United States Patent Application Publication US 2025/0333448 A1 - sequence listing, part 5

SEQ ID NO: 85906 - protein, 23 aa, Artificial Sequence
  Description of Artificial Sequence: Synthetic peptide
  Seed: GMDPRMCSLMQGSTLPRRSGAAG
GMDPRMFSLIQISTNPRRSGAAG

SEQ ID NO: 85907 - protein, 23 aa, Artificial Sequence
  Description of Artificial Sequence: Synthetic peptide
  Seed: GMDPRMCSLMQGSTLPRRSGAAG
GMDPRMFSLIQISTSPRRSGAAG

SEQ ID NO: 85908 - protein, 23 aa, Artificial Sequence
  Description of Artificial Sequence: Synthetic peptide
  Seed: GMDPRMCSLMQGSTLPRRSGAAG
GMDPRMFSLIQISTTPRRSGAAG

SEQ ID NO: 85909 - protein, 23 aa, Artificial Sequence
  Description of Artificial Sequence: Synthetic peptide
  Seed: GMDPRMCSLMQGSTLPRRSGAAG
GMDPRMFSLIQISTVPRRSGAAG

SEQ ID NO: 85910 - protein, 23 aa, Artificial Sequence
  Description of Artificial Sequence: Synthetic peptide
  Seed: GMDPRMCSLMQGSTLPRRSGAAG
GMDPRMFSLIQLSTAPRRSGAAG

SEQ ID NO: 85911 - protein, 23 aa, Artificial Sequence
  Description of Artificial Sequence: Synthetic peptide
  Seed: GMDPRMCSLMQGSTLPRRSGAAG
GMDPRMFSLIQLSTNPRRSGAAG

SEQ ID NO: 85912 - protein, 23 aa, Artificial Sequence
  Description of Artificial Sequence: Synthetic peptide
  Seed: GMDPRMCSLMQGSTLPRRSGAAG
GMDPRMFSLIQLSTSPRRSGAAG

SEQ ID NO: 85913 - protein, 23 aa, Artificial Sequence
  Description of Artificial Sequence: Synthetic peptide
  Seed: GMDPRMCSLMQGSTLPRRSGAAG
GMDPRMFSLIQMSTAPRRSGAAG

SEQ ID NO: 85914 - protein, 23 aa, Artificial Sequence
  Description of Artificial Sequence: Synthetic peptide
  Seed: GMDPRMCSLMQGSTLPRRSGAAG
GMDPRMFSLIQMSTNPRRSGAAG

SEQ ID NO: 85915 - protein, 23 aa, Artificial Sequence
  Description of Artificial Sequence: Synthetic peptide
  Seed: GMDPRMCSLMQGSTLPRRSGAAG
GMDPRMFSLIQMSTSPRRSGAAG

SEQ ID NO: 85916 - protein, 23 aa, Artificial Sequence
  Description of Artificial Sequence: Synthetic peptide
  Seed: GMDPRMCSLMQGSTLPRRSGAAG
GMDPRMFSLIQNSTAPRRSGAAG

SEQ ID NO: 85917 - protein, 23 aa, Artificial Sequence
  Description of Artificial Sequence: Synthetic peptide
  Seed: GMDPRMCSLMQGSTLPRRSGAAG
GMDPRMFSLIQNSTIPRRSGAAG

SEQ ID NO: 85918 - protein, 23 aa, Artificial Sequence
  Description of Artificial Sequence: Synthetic peptide
  Seed: GMDPRMCSLMQGSTLPRRSGAAG
GMDPRMFSLIQNSTLPRRSGAAG

SEQ ID NO: 85919 - protein, 23 aa, Artificial Sequence
  Description of Artificial Sequence: Synthetic peptide
  Seed: GMDPRMCSLMQGSTLPRRSGAAG
GMDPRMFSLIQNSTNPRRSGAAG

SEQ ID NO: 85920 - protein, 23 aa, Artificial Sequence
  Description of Artificial Sequence: Synthetic peptide
  Seed: GMDPRMCSLMQGSTLPRRSGAAG
GMDPRMFSLIQNSTSPRRSGAAG

SEQ ID NO: 85921 - protein, 23 aa, Artificial Sequence
  Description of Artificial Sequence: Synthetic peptide
  Seed: GMDPRMCSLMQGSTLPRRSGAAG
GMDPRMFSLIQNSTTPRRSGAAG

SEQ ID NO: 85922 - protein, 23 aa, Artificial Sequence
  Description of Artificial Sequence: Synthetic peptide
  Seed: GMDPRMCSLMQGSTLPRRSGAAG
GMDPRMFSLIQNSTVPRRSGAAG

SEQ ID NO: 85923 - protein, 23 aa, Artificial Sequence
  Description of Artificial Sequence: Synthetic peptide
  Seed: GMDPRMCSLMQGSTLPRRSGAAG
GMDPRMFSLIQPSTAPRRSGAAG

SEQ ID NO: 85924 - protein, 23 aa, Artificial Sequence
  Description of Artificial Sequence: Synthetic peptide
  Seed: GMDPRMCSLMQGSTLPRRSGAAG
GMDPRMFSLIQPSTGPRRSGAAG

SEQ ID NO: 85925 - protein, 23 aa, Artificial Sequence
  Description of Artificial Sequence: Synthetic peptide
  Seed: GMDPRMCSLMQGSTLPRRSGAAG
GMDPRMFSLIQPSTHPRRSGAAG

SEQ ID NO: 85926 - protein, 23 aa, Artificial Sequence
  Description of Artificial Sequence: Synthetic peptide
  Seed: GMDPRMCSLMQGSTLPRRSGAAG
GMDPRMFSLIQPSTIPRRSGAAG

SEQ ID NO: 85927 - protein, 23 aa, Artificial Sequence
  Description of Artificial Sequence: Synthetic peptide
  Seed: GMDPRMCSLMQGSTLPRRSGAAG
GMDPRMFSLIQPSTLPRRSGAAG

SEQ ID NO: 85928 - protein, 23 aa, Artificial Sequence
  Description of Artificial Sequence: Synthetic peptide
  Seed: GMDPRMCSLMQGSTLPRRSGAAG
GMDPRMFSLIQPSTMPRRSGAAG

SEQ ID NO: 85929 - protein, 23 aa, Artificial Sequence
  Description of Artificial Sequence: Synthetic peptide
  Seed: GMDPRMCSLMQGSTLPRRSGAAG
GMDPRMFSLIQPSTNPRRSGAAG

SEQ ID NO: 85930 - protein, 23 aa, Artificial Sequence
  Description of Artificial Sequence: Synthetic peptide
  Seed: GMDPRMCSLMQGSTLPRRSGAAG
GMDPRMFSLIQPSTQPRRSGAAG

SEQ ID NO: 85931 - protein, 23 aa, Artificial Sequence
  Description of Artificial Sequence: Synthetic peptide
  Seed: GMDPRMCSLMQGSTLPRRSGAAG
GMDPRMFSLIQPSTSPRRSGAAG

SEQ ID NO: 85932 - protein, 23 aa, Artificial Sequence
  Description of Artificial Sequence: Synthetic peptide
  Seed: GMDPRMCSLMQGSTLPRRSGAAG
GMDPRMFSLIQPSTTPRRSGAAG

SEQ ID NO: 85933 - protein, 23 aa, Artificial Sequence
  Description of Artificial Sequence: Synthetic peptide
  Seed: GMDPRMCSLMQGSTLPRRSGAAG
GMDPRMFSLIQPSTVPRRSGAAG

SEQ ID NO: 85934 - protein, 23 aa, Artificial Sequence
  Description of Artificial Sequence: Synthetic peptide
  Seed: GMDPRMCSLMQGSTLPRRSGAAG
GMDPRMFSLIQSSTAPRRSGAAG

SEQ ID NO: 85935 - protein, 23 aa, Artificial Sequence
  Description of Artificial Sequence: Synthetic peptide
  Seed: GMDPRMCSLMQGSTLPRRSGAAG
GMDPRMFSLIQSSTGPRRSGAAG

SEQ ID NO: 85936 - protein, 23 aa, Artificial Sequence
  Description of Artificial Sequence: Synthetic peptide
  Seed: GMDPRMCSLMQGSTLPRRSGAAG
GMDPRMFSLIQSSTHPRRSGAAG

SEQ ID NO: 85937 - protein, 23 aa, Artificial Sequence
  Description of Artificial Sequence: Synthetic peptide
  Seed: GMDPRMCSLMQGSTLPRRSGAAG
GMDPRMFSLIQSSTIPRRSGAAG

SEQ ID NO: 85938 - protein, 23 aa, Artificial Sequence
  Description of Artificial Sequence: Synthetic peptide
  Seed: GMDPRMCSLMQGSTLPRRSGAAG
GMDPRMFSLIQSSTLPRRSGAAG

SEQ ID NO: 85939 - protein, 23 aa, Artificial Sequence
  Description of Artificial Sequence: Synthetic peptide
  Seed: GMDPRMCSLMQGSTLPRRSGAAG
GMDPRMFSLIQSSTMPRRSGAAG

SEQ ID NO: 85940 - protein, 23 aa, Artificial Sequence
  Description of Artificial Sequence: Synthetic peptide
  Seed: GMDPRMCSLMQGSTLPRRSGAAG
GMDPRMFSLIQSSTNPRRSGAAG

SEQ ID NO: 85941 - protein, 23 aa, Artificial Sequence
  Description of Artificial Sequence: Synthetic peptide
  Seed: GMDPRMCSLMQGSTLPRRSGAAG
GMDPRMFSLIQSSTQPRRSGAAG

SEQ ID NO: 85942 - protein, 23 aa, Artificial Sequence
  Description of Artificial Sequence: Synthetic peptide
  Seed: GMDPRMCSLMQGSTLPRRSGAAG
GMDPRMFSLIQSSTSPRRSGAAG

SEQ ID NO: 85943 - protein, 23 aa, Artificial Sequence
  Description of Artificial Sequence: Synthetic peptide
  Seed: GMDPRMCSLMQGSTLPRRSGAAG
GMDPRMFSLIQSSTTPRRSGAAG

SEQ ID NO: 85944 - protein, 23 aa, Artificial Sequence
  Description of Artificial Sequence: Synthetic peptide
  Seed: GMDPRMCSLMQGSTLPRRSGAAG
GMDPRMFSLIQSSTVPRRSGAAG

SEQ ID NO: 85945 - protein, 23 aa, Artificial Sequence
  Description of Artificial Sequence: Synthetic peptide
  Seed: GMDPRMCSLMQGSTLPRRSGAAG
GMDPRMFSLIQTSTAPRRSGAAG

SEQ ID NO: 85946 - protein, 23 aa, Artificial Sequence
  Description of Artificial Sequence: Synthetic peptide
  Seed: GMDPRMCSLMQGSTLPRRSGAAG
GMDPRMFSLIQTSTGPRRSGAAG

SEQ ID NO: 85947 - protein, 23 aa, Artificial Sequence
  Description of Artificial Sequence: Synthetic peptide
  Seed: GMDPRMCSLMQGSTLPRRSGAAG
GMDPRMFSLIQTSTHPRRSGAAG

SEQ ID NO: 85948 - protein, 23 aa, Artificial Sequence
  Description of Artificial Sequence: Synthetic peptide
  Seed: GMDPRMCSLMQGSTLPRRSGAAG
GMDPRMFSLIQTSTIPRRSGAAG

SEQ ID NO: 85949 - protein, 23 aa, Artificial Sequence
  Description of Artificial Sequence: Synthetic peptide
  Seed: GMDPRMCSLMQGSTLPRRSGAAG
GMDPRMFSLIQTSTLPRRSGAAG

SEQ ID NO: 85950 - protein, 23 aa, Artificial Sequence
  Description of Artificial Sequence: Synthetic peptide
  Seed: GMDPRMCSLMQGSTLPRRSGAAG
GMDPRMFSLIQTSTMPRRSGAAG

SEQ ID NO: 85951 - protein, 23 aa, Artificial Sequence
  Description of Artificial Sequence: Synthetic peptide
  Seed: GMDPRMCSLMQGSTLPRRSGAAG
GMDPRMFSLIQTSTNPRRSGAAG

SEQ ID NO: 85952 - protein, 23 aa, Artificial Sequence
  Description of Artificial Sequence: Synthetic peptide
  Seed: GMDPRMCSLMQGSTLPRRSGAAG
GMDPRMFSLIQTSTQPRRSGAAG

SEQ ID NO: 85953 - protein, 23 aa, Artificial Sequence
  Description of Artificial Sequence: Synthetic peptide
  Seed: GMDPRMCSLMQGSTLPRRSGAAG
GMDPRMFSLIQTSTSPRRSGAAG

SEQ ID NO: 85954 - protein, 23 aa, Artificial Sequence
  Description of Artificial Sequence: Synthetic peptide
  Seed: GMDPRMCSLMQGSTLPRRSGAAG
GMDPRMFSLIQTSTTPRRSGAAG

SEQ ID NO: 85955 - protein, 23 aa, Artificial Sequence
  Description of Artificial Sequence: Synthetic peptide
  Seed: GMDPRMCSLMQGSTLPRRSGAAG
GMDPRMFSLIQTSTVPRRSGAAG

SEQ ID NO: 85956 - protein, 23 aa, Artificial Sequence
  Description of Artificial Sequence: Synthetic peptide
  Seed: GMDPRMCSLMQGSTLPRRSGAAG
GMDPRMFSLIQVSTAPRRSGAAG

SEQ ID NO: 85957 - protein, 23 aa, Artificial Sequence
  Description of Artificial Sequence: Synthetic peptide
  Seed: GMDPRMCSLMQGSTLPRRSGAAG
GMDPRMFSLIQVSTGPRRSGAAG

SEQ ID NO: 85958 - protein, 23 aa, Artificial Sequence
  Description of Artificial Sequence: Synthetic peptide
  Seed: GMDPRMCSLMQGSTLPRRSGAAG
GMDPRMFSLIQVSTHPRRSGAAG

SEQ ID NO: 85959 - protein, 23 aa, Artificial Sequence
  Description of Artificial Sequence: Synthetic peptide
  Seed: GMDPRMCSLMQGSTLPRRSGAAG
GMDPRMFSLIQVSTIPRRSGAAG

SEQ ID NO: 85960 - protein, 23 aa, Artificial Sequence
  Description of Artificial Sequence: Synthetic peptide
  Seed: GMDPRMCSLMQGSTLPRRSGAAG
GMDPRMFSLIQVSTLPRRSGAAG

SEQ ID NO: 85961 - protein, 23 aa, Artificial Sequence
  Description of Artificial Sequence: Synthetic peptide
  Seed: GMDPRMCSLMQGSTLPRRSGAAG
GMDPRMFSLIQVSTMPRRSGAAG

SEQ ID NO: 85962 - protein, 23 aa, Artificial Sequence
  Description of Artificial Sequence: Synthetic peptide
  Seed: GMDPRMCSLMQGSTLPRRSGAAG
GMDPRMFSLIQVSTNPRRSGAAG

SEQ ID NO: 85963 - protein, 23 aa, Artificial Sequence
  Description of Artificial Sequence: Synthetic peptide
  Seed: GMDPRMCSLMQGSTLPRRSGAAG
GMDPRMFSLIQVSTQPRRSGAAG

SEQ ID NO: 85964 - protein, 23 aa, Artificial Sequence
  Description of Artificial Sequence: Synthetic peptide
  Seed: GMDPRMCSLMQGSTLPRRSGAAG
GMDPRMFSLIQVSTSPRRSGAAG

SEQ ID NO: 85965 - protein, 23 aa, Artificial Sequence
  Description of Artificial Sequence: Synthetic peptide
  Seed: GMDPRMCSLMQGSTLPRRSGAAG
GMDPRMFSLIQVSTTPRRSGAAG

SEQ ID NO: 85966 - protein, 23 aa, Artificial Sequence
  Description of Artificial Sequence: Synthetic peptide
  Seed: GMDPRMCSLMQGSTLPRRSGAAG
GMDPRMFSLIQVSTVPRRSGAAG

SEQ ID NO: 85967 - protein, 23 aa, Artificial Sequence
  Description of Artificial Sequence: Synthetic peptide
  Seed: GMDPRMCSLMQGSTLPRRSGAAG
GMDPRMFSLLQASTAPRRSGAAG

SEQ ID NO: 85968 - protein, 23 aa, Artificial Sequence
  Description of Artificial Sequence: Synthetic peptide
  Seed: GMDPRMCSLMQGSTLPRRSGAAG
GMDPRMFSLLQASTCPRRSGAAG

SEQ ID NO: 85969 - protein, 23 aa, Artificial Sequence
  Description of Artificial Sequence: Synthetic peptide
  Seed: GMDPRMCSLMQGSTLPRRSGAAG
GMDPRMFSLLQASTDPRRSGAAG

SEQ ID NO: 85970 - protein, 23 aa, Artificial Sequence
  Description of Artificial Sequence: Synthetic peptide
  Seed: GMDPRMCSLMQGSTLPRRSGAAG
GMDPRMFSLLQASTEPRRSGAAG

SEQ ID NO: 85971 - protein, 23 aa, Artificial Sequence
  Description of Artificial Sequence: Synthetic peptide
  Seed: GMDPRMCSLMQGSTLPRRSGAAG
GMDPRMFSLLQASTFPRRSGAAG

SEQ ID NO: 85972 - protein, 23 aa, Artificial Sequence
  Description of Artificial Sequence: Synthetic peptide
  Seed: GMDPRMCSLMQGSTLPRRSGAAG
GMDPRMFSLLQASTGPRRSGAAG

SEQ ID NO: 85973 - protein, 23 aa, Artificial Sequence
  Description of Artificial Sequence: Synthetic peptide
  Seed: GMDPRMCSLMQGSTLPRRSGAAG
GMDPRMFSLLQASTHPRRSGAAG

SEQ ID NO: 85974 - protein, 23 aa, Artificial Sequence
  Description of Artificial Sequence: Synthetic peptide
  Seed: GMDPRMCSLMQGSTLPRRSGAAG
GMDPRMFSLLQASTIPRRSGAAG

SEQ ID NO: 85975 - protein, 23 aa, Artificial Sequence
  Description of Artificial Sequence: Synthetic peptide
  Seed: GMDPRMCSLMQGSTLPRRSGAAG
GMDPRMFSLLQASTLPRRSGAAG

SEQ ID NO: 85976 - protein, 23 aa, Artificial Sequence
  Description of Artificial Sequence: Synthetic peptide
  Seed: GMDPRMCSLMQGSTLPRRSGAAG
GMDPRMFSLLQASTMPRRSGAAG

SEQ ID NO: 85977 - protein, 23 aa, Artificial Sequence
  Description of Artificial Sequence: Synthetic peptide
  Seed: GMDPRMCSLMQGSTLPRRSGAAG
GMDPRMFSLLQASTNPRRSGAAG

SEQ ID NO: 85978 - protein, 23 aa, Artificial Sequence
  Description of Artificial Sequence: Synthetic peptide
  Seed: GMDPRMCSLMQGSTLPRRSGAAG
GMDPRMFSLLQASTPPRRSGAAG

SEQ ID NO: 85979 - protein, 23 aa, Artificial Sequence
  Description of Artificial Sequence: Synthetic peptide
  Seed: GMDPRMCSLMQGSTLPRRSGAAG
GMDPRMFSLLQASTQPRRSGAAG

SEQ ID NO: 85980 - protein, 23 aa, Artificial Sequence
  Description of Artificial Sequence: Synthetic peptide
  Seed: GMDPRMCSLMQGSTLPRRSGAAG
GMDPRMFSLLQASTSPRRSGAAG

SEQ ID NO: 85981 - protein, 23 aa, Artificial Sequence
  Description of Artificial Sequence: Synthetic peptide
  Seed: GMDPRMCSLMQGSTLPRRSGAAG
GMDPRMFSLLQASTTPRRSGAAG

SEQ ID NO: 85982 - protein, 23 aa, Artificial Sequence
  Description of Artificial Sequence: Synthetic peptide
  Seed: GMDPRMCSLMQGSTLPRRSGAAG
GMDPRMFSLLQASTVPRRSGAAG

SEQ ID NO: 85983 - protein, 23 aa, Artificial Sequence
  Description of Artificial Sequence: Synthetic peptide
  Seed: GMDPRMCSLMQGSTLPRRSGAAG
GMDPRMFSLLQASTYPRRSGAAG

SEQ ID NO: 85984 - protein, 23 aa, Artificial Sequence
  Description of Artificial Sequence: Synthetic peptide
  Seed: GMDPRMCSLMQGSTLPRRSGAAG
GMDPRMFSLLQGSTAPRRSGAAG

SEQ ID NO: 85985 - protein, 23 aa, Artificial Sequence
  Description of Artificial Sequence: Synthetic peptide
  Seed: GMDPRMCSLMQGSTLPRRSGAAG
GMDPRMFSLLQGSTCPRRSGAAG

SEQ ID NO: 85986 - protein, 23 aa, Artificial Sequence
  Description of Artificial Sequence: Synthetic peptide
  Seed: GMDPRMCSLMQGSTLPRRSGAAG
GMDPRMFSLLQGSTFPRRSGAAG

SEQ ID NO: 85987 - protein, 23 aa, Artificial Sequence
  Description of Artificial Sequence: Synthetic peptide
  Seed: GMDPRMCSLMQGSTLPRRSGAAG
GMDPRMFSLLQGSTGPRRSGAAG

SEQ ID NO: 85988 - protein, 23 aa, Artificial Sequence
  Description of Artificial Sequence: Synthetic peptide
  Seed: GMDPRMCSLMQGSTLPRRSGAAG
GMDPRMFSLLQGSTIPRRSGAAG

SEQ ID NO: 85989 - protein, 23 aa, Artificial Sequence
  Description of Artificial Sequence: Synthetic peptide
  Seed: GMDPRMCSLMQGSTLPRRSGAAG
GMDPRMFSLLQGSTLPRRSGAAG

SEQ ID NO: 85990 - protein, 23 aa, Artificial Sequence
  Description of Artificial Sequence: Synthetic peptide
  Seed: GMDPRMCSLMQGSTLPRRSGAAG
GMDPRMFSLLQGSTMPRRSGAAG

SEQ ID NO: 85991 - protein, 23 aa, Artificial Sequence
  Description of Artificial Sequence: Synthetic peptide
  Seed: GMDPRMCSLMQGSTLPRRSGAAG
GMDPRMFSLLQGSTNPRRSGAAG

SEQ ID NO: 85992 - protein, 23 aa, Artificial Sequence
  Description of Artificial Sequence: Synthetic peptide
  Seed: GMDPRMCSLMQGSTLPRRSGAAG
GMDPRMFSLLQGSTSPRRSGAAG

SEQ ID NO: 85993 - protein, 23 aa, Artificial Sequence
  Description of Artificial Sequence: Synthetic peptide
  Seed: GMDPRMCSLMQGSTLPRRSGAAG
GMDPRMFSLLQGSTTPRRSGAAG

SEQ ID NO: 85994 - protein, 23 aa, Artificial Sequence
  Description of Artificial Sequence: Synthetic peptide
  Seed: GMDPRMCSLMQGSTLPRRSGAAG
GMDPRMFSLLQGSTVPRRSGAAG

SEQ ID NO: 85995 - protein, 23 aa, Artificial Sequence
  Description of Artificial Sequence: Synthetic peptide
  Seed: GMDPRMCSLMQGSTLPRRSGAAG
GMDPRMFSLLQHSTVPRRSGAAG

SEQ ID NO: 85996 - protein, 23 aa, Artificial Sequence
  Description of Artificial Sequence: Synthetic peptide
  Seed: GMDPRMCSLMQGSTLPRRSGAAG
GMDPRMFSLLQISTAPRRSGAAG

SEQ ID NO: 85997 - protein, 23 aa, Artificial Sequence
  Description of Artificial Sequence: Synthetic peptide
  Seed: GMDPRMCSLMQGSTLPRRSGAAG
GMDPRMFSLLQISTGPRRSGAAG

SEQ ID NO: 85998 - protein, 23 aa, Artificial Sequence
  Description of Artificial Sequence: Synthetic peptide
  Seed: GMDPRMCSLMQGSTLPRRSGAAG
GMDPRMFSLLQISTHPRRSGAAG

SEQ ID NO: 85999 - protein, 23 aa, Artificial Sequence
  Description of Artificial Sequence: Synthetic peptide
  Seed: GMDPRMCSLMQGSTLPRRSGAAG
GMDPRMFSLLQISTIPRRSGAAG

SEQ ID NO: 86000 - protein, 23 aa, Artificial Sequence
  Description of Artificial Sequence: Synthetic peptide
  Seed: GMDPRMCSLMQGSTLPRRSGAAG
GMDPRMFSLLQISTLPRRSGAAG

SEQ ID NO: 86001 - protein, 23 aa, Artificial Sequence
  Description of Artificial Sequence: Synthetic peptide
  Seed: GMDPRMCSLMQGSTLPRRSGAAG
GMDPRMFSLLQISTMPRRSGAAG

SEQ ID NO: 86002 - protein, 23 aa, Artificial Sequence
  Description of Artificial Sequence: Synthetic peptide
  Seed: GMDPRMCSLMQGSTLPRRSGAAG
GMDPRMFSLLQISTNPRRSGAAG

SEQ ID NO: 86003 - protein, 23 aa, Artificial Sequence
  Description of Artificial Sequence: Synthetic peptide
  Seed: GMDPRMCSLMQGSTLPRRSGAAG
GMDPRMFSLLQISTQPRRSGAAG

SEQ ID NO: 86004 - protein, 23 aa, Artificial Sequence
  Description of Artificial Sequence: Synthetic peptide
  Seed: GMDPRMCSLMQGSTLPRRSGAAG
GMDPRMFSLLQISTSPRRSGAAG

SEQ ID NO: 86005 - protein, 23 aa, Artificial Sequence
  Description of Artificial Sequence: Synthetic peptide
  Seed: GMDPRMCSLMQGSTLPRRSGAAG
GMDPRMFSLLQISTTPRRSGAAG

SEQ ID NO: 86006 - protein, 23 aa, Artificial Sequence
  Description of Artificial Sequence: Synthetic peptide
  Seed: GMDPRMCSLMQGSTLPRRSGAAG
GMDPRMFSLLQISTVPRRSGAAG

SEQ ID NO: 86007 - protein, 23 aa, Artificial Sequence
  Description of Artificial Sequence: Synthetic peptide
  Seed: GMDPRMCSLMQGSTLPRRSGAAG
GMDPRMFSLLQLSTAPRRSGAAG

SEQ ID NO: 86008 - protein, 23 aa, Artificial Sequence
  Description of Artificial Sequence: Synthetic peptide
  Seed: GMDPRMCSLMQGSTLPRRSGAAG
GMDPRMFSLLQLSTNPRRSGAAG

SEQ ID NO: 86009 - protein, 23 aa, Artificial Sequence
  Description of Artificial Sequence: Synthetic peptide
  Seed: GMDPRMCSLMQGSTLPRRSGAAG
GMDPRMFSLLQLSTSPRRSGAAG

SEQ ID NO: 86010 - protein, 23 aa, Artificial Sequence
  Description of Artificial Sequence: Synthetic peptide
  Seed: GMDPRMCSLMQGSTLPRRSGAAG
GMDPRMFSLLQMSTAPRRSGAAG

SEQ ID NO: 86011 - protein, 23 aa, Artificial Sequence
  Description of Artificial Sequence: Synthetic peptide
  Seed: GMDPRMCSLMQGSTLPRRSGAAG
GMDPRMFSLLQMSTNPRRSGAAG

SEQ ID NO: 86012 - protein, 23 aa, Artificial Sequence
  Description of Artificial Sequence: Synthetic peptide
  Seed: GMDPRMCSLMQGSTLPRRSGAAG
GMDPRMFSLLQMSTSPRRSGAAG

SEQ ID NO: 86013 - protein, 23 aa, Artificial Sequence
  Description of Artificial Sequence: Synthetic peptide
  Seed: GMDPRMCSLMQGSTLPRRSGAAG
GMDPRMFSLLQNSTAPRRSGAAG

SEQ ID NO: 86014 - protein, 23 aa, Artificial Sequence
  Description of Artificial Sequence: Synthetic peptide
  Seed: GMDPRMCSLMQGSTLPRRSGAAG
GMDPRMFSLLQNSTGPRRSGAAG

SEQ ID NO: 86015 - protein, 23 aa, Artificial Sequence
  Description of Artificial Sequence: Synthetic peptide
  Seed: GMDPRMCSLMQGSTLPRRSGAAG
GMDPRMFSLLQNSTIPRRSGAAG

SEQ ID NO: 86016 - protein, 23 aa, Artificial Sequence
  Description of Artificial Sequence: Synthetic peptide
  Seed: GMDPRMCSLMQGSTLPRRSGAAG
GMDPRMFSLLQNSTLPRRSGAAG

SEQ ID NO: 86017 - protein, 23 aa, Artificial Sequence
  Description of Artificial Sequence: Synthetic peptide
  Seed: GMDPRMCSLMQGSTLPRRSGAAG
GMDPRMFSLLQNSTMPRRSGAAG

SEQ ID NO: 86018 - protein, 23 aa, Artificial Sequence
  Description of Artificial Sequence: Synthetic peptide
  Seed: GMDPRMCSLMQGSTLPRRSGAAG
GMDPRMFSLLQNSTNPRRSGAAG

SEQ ID NO: 86019 - protein, 23 aa, Artificial Sequence
  Description of Artificial Sequence: Synthetic peptide
  Seed: GMDPRMCSLMQGSTLPRRSGAAG
GMDPRMFSLLQNSTSPRRSGAAG

SEQ ID NO: 86020 - protein, 23 aa, Artificial Sequence
  Description of Artificial Sequence: Synthetic peptide
  Seed: GMDPRMCSLMQGSTLPRRSGAAG
GMDPRMFSLLQNSTTPRRSGAAG

SEQ ID NO: 86021 - protein, 23 aa, Artificial Sequence
  Description of Artificial Sequence: Synthetic peptide
  Seed: GMDPRMCSLMQGSTLPRRSGAAG
GMDPRMFSLLQNSTVPRRSGAAG

SEQ ID NO: 86022 - protein, 23 aa, Artificial Sequence
  Description of Artificial Sequence: Synthetic peptide
  Seed: GMDPRMCSLMQGSTLPRRSGAAG
GMDPRMFSLLQPSTAPRRSGAAG

SEQ ID NO: 86023 - protein, 23 aa, Artificial Sequence
  Description of Artificial Sequence: Synthetic peptide
  Seed: GMDPRMCSLMQGSTLPRRSGAAG
GMDPRMFSLLQPSTCPRRSGAAG

SEQ ID NO: 86024 - protein, 23 aa, Artificial Sequence
  Description of Artificial Sequence: Synthetic peptide
  Seed: GMDPRMCSLMQGSTLPRRSGAAG
GMDPRMFSLLQPSTDPRRSGAAG

SEQ ID NO: 86025 - protein, 23 aa, Artificial Sequence
  Description of Artificial Sequence: Synthetic peptide
  Seed: GMDPRMCSLMQGSTLPRRSGAAG
GMDPRMFSLLQPSTEPRRSGAAG

SEQ ID NO: 86026 - protein, 23 aa, Artificial Sequence
  Description of Artificial Sequence: Synthetic peptide
  Seed: GMDPRMCSLMQGSTLPRRSGAAG
GMDPRMFSLLQPSTFPRRSGAAG

SEQ ID NO: 86027 - protein, 23 aa, Artificial Sequence
  Description of Artificial Sequence: Synthetic peptide
  Seed: GMDPRMCSLMQGSTLPRRSGAAG
GMDPRMFSLLQPSTGPRRSGAAG

SEQ ID NO: 86028 - protein, 23 aa, Artificial Sequence
  Description of Artificial Sequence: Synthetic peptide
  Seed: GMDPRMCSLMQGSTLPRRSGAAG
GMDPRMFSLLQPSTHPRRSGAAG

SEQ ID NO: 86029 - protein, 23 aa, Artificial Sequence
  Description of Artificial Sequence: Synthetic peptide
  Seed: GMDPRMCSLMQGSTLPRRSGAAG
GMDPRMFSLLQPSTIPRRSGAAG

SEQ ID NO: 86030 - protein, 23 aa, Artificial Sequence
  Description of Artificial Sequence: Synthetic peptide
  Seed: GMDPRMCSLMQGSTLPRRSGAAG
GMDPRMFSLLQPSTLPRRSGAAG

SEQ ID NO: 86031 - protein, 23 aa, Artificial Sequence
  Description of Artificial Sequence: Synthetic peptide
  Seed: GMDPRMCSLMQGSTLPRRSGAAG
GMDPRMFSLLQPSTMPRRSGAAG

SEQ ID NO: 86032 - protein, 23 aa, Artificial Sequence
  Description of Artificial Sequence: Synthetic peptide
  Seed: GMDPRMCSLMQGSTLPRRSGAAG
GMDPRMFSLLQPSTNPRRSGAAG

SEQ ID NO: 86033 - protein, 23 aa, Artificial Sequence
  Description of Artificial Sequence: Synthetic peptide
  Seed: GMDPRMCSLMQGSTLPRRSGAAG
GMDPRMFSLLQPSTPPRRSGAAG

SEQ ID NO: 86034 - protein, 23 aa, Artificial Sequence
  Description of Artificial Sequence: Synthetic peptide
  Seed: GMDPRMCSLMQGSTLPRRSGAAG
GMDPRMFSLLQPSTQPRRSGAAG

SEQ ID NO: 86035 - protein, 23 aa, Artificial Sequence
  Description of Artificial Sequence: Synthetic peptide
  Seed: GMDPRMCSLMQGSTLPRRSGAAG
GMDPRMFSLLQPSTSPRRSGAAG

SEQ ID NO: 86036 - protein, 23 aa, Artificial Sequence
  Description of Artificial Sequence: Synthetic peptide
  Seed: GMDPRMCSLMQGSTLPRRSGAAG
GMDPRMFSLLQPSTTPRRSGAAG

SEQ ID NO: 86037 - protein, 23 aa, Artificial Sequence
  Description of Artificial Sequence: Synthetic peptide
  Seed: GMDPRMCSLMQGSTLPRRSGAAG
GMDPRMFSLLQPSTVPRRSGAAG

SEQ ID NO: 86038 - protein, 23 aa, Artificial Sequence
  Description of Artificial Sequence: Synthetic peptide
  Seed: GMDPRMCSLMQGSTLPRRSGAAG
GMDPRMFSLLQSSTAPRRSGAAG

SEQ ID NO: 86039 - protein, 23 aa, Artificial Sequence
  Description of Artificial Sequence: Synthetic peptide
  Seed: GMDPRMCSLMQGSTLPRRSGAAG
GMDPRMFSLLQSSTCPRRSGAAG

SEQ ID NO: 86040 - protein, 23 aa, Artificial Sequence
  Description of Artificial Sequence: Synthetic peptide
  Seed: GMDPRMCSLMQGSTLPRRSGAAG
GMDPRMFSLLQSSTDPRRSGAAG

SEQ ID NO: 86041 - protein, 23 aa, Artificial Sequence
  Description of Artificial Sequence: Synthetic peptide
  Seed: GMDPRMCSLMQGSTLPRRSGAAG
GMDPRMFSLLQSSTFPRRSGAAG

SEQ ID NO: 86042 - protein, 23 aa, Artificial Sequence
  Description of Artificial Sequence: Synthetic peptide
  Seed: GMDPRMCSLMQGSTLPRRSGAAG
GMDPRMFSLLQSSTGPRRSGAAG

SEQ ID NO: 86043 - protein, 23 aa, Artificial Sequence
  Description of Artificial Sequence: Synthetic peptide
  Seed: GMDPRMCSLMQGSTLPRRSGAAG
GMDPRMFSLLQSSTHPRRSGAAG

SEQ ID NO: 86044 - protein, 23 aa, Artificial Sequence
  Description of Artificial Sequence: Synthetic peptide
  Seed: GMDPRMCSLMQGSTLPRRSGAAG
GMDPRMFSLLQSSTIPRRSGAAG

SEQ ID NO: 86045 - protein, 23 aa, Artificial Sequence
  Description of Artificial Sequence: Synthetic peptide
  Seed: GMDPRMCSLMQGSTLPRRSGAAG
GMDPRMFSLLQSSTLPRRSGAAG

SEQ ID NO: 86046 - protein, 23 aa, Artificial Sequence
  Description of Artificial Sequence: Synthetic peptide
  Seed: GMDPRMCSLMQGSTLPRRSGAAG
GMDPRMFSLLQSSTMPRRSGAAG

SEQ ID NO: 86047 - protein, 23 aa, Artificial Sequence
  Description of Artificial Sequence: Synthetic peptide
  Seed: GMDPRMCSLMQGSTLPRRSGAAG
GMDPRMFSLLQSSTNPRRSGAAG

SEQ ID NO: 86048 - protein, 23 aa, Artificial Sequence
  Description of Artificial Sequence: Synthetic peptide
  Seed: GMDPRMCSLMQGSTLPRRSGAAG
GMDPRMFSLLQSSTQPRRSGAAG

SEQ ID NO: 86049 - protein, 23 aa, Artificial Sequence
  Description of Artificial Sequence: Synthetic peptide
  Seed: GMDPRMCSLMQGSTLPRRSGAAG
GMDPRMFSLLQSSTSPRRSGAAG

SEQ ID NO: 86050 - protein, 23 aa, Artificial Sequence
  Description of Artificial Sequence: Synthetic peptide
  Seed: GMDPRMCSLMQGSTLPRRSGAAG
GMDPRMFSLLQSSTTPRRSGAAG

SEQ ID NO: 86051 - protein, 23 aa, Artificial Sequence
  Description of Artificial Sequence: Synthetic peptide
  Seed: GMDPRMCSLMQGSTLPRRSGAAG
GMDPRMFSLLQSSTVPRRSGAAG

SEQ ID NO: 86052 - protein, 23 aa, Artificial Sequence
  Description of Artificial Sequence: Synthetic peptide
  Seed: GMDPRMCSLMQGSTLPRRSGAAG
GMDPRMFSLLQTSTAPRRSGAAG

SEQ ID NO: 86053 - protein, 23 aa, Artificial Sequence
  Description of Artificial Sequence: Synthetic peptide
  Seed: GMDPRMCSLMQGSTLPRRSGAAG
GMDPRMFSLLQTSTDPRRSGAAG

SEQ ID NO: 86054 - protein, 23 aa, Artificial Sequence
  Description of Artificial Sequence: Synthetic peptide
  Seed: GMDPRMCSLMQGSTLPRRSGAAG
GMDPRMFSLLQTSTGPRRSGAAG

SEQ ID NO: 86055 - protein, 23 aa, Artificial Sequence
  Description of Artificial Sequence: Synthetic peptide
  Seed: GMDPRMCSLMQGSTLPRRSGAAG
GMDPRMFSLLQTSTHPRRSGAAG

SEQ ID NO: 86056 - protein, 23 aa, Artificial Sequence
  Description of Artificial Sequence: Synthetic peptide
  Seed: GMDPRMCSLMQGSTLPRRSGAAG
GMDPRMFSLLQTSTIPRRSGAAG

SEQ ID NO: 86057 - protein, 23 aa, Artificial Sequence
  Description of Artificial Sequence: Synthetic peptide
  Seed: GMDPRMCSLMQGSTLPRRSGAAG
GMDPRMFSLLQTSTLPRRSGAAG

SEQ ID NO: 86058 - protein, 23 aa, Artificial Sequence
  Description of Artificial Sequence: Synthetic peptide
  Seed: GMDPRMCSLMQGSTLPRRSGAAG
GMDPRMFSLLQTSTMPRRSGAAG

SEQ ID NO: 86059 - protein, 23 aa, Artificial Sequence
  Description of Artificial Sequence: Synthetic peptide
  Seed: GMDPRMCSLMQGSTLPRRSGAAG
GMDPRMFSLLQTSTNPRRSGAAG

SEQ ID NO: 86060 - protein, 23 aa, Artificial Sequence
  Description of Artificial Sequence: Synthetic peptide
  Seed: GMDPRMCSLMQGSTLPRRSGAAG
GMDPRMFSLLQTSTPPRRSGAAG

SEQ ID NO: 86061 - protein, 23 aa, Artificial Sequence
  Description of Artificial Sequence: Synthetic peptide
  Seed: GMDPRMCSLMQGSTLPRRSGAAG
GMDPRMFSLLQTSTQPRRSGAAG

SEQ ID NO: 86062 - protein, 23 aa, Artificial Sequence
  Description of Artificial Sequence: Synthetic peptide
  Seed: GMDPRMCSLMQGSTLPRRSGAAG
GMDPRMFSLLQTSTSPRRSGAAG

SEQ ID NO: 86063 - protein, 23 aa, Artificial Sequence
  Description of Artificial Sequence: Synthetic peptide
  Seed: GMDPRMCSLMQGSTLPRRSGAAG
GMDPRMFSLLQTSTTPRRSGAAG

SEQ ID NO: 86064 - protein, 23 aa, Artificial Sequence
  Description of Artificial Sequence: Synthetic peptide
  Seed: GMDPRMCSLMQGSTLPRRSGAAG
GMDPRMFSLLQTSTVPRRSGAAG

SEQ ID NO: 86065 - protein, 23 aa, Artificial Sequence
  Description of Artificial Sequence: Synthetic peptide
  Seed: GMDPRMCSLMQGSTLPRRSGAAG
GMDPRMFSLLQVSTAPRRSGAAG

SEQ ID NO: 86066 - protein, 23 aa, Artificial Sequence
  Description of Artificial Sequence: Synthetic peptide
  Seed: GMDPRMCSLMQGSTLPRRSGAAG
GMDPRMFSLLQVSTDPRRSGAAG

SEQ ID NO: 86067 - protein, 23 aa, Artificial Sequence
  Description of Artificial Sequence: Synthetic peptide
  Seed: GMDPRMCSLMQGSTLPRRSGAAG
GMDPRMFSLLQVSTGPRRSGAAG

SEQ ID NO: 86068 - protein, 23 aa, Artificial Sequence
  Description of Artificial Sequence: Synthetic peptide
  Seed: GMDPRMCSLMQGSTLPRRSGAAG
GMDPRMFSLLQVSTHPRRSGAAG

SEQ ID NO: 86069 - protein, 23 aa, Artificial Sequence
  Description of Artificial Sequence: Synthetic peptide
  Seed: GMDPRMCSLMQGSTLPRRSGAAG
GMDPRMFSLLQVSTIPRRSGAAG

SEQ ID NO: 86070 - protein, 23 aa, Artificial Sequence
  Description of Artificial Sequence: Synthetic peptide
  Seed: GMDPRMCSLMQGSTLPRRSGAAG
GMDPRMFSLLQVSTLPRRSGAAG

SEQ ID NO: 86071 - protein, 23 aa, Artificial Sequence
  Description of Artificial Sequence: Synthetic peptide
  Seed: GMDPRMCSLMQGSTLPRRSGAAG
GMDPRMFSLLQVSTMPRRSGAAG

SEQ ID NO: 86072 - protein, 23 aa, Artificial Sequence
  Description of Artificial Sequence: Synthetic peptide
  Seed: GMDPRMCSLMQGSTLPRRSGAAG
GMDPRMFSLLQVSTNPRRSGAAG

SEQ ID NO: 86073 - protein, 23 aa, Artificial Sequence
  Description of Artificial Sequence: Synthetic peptide
  Seed: GMDPRMCSLMQGSTLPRRSGAAG
GMDPRMFSLLQVSTPPRRSGAAG

SEQ ID NO: 86074 - protein, 23 aa, Artificial Sequence
  Description of Artificial Sequence: Synthetic peptide
  Seed: GMDPRMCSLMQGSTLPRRSGAAG
GMDPRMFSLLQVSTQPRRSGAAG

SEQ ID NO: 86075 - protein, 23 aa, Artificial Sequence
  Description of Artificial Sequence: Synthetic peptide
  Seed: GMDPRMCSLMQGSTLPRRSGAAG
GMDPRMFSLLQVSTSPRRSGAAG

SEQ ID NO: 86076 - protein, 23 aa, Artificial Sequence
  Description of Artificial Sequence: Synthetic peptide
  Seed: GMDPRMCSLMQGSTLPRRSGAAG
GMDPRMFSLLQVSTTPRRSGAAG

SEQ ID NO: 86077 - protein, 23 aa, Artificial Sequence
  Description of Artificial Sequence: Synthetic peptide
  Seed: GMDPRMCSLMQGSTLPRRSGAAG
GMDPRMFSLLQVSTVPRRSGAAG

SEQ ID NO: 86078 - protein, 23 aa, Artificial Sequence
  Description of Artificial Sequence: Synthetic peptide
  Seed: GMDPRMCSLMQGSTLPRRSGAAG
GMDPRMFSLMQASTAPRRSGAAG

SEQ ID NO: 86079 - protein, 23 aa, Artificial Sequence
  Description of Artificial Sequence: Synthetic peptide
  Seed: GMDPRMCSLMQGSTLPRRSGAAG
GMDPRMFSLMQASTCPRRSGAAG

SEQ ID NO: 86080 - protein, 23 aa, Artificial Sequence
  Description of Artificial Sequence: Synthetic peptide
  Seed: GMDPRMCSLMQGSTLPRRSGAAG
GMDPRMFSLMQASTDPRRSGAAG

SEQ ID NO: 86081 - protein, 23 aa, Artificial Sequence
  Description of Artificial Sequence: Synthetic peptide
  Seed: GMDPRMCSLMQGSTLPRRSGAAG
GMDPRMFSLMQASTEPRRSGAAG

SEQ ID NO: 86082 - protein, 23 aa, Artificial Sequence
  Description of Artificial Sequence: Synthetic peptide
  Seed: GMDPRMCSLMQGSTLPRRSGAAG
GMDPRMFSLMQASTFPRRSGAAG

SEQ ID NO: 86083 - protein, 23 aa, Artificial Sequence
  Description of Artificial Sequence: Synthetic peptide
  Seed: GMDPRMCSLMQGSTLPRRSGAAG
GMDPRMFSLMQASTGPRRSGAAG

SEQ ID NO: 86084 - protein, 23 aa, Artificial Sequence
  Description of Artificial Sequence: Synthetic peptide
  Seed: GMDPRMCSLMQGSTLPRRSGAAG
GMDPRMFSLMQASTHPRRSGAAG

SEQ ID NO: 86085 - protein, 23 aa, Artificial Sequence
  Description of Artificial Sequence: Synthetic peptide
  Seed: GMDPRMCSLMQGSTLPRRSGAAG
GMDPRMFSLMQASTIPRRSGAAG

SEQ ID NO: 86086 - protein, 23 aa, Artificial Sequence
  Description of Artificial Sequence: Synthetic peptide
  Seed: GMDPRMCSLMQGSTLPRRSGAAG
GMDPRMFSLMQASTLPRRSGAAG

SEQ ID NO: 86087 - protein, 23 aa, Artificial Sequence
  Description of Artificial Sequence: Synthetic peptide
  Seed: GMDPRMCSLMQGSTLPRRSGAAG
GMDPRMFSLMQASTMPRRSGAAG

SEQ ID NO: 86088 - protein, 23 aa, Artificial Sequence
  Description of Artificial Sequence: Synthetic peptide
  Seed: GMDPRMCSLMQGSTLPRRSGAAG
GMDPRMFSLMQASTNPRRSGAAG

SEQ ID NO: 86089 - protein, 23 aa, Artificial Sequence
  Description of Artificial Sequence: Synthetic peptide
  Seed: GMDPRMCSLMQGSTLPRRSGAAG
GMDPRMFSLMQASTPPRRSGAAG

SEQ ID NO: 86090 - protein, 23 aa, Artificial Sequence
  Description of Artificial Sequence: Synthetic peptide
  Seed: GMDPRMCSLMQGSTLPRRSGAAG
GMDPRMFSLMQASTQPRRSGAAG

SEQ ID NO: 86091 - protein, 23 aa, Artificial Sequence
  Description of Artificial Sequence: Synthetic peptide
  Seed: GMDPRMCSLMQGSTLPRRSGAAG
GMDPRMFSLMQASTSPRRSGAAG

SEQ ID NO: 86092 - protein, 23 aa, Artificial Sequence
  Description of Artificial Sequence: Synthetic peptide
  Seed: GMDPRMCSLMQGSTLPRRSGAAG
GMDPRMFSLMQASTTPRRSGAAG

SEQ ID NO: 86093 - protein, 23 aa, Artificial Sequence
  Description of Artificial Sequence: Synthetic peptide
  Seed: GMDPRMCSLMQGSTLPRRSGAAG
GMDPRMFSLMQASTVPRRSGAAG

SEQ ID NO: 86094 - protein, 23 aa, Artificial Sequence
  Description of Artificial Sequence: Synthetic peptide
  Seed: GMDPRMCSLMQGSTLPRRSGAAG
GMDPRMFSLMQASTYPRRSGAAG

SEQ ID NO: 86095 - protein, 23 aa, Artificial Sequence
  Description of Artificial Sequence: Synthetic peptide
  Seed: GMDPRMCSLMQGSTLPRRSGAAG
GMDPRMFSLMQGSTAPRRSGAAG

SEQ ID NO: 86096 - protein, 23 aa, Artificial Sequence
  Description of Artificial Sequence: Synthetic peptide
  Seed: GMDPRMCSLMQGSTLPRRSGAAG
GMDPRMFSLMQGSTCPRRSGAAG

SEQ ID NO: 86097 - protein, 23 aa, Artificial Sequence
  Description of Artificial Sequence: Synthetic peptide
  Seed: GMDPRMCSLMQGSTLPRRSGAAG
GMDPRMFSLMQGSTFPRRSGAAG

SEQ ID NO: 86098 - protein, 23 aa, Artificial Sequence
  Description of Artificial Sequence: Synthetic peptide
  Seed: GMDPRMCSLMQGSTLPRRSGAAG
GMDPRMFSLMQGSTGPRRSGAAG

SEQ ID NO: 86099 - protein, 23 aa, Artificial Sequence
  Description of Artificial Sequence: Synthetic peptide
  Seed: GMDPRMCSLMQGSTLPRRSGAAG
GMDPRMFSLMQGSTIPRRSGAAG

SEQ ID NO: 86100 - protein, 23 aa, Artificial Sequence
  Description of Artificial Sequence: Synthetic peptide
  Seed: GMDPRMCSLMQGSTLPRRSGAAG
GMDPRMFSLMQGSTLPRRSGAAG

SEQ ID NO: 86101 - protein, 23 aa, Artificial Sequence
  Description of Artificial Sequence: Synthetic peptide
  Seed: GMDPRMCSLMQGSTLPRRSGAAG
GMDPRMFSLMQGSTMPRRSGAAG

SEQ ID NO: 86102 - protein, 23 aa, Artificial Sequence
  Description of Artificial Sequence: Synthetic peptide
  Seed: GMDPRMCSLMQGSTLPRRSGAAG
GMDPRMFSLMQGSTNPRRSGAAG

SEQ ID NO: 86103 - protein, 23 aa, Artificial Sequence
  Description of Artificial Sequence: Synthetic peptide
  Seed: GMDPRMCSLMQGSTLPRRSGAAG
GMDPRMFSLMQGSTQPRRSGAAG

SEQ ID NO: 86104 - protein, 23 aa, Artificial Sequence
  Description of Artificial Sequence: Synthetic peptide
  Seed: GMDPRMCSLMQGSTLPRRSGAAG
GMDPRMFSLMQGSTSPRRSGAAG

SEQ ID NO: 86105 - protein, 23 aa, Artificial Sequence
  Description of Artificial Sequence: Synthetic peptide
  Seed: GMDPRMCSLMQGSTLPRRSGAAG
GMDPRMFSLMQGSTTPRRSGAAG

SEQ ID NO: 86106 - protein, 23 aa, Artificial Sequence
  Description of Artificial Sequence: Synthetic peptide
  Seed: GMDPRMCSLMQGSTLPRRSGAAG
GMDPRMFSLMQGSTVPRRSGAAG

SEQ ID NO: 86107 - protein, 23 aa, Artificial Sequence
  Description of Artificial Sequence: Synthetic peptide
  Seed: GMDPRMCSLMQGSTLPRRSGAAG
GMDPRMFSLMQGSTYPRRSGAAG

SEQ ID NO: 86108 - protein, 23 aa, Artificial Sequence
  Description of Artificial Sequence: Synthetic peptide
  Seed: GMDPRMCSLMQGSTLPRRSGAAG
GMDPRMFSLMQHSTIPRRSGAAG

SEQ ID NO: 86109 - protein, 23 aa, Artificial Sequence
  Description of Artificial Sequence: Synthetic peptide
  Seed: GMDPRMCSLMQGSTLPRRSGAAG
GMDPRMFSLMQHSTLPRRSGAAG

SEQ ID NO: 86110 - protein, 23 aa, Artificial Sequence
  Description of Artificial Sequence: Synthetic peptide
  Seed: GMDPRMCSLMQGSTLPRRSGAAG
GMDPRMFSLMQHSTVPRRSGAAG

SEQ ID NO: 86111 - protein, 23 aa, Artificial Sequence
  Description of Artificial Sequence: Synthetic peptide
  Seed: GMDPRMCSLMQGSTLPRRSGAAG
GMDPRMFSLMQISTAPRRSGAAG

SEQ ID NO: 86112 - protein, 23 aa, Artificial Sequence
  Description of Artificial Sequence: Synthetic peptide
  Seed: GMDPRMCSLMQGSTLPRRSGAAG
GMDPRMFSLMQISTDPRRSGAAG

SEQ ID NO: 86113 - protein, 23 aa, Artificial Sequence
  Description of Artificial Sequence: Synthetic peptide
  Seed: GMDPRMCSLMQGSTLPRRSGAAG
GMDPRMFSLMQISTGPRRSGAAG

SEQ ID NO: 86114 - protein, 23 aa, Artificial Sequence
  Description of Artificial Sequence: Synthetic peptide
  Seed: GMDPRMCSLMQGSTLPRRSGAAG
GMDPRMFSLMQISTHPRRSGAAG

SEQ ID NO: 86115 - protein, 23 aa, Artificial Sequence
  Description of Artificial Sequence: Synthetic peptide
  Seed: GMDPRMCSLMQGSTLPRRSGAAG
GMDPRMFSLMQISTIPRRSGAAG

SEQ ID NO: 86116 - protein, 23 aa, Artificial Sequence
  Description of Artificial Sequence: Synthetic peptide
  Seed: GMDPRMCSLMQGSTLPRRSGAAG
GMDPRMFSLMQISTLPRRSGAAG

SEQ ID NO: 86117 - protein, 23 aa, Artificial Sequence
  Description of Artificial Sequence: Synthetic peptide
  Seed: GMDPRMCSLMQGSTLPRRSGAAG
GMDPRMFSLMQISTMPRRSGAAG

SEQ ID NO: 86118 - protein, 23 aa, Artificial Sequence
  Description of Artificial Sequence: Synthetic peptide
  Seed: GMDPRMCSLMQGSTLPRRSGAAG
GMDPRMFSLMQISTNPRRSGAAG

SEQ ID NO: 86119 - protein, 23 aa, Artificial Sequence
  Description of Artificial Sequence: Synthetic peptide
  Seed: GMDPRMCSLMQGSTLPRRSGAAG
GMDPRMFSLMQISTQPRRSGAAG

SEQ ID NO: 86120 - protein, 23 aa, Artificial Sequence
  Description of Artificial Sequence: Synthetic peptide
  Seed: GMDPRMCSLMQGSTLPRRSGAAG
GMDPRMFSLMQISTSPRRSGAAG

SEQ ID NO: 86121 - protein, 23 aa, Artificial Sequence
  Description of Artificial Sequence: Synthetic peptide
  Seed: GMDPRMCSLMQGSTLPRRSGAAG
GMDPRMFSLMQISTTPRRSGAAG

SEQ ID NO: 86122 - protein, 23 aa, Artificial Sequence
  Description of Artificial Sequence: Synthetic peptide
  Seed: GMDPRMCSLMQGSTLPRRSGAAG
GMDPRMFSLMQISTVPRRSGAAG

SEQ ID NO: 86123 - protein, 23 aa, Artificial Sequence
  Description of Artificial Sequence: Synthetic peptide
  Seed: GMDPRMCSLMQGSTLPRRSGAAG
GMDPRMFSLMQLSTAPRRSGAAG

SEQ ID NO: 86124 - protein, 23 aa, Artificial Sequence
  Description of Artificial Sequence: Synthetic peptide
  Seed: GMDPRMCSLMQGSTLPRRSGAAG
GMDPRMFSLMQLSTMPRRSGAAG

SEQ ID NO: 86125 - protein, 23 aa, Artificial Sequence
  Description of Artificial Sequence: Synthetic peptide
  Seed: GMDPRMCSLMQGSTLPRRSGAAG
GMDPRMFSLMQLSTNPRRSGAAG

SEQ ID NO: 86126 - protein, 23 aa, Artificial Sequence
  Description of Artificial Sequence: Synthetic peptide
  Seed: GMDPRMCSLMQGSTLPRRSGAAG
GMDPRMFSLMQLSTSPRRSGAAG

SEQ ID NO: 86127 - protein, 23 aa, Artificial Sequence
  Description of Artificial Sequence: Synthetic peptide
  Seed: GMDPRMCSLMQGSTLPRRSGAAG
GMDPRMFSLMQLSTTPRRSGAAG

SEQ ID NO: 86128 - protein, 23 aa, Artificial Sequence
  Description of Artificial Sequence: Synthetic peptide
  Seed: GMDPRMCSLMQGSTLPRRSGAAG
GMDPRMFSLMQLSTVPRRSGAAG

SEQ ID NO: 86129 - protein, 23 aa, Artificial Sequence
  Description of Artificial Sequence: Synthetic peptide
  Seed: GMDPRMCSLMQGSTLPRRSGAAG
GMDPRMFSLMQMSTAPRRSGAAG

SEQ ID NO: 86130 - protein, 23 aa, Artificial Sequence
  Description of Artificial Sequence: Synthetic peptide
  Seed: GMDPRMCSLMQGSTLPRRSGAAG
GMDPRMFSLMQMSTIPRRSGAAG

SEQ ID NO: 86131 - protein, 23 aa, Artificial Sequence
  Description of Artificial Sequence: Synthetic peptide
  Seed: GMDPRMCSLMQGSTLPRRSGAAG
GMDPRMFSLMQMSTNPRRSGAAG

SEQ ID NO: 86132 - protein, 23 aa, Artificial Sequence
  Description of Artificial Sequence: Synthetic peptide
  Seed: GMDPRMCSLMQGSTLPRRSGAAG
GMDPRMFSLMQMSTSPRRSGAAG

SEQ ID NO: 86133 - protein, 23 aa, Artificial Sequence
  Description of Artificial Sequence: Synthetic peptide
  Seed: GMDPRMCSLMQGSTLPRRSGAAG
GMDPRMFSLMQMSTTPRRSGAAG

SEQ ID NO: 86134 - protein, 23 aa, Artificial Sequence
  Description of Artificial Sequence: Synthetic peptide
  Seed: GMDPRMCSLMQGSTLPRRSGAAG
GMDPRMFSLMQMSTVPRRSGAAG

SEQ ID NO: 86135 - protein, 23 aa, Artificial Sequence
  Description of Artificial Sequence: Synthetic peptide
  Seed: GMDPRMCSLMQGSTLPRRSGAAG
GMDPRMFSLMQNSTAPRRSGAAG

SEQ ID NO: 86136 - protein, 23 aa, Artificial Sequence
  Description of Artificial Sequence: Synthetic peptide
  Seed: GMDPRMCSLMQGSTLPRRSGAAG
GMDPRMFSLMQNSTGPRRSGAAG

SEQ ID NO: 86137 - protein, 23 aa, Artificial Sequence
  Description of Artificial Sequence: Synthetic peptide
  Seed: GMDPRMCSLMQGSTLPRRSGAAG
GMDPRMFSLMQNSTIPRRSGAAG

SEQ ID NO: 86138 - protein, 23 aa, Artificial Sequence
  Description of Artificial Sequence: Synthetic peptide
  Seed: GMDPRMCSLMQGSTLPRRSGAAG
GMDPRMFSLMQNSTLPRRSGAAG

SEQ ID NO: 86139 - protein, 23 aa, Artificial Sequence
  Description of Artificial Sequence: Synthetic peptide
  Seed: GMDPRMCSLMQGSTLPRRSGAAG
GMDPRMFSLMQNSTMPRRSGAAG

SEQ ID NO: 86140 - protein, 23 aa, Artificial Sequence
  Description of Artificial Sequence: Synthetic peptide
  Seed: GMDPRMCSLMQGSTLPRRSGAAG
GMDPRMFSLMQNSTNPRRSGAAG

SEQ ID NO: 86141 - protein, 23 aa, Artificial Sequence
  Description of Artificial Sequence: Synthetic peptide
  Seed: GMDPRMCSLMQGSTLPRRSGAAG
GMDPRMFSLMQNSTSPRRSGAAG

SEQ ID NO: 86142 - protein, 23 aa, Artificial Sequence
  Description of Artificial Sequence: Synthetic peptide
  Seed: GMDPRMCSLMQGSTLPRRSGAAG
GMDPRMFSLMQNSTTPRRSGAAG

SEQ ID NO: 86143 - protein, 23 aa, Artificial Sequence
  Description of Artificial Sequence: Synthetic peptide
  Seed: GMDPRMCSLMQGSTLPRRSGAAG
GMDPRMFSLMQNSTVPRRSGAAG

SEQ ID NO: 86144 - protein, 23 aa, Artificial Sequence
  Description of Artificial Sequence: Synthetic peptide
  Seed: GMDPRMCSLMQGSTLPRRSGAAG
GMDPRMFSLMQPSTAPRRSGAAG

SEQ ID NO: 86145 - protein, 23 aa, Artificial Sequence
  Description of Artificial Sequence: Synthetic peptide
  Seed: GMDPRMCSLMQGSTLPRRSGAAG
GMDPRMFSLMQPSTCPRRSGAAG

SEQ ID NO: 86146 - protein, 23 aa, Artificial Sequence
  Description of Artificial Sequence: Synthetic peptide
  Seed: GMDPRMCSLMQGSTLPRRSGAAG
GMDPRMFSLMQPSTDPRRSGAAG

SEQ ID NO: 86147 - protein, 23 aa, Artificial Sequence
  Description of Artificial Sequence: Synthetic peptide
  Seed: GMDPRMCSLMQGSTLPRRSGAAG
GMDPRMFSLMQPSTEPRRSGAAG

SEQ ID NO: 86148 - protein, 23 aa, Artificial Sequence
  Description of Artificial Sequence: Synthetic peptide
  Seed: GMDPRMCSLMQGSTLPRRSGAAG
GMDPRMFSLMQPSTFPRRSGAAG

SEQ ID NO: 86149 - protein, 23 aa, Artificial Sequence
  Description of Artificial Sequence: Synthetic peptide
  Seed: GMDPRMCSLMQGSTLPRRSGAAG
GMDPRMFSLMQPSTGPRRSGAAG

SEQ ID NO: 86150 - protein, 23 aa, Artificial Sequence
  Description of Artificial Sequence: Synthetic peptide
  Seed: GMDPRMCSLMQGSTLPRRSGAAG
GMDPRMFSLMQPSTHPRRSGAAG

SEQ ID NO: 86151 - protein, 23 aa, Artificial Sequence
  Description of Artificial Sequence: Synthetic peptide
  Seed: GMDPRMCSLMQGSTLPRRSGAAG
GMDPRMFSLMQPSTIPRRSGAAG

SEQ ID NO: 86152 - protein, 23 aa, Artificial Sequence
  Description of Artificial Sequence: Synthetic peptide
  Seed: GMDPRMCSLMQGSTLPRRSGAAG
GMDPRMFSLMQPSTLPRRSGAAG

SEQ ID NO: 86153 - protein, 23 aa, Artificial Sequence
  Description of Artificial Sequence: Synthetic peptide
  Seed: GMDPRMCSLMQGSTLPRRSGAAG
GMDPRMFSLMQPSTMPRRSGAAG

SEQ ID NO: 86154 - protein, 23 aa, Artificial Sequence
  Description of Artificial Sequence: Synthetic peptide
  Seed: GMDPRMCSLMQGSTLPRRSGAAG
GMDPRMFSLMQPSTNPRRSGAAG

SEQ ID NO: 86155 - protein, 23 aa, Artificial Sequence
  Description of Artificial Sequence: Synthetic peptide
  Seed: GMDPRMCSLMQGSTLPRRSGAAG
GMDPRMFSLMQPSTPPRRSGAAG

SEQ ID NO: 86156 - protein, 23 aa, Artificial Sequence
  Description of Artificial Sequence: Synthetic peptide
  Seed: GMDPRMCSLMQGSTLPRRSGAAG
GMDPRMFSLMQPSTQPRRSGAAG

SEQ ID NO: 86157 - protein, 23 aa, Artificial Sequence
  Description of Artificial Sequence: Synthetic peptide
  Seed: GMDPRMCSLMQGSTLPRRSGAAG
GMDPRMFSLMQPSTSPRRSGAAG

SEQ ID NO: 86158 - protein, 23 aa, Artificial Sequence
  Description of Artificial Sequence: Synthetic peptide
  Seed: GMDPRMCSLMQGSTLPRRSGAAG
GMDPRMFSLMQPSTTPRRSGAAG

SEQ ID NO: 86159 - protein, 23 aa, Artificial Sequence
  Description of Artificial Sequence: Synthetic peptide
  Seed: GMDPRMCSLMQGSTLPRRSGAAG
GMDPRMFSLMQPSTVPRRSGAAG

SEQ ID NO: 86160 - protein, 23 aa, Artificial Sequence
  Description of Artificial Sequence: Synthetic peptide
  Seed: GMDPRMCSLMQGSTLPRRSGAAG
GMDPRMFSLMQSSTAPRRSGAAG

SEQ ID NO: 86161 - protein, 23 aa, Artificial Sequence
  Description of Artificial Sequence: Synthetic peptide
  Seed: GMDPRMCSLMQGSTLPRRSGAAG
GMDPRMFSLMQSSTCPRRSGAAG

SEQ ID NO: 86162 - protein, 23 aa, Artificial Sequence
  Description of Artificial Sequence: Synthetic peptide
  Seed: GMDPRMCSLMQGSTLPRRSGAAG
GMDPRMFSLMQSSTDPRRSGAAG

SEQ ID NO: 86163 - protein, 23 aa, Artificial Sequence
  Description of Artificial Sequence: Synthetic peptide
  Seed: GMDPRMCSLMQGSTLPRRSGAAG
GMDPRMFSLMQSSTEPRRSGAAG

SEQ ID NO: 86164 - protein, 23 aa, Artificial Sequence
  Description of Artificial Sequence: Synthetic peptide
  Seed: GMDPRMCSLMQGSTLPRRSGAAG
GMDPRMFSLMQSSTFPRRSGAAG

SEQ ID NO: 86165 - protein, 23 aa, Artificial Sequence
  Description of Artificial Sequence: Synthetic peptide
  Seed: GMDPRMCSLMQGSTLPRRSGAAG
GMDPRMFSLMQSSTGPRRSGAAG

SEQ ID NO: 86166 - protein, 23 aa, Artificial Sequence
  Description of Artificial Sequence: Synthetic peptide
  Seed: GMDPRMCSLMQGSTLPRRSGAAG
GMDPRMFSLMQSSTHPRRSGAAG

SEQ ID NO: 86167 - protein, 23 aa, Artificial Sequence
  Description of Artificial Sequence: Synthetic peptide
  Seed: GMDPRMCSLMQGSTLPRRSGAAG
GMDPRMFSLMQSSTIPRRSGAAG

SEQ ID NO: 86168 - protein, 23 aa, Artificial Sequence
  Description of Artificial Sequence: Synthetic peptide
  Seed: GMDPRMCSLMQGSTLPRRSGAAG
GMDPRMFSLMQSSTLPRRSGAAG

SEQ ID NO: 86169 - protein, 23 aa, Artificial Sequence
  Description of Artificial Sequence: Synthetic peptide
  Seed: GMDPRMCSLMQGSTLPRRSGAAG
GMDPRMFSLMQSSTMPRRSGAAG

SEQ ID NO: 86170 - protein, 23 aa, Artificial Sequence
  Description of Artificial Sequence: Synthetic peptide
  Seed: GMDPRMCSLMQGSTLPRRSGAAG
GMDPRMFSLMQSSTNPRRSGAAG

SEQ ID NO: 86171 - protein, 23 aa, Artificial Sequence
  Description of Artificial Sequence: Synthetic peptide
  Seed: GMDPRMCSLMQGSTLPRRSGAAG
GMDPRMFSLMQSSTPPRRSGAAG

SEQ ID NO: 86172 - protein, 23 aa, Artificial Sequence
  Description of Artificial Sequence: Synthetic peptide
  Seed: GMDPRMCSLMQGSTLPRRSGAAG
GMDPRMFSLMQSSTQPRRSGAAG

SEQ ID NO: 86173 - protein, 23 aa, Artificial Sequence
  Description of Artificial Sequence: Synthetic peptide
  Seed: GMDPRMCSLMQGSTLPRRSGAAG
GMDPRMFSLMQSSTSPRRSGAAG

SEQ ID NO: 86174 - protein, 23 aa, Artificial Sequence
  Description of Artificial Sequence: Synthetic peptide
  Seed: GMDPRMCSLMQGSTLPRRSGAAG
GMDPRMFSLMQSSTTPRRSGAAG

SEQ ID NO: 86175 - protein, 23 aa, Artificial Sequence
  Description of Artificial Sequence: Synthetic peptide
  Seed: GMDPRMCSLMQGSTLPRRSGAAG
GMDPRMFSLMQSSTVPRRSGAAG

SEQ ID NO: 86176 - protein, 23 aa, Artificial Sequence
  Description of Artificial Sequence: Synthetic peptide
  Seed: GMDPRMCSLMQGSTLPRRSGAAG
GMDPRMFSLMQTSTAPRRSGAAG

SEQ ID NO: 86177 - protein, 23 aa, Artificial Sequence
  Description of Artificial Sequence: Synthetic peptide
  Seed: GMDPRMCSLMQGSTLPRRSGAAG
GMDPRMFSLMQTSTDPRRSGAAG

SEQ ID NO: 86178 - protein, 23 aa, Artificial Sequence
  Description of Artificial Sequence: Synthetic peptide
  Seed: GMDPRMCSLMQGSTLPRRSGAAG
GMDPRMFSLMQTSTGPRRSGAAG

SEQ ID NO: 86179 - protein, 23 aa, Artificial Sequence
  Description of Artificial Sequence: Synthetic peptide
  Seed: GMDPRMCSLMQGSTLPRRSGAAG
GMDPRMFSLMQTSTHPRRSGAAG

SEQ ID NO: 86180 - protein, 23 aa, Artificial Sequence
  Description of Artificial Sequence: Synthetic peptide
  Seed: GMDPRMCSLMQGSTLPRRSGAAG
GMDPRMFSLMQTSTIPRRSGAAG

SEQ ID NO: 86181 - protein, 23 aa, Artificial Sequence
  Description of Artificial Sequence: Synthetic peptide
  Seed: GMDPRMCSLMQGSTLPRRSGAAG
GMDPRMFSLMQTSTLPRRSGAAG

SEQ ID NO: 86182 - protein, 23 aa, Artificial Sequence
  Description of Artificial Sequence: Synthetic peptide
  Seed: GMDPRMCSLMQGSTLPRRSGAAG
GMDPRMFSLMQTSTMPRRSGAAG

SEQ ID NO: 86183 - protein, 23 aa, Artificial Sequence
  Description of Artificial Sequence: Synthetic peptide
  Seed: GMDPRMCSLMQGSTLPRRSGAAG
GMDPRMFSLMQTSTNPRRSGAAG

SEQ ID NO: 86184 - protein, 23 aa, Artificial Sequence
  Description of Artificial Sequence: Synthetic peptide
  Seed: GMDPRMCSLMQGSTLPRRSGAAG
GMDPRMFSLMQTSTPPRRSGAAG

SEQ ID NO: 86185 - protein, 23 aa, Artificial Sequence
  Description of Artificial Sequence: Synthetic peptide
  Seed: GMDPRMCSLMQGSTLPRRSGAAG
GMDPRMFSLMQTSTQPRRSGAAG

SEQ ID NO: 86186 - protein, 23 aa, Artificial Sequence
  Description of Artificial Sequence: Synthetic peptide
  Seed: GMDPRMCSLMQGSTLPRRSGAAG
GMDPRMFSLMQTSTSPRRSGAAG

SEQ ID NO: 86187 - protein, 23 aa, Artificial Sequence
  Description of Artificial Sequence: Synthetic peptide
  Seed: GMDPRMCSLMQGSTLPRRSGAAG
GMDPRMFSLMQTSTTPRRSGAAG

SEQ ID NO: 86188 - protein, 23 aa, Artificial Sequence
  Description of Artificial Sequence: Synthetic peptide
  Seed: GMDPRMCSLMQGSTLPRRSGAAG
GMDPRMFSLMQTSTVPRRSGAAG

SEQ ID NO: 86189 - protein, 23 aa, Artificial Sequence
  Description of Artificial Sequence: Synthetic peptide
  Seed: GMDPRMCSLMQGSTLPRRSGAAG
GMDPRMFSLMQVSTAPRRSGAAG

SEQ ID NO: 86190 - protein, 23 aa, Artificial Sequence
  Description of Artificial Sequence: Synthetic peptide
  Seed: GMDPRMCSLMQGSTLPRRSGAAG
GMDPRMFSLMQVSTDPRRSGAAG

SEQ ID NO: 86191 - protein, 23 aa, Artificial Sequence
  Description of Artificial Sequence: Synthetic peptide
  Seed: GMDPRMCSLMQGSTLPRRSGAAG
GMDPRMFSLMQVSTEPRRSGAAG

SEQ ID NO: 86192 - protein, 23 aa, Artificial Sequence
  Description of Artificial Sequence: Synthetic peptide
  Seed: GMDPRMCSLMQGSTLPRRSGAAG
GMDPRMFSLMQVSTGPRRSGAAG

SEQ ID NO: 86193 - protein, 23 aa, Artificial Sequence
  Description of Artificial Sequence: Synthetic peptide
  Seed: GMDPRMCSLMQGSTLPRRSGAAG
GMDPRMFSLMQVSTHPRRSGAAG

SEQ ID NO: 86194 - protein, 23 aa, Artificial Sequence
  Description of Artificial Sequence: Synthetic peptide
  Seed: GMDPRMCSLMQGSTLPRRSGAAG
GMDPRMFSLMQVSTIPRRSGAAG

SEQ ID NO: 86195 - protein, 23 aa, Artificial Sequence
  Description of Artificial Sequence: Synthetic peptide
  Seed: GMDPRMCSLMQGSTLPRRSGAAG
GMDPRMFSLMQVSTLPRRSGAAG

SEQ ID NO: 86196 - protein, 23 aa, Artificial Sequence
  Description of Artificial Sequence: Synthetic peptide
  Seed: GMDPRMCSLMQGSTLPRRSGAAG
GMDPRMFSLMQVSTMPRRSGAAG

SEQ ID NO: 86197 - protein, 23 aa, Artificial Sequence
  Description of Artificial Sequence: Synthetic peptide
  Seed: GMDPRMCSLMQGSTLPRRSGAAG
GMDPRMFSLMQVSTNPRRSGAAG

SEQ ID NO: 86198 - protein, 23 aa, Artificial Sequence
  Description of Artificial Sequence: Synthetic peptide
  Seed: GMDPRMCSLMQGSTLPRRSGAAG
GMDPRMFSLMQVSTPPRRSGAAG

SEQ ID NO: 86199 - protein, 23 aa, Artificial Sequence
  Description of Artificial Sequence: Synthetic peptide
  Seed: GMDPRMCSLMQGSTLPRRSGAAG
GMDPRMFSLMQVSTQPRRSGAAG

SEQ ID NO: 86200 - protein, 23 aa, Artificial Sequence
  Description of Artificial Sequence: Synthetic peptide
  Seed: GMDPRMCSLMQGSTLPRRSGAAG
GMDPRMFSLMQVSTSPRRSGAAG

SEQ ID NO: 86201 - protein, 23 aa, Artificial Sequence
  Description of Artificial Sequence: Synthetic peptide
  Seed: GMDPRMCSLMQGSTLPRRSGAAG
GMDPRMFSLMQVSTTPRRSGAAG

SEQ ID NO: 86202 - protein, 23 aa, Artificial Sequence
  Description of Artificial Sequence: Synthetic peptide
  Seed: GMDPRMCSLMQGSTLPRRSGAAG
GMDPRMFSLMQVSTVPRRSGAAG

SEQ ID NO: 86203 - protein, 23 aa, Artificial Sequence
  Description of Artificial Sequence: Synthetic peptide
  Seed: GMDPRMCSLMQGSTLPRRSGAAG
GMDPRMFSLNQASTIPRRSGAAG

SEQ ID NO: 86204 - protein, 23 aa, Artificial Sequence
  Description of Artificial Sequence: Synthetic peptide
  Seed: GMDPRMCSLMQGSTLPRRSGAAG
GMDPRMFSLNQASTLPRRSGAAG

SEQ ID NO: 86205 - protein, 23 aa, Artificial Sequence
  Description of Artificial Sequence: Synthetic peptide
  Seed: GMDPRMCSLMQGSTLPRRSGAAG
GMDPRMFSLNQASTVPRRSGAAG

SEQ ID NO: 86206 - protein, 23 aa, Artificial Sequence
  Description of Artificial Sequence: Synthetic peptide
  Seed: GMDPRMCSLMQGSTLPRRSGAAG
GMDPRMFSLQQASTAPRRSGAAG

SEQ ID NO: 86207 - protein, 23 aa, Artificial Sequence
  Description of Artificial Sequence: Synthetic peptide
  Seed: GMDPRMCSLMQGSTLPRRSGAAG
GMDPRMFSLQQASTGPRRSGAAG

SEQ ID NO: 86208 - protein, 23 aa, Artificial Sequence
  Description of Artificial Sequence: Synthetic peptide
  Seed: GMDPRMCSLMQGSTLPRRSGAAG
GMDPRMFSLQQASTIPRRSGAAG

SEQ ID NO: 86209 - protein, 23 aa, Artificial Sequence
  Description of Artificial Sequence: Synthetic peptide
  Seed: GMDPRMCSLMQGSTLPRRSGAAG
GMDPRMFSLQQASTLPRRSGAAG

SEQ ID NO: 86210 - protein, 23 aa, Artificial Sequence
  Description of Artificial Sequence: Synthetic peptide
  Seed: GMDPRMCSLMQGSTLPRRSGAAG
GMDPRMFSLQQASTMPRRSGAAG

SEQ ID NO: 86211 - protein, 23 aa, Artificial Sequence
  Description of Artificial Sequence: Synthetic peptide
  Seed: GMDPRMCSLMQGSTLPRRSGAAG
GMDPRMFSLQQASTNPRRSGAAG

SEQ ID NO: 86212 - protein, 23 aa, Artificial Sequence
  Description of Artificial Sequence: Synthetic peptide
  Seed: GMDPRMCSLMQGSTLPRRSGAAG
GMDPRMFSLQQASTSPRRSGAAG

SEQ ID NO: 86213 - protein, 23 aa, Artificial Sequence
  Description of Artificial Sequence: Synthetic peptide
  Seed: GMDPRMCSLMQGSTLPRRSGAAG
GMDPRMFSLQQASTTPRRSGAAG

SEQ ID NO: 86214 - protein, 23 aa, Artificial Sequence
  Description of Artificial Sequence: Synthetic peptide
  Seed: GMDPRMCSLMQGSTLPRRSGAAG
GMDPRMFSLQQASTVPRRSGAAG

SEQ ID NO: 86215 - protein, 23 aa, Artificial Sequence
  Description of Artificial Sequence: Synthetic peptide
  Seed: GMDPRMCSLMQGSTLPRRSGAAG
GMDPRMFSLQQGSTAPRRSGAAG

SEQ ID NO: 86216 - protein, 23 aa, Artificial Sequence
  Description of Artificial Sequence: Synthetic peptide
  Seed: GMDPRMCSLMQGSTLPRRSGAAG
GMDPRMFSLQQGSTIPRRSGAAG

SEQ ID NO: 86217 - protein, 23 aa, Artificial Sequence
  Description of Artificial Sequence: Synthetic peptide
  Seed: GMDPRMCSLMQGSTLPRRSGAAG
GMDPRMFSLQQGSTLPRRSGAAG

SEQ ID NO: 86218 - protein, 23 aa, Artificial Sequence
  Description of Artificial Sequence: Synthetic peptide
  Seed: GMDPRMCSLMQGSTLPRRSGAAG
GMDPRMFSLQQGSTMPRRSGAAG

SEQ ID NO: 86219 - protein, 23 aa, Artificial Sequence
  Description of Artificial Sequence: Synthetic peptide
  Seed: GMDPRMCSLMQGSTLPRRSGAAG
GMDPRMFSLQQGSTVPRRSGAAG

SEQ ID NO: 86220 - protein, 23 aa, Artificial Sequence
  Description of Artificial Sequence: Synthetic peptide
  Seed: GMDPRMCSLMQGSTLPRRSGAAG
GMDPRMFSLQQISTAPRRSGAAG

SEQ ID NO: 86221 - protein, 23 aa, Artificial Sequence
  Description of Artificial Sequence: Synthetic peptide
  Seed: GMDPRMCSLMQGSTLPRRSGAAG
GMDPRMFSLQQISTNPRRSGAAG

SEQ ID NO: 86222 - protein, 23 aa, Artificial Sequence
  Description of Artificial Sequence: Synthetic peptide
  Seed: GMDPRMCSLMQGSTLPRRSGAAG
GMDPRMFSLQQISTSPRRSGAAG

SEQ ID NO: 86223 - protein, 23 aa, Artificial Sequence
  Description of Artificial Sequence: Synthetic peptide
  Seed: GMDPRMCSLMQGSTLPRRSGAAG
GMDPRMFSLQQNSTIPRRSGAAG

SEQ ID NO: 86224 - protein, 23 aa, Artificial Sequence
  Description of Artificial Sequence: Synthetic peptide
  Seed: GMDPRMCSLMQGSTLPRRSGAAG
GMDPRMFSLQQNSTLPRRSGAAG

SEQ ID NO: 86225 - protein, 23 aa, Artificial Sequence
  Description of Artificial Sequence: Synthetic peptide
  Seed: GMDPRMCSLMQGSTLPRRSGAAG
GMDPRMFSLQQNSTVPRRSGAAG

SEQ ID NO: 86226 - protein, 23 aa, Artificial Sequence
  Description of Artificial Sequence: Synthetic peptide
  Seed: GMDPRMCSLMQGSTLPRRSGAAG
GMDPRMFSLQQPSTAPRRSGAAG

SEQ ID NO: 86227 - protein, 23 aa, Artificial Sequence
  Description of Artificial Sequence: Synthetic peptide
  Seed: GMDPRMCSLMQGSTLPRRSGAAG
GMDPRMFSLQQPSTIPRRSGAAG

SEQ ID NO: 86228 - protein, 23 aa, Artificial Sequence
  Description of Artificial Sequence: Synthetic peptide
  Seed: GMDPRMCSLMQGSTLPRRSGAAG
GMDPRMFSLQQPSTLPRRSGAAG

SEQ ID NO: 86229 - protein, 23 aa, Artificial Sequence
  Description of Artificial Sequence: Synthetic peptide
  Seed: GMDPRMCSLMQGSTLPRRSGAAG
GMDPRMFSLQQPSTSPRRSGAAG

SEQ ID NO: 86230 - protein, 23 aa, Artificial Sequence
  Description of Artificial Sequence: Synthetic peptide
  Seed: GMDPRMCSLMQGSTLPRRSGAAG
GMDPRMFSLQQPSTVPRRSGAAG

SEQ ID NO: 86231 - protein, 23 aa, Artificial Sequence
  Description of Artificial Sequence: Synthetic peptide
  Seed: GMDPRMCSLMQGSTLPRRSGAAG
GMDPRMFSLQQSSTAPRRSGAAG

SEQ ID NO: 86232 - protein, 23 aa, Artificial Sequence
  Description of Artificial Sequence: Synthetic peptide
  Seed: GMDPRMCSLMQGSTLPRRSGAAG
GMDPRMFSLQQSSTIPRRSGAAG

SEQ ID NO: 86233 - protein, 23 aa, Artificial Sequence
  Description of Artificial Sequence: Synthetic peptide
  Seed: GMDPRMCSLMQGSTLPRRSGAAG
GMDPRMFSLQQSSTLPRRSGAAG

SEQ ID NO: 86234 - protein, 23 aa, Artificial Sequence
  Description of Artificial Sequence: Synthetic peptide
  Seed: GMDPRMCSLMQGSTLPRRSGAAG
GMDPRMFSLQQSSTMPRRSGAAG

SEQ ID NO: 86235 - protein, 23 aa, Artificial Sequence
  Description of Artificial Sequence: Synthetic peptide
  Seed: GMDPRMCSLMQGSTLPRRSGAAG
GMDPRMFSLQQSSTNPRRSGAAG

SEQ ID NO: 86236 - protein, 23 aa, Artificial Sequence
  Description of Artificial Sequence: Synthetic peptide
  Seed: GMDPRMCSLMQGSTLPRRSGAAG
GMDPRMFSLQQSSTSPRRSGAAG

SEQ ID NO: 86237 - protein, 23 aa, Artificial Sequence
  Description of Artificial Sequence: Synthetic peptide
  Seed: GMDPRMCSLMQGSTLPRRSGAAG
GMDPRMFSLQQSSTVPRRSGAAG

SEQ ID NO: 86238 - protein, 23 aa, Artificial Sequence
  Description of Artificial Sequence: Synthetic peptide
  Seed: GMDPRMCSLMQGSTLPRRSGAAG
GMDPRMFSLQQTSTAPRRSGAAG

SEQ ID NO: 86239 - protein, 23 aa, Artificial Sequence
  Description of Artificial Sequence: Synthetic peptide
  Seed: GMDPRMCSLMQGSTLPRRSGAAG
GMDPRMFSLQQTSTIPRRSGAAG

SEQ ID NO: 86240 - protein, 23 aa, Artificial Sequence
  Description of Artificial Sequence: Synthetic peptide
  Seed: GMDPRMCSLMQGSTLPRRSGAAG
GMDPRMFSLQQTSTLPRRSGAAG

SEQ ID NO: 86241 - protein, 23 aa, Artificial Sequence
  Description of Artificial Sequence: Synthetic peptide
  Seed: GMDPRMCSLMQGSTLPRRSGAAG
GMDPRMFSLQQTSTNPRRSGAAG

SEQ ID NO: 86242 - protein, 23 aa, Artificial Sequence
  Description of Artificial Sequence: Synthetic peptide
  Seed: GMDPRMCSLMQGSTLPRRSGAAG
GMDPRMFSLQQTSTSPRRSGAAG

SEQ ID NO: 86243 - protein, 23 aa, Artificial Sequence
  Description of Artificial Sequence: Synthetic peptide
  Seed: GMDPRMCSLMQGSTLPRRSGAAG
GMDPRMFSLQQTSTVPRRSGAAG

SEQ ID NO: 86244 - protein, 23 aa, Artificial Sequence
  Description of Artificial Sequence: Synthetic peptide
  Seed: GMDPRMCSLMQGSTLPRRSGAAG
GMDPRMFSLQQVSTAPRRSGAAG

SEQ ID NO: 86245 - protein, 23 aa, Artificial Sequence
  Description of Artificial Sequence: Synthetic peptide
  Seed: GMDPRMCSLMQGSTLPRRSGAAG
GMDPRMFSLQQVSTNPRRSGAAG

SEQ ID NO: 86246 - protein, 23 aa, Artificial Sequence
  Description of Artificial Sequence: Synthetic peptide
  Seed: GMDPRMCSLMQGSTLPRRSGAAG
GMDPRMFSLQQVSTSPRRSGAAG

SEQ ID NO: 86247 - protein, 23 aa, Artificial Sequence
  Description of Artificial Sequence: Synthetic peptide
  Seed: GMDPRMCSLMQGSTLPRRSGAAG
GMDPRMFSLSQASTAPRRSGAAG

SEQ ID NO: 86248 - protein, 23 aa, Artificial Sequence
  Description of Artificial Sequence: Synthetic peptide
  Seed: GMDPRMCSLMQGSTLPRRSGAAG
GMDPRMFSLSQASTIPRRSGAAG

SEQ ID NO: 86249 - protein, 23 aa, Artificial Sequence
  Description of Artificial Sequence: Synthetic peptide
  Seed: GMDPRMCSLMQGSTLPRRSGAAG
GMDPRMFSLSQASTLPRRSGAAG

SEQ ID NO: 86250 - protein, 23 aa, Artificial Sequence
  Description of Artificial Sequence: Synthetic peptide
  Seed: GMDPRMCSLMQGSTLPRRSGAAG
GMDPRMFSLSQASTMPRRSGAAG

SEQ ID NO: 86251 - protein, 23 aa, Artificial Sequence
  Description of Artificial Sequence: Synthetic peptide
  Seed: GMDPRMCSLMQGSTLPRRSGAAG
GMDPRMFSLSQASTNPRRSGAAG

SEQ ID NO: 86252 - protein, 23 aa, Artificial Sequence
  Description of Artificial Sequence: Synthetic peptide
  Seed: GMDPRMCSLMQGSTLPRRSGAAG
GMDPRMFSLSQASTSPRRSGAAG

SEQ ID NO: 86253 - protein, 23 aa, Artificial Sequence
  Description of Artificial Sequence: Synthetic peptide
  Seed: GMDPRMCSLMQGSTLPRRSGAAG
GMDPRMFSLSQASTVPRRSGAAG

SEQ ID NO: 86254 - protein, 23 aa, Artificial Sequence
  Description of Artificial Sequence: Synthetic peptide
  Seed: GMDPRMCSLMQGSTLPRRSGAAG
GMDPRMFSLSQGSTIPRRSGAAG

SEQ ID NO: 86255 - protein, 23 aa, Artificial Sequence
  Description of Artificial Sequence: Synthetic peptide
  Seed: GMDPRMCSLMQGSTLPRRSGAAG
GMDPRMFSLSQGSTLPRRSGAAG

SEQ ID NO: 86256 - protein, 23 aa, Artificial Sequence
  Description of Artificial Sequence: Synthetic peptide
  Seed: GMDPRMCSLMQGSTLPRRSGAAG
GMDPRMFSLSQGSTVPRRSGAAG

SEQ ID NO: 86257 - protein, 23 aa, Artificial Sequence
  Description of Artificial Sequence: Synthetic peptide
  Seed: GMDPRMCSLMQGSTLPRRSGAAG
GMDPRMFSLSQPSTIPRRSGAAG

SEQ ID NO: 86258 - protein, 23 aa, Artificial Sequence
  Description of Artificial Sequence: Synthetic peptide
  Seed: GMDPRMCSLMQGSTLPRRSGAAG
GMDPRMFSLSQPSTLPRRSGAAG

SEQ ID NO: 86259 - protein, 23 aa, Artificial Sequence
  Description of Artificial Sequence: Synthetic peptide
  Seed: GMDPRMCSLMQGSTLPRRSGAAG
GMDPRMFSLSQPSTVPRRSGAAG

SEQ ID NO: 86260 - protein, 23 aa, Artificial Sequence
  Description of Artificial Sequence: Synthetic peptide
  Seed: GMDPRMCSLMQGSTLPRRSGAAG
GMDPRMFSLSQSSTIPRRSGAAG

SEQ ID NO: 86261 - protein, 23 aa, Artificial Sequence
  Description of Artificial Sequence: Synthetic peptide
  Seed: GMDPRMCSLMQGSTLPRRSGAAG
GMDPRMFSLSQSSTLPRRSGAAG

SEQ ID NO: 86262 - protein, 23 aa, Artificial Sequence
  Description of Artificial Sequence: Synthetic peptide
  Seed: GMDPRMCSLMQGSTLPRRSGAAG
GMDPRMFSLSQSSTVPRRSGAAG

SEQ ID NO: 86263 - protein, 23 aa, Artificial Sequence
  Description of Artificial Sequence: Synthetic peptide
  Seed: GMDPRMCSLMQGSTLPRRSGAAG
GMDPRMFSLTQASTAPRRSGAAG

SEQ ID NO: 86264 - protein, 23 aa, Artificial Sequence
  Description of Artificial Sequence: Synthetic peptide
  Seed: GMDPRMCSLMQGSTLPRRSGAAG
GMDPRMFSLTQASTIPRRSGAAG

SEQ ID NO: 86265 - protein, 23 aa, Artificial Sequence
  Description of Artificial Sequence: Synthetic peptide
  Seed: GMDPRMCSLMQGSTLPRRSGAAG
GMDPRMFSLTQASTLPRRSGAAG

SEQ ID NO: 86266 - protein, 23 aa, Artificial Sequence
  Description of Artificial Sequence: Synthetic peptide
  Seed: GMDPRMCSLMQGSTLPRRSGAAG
GMDPRMFSLTQASTNPRRSGAAG

SEQ ID NO: 86267 - protein, 23 aa, Artificial Sequence
  Description of Artificial Sequence: Synthetic peptide
  Seed: GMDPRMCSLMQGSTLPRRSGAAG
GMDPRMFSLTQASTSPRRSGAAG

SEQ ID NO: 86268 - protein, 23 aa, Artificial Sequence
  Description of Artificial Sequence: Synthetic peptide
  Seed: GMDPRMCSLMQGSTLPRRSGAAG
GMDPRMFSLTQASTVPRRSGAAG

SEQ ID NO: 86269 - protein, 23 aa, Artificial Sequence
  Description of Artificial Sequence: Synthetic peptide
  Seed: GMDPRMCSLMQGSTLPRRSGAAG
GMDPRMFSLTQGSTLPRRSGAAG

SEQ ID NO: 86270 - protein, 23 aa, Artificial Sequence
  Description of Artificial Sequence: Synthetic peptide
  Seed: GMDPRMCSLMQGSTLPRRSGAAG
GMDPRMFSLTQGSTVPRRSGAAG

SEQ ID NO: 86271 - protein, 23 aa, Artificial Sequence
  Description of Artificial Sequence: Synthetic peptide
  Seed: GMDPRMCSLMQGSTLPRRSGAAG
GMDPRMFSLVQASTAPRRSGAAG

SEQ ID NO: 86272 - protein, 23 aa, Artificial Sequence
  Description of Artificial Sequence: Synthetic peptide
  Seed: GMDPRMCSLMQGSTLPRRSGAAG
GMDPRMFSLVQASTGPRRSGAAG

SEQ ID NO: 86273 - protein, 23 aa, Artificial Sequence
  Description of Artificial Sequence: Synthetic peptide
  Seed: GMDPRMCSLMQGSTLPRRSGAAG
GMDPRMFSLVQASTHPRRSGAAG

SEQ ID NO: 86274 - protein, 23 aa, Artificial Sequence
  Description of Artificial Sequence: Synthetic peptide
  Seed: GMDPRMCSLMQGSTLPRRSGAAG
GMDPRMFSLVQASTIPRRSGAAG

SEQ ID NO: 86275 - protein, 23 aa, Artificial Sequence
  Description of Artificial Sequence: Synthetic peptide
  Seed: GMDPRMCSLMQGSTLPRRSGAAG
GMDPRMFSLVQASTLPRRSGAAG

SEQ ID NO: 86276 - protein, 23 aa, Artificial Sequence
  Description of Artificial Sequence: Synthetic peptide
  Seed: GMDPRMCSLMQGSTLPRRSGAAG
GMDPRMFSLVQASTMPRRSGAAG

SEQ ID NO: 86277 - protein, 23 aa, Artificial Sequence
  Description of Artificial Sequence: Synthetic peptide
  Seed: GMDPRMCSLMQGSTLPRRSGAAG
GMDPRMFSLVQASTNPRRSGAAG

SEQ ID NO: 86278 - protein, 23 aa, Artificial Sequence
  Description of Artificial Sequence: Synthetic peptide
  Seed: GMDPRMCSLMQGSTLPRRSGAAG
GMDPRMFSLVQASTQPRRSGAAG

SEQ ID NO: 86279 - protein, 23 aa, Artificial Sequence
  Description of Artificial Sequence: Synthetic peptide
  Seed: GMDPRMCSLMQGSTLPRRSGAAG
GMDPRMFSLVQASTSPRRSGAAG

SEQ ID NO: 86280 - protein, 23 aa, Artificial Sequence
  Description of Artificial Sequence: Synthetic peptide
  Seed: GMDPRMCSLMQGSTLPRRSGAAG
GMDPRMFSLVQASTTPRRSGAAG

SEQ ID NO: 86281 - protein, 23 aa, Artificial Sequence
  Description of Artificial Sequence: Synthetic peptide
  Seed: GMDPRMCSLMQGSTLPRRSGAAG
GMDPRMFSLVQASTVPRRSGAAG

SEQ ID NO: 86282 - protein, 23 aa, Artificial Sequence
  Description of Artificial Sequence: Synthetic peptide
  Seed: GMDPRMCSLMQGSTLPRRSGAAG
GMDPRMFSLVQGSTAPRRSGAAG

SEQ ID NO: 86283 - protein, 23 aa, Artificial Sequence
  Description of Artificial Sequence: Synthetic peptide
  Seed: GMDPRMCSLMQGSTLPRRSGAAG
GMDPRMFSLVQGSTIPRRSGAAG

SEQ ID NO: 86284 - protein, 23 aa, Artificial Sequence
  Description of Artificial Sequence: Synthetic peptide
  Seed: GMDPRMCSLMQGSTLPRRSGAAG
GMDPRMFSLVQGSTLPRRSGAAG

SEQ ID NO: 86285 - protein, 23 aa, Artificial Sequence
  Description of Artificial Sequence: Synthetic peptide
  Seed: GMDPRMCSLMQGSTLPRRSGAAG
GMDPRMFSLVQGSTMPRRSGAAG

SEQ ID NO: 86286 - protein, 23 aa, Artificial Sequence
  Description of Artificial Sequence: Synthetic peptide
  Seed: GMDPRMCSLMQGSTLPRRSGAAG
GMDPRMFSLVQGSTNPRRSGAAG

SEQ ID NO: 86287 - protein, 23 aa, Artificial Sequence
  Description of Artificial Sequence: Synthetic peptide
  Seed: GMDPRMCSLMQGSTLPRRSGAAG
GMDPRMFSLVQGSTSPRRSGAAG

SEQ ID NO: 86288 - protein, 23 aa, Artificial Sequence
  Description of Artificial Sequence: Synthetic peptide
  Seed: GMDPRMCSLMQGSTLPRRSGAAG
GMDPRMFSLVQGSTTPRRSGAAG

SEQ ID NO: 86289 - protein, 23 aa, Artificial Sequence
  Description of Artificial Sequence: Synthetic peptide
  Seed: GMDPRMCSLMQGSTLPRRSGAAG
GMDPRMFSLVQGSTVPRRSGAAG

SEQ ID NO: 86290 - protein, 23 aa, Artificial Sequence
  Description of Artificial Sequence: Synthetic peptide
  Seed: GMDPRMCSLMQGSTLPRRSGAAG
GMDPRMFSLVQISTAPRRSGAAG

SEQ ID NO: 86291 - protein, 23 aa, Artificial Sequence
  Description of Artificial Sequence: Synthetic peptide
  Seed: GMDPRMCSLMQGSTLPRRSGAAG
GMDPRMFSLVQISTNPRRSGAAG

SEQ ID NO: 86292 - protein, 23 aa, Artificial Sequence
  Description of Artificial Sequence: Synthetic peptide
  Seed: GMDPRMCSLMQGSTLPRRSGAAG
GMDPRMFSLVQISTSPRRSGAAG

SEQ ID NO: 86293 - protein, 23 aa, Artificial Sequence
  Description of Artificial Sequence: Synthetic peptide
  Seed: GMDPRMCSLMQGSTLPRRSGAAG
GMDPRMFSLVQNSTAPRRSGAAG

SEQ ID NO: 86294 - protein, 23 aa, Artificial Sequence
  Description of Artificial Sequence: Synthetic peptide
  Seed: GMDPRMCSLMQGSTLPRRSGAAG
GMDPRMFSLVQNSTIPRRSGAAG

SEQ ID NO: 86295 - protein, 23 aa, Artificial Sequence
  Description of Artificial Sequence: Synthetic peptide
  Seed: GMDPRMCSLMQGSTLPRRSGAAG
GMDPRMFSLVQNSTLPRRSGAAG

SEQ ID NO: 86296 - protein, 23 aa, Artificial Sequence
  Description of Artificial Sequence: Synthetic peptide
  Seed: GMDPRMCSLMQGSTLPRRSGAAG
GMDPRMFSLVQNSTSPRRSGAAG

SEQ ID NO: 86297 - protein, 23 aa, Artificial Sequence
  Description of Artificial Sequence: Synthetic peptide
  Seed: GMDPRMCSLMQGSTLPRRSGAAG
GMDPRMFSLVQNSTVPRRSGAAG

SEQ ID NO: 86298 - protein, 23 aa, Artificial Sequence
  Description of Artificial Sequence: Synthetic peptide
  Seed: GMDPRMCSLMQGSTLPRRSGAAG
GMDPRMFSLVQPSTAPRRSGAAG

SEQ ID NO: 86299 - protein, 23 aa, Artificial Sequence
  Description of Artificial Sequence: Synthetic peptide
  Seed: GMDPRMCSLMQGSTLPRRSGAAG
GMDPRMFSLVQPSTGPRRSGAAG

SEQ ID NO: 86300 - protein, 23 aa, Artificial Sequence
  Description of Artificial Sequence: Synthetic peptide
  Seed: GMDPRMCSLMQGSTLPRRSGAAG
GMDPRMFSLVQPSTIPRRSGAAG

SEQ ID NO: 86301 - protein, 23 aa, Artificial Sequence
  Description of Artificial Sequence: Synthetic peptide
  Seed: GMDPRMCSLMQGSTLPRRSGAAG
GMDPRMFSLVQPSTLPRRSGAAG

SEQ ID NO: 86302 - protein, 23 aa, Artificial Sequence
  Description of Artificial Sequence: Synthetic peptide
  Seed: GMDPRMCSLMQGSTLPRRSGAAG
GMDPRMFSLVQPSTMPRRSGAAG

SEQ ID NO: 86303 - protein, 23 aa, Artificial Sequence
  Description of Artificial Sequence: Synthetic peptide
  Seed: GMDPRMCSLMQGSTLPRRSGAAG
GMDPRMFSLVQPSTNPRRSGAAG

SEQ ID NO: 86304 - protein, 23 aa, Artificial Sequence
  Description of Artificial Sequence: Synthetic peptide
  Seed: GMDPRMCSLMQGSTLPRRSGAAG
GMDPRMFSLVQPSTSPRRSGAAG

SEQ ID NO: 86305 - protein, 23 aa, Artificial Sequence
  Description of Artificial Sequence: Synthetic peptide
  Seed: GMDPRMCSLMQGSTLPRRSGAAG
GMDPRMFSLVQPSTTPRRSGAAG

SEQ ID NO: 86306 - protein, 23 aa, Artificial Sequence
  Description of Artificial Sequence: Synthetic peptide
  Seed: GMDPRMCSLMQGSTLPRRSGAAG
GMDPRMFSLVQPSTVPRRSGAAG

SEQ ID NO: 86307 - protein, 23 aa, Artificial Sequence
  Description of Artificial Sequence: Synthetic peptide
  Seed: GMDPRMCSLMQGSTLPRRSGAAG
GMDPRMFSLVQSSTAPRRSGAAG

SEQ ID NO: 86308 - protein, 23 aa, Artificial Sequence
  Description of Artificial Sequence: Synthetic peptide
  Seed: GMDPRMCSLMQGSTLPRRSGAAG
GMDPRMFSLVQSSTGPRRSGAAG

SEQ ID NO: 86309 - protein, 23 aa, Artificial Sequence
  Description of Artificial Sequence: Synthetic peptide
  Seed: GMDPRMCSLMQGSTLPRRSGAAG
GMDPRMFSLVQSSTIPRRSGAAG

SEQ ID NO: 86310 - protein, 23 aa, Artificial Sequence
  Description of Artificial Sequence: Synthetic peptide
  Seed: GMDPRMCSLMQGSTLPRRSGAAG
GMDPRMFSLVQSSTLPRRSGAAG

SEQ ID NO: 86311 - protein, 23 aa, Artificial Sequence
  Description of Artificial Sequence: Synthetic peptide
  Seed: GMDPRMCSLMQGSTLPRRSGAAG
GMDPRMFSLVQSSTMPRRSGAAG

SEQ ID NO: 86312 - protein, 23 aa, Artificial Sequence
  Description of Artificial Sequence: Synthetic peptide
  Seed: GMDPRMCSLMQGSTLPRRSGAAG
GMDPRMFSLVQSSTNPRRSGAAG

SEQ ID NO: 86313 - protein, 23 aa, Artificial Sequence
  Description of Artificial Sequence: Synthetic peptide
  Seed: GMDPRMCSLMQGSTLPRRSGAAG
GMDPRMFSLVQSSTSPRRSGAAG

SEQ ID NO: 86314 - protein, 23 aa, Artificial Sequence
  Description of Artificial Sequence: Synthetic peptide
  Seed: GMDPRMCSLMQGSTLPRRSGAAG
GMDPRMFSLVQSSTTPRRSGAAG

SEQ ID NO: 86315 - protein, 23 aa, Artificial Sequence
  Description of Artificial Sequence: Synthetic peptide
  Seed: GMDPRMCSLMQGSTLPRRSGAAG
GMDPRMFSLVQSSTVPRRSGAAG

SEQ ID NO: 86316 - protein, 23 aa, Artificial Sequence
  Description of Artificial Sequence: Synthetic peptide
  Seed: GMDPRMCSLMQGSTLPRRSGAAG
GMDPRMFSLVQTSTAPRRSGAAG

SEQ ID NO: 86317 - protein, 23 aa, Artificial Sequence
  Description of Artificial Sequence: Synthetic peptide
  Seed: GMDPRMCSLMQGSTLPRRSGAAG
GMDPRMFSLVQTSTIPRRSGAAG

SEQ ID NO: 86318 - protein, 23 aa, Artificial Sequence
  Description of Artificial Sequence: Synthetic peptide
  Seed: GMDPRMCSLMQGSTLPRRSGAAG
GMDPRMFSLVQTSTLPRRSGAAG

SEQ ID NO: 86319 - protein, 23 aa, Artificial Sequence
  Description of Artificial Sequence: Synthetic peptide
  Seed: GMDPRMCSLMQGSTLPRRSGAAG
GMDPRMFSLVQTSTMPRRSGAAG

SEQ ID NO: 86320 - protein, 23 aa, Artificial Sequence
  Description of Artificial Sequence: Synthetic peptide
  Seed: GMDPRMCSLMQGSTLPRRSGAAG
GMDPRMFSLVQTSTNPRRSGAAG

SEQ ID NO: 86321 - protein, 23 aa, Artificial Sequence
  Description of Artificial Sequence: Synthetic peptide
  Seed: GMDPRMCSLMQGSTLPRRSGAAG
GMDPRMFSLVQTSTSPRRSGAAG

SEQ ID NO: 86322 - protein, 23 aa, Artificial Sequence
  Description of Artificial Sequence: Synthetic peptide
  Seed: GMDPRMCSLMQGSTLPRRSGAAG
GMDPRMFSLVQTSTTPRRSGAAG

SEQ ID NO: 86323 - protein, 23 aa, Artificial Sequence
  Description of Artificial Sequence: Synthetic peptide
  Seed: GMDPRMCSLMQGSTLPRRSGAAG
GMDPRMFSLVQTSTVPRRSGAAG

SEQ ID NO: 86324 - protein, 23 aa, Artificial Sequence
  Description of Artificial Sequence: Synthetic peptide
  Seed: GMDPRMCSLMQGSTLPRRSGAAG
GMDPRMFSLVQVSTAPRRSGAAG

SEQ ID NO: 86325 - protein, 23 aa, Artificial Sequence
  Description of Artificial Sequence: Synthetic peptide
  Seed: GMDPRMCSLMQGSTLPRRSGAAG
GMDPRMFSLVQVSTNPRRSGAAG

SEQ ID NO: 86326 - protein, 23 aa, Artificial Sequence
  Description of Artificial Sequence: Synthetic peptide
  Seed: GMDPRMCSLMQGSTLPRRSGAAG
GMDPRMFSLVQVSTSPRRSGAAG

SEQ ID NO: 86327 - protein, 23 aa, Artificial Sequence
  Description of Artificial Sequence: Synthetic peptide
  Seed: GMDPRMCSLMQGSTLPRRSGAAG
GMDPRMFSLVQVSTTPRRSGAAG

SEQ ID NO: 86328 - protein, 23 aa, Artificial Sequence
  Description of Artificial Sequence: Synthetic peptide
  Seed: GMDPRMCSLMQGSTLPRRSGAAG
GMDPRMFSLVQVSTVPRRSGAAG

SEQ ID NO: 86329 - protein, 23 aa, Artificial Sequence
  Description of Artificial Sequence: Synthetic peptide
  Seed: GMDPRMCSLMQGSTLPRRSGAAG
GMDPRMISLAQASTAPRRSGAAG

SEQ ID NO: 86330 - protein, 23 aa, Artificial Sequence
  Description of Artificial Sequence: Synthetic peptide
  Seed: GMDPRMCSLMQGSTLPRRSGAAG
GMDPRMISLAQASTIPRRSGAAG

SEQ ID NO: 86331 - protein, 23 aa, Artificial Sequence
  Description of Artificial Sequence: Synthetic peptide
  Seed: GMDPRMCSLMQGSTLPRRSGAAG
GMDPRMISLAQASTLPRRSGAAG

SEQ ID NO: 86332 - protein, 23 aa, Artificial Sequence
  Description of Artificial Sequence: Synthetic peptide
  Seed: GMDPRMCSLMQGSTLPRRSGAAG
GMDPRMISLAQASTVPRRSGAAG

SEQ ID NO: 86333 - protein, 23 aa, Artificial Sequence
  Description of Artificial Sequence: Synthetic peptide
  Seed: GMDPRMCSLMQGSTLPRRSGAAG
GMDPRMISLAQGSTIPRRSGAAG

SEQ ID NO: 86334 - protein, 23 aa, Artificial Sequence
  Description of Artificial Sequence: Synthetic peptide
  Seed: GMDPRMCSLMQGSTLPRRSGAAG
GMDPRMISLAQGSTLPRRSGAAG

SEQ ID NO: 86335 - protein, 23 aa, Artificial Sequence
  Description of Artificial Sequence: Synthetic peptide
  Seed: GMDPRMCSLMQGSTLPRRSGAAG
GMDPRMISLAQGSTVPRRSGAAG

SEQ ID NO: 86336 - protein, 23 aa, Artificial Sequence
  Description of Artificial Sequence: Synthetic peptide
  Seed: GMDPRMCSLMQGSTLPRRSGAAG
GMDPRMISLIQASTAPRRSGAAG

SEQ ID NO: 86337 - protein, 23 aa, Artificial Sequence
  Description of Artificial Sequence: Synthetic peptide
  Seed: GMDPRMCSLMQGSTLPRRSGAAG
GMDPRMISLIQASTIPRRSGAAG

SEQ ID NO: 86338 - protein, 23 aa, Artificial Sequence
  Description of Artificial Sequence: Synthetic peptide
  Seed: GMDPRMCSLMQGSTLPRRSGAAG
GMDPRMISLIQASTLPRRSGAAG

SEQ ID NO: 86339 - protein, 23 aa, Artificial Sequence
  Description of Artificial Sequence: Synthetic peptide
  Seed: GMDPRMCSLMQGSTLPRRSGAAG
GMDPRMISLIQASTNPRRSGAAG

SEQ ID NO: 86340 - protein, 23 aa, Artificial Sequence
  Description of Artificial Sequence: Synthetic peptide
  Seed: GMDPRMCSLMQGSTLPRRSGAAG
GMDPRMISLIQASTSPRRSGAAG

SEQ ID NO: 86341 - protein, 23 aa, Artificial Sequence
  Description of Artificial Sequence: Synthetic peptide
  Seed: GMDPRMCSLMQGSTLPRRSGAAG
GMDPRMISLIQASTVPRRSGAAG

SEQ ID NO: 86342 - protein, 23 aa, Artificial Sequence
  Description of Artificial Sequence: Synthetic peptide
  Seed: GMDPRMCSLMQGSTLPRRSGAAG
GMDPRMISLIQGSTAPRRSGAAG

SEQ ID NO: 86343 - protein, 23 aa, Artificial Sequence
  Description of Artificial Sequence: Synthetic peptide
  Seed: GMDPRMCSLMQGSTLPRRSGAAG
GMDPRMISLIQGSTIPRRSGAAG

SEQ ID NO: 86344 - protein, 23 aa, Artificial Sequence
  Description of Artificial Sequence: Synthetic peptide
  Seed: GMDPRMCSLMQGSTLPRRSGAAG
GMDPRMISLIQGSTLPRRSGAAG

SEQ ID NO: 86345 - protein, 23 aa, Artificial Sequence
  Description of Artificial Sequence: Synthetic peptide
  Seed: GMDPRMCSLMQGSTLPRRSGAAG
GMDPRMISLIQGSTVPRRSGAAG

SEQ ID NO: 86346 - protein, 23 aa, Artificial Sequence
  Description of Artificial Sequence: Synthetic peptide
  Seed: GMDPRMCSLMQGSTLPRRSGAAG
GMDPRMISLIQPSTAPRRSGAAG

SEQ ID NO: 86347 - protein, 23 aa, Artificial Sequence
  Description of Artificial Sequence: Synthetic peptide
  Seed: GMDPRMCSLMQGSTLPRRSGAAG
GMDPRMISLIQPSTVPRRSGAAG

SEQ ID NO: 86348 - protein, 23 aa, Artificial Sequence
  Description of Artificial Sequence: Synthetic peptide
  Seed: GMDPRMCSLMQGSTLPRRSGAAG
GMDPRMISLIQSSTAPRRSGAAG

SEQ ID NO: 86349 - protein, 23 aa, Artificial Sequence
  Description of Artificial Sequence: Synthetic peptide
  Seed: GMDPRMCSLMQGSTLPRRSGAAG
GMDPRMISLIQSSTIPRRSGAAG

SEQ ID NO: 86350 - protein, 23 aa, Artificial Sequence
  Description of Artificial Sequence: Synthetic peptide
  Seed: GMDPRMCSLMQGSTLPRRSGAAG
GMDPRMISLIQSSTLPRRSGAAG

SEQ ID NO: 86351 - protein, 23 aa, Artificial Sequence
  Description of Artificial Sequence: Synthetic peptide
  Seed: GMDPRMCSLMQGSTLPRRSGAAG
GMDPRMISLIQSSTVPRRSGAAG

SEQ ID NO: 86352 - protein, 23 aa, Artificial Sequence
  Description of Artificial Sequence: Synthetic peptide
  Seed: GMDPRMCSLMQGSTLPRRSGAAG
GMDPRMISLLQASTAPRRSGAAG

SEQ ID NO: 86353 - protein, 23 aa, Artificial Sequence
  Description of Artificial Sequence: Synthetic peptide
  Seed: GMDPRMCSLMQGSTLPRRSGAAG
GMDPRMISLLQASTGPRRSGAAG

SEQ ID NO: 86354 - protein, 23 aa, Artificial Sequence
  Description of Artificial Sequence: Synthetic peptide
  Seed: GMDPRMCSLMQGSTLPRRSGAAG
GMDPRMISLLQASTIPRRSGAAG

SEQ ID NO: 86355 - protein, 23 aa, Artificial Sequence
  Description of Artificial Sequence: Synthetic peptide
  Seed: GMDPRMCSLMQGSTLPRRSGAAG
GMDPRMISLLQASTLPRRSGAAG

SEQ ID NO: 86356 - protein, 23 aa, Artificial Sequence
  Description of Artificial Sequence: Synthetic peptide
  Seed: GMDPRMCSLMQGSTLPRRSGAAG
GMDPRMISLLQASTMPRRSGAAG

SEQ ID NO: 86357 - protein, 23 aa, Artificial Sequence
  Description of Artificial Sequence: Synthetic peptide
  Seed: GMDPRMCSLMQGSTLPRRSGAAG
GMDPRMISLLQASTNPRRSGAAG

SEQ ID NO: 86358 - protein, 23 aa, Artificial Sequence
  Description of Artificial Sequence: Synthetic peptide
  Seed: GMDPRMCSLMQGSTLPRRSGAAG
GMDPRMISLLQASTSPRRSGAAG

SEQ ID NO: 86359 - protein, 23 aa, Artificial Sequence
  Description of Artificial Sequence: Synthetic peptide
  Seed: GMDPRMCSLMQGSTLPRRSGAAG
GMDPRMISLLQASTTPRRSGAAG

SEQ ID NO: 86360 - protein, 23 aa, Artificial Sequence
  Description of Artificial Sequence: Synthetic peptide
  Seed: GMDPRMCSLMQGSTLPRRSGAAG
GMDPRMISLLQASTVPRRSGAAG

SEQ ID NO: 86361 - protein, 23 aa, Artificial Sequence
  Description of Artificial Sequence: Synthetic peptide
  Seed: GMDPRMCSLMQGSTLPRRSGAAG
GMDPRMISLLQGSTAPRRSGAAG

SEQ ID NO: 86362 - protein, 23 aa, Artificial Sequence
  Description of Artificial Sequence: Synthetic peptide
  Seed: GMDPRMCSLMQGSTLPRRSGAAG
GMDPRMISLLQGSTIPRRSGAAG

SEQ ID NO: 86363 - protein, 23 aa, Artificial Sequence
  Description of Artificial Sequence: Synthetic peptide
  Seed: GMDPRMCSLMQGSTLPRRSGAAG
GMDPRMISLLQGSTLPRRSGAAG

SEQ ID NO: 86364 - protein, 23 aa, Artificial Sequence
  Description of Artificial Sequence: Synthetic peptide
  Seed: GMDPRMCSLMQGSTLPRRSGAAG
GMDPRMISLLQGSTMPRRSGAAG

SEQ ID NO: 86365 - protein, 23 aa, Artificial Sequence
  Description of Artificial Sequence: Synthetic peptide
  Seed: GMDPRMCSLMQGSTLPRRSGAAG
GMDPRMISLLQGSTSPRRSGAAG

SEQ ID NO: 86366 - protein, 23 aa, Artificial Sequence
  Description of Artificial Sequence: Synthetic peptide
  Seed: GMDPRMCSLMQGSTLPRRSGAAG
GMDPRMISLLQGSTTPRRSGAAG

SEQ ID NO: 86367 - protein, 23 aa, Artificial Sequence
  Description of Artificial Sequence: Synthetic peptide
  Seed: GMDPRMCSLMQGSTLPRRSGAAG
GMDPRMISLLQGSTVPRRSGAAG

SEQ ID NO: 86368 - protein, 23 aa, Artificial Sequence
  Description of Artificial Sequence: Synthetic peptide
  Seed: GMDPRMCSLMQGSTLPRRSGAAG
GMDPRMISLLQNSTIPRRSGAAG

SEQ ID NO: 86369 - protein, 23 aa, Artificial Sequence
  Description of Artificial Sequence: Synthetic peptide
  Seed: GMDPRMCSLMQGSTLPRRSGAAG
GMDPRMISLLQNSTLPRRSGAAG

SEQ ID NO: 86370 - protein, 23 aa, Artificial Sequence
  Description of Artificial Sequence: Synthetic peptide
  Seed: GMDPRMCSLMQGSTLPRRSGAAG
GMDPRMISLLQNSTVPRRSGAAG

SEQ ID NO: 86371 - protein, 23 aa, Artificial Sequence
  Description of Artificial Sequence: Synthetic peptide
  Seed: GMDPRMCSLMQGSTLPRRSGAAG
GMDPRMISLLQPSTAPRRSGAAG

SEQ ID NO: 86372 - protein, 23 aa, Artificial Sequence
  Description of Artificial Sequence: Synthetic peptide
  Seed: GMDPRMCSLMQGSTLPRRSGAAG
GMDPRMISLLQPSTIPRRSGAAG

SEQ ID NO: 86373 - protein, 23 aa, Artificial Sequence
  Description of Artificial Sequence: Synthetic peptide
  Seed: GMDPRMCSLMQGSTLPRRSGAAG
GMDPRMISLLQPSTLPRRSGAAG

SEQ ID NO: 86374 - protein, 23 aa, Artificial Sequence
  Description of Artificial Sequence: Synthetic peptide
  Seed: GMDPRMCSLMQGSTLPRRSGAAG
GMDPRMISLLQPSTMPRRSGAAG

SEQ ID NO: 86375 - protein, 23 aa, Artificial Sequence
  Description of Artificial Sequence: Synthetic peptide
  Seed: GMDPRMCSLMQGSTLPRRSGAAG
GMDPRMISLLQPSTNPRRSGAAG

SEQ ID NO: 86376 - protein, 23 aa, Artificial Sequence
  Description of Artificial Sequence: Synthetic peptide
  Seed: GMDPRMCSLMQGSTLPRRSGAAG
GMDPRMISLLQPSTSPRRSGAAG

SEQ ID NO: 86377 - protein, 23 aa, Artificial Sequence
  Description of Artificial Sequence: Synthetic peptide
  Seed: GMDPRMCSLMQGSTLPRRSGAAG
GMDPRMISLLQPSTTPRRSGAAG

SEQ ID NO: 86378 - protein, 23 aa, Artificial Sequence
  Description of Artificial Sequence: Synthetic peptide
  Seed: GMDPRMCSLMQGSTLPRRSGAAG
GMDPRMISLLQPSTVPRRSGAAG

SEQ ID NO: 86379 - protein, 23 aa, Artificial Sequence
  Description of Artificial Sequence: Synthetic peptide
  Seed: GMDPRMCSLMQGSTLPRRSGAAG
GMDPRMISLLQSSTAPRRSGAAG

SEQ ID NO: 86380 - protein, 23 aa, Artificial Sequence
  Description of Artificial Sequence: Synthetic peptide
  Seed: GMDPRMCSLMQGSTLPRRSGAAG
GMDPRMISLLQSSTIPRRSGAAG

SEQ ID NO: 86381 - protein, 23 aa, Artificial Sequence
  Description of Artificial Sequence: Synthetic peptide
  Seed: GMDPRMCSLMQGSTLPRRSGAAG
GMDPRMISLLQSSTLPRRSGAAG

SEQ ID NO: 86382 - protein, 23 aa, Artificial Sequence
  Description of Artificial Sequence: Synthetic peptide
  Seed: GMDPRMCSLMQGSTLPRRSGAAG
GMDPRMISLLQSSTMPRRSGAAG

SEQ ID NO: 86383 - protein, 23 aa, Artificial Sequence
  Description of Artificial Sequence: Synthetic peptide
  Seed: GMDPRMCSLMQGSTLPRRSGAAG
GMDPRMISLLQSSTNPRRSGAAG

SEQ ID NO: 86384 - protein, 23 aa, Artificial Sequence
  Description of Artificial Sequence: Synthetic peptide
  Seed: GMDPRMCSLMQGSTLPRRSGAAG
GMDPRMISLLQSSTSPRRSGAAG

SEQ ID NO: 86385 - protein, 23 aa, Artificial Sequence
  Description of Artificial Sequence: Synthetic peptide
  Seed: GMDPRMCSLMQGSTLPRRSGAAG
GMDPRMISLLQSSTTPRRSGAAG

SEQ ID NO: 86386 - protein, 23 aa, Artificial Sequence
  Description of Artificial Sequence: Synthetic peptide
  Seed: GMDPRMCSLMQGSTLPRRSGAAG
GMDPRMISLLQSSTVPRRSGAAG

SEQ ID NO: 86387 - protein, 23 aa, Artificial Sequence
  Description of Artificial Sequence: Synthetic peptide
  Seed: GMDPRMCSLMQGSTLPRRSGAAG
GMDPRMISLLQTSTAPRRSGAAG

SEQ ID NO: 86388 - protein, 23 aa, Artificial Sequence
  Description of Artificial Sequence: Synthetic peptide
  Seed: GMDPRMCSLMQGSTLPRRSGAAG
GMDPRMISLLQTSTIPRRSGAAG

SEQ ID NO: 86389 - protein, 23 aa, Artificial Sequence
  Description of Artificial Sequence: Synthetic peptide
  Seed: GMDPRMCSLMQGSTLPRRSGAAG
GMDPRMISLLQTSTLPRRSGAAG

SEQ ID NO: 86390 - protein, 23 aa, Artificial Sequence
  Description of Artificial Sequence: Synthetic peptide
  Seed: GMDPRMCSLMQGSTLPRRSGAAG
GMDPRMISLLQTSTNPRRSGAAG

SEQ ID NO: 86391 - protein, 23 aa, Artificial Sequence
  Description of Artificial Sequence: Synthetic peptide
  Seed: GMDPRMCSLMQGSTLPRRSGAAG
GMDPRMISLLQTSTSPRRSGAAG

SEQ ID NO: 86392 - protein, 23 aa, Artificial Sequence
  Description of Artificial Sequence: Synthetic peptide
  Seed: GMDPRMCSLMQGSTLPRRSGAAG
GMDPRMISLLQTSTVPRRSGAAG

SEQ ID NO: 86393 - protein, 23 aa, Artificial Sequence
  Description of Artificial Sequence: Synthetic peptide
  Seed: GMDPRMCSLMQGSTLPRRSGAAG
GMDPRMISLLQVSTAPRRSGAAG

SEQ ID NO: 86394 - protein, 23 aa, Artificial Sequence
  Description of Artificial Sequence: Synthetic peptide
  Seed: GMDPRMCSLMQGSTLPRRSGAAG
GMDPRMISLLQVSTNPRRSGAAG

SEQ ID NO: 86395 - protein, 23 aa, Artificial Sequence
  Description of Artificial Sequence: Synthetic peptide
  Seed: GMDPRMCSLMQGSTLPRRSGAAG
GMDPRMISLLQVSTSPRRSGAAG

SEQ ID NO: 86396 - protein, 23 aa, Artificial Sequence
  Description of Artificial Sequence: Synthetic peptide
  Seed: GMDPRMCSLMQGSTLPRRSGAAG
GMDPRMISLMQASTAPRRSGAAG

SEQ ID NO: 86397 - protein, 23 aa, Artificial Sequence
  Description of Artificial Sequence: Synthetic peptide
  Seed: GMDPRMCSLMQGSTLPRRSGAAG
GMDPRMISLMQASTGPRRSGAAG

SEQ ID NO: 86398 - protein, 23 aa, Artificial Sequence
  Description of Artificial Sequence: Synthetic peptide
  Seed: GMDPRMCSLMQGSTLPRRSGAAG
GMDPRMISLMQASTIPRRSGAAG

SEQ ID NO: 86399 - protein, 23 aa, Artificial Sequence
  Description of Artificial Sequence: Synthetic peptide
  Seed: GMDPRMCSLMQGSTLPRRSGAAG
GMDPRMISLMQASTLPRRSGAAG

SEQ ID NO: 86400 - protein, 23 aa, Artificial Sequence
  Description of Artificial Sequence: Synthetic peptide
  Seed: GMDPRMCSLMQGSTLPRRSGAAG
GMDPRMISLMQASTMPRRSGAAG

SEQ ID NO: 86401 - protein, 23 aa, Artificial Sequence
  Description of Artificial Sequence: Synthetic peptide
  Seed: GMDPRMCSLMQGSTLPRRSGAAG
GMDPRMISLMQASTNPRRSGAAG

SEQ ID NO: 86402 - protein, 23 aa, Artificial Sequence
  Description of Artificial Sequence: Synthetic peptide
  Seed: GMDPRMCSLMQGSTLPRRSGAAG
GMDPRMISLMQASTSPRRSGAAG

SEQ ID NO: 86403 - protein, 23 aa, Artificial Sequence
  Description of Artificial Sequence: Synthetic peptide
  Seed: GMDPRMCSLMQGSTLPRRSGAAG
GMDPRMISLMQASTTPRRSGAAG

SEQ ID NO: 86404 - protein, 23 aa, Artificial Sequence
  Description of Artificial Sequence: Synthetic peptide
  Seed: GMDPRMCSLMQGSTLPRRSGAAG
GMDPRMISLMQASTVPRRSGAAG

SEQ ID NO: 86405 - protein, 23 aa, Artificial Sequence
  Description of Artificial Sequence: Synthetic peptide
  Seed: GMDPRMCSLMQGSTLPRRSGAAG
GMDPRMISLMQGSTAPRRSGAAG

SEQ ID NO: 86406 - protein, 23 aa, Artificial Sequence
  Description of Artificial Sequence: Synthetic peptide
  Seed: GMDPRMCSLMQGSTLPRRSGAAG
GMDPRMISLMQGSTIPRRSGAAG

SEQ ID NO: 86407 - protein, 23 aa, Artificial Sequence
  Description of Artificial Sequence: Synthetic peptide
  Seed: GMDPRMCSLMQGSTLPRRSGAAG
GMDPRMISLMQGSTLPRRSGAAG

SEQ ID NO: 86408 - protein, 23 aa, Artificial Sequence
  Description of Artificial Sequence: Synthetic peptide
  Seed: GMDPRMCSLMQGSTLPRRSGAAG
GMDPRMISLMQGSTMPRRSGAAG

SEQ ID NO: 86409 - protein, 23 aa, Artificial Sequence
  Description of Artificial Sequence: Synthetic peptide
  Seed: GMDPRMCSLMQGSTLPRRSGAAG
GMDPRMISLMQGSTSPRRSGAAG

SEQ ID NO: 86410 - protein, 23 aa, Artificial Sequence
  Description of Artificial Sequence: Synthetic peptide
  Seed: GMDPRMCSLMQGSTLPRRSGAAG
GMDPRMISLMQGSTTPRRSGAAG

SEQ ID NO: 86411 - protein, 23 aa, Artificial Sequence
  Description of Artificial Sequence: Synthetic peptide
  Seed: GMDPRMCSLMQGSTLPRRSGAAG
GMDPRMISLMQGSTVPRRSGAAG

SEQ ID NO: 86412 - protein, 23 aa, Artificial Sequence
  Description of Artificial Sequence: Synthetic peptide
  Seed: GMDPRMCSLMQGSTLPRRSGAAG
GMDPRMISLMQISTAPRRSGAAG

SEQ ID NO: 86413 - protein, 23 aa, Artificial Sequence
  Description of Artificial Sequence: Synthetic peptide
  Seed: GMDPRMCSLMQGSTLPRRSGAAG
GMDPRMISLMQISTNPRRSGAAG

SEQ ID NO: 86414 - protein, 23 aa, Artificial Sequence
  Description of Artificial Sequence: Synthetic peptide
  Seed: GMDPRMCSLMQGSTLPRRSGAAG
GMDPRMISLMQISTSPRRSGAAG

SEQ ID NO: 86415 - protein, 23 aa, Artificial Sequence
  Description of Artificial Sequence: Synthetic peptide
  Seed: GMDPRMCSLMQGSTLPRRSGAAG
GMDPRMISLMQNSTAPRRSGAAG

SEQ ID NO: 86416 - protein, 23 aa, Artificial Sequence
  Description of Artificial Sequence: Synthetic peptide
  Seed: GMDPRMCSLMQGSTLPRRSGAAG
GMDPRMISLMQNSTIPRRSGAAG

SEQ ID NO: 86417 - protein, 23 aa, Artificial Sequence
  Description of Artificial Sequence: Synthetic peptide
  Seed: GMDPRMCSLMQGSTLPRRSGAAG
GMDPRMISLMQNSTLPRRSGAAG

SEQ ID NO: 86418 - protein, 23 aa, Artificial Sequence
  Description of Artificial Sequence: Synthetic peptide
  Seed: GMDPRMCSLMQGSTLPRRSGAAG
GMDPRMISLMQNSTVPRRSGAAG

SEQ ID NO: 86419 - protein, 23 aa, Artificial Sequence
  Description of Artificial Sequence: Synthetic peptide
  Seed: GMDPRMCSLMQGSTLPRRSGAAG
GMDPRMISLMQPSTAPRRSGAAG

SEQ ID NO: 86420 - protein, 23 aa, Artificial Sequence
  Description of Artificial Sequence: Synthetic peptide
  Seed: GMDPRMCSLMQGSTLPRRSGAAG
GMDPRMISLMQPSTIPRRSGAAG

SEQ ID NO: 86421 - protein, 23 aa, Artificial Sequence
  Description of Artificial Sequence: Synthetic peptide
  Seed: GMDPRMCSLMQGSTLPRRSGAAG
GMDPRMISLMQPSTLPRRSGAAG

SEQ ID NO: 86422 - protein, 23 aa, Artificial Sequence
  Description of Artificial Sequence: Synthetic peptide
  Seed: GMDPRMCSLMQGSTLPRRSGAAG
GMDPRMISLMQPSTMPRRSGAAG

SEQ ID NO: 86423 - protein, 23 aa, Artificial Sequence
  Description of Artificial Sequence: Synthetic peptide
  Seed: GMDPRMCSLMQGSTLPRRSGAAG
GMDPRMISLMQPSTNPRRSGAAG

SEQ ID NO: 86424 - protein, 23 aa, Artificial Sequence
  Description of Artificial Sequence: Synthetic peptide
  Seed: GMDPRMCSLMQGSTLPRRSGAAG
GMDPRMISLMQPSTSPRRSGAAG

SEQ ID NO: 86425 - protein, 23 aa, Artificial Sequence
  Description of Artificial Sequence: Synthetic peptide
  Seed: GMDPRMCSLMQGSTLPRRSGAAG
GMDPRMISLMQPSTTPRRSGAAG

SEQ ID NO: 86426 - protein, 23 aa, Artificial Sequence
  Description of Artificial Sequence: Synthetic peptide
  Seed: GMDPRMCSLMQGSTLPRRSGAAG
GMDPRMISLMQPSTVPRRSGAAG

SEQ ID NO: 86427 - protein, 23 aa, Artificial Sequence
  Description of Artificial Sequence: Synthetic peptide
  Seed: GMDPRMCSLMQGSTLPRRSGAAG
GMDPRMISLMQSSTAPRRSGAAG

SEQ ID NO: 86428 - protein, 23 aa, Artificial Sequence
  Description of Artificial Sequence: Synthetic peptide
  Seed: GMDPRMCSLMQGSTLPRRSGAAG
GMDPRMISLMQSSTIPRRSGAAG

SEQ ID NO: 86429 - protein, 23 aa, Artificial Sequence
  Description of Artificial Sequence: Synthetic peptide
  Seed: GMDPRMCSLMQGSTLPRRSGAAG
GMDPRMISLMQSSTLPRRSGAAG

SEQ ID NO: 86430 - protein, 23 aa, Artificial Sequence
  Description of Artificial Sequence: Synthetic peptide
  Seed: GMDPRMCSLMQGSTLPRRSGAAG
GMDPRMISLMQSSTMPRRSGAAG

SEQ ID NO: 86431 - protein, 23 aa, Artificial Sequence
  Description of Artificial Sequence: Synthetic peptide
  Seed: GMDPRMCSLMQGSTLPRRSGAAG
GMDPRMISLMQSSTNPRRSGAAG

SEQ ID NO: 86432 - protein, 23 aa, Artificial Sequence
  Description of Artificial Sequence: Synthetic peptide
  Seed: GMDPRMCSLMQGSTLPRRSGAAG
GMDPRMISLMQSSTSPRRSGAAG

SEQ ID NO: 86433 - protein, 23 aa, Artificial Sequence
  Description of Artificial Sequence: Synthetic peptide
  Seed: GMDPRMCSLMQGSTLPRRSGAAG
GMDPRMISLMQSSTTPRRSGAAG

SEQ ID NO: 86434 - protein, 23 aa, Artificial Sequence
  Description of Artificial Sequence: Synthetic peptide
  Seed: GMDPRMCSLMQGSTLPRRSGAAG
GMDPRMISLMQSSTVPRRSGAAG

SEQ ID NO: 86435 - protein, 23 aa, Artificial Sequence
  Description of Artificial Sequence: Synthetic peptide
  Seed: GMDPRMCSLMQGSTLPRRSGAAG
GMDPRMISLMQTSTAPRRSGAAG

SEQ ID NO: 86436 - protein, 23 aa, Artificial Sequence
  Description of Artificial Sequence: Synthetic peptide
  Seed: GMDPRMCSLMQGSTLPRRSGAAG
GMDPRMISLMQTSTIPRRSGAAG

SEQ ID NO: 86437 - protein, 23 aa, Artificial Sequence
  Description of Artificial Sequence: Synthetic peptide
  Seed: GMDPRMCSLMQGSTLPRRSGAAG
GMDPRMISLMQTSTLPRRSGAAG

SEQ ID NO: 86438 - protein, 23 aa, Artificial Sequence
  Description of Artificial Sequence: Synthetic peptide
  Seed: GMDPRMCSLMQGSTLPRRSGAAG
GMDPRMISLMQTSTNPRRSGAAG

SEQ ID NO: 86439 - protein, 23 aa, Artificial Sequence
  Description of Artificial Sequence: Synthetic peptide
  Seed: GMDPRMCSLMQGSTLPRRSGAAG
GMDPRMISLMQTSTSPRRSGAAG

SEQ ID NO: 86440 - protein, 23 aa, Artificial Sequence
  Description of Artificial Sequence: Synthetic peptide
  Seed: GMDPRMCSLMQGSTLPRRSGAAG
GMDPRMISLMQTSTVPRRSGAAG

SEQ ID NO: 86441 - protein, 23 aa, Artificial Sequence
  Description of Artificial Sequence: Synthetic peptide
  Seed: GMDPRMCSLMQGSTLPRRSGAAG
GMDPRMISLMQVSTAPRRSGAAG

SEQ ID NO: 86442 - protein, 23 aa, Artificial Sequence
  Description of Artificial Sequence: Synthetic peptide
  Seed: GMDPRMCSLMQGSTLPRRSGAAG
GMDPRMISLMQVSTNPRRSGAAG

SEQ ID NO: 86443 - protein, 23 aa, Artificial Sequence
  Description of Artificial Sequence: Synthetic peptide
  Seed: GMDPRMCSLMQGSTLPRRSGAAG
GMDPRMISLMQVSTSPRRSGAAG

SEQ ID NO: 86444 - protein, 23 aa, Artificial Sequence
  Description of Artificial Sequence: Synthetic peptide
  Seed: GMDPRMCSLMQGSTLPRRSGAAG
GMDPRMISLQQASTAPRRSGAAG

SEQ ID NO: 86445 - protein, 23 aa, Artificial Sequence
  Description of Artificial Sequence: Synthetic peptide
  Seed: GMDPRMCSLMQGSTLPRRSGAAG
GMDPRMISLQQASTIPRRSGAAG

SEQ ID NO: 86446 - protein, 23 aa, Artificial Sequence
  Description of Artificial Sequence: Synthetic peptide
  Seed: GMDPRMCSLMQGSTLPRRSGAAG
GMDPRMISLQQASTLPRRSGAAG

SEQ ID NO: 86447 - protein, 23 aa, Artificial Sequence
  Description of Artificial Sequence: Synthetic peptide
  Seed: GMDPRMCSLMQGSTLPRRSGAAG
GMDPRMISLQQASTVPRRSGAAG

SEQ ID NO: 86448 - protein, 23 aa, Artificial Sequence
  Description of Artificial Sequence: Synthetic peptide
  Seed: GMDPRMCSLMQGSTLPRRSGAAG
GMDPRMISLQQGSTLPRRSGAAG

SEQ ID NO: 86449 - protein, 23 aa, Artificial Sequence
  Description of Artificial Sequence: Synthetic peptide
  Seed: GMDPRMCSLMQGSTLPRRSGAAG
GMDPRMISLQQGSTVPRRSGAAG

SEQ ID NO: 86450 - protein, 23 aa, Artificial Sequence
  Description of Artificial Sequence: Synthetic peptide
  Seed: GMDPRMCSLMQGSTLPRRSGAAG
GMDPRMISLVQASTLPRRSGAAG

SEQ ID NO: 86451 - protein, 23 aa, Artificial Sequence
  Description of Artificial Sequence: Synthetic peptide
  Seed: GMDPRMCSLMQGSTLPRRSGAAG
GMDPRMISLVQASTVPRRSGAAG

SEQ ID NO: 86452 - protein, 23 aa, Artificial Sequence
  Description of Artificial Sequence: Synthetic peptide
  Seed: GMDPRMCSLMQGSTLPRRSGAAG
GMDPRMISLVQGSTVPRRSGAAG

SEQ ID NO: 86453 - protein, 23 aa, Artificial Sequence
  Description of Artificial Sequence: Synthetic peptide
  Seed: GMDPRMCSLMQGSTLPRRSGAAG
GMDPRMLSLAQASTIPRRSGAAG

SEQ ID NO: 86454 - protein, 23 aa, Artificial Sequence
  Description of Artificial Sequence: Synthetic peptide
  Seed: GMDPRMCSLMQGSTLPRRSGAAG
GMDPRMLSLAQASTLPRRSGAAG

SEQ ID NO: 86455 - protein, 23 aa, Artificial Sequence
  Description of Artificial Sequence: Synthetic peptide
  Seed: GMDPRMCSLMQGSTLPRRSGAAG
GMDPRMLSLAQASTVPRRSGAAG

SEQ ID NO: 86456 - protein, 23 aa, Artificial Sequence
  Description of Artificial Sequence: Synthetic peptide
  Seed: GMDPRMCSLMQGSTLPRRSGAAG
GMDPRMLSLIQASTAPRRSGAAG

SEQ ID NO: 86457 - protein, 23 aa, Artificial Sequence
  Description of Artificial Sequence: Synthetic peptide
  Seed: GMDPRMCSLMQGSTLPRRSGAAG
GMDPRMLSLIQASTIPRRSGAAG

SEQ ID NO: 86458 - protein, 23 aa, Artificial Sequence
  Description of Artificial Sequence: Synthetic peptide
  Seed: GMDPRMCSLMQGSTLPRRSGAAG
GMDPRMLSLIQASTLPRRSGAAG

SEQ ID NO: 86459 - protein, 23 aa, Artificial Sequence
  Description of Artificial Sequence: Synthetic peptide
  Seed: GMDPRMCSLMQGSTLPRRSGAAG
GMDPRMLSLIQASTNPRRSGAAG

SEQ ID NO: 86460 - protein, 23 aa, Artificial Sequence
  Description of Artificial Sequence: Synthetic peptide
  Seed: GMDPRMCSLMQGSTLPRRSGAAG
GMDPRMLSLIQASTSPRRSGAAG

SEQ ID NO: 86461 - protein, 23 aa, Artificial Sequence
  Description of Artificial Sequence: Synthetic peptide
  Seed: GMDPRMCSLMQGSTLPRRSGAAG
GMDPRMLSLIQASTVPRRSGAAG

SEQ ID NO: 86462 - protein, 23 aa, Artificial Sequence
  Description of Artificial Sequence: Synthetic peptide
  Seed: GMDPRMCSLMQGSTLPRRSGAAG
GMDPRMLSLIQGSTAPRRSGAAG

SEQ ID NO: 86463 - protein, 23 aa, Artificial Sequence
  Description of Artificial Sequence: Synthetic peptide
  Seed: GMDPRMCSLMQGSTLPRRSGAAG
GMDPRMLSLIQGSTIPRRSGAAG

SEQ ID NO: 86464 - protein, 23 aa, Artificial Sequence
  Description of Artificial Sequence: Synthetic peptide
  Seed: GMDPRMCSLMQGSTLPRRSGAAG
GMDPRMLSLIQGSTLPRRSGAAG

SEQ ID NO: 86465 - protein, 23 aa, Artificial Sequence
  Description of Artificial Sequence: Synthetic peptide
  Seed: GMDPRMCSLMQGSTLPRRSGAAG
GMDPRMLSLIQGSTVPRRSGAAG

SEQ ID NO: 86466 - protein, 23 aa, Artificial Sequence
  Description of Artificial Sequence: Synthetic peptide
  Seed: GMDPRMCSLMQGSTLPRRSGAAG
GMDPRMLSLLQASTAPRRSGAAG

SEQ ID NO: 86467 - protein, 23 aa, Artificial Sequence
  Description of Artificial Sequence: Synthetic peptide
  Seed: GMDPRMCSLMQGSTLPRRSGAAG
GMDPRMLSLLQASTIPRRSGAAG

SEQ ID NO: 86468 - protein, 23 aa, Artificial Sequence
  Description of Artificial Sequence: Synthetic peptide
  Seed: GMDPRMCSLMQGSTLPRRSGAAG
GMDPRMLSLLQASTLPRRSGAAG

SEQ ID NO: 86469 - protein, 23 aa, Artificial Sequence
  Description of Artificial Sequence: Synthetic peptide
  Seed: GMDPRMCSLMQGSTLPRRSGAAG
GMDPRMLSLLQASTMPRRSGAAG

SEQ ID NO: 86470 - protein, 23 aa, Artificial Sequence
  Description of Artificial Sequence: Synthetic peptide
  Seed: GMDPRMCSLMQGSTLPRRSGAAG
GMDPRMLSLLQASTNPRRSGAAG

SEQ ID NO: 86471 - protein, 23 aa, Artificial Sequence
  Description of Artificial Sequence: Synthetic peptide
  Seed: GMDPRMCSLMQGSTLPRRSGAAG
GMDPRMLSLLQASTSPRRSGAAG

SEQ ID NO: 86472 - protein, 23 aa, Artificial Sequence
  Description of Artificial Sequence: Synthetic peptide
  Seed: GMDPRMCSLMQGSTLPRRSGAAG
GMDPRMLSLLQASTTPRRSGAAG

SEQ ID NO: 86473 - protein, 23 aa, Artificial Sequence
  Description of Artificial Sequence: Synthetic peptide
  Seed: GMDPRMCSLMQGSTLPRRSGAAG
GMDPRMLSLLQASTVPRRSGAAG

SEQ ID NO: 86474 - protein, 23 aa, Artificial Sequence
  Description of Artificial Sequence: Synthetic peptide
  Seed: GMDPRMCSLMQGSTLPRRSGAAG
GMDPRMLSLLQGSTAPRRSGAAG

SEQ ID NO: 86475 - protein, 23 aa, Artificial Sequence
  Description of Artificial Sequence: Synthetic peptide
  Seed: GMDPRMCSLMQGSTLPRRSGAAG
GMDPRMLSLLQGSTIPRRSGAAG

SEQ ID NO: 86476 - protein, 23 aa, Artificial Sequence
  Description of Artificial Sequence: Synthetic peptide
  Seed: GMDPRMCSLMQGSTLPRRSGAAG
GMDPRMLSLLQGSTLPRRSGAAG

SEQ ID NO: 86477 - protein, 23 aa, Artificial Sequence
  Description of Artificial Sequence: Synthetic peptide
  Seed: GMDPRMCSLMQGSTLPRRSGAAG
GMDPRMLSLLQGSTMPRRSGAAG

SEQ ID NO: 86478 - protein, 23 aa, Artificial Sequence
  Description of Artificial Sequence: Synthetic peptide
  Seed: GMDPRMCSLMQGSTLPRRSGAAG
GMDPRMLSLLQGSTSPRRSGAAG

SEQ ID NO: 86479 - protein, 23 aa, Artificial Sequence
  Description of Artificial Sequence: Synthetic peptide
  Seed: GMDPRMCSLMQGSTLPRRSGAAG
GMDPRMLSLLQGSTTPRRSGAAG

SEQ ID NO: 86480 - protein, 23 aa, Artificial Sequence
  Description of Artificial Sequence: Synthetic peptide
  Seed: GMDPRMCSLMQGSTLPRRSGAAG
GMDPRMLSLLQGSTVPRRSGAAG

SEQ ID NO: 86481 - protein, 23 aa, Artificial Sequence
  Description of Artificial Sequence: Synthetic peptide
  Seed: GMDPRMCSLMQGSTLPRRSGAAG
GMDPRMLSLLQNSTVPRRSGAAG

SEQ ID NO: 86482 - protein, 23 aa, Artificial Sequence
  Description of Artificial Sequence: Synthetic peptide
  Seed: GMDPRMCSLMQGSTLPRRSGAAG
GMDPRMLSLLQPSTAPRRSGAAG

SEQ ID NO: 86483 - protein, 23 aa, Artificial Sequence
  Description of Artificial Sequence: Synthetic peptide
  Seed: GMDPRMCSLMQGSTLPRRSGAAG
GMDPRMLSLLQPSTIPRRSGAAG

SEQ ID NO: 86484 - protein, 23 aa, Artificial Sequence
  Description of Artificial Sequence: Synthetic peptide
  Seed: GMDPRMCSLMQGSTLPRRSGAAG
GMDPRMLSLLQPSTLPRRSGAAG

SEQ ID NO: 86485 - protein, 23 aa, Artificial Sequence
  Description of Artificial Sequence: Synthetic peptide
  Seed: GMDPRMCSLMQGSTLPRRSGAAG
GMDPRMLSLLQPSTNPRRSGAAG

SEQ ID NO: 86486 - protein, 23 aa, Artificial Sequence
  Description of Artificial Sequence: Synthetic peptide
  Seed: GMDPRMCSLMQGSTLPRRSGAAG
GMDPRMLSLLQPSTSPRRSGAAG

SEQ ID NO: 86487 - protein, 23 aa, Artificial Sequence
  Description of Artificial Sequence: Synthetic peptide
  Seed: GMDPRMCSLMQGSTLPRRSGAAG
GMDPRMLSLLQPSTVPRRSGAAG

SEQ ID NO: 86488 - protein, 23 aa, Artificial Sequence
  Description of Artificial Sequence: Synthetic peptide
  Seed: GMDPRMCSLMQGSTLPRRSGAAG
GMDPRMLSLLQSSTAPRRSGAAG

SEQ ID NO: 86489 - protein, 23 aa, Artificial Sequence
  Description of Artificial Sequence: Synthetic peptide
  Seed: GMDPRMCSLMQGSTLPRRSGAAG
GMDPRMLSLLQSSTIPRRSGAAG

SEQ ID NO: 86490 - protein, 23 aa, Artificial Sequence
  Description of Artificial Sequence: Synthetic peptide
  Seed: GMDPRMCSLMQGSTLPRRSGAAG
GMDPRMLSLLQSSTLPRRSGAAG

SEQ ID NO: 86491 - protein, 23 aa, Artificial Sequence
  Description of Artificial Sequence: Synthetic peptide
  Seed: GMDPRMCSLMQGSTLPRRSGAAG
GMDPRMLSLLQSSTSPRRSGAAG

SEQ ID NO: 86492 - protein, 23 aa, Artificial Sequence
  Description of Artificial Sequence: Synthetic peptide
  Seed: GMDPRMCSLMQGSTLPRRSGAAG
GMDPRMLSLLQSSTTPRRSGAAG

SEQ ID NO: 86493 - protein, 23 aa, Artificial Sequence
  Description of Artificial Sequence: Synthetic peptide
  Seed: GMDPRMCSLMQGSTLPRRSGAAG
GMDPRMLSLLQSSTVPRRSGAAG

SEQ ID NO: 86494 - protein, 23 aa, Artificial Sequence
  Description of Artificial Sequence: Synthetic peptide
  Seed: GMDPRMCSLMQGSTLPRRSGAAG
GMDPRMLSLLQTSTAPRRSGAAG

SEQ ID NO: 86495 - protein, 23 aa, Artificial Sequence
  Description of Artificial Sequence: Synthetic peptide
  Seed: GMDPRMCSLMQGSTLPRRSGAAG
GMDPRMLSLLQTSTNPRRSGAAG

SEQ ID NO: 86496 - protein, 23 aa, Artificial Sequence
  Description of Artificial Sequence: Synthetic peptide
  Seed: GMDPRMCSLMQGSTLPRRSGAAG
GMDPRMLSLLQTSTSPRRSGAAG

SEQ ID NO: 86497 - protein, 23 aa, Artificial Sequence
  Description of Artificial Sequence: Synthetic peptide
  Seed: GMDPRMCSLMQGSTLPRRSGAAG
GMDPRMLSLLQTSTVPRRSGAAG

SEQ ID NO: 86498 - protein, 23 aa, Artificial Sequence
  Description of Artificial Sequence: Synthetic peptide
  Seed: GMDPRMCSLMQGSTLPRRSGAAG
GMDPRMLSLLQVSTAPRRSGAAG

SEQ ID NO: 86499 - protein, 23 aa, Artificial Sequence
  Description of Artificial Sequence: Synthetic peptide
  Seed: GMDPRMCSLMQGSTLPRRSGAAG
GMDPRMLSLLQVSTNPRRSGAAG

SEQ ID NO: 86500 - protein, 23 aa, Artificial Sequence
  Description of Artificial Sequence: Synthetic peptide
  Seed: GMDPRMCSLMQGSTLPRRSGAAG
GMDPRMLSLLQVSTSPRRSGAAG

SEQ ID NO: 86501 - protein, 23 aa, Artificial Sequence
  Description of Artificial Sequence: Synthetic peptide
  Seed: GMDPRMCSLMQGSTLPRRSGAAG
GMDPRMLSLMQASTAPRRSGAAG

SEQ ID NO: 86502 - protein, 23 aa, Artificial Sequence
  Description of Artificial Sequence: Synthetic peptide
  Seed: GMDPRMCSLMQGSTLPRRSGAAG
GMDPRMLSLMQASTIPRRSGAAG

SEQ ID NO: 86503 - protein, 23 aa, Artificial Sequence
  Description of Artificial Sequence: Synthetic peptide
  Seed: GMDPRMCSLMQGSTLPRRSGAAG
GMDPRMLSLMQASTLPRRSGAAG

SEQ ID NO: 86504 - protein, 23 aa, Artificial Sequence
  Description of Artificial Sequence: Synthetic peptide
  Seed: GMDPRMCSLMQGSTLPRRSGAAG
GMDPRMLSLMQASTMPRRSGAAG

SEQ ID NO: 86505 - protein, 23 aa, Artificial Sequence
  Description of Artificial Sequence: Synthetic peptide
  Seed: GMDPRMCSLMQGSTLPRRSGAAG
GMDPRMLSLMQASTNPRRSGAAG

SEQ ID NO: 86506 - protein, 23 aa, Artificial Sequence
  Description of Artificial Sequence: Synthetic peptide
  Seed: GMDPRMCSLMQGSTLPRRSGAAG
GMDPRMLSLMQASTSPRRSGAAG

SEQ ID NO: 86507 - protein, 23 aa, Artificial Sequence
  Description of Artificial Sequence: Synthetic peptide
  Seed: GMDPRMCSLMQGSTLPRRSGAAG
GMDPRMLSLMQASTTPRRSGAAG

SEQ ID NO: 86508 - protein, 23 aa, Artificial Sequence
  Description of Artificial Sequence: Synthetic peptide
  Seed: GMDPRMCSLMQGSTLPRRSGAAG
GMDPRMLSLMQASTVPRRSGAAG

SEQ ID NO: 86509 - protein, 23 aa, Artificial Sequence
  Description of Artificial Sequence: Synthetic peptide
  Seed: GMDPRMCSLMQGSTLPRRSGAAG
GMDPRMLSLMQGSTAPRRSGAAG

SEQ ID NO: 86510 - protein, 23 aa, Artificial Sequence
  Description of Artificial Sequence: Synthetic peptide
  Seed: GMDPRMCSLMQGSTLPRRSGAAG
GMDPRMLSLMQGSTIPRRSGAAG

SEQ ID NO: 86511 - protein, 23 aa, Artificial Sequence
  Description of Artificial Sequence: Synthetic peptide
  Seed: GMDPRMCSLMQGSTLPRRSGAAG
GMDPRMLSLMQGSTLPRRSGAAG

SEQ ID NO: 86512 - protein, 23 aa, Artificial Sequence
  Description of Artificial Sequence: Synthetic peptide
  Seed: GMDPRMCSLMQGSTLPRRSGAAG
GMDPRMLSLMQGSTMPRRSGAAG

SEQ ID NO: 86513 - protein, 23 aa, Artificial Sequence
  Description of Artificial Sequence: Synthetic peptide
  Seed: GMDPRMCSLMQGSTLPRRSGAAG
GMDPRMLSLMQGSTSPRRSGAAG

SEQ ID NO: 86514 - protein, 23 aa, Artificial Sequence
  Description of Artificial Sequence: Synthetic peptide
  Seed: GMDPRMCSLMQGSTLPRRSGAAG
GMDPRMLSLMQGSTTPRRSGAAG

SEQ ID NO: 86515 - protein, 23 aa, Artificial Sequence
  Description of Artificial Sequence: Synthetic peptide
  Seed: GMDPRMCSLMQGSTLPRRSGAAG
GMDPRMLSLMQGSTVPRRSGAAG

SEQ ID NO: 86516 - protein, 23 aa, Artificial Sequence
  Description of Artificial Sequence: Synthetic peptide
  Seed: GMDPRMCSLMQGSTLPRRSGAAG
GMDPRMLSLMQISTAPRRSGAAG

SEQ ID NO: 86517 - protein, 23 aa, Artificial Sequence
  Description of Artificial Sequence: Synthetic peptide
  Seed: GMDPRMCSLMQGSTLPRRSGAAG
GMDPRMLSLMQISTSPRRSGAAG

SEQ ID NO: 86518 - protein, 23 aa, Artificial Sequence
  Description of Artificial Sequence: Synthetic peptide
  Seed: GMDPRMCSLMQGSTLPRRSGAAG
GMDPRMLSLMQPSTAPRRSGAAG

SEQ ID NO: 86519 - protein, 23 aa, Artificial Sequence
  Description of Artificial Sequence: Synthetic peptide
  Seed: GMDPRMCSLMQGSTLPRRSGAAG
GMDPRMLSLMQPSTIPRRSGAAG

SEQ ID NO: 86520 - protein, 23 aa, Artificial Sequence
  Description of Artificial Sequence: Synthetic peptide
  Seed: GMDPRMCSLMQGSTLPRRSGAAG
GMDPRMLSLMQPSTLPRRSGAAG

SEQ ID NO: 86521 - protein, 23 aa, Artificial Sequence
  Description of Artificial Sequence: Synthetic peptide
  Seed: GMDPRMCSLMQGSTLPRRSGAAG
GMDPRMLSLMQPSTNPRRSGAAG

SEQ ID NO: 86522 - protein, 23 aa, Artificial Sequence
  Description of Artificial Sequence: Synthetic peptide
  Seed: GMDPRMCSLMQGSTLPRRSGAAG
GMDPRMLSLMQPSTSPRRSGAAG

SEQ ID NO: 86523 - protein, 23 aa, Artificial Sequence
  Description of Artificial Sequence: Synthetic peptide
  Seed: GMDPRMCSLMQGSTLPRRSGAAG
GMDPRMLSLMQPSTVPRRSGAAG

SEQ ID NO: 86524 - protein, 23 aa, Artificial Sequence
  Description of Artificial Sequence: Synthetic peptide
  Seed: GMDPRMCSLMQGSTLPRRSGAAG
GMDPRMLSLMQSSTAPRRSGAAG

SEQ ID NO: 86525 - protein, 23 aa, Artificial Sequence
  Description of Artificial Sequence: Synthetic peptide
  Seed: GMDPRMCSLMQGSTLPRRSGAAG
GMDPRMLSLMQSSTIPRRSGAAG

SEQ ID NO: 86526 - protein, 23 aa, Artificial Sequence
  Description of Artificial Sequence: Synthetic peptide
  Seed: GMDPRMCSLMQGSTLPRRSGAAG
GMDPRMLSLMQSSTLPRRSGAAG

SEQ ID NO: 86527 - protein, 23 aa, Artificial Sequence
  Description of Artificial Sequence: Synthetic peptide
  Seed: GMDPRMCSLMQGSTLPRRSGAAG
GMDPRMLSLMQSSTNPRRSGAAG

SEQ ID NO: 86528 - protein, 23 aa, Artificial Sequence
  Description of Artificial Sequence: Synthetic peptide
  Seed: GMDPRMCSLMQGSTLPRRSGAAG
GMDPRMLSLMQSSTSPRRSGAAG

SEQ ID NO: 86529 - protein, 23 aa, Artificial Sequence
  Description of Artificial Sequence: Synthetic peptide
  Seed: GMDPRMCSLMQGSTLPRRSGAAG
GMDPRMLSLMQSSTTPRRSGAAG

SEQ ID NO: 86530 - protein, 23 aa, Artificial Sequence
  Description of Artificial Sequence: Synthetic peptide
  Seed: GMDPRMCSLMQGSTLPRRSGAAG
GMDPRMLSLMQSSTVPRRSGAAG

SEQ ID NO: 86531 - protein, 23 aa, Artificial Sequence
  Description of Artificial Sequence: Synthetic peptide
  Seed: GMDPRMCSLMQGSTLPRRSGAAG
GMDPRMLSLMQTSTAPRRSGAAG

SEQ ID NO: 86532 - protein, 23 aa, Artificial Sequence
  Description of Artificial Sequence: Synthetic peptide
  Seed: GMDPRMCSLMQGSTLPRRSGAAG
GMDPRMLSLMQTSTNPRRSGAAG

SEQ ID NO: 86533 - protein, 23 aa, Artificial Sequence
  Description of Artificial Sequence: Synthetic peptide
  Seed: GMDPRMCSLMQGSTLPRRSGAAG
GMDPRMLSLMQTSTSPRRSGAAG

SEQ ID NO: 86534 - protein, 23 aa, Artificial Sequence
  Description of Artificial Sequence: Synthetic peptide
  Seed: GMDPRMCSLMQGSTLPRRSGAAG
GMDPRMLSLMQTSTVPRRSGAAG

SEQ ID NO: 86535 - protein, 23 aa, Artificial Sequence
  Description of Artificial Sequence: Synthetic peptide
  Seed: GMDPRMCSLMQGSTLPRRSGAAG
GMDPRMLSLMQVSTAPRRSGAAG

SEQ ID NO: 86536 - protein, 23 aa, Artificial Sequence
  Description of Artificial Sequence: Synthetic peptide
  Seed: GMDPRMCSLMQGSTLPRRSGAAG
GMDPRMLSLMQVSTNPRRSGAAG

SEQ ID NO: 86537 - protein, 23 aa, Artificial Sequence
  Description of Artificial Sequence: Synthetic peptide
  Seed: GMDPRMCSLMQGSTLPRRSGAAG
GMDPRMLSLMQVSTSPRRSGAAG

SEQ ID NO: 86538 - protein, 23 aa, Artificial Sequence
  Description of Artificial Sequence: Synthetic peptide
  Seed: GMDPRMCSLMQGSTLPRRSGAAG
GMDPRMLSLQQASTLPRRSGAAG

SEQ ID NO: 86539 - protein, 23 aa, Artificial Sequence
  Description of Artificial Sequence: Synthetic peptide
  Seed: GMDPRMCSLMQGSTLPRRSGAAG
GMDPRMLSLQQASTVPRRSGAAG

SEQ ID NO: 86540 - protein, 23 aa, Artificial Sequence
  Description of Artificial Sequence: Synthetic peptide
  Seed: GMDPRMCSLMQGSTLPRRSGAAG
GMDPRMMSLIQASTVPRRSGAAG

SEQ ID NO: 86541 - protein, 23 aa, Artificial Sequence
  Description of Artificial Sequence: Synthetic peptide
  Seed: GMDPRMCSLMQGSTLPRRSGAAG
GMDPRMMSLLQASTAPRRSGAAG

SEQ ID NO: 86542 - protein, 23 aa, Artificial Sequence
  Description of Artificial Sequence: Synthetic peptide
  Seed: GMDPRMCSLMQGSTLPRRSGAAG
GMDPRMMSLLQASTIPRRSGAAG

SEQ ID NO: 86543 - protein, 23 aa, Artificial Sequence
  Description of Artificial Sequence: Synthetic peptide
  Seed: GMDPRMCSLMQGSTLPRRSGAAG
GMDPRMMSLLQASTLPRRSGAAG

SEQ ID NO: 86544 - protein, 23 aa, Artificial Sequence
  Description of Artificial Sequence: Synthetic peptide
  Seed: GMDPRMCSLMQGSTLPRRSGAAG
GMDPRMMSLLQASTMPRRSGAAG

SEQ ID NO: 86545 - protein, 23 aa, Artificial Sequence
  Description of Artificial Sequence: Synthetic peptide
  Seed: GMDPRMCSLMQGSTLPRRSGAAG
GMDPRMMSLLQASTNPRRSGAAG

SEQ ID NO: 86546 - protein, 23 aa, Artificial Sequence
  Description of Artificial Sequence: Synthetic peptide
  Seed: GMDPRMCSLMQGSTLPRRSGAAG
GMDPRMMSLLQASTSPRRSGAAG

SEQ ID NO: 86547 - protein, 23 aa, Artificial Sequence
  Description of Artificial Sequence: Synthetic peptide
  Seed: GMDPRMCSLMQGSTLPRRSGAAG
GMDPRMMSLLQASTTPRRSGAAG

SEQ ID NO: 86548 - protein, 23 aa, Artificial Sequence
  Description of Artificial Sequence: Synthetic peptide
  Seed: GMDPRMCSLMQGSTLPRRSGAAG
GMDPRMMSLLQASTVPRRSGAAG

SEQ ID NO: 86549 - protein, 23 aa, Artificial Sequence
  Description of Artificial Sequence: Synthetic peptide
  Seed: GMDPRMCSLMQGSTLPRRSGAAG
GMDPRMMSLLQGSTAPRRSGAAG

SEQ ID NO: 86550 - protein, 23 aa, Artificial Sequence
  Description of Artificial Sequence: Synthetic peptide
  Seed: GMDPRMCSLMQGSTLPRRSGAAG
GMDPRMMSLLQGSTIPRRSGAAG

SEQ ID NO: 86551 - protein, 23 aa, Artificial Sequence
  Description of Artificial Sequence: Synthetic peptide
  Seed: GMDPRMCSLMQGSTLPRRSGAAG
GMDPRMMSLLQGSTLPRRSGAAG

SEQ ID NO: 86552 - protein, 23 aa, Artificial Sequence
  Description of Artificial Sequence: Synthetic peptide
  Seed: GMDPRMCSLMQGSTLPRRSGAAG
GMDPRMMSLLQGSTVPRRSGAAG

SEQ ID NO: 86553 - protein, 23 aa, Artificial Sequence
  Description of Artificial Sequence: Synthetic peptide
  Seed: GMDPRMCSLMQGSTLPRRSGAAG
GMDPRMMSLLQPSTAPRRSGAAG

SEQ ID NO: 86554 - protein, 23 aa, Artificial Sequence
  Description of Artificial Sequence: Synthetic peptide
  Seed: GMDPRMCSLMQGSTLPRRSGAAG
GMDPRMMSLLQPSTIPRRSGAAG

SEQ ID NO: 86555 - protein, 23 aa, Artificial Sequence
  Description of Artificial Sequence: Synthetic peptide
  Seed: GMDPRMCSLMQGSTLPRRSGAAG
GMDPRMMSLLQPSTLPRRSGAAG

SEQ ID NO: 86556 - protein, 23 aa, Artificial Sequence
  Description of Artificial Sequence: Synthetic peptide
  Seed: GMDPRMCSLMQGSTLPRRSGAAG
GMDPRMMSLLQPSTVPRRSGAAG

SEQ ID NO: 86557 - protein, 23 aa, Artificial Sequence
  Description of Artificial Sequence: Synthetic peptide
  Seed: GMDPRMCSLMQGSTLPRRSGAAG
GMDPRMMSLLQSSTAPRRSGAAG

SEQ ID NO: 86558 - protein, 23 aa, Artificial Sequence
  Description of Artificial Sequence: Synthetic peptide
  Seed: GMDPRMCSLMQGSTLPRRSGAAG
GMDPRMMSLLQSSTIPRRSGAAG

SEQ ID NO: 86559 - protein, 23 aa, Artificial Sequence
  Description of Artificial Sequence: Synthetic peptide
  Seed: GMDPRMCSLMQGSTLPRRSGAAG
GMDPRMMSLLQSSTLPRRSGAAG

SEQ ID NO: 86560 - protein, 23 aa, Artificial Sequence
  Description of Artificial Sequence: Synthetic peptide
  Seed: GMDPRMCSLMQGSTLPRRSGAAG
GMDPRMMSLLQSSTVPRRSGAAG

SEQ ID NO: 86561 - protein, 23 aa, Artificial Sequence
  Description of Artificial Sequence: Synthetic peptide
  Seed: GMDPRMCSLMQGSTLPRRSGAAG
GMDPRMMSLLQVSTAPRRSGAAG

SEQ ID NO: 86562 - protein, 23 aa, Artificial Sequence
  Description of Artificial Sequence: Synthetic peptide
  Seed: GMDPRMCSLMQGSTLPRRSGAAG
GMDPRMMSLMQASTAPRRSGAAG

SEQ ID NO: 86563 - protein, 23 aa, Artificial Sequence
  Description of Artificial Sequence: Synthetic peptide
  Seed: GMDPRMCSLMQGSTLPRRSGAAG
GMDPRMMSLMQASTIPRRSGAAG

SEQ ID NO: 86564 - protein, 23 aa, Artificial Sequence
  Description of Artificial Sequence: Synthetic peptide
  Seed: GMDPRMCSLMQGSTLPRRSGAAG
GMDPRMMSLMQASTLPRRSGAAG

SEQ ID NO: 86565 - protein, 23 aa, Artificial Sequence
  Description of Artificial Sequence: Synthetic peptide
  Seed: GMDPRMCSLMQGSTLPRRSGAAG
GMDPRMMSLMQASTMPRRSGAAG

SEQ ID NO: 86566 - protein, 23 aa, Artificial Sequence
  Description of Artificial Sequence: Synthetic peptide
  Seed: GMDPRMCSLMQGSTLPRRSGAAG
GMDPRMMSLMQASTNPRRSGAAG

SEQ ID NO: 86567 - protein, 23 aa, Artificial Sequence
  Description of Artificial Sequence: Synthetic peptide
  Seed: GMDPRMCSLMQGSTLPRRSGAAG
GMDPRMMSLMQASTSPRRSGAAG

SEQ ID NO: 86568 - protein, 23 aa, Artificial Sequence
  Description of Artificial Sequence: Synthetic peptide
  Seed: GMDPRMCSLMQGSTLPRRSGAAG
GMDPRMMSLMQASTTPRRSGAAG

SEQ ID NO: 86569 - protein, 23 aa, Artificial Sequence
  Description of Artificial Sequence: Synthetic peptide
  Seed: GMDPRMCSLMQGSTLPRRSGAAG
GMDPRMMSLMQASTVPRRSGAAG

SEQ ID NO: 86570 - protein, 23 aa, Artificial Sequence
  Description of Artificial Sequence: Synthetic peptide
  Seed: GMDPRMCSLMQGSTLPRRSGAAG
GMDPRMMSLMQGSTAPRRSGAAG

SEQ ID NO: 86571 - protein, 23 aa, Artificial Sequence
  Description of Artificial Sequence: Synthetic peptide
  Seed: GMDPRMCSLMQGSTLPRRSGAAG
GMDPRMMSLMQGSTIPRRSGAAG

SEQ ID NO: 86572 - protein, 23 aa, Artificial Sequence
  Description of Artificial Sequence: Synthetic peptide
  Seed: GMDPRMCSLMQGSTLPRRSGAAG
GMDPRMMSLMQGSTLPRRSGAAG

SEQ ID NO: 86573 - protein, 23 aa, Artificial Sequence
  Description of Artificial Sequence: Synthetic peptide
  Seed: GMDPRMCSLMQGSTLPRRSGAAG
GMDPRMMSLMQGSTVPRRSGAAG

SEQ ID NO: 86574 - protein, 23 aa, Artificial Sequence
  Description of Artificial Sequence: Synthetic peptide
  Seed: GMDPRMCSLMQGSTLPRRSGAAG
GMDPRMMSLMQPSTAPRRSGAAG

SEQ ID NO: 86575 - protein, 23 aa, Artificial Sequence
  Description of Artificial Sequence: Synthetic peptide
  Seed: GMDPRMCSLMQGSTLPRRSGAAG
GMDPRMMSLMQPSTIPRRSGAAG

SEQ ID NO: 86576 - protein, 23 aa, Artificial Sequence
  Description of Artificial Sequence: Synthetic peptide
  Seed: GMDPRMCSLMQGSTLPRRSGAAG
GMDPRMMSLMQPSTLPRRSGAAG

SEQ ID NO: 86577 - protein, 23 aa, Artificial Sequence
  Description of Artificial Sequence: Synthetic peptide
  Seed: GMDPRMCSLMQGSTLPRRSGAAG
GMDPRMMSLMQPSTVPRRSGAAG

SEQ ID NO: 86578 - protein, 23 aa, Artificial Sequence
  Description of Artificial Sequence: Synthetic peptide
  Seed: GMDPRMCSLMQGSTLPRRSGAAG
GMDPRMMSLMQSSTAPRRSGAAG

SEQ ID NO: 86579 - protein, 23 aa, Artificial Sequence
  Description of Artificial Sequence: Synthetic peptide
  Seed: GMDPRMCSLMQGSTLPRRSGAAG
GMDPRMMSLMQSSTIPRRSGAAG

SEQ ID NO: 86580 - protein, 23 aa, Artificial Sequence
  Description of Artificial Sequence: Synthetic peptide
  Seed: GMDPRMCSLMQGSTLPRRSGAAG
GMDPRMMSLMQSSTLPRRSGAAG

SEQ ID NO: 86581 - protein, 23 aa, Artificial Sequence
  Description of Artificial Sequence: Synthetic peptide
  Seed: GMDPRMCSLMQGSTLPRRSGAAG
GMDPRMMSLMQSSTVPRRSGAAG

SEQ ID NO: 86582 - protein, 23 aa, Artificial Sequence
  Description of Artificial Sequence: Synthetic peptide
  Seed: GMDPRMCSLMQGSTLPRRSGAAG
GMDPRMMSLMQVSTAPRRSGAAG

SEQ ID NO: 86583 - protein, 23 aa, Artificial Sequence
  Description of Artificial Sequence: Synthetic peptide
  Seed: GMDPRMCSLMQGSTLPRRSGAAG
GMDPRMVSLLQASTAPRRSGAAG

SEQ ID NO: 86584 - protein, 23 aa, Artificial Sequence
  Description of Artificial Sequence: Synthetic peptide
  Seed: GMDPRMCSLMQGSTLPRRSGAAG
GMDPRMVSLLQASTIPRRSGAAG

SEQ ID NO: 86585 - protein, 23 aa, Artificial Sequence
  Description of Artificial Sequence: Synthetic peptide
  Seed: GMDPRMCSLMQGSTLPRRSGAAG
GMDPRMVSLLQASTLPRRSGAAG

SEQ ID NO: 86586 - protein, 23 aa, Artificial Sequence
  Description of Artificial Sequence: Synthetic peptide
  Seed: GMDPRMCSLMQGSTLPRRSGAAG
GMDPRMVSLLQASTMPRRSGAAG

SEQ ID NO: 86587 - protein, 23 aa, Artificial Sequence
  Description of Artificial Sequence: Synthetic peptide
  Seed: GMDPRMCSLMQGSTLPRRSGAAG
GMDPRMVSLLQASTTPRRSGAAG

SEQ ID NO: 86588 - protein, 23 aa, Artificial Sequence
  Description of Artificial Sequence: Synthetic peptide
  Seed: GMDPRMCSLMQGSTLPRRSGAAG
GMDPRMVSLLQASTVPRRSGAAG

SEQ ID NO: 86589 - protein, 23 aa, Artificial Sequence
  Description of Artificial Sequence: Synthetic peptide
  Seed: GMDPRMCSLMQGSTLPRRSGAAG
GMDPRMVSLLQGSTAPRRSGAAG

SEQ ID NO: 86590 - protein, 23 aa, Artificial Sequence
  Description of Artificial Sequence: Synthetic peptide
  Seed: GMDPRMCSLMQGSTLPRRSGAAG
GMDPRMVSLLQGSTIPRRSGAAG

SEQ ID NO: 86591 - protein, 23 aa, Artificial Sequence
  Description of Artificial Sequence: Synthetic peptide
  Seed: GMDPRMCSLMQGSTLPRRSGAAG
GMDPRMVSLLQGSTLPRRSGAAG

SEQ ID NO: 86592 - protein, 23 aa, Artificial Sequence
  Description of Artificial Sequence: Synthetic peptide
  Seed: GMDPRMCSLMQGSTLPRRSGAAG
GMDPRMVSLLQGSTVPRRSGAAG

SEQ ID NO: 86593 - protein, 23 aa, Artificial Sequence
  Description of Artificial Sequence: Synthetic peptide
  Seed: GMDPRMCSLMQGSTLPRRSGAAG
GMDPRMVSLLQPSTIPRRSGAAG

SEQ ID NO: 86594 - protein, 23 aa, Artificial Sequence
  Description of Artificial Sequence: Synthetic peptide
  Seed: GMDPRMCSLMQGSTLPRRSGAAG
GMDPRMVSLLQPSTLPRRSGAAG

SEQ ID NO: 86595 - protein, 23 aa, Artificial Sequence
  Description of Artificial Sequence: Synthetic peptide
  Seed: GMDPRMCSLMQGSTLPRRSGAAG
GMDPRMVSLLQPSTVPRRSGAAG

SEQ ID NO: 86596 - protein, 23 aa, Artificial Sequence
  Description of Artificial Sequence: Synthetic peptide
  Seed: GMDPRMCSLMQGSTLPRRSGAAG
GMDPRMVSLLQSSTAPRRSGAAG

SEQ ID NO: 86597 - protein, 23 aa, Artificial Sequence
  Description of Artificial Sequence: Synthetic peptide
  Seed: GMDPRMCSLMQGSTLPRRSGAAG
GMDPRMVSLLQSSTIPRRSGAAG

SEQ ID NO: 86598 - protein, 23 aa, Artificial Sequence
  Description of Artificial Sequence: Synthetic peptide
  Seed: GMDPRMCSLMQGSTLPRRSGAAG
GMDPRMVSLLQSSTLPRRSGAAG

SEQ ID NO: 86599 - protein, 23 aa, Artificial Sequence
  Description of Artificial Sequence: Synthetic peptide
  Seed: GMDPRMCSLMQGSTLPRRSGAAG
GMDPRMVSLLQSSTVPRRSGAAG

SEQ ID NO: 86600 - protein, 23 aa, Artificial Sequence
  Description of Artificial Sequence: Synthetic peptide
  Seed: GMDPRMCSLMQGSTLPRRSGAAG
GMDPRMVSLMQASTAPRRSGAAG

SEQ ID NO: 86601 - protein, 23 aa, Artificial Sequence
  Description of Artificial Sequence: Synthetic peptide
  Seed: GMDPRMCSLMQGSTLPRRSGAAG
GMDPRMVSLMQASTIPRRSGAAG

SEQ ID NO: 86602 - protein, 23 aa, Artificial Sequence
  Description of Artificial Sequence: Synthetic peptide
  Seed: GMDPRMCSLMQGSTLPRRSGAAG
GMDPRMVSLMQASTLPRRSGAAG

SEQ ID NO: 86603 - protein, 23 aa, Artificial Sequence
  Description of Artificial Sequence: Synthetic peptide
  Seed: GMDPRMCSLMQGSTLPRRSGAAG
GMDPRMVSLMQASTMPRRSGAAG

SEQ ID NO: 86604 - protein, 23 aa, Artificial Sequence
  Description of Artificial Sequence: Synthetic peptide
  Seed: GMDPRMCSLMQGSTLPRRSGAAG
GMDPRMVSLMQASTVPRRSGAAG

SEQ ID NO: 86605 - protein, 23 aa, Artificial Sequence
  Description of Artificial Sequence: Synthetic peptide
  Seed: GMDPRMCSLMQGSTLPRRSGAAG
GMDPRMVSLMQGSTAPRRSGAAG

SEQ ID NO: 86606 - protein, 23 aa, Artificial Sequence
  Description of Artificial Sequence: Synthetic peptide
  Seed: GMDPRMCSLMQGSTLPRRSGAAG
GMDPRMVSLMQGSTIPRRSGAAG

SEQ ID NO: 86607 - protein, 23 aa, Artificial Sequence
  Description of Artificial Sequence: Synthetic peptide
  Seed: GMDPRMCSLMQGSTLPRRSGAAG
GMDPRMVSLMQGSTLPRRSGAAG

SEQ ID NO: 86608 - protein, 23 aa, Artificial Sequence
  Description of Artificial Sequence: Synthetic peptide
  Seed: GMDPRMCSLMQGSTLPRRSGAAG
GMDPRMVSLMQGSTVPRRSGAAG

SEQ ID NO: 86609 - protein, 23 aa, Artificial Sequence
  Description of Artificial Sequence: Synthetic peptide
  Seed: GMDPRMCSLMQGSTLPRRSGAAG
GMDPRMVSLMQPSTIPRRSGAAG

SEQ ID NO: 86610 - protein, 23 aa, Artificial Sequence
  Description of Artificial Sequence: Synthetic peptide
  Seed: GMDPRMCSLMQGSTLPRRSGAAG
GMDPRMVSLMQPSTLPRRSGAAG

SEQ ID NO: 86611 - protein, 23 aa, Artificial Sequence
  Description of Artificial Sequence: Synthetic peptide
  Seed: GMDPRMCSLMQGSTLPRRSGAAG
GMDPRMVSLMQPSTVPRRSGAAG

SEQ ID NO: 86612 - protein, 23 aa, Artificial Sequence
  Description of Artificial Sequence: Synthetic peptide
  Seed: GMDPRMCSLMQGSTLPRRSGAAG
GMDPRMVSLMQSSTAPRRSGAAG

SEQ ID NO: 86613 - protein, 23 aa, Artificial Sequence
  Description of Artificial Sequence: Synthetic peptide
  Seed: GMDPRMCSLMQGSTLPRRSGAAG
GMDPRMVSLMQSSTIPRRSGAAG

SEQ ID NO: 86614 - protein, 23 aa, Artificial Sequence
  Description of Artificial Sequence: Synthetic peptide
  Seed: GMDPRMCSLMQGSTLPRRSGAAG
GMDPRMVSLMQSSTLPRRSGAAG

SEQ ID NO: 86615 - protein, 23 aa, Artificial Sequence
  Description of Artificial Sequence: Synthetic peptide
  Seed: GMDPRMCSLMQGSTLPRRSGAAG
GMDPRMVSLMQSSTVPRRSGAAG

SEQ ID NO: 86616 - protein, 23 aa, Artificial Sequence
  Description of Artificial Sequence: Synthetic peptide
  Seed: GMDPRMCSLMQGSTLPRRSGAAG
GMDPRMWSLAQASTAPRRSGAAG

SEQ ID NO: 86617 - protein, 23 aa, Artificial Sequence
  Description of Artificial Sequence: Synthetic peptide
  Seed: GMDPRMCSLMQGSTLPRRSGAAG
GMDPRMWSLAQASTIPRRSGAAG

SEQ ID NO: 86618 - protein, 23 aa, Artificial Sequence
  Description of Artificial Sequence: Synthetic peptide
  Seed: GMDPRMCSLMQGSTLPRRSGAAG
GMDPRMWSLAQASTLPRRSGAAG

SEQ ID NO: 86619 - protein, 23 aa, Artificial Sequence
  Description of Artificial Sequence: Synthetic peptide
  Seed: GMDPRMCSLMQGSTLPRRSGAAG
GMDPRMWSLAQASTMPRRSGAAG

SEQ ID NO: 86620 - protein, 23 aa, Artificial Sequence
  Description of Artificial Sequence: Synthetic peptide
  Seed: GMDPRMCSLMQGSTLPRRSGAAG
GMDPRMWSLAQASTNPRRSGAAG

SEQ ID NO: 86621 - protein, 23 aa, Artificial Sequence
  Description of Artificial Sequence: Synthetic peptide
  Seed: GMDPRMCSLMQGSTLPRRSGAAG
GMDPRMWSLAQASTSPRRSGAAG

SEQ ID NO: 86622 - protein, 23 aa, Artificial Sequence
  Description of Artificial Sequence: Synthetic peptide
  Seed: GMDPRMCSLMQGSTLPRRSGAAG
GMDPRMWSLAQASTTPRRSGAAG

SEQ ID NO: 86623 - protein, 23 aa, Artificial Sequence
  Description of Artificial Sequence: Synthetic peptide
  Seed: GMDPRMCSLMQGSTLPRRSGAAG
GMDPRMWSLAQASTVPRRSGAAG

SEQ ID NO: 86624 - protein, 23 aa, Artificial Sequence
  Description of Artificial Sequence: Synthetic peptide
  Seed: GMDPRMCSLMQGSTLPRRSGAAG
GMDPRMWSLAQGSTAPRRSGAAG

SEQ ID NO: 86625 - protein, 23 aa, Artificial Sequence
  Description of Artificial Sequence: Synthetic peptide
  Seed: GMDPRMCSLMQGSTLPRRSGAAG
GMDPRMWSLAQGSTIPRRSGAAG

SEQ ID NO: 86626 - protein, 23 aa, Artificial Sequence
  Description of Artificial Sequence: Synthetic peptide
  Seed: GMDPRMCSLMQGSTLPRRSGAAG
GMDPRMWSLAQGSTLPRRSGAAG

SEQ ID NO: 86627 - protein, 23 aa, Artificial Sequence
  Description of Artificial Sequence: Synthetic peptide
  Seed: GMDPRMCSLMQGSTLPRRSGAAG
GMDPRMWSLAQGSTVPRRSGAAG

SEQ ID NO: 86628 - protein, 23 aa, Artificial Sequence
  Description of Artificial Sequence: Synthetic peptide
  Seed: GMDPRMCSLMQGSTLPRRSGAAG
GMDPRMWSLAQSSTIPRRSGAAG

SEQ ID NO: 86629 - protein, 23 aa, Artificial Sequence
  Description of Artificial Sequence: Synthetic peptide
  Seed: GMDPRMCSLMQGSTLPRRSGAAG
GMDPRMWSLAQSSTLPRRSGAAG

SEQ ID NO: 86630 - protein, 23 aa, Artificial Sequence
  Description of Artificial Sequence: Synthetic peptide
  Seed: GMDPRMCSLMQGSTLPRRSGAAG
GMDPRMWSLAQSSTVPRRSGAAG

SEQ ID NO: 86631 - protein, 23 aa, Artificial Sequence
  Description of Artificial Sequence: Synthetic peptide
  Seed: GMDPRMCSLMQGSTLPRRSGAAG
GMDPRMWSLAQVSTAPRRSGAAG

SEQ ID NO: 86632 - protein, 23 aa, Artificial Sequence
  Description of Artificial Sequence: Synthetic peptide
  Seed: GMDPRMCSLMQGSTLPRRSGAAG
GMDPRMWSLIQASTAPRRSGAAG

SEQ ID NO: 86633 - protein, 23 aa, Artificial Sequence
  Description of Artificial Sequence: Synthetic peptide
  Seed: GMDPRMCSLMQGSTLPRRSGAAG
GMDPRMWSLIQASTGPRRSGAAG

SEQ ID NO: 86634 - protein, 23 aa, Artificial Sequence
  Description of Artificial Sequence: Synthetic peptide
  Seed: GMDPRMCSLMQGSTLPRRSGAAG
GMDPRMWSLIQASTIPRRSGAAG

SEQ ID NO: 86635 - protein, 23 aa, Artificial Sequence
  Description of Artificial Sequence: Synthetic peptide
  Seed: GMDPRMCSLMQGSTLPRRSGAAG
GMDPRMWSLIQASTLPRRSGAAG

SEQ ID NO: 86636 - protein, 23 aa, Artificial Sequence
  Description of Artificial Sequence: Synthetic peptide
  Seed: GMDPRMCSLMQGSTLPRRSGAAG
GMDPRMWSLIQASTMPRRSGAAG

SEQ ID NO: 86637 - protein, 23 aa, Artificial Sequence
  Description of Artificial Sequence: Synthetic peptide
  Seed: GMDPRMCSLMQGSTLPRRSGAAG
GMDPRMWSLIQASTNPRRSGAAG

SEQ ID NO: 86638 - protein, 23 aa, Artificial Sequence
  Description of Artificial Sequence: Synthetic peptide
  Seed: GMDPRMCSLMQGSTLPRRSGAAG
GMDPRMWSLIQASTSPRRSGAAG

SEQ ID NO: 86639 - protein, 23 aa, Artificial Sequence
  Description of Artificial Sequence: Synthetic peptide
  Seed: GMDPRMCSLMQGSTLPRRSGAAG
GMDPRMWSLIQASTTPRRSGAAG

SEQ ID NO: 86640 - protein, 23 aa, Artificial Sequence
  Description of Artificial Sequence: Synthetic peptide
  Seed: GMDPRMCSLMQGSTLPRRSGAAG
GMDPRMWSLIQASTVPRRSGAAG

SEQ ID NO: 86641 - protein, 23 aa, Artificial Sequence
  Description of Artificial Sequence: Synthetic peptide
  Seed: GMDPRMCSLMQGSTLPRRSGAAG
GMDPRMWSLIQGSTAPRRSGAAG

SEQ ID NO: 86642 - protein, 23 aa, Artificial Sequence
  Description of Artificial Sequence: Synthetic peptide
  Seed: GMDPRMCSLMQGSTLPRRSGAAG
GMDPRMWSLIQGSTIPRRSGAAG

SEQ ID NO: 86643 - protein, 23 aa, Artificial Sequence
  Description of Artificial Sequence: Synthetic peptide
  Seed: GMDPRMCSLMQGSTLPRRSGAAG
GMDPRMWSLIQGSTLPRRSGAAG

SEQ ID NO: 86644 - protein, 23 aa, Artificial Sequence
  Description of Artificial Sequence: Synthetic peptide
  Seed: GMDPRMCSLMQGSTLPRRSGAAG
GMDPRMWSLIQGSTTPRRSGAAG

SEQ ID NO: 86645 - protein, 23 aa, Artificial Sequence
  Description of Artificial Sequence: Synthetic peptide
  Seed: GMDPRMCSLMQGSTLPRRSGAAG
GMDPRMWSLIQGSTVPRRSGAAG

SEQ ID NO: 86646 - protein, 23 aa, Artificial Sequence
  Description of Artificial Sequence: Synthetic peptide
  Seed: GMDPRMCSLMQGSTLPRRSGAAG
GMDPRMWSLIQISTAPRRSGAAG

SEQ ID NO: 86647 - protein, 23 aa, Artificial Sequence
  Description of Artificial Sequence: Synthetic peptide
  Seed: GMDPRMCSLMQGSTLPRRSGAAG
GMDPRMWSLIQISTNPRRSGAAG

SEQ ID NO: 86648 - protein, 23 aa, Artificial Sequence
  Description of Artificial Sequence: Synthetic peptide
  Seed: GMDPRMCSLMQGSTLPRRSGAAG
GMDPRMWSLIQPSTAPRRSGAAG

SEQ ID NO: 86649 - protein, 23 aa, Artificial Sequence
  Description of Artificial Sequence: Synthetic peptide
  Seed: GMDPRMCSLMQGSTLPRRSGAAG
GMDPRMWSLIQPSTIPRRSGAAG

SEQ ID NO: 86650 - protein, 23 aa, Artificial Sequence
  Description of Artificial Sequence: Synthetic peptide
  Seed: GMDPRMCSLMQGSTLPRRSGAAG
GMDPRMWSLIQPSTLPRRSGAAG

SEQ ID NO: 86651 - protein, 23 aa, Artificial Sequence
  Description of Artificial Sequence: Synthetic peptide
  Seed: GMDPRMCSLMQGSTLPRRSGAAG
GMDPRMWSLIQPSTNPRRSGAAG

SEQ ID NO: 86652 - protein, 23 aa, Artificial Sequence
  Description of Artificial Sequence: Synthetic peptide
  Seed: GMDPRMCSLMQGSTLPRRSGAAG
GMDPRMWSLIQPSTSPRRSGAAG

SEQ ID NO: 86653 - protein, 23 aa, Artificial Sequence
  Description of Artificial Sequence: Synthetic peptide
  Seed: GMDPRMCSLMQGSTLPRRSGAAG
GMDPRMWSLIQPSTVPRRSGAAG

SEQ ID NO: 86654 - protein, 23 aa, Artificial Sequence
  Description of Artificial Sequence: Synthetic peptide
  Seed: GMDPRMCSLMQGSTLPRRSGAAG
GMDPRMWSLIQSSTAPRRSGAAG

SEQ ID NO: 86655 - protein, 23 aa, Artificial Sequence
  Description of Artificial Sequence: Synthetic peptide
  Seed: GMDPRMCSLMQGSTLPRRSGAAG
GMDPRMWSLIQSSTIPRRSGAAG

SEQ ID NO: 86656 - protein, 23 aa, Artificial Sequence
  Description of Artificial Sequence: Synthetic peptide
  Seed: GMDPRMCSLMQGSTLPRRSGAAG
GMDPRMWSLIQSSTLPRRSGAAG

SEQ ID NO: 86657 - protein, 23 aa, Artificial Sequence
  Description of Artificial Sequence: Synthetic peptide
  Seed: GMDPRMCSLMQGSTLPRRSGAAG
GMDPRMWSLIQSSTNPRRSGAAG

SEQ ID NO: 86658 - protein, 23 aa, Artificial Sequence
  Description of Artificial Sequence: Synthetic peptide
  Seed: GMDPRMCSLMQGSTLPRRSGAAG
GMDPRMWSLIQSSTSPRRSGAAG

SEQ ID NO: 86659 - protein, 23 aa, Artificial Sequence
  Description of Artificial Sequence: Synthetic peptide
  Seed: GMDPRMCSLMQGSTLPRRSGAAG
GMDPRMWSLIQSSTVPRRSGAAG

SEQ ID NO: 86660 - protein, 23 aa, Artificial Sequence
  Description of Artificial Sequence: Synthetic peptide
  Seed: GMDPRMCSLMQGSTLPRRSGAAG
GMDPRMWSLIQTSTAPRRSGAAG

SEQ ID NO: 86661 - protein, 23 aa, Artificial Sequence
  Description of Artificial Sequence: Synthetic peptide
  Seed: GMDPRMCSLMQGSTLPRRSGAAG
GMDPRMWSLIQTSTNPRRSGAAG

SEQ ID NO: 86662 - protein, 23 aa, Artificial Sequence
  Description of Artificial Sequence: Synthetic peptide
  Seed: GMDPRMCSLMQGSTLPRRSGAAG
GMDPRMWSLIQTSTSPRRSGAAG

SEQ ID NO: 86663 - protein, 23 aa, Artificial Sequence
  Description of Artificial Sequence: Synthetic peptide
  Seed: GMDPRMCSLMQGSTLPRRSGAAG
GMDPRMWSLIQTSTTPRRSGAAG

SEQ ID NO: 86664 - protein, 23 aa, Artificial Sequence
  Description of Artificial Sequence: Synthetic peptide
  Seed: GMDPRMCSLMQGSTLPRRSGAAG
GMDPRMWSLIQVSTAPRRSGAAG

SEQ ID NO: 86665 - protein, 23 aa, Artificial Sequence
  Description of Artificial Sequence: Synthetic peptide
  Seed: GMDPRMCSLMQGSTLPRRSGAAG
GMDPRMWSLIQVSTNPRRSGAAG

SEQ ID NO: 86666 - protein, 23 aa, Artificial Sequence
  Description of Artificial Sequence: Synthetic peptide
  Seed: GMDPRMCSLMQGSTLPRRSGAAG
GMDPRMWSLIQVSTSPRRSGAAG

SEQ ID NO: 86667 - protein, 23 aa, Artificial Sequence
  Description of Artificial Sequence: Synthetic peptide
  Seed: GMDPRMCSLMQGSTLPRRSGAAG
GMDPRMWSLLQASTAPRRSGAAG

SEQ ID NO: 86668 - protein, 23 aa, Artificial Sequence
  Description of Artificial Sequence: Synthetic peptide
  Seed: GMDPRMCSLMQGSTLPRRSGAAG
GMDPRMWSLLQASTGPRRSGAAG

SEQ ID NO: 86669 - protein, 23 aa, Artificial Sequence
  Description of Artificial Sequence: Synthetic peptide
  Seed: GMDPRMCSLMQGSTLPRRSGAAG
GMDPRMWSLLQASTIPRRSGAAG

SEQ ID NO: 86670 - protein, 23 aa, Artificial Sequence
  Description of Artificial Sequence: Synthetic peptide
  Seed: GMDPRMCSLMQGSTLPRRSGAAG
GMDPRMWSLLQASTLPRRSGAAG

SEQ ID NO: 86671 - protein, 23 aa, Artificial Sequence
  Description of Artificial Sequence: Synthetic peptide
  Seed: GMDPRMCSLMQGSTLPRRSGAAG
GMDPRMWSLLQASTMPRRSGAAG

SEQ ID NO: 86672 - protein, 23 aa, Artificial Sequence
  Description of Artificial Sequence: Synthetic peptide
  Seed: GMDPRMCSLMQGSTLPRRSGAAG
GMDPRMWSLLQASTNPRRSGAAG

SEQ ID NO: 86673 - protein, 23 aa, Artificial Sequence
  Description of Artificial Sequence: Synthetic peptide
  Seed: GMDPRMCSLMQGSTLPRRSGAAG
GMDPRMWSLLQASTSPRRSGAAG

SEQ ID NO: 86674 - protein, 23 aa, Artificial Sequence
  Description of Artificial Sequence: Synthetic peptide
  Seed: GMDPRMCSLMQGSTLPRRSGAAG
GMDPRMWSLLQASTTPRRSGAAG

SEQ ID NO: 86675 - protein, 23 aa, Artificial Sequence
  Description of Artificial Sequence: Synthetic peptide
  Seed: GMDPRMCSLMQGSTLPRRSGAAG
GMDPRMWSLLQASTVPRRSGAAG

SEQ ID NO: 86676 - protein, 23 aa, Artificial Sequence
  Description of Artificial Sequence: Synthetic peptide
  Seed: GMDPRMCSLMQGSTLPRRSGAAG
GMDPRMWSLLQGSTAPRRSGAAG

SEQ ID NO: 86677 - protein, 23 aa, Artificial Sequence
  Description of Artificial Sequence: Synthetic peptide
  Seed: GMDPRMCSLMQGSTLPRRSGAAG
GMDPRMWSLLQGSTGPRRSGAAG

SEQ ID NO: 86678 - protein, 23 aa, Artificial Sequence
  Description of Artificial Sequence: Synthetic peptide
  Seed: GMDPRMCSLMQGSTLPRRSGAAG
GMDPRMWSLLQGSTIPRRSGAAG

SEQ ID NO: 86679 - protein, 23 aa, Artificial Sequence
  Description of Artificial Sequence: Synthetic peptide
  Seed: GMDPRMCSLMQGSTLPRRSGAAG
GMDPRMWSLLQGSTLPRRSGAAG

SEQ ID NO: 86680 - protein, 23 aa, Artificial Sequence
  Description of Artificial Sequence: Synthetic peptide
  Seed: GMDPRMCSLMQGSTLPRRSGAAG
GMDPRMWSLLQGSTMPRRSGAAG

SEQ ID NO: 86681 - protein, 23 aa, Artificial Sequence
  Description of Artificial Sequence: Synthetic peptide
  Seed: GMDPRMCSLMQGSTLPRRSGAAG
GMDPRMWSLLQGSTSPRRSGAAG

SEQ ID NO: 86682 - protein, 23 aa, Artificial Sequence
  Description of Artificial Sequence: Synthetic peptide
  Seed: GMDPRMCSLMQGSTLPRRSGAAG
GMDPRMWSLLQGSTTPRRSGAAG

SEQ ID NO: 86683 - protein, 23 aa, Artificial Sequence
  Description of Artificial Sequence: Synthetic peptide
  Seed: GMDPRMCSLMQGSTLPRRSGAAG
GMDPRMWSLLQGSTVPRRSGAAG

SEQ ID NO: 86684 - protein, 23 aa, Artificial Sequence
  Description of Artificial Sequence: Synthetic peptide
  Seed: GMDPRMCSLMQGSTLPRRSGAAG
GMDPRMWSLLQISTAPRRSGAAG

SEQ ID NO: 86685 - protein, 23 aa, Artificial Sequence
  Description of Artificial Sequence: Synthetic peptide
  Seed: GMDPRMCSLMQGSTLPRRSGAAG
GMDPRMWSLLQISTNPRRSGAAG

SEQ ID NO: 86686 - protein, 23 aa, Artificial Sequence
  Description of Artificial Sequence: Synthetic peptide
  Seed: GMDPRMCSLMQGSTLPRRSGAAG
GMDPRMWSLLQISTSPRRSGAAG

SEQ ID NO: 86687 - protein, 23 aa, Artificial Sequence
  Description of Artificial Sequence: Synthetic peptide
  Seed: GMDPRMCSLMQGSTLPRRSGAAG
GMDPRMWSLLQNSTAPRRSGAAG

SEQ ID NO: 86688 - protein, 23 aa, Artificial Sequence
  Description of Artificial Sequence: Synthetic peptide
  Seed: GMDPRMCSLMQGSTLPRRSGAAG
GMDPRMWSLLQNSTIPRRSGAAG

SEQ ID NO: 86689 - protein, 23 aa, Artificial Sequence
  Description of Artificial Sequence: Synthetic peptide
  Seed: GMDPRMCSLMQGSTLPRRSGAAG
GMDPRMWSLLQNSTLPRRSGAAG

SEQ ID NO: 86690 - protein, 23 aa, Artificial Sequence
  Description of Artificial Sequence: Synthetic peptide
  Seed: GMDPRMCSLMQGSTLPRRSGAAG
GMDPRMWSLLQNSTVPRRSGAAG

SEQ ID NO: 86691 - protein, 23 aa, Artificial Sequence
  Description of Artificial Sequence: Synthetic peptide
  Seed: GMDPRMCSLMQGSTLPRRSGAAG
GMDPRMWSLLQPSTAPRRSGAAG

SEQ ID NO: 86692 - protein, 23 aa, Artificial Sequence
  Description of Artificial Sequence: Synthetic peptide
  Seed: GMDPRMCSLMQGSTLPRRSGAAG
GMDPRMWSLLQPSTIPRRSGAAG

SEQ ID NO: 86693 - protein, 23 aa, Artificial Sequence
  Description of Artificial Sequence: Synthetic peptide
  Seed: GMDPRMCSLMQGSTLPRRSGAAG
GMDPRMWSLLQPSTLPRRSGAAG

SEQ ID NO: 86694 - protein, 23 aa, Artificial Sequence
  Description of Artificial Sequence: Synthetic peptide
  Seed: GMDPRMCSLMQGSTLPRRSGAAG
GMDPRMWSLLQPSTMPRRSGAAG

SEQ ID NO: 86695 - protein, 23 aa, Artificial Sequence
  Description of Artificial Sequence: Synthetic peptide
  Seed: GMDPRMCSLMQGSTLPRRSGAAG
GMDPRMWSLLQPSTNPRRSGAAG

SEQ ID NO: 86696 - protein, 23 aa, Artificial Sequence
  Description of Artificial Sequence: Synthetic peptide
  Seed: GMDPRMCSLMQGSTLPRRSGAAG
GMDPRMWSLLQPSTSPRRSGAAG

SEQ ID NO: 86697 - protein, 23 aa, Artificial Sequence
  Description of Artificial Sequence: Synthetic peptide
  Seed: GMDPRMCSLMQGSTLPRRSGAAG
GMDPRMWSLLQPSTTPRRSGAAG

SEQ ID NO: 86698 - protein, 23 aa, Artificial Sequence
  Description of Artificial Sequence: Synthetic peptide
  Seed: GMDPRMCSLMQGSTLPRRSGAAG
GMDPRMWSLLQPSTVPRRSGAAG

SEQ ID NO: 86699 - protein, 23 aa, Artificial Sequence
  Description of Artificial Sequence: Synthetic peptide
  Seed: GMDPRMCSLMQGSTLPRRSGAAG
GMDPRMWSLLQSSTAPRRSGAAG

SEQ ID NO: 86700 - protein, 23 aa, Artificial Sequence
  Description of Artificial Sequence: Synthetic peptide
  Seed: GMDPRMCSLMQGSTLPRRSGAAG
GMDPRMWSLLQSSTIPRRSGAAG

SEQ ID NO: 86701 - protein, 23 aa, Artificial Sequence
  Description of Artificial Sequence: Synthetic peptide
  Seed: GMDPRMCSLMQGSTLPRRSGAAG
GMDPRMWSLLQSSTLPRRSGAAG

SEQ ID NO: 86702 - protein, 23 aa, Artificial Sequence
  Description of Artificial Sequence: Synthetic peptide
  Seed: GMDPRMCSLMQGSTLPRRSGAAG
GMDPRMWSLLQSSTMPRRSGAAG

SEQ ID NO: 86703 - protein, 23 aa, Artificial Sequence
  Description of Artificial Sequence: Synthetic peptide
  Seed: GMDPRMCSLMQGSTLPRRSGAAG
GMDPRMWSLLQSSTNPRRSGAAG

SEQ ID NO: 86704 - protein, 23 aa, Artificial Sequence
  Description of Artificial Sequence: Synthetic peptide
  Seed: GMDPRMCSLMQGSTLPRRSGAAG
GMDPRMWSLLQSSTSPRRSGAAG

SEQ ID NO: 86705 - protein, 23 aa, Artificial Sequence
  Description of Artificial Sequence: Synthetic peptide
  Seed: GMDPRMCSLMQGSTLPRRSGAAG
GMDPRMWSLLQSSTTPRRSGAAG

SEQ ID NO: 86706 - protein, 23 aa, Artificial Sequence
  Description of Artificial Sequence: Synthetic peptide
  Seed: GMDPRMCSLMQGSTLPRRSGAAG
GMDPRMWSLLQSSTVPRRSGAAG

SEQ ID NO: 86707 - protein, 23 aa, Artificial Sequence
  Description of Artificial Sequence: Synthetic peptide
  Seed: GMDPRMCSLMQGSTLPRRSGAAG
GMDPRMWSLLQTSTAPRRSGAAG

SEQ ID NO: 86708 - protein, 23 aa, Artificial Sequence
  Description of Artificial Sequence: Synthetic peptide
  Seed: GMDPRMCSLMQGSTLPRRSGAAG
GMDPRMWSLLQTSTIPRRSGAAG

SEQ ID NO: 86709 - protein, 23 aa, Artificial Sequence
  Description of Artificial Sequence: Synthetic peptide
  Seed: GMDPRMCSLMQGSTLPRRSGAAG
GMDPRMWSLLQTSTLPRRSGAAG

SEQ ID NO: 86710 - protein, 23 aa, Artificial Sequence
  Description of Artificial Sequence: Synthetic peptide
  Seed: GMDPRMCSLMQGSTLPRRSGAAG
GMDPRMWSLLQTSTNPRRSGAAG

SEQ ID NO: 86711 - protein, 23 aa, Artificial Sequence
  Description of Artificial Sequence: Synthetic peptide
  Seed: GMDPRMCSLMQGSTLPRRSGAAG
GMDPRMWSLLQTSTSPRRSGAAG

SEQ ID NO: 86712 - protein, 23 aa, Artificial Sequence
  Description of Artificial Sequence: Synthetic peptide
  Seed: GMDPRMCSLMQGSTLPRRSGAAG
GMDPRMWSLLQTSTTPRRSGAAG

SEQ ID NO: 86713 - protein, 23 aa, Artificial Sequence
  Description of Artificial Sequence: Synthetic peptide
  Seed: GMDPRMCSLMQGSTLPRRSGAAG
GMDPRMWSLLQTSTVPRRSGAAG

SEQ ID NO: 86714 - protein, 23 aa, Artificial Sequence
  Description of Artificial Sequence: Synthetic peptide
  Seed: GMDPRMCSLMQGSTLPRRSGAAG
GMDPRMWSLLQVSTAPRRSGAAG

SEQ ID NO: 86715 - protein, 23 aa, Artificial Sequence
  Description of Artificial Sequence: Synthetic peptide
  Seed: GMDPRMCSLMQGSTLPRRSGAAG
GMDPRMWSLLQVSTNPRRSGAAG

SEQ ID NO: 86716 - protein, 23 aa, Artificial Sequence
  Description of Artificial Sequence: Synthetic peptide
  Seed: GMDPRMCSLMQGSTLPRRSGAAG
GMDPRMWSLLQVSTSPRRSGAAG

SEQ ID NO: 86717 - protein, 23 aa, Artificial Sequence
  Description of Artificial Sequence: Synthetic peptide
  Seed: GMDPRMCSLMQGSTLPRRSGAAG
GMDPRMWSLLQVSTTPRRSGAAG

SEQ ID NO: 86718 - protein, 23 aa, Artificial Sequence
  Description of Artificial Sequence: Synthetic peptide
  Seed: GMDPRMCSLMQGSTLPRRSGAAG
GMDPRMWSLMQASTAPRRSGAAG

SEQ ID NO: 86719 - protein, 23 aa, Artificial Sequence
  Description of Artificial Sequence: Synthetic peptide
  Seed: GMDPRMCSLMQGSTLPRRSGAAG
GMDPRMWSLMQASTGPRRSGAAG

SEQ ID NO: 86720 - protein, 23 aa, Artificial Sequence
  Description of Artificial Sequence: Synthetic peptide
  Seed: GMDPRMCSLMQGSTLPRRSGAAG
GMDPRMWSLMQASTHPRRSGAAG

SEQ ID NO: 86721 - protein, 23 aa, Artificial Sequence
  Description of Artificial Sequence: Synthetic peptide
  Seed: GMDPRMCSLMQGSTLPRRSGAAG
GMDPRMWSLMQASTIPRRSGAAG

SEQ ID NO: 86722 - protein, 23 aa, Artificial Sequence
  Description of Artificial Sequence: Synthetic peptide
  Seed: GMDPRMCSLMQGSTLPRRSGAAG
GMDPRMWSLMQASTLPRRSGAAG

SEQ ID NO: 86723 - protein, 23 aa, Artificial Sequence
  Description of Artificial Sequence: Synthetic peptide
  Seed: GMDPRMCSLMQGSTLPRRSGAAG
GMDPRMWSLMQASTMPRRSGAAG

SEQ ID NO: 86724 - protein, 23 aa, Artificial Sequence
  Description of Artificial Sequence: Synthetic peptide
  Seed: GMDPRMCSLMQGSTLPRRSGAAG
GMDPRMWSLMQASTNPRRSGAAG

SEQ ID NO: 86725 - protein, 23 aa, Artificial Sequence
  Description of Artificial Sequence: Synthetic peptide
  Seed: GMDPRMCSLMQGSTLPRRSGAAG
GMDPRMWSLMQASTQPRRSGAAG

SEQ ID NO: 86726 - protein, 23 aa, Artificial Sequence
  Description of Artificial Sequence: Synthetic peptide
  Seed: GMDPRMCSLMQGSTLPRRSGAAG
GMDPRMWSLMQASTSPRRSGAAG

SEQ ID NO: 86727 - protein, 23 aa, Artificial Sequence
  Description of Artificial Sequence: Synthetic peptide
  Seed: GMDPRMCSLMQGSTLPRRSGAAG
GMDPRMWSLMQASTTPRRSGAAG

SEQ ID NO: 86728 - protein, 23 aa, Artificial Sequence
  Description of Artificial Sequence: Synthetic peptide
  Seed: GMDPRMCSLMQGSTLPRRSGAAG
GMDPRMWSLMQASTVPRRSGAAG

SEQ ID NO: 86729 - protein, 23 aa, Artificial Sequence
  Description of Artificial Sequence: Synthetic peptide
  Seed: GMDPRMCSLMQGSTLPRRSGAAG
GMDPRMWSLMQGSTAPRRSGAAG

SEQ ID NO: 86730 - protein, 23 aa, Artificial Sequence
  Description of Artificial Sequence: Synthetic peptide
  Seed: GMDPRMCSLMQGSTLPRRSGAAG
GMDPRMWSLMQGSTIPRRSGAAG

SEQ ID NO: 86731 - protein, 23 aa, Artificial Sequence
  Description of Artificial Sequence: Synthetic peptide
  Seed: GMDPRMCSLMQGSTLPRRSGAAG
GMDPRMWSLMQGSTLPRRSGAAG

SEQ ID NO: 86732 - protein, 23 aa, Artificial Sequence
  Description of Artificial Sequence: Synthetic peptide
  Seed: GMDPRMCSLMQGSTLPRRSGAAG
GMDPRMWSLMQGSTMPRRSGAAG

SEQ ID NO: 86733 - protein, 23 aa, Artificial Sequence
  Description of Artificial Sequence: Synthetic peptide
  Seed: GMDPRMCSLMQGSTLPRRSGAAG
GMDPRMWSLMQGSTSPRRSGAAG

SEQ ID NO: 86734 - protein, 23 aa, Artificial Sequence
  Description of Artificial Sequence: Synthetic peptide
  Seed: GMDPRMCSLMQGSTLPRRSGAAG
GMDPRMWSLMQGSTTPRRSGAAG

SEQ ID NO: 86735 - protein, 23 aa, Artificial Sequence
  Description of Artificial Sequence: Synthetic peptide
  Seed: GMDPRMCSLMQGSTLPRRSGAAG
GMDPRMWSLMQGSTVPRRSGAAG

SEQ ID NO: 86736 - protein, 23 aa, Artificial Sequence
  Description of Artificial Sequence: Synthetic peptide
  Seed: GMDPRMCSLMQGSTLPRRSGAAG
GMDPRMWSLMQISTAPRRSGAAG

SEQ ID NO: 86737 - protein, 23 aa, Artificial Sequence
  Description of Artificial Sequence: Synthetic peptide
  Seed: GMDPRMCSLMQGSTLPRRSGAAG
GMDPRMWSLMQISTNPRRSGAAG

SEQ ID NO: 86738 - protein, 23 aa, Artificial Sequence
  Description of Artificial Sequence: Synthetic peptide
  Seed: GMDPRMCSLMQGSTLPRRSGAAG
GMDPRMWSLMQISTSPRRSGAAG

SEQ ID NO: 86739 - protein, 23 aa, Artificial Sequence
  Description of Artificial Sequence: Synthetic peptide
  Seed: GMDPRMCSLMQGSTLPRRSGAAG
GMDPRMWSLMQNSTAPRRSGAAG

SEQ ID NO: 86740 - protein, 23 aa, Artificial Sequence
  Description of Artificial Sequence: Synthetic peptide
  Seed: GMDPRMCSLMQGSTLPRRSGAAG
GMDPRMWSLMQNSTIPRRSGAAG

SEQ ID NO: 86741 - protein, 23 aa, Artificial Sequence
  Description of Artificial Sequence: Synthetic peptide
  Seed: GMDPRMCSLMQGSTLPRRSGAAG
GMDPRMWSLMQNSTLPRRSGAAG

SEQ ID NO: 86742 - protein, 23 aa, Artificial Sequence
  Description of Artificial Sequence: Synthetic peptide
  Seed: GMDPRMCSLMQGSTLPRRSGAAG
GMDPRMWSLMQNSTVPRRSGAAG

SEQ ID NO: 86743 - protein, 23 aa, Artificial Sequence
  Description of Artificial Sequence: Synthetic peptide
  Seed: GMDPRMCSLMQGSTLPRRSGAAG
GMDPRMWSLMQPSTAPRRSGAAG

SEQ ID NO: 86744 - protein, 23 aa, Artificial Sequence
  Description of Artificial Sequence: Synthetic peptide
  Seed: GMDPRMCSLMQGSTLPRRSGAAG
GMDPRMWSLMQPSTIPRRSGAAG

SEQ ID NO: 86745 - protein, 23 aa, Artificial Sequence
  Description of Artificial Sequence: Synthetic peptide
  Seed: GMDPRMCSLMQGSTLPRRSGAAG
GMDPRMWSLMQPSTLPRRSGAAG

SEQ ID NO: 86746 - protein, 23 aa, Artificial Sequence
  Description of Artificial Sequence: Synthetic peptide
  Seed: GMDPRMCSLMQGSTLPRRSGAAG
GMDPRMWSLMQPSTMPRRSGAAG

SEQ ID NO: 86747 - protein, 23 aa, Artificial Sequence
  Description of Artificial Sequence: Synthetic peptide
  Seed: GMDPRMCSLMQGSTLPRRSGAAG
GMDPRMWSLMQPSTNPRRSGAAG

SEQ ID NO: 86748 - protein, 23 aa, Artificial Sequence
  Description of Artificial Sequence: Synthetic peptide
  Seed: GMDPRMCSLMQGSTLPRRSGAAG
GMDPRMWSLMQPSTSPRRSGAAG

SEQ ID NO: 86749 - protein, 23 aa, Artificial Sequence
  Description of Artificial Sequence: Synthetic peptide
  Seed: GMDPRMCSLMQGSTLPRRSGAAG
GMDPRMWSLMQPSTTPRRSGAAG

SEQ ID NO: 86750 - protein, 23 aa, Artificial Sequence
  Description of Artificial Sequence: Synthetic peptide
  Seed: GMDPRMCSLMQGSTLPRRSGAAG
GMDPRMWSLMQPSTVPRRSGAAG

SEQ ID NO: 86751 - protein, 23 aa, Artificial Sequence
  Description of Artificial Sequence: Synthetic peptide
  Seed: GMDPRMCSLMQGSTLPRRSGAAG
GMDPRMWSLMQSSTAPRRSGAAG

SEQ ID NO: 86752 - protein, 23 aa, Artificial Sequence
  Description of Artificial Sequence: Synthetic peptide
  Seed: GMDPRMCSLMQGSTLPRRSGAAG
GMDPRMWSLMQSSTIPRRSGAAG

SEQ ID NO: 86753 - protein, 23 aa, Artificial Sequence
  Description of Artificial Sequence: Synthetic peptide
  Seed: GMDPRMCSLMQGSTLPRRSGAAG
GMDPRMWSLMQSSTLPRRSGAAG

SEQ ID NO: 86754 - protein, 23 aa, Artificial Sequence
  Description of Artificial Sequence: Synthetic peptide
  Seed: GMDPRMCSLMQGSTLPRRSGAAG
GMDPRMWSLMQSSTMPRRSGAAG

SEQ ID NO: 86755 - protein, 23 aa, Artificial Sequence
  Description of Artificial Sequence: Synthetic peptide
  Seed: GMDPRMCSLMQGSTLPRRSGAAG
GMDPRMWSLMQSSTNPRRSGAAG

SEQ ID NO: 86756 - protein, 23 aa, Artificial Sequence
  Description of Artificial Sequence: Synthetic peptide
  Seed: GMDPRMCSLMQGSTLPRRSGAAG
GMDPRMWSLMQSSTSPRRSGAAG

SEQ ID NO: 86757 - protein, 23 aa, Artificial Sequence
  Description of Artificial Sequence: Synthetic peptide
  Seed: GMDPRMCSLMQGSTLPRRSGAAG
GMDPRMWSLMQSSTTPRRSGAAG

SEQ ID NO: 86758 - protein, 23 aa, Artificial Sequence
  Description of Artificial Sequence: Synthetic peptide
  Seed: GMDPRMCSLMQGSTLPRRSGAAG
GMDPRMWSLMQSSTVPRRSGAAG

SEQ ID NO: 86759 - protein, 23 aa, Artificial Sequence
  Description of Artificial Sequence: Synthetic peptide
  Seed: GMDPRMCSLMQGSTLPRRSGAAG
GMDPRMWSLMQTSTAPRRSGAAG

SEQ ID NO: 86760 - protein, 23 aa, Artificial Sequence
  Description of Artificial Sequence: Synthetic peptide
  Seed: GMDPRMCSLMQGSTLPRRSGAAG
GMDPRMWSLMQTSTIPRRSGAAG

SEQ ID NO: 86761 - protein, 23 aa, Artificial Sequence
  Description of Artificial Sequence: Synthetic peptide
  Seed: GMDPRMCSLMQGSTLPRRSGAAG
GMDPRMWSLMQTSTLPRRSGAAG

SEQ ID NO: 86762 - protein, 23 aa, Artificial Sequence
  Description of Artificial Sequence: Synthetic peptide
  Seed: GMDPRMCSLMQGSTLPRRSGAAG
GMDPRMWSLMQTSTMPRRSGAAG

SEQ ID NO: 86763 - protein, 23 aa, Artificial Sequence
  Description of Artificial Sequence: Synthetic peptide
  Seed: GMDPRMCSLMQGSTLPRRSGAAG
GMDPRMWSLMQTSTNPRRSGAAG

SEQ ID NO: 86764 - protein, 23 aa, Artificial Sequence
  Description of Artificial Sequence: Synthetic peptide
  Seed: GMDPRMCSLMQGSTLPRRSGAAG
GMDPRMWSLMQTSTSPRRSGAAG

SEQ ID NO: 86765 - protein, 23 aa, Artificial Sequence
  Description of Artificial Sequence: Synthetic peptide
  Seed: GMDPRMCSLMQGSTLPRRSGAAG
GMDPRMWSLMQTSTTPRRSGAAG

SEQ ID NO: 86766 - protein, 23 aa, Artificial Sequence
  Description of Artificial Sequence: Synthetic peptide
  Seed: GMDPRMCSLMQGSTLPRRSGAAG
GMDPRMWSLMQTSTVPRRSGAAG

SEQ ID NO: 86767 - protein, 23 aa, Artificial Sequence
  Description of Artificial Sequence: Synthetic peptide
  Seed: GMDPRMCSLMQGSTLPRRSGAAG
GMDPRMWSLMQVSTAPRRSGAAG

SEQ ID NO: 86768 - protein, 23 aa, Artificial Sequence
  Description of Artificial Sequence: Synthetic peptide
  Seed: GMDPRMCSLMQGSTLPRRSGAAG
GMDPRMWSLMQVSTNPRRSGAAG

SEQ ID NO: 86769 - protein, 23 aa, Artificial Sequence
  Description of Artificial Sequence: Synthetic peptide
  Seed: GMDPRMCSLMQGSTLPRRSGAAG
GMDPRMWSLMQVSTSPRRSGAAG

SEQ ID NO: 86770 - protein, 23 aa, Artificial Sequence
  Description of Artificial Sequence: Synthetic peptide
  Seed: GMDPRMCSLMQGSTLPRRSGAAG
GMDPRMWSLMQVSTTPRRSGAAG

SEQ ID NO: 86771 - protein, 23 aa, Artificial Sequence
  Description of Artificial Sequence: Synthetic peptide
  Seed: GMDPRMCSLMQGSTLPRRSGAAG
GMDPRMWSLMQVSTVPRRSGAAG

SEQ ID NO: 86772 - protein, 23 aa, Artificial Sequence
  Description of Artificial Sequence: Synthetic peptide
  Seed: GMDPRMCSLMQGSTLPRRSGAAG
GMDPRMWSLQQASTAPRRSGAAG

SEQ ID NO: 86773 - protein, 23 aa, Artificial Sequence
  Description of Artificial Sequence: Synthetic peptide
  Seed: GMDPRMCSLMQGSTLPRRSGAAG
GMDPRMWSLQQASTIPRRSGAAG

SEQ ID NO: 86774 - protein, 23 aa, Artificial Sequence
  Description of Artificial Sequence: Synthetic peptide
  Seed: GMDPRMCSLMQGSTLPRRSGAAG
GMDPRMWSLQQASTLPRRSGAAG

SEQ ID NO: 86775 - protein, 23 aa, Artificial Sequence
  Description of Artificial Sequence: Synthetic peptide
  Seed: GMDPRMCSLMQGSTLPRRSGAAG
GMDPRMWSLQQASTVPRRSGAAG

SEQ ID NO: 86776 - protein, 23 aa, Artificial Sequence
  Description of Artificial Sequence: Synthetic peptide
  Seed: GMDPRMCSLMQGSTLPRRSGAAG
GMDPRMWSLQQGSTLPRRSGAAG

SEQ ID NO: 86777 - protein, 23 aa, Artificial Sequence
  Description of Artificial Sequence: Synthetic peptide
  Seed: GMDPRMCSLMQGSTLPRRSGAAG
GMDPRMWSLQQGSTVPRRSGAAG

SEQ ID NO: 86778 - protein, 23 aa, Artificial Sequence
  Description of Artificial Sequence: Synthetic peptide
  Seed: GMDPRMCSLMQGSTLPRRSGAAG
GMDPRMWSLVQASTAPRRSGAAG

SEQ ID NO: 86779 - protein, 23 aa, Artificial Sequence
  Description of Artificial Sequence: Synthetic peptide
  Seed: GMDPRMCSLMQGSTLPRRSGAAG
GMDPRMWSLVQASTIPRRSGAAG

SEQ ID NO: 86780 - protein, 23 aa, Artificial Sequence
  Description of Artificial Sequence: Synthetic peptide
  Seed: GMDPRMCSLMQGSTLPRRSGAAG
GMDPRMWSLVQASTLPRRSGAAG

SEQ ID NO: 86781 - protein, 23 aa, Artificial Sequence
  Description of Artificial Sequence: Synthetic peptide
  Seed: GMDPRMCSLMQGSTLPRRSGAAG
GMDPRMWSLVQASTNPRRSGAAG

SEQ ID NO: 86782 - protein, 23 aa, Artificial Sequence
  Description of Artificial Sequence: Synthetic peptide
  Seed: GMDPRMCSLMQGSTLPRRSGAAG
GMDPRMWSLVQASTSPRRSGAAG

SEQ ID NO: 86783 - protein, 23 aa, Artificial Sequence
  Description of Artificial Sequence: Synthetic peptide
  Seed: GMDPRMCSLMQGSTLPRRSGAAG
GMDPRMWSLVQASTVPRRSGAAG

SEQ ID NO: 86784 - protein, 23 aa, Artificial Sequence
  Description of Artificial Sequence: Synthetic peptide
  Seed: GMDPRMCSLMQGSTLPRRSGAAG
GMDPRMWSLVQGSTAPRRSGAAG

SEQ ID NO: 86785 - protein, 23 aa, Artificial Sequence
  Description of Artificial Sequence: Synthetic peptide
  Seed: GMDPRMCSLMQGSTLPRRSGAAG
GMDPRMWSLVQGSTIPRRSGAAG

SEQ ID NO: 86786 - protein, 23 aa, Artificial Sequence
  Description of Artificial Sequence: Synthetic peptide
  Seed: GMDPRMCSLMQGSTLPRRSGAAG
GMDPRMWSLVQGSTLPRRSGAAG

SEQ ID NO: 86787 - protein, 23 aa, Artificial Sequence
  Description of Artificial Sequence: Synthetic peptide
  Seed: GMDPRMCSLMQGSTLPRRSGAAG
GMDPRMWSLVQGSTVPRRSGAAG

SEQ ID NO: 86788 - protein, 23 aa, Artificial Sequence
  Description of Artificial Sequence: Synthetic peptide
  Seed: GMDPRMCSLMQGSTLPRRSGAAG
GMDPRMWSLVQPSTAPRRSGAAG

SEQ ID NO: 86789 - protein, 23 aa, Artificial Sequence
  Description of Artificial Sequence: Synthetic peptide
  Seed: GMDPRMCSLMQGSTLPRRSGAAG
GMDPRMWSLVQSSTVPRRSGAAG

SEQ ID NO: 86790 - protein, 23 aa, Artificial Sequence
  Description of Artificial Sequence: Synthetic peptide
  Seed: GMDPRMCSLMQGSTLPRRSGAAG
GMDPRMYSLAQASTAPRRSGAAG

SEQ ID NO: 86791 - protein, 23 aa, Artificial Sequence
  Description of Artificial Sequence: Synthetic peptide
  Seed: GMDPRMCSLMQGSTLPRRSGAAG
GMDPRMYSLAQASTGPRRSGAAG

SEQ ID NO: 86792 - protein, 23 aa, Artificial Sequence
  Description of Artificial Sequence: Synthetic peptide
  Seed: GMDPRMCSLMQGSTLPRRSGAAG
GMDPRMYSLAQASTIPRRSGAAG

SEQ ID NO: 86793 - protein, 23 aa, Artificial Sequence
  Description of Artificial Sequence: Synthetic peptide
  Seed: GMDPRMCSLMQGSTLPRRSGAAG
GMDPRMYSLAQASTLPRRSGAAG

SEQ ID NO: 86794 - protein, 23 aa, Artificial Sequence
  Description of Artificial Sequence: Synthetic peptide
  Seed: GMDPRMCSLMQGSTLPRRSGAAG
GMDPRMYSLAQASTMPRRSGAAG

SEQ ID NO: 86795 - protein, 23 aa, Artificial Sequence
  Description of Artificial Sequence: Synthetic peptide
  Seed: GMDPRMCSLMQGSTLPRRSGAAG
GMDPRMYSLAQASTNPRRSGAAG

SEQ ID NO: 86796 - protein, 23 aa, Artificial Sequence
  Description of Artificial Sequence: Synthetic peptide
  Seed: GMDPRMCSLMQGSTLPRRSGAAG
GMDPRMYSLAQASTQPRRSGAAG

SEQ ID NO: 86797 - protein, 23 aa, Artificial Sequence
  Description of Artificial Sequence: Synthetic peptide
  Seed: GMDPRMCSLMQGSTLPRRSGAAG
GMDPRMYSLAQASTSPRRSGAAG

SEQ ID NO: 86798 - protein, 23 aa, Artificial Sequence
  Description of Artificial Sequence: Synthetic peptide
  Seed: GMDPRMCSLMQGSTLPRRSGAAG
GMDPRMYSLAQASTTPRRSGAAG

SEQ ID NO: 86799 - protein, 23 aa, Artificial Sequence
  Description of Artificial Sequence: Synthetic peptide
  Seed: GMDPRMCSLMQGSTLPRRSGAAG
GMDPRMYSLAQASTVPRRSGAAG

SEQ ID NO: 86800 - protein, 23 aa, Artificial Sequence
  Description of Artificial Sequence: Synthetic peptide
  Seed: GMDPRMCSLMQGSTLPRRSGAAG
GMDPRMYSLAQGSTAPRRSGAAG

SEQ ID NO: 86801 - protein, 23 aa, Artificial Sequence
  Description of Artificial Sequence: Synthetic peptide
  Seed: GMDPRMCSLMQGSTLPRRSGAAG
GMDPRMYSLAQGSTIPRRSGAAG

SEQ ID NO: 86802 - protein, 23 aa, Artificial Sequence
  Description of Artificial Sequence: Synthetic peptide
  Seed: GMDPRMCSLMQGSTLPRRSGAAG
GMDPRMYSLAQGSTLPRRSGAAG

SEQ ID NO: 86803 - protein, 23 aa, Artificial Sequence
  Description of Artificial Sequence: Synthetic peptide
  Seed: GMDPRMCSLMQGSTLPRRSGAAG
GMDPRMYSLAQGSTMPRRSGAAG

SEQ ID NO: 86804 - protein, 23 aa, Artificial Sequence
  Description of Artificial Sequence: Synthetic peptide
  Seed: GMDPRMCSLMQGSTLPRRSGAAG
GMDPRMYSLAQGSTVPRRSGAAG

SEQ ID NO: 86805 - protein, 23 aa, Artificial Sequence
  Description of Artificial Sequence: Synthetic peptide
  Seed: GMDPRMCSLMQGSTLPRRSGAAG
GMDPRMYSLAQISTAPRRSGAAG

SEQ ID NO: 86806 - protein, 23 aa, Artificial Sequence
  Description of Artificial Sequence: Synthetic peptide
  Seed: GMDPRMCSLMQGSTLPRRSGAAG
GMDPRMYSLAQISTNPRRSGAAG

SEQ ID NO: 86807 - protein, 23 aa, Artificial Sequence
  Description of Artificial Sequence: Synthetic peptide
  Seed: GMDPRMCSLMQGSTLPRRSGAAG
GMDPRMYSLAQISTSPRRSGAAG

SEQ ID NO: 86808 - protein, 23 aa, Artificial Sequence
  Description of Artificial Sequence: Synthetic peptide
  Seed: GMDPRMCSLMQGSTLPRRSGAAG
GMDPRMYSLAQISTVPRRSGAAG

SEQ ID NO: 86809 - protein, 23 aa, Artificial Sequence
  Description of Artificial Sequence: Synthetic peptide
  Seed: GMDPRMCSLMQGSTLPRRSGAAG
GMDPRMYSLAQNSTIPRRSGAAG

SEQ ID NO: 86810 - protein, 23 aa, Artificial Sequence
  Description of Artificial Sequence: Synthetic peptide
  Seed: GMDPRMCSLMQGSTLPRRSGAAG
GMDPRMYSLAQNSTLPRRSGAAG

SEQ ID NO: 86811 - protein, 23 aa, Artificial Sequence
  Description of Artificial Sequence: Synthetic peptide
  Seed: GMDPRMCSLMQGSTLPRRSGAAG
GMDPRMYSLAQNSTVPRRSGAAG

SEQ ID NO: 86812 - protein, 23 aa, Artificial Sequence
  Description of Artificial Sequence: Synthetic peptide
  Seed: GMDPRMCSLMQGSTLPRRSGAAG
GMDPRMYSLAQPSTAPRRSGAAG

SEQ ID NO: 86813 - protein, 23 aa, Artificial Sequence
  Description of Artificial Sequence: Synthetic peptide
  Seed: GMDPRMCSLMQGSTLPRRSGAAG
GMDPRMYSLAQPSTIPRRSGAAG

SEQ ID NO: 86814 - protein, 23 aa, Artificial Sequence
  Description of Artificial Sequence: Synthetic peptide
  Seed: GMDPRMCSLMQGSTLPRRSGAAG
GMDPRMYSLAQPSTLPRRSGAAG

SEQ ID NO: 86815 - protein, 23 aa, Artificial Sequence
  Description of Artificial Sequence: Synthetic peptide
  Seed: GMDPRMCSLMQGSTLPRRSGAAG
GMDPRMYSLAQPSTMPRRSGAAG

SEQ ID NO: 86816 - protein, 23 aa, Artificial Sequence
  Description of Artificial Sequence: Synthetic peptide
  Seed: GMDPRMCSLMQGSTLPRRSGAAG
GMDPRMYSLAQPSTNPRRSGAAG

SEQ ID NO: 86817 - protein, 23 aa, Artificial Sequence
  Description of Artificial Sequence: Synthetic peptide
  Seed: GMDPRMCSLMQGSTLPRRSGAAG
GMDPRMYSLAQPSTSPRRSGAAG

SEQ ID NO: 86818 - protein, 23 aa, Artificial Sequence
  Description of Artificial Sequence: Synthetic peptide
  Seed: GMDPRMCSLMQGSTLPRRSGAAG
GMDPRMYSLAQPSTVPRRSGAAG

SEQ ID NO: 86819 - protein, 23 aa, Artificial Sequence
  Description of Artificial Sequence: Synthetic peptide
  Seed: GMDPRMCSLMQGSTLPRRSGAAG
GMDPRMYSLAQSSTAPRRSGAAG

SEQ ID NO: 86820 - protein, 23 aa, Artificial Sequence
  Description of Artificial Sequence: Synthetic peptide
  Seed: GMDPRMCSLMQGSTLPRRSGAAG
GMDPRMYSLAQSSTIPRRSGAAG

SEQ ID NO: 86821 - protein, 23 aa, Artificial Sequence
  Description of Artificial Sequence: Synthetic peptide
  Seed: GMDPRMCSLMQGSTLPRRSGAAG
GMDPRMYSLAQSSTLPRRSGAAG

SEQ ID NO: 86822 - protein, 23 aa, Artificial Sequence
  Description of Artificial Sequence: Synthetic peptide
  Seed: GMDPRMCSLMQGSTLPRRSGAAG
GMDPRMYSLAQSSTMPRRSGAAG

SEQ ID NO: 86823 - protein, 23 aa, Artificial Sequence
  Description of Artificial Sequence: Synthetic peptide
  Seed: GMDPRMCSLMQGSTLPRRSGAAG
GMDPRMYSLAQSSTNPRRSGAAG

SEQ ID NO: 86824 - protein, 23 aa, Artificial Sequence
  Description of Artificial Sequence: Synthetic peptide
  Seed: GMDPRMCSLMQGSTLPRRSGAAG
GMDPRMYSLAQSSTSPRRSGAAG

SEQ ID NO: 86825 - protein, 23 aa, Artificial Sequence
  Description of Artificial Sequence: Synthetic peptide
  Seed: GMDPRMCSLMQGSTLPRRSGAAG
GMDPRMYSLAQSSTTPRRSGAAG

SEQ ID NO: 86826 - protein, 23 aa, Artificial Sequence
  Description of Artificial Sequence: Synthetic peptide
  Seed: GMDPRMCSLMQGSTLPRRSGAAG
GMDPRMYSLAQSSTVPRRSGAAG

SEQ ID NO: 86827 - protein, 23 aa, Artificial Sequence
  Description of Artificial Sequence: Synthetic peptide
  Seed: GMDPRMCSLMQGSTLPRRSGAAG
GMDPRMYSLAQTSTAPRRSGAAG

SEQ ID NO: 86828 - protein, 23 aa, Artificial Sequence
  Description of Artificial Sequence: Synthetic peptide
  Seed: GMDPRMCSLMQGSTLPRRSGAAG
GMDPRMYSLAQTSTIPRRSGAAG

SEQ ID NO: 86829 - protein, 23 aa, Artificial Sequence
  Description of Artificial Sequence: Synthetic peptide
  Seed: GMDPRMCSLMQGSTLPRRSGAAG
GMDPRMYSLAQTSTLPRRSGAAG

SEQ ID NO: 86830 - protein, 23 aa, Artificial Sequence
  Description of Artificial Sequence: Synthetic peptide
  Seed: GMDPRMCSLMQGSTLPRRSGAAG
GMDPRMYSLAQTSTMPRRSGAAG

SEQ ID NO: 86831 - protein, 23 aa, Artificial Sequence
  Description of Artificial Sequence: Synthetic peptide
  Seed: GMDPRMCSLMQGSTLPRRSGAAG
GMDPRMYSLAQTSTNPRRSGAAG

SEQ ID NO: 86832 - protein, 23 aa, Artificial Sequence
  Description of Artificial Sequence: Synthetic peptide
  Seed: GMDPRMCSLMQGSTLPRRSGAAG
GMDPRMYSLAQTSTSPRRSGAAG

SEQ ID NO: 86833 - protein, 23 aa, Artificial Sequence
  Description of Artificial Sequence: Synthetic peptide
  Seed: GMDPRMCSLMQGSTLPRRSGAAG
GMDPRMYSLAQTSTVPRRSGAAG

SEQ ID NO: 86834 - protein, 23 aa, Artificial Sequence
  Description of Artificial Sequence: Synthetic peptide
  Seed: GMDPRMCSLMQGSTLPRRSGAAG
GMDPRMYSLAQVSTAPRRSGAAG

SEQ ID NO: 86835 - protein, 23 aa, Artificial Sequence
  Description of Artificial Sequence: Synthetic peptide
  Seed: GMDPRMCSLMQGSTLPRRSGAAG
GMDPRMYSLAQVSTIPRRSGAAG

SEQ ID NO: 86836 - protein, 23 aa, Artificial Sequence
  Description of Artificial Sequence: Synthetic peptide
  Seed: GMDPRMCSLMQGSTLPRRSGAAG
GMDPRMYSLAQVSTLPRRSGAAG

SEQ ID NO: 86837 - protein, 23 aa, Artificial Sequence
  Description of Artificial Sequence: Synthetic peptide
  Seed: GMDPRMCSLMQGSTLPRRSGAAG
GMDPRMYSLAQVSTMPRRSGAAG

SEQ ID NO: 86838 - protein, 23 aa, Artificial Sequence
  Description of Artificial Sequence: Synthetic peptide
  Seed: GMDPRMCSLMQGSTLPRRSGAAG
GMDPRMYSLAQVSTNPRRSGAAG

SEQ ID NO: 86839 - protein, 23 aa, Artificial Sequence
  Description of Artificial Sequence: Synthetic peptide
  Seed: GMDPRMCSLMQGSTLPRRSGAAG
GMDPRMYSLAQVSTSPRRSGAAG

SEQ ID NO: 86840 - protein, 23 aa, Artificial Sequence
  Description of Artificial Sequence: Synthetic peptide
  Seed: GMDPRMCSLMQGSTLPRRSGAAG
GMDPRMYSLAQVSTTPRRSGAAG

SEQ ID NO: 86841 - protein, 23 aa, Artificial Sequence
  Description of Artificial Sequence: Synthetic peptide
  Seed: GMDPRMCSLMQGSTLPRRSGAAG
GMDPRMYSLAQVSTVPRRSGAAG

SEQ ID NO: 86842 - protein, 23 aa, Artificial Sequence
  Description of Artificial Sequence: Synthetic peptide
  Seed: GMDPRMCSLMQGSTLPRRSGAAG
GMDPRMYSLEQASTAPRRSGAAG

SEQ ID NO: 86843 - protein, 23 aa, Artificial Sequence
  Description of Artificial Sequence: Synthetic peptide
  Seed: GMDPRMCSLMQGSTLPRRSGAAG
GMDPRMYSLEQASTIPRRSGAAG

SEQ ID NO: 86844 - protein, 23 aa, Artificial Sequence
  Description of Artificial Sequence: Synthetic peptide
  Seed: GMDPRMCSLMQGSTLPRRSGAAG
GMDPRMYSLEQASTLPRRSGAAG

SEQ ID NO: 86845 - protein, 23 aa, Artificial Sequence
  Description of Artificial Sequence: Synthetic peptide
  Seed: GMDPRMCSLMQGSTLPRRSGAAG
GMDPRMYSLEQASTVPRRSGAAG

SEQ ID NO: 86846 - protein, 23 aa, Artificial Sequence
  Description of Artificial Sequence: Synthetic peptide
  Seed: GMDPRMCSLMQGSTLPRRSGAAG
GMDPRMYSLEQGSTLPRRSGAAG

SEQ ID NO: 86847 - protein, 23 aa, Artificial Sequence
  Description of Artificial Sequence: Synthetic peptide
  Seed: GMDPRMCSLMQGSTLPRRSGAAG
GMDPRMYSLFQASTAPRRSGAAG

SEQ ID NO: 86848 - protein, 23 aa, Artificial Sequence
  Description of Artificial Sequence: Synthetic peptide
  Seed: GMDPRMCSLMQGSTLPRRSGAAG
GMDPRMYSLFQASTIPRRSGAAG

SEQ ID NO: 86849 - protein, 23 aa, Artificial Sequence
  Description of Artificial Sequence: Synthetic peptide
  Seed: GMDPRMCSLMQGSTLPRRSGAAG
GMDPRMYSLFQASTLPRRSGAAG

SEQ ID NO: 86850 - protein, 23 aa, Artificial Sequence
  Description of Artificial Sequence: Synthetic peptide
  Seed: GMDPRMCSLMQGSTLPRRSGAAG
GMDPRMYSLFQASTNPRRSGAAG

SEQ ID NO: 86851 - protein, 23 aa, Artificial Sequence
  Description of Artificial Sequence: Synthetic peptide
  Seed: GMDPRMCSLMQGSTLPRRSGAAG
GMDPRMYSLFQASTSPRRSGAAG

SEQ ID NO: 86852 - protein, 23 aa, Artificial Sequence
  Description of Artificial Sequence: Synthetic peptide
  Seed: GMDPRMCSLMQGSTLPRRSGAAG
GMDPRMYSLFQASTVPRRSGAAG

SEQ ID NO: 86853 - protein, 23 aa, Artificial Sequence
  Description of Artificial Sequence: Synthetic peptide
  Seed: GMDPRMCSLMQGSTLPRRSGAAG
GMDPRMYSLFQGSTVPRRSGAAG

SEQ ID NO: 86854 - protein, 23 aa, Artificial Sequence
  Description of Artificial Sequence: Synthetic peptide
  Seed: GMDPRMCSLMQGSTLPRRSGAAG
GMDPRMYSLFQPSTAPRRSGAAG

SEQ ID NO: 86855 - protein, 23 aa, Artificial Sequence
  Description of Artificial Sequence: Synthetic peptide
  Seed: GMDPRMCSLMQGSTLPRRSGAAG
GMDPRMYSLFQSSTLPRRSGAAG

SEQ ID NO: 86856 - protein, 23 aa, Artificial Sequence
  Description of Artificial Sequence: Synthetic peptide
  Seed: GMDPRMCSLMQGSTLPRRSGAAG
GMDPRMYSLFQSSTVPRRSGAAG

SEQ ID NO: 86857 - protein, 23 aa, Artificial Sequence
  Description of Artificial Sequence: Synthetic peptide
  Seed: GMDPRMCSLMQGSTLPRRSGAAG
GMDPRMYSLFQTSTAPRRSGAAG

SEQ ID NO: 86858 - protein, 23 aa, Artificial Sequence
  Description of Artificial Sequence: Synthetic peptide
  Seed: GMDPRMCSLMQGSTLPRRSGAAG
GMDPRMYSLFQVSTAPRRSGAAG

SEQ ID NO: 86859 - protein, 23 aa, Artificial Sequence
  Description of Artificial Sequence: Synthetic peptide
  Seed: GMDPRMCSLMQGSTLPRRSGAAG
GMDPRMYSLGQASTIPRRSGAAG

SEQ ID NO: 86860 - protein, 23 aa, Artificial Sequence
  Description of Artificial Sequence: Synthetic peptide
  Seed: GMDPRMCSLMQGSTLPRRSGAAG
GMDPRMYSLGQASTLPRRSGAAG

SEQ ID NO: 86861 - protein, 23 aa, Artificial Sequence
  Description of Artificial Sequence: Synthetic peptide
  Seed: GMDPRMCSLMQGSTLPRRSGAAG
GMDPRMYSLGQASTVPRRSGAAG

SEQ ID NO: 86862 - protein, 23 aa, Artificial Sequence
  Description of Artificial Sequence: Synthetic peptide
  Seed: GMDPRMCSLMQGSTLPRRSGAAG
GMDPRMYSLIQASTAPRRSGAAG

SEQ ID NO: 86863 - protein, 23 aa, Artificial Sequence
  Description of Artificial Sequence: Synthetic peptide
  Seed: GMDPRMCSLMQGSTLPRRSGAAG
GMDPRMYSLIQASTCPRRSGAAG

SEQ ID NO: 86864 - protein, 23 aa, Artificial Sequence
  Description of Artificial Sequence: Synthetic peptide
  Seed: GMDPRMCSLMQGSTLPRRSGAAG
GMDPRMYSLIQASTGPRRSGAAG

SEQ ID NO: 86865 - protein, 23 aa, Artificial Sequence
  Description of Artificial Sequence: Synthetic peptide
  Seed: GMDPRMCSLMQGSTLPRRSGAAG
GMDPRMYSLIQASTHPRRSGAAG

SEQ ID NO: 86866 - protein, 23 aa, Artificial Sequence
  Description of Artificial Sequence: Synthetic peptide
  Seed: GMDPRMCSLMQGSTLPRRSGAAG
GMDPRMYSLIQASTIPRRSGAAG

SEQ ID NO: 86867 - protein, 23 aa, Artificial Sequence
  Description of Artificial Sequence: Synthetic peptide
  Seed: GMDPRMCSLMQGSTLPRRSGAAG
GMDPRMYSLIQASTLPRRSGAAG

SEQ ID NO: 86868 - protein, 23 aa, Artificial Sequence
  Description of Artificial Sequence: Synthetic peptide
  Seed: GMDPRMCSLMQGSTLPRRSGAAG
GMDPRMYSLIQASTMPRRSGAAG

SEQ ID NO: 86869 - protein, 23 aa, Artificial Sequence
  Description of Artificial Sequence: Synthetic peptide
  Seed: GMDPRMCSLMQGSTLPRRSGAAG
GMDPRMYSLIQASTNPRRSGAAG

SEQ ID NO: 86870 - protein, 23 aa, Artificial Sequence
  Description of Artificial Sequence: Synthetic peptide
  Seed: GMDPRMCSLMQGSTLPRRSGAAG
GMDPRMYSLIQASTPPRRSGAAG

SEQ ID NO: 86871 - protein, 23 aa, Artificial Sequence
  Description of Artificial Sequence: Synthetic peptide
  Seed: GMDPRMCSLMQGSTLPRRSGAAG
GMDPRMYSLIQASTQPRRSGAAG

SEQ ID NO: 86872 - protein, 23 aa, Artificial Sequence
  Description of Artificial Sequence: Synthetic peptide
  Seed: GMDPRMCSLMQGSTLPRRSGAAG
GMDPRMYSLIQASTSPRRSGAAG

SEQ ID NO: 86873 - protein, 23 aa, Artificial Sequence
  Description of Artificial Sequence: Synthetic peptide
  Seed: GMDPRMCSLMQGSTLPRRSGAAG
GMDPRMYSLIQASTTPRRSGAAG

SEQ ID NO: 86874 - protein, 23 aa, Artificial Sequence
  Description of Artificial Sequence: Synthetic peptide
  Seed: GMDPRMCSLMQGSTLPRRSGAAG
GMDPRMYSLIQASTVPRRSGAAG

SEQ ID NO: 86875 - protein, 23 aa, Artificial Sequence
  Description of Artificial Sequence: Synthetic peptide
  Seed: GMDPRMCSLMQGSTLPRRSGAAG
GMDPRMYSLIQGSTAPRRSGAAG

SEQ ID NO: 86876 - protein, 23 aa, Artificial Sequence
  Description of Artificial Sequence: Synthetic peptide
  Seed: GMDPRMCSLMQGSTLPRRSGAAG
GMDPRMYSLIQGSTGPRRSGAAG

SEQ ID NO: 86877 - protein, 23 aa, Artificial Sequence
  Description of Artificial Sequence: Synthetic peptide
  Seed: GMDPRMCSLMQGSTLPRRSGAAG
GMDPRMYSLIQGSTIPRRSGAAG

SEQ ID NO: 86878 - protein, 23 aa, Artificial Sequence
  Description of Artificial Sequence: Synthetic peptide
  Seed: GMDPRMCSLMQGSTLPRRSGAAG
GMDPRMYSLIQGSTLPRRSGAAG

SEQ ID NO: 86879 - protein, 23 aa, Artificial Sequence
  Description of Artificial Sequence: Synthetic peptide
  Seed: GMDPRMCSLMQGSTLPRRSGAAG
GMDPRMYSLIQGSTMPRRSGAAG

SEQ ID NO: 86880 - protein, 23 aa, Artificial Sequence
  Description of Artificial Sequence: Synthetic peptide
  Seed: GMDPRMCSLMQGSTLPRRSGAAG
GMDPRMYSLIQGSTNPRRSGAAG

SEQ ID NO: 86881 - protein, 23 aa, Artificial Sequence
  Description of Artificial Sequence: Synthetic peptide
  Seed: GMDPRMCSLMQGSTLPRRSGAAG
GMDPRMYSLIQGSTSPRRSGAAG

SEQ ID NO: 86882 - protein, 23 aa, Artificial Sequence
  Description of Artificial Sequence: Synthetic peptide
  Seed: GMDPRMCSLMQGSTLPRRSGAAG
GMDPRMYSLIQGSTTPRRSGAAG

SEQ ID NO: 86883 - protein, 23 aa, Artificial Sequence
  Description of Artificial Sequence: Synthetic peptide
  Seed: GMDPRMCSLMQGSTLPRRSGAAG
GMDPRMYSLIQGSTVPRRSGAAG

SEQ ID NO: 86884 - protein, 23 aa, Artificial Sequence
  Description of Artificial Sequence: Synthetic peptide
  Seed: GMDPRMCSLMQGSTLPRRSGAAG
GMDPRMYSLIQISTAPRRSGAAG

SEQ ID NO: 86885 - protein, 23 aa, Artificial Sequence
  Description of Artificial Sequence: Synthetic peptide
  Seed: GMDPRMCSLMQGSTLPRRSGAAG
GMDPRMYSLIQISTGPRRSGAAG

SEQ ID NO: 86886 - protein, 23 aa, Artificial Sequence
  Description of Artificial Sequence: Synthetic peptide
  Seed: GMDPRMCSLMQGSTLPRRSGAAG
GMDPRMYSLIQISTIPRRSGAAG

SEQ ID NO: 86887 - protein, 23 aa, Artificial Sequence
  Description of Artificial Sequence: Synthetic peptide
  Seed: GMDPRMCSLMQGSTLPRRSGAAG
GMDPRMYSLIQISTLPRRSGAAG

SEQ ID NO: 86888 - protein, 23 aa, Artificial Sequence
  Description of Artificial Sequence: Synthetic peptide
  Seed: GMDPRMCSLMQGSTLPRRSGAAG
GMDPRMYSLIQISTMPRRSGAAG

SEQ ID NO: 86889 - protein, 23 aa, Artificial Sequence
  Description of Artificial Sequence: Synthetic peptide
  Seed: GMDPRMCSLMQGSTLPRRSGAAG
GMDPRMYSLIQISTNPRRSGAAG

SEQ ID NO: 86890 - protein, 23 aa, Artificial Sequence
  Description of Artificial Sequence: Synthetic peptide
  Seed: GMDPRMCSLMQGSTLPRRSGAAG
GMDPRMYSLIQISTSPRRSGAAG

SEQ ID NO: 86891 - protein, 23 aa, Artificial Sequence
  Description of Artificial Sequence: Synthetic peptide
  Seed: GMDPRMCSLMQGSTLPRRSGAAG
GMDPRMYSLIQISTTPRRSGAAG

SEQ ID NO: 86892 - protein, 23 aa, Artificial Sequence
  Description of Artificial Sequence: Synthetic peptide
  Seed: GMDPRMCSLMQGSTLPRRSGAAG
GMDPRMYSLIQISTVPRRSGAAG

SEQ ID NO: 86893 - protein, 23 aa, Artificial Sequence
  Description of Artificial Sequence: Synthetic peptide
  Seed: GMDPRMCSLMQGSTLPRRSGAAG
GMDPRMYSLIQLSTAPRRSGAAG

SEQ ID NO: 86894 - protein, 23 aa, Artificial Sequence
  Description of Artificial Sequence: Synthetic peptide
  Seed: GMDPRMCSLMQGSTLPRRSGAAG
GMDPRMYSLIQLSTNPRRSGAAG

SEQ ID NO: 86895 - protein, 23 aa, Artificial Sequence
  Description of Artificial Sequence: Synthetic peptide
  Seed: GMDPRMCSLMQGSTLPRRSGAAG
GMDPRMYSLIQMSTAPRRSGAAG

SEQ ID NO: 86896 - protein, 23 aa, Artificial Sequence
  Description of Artificial Sequence: Synthetic peptide
  Seed: GMDPRMCSLMQGSTLPRRSGAAG
GMDPRMYSLIQNSTAPRRSGAAG

SEQ ID NO: 86897 - protein, 23 aa, Artificial Sequence
  Description of Artificial Sequence: Synthetic peptide
  Seed: GMDPRMCSLMQGSTLPRRSGAAG
GMDPRMYSLIQNSTIPRRSGAAG

SEQ ID NO: 86898 - protein, 23 aa, Artificial Sequence
  Description of Artificial Sequence: Synthetic peptide
  Seed: GMDPRMCSLMQGSTLPRRSGAAG
GMDPRMYSLIQNSTLPRRSGAAG

SEQ ID NO: 86899 - protein, 23 aa, Artificial Sequence
  Description of Artificial Sequence: Synthetic peptide
  Seed: GMDPRMCSLMQGSTLPRRSGAAG
GMDPRMYSLIQNSTNPRRSGAAG

SEQ ID NO: 86900 - protein, 23 aa, Artificial Sequence
  Description of Artificial Sequence: Synthetic peptide
  Seed: GMDPRMCSLMQGSTLPRRSGAAG
GMDPRMYSLIQNSTSPRRSGAAG

SEQ ID NO: 86901 - protein, 23 aa, Artificial Sequence
  Description of Artificial Sequence: Synthetic peptide
  Seed: GMDPRMCSLMQGSTLPRRSGAAG
GMDPRMYSLIQNSTVPRRSGAAG

SEQ ID NO: 86902 - protein, 23 aa, Artificial Sequence
  Description of Artificial Sequence: Synthetic peptide
  Seed: GMDPRMCSLMQGSTLPRRSGAAG
GMDPRMYSLIQPSTAPRRSGAAG

SEQ ID NO: 86903 - protein, 23 aa, Artificial Sequence
  Description of Artificial Sequence: Synthetic peptide
  Seed: GMDPRMCSLMQGSTLPRRSGAAG
GMDPRMYSLIQPSTGPRRSGAAG

SEQ ID NO: 86904 - protein, 23 aa, Artificial Sequence
  Description of Artificial Sequence: Synthetic peptide
  Seed: GMDPRMCSLMQGSTLPRRSGAAG
GMDPRMYSLIQPSTIPRRSGAAG

SEQ ID NO: 86905 - protein, 23 aa, Artificial Sequence
  Description of Artificial Sequence: Synthetic peptide
  Seed: GMDPRMCSLMQGSTLPRRSGAAG
GMDPRMYSLIQPSTLPRRSGAAG

SEQ ID NO: 86906 - protein, 23 aa, Artificial Sequence
  Description of Artificial Sequence: Synthetic peptide
  Seed: GMDPRMCSLMQGSTLPRRSGAAG
GMDPRMYSLIQPSTMPRRSGAAG

SEQ ID NO: 86907 - protein, 23 aa, Artificial Sequence
  Description of Artificial Sequence: Synthetic peptide
  Seed: GMDPRMCSLMQGSTLPRRSGAAG
GMDPRMYSLIQPSTNPRRSGAAG

SEQ ID NO: 86908 - protein, 23 aa, Artificial Sequence
  Description of Artificial Sequence: Synthetic peptide
  Seed: GMDPRMCSLMQGSTLPRRSGAAG
GMDPRMYSLIQPSTQPRRSGAAG

SEQ ID NO: 86909 - protein, 23 aa, Artificial Sequence
  Description of Artificial Sequence: Synthetic peptide
  Seed: GMDPRMCSLMQGSTLPRRSGAAG
GMDPRMYSLIQPSTSPRRSGAAG

SEQ ID NO: 86910 - protein, 23 aa, Artificial Sequence
  Description of Artificial Sequence: Synthetic peptide
  Seed: GMDPRMCSLMQGSTLPRRSGAAG
GMDPRMYSLIQPSTTPRRSGAAG

SEQ ID NO: 86911 - protein, 23 aa, Artificial Sequence
  Description of Artificial Sequence: Synthetic peptide
  Seed: GMDPRMCSLMQGSTLPRRSGAAG
GMDPRMYSLIQPSTVPRRSGAAG

SEQ ID NO: 86912 - protein, 23 aa, Artificial Sequence
  Description of Artificial Sequence: Synthetic peptide
  Seed: GMDPRMCSLMQGSTLPRRSGAAG
GMDPRMYSLIQSSTAPRRSGAAG

SEQ ID NO: 86913 - protein, 23 aa, Artificial Sequence
  Description of Artificial Sequence: Synthetic peptide
  Seed: GMDPRMCSLMQGSTLPRRSGAAG
GMDPRMYSLIQSSTGPRRSGAAG

SEQ ID NO: 86914 - protein, 23 aa, Artificial Sequence
  Description of Artificial Sequence: Synthetic peptide
  Seed: GMDPRMCSLMQGSTLPRRSGAAG
GMDPRMYSLIQSSTIPRRSGAAG

SEQ ID NO: 86915 - protein, 23 aa, Artificial Sequence
  Description of Artificial Sequence: Synthetic peptide
  Seed: GMDPRMCSLMQGSTLPRRSGAAG
GMDPRMYSLIQSSTLPRRSGAAG

SEQ ID NO: 86916 - protein, 23 aa, Artificial Sequence
  Description of Artificial Sequence: Synthetic peptide
  Seed: GMDPRMCSLMQGSTLPRRSGAAG
GMDPRMYSLIQSSTMPRRSGAAG

SEQ ID NO: 86917 - protein, 23 aa, Artificial Sequence
  Description of Artificial Sequence: Synthetic peptide
  Seed: GMDPRMCSLMQGSTLPRRSGAAG
GMDPRMYSLIQSSTNPRRSGAAG

SEQ ID NO: 86918 - protein, 23 aa, Artificial Sequence
  Description of Artificial Sequence: Synthetic peptide
  Seed: GMDPRMCSLMQGSTLPRRSGAAG
GMDPRMYSLIQSSTSPRRSGAAG

SEQ ID NO: 86919 - protein, 23 aa, Artificial Sequence
  Description of Artificial Sequence: Synthetic peptide
  Seed: GMDPRMCSLMQGSTLPRRSGAAG
GMDPRMYSLIQSSTTPRRSGAAG

SEQ ID NO: 86920 - protein, 23 aa, Artificial Sequence
  Description of Artificial Sequence: Synthetic peptide
  Seed: GMDPRMCSLMQGSTLPRRSGAAG
GMDPRMYSLIQSSTVPRRSGAAG

SEQ ID NO: 86921 - protein, 23 aa, Artificial Sequence
  Description of Artificial Sequence: Synthetic peptide
  Seed: GMDPRMCSLMQGSTLPRRSGAAG
GMDPRMYSLIQTSTAPRRSGAAG

SEQ ID NO: 86922 - protein, 23 aa, Artificial Sequence
  Description of Artificial Sequence: Synthetic peptide
  Seed: GMDPRMCSLMQGSTLPRRSGAAG
GMDPRMYSLIQTSTGPRRSGAAG

SEQ ID NO: 86923 - protein, 23 aa, Artificial Sequence
  Description of Artificial Sequence: Synthetic peptide
  Seed: GMDPRMCSLMQGSTLPRRSGAAG
GMDPRMYSLIQTSTIPRRSGAAG

SEQ ID NO: 86924 - protein, 23 aa, Artificial Sequence
  Description of Artificial Sequence: Synthetic peptide
  Seed: GMDPRMCSLMQGSTLPRRSGAAG
GMDPRMYSLIQTSTLPRRSGAAG

SEQ ID NO: 86925 - protein, 23 aa, Artificial Sequence
  Description of Artificial Sequence: Synthetic peptide
  Seed: GMDPRMCSLMQGSTLPRRSGAAG
GMDPRMYSLIQTSTMPRRSGAAG

SEQ ID NO: 86926 - protein, 23 aa, Artificial Sequence
  Description of Artificial Sequence: Synthetic peptide
  Seed: GMDPRMCSLMQGSTLPRRSGAAG
GMDPRMYSLIQTSTNPRRSGAAG

SEQ ID NO: 86927 - protein, 23 aa, Artificial Sequence
  Description of Artificial Sequence: Synthetic peptide
  Seed: GMDPRMCSLMQGSTLPRRSGAAG
GMDPRMYSLIQTSTSPRRSGAAG

SEQ ID NO: 86928 - protein, 23 aa, Artificial Sequence
  Description of Artificial Sequence: Synthetic peptide
  Seed: GMDPRMCSLMQGSTLPRRSGAAG
GMDPRMYSLIQTSTTPRRSGAAG

SEQ ID NO: 86929 - protein, 23 aa, Artificial Sequence
  Description of Artificial Sequence: Synthetic peptide
  Seed: GMDPRMCSLMQGSTLPRRSGAAG
GMDPRMYSLIQTSTVPRRSGAAG

SEQ ID NO: 86930 - protein, 23 aa, Artificial Sequence
  Description of Artificial Sequence: Synthetic peptide
  Seed: GMDPRMCSLMQGSTLPRRSGAAG
GMDPRMYSLIQVSTAPRRSGAAG

SEQ ID NO: 86931 - protein, 23 aa, Artificial Sequence
  Description of Artificial Sequence: Synthetic peptide
  Seed: GMDPRMCSLMQGSTLPRRSGAAG
GMDPRMYSLIQVSTGPRRSGAAG

SEQ ID NO: 86932 - protein, 23 aa, Artificial Sequence
  Description of Artificial Sequence: Synthetic peptide
  Seed: GMDPRMCSLMQGSTLPRRSGAAG
GMDPRMYSLIQVSTHPRRSGAAG

SEQ ID NO: 86933 - protein, 23 aa, Artificial Sequence
  Description of Artificial Sequence: Synthetic peptide
  Seed: GMDPRMCSLMQGSTLPRRSGAAG
GMDPRMYSLIQVSTIPRRSGAAG

SEQ ID NO: 86934 - protein, 23 aa, Artificial Sequence
  Description of Artificial Sequence: Synthetic peptide
  Seed: GMDPRMCSLMQGSTLPRRSGAAG
GMDPRMYSLIQVSTLPRRSGAAG

SEQ ID NO: 86935 - protein, 23 aa, Artificial Sequence
  Description of Artificial Sequence: Synthetic peptide
  Seed: GMDPRMCSLMQGSTLPRRSGAAG
GMDPRMYSLIQVSTMPRRSGAAG

SEQ ID NO: 86936 - protein, 23 aa, Artificial Sequence
  Description of Artificial Sequence: Synthetic peptide
  Seed: GMDPRMCSLMQGSTLPRRSGAAG
GMDPRMYSLIQVSTNPRRSGAAG

SEQ ID NO: 86937 - protein, 23 aa, Artificial Sequence
  Description of Artificial Sequence: Synthetic peptide
  Seed: GMDPRMCSLMQGSTLPRRSGAAG
GMDPRMYSLIQVSTSPRRSGAAG

SEQ ID NO: 86938 - protein, 23 aa, Artificial Sequence
  Description of Artificial Sequence: Synthetic peptide
  Seed: GMDPRMCSLMQGSTLPRRSGAAG
GMDPRMYSLIQVSTTPRRSGAAG

SEQ ID NO: 86939 - protein, 23 aa, Artificial Sequence
  Description of Artificial Sequence: Synthetic peptide
  Seed: GMDPRMCSLMQGSTLPRRSGAAG
GMDPRMYSLIQVSTVPRRSGAAG

SEQ ID NO: 86940 - protein, 23 aa, Artificial Sequence
  Description of Artificial Sequence: Synthetic peptide
  Seed: GMDPRMCSLMQGSTLPRRSGAAG
GMDPRMYSLLQASTAPRRSGAAG

SEQ ID NO: 86941 - protein, 23 aa, Artificial Sequence
  Description of Artificial Sequence: Synthetic peptide
  Seed: GMDPRMCSLMQGSTLPRRSGAAG
GMDPRMYSLLQASTCPRRSGAAG

SEQ ID NO: 86942 - protein, 23 aa, Artificial Sequence
  Description of Artificial Sequence: Synthetic peptide
  Seed: GMDPRMCSLMQGSTLPRRSGAAG
GMDPRMYSLLQASTDPRRSGAAG

SEQ ID NO: 86943 - protein, 23 aa, Artificial Sequence
  Description of Artificial Sequence: Synthetic peptide
  Seed: GMDPRMCSLMQGSTLPRRSGAAG
GMDPRMYSLLQASTEPRRSGAAG

SEQ ID NO: 86944 - protein, 23 aa, Artificial Sequence
  Description of Artificial Sequence: Synthetic peptide
  Seed: GMDPRMCSLMQGSTLPRRSGAAG
GMDPRMYSLLQASTFPRRSGAAG

SEQ ID NO: 86945 - protein, 23 aa, Artificial Sequence
  Description of Artificial Sequence: Synthetic peptide
  Seed: GMDPRMCSLMQGSTLPRRSGAAG
GMDPRMYSLLQASTGPRRSGAAG

SEQ ID NO: 86946 - protein, 23 aa, Artificial Sequence
  Description of Artificial Sequence: Synthetic peptide
  Seed: GMDPRMCSLMQGSTLPRRSGAAG
GMDPRMYSLLQASTHPRRSGAAG

SEQ ID NO: 86947 - protein, 23 aa, Artificial Sequence
  Description of Artificial Sequence: Synthetic peptide
  Seed: GMDPRMCSLMQGSTLPRRSGAAG
GMDPRMYSLLQASTIPRRSGAAG

SEQ ID NO: 86948 - protein, 23 aa, Artificial Sequence
  Description of Artificial Sequence: Synthetic peptide
  Seed: GMDPRMCSLMQGSTLPRRSGAAG
GMDPRMYSLLQASTLPRRSGAAG

SEQ ID NO: 86949 - protein, 23 aa, Artificial Sequence
  Description of Artificial Sequence: Synthetic peptide
  Seed: GMDPRMCSLMQGSTLPRRSGAAG
GMDPRMYSLLQASTMPRRSGAAG

SEQ ID NO: 86950 - protein, 23 aa, Artificial Sequence
  Description of Artificial Sequence: Synthetic peptide
  Seed: GMDPRMCSLMQGSTLPRRSGAAG
GMDPRMYSLLQASTNPRRSGAAG

SEQ ID NO: 86951 - protein, 23 aa, Artificial Sequence
  Description of Artificial Sequence: Synthetic peptide
  Seed: GMDPRMCSLMQGSTLPRRSGAAG
GMDPRMYSLLQASTPPRRSGAAG

SEQ ID NO: 86952 - protein, 23 aa, Artificial Sequence
  Description of Artificial Sequence: Synthetic peptide
  Seed: GMDPRMCSLMQGSTLPRRSGAAG
GMDPRMYSLLQASTQPRRSGAAG

SEQ ID NO: 86953 - protein, 23 aa, Artificial Sequence
  Description of Artificial Sequence: Synthetic peptide
  Seed: GMDPRMCSLMQGSTLPRRSGAAG
GMDPRMYSLLQASTSPRRSGAAG

SEQ ID NO: 86954 - protein, 23 aa, Artificial Sequence
  Description of Artificial Sequence: Synthetic peptide
  Seed: GMDPRMCSLMQGSTLPRRSGAAG
GMDPRMYSLLQASTTPRRSGAAG

SEQ ID NO: 86955 - protein, 23 aa, Artificial Sequence
  Description of Artificial Sequence: Synthetic peptide
  Seed: GMDPRMCSLMQGSTLPRRSGAAG
GMDPRMYSLLQASTVPRRSGAAG

SEQ ID NO: 86956 - protein, 23 aa, Artificial Sequence
  Description of Artificial Sequence: Synthetic peptide
  Seed: GMDPRMCSLMQGSTLPRRSGAAG
GMDPRMYSLLQGSTAPRRSGAAG

SEQ ID NO: 86957 - protein, 23 aa, Artificial Sequence
  Description of Artificial Sequence: Synthetic peptide
  Seed: GMDPRMCSLMQGSTLPRRSGAAG
GMDPRMYSLLQGSTCPRRSGAAG

SEQ ID NO: 86958 - protein, 23 aa, Artificial Sequence
  Description of Artificial Sequence: Synthetic peptide
  Seed: GMDPRMCSLMQGSTLPRRSGAAG
GMDPRMYSLLQGSTFPRRSGAAG

SEQ ID NO: 86959 - protein, 23 aa, Artificial Sequence
  Description of Artificial Sequence: Synthetic peptide
  Seed: GMDPRMCSLMQGSTLPRRSGAAG
GMDPRMYSLLQGSTGPRRSGAAG

SEQ ID NO: 86960 - protein, 23 aa, Artificial Sequence
  Description of Artificial Sequence: Synthetic peptide
  Seed: GMDPRMCSLMQGSTLPRRSGAAG
GMDPRMYSLLQGSTIPRRSGAAG

SEQ ID NO: 86961 - protein, 23 aa, Artificial Sequence
  Description of Artificial Sequence: Synthetic peptide
  Seed: GMDPRMCSLMQGSTLPRRSGAAG
GMDPRMYSLLQGSTLPRRSGAAG

SEQ ID NO: 86962 - protein, 23 aa, Artificial Sequence
  Description of Artificial Sequence: Synthetic peptide
  Seed: GMDPRMCSLMQGSTLPRRSGAAG
GMDPRMYSLLQGSTMPRRSGAAG

SEQ ID NO: 86963 - protein, 23 aa, Artificial Sequence
  Description of Artificial Sequence: Synthetic peptide
  Seed: GMDPRMCSLMQGSTLPRRSGAAG
GMDPRMYSLLQGSTNPRRSGAAG

SEQ ID NO: 86964 - protein, 23 aa, Artificial Sequence
  Description of Artificial Sequence: Synthetic peptide
  Seed: GMDPRMCSLMQGSTLPRRSGAAG
GMDPRMYSLLQGSTSPRRSGAAG

SEQ ID NO: 86965 - protein, 23 aa, Artificial Sequence
  Description of Artificial Sequence: Synthetic peptide
  Seed: GMDPRMCSLMQGSTLPRRSGAAG
GMDPRMYSLLQGSTTPRRSGAAG

SEQ ID NO: 86966 - protein, 23 aa, Artificial Sequence
  Description of Artificial Sequence: Synthetic peptide
  Seed: GMDPRMCSLMQGSTLPRRSGAAG
GMDPRMYSLLQGSTVPRRSGAAG

SEQ ID NO: 86967 - protein, 23 aa, Artificial Sequence
  Description of Artificial Sequence: Synthetic peptide
  Seed: GMDPRMCSLMQGSTLPRRSGAAG
GMDPRMYSLLQISTAPRRSGAAG

SEQ ID NO: 86968 - protein, 23 aa, Artificial Sequence
  Description of Artificial Sequence: Synthetic peptide
  Seed: GMDPRMCSLMQGSTLPRRSGAAG
GMDPRMYSLLQISTGPRRSGAAG

SEQ ID NO: 86969 - protein, 23 aa, Artificial Sequence
  Description of Artificial Sequence: Synthetic peptide
  Seed: GMDPRMCSLMQGSTLPRRSGAAG
GMDPRMYSLLQISTIPRRSGAAG

SEQ ID NO: 86970 - protein, 23 aa, Artificial Sequence
  Description of Artificial Sequence: Synthetic peptide
  Seed: GMDPRMCSLMQGSTLPRRSGAAG
GMDPRMYSLLQISTLPRRSGAAG

SEQ ID NO: 86971 - protein, 23 aa, Artificial Sequence
  Description of Artificial Sequence: Synthetic peptide
  Seed: GMDPRMCSLMQGSTLPRRSGAAG
GMDPRMYSLLQISTMPRRSGAAG

SEQ ID NO: 86972 - protein, 23 aa, Artificial Sequence
  Description of Artificial Sequence: Synthetic peptide
  Seed: GMDPRMCSLMQGSTLPRRSGAAG
GMDPRMYSLLQISTNPRRSGAAG

SEQ ID NO: 86973 - protein, 23 aa, Artificial Sequence
  Description of Artificial Sequence: Synthetic peptide
  Seed: GMDPRMCSLMQGSTLPRRSGAAG
GMDPRMYSLLQISTSPRRSGAAG

SEQ ID NO: 86974 - protein, 23 aa, Artificial Sequence
  Description of Artificial Sequence: Synthetic peptide
  Seed: GMDPRMCSLMQGSTLPRRSGAAG
GMDPRMYSLLQISTTPRRSGAAG

SEQ ID NO: 86975 - protein, 23 aa, Artificial Sequence
  Description of Artificial Sequence: Synthetic peptide
  Seed: GMDPRMCSLMQGSTLPRRSGAAG
GMDPRMYSLLQISTVPRRSGAAG

SEQ ID NO: 86976 - protein, 23 aa, Artificial Sequence
  Description of Artificial Sequence: Synthetic peptide
  Seed: GMDPRMCSLMQGSTLPRRSGAAG
GMDPRMYSLLQLSTAPRRSGAAG

SEQ ID NO: 86977 - protein, 23 aa, Artificial Sequence
  Description of Artificial Sequence: Synthetic peptide
  Seed: GMDPRMCSLMQGSTLPRRSGAAG
GMDPRMYSLLQLSTNPRRSGAAG

SEQ ID NO: 86978 - protein, 23 aa, Artificial Sequence
  Description of Artificial Sequence: Synthetic peptide
  Seed: GMDPRMCSLMQGSTLPRRSGAAG
GMDPRMYSLLQLSTSPRRSGAAG

SEQ ID NO: 86979 - protein, 23 aa, Artificial Sequence
  Description of Artificial Sequence: Synthetic peptide
  Seed: GMDPRMCSLMQGSTLPRRSGAAG
GMDPRMYSLLQMSTAPRRSGAAG

SEQ ID NO: 86980 - protein, 23 aa, Artificial Sequence
  Description of Artificial Sequence: Synthetic peptide
  Seed: GMDPRMCSLMQGSTLPRRSGAAG
GMDPRMYSLLQMSTNPRRSGAAG

SEQ ID NO: 86981 - protein, 23 aa, Artificial Sequence
  Description of Artificial Sequence: Synthetic peptide
  Seed: GMDPRMCSLMQGSTLPRRSGAAG
GMDPRMYSLLQMSTSPRRSGAAG

SEQ ID NO: 86982 - protein, 23 aa, Artificial Sequence
  Description of Artificial Sequence: Synthetic peptide
  Seed: GMDPRMCSLMQGSTLPRRSGAAG
GMDPRMYSLLQNSTAPRRSGAAG

SEQ ID NO: 86983 - protein, 23 aa, Artificial Sequence
  Description of Artificial Sequence: Synthetic peptide
  Seed: GMDPRMCSLMQGSTLPRRSGAAG
GMDPRMYSLLQNSTIPRRSGAAG

SEQ ID NO: 86984 - protein, 23 aa, Artificial Sequence
  Description of Artificial Sequence: Synthetic peptide
  Seed: GMDPRMCSLMQGSTLPRRSGAAG
GMDPRMYSLLQNSTLPRRSGAAG

SEQ ID NO: 86985 - protein, 23 aa, Artificial Sequence
  Description of Artificial Sequence: Synthetic peptide
  Seed: GMDPRMCSLMQGSTLPRRSGAAG
GMDPRMYSLLQNSTMPRRSGAAG

SEQ ID NO: 86986 - protein, 23 aa, Artificial Sequence
  Description of Artificial Sequence: Synthetic peptide
  Seed: GMDPRMCSLMQGSTLPRRSGAAG
GMDPRMYSLLQNSTNPRRSGAAG

SEQ ID NO: 86987 - protein, 23 aa, Artificial Sequence
  Description of Artificial Sequence: Synthetic peptide
  Seed: GMDPRMCSLMQGSTLPRRSGAAG
GMDPRMYSLLQNSTSPRRSGAAG

SEQ ID NO: 86988 - protein, 23 aa, Artificial Sequence
  Description of Artificial Sequence: Synthetic peptide
  Seed: GMDPRMCSLMQGSTLPRRSGAAG
GMDPRMYSLLQNSTTPRRSGAAG

SEQ ID NO: 86989 - protein, 23 aa, Artificial Sequence
  Description of Artificial Sequence: Synthetic peptide
  Seed: GMDPRMCSLMQGSTLPRRSGAAG
GMDPRMYSLLQNSTVPRRSGAAG

SEQ ID NO: 86990 - protein, 23 aa, Artificial Sequence
  Description of Artificial Sequence: Synthetic peptide
  Seed: GMDPRMCSLMQGSTLPRRSGAAG
GMDPRMYSLLQPSTAPRRSGAAG

SEQ ID NO: 86991 - protein, 23 aa, Artificial Sequence
  Description of Artificial Sequence: Synthetic peptide
  Seed: GMDPRMCSLMQGSTLPRRSGAAG
GMDPRMYSLLQPSTFPRRSGAAG

SEQ ID NO: 86992 - protein, 23 aa, Artificial Sequence
  Description of Artificial Sequence: Synthetic peptide
  Seed: GMDPRMCSLMQGSTLPRRSGAAG
GMDPRMYSLLQPSTGPRRSGAAG

SEQ ID NO: 86993 - protein, 23 aa, Artificial Sequence
  Description of Artificial Sequence: Synthetic peptide
  Seed: GMDPRMCSLMQGSTLPRRSGAAG
GMDPRMYSLLQPSTHPRRSGAAG

SEQ ID NO: 86994 - protein, 23 aa, Artificial Sequence
  Description of Artificial Sequence: Synthetic peptide
  Seed: GMDPRMCSLMQGSTLPRRSGAAG
GMDPRMYSLLQPSTIPRRSGAAG

SEQ ID NO: 86995 - protein, 23 aa, Artificial Sequence
  Description of Artificial Sequence: Synthetic peptide
  Seed: GMDPRMCSLMQGSTLPRRSGAAG
GMDPRMYSLLQPSTLPRRSGAAG

SEQ ID NO: 86996 - protein, 23 aa, Artificial Sequence
  Description of Artificial Sequence: Synthetic peptide
  Seed: GMDPRMCSLMQGSTLPRRSGAAG
GMDPRMYSLLQPSTMPRRSGAAG

SEQ ID NO: 86997 - protein, 23 aa, Artificial Sequence
  Description of Artificial Sequence: Synthetic peptide
  Seed: GMDPRMCSLMQGSTLPRRSGAAG
GMDPRMYSLLQPSTNPRRSGAAG

SEQ ID NO: 86998 - protein, 23 aa, Artificial Sequence
  Description of Artificial Sequence: Synthetic peptide
  Seed: GMDPRMCSLMQGSTLPRRSGAAG
GMDPRMYSLLQPSTPPRRSGAAG

SEQ ID NO: 86999 - protein, 23 aa, Artificial Sequence
  Description of Artificial Sequence: Synthetic peptide
  Seed: GMDPRMCSLMQGSTLPRRSGAAG
GMDPRMYSLLQPSTQPRRSGAAG

SEQ ID NO: 87000 - protein, 23 aa, Artificial Sequence
  Description of Artificial Sequence: Synthetic peptide
  Seed: GMDPRMCSLMQGSTLPRRSGAAG
GMDPRMYSLLQPSTSPRRSGAAG

SEQ ID NO: 87001 - protein, 23 aa, Artificial Sequence
  Description of Artificial Sequence: Synthetic peptide
  Seed: GMDPRMCSLMQGSTLPRRSGAAG
GMDPRMYSLLQPSTTPRRSGAAG

SEQ ID NO: 87002 - protein, 23 aa, Artificial Sequence
  Description of Artificial Sequence: Synthetic peptide
  Seed: GMDPRMCSLMQGSTLPRRSGAAG
GMDPRMYSLLQPSTVPRRSGAAG

SEQ ID NO: 87003 - protein, 23 aa, Artificial Sequence
  Description of Artificial Sequence: Synthetic peptide
  Seed: GMDPRMCSLMQGSTLPRRSGAAG
GMDPRMYSLLQSSTAPRRSGAAG

SEQ ID NO: 87004 - protein, 23 aa, Artificial Sequence
  Description of Artificial Sequence: Synthetic peptide
  Seed: GMDPRMCSLMQGSTLPRRSGAAG
GMDPRMYSLLQSSTCPRRSGAAG

SEQ ID NO: 87005 - protein, 23 aa, Artificial Sequence
  Description of Artificial Sequence: Synthetic peptide
  Seed: GMDPRMCSLMQGSTLPRRSGAAG
GMDPRMYSLLQSSTGPRRSGAAG

SEQ ID NO: 87006 - protein, 23 aa, Artificial Sequence
  Description of Artificial Sequence: Synthetic peptide
  Seed: GMDPRMCSLMQGSTLPRRSGAAG
GMDPRMYSLLQSSTIPRRSGAAG

SEQ ID NO: 87007 - protein, 23 aa, Artificial Sequence
  Description of Artificial Sequence: Synthetic peptide
  Seed: GMDPRMCSLMQGSTLPRRSGAAG
GMDPRMYSLLQSSTLPRRSGAAG

SEQ ID NO: 87008 - protein, 23 aa, Artificial Sequence
  Description of Artificial Sequence: Synthetic peptide
  Seed: GMDPRMCSLMQGSTLPRRSGAAG
GMDPRMYSLLQSSTMPRRSGAAG

SEQ ID NO: 87009 - protein, 23 aa, Artificial Sequence
  Description of Artificial Sequence: Synthetic peptide
  Seed: GMDPRMCSLMQGSTLPRRSGAAG
GMDPRMYSLLQSSTNPRRSGAAG

SEQ ID NO: 87010 - protein, 23 aa, Artificial Sequence
  Description of Artificial Sequence: Synthetic peptide
  Seed: GMDPRMCSLMQGSTLPRRSGAAG
GMDPRMYSLLQSSTQPRRSGAAG

SEQ ID NO: 87011 - protein, 23 aa, Artificial Sequence
  Description of Artificial Sequence: Synthetic peptide
  Seed: GMDPRMCSLMQGSTLPRRSGAAG
GMDPRMYSLLQSSTSPRRSGAAG

SEQ ID NO: 87012 - protein, 23 aa, Artificial Sequence
  Description of Artificial Sequence: Synthetic peptide
  Seed: GMDPRMCSLMQGSTLPRRSGAAG
GMDPRMYSLLQSSTTPRRSGAAG

SEQ ID NO: 87013 - protein, 23 aa, Artificial Sequence
  Description of Artificial Sequence: Synthetic peptide
  Seed: GMDPRMCSLMQGSTLPRRSGAAG
GMDPRMYSLLQSSTVPRRSGAAG

SEQ ID NO: 87014 - protein, 23 aa, Artificial Sequence
  Description of Artificial Sequence: Synthetic peptide
  Seed: GMDPRMCSLMQGSTLPRRSGAAG
GMDPRMYSLLQTSTAPRRSGAAG

SEQ ID NO: 87015 - protein, 23 aa, Artificial Sequence
  Description of Artificial Sequence: Synthetic peptide
  Seed: GMDPRMCSLMQGSTLPRRSGAAG
GMDPRMYSLLQTSTGPRRSGAAG

SEQ ID NO: 87016 - protein, 23 aa, Artificial Sequence
  Description of Artificial Sequence: Synthetic peptide
  Seed: GMDPRMCSLMQGSTLPRRSGAAG
GMDPRMYSLLQTSTHPRRSGAAG

SEQ ID NO: 87017 - protein, 23 aa, Artificial Sequence
  Description of Artificial Sequence: Synthetic peptide
  Seed: GMDPRMCSLMQGSTLPRRSGAAG
GMDPRMYSLLQTSTIPRRSGAAG

SEQ ID NO: 87018 - protein, 23 aa, Artificial Sequence
  Description of Artificial Sequence: Synthetic peptide
  Seed: GMDPRMCSLMQGSTLPRRSGAAG
GMDPRMYSLLQTSTLPRRSGAAG

SEQ ID NO: 87019 - protein, 23 aa, Artificial Sequence
  Description of Artificial Sequence: Synthetic peptide
  Seed: GMDPRMCSLMQGSTLPRRSGAAG
GMDPRMYSLLQTSTMPRRSGAAG

SEQ ID NO: 87020 - protein, 23 aa, Artificial Sequence
  Description of Artificial Sequence: Synthetic peptide
  Seed: GMDPRMCSLMQGSTLPRRSGAAG
GMDPRMYSLLQTSTNPRRSGAAG

SEQ ID NO: 87021 - protein, 23 aa, Artificial Sequence
  Description of Artificial Sequence: Synthetic peptide
  Seed: GMDPRMCSLMQGSTLPRRSGAAG
GMDPRMYSLLQTSTSPRRSGAAG

SEQ ID NO: 87022 - protein, 23 aa, Artificial Sequence
  Description of Artificial Sequence: Synthetic peptide
  Seed: GMDPRMCSLMQGSTLPRRSGAAG
GMDPRMYSLLQTSTTPRRSGAAG

SEQ ID NO: 87023 - protein, 23 aa, Artificial Sequence
  Description of Artificial Sequence: Synthetic peptide
  Seed: GMDPRMCSLMQGSTLPRRSGAAG
GMDPRMYSLLQTSTVPRRSGAAG

SEQ ID NO: 87024 - protein, 23 aa, Artificial Sequence
  Description of Artificial Sequence: Synthetic peptide
  Seed: GMDPRMCSLMQGSTLPRRSGAAG
GMDPRMYSLLQVSTAPRRSGAAG

SEQ ID NO: 87025 - protein, 23 aa, Artificial Sequence
  Description of Artificial Sequence: Synthetic peptide
  Seed: GMDPRMCSLMQGSTLPRRSGAAG
GMDPRMYSLLQVSTGPRRSGAAG

SEQ ID NO: 87026 - protein, 23 aa, Artificial Sequence
  Description of Artificial Sequence: Synthetic peptide
  Seed: GMDPRMCSLMQGSTLPRRSGAAG
GMDPRMYSLLQVSTHPRRSGAAG

SEQ ID NO: 87027 - protein, 23 aa, Artificial Sequence
  Description of Artificial Sequence: Synthetic peptide
  Seed: GMDPRMCSLMQGSTLPRRSGAAG
GMDPRMYSLLQVSTIPRRSGAAG

SEQ ID NO: 87028 - protein, 23 aa, Artificial Sequence
  Description of Artificial Sequence: Synthetic peptide
  Seed: GMDPRMCSLMQGSTLPRRSGAAG
GMDPRMYSLLQVSTLPRRSGAAG

SEQ ID NO: 87029 - protein, 23 aa, Artificial Sequence
  Description of Artificial Sequence: Synthetic peptide
  Seed: GMDPRMCSLMQGSTLPRRSGAAG
GMDPRMYSLLQVSTMPRRSGAAG

SEQ ID NO: 87030 - protein, 23 aa, Artificial Sequence
  Description of Artificial Sequence: Synthetic peptide
  Seed: GMDPRMCSLMQGSTLPRRSGAAG
GMDPRMYSLLQVSTNPRRSGAAG

SEQ ID NO: 87031 - protein, 23 aa, Artificial Sequence
  Description of Artificial Sequence: Synthetic peptide
  Seed: GMDPRMCSLMQGSTLPRRSGAAG
GMDPRMYSLLQVSTQPRRSGAAG

SEQ ID NO: 87032 - protein, 23 aa, Artificial Sequence
  Description of Artificial Sequence: Synthetic peptide
  Seed: GMDPRMCSLMQGSTLPRRSGAAG
GMDPRMYSLLQVSTSPRRSGAAG

SEQ ID NO: 87033 - protein, 23 aa, Artificial Sequence
  Description of Artificial Sequence: Synthetic peptide
  Seed: GMDPRMCSLMQGSTLPRRSGAAG
GMDPRMYSLLQVSTTPRRSGAAG

SEQ ID NO: 87034 - protein, 23 aa, Artificial Sequence
  Description of Artificial Sequence: Synthetic peptide
  Seed: GMDPRMCSLMQGSTLPRRSGAAG
GMDPRMYSLLQVSTVPRRSGAAG

SEQ ID NO: 87035 - protein, 23 aa, Artificial Sequence
  Description of Artificial Sequence: Synthetic peptide
  Seed: GMDPRMCSLMQGSTLPRRSGAAG
GMDPRMYSLMQASTAPRRSGAAG

SEQ ID NO: 87036 - protein, 23 aa, Artificial Sequence
  Description of Artificial Sequence: Synthetic peptide
  Seed: GMDPRMCSLMQGSTLPRRSGAAG
GMDPRMYSLMQASTCPRRSGAAG

SEQ ID NO: 87037 - protein, 23 aa, Artificial Sequence
  Description of Artificial Sequence: Synthetic peptide
  Seed: GMDPRMCSLMQGSTLPRRSGAAG
GMDPRMYSLMQASTDPRRSGAAG

SEQ ID NO: 87038 - protein, 23 aa, Artificial Sequence
  Description of Artificial Sequence: Synthetic peptide
  Seed: GMDPRMCSLMQGSTLPRRSGAAG
GMDPRMYSLMQASTEPRRSGAAG

SEQ ID NO: 87039 - protein, 23 aa, Artificial Sequence
  Description of Artificial Sequence: Synthetic peptide
  Seed: GMDPRMCSLMQGSTLPRRSGAAG
GMDPRMYSLMQASTFPRRSGAAG

SEQ ID NO: 87040 - protein, 23 aa, Artificial Sequence
  Description of Artificial Sequence: Synthetic peptide
  Seed: GMDPRMCSLMQGSTLPRRSGAAG
GMDPRMYSLMQASTGPRRSGAAG

SEQ ID NO: 87041 - protein, 23 aa, Artificial Sequence
  Description of Artificial Sequence: Synthetic peptide
  Seed: GMDPRMCSLMQGSTLPRRSGAAG
GMDPRMYSLMQASTHPRRSGAAG

SEQ ID NO: 87042 - protein, 23 aa, Artificial Sequence
  Description of Artificial Sequence: Synthetic peptide
  Seed: GMDPRMCSLMQGSTLPRRSGAAG
GMDPRMYSLMQASTIPRRSGAAG

SEQ ID NO: 87043 - protein, 23 aa, Artificial Sequence
  Description of Artificial Sequence: Synthetic peptide
  Seed: GMDPRMCSLMQGSTLPRRSGAAG
GMDPRMYSLMQASTLPRRSGAAG

SEQ ID NO: 87044 - protein, 23 aa, Artificial Sequence
  Description of Artificial Sequence: Synthetic peptide
  Seed: GMDPRMCSLMQGSTLPRRSGAAG
GMDPRMYSLMQASTMPRRSGAAG

SEQ ID NO: 87045 - protein, 23 aa, Artificial Sequence
  Description of Artificial Sequence: Synthetic peptide
  Seed: GMDPRMCSLMQGSTLPRRSGAAG
GMDPRMYSLMQASTNPRRSGAAG

SEQ ID NO: 87046 - protein, 23 aa, Artificial Sequence
  Description of Artificial Sequence: Synthetic peptide
  Seed: GMDPRMCSLMQGSTLPRRSGAAG
GMDPRMYSLMQASTPPRRSGAAG

SEQ ID NO: 87047 - protein, 23 aa, Artificial Sequence
  Description of Artificial Sequence: Synthetic peptide
  Seed: GMDPRMCSLMQGSTLPRRSGAAG
GMDPRMYSLMQASTQPRRSGAAG

SEQ ID NO: 87048 - protein, 23 aa, Artificial Sequence
  Description of Artificial Sequence: Synthetic peptide
  Seed: GMDPRMCSLMQGSTLPRRSGAAG
GMDPRMYSLMQASTSPRRSGAAG

SEQ ID NO: 87049 - protein, 23 aa, Artificial Sequence
  Description of Artificial Sequence: Synthetic peptide
  Seed: GMDPRMCSLMQGSTLPRRSGAAG
GMDPRMYSLMQASTTPRRSGAAG

SEQ ID NO: 87050 - protein, 23 aa, Artificial Sequence
  Description of Artificial Sequence: Synthetic peptide
  Seed: GMDPRMCSLMQGSTLPRRSGAAG
GMDPRMYSLMQASTVPRRSGAAG

SEQ ID NO: 87051 - protein, 23 aa, Artificial Sequence
  Description of Artificial Sequence: Synthetic peptide
  Seed: GMDPRMCSLMQGSTLPRRSGAAG
GMDPRMYSLMQGSTAPRRSGAAG

SEQ ID NO: 87052 - protein, 23 aa, Artificial Sequence
  Description of Artificial Sequence: Synthetic peptide
  Seed: GMDPRMCSLMQGSTLPRRSGAAG
GMDPRMYSLMQGSTCPRRSGAAG

SEQ ID NO: 87053 - protein, 23 aa, Artificial Sequence
  Description of Artificial Sequence: Synthetic peptide
  Seed: GMDPRMCSLMQGSTLPRRSGAAG
GMDPRMYSLMQGSTFPRRSGAAG

SEQ ID NO: 87054 - protein, 23 aa, Artificial Sequence
  Description of Artificial Sequence: Synthetic peptide
  Seed: GMDPRMCSLMQGSTLPRRSGAAG
GMDPRMYSLMQGSTGPRRSGAAG

SEQ ID NO: 87055 - protein, 23 aa, Artificial Sequence
  Description of Artificial Sequence: Synthetic peptide
  Seed: GMDPRMCSLMQGSTLPRRSGAAG
GMDPRMYSLMQGSTIPRRSGAAG

SEQ ID NO: 87056 - protein, 23 aa, Artificial Sequence
  Description of Artificial Sequence: Synthetic peptide
  Seed: GMDPRMCSLMQGSTLPRRSGAAG
GMDPRMYSLMQGSTLPRRSGAAG

SEQ ID NO: 87057 - protein, 23 aa, Artificial Sequence
  Description of Artificial Sequence: Synthetic peptide
  Seed: GMDPRMCSLMQGSTLPRRSGAAG
GMDPRMYSLMQGSTMPRRSGAAG

SEQ ID NO: 87058 - protein, 23 aa, Artificial Sequence
  Description of Artificial Sequence: Synthetic peptide
  Seed: GMDPRMCSLMQGSTLPRRSGAAG
GMDPRMYSLMQGSTNPRRSGAAG

SEQ ID NO: 87059 - protein, 23 aa, Artificial Sequence
  Description of Artificial Sequence: Synthetic peptide
  Seed: GMDPRMCSLMQGSTLPRRSGAAG
GMDPRMYSLMQGSTSPRRSGAAG

SEQ ID NO: 87060 - protein, 23 aa, Artificial Sequence
  Description of Artificial Sequence: Synthetic peptide
  Seed: GMDPRMCSLMQGSTLPRRSGAAG
GMDPRMYSLMQGSTTPRRSGAAG

SEQ ID NO: 87061 - protein, 23 aa, Artificial Sequence
  Description of Artificial Sequence: Synthetic peptide
  Seed: GMDPRMCSLMQGSTLPRRSGAAG
GMDPRMYSLMQGSTVPRRSGAAG

SEQ ID NO: 87062 - protein, 23 aa, Artificial Sequence
  Description of Artificial Sequence: Synthetic peptide
  Seed: GMDPRMCSLMQGSTLPRRSGAAG
GMDPRMYSLMQISTAPRRSGAAG

SEQ ID NO: 87063 - protein, 23 aa, Artificial Sequence
  Description of Artificial Sequence: Synthetic peptide
  Seed: GMDPRMCSLMQGSTLPRRSGAAG
GMDPRMYSLMQISTGPRRSGAAG

SEQ ID NO: 87064 - protein, 23 aa, Artificial Sequence
  Description of Artificial Sequence: Synthetic peptide
  Seed: GMDPRMCSLMQGSTLPRRSGAAG
GMDPRMYSLMQISTHPRRSGAAG

SEQ ID NO: 87065 - protein, 23 aa, Artificial Sequence
  Description of Artificial Sequence: Synthetic peptide
  Seed: GMDPRMCSLMQGSTLPRRSGAAG
GMDPRMYSLMQISTIPRRSGAAG

SEQ ID NO: 87066 - protein, 23 aa, Artificial Sequence
  Description of Artificial Sequence: Synthetic peptide
  Seed: GMDPRMCSLMQGSTLPRRSGAAG
GMDPRMYSLMQISTLPRRSGAAG

SEQ ID NO: 87067 - protein, 23 aa, Artificial Sequence
  Description of Artificial Sequence: Synthetic peptide
  Seed: GMDPRMCSLMQGSTLPRRSGAAG
GMDPRMYSLMQISTMPRRSGAAG

SEQ ID NO: 87068 - protein, 23 aa, Artificial Sequence
  Description of Artificial Sequence: Synthetic peptide
  Seed: GMDPRMCSLMQGSTLPRRSGAAG
GMDPRMYSLMQISTNPRRSGAAG

SEQ ID NO: 87069 - protein, 23 aa, Artificial Sequence
  Description of Artificial Sequence: Synthetic peptide
  Seed: GMDPRMCSLMQGSTLPRRSGAAG
GMDPRMYSLMQISTQPRRSGAAG

SEQ ID NO: 87070 - protein, 23 aa, Artificial Sequence
  Description of Artificial Sequence: Synthetic peptide
  Seed: GMDPRMCSLMQGSTLPRRSGAAG
GMDPRMYSLMQISTSPRRSGAAG

SEQ ID NO: 87071 - protein, 23 aa, Artificial Sequence
  Description of Artificial Sequence: Synthetic peptide
  Seed: GMDPRMCSLMQGSTLPRRSGAAG
GMDPRMYSLMQISTTPRRSGAAG

SEQ ID NO: 87072 - protein, 23 aa, Artificial Sequence
  Description of Artificial Sequence: Synthetic peptide
  Seed: GMDPRMCSLMQGSTLPRRSGAAG
GMDPRMYSLMQISTVPRRSGAAG

SEQ ID NO: 87073 - protein, 23 aa, Artificial Sequence
  Description of Artificial Sequence: Synthetic peptide
  Seed: GMDPRMCSLMQGSTLPRRSGAAG
GMDPRMYSLMQLSTAPRRSGAAG

SEQ ID NO: 87074 - protein, 23 aa, Artificial Sequence
  Description of Artificial Sequence: Synthetic peptide
  Seed: GMDPRMCSLMQGSTLPRRSGAAG
GMDPRMYSLMQLSTNPRRSGAAG

SEQ ID NO: 87075 - protein, 23 aa, Artificial Sequence
  Description of Artificial Sequence: Synthetic peptide
  Seed: GMDPRMCSLMQGSTLPRRSGAAG
GMDPRMYSLMQLSTSPRRSGAAG

SEQ ID NO: 87076 - protein, 23 aa, Artificial Sequence
  Description of Artificial Sequence: Synthetic peptide
  Seed: GMDPRMCSLMQGSTLPRRSGAAG
GMDPRMYSLMQLSTTPRRSGAAG

SEQ ID NO: 87077 - protein, 23 aa, Artificial Sequence
  Description of Artificial Sequence: Synthetic peptide
  Seed: GMDPRMCSLMQGSTLPRRSGAAG
GMDPRMYSLMQLSTVPRRSGAAG

SEQ ID NO: 87078 - protein, 23 aa, Artificial Sequence
  Description of Artificial Sequence: Synthetic peptide
  Seed: GMDPRMCSLMQGSTLPRRSGAAG
GMDPRMYSLMQMSTAPRRSGAAG

SEQ ID NO: 87079 - protein, 23 aa, Artificial Sequence
  Description of Artificial Sequence: Synthetic peptide
  Seed: GMDPRMCSLMQGSTLPRRSGAAG
GMDPRMYSLMQMSTNPRRSGAAG

SEQ ID NO: 87080 - protein, 23 aa, Artificial Sequence
  Description of Artificial Sequence: Synthetic peptide
  Seed: GMDPRMCSLMQGSTLPRRSGAAG
GMDPRMYSLMQMSTSPRRSGAAG

SEQ ID NO: 87081 - protein, 23 aa, Artificial Sequence
  Description of Artificial Sequence: Synthetic peptide
  Seed: GMDPRMCSLMQGSTLPRRSGAAG
GMDPRMYSLMQNSTAPRRSGAAG

SEQ ID NO: 87082 - protein, 23 aa, Artificial Sequence
  Description of Artificial Sequence: Synthetic peptide
  Seed: GMDPRMCSLMQGSTLPRRSGAAG
GMDPRMYSLMQNSTIPRRSGAAG

SEQ ID NO: 87083 - protein, 23 aa, Artificial Sequence
  Description of Artificial Sequence: Synthetic peptide
  Seed: GMDPRMCSLMQGSTLPRRSGAAG
GMDPRMYSLMQNSTLPRRSGAAG

SEQ ID NO: 87084 - protein, 23 aa, Artificial Sequence
  Description of Artificial Sequence: Synthetic peptide
  Seed: GMDPRMCSLMQGSTLPRRSGAAG
GMDPRMYSLMQNSTMPRRSGAAG

SEQ ID NO: 87085 - protein, 23 aa, Artificial Sequence
  Description of Artificial Sequence: Synthetic peptide
  Seed: GMDPRMCSLMQGSTLPRRSGAAG
GMDPRMYSLMQNSTNPRRSGAAG

SEQ ID NO: 87086 - protein, 23 aa, Artificial Sequence
  Description of Artificial Sequence: Synthetic peptide
  Seed: GMDPRMCSLMQGSTLPRRSGAAG
GMDPRMYSLMQNSTSPRRSGAAG

SEQ ID NO: 87087 - protein, 23 aa, Artificial Sequence
  Description of Artificial Sequence: Synthetic peptide
  Seed: GMDPRMCSLMQGSTLPRRSGAAG
GMDPRMYSLMQNSTTPRRSGAAG

SEQ ID NO: 87088 - protein, 23 aa, Artificial Sequence
  Description of Artificial Sequence: Synthetic peptide
  Seed: GMDPRMCSLMQGSTLPRRSGAAG
GMDPRMYSLMQNSTVPRRSGAAG

SEQ ID NO: 87089 - protein, 23 aa, Artificial Sequence
  Description of Artificial Sequence: Synthetic peptide
  Seed: GMDPRMCSLMQGSTLPRRSGAAG
GMDPRMYSLMQPSTAPRRSGAAG

SEQ ID NO: 87090 - protein, 23 aa, Artificial Sequence
  Description of Artificial Sequence: Synthetic peptide
  Seed: GMDPRMCSLMQGSTLPRRSGAAG
GMDPRMYSLMQPSTGPRRSGAAG

SEQ ID NO: 87091 - protein, 23 aa, Artificial Sequence
  Description of Artificial Sequence: Synthetic peptide
  Seed: GMDPRMCSLMQGSTLPRRSGAAG
GMDPRMYSLMQPSTHPRRSGAAG

SEQ ID NO: 87092 - protein, 23 aa, Artificial Sequence
  Description of Artificial Sequence: Synthetic peptide
  Seed: GMDPRMCSLMQGSTLPRRSGAAG
GMDPRMYSLMQPSTIPRRSGAAG

SEQ ID NO: 87093 - protein, 23 aa, Artificial Sequence
  Description of Artificial Sequence: Synthetic peptide
  Seed: GMDPRMCSLMQGSTLPRRSGAAG
GMDPRMYSLMQPSTLPRRSGAAG

SEQ ID NO: 87094 - protein, 23 aa, Artificial Sequence
  Description of Artificial Sequence: Synthetic peptide
  Seed: GMDPRMCSLMQGSTLPRRSGAAG
GMDPRMYSLMQPSTMPRRSGAAG

SEQ ID NO: 87095 - protein, 23 aa, Artificial Sequence
  Description of Artificial Sequence: Synthetic peptide
  Seed: GMDPRMCSLMQGSTLPRRSGAAG
GMDPRMYSLMQPSTNPRRSGAAG

SEQ ID NO: 87096 - protein, 23 aa, Artificial Sequence
  Description of Artificial Sequence: Synthetic peptide
  Seed: GMDPRMCSLMQGSTLPRRSGAAG
GMDPRMYSLMQPSTPPRRSGAAG

SEQ ID NO: 87097 - protein, 23 aa, Artificial Sequence
  Description of Artificial Sequence: Synthetic peptide
  Seed: GMDPRMCSLMQGSTLPRRSGAAG
GMDPRMYSLMQPSTQPRRSGAAG

SEQ ID NO: 87098 - protein, 23 aa, Artificial Sequence
  Description of Artificial Sequence: Synthetic peptide
  Seed: GMDPRMCSLMQGSTLPRRSGAAG
GMDPRMYSLMQPSTSPRRSGAAG

SEQ ID NO: 87099 - protein, 23 aa, Artificial Sequence
  Description of Artificial Sequence: Synthetic peptide
  Seed: GMDPRMCSLMQGSTLPRRSGAAG
GMDPRMYSLMQPSTTPRRSGAAG

SEQ ID NO: 87100 - protein, 23 aa, Artificial Sequence
  Description of Artificial Sequence: Synthetic peptide
  Seed: GMDPRMCSLMQGSTLPRRSGAAG
GMDPRMYSLMQPSTVPRRSGAAG

SEQ ID NO: 87101 - protein, 23 aa, Artificial Sequence
  Description of Artificial Sequence: Synthetic peptide
  Seed: GMDPRMCSLMQGSTLPRRSGAAG
GMDPRMYSLMQSSTAPRRSGAAG

SEQ ID NO: 87102 - protein, 23 aa, Artificial Sequence
  Description of Artificial Sequence: Synthetic peptide
  Seed: GMDPRMCSLMQGSTLPRRSGAAG
GMDPRMYSLMQSSTCPRRSGAAG

SEQ ID NO: 87103 - protein, 23 aa, Artificial Sequence
  Description of Artificial Sequence: Synthetic peptide
  Seed: GMDPRMCSLMQGSTLPRRSGAAG
GMDPRMYSLMQSSTGPRRSGAAG

SEQ ID NO: 87104 - protein, 23 aa, Artificial Sequence
  Description of Artificial Sequence: Synthetic peptide
  Seed: GMDPRMCSLMQGSTLPRRSGAAG
GMDPRMYSLMQSSTHPRRSGAAG

SEQ ID NO: 87105 - protein, 23 aa, Artificial Sequence
  Description of Artificial Sequence: Synthetic peptide
  Seed: GMDPRMCSLMQGSTLPRRSGAAG
GMDPRMYSLMQSSTIPRRSGAAG

SEQ ID NO: 87106 - protein, 23 aa, Artificial Sequence
  Description of Artificial Sequence: Synthetic peptide
  Seed: GMDPRMCSLMQGSTLPRRSGAAG
GMDPRMYSLMQSSTLPRRSGAAG

SEQ ID NO: 87107 - protein, 23 aa, Artificial Sequence
  Description of Artificial Sequence: Synthetic peptide
  Seed: GMDPRMCSLMQGSTLPRRSGAAG
GMDPRMYSLMQSSTMPRRSGAAG

SEQ ID NO: 87108 - protein, 23 aa, Artificial Sequence
  Description of Artificial Sequence: Synthetic peptide
  Seed: GMDPRMCSLMQGSTLPRRSGAAG
GMDPRMYSLMQSSTNPRRSGAAG

SEQ ID NO: 87109 - protein, 23 aa, Artificial Sequence
  Description of Artificial Sequence: Synthetic peptide
  Seed: GMDPRMCSLMQGSTLPRRSGAAG
GMDPRMYSLMQSSTQPRRSGAAG

SEQ ID NO: 87110 - protein, 23 aa, Artificial Sequence
  Description of Artificial Sequence: Synthetic peptide
  Seed: GMDPRMCSLMQGSTLPRRSGAAG
GMDPRMYSLMQSSTSPRRSGAAG

SEQ ID NO: 87111 - protein, 23 aa, Artificial Sequence
  Description of Artificial Sequence: Synthetic peptide
  Seed: GMDPRMCSLMQGSTLPRRSGAAG
GMDPRMYSLMQSSTTPRRSGAAG

SEQ ID NO: 87112 - protein, 23 aa, Artificial Sequence
  Description of Artificial Sequence: Synthetic peptide
  Seed: GMDPRMCSLMQGSTLPRRSGAAG
GMDPRMYSLMQSSTVPRRSGAAG

SEQ ID NO: 87113 - protein, 23 aa, Artificial Sequence
  Description of Artificial Sequence: Synthetic peptide
  Seed: GMDPRMCSLMQGSTLPRRSGAAG
GMDPRMYSLMQTSTAPRRSGAAG

SEQ ID NO: 87114 - protein, 23 aa, Artificial Sequence
  Description of Artificial Sequence: Synthetic peptide
  Seed: GMDPRMCSLMQGSTLPRRSGAAG
GMDPRMYSLMQTSTGPRRSGAAG

SEQ ID NO: 87115 - protein, 23 aa, Artificial Sequence
  Description of Artificial Sequence: Synthetic peptide
  Seed: GMDPRMCSLMQGSTLPRRSGAAG
GMDPRMYSLMQTSTHPRRSGAAG

SEQ ID NO: 87116 - protein, 23 aa, Artificial Sequence
  Description of Artificial Sequence: Synthetic peptide
  Seed: GMDPRMCSLMQGSTLPRRSGAAG
GMDPRMYSLMQTSTIPRRSGAAG

SEQ ID NO: 87117 - protein, 23 aa, Artificial Sequence
  Description of Artificial Sequence: Synthetic peptide
  Seed: GMDPRMCSLMQGSTLPRRSGAAG
GMDPRMYSLMQTSTLPRRSGAAG

SEQ ID NO: 87118 - protein, 23 aa, Artificial Sequence
  Description of Artificial Sequence: Synthetic peptide
  Seed: GMDPRMCSLMQGSTLPRRSGAAG
GMDPRMYSLMQTSTMPRRSGAAG

SEQ ID NO: 87119 - protein, 23 aa, Artificial Sequence
  Description of Artificial Sequence: Synthetic peptide
  Seed: GMDPRMCSLMQGSTLPRRSGAAG
GMDPRMYSLMQTSTNPRRSGAAG

SEQ ID NO: 87120 - protein, 23 aa, Artificial Sequence
  Description of Artificial Sequence: Synthetic peptide
  Seed: GMDPRMCSLMQGSTLPRRSGAAG
GMDPRMYSLMQTSTQPRRSGAAG

SEQ ID NO: 87121 - protein, 23 aa, Artificial Sequence
  Description of Artificial Sequence: Synthetic peptide
  Seed: GMDPRMCSLMQGSTLPRRSGAAG
GMDPRMYSLMQTSTSPRRSGAAG

SEQ ID NO: 87122 - protein, 23 aa, Artificial Sequence
  Description of Artificial Sequence: Synthetic peptide
  Seed: GMDPRMCSLMQGSTLPRRSGAAG
GMDPRMYSLMQTSTTPRRSGAAG

SEQ ID NO: 87123 - protein, 23 aa, Artificial Sequence
  Description of Artificial Sequence: Synthetic peptide
  Seed: GMDPRMCSLMQGSTLPRRSGAAG
GMDPRMYSLMQTSTVPRRSGAAG

SEQ ID NO: 87124 - protein, 23 aa, Artificial Sequence
  Description of Artificial Sequence: Synthetic peptide
  Seed: GMDPRMCSLMQGSTLPRRSGAAG
GMDPRMYSLMQVSTAPRRSGAAG

SEQ ID NO: 87125 - protein, 23 aa, Artificial Sequence
  Description of Artificial Sequence: Synthetic peptide
  Seed: GMDPRMCSLMQGSTLPRRSGAAG
GMDPRMYSLMQVSTGPRRSGAAG

SEQ ID NO: 87126 - protein, 23 aa, Artificial Sequence
  Description of Artificial Sequence: Synthetic peptide
  Seed: GMDPRMCSLMQGSTLPRRSGAAG
GMDPRMYSLMQVSTHPRRSGAAG

SEQ ID NO: 87127 - protein, 23 aa, Artificial Sequence
  Description of Artificial Sequence: Synthetic peptide
  Seed: GMDPRMCSLMQGSTLPRRSGAAG
GMDPRMYSLMQVSTIPRRSGAAG

SEQ ID NO: 87128 - protein, 23 aa, Artificial Sequence
  Description of Artificial Sequence: Synthetic peptide
  Seed: GMDPRMCSLMQGSTLPRRSGAAG
GMDPRMYSLMQVSTLPRRSGAAG

SEQ ID NO: 87129 - protein, 23 aa, Artificial Sequence
  Description of Artificial Sequence: Synthetic peptide
  Seed: GMDPRMCSLMQGSTLPRRSGAAG
GMDPRMYSLMQVSTMPRRSGAAG

SEQ ID NO: 87130 - protein, 23 aa, Artificial Sequence
  Description of Artificial Sequence: Synthetic peptide
  Seed: GMDPRMCSLMQGSTLPRRSGAAG
GMDPRMYSLMQVSTNPRRSGAAG

SEQ ID NO: 87131 - protein, 23 aa, Artificial Sequence
  Description of Artificial Sequence: Synthetic peptide
  Seed: GMDPRMCSLMQGSTLPRRSGAAG
GMDPRMYSLMQVSTPPRRSGAAG

SEQ ID NO: 87132 - protein, 23 aa, Artificial Sequence
  Description of Artificial Sequence: Synthetic peptide
  Seed: GMDPRMCSLMQGSTLPRRSGAAG
GMDPRMYSLMQVSTQPRRSGAAG

SEQ ID NO: 87133 - protein, 23 aa, Artificial Sequence
  Description of Artificial Sequence: Synthetic peptide
  Seed: GMDPRMCSLMQGSTLPRRSGAAG
GMDPRMYSLMQVSTSPRRSGAAG

SEQ ID NO: 87134 - protein, 23 aa, Artificial Sequence
  Description of Artificial Sequence: Synthetic peptide
  Seed: GMDPRMCSLMQGSTLPRRSGAAG
GMDPRMYSLMQVSTTPRRSGAAG

SEQ ID NO: 87135 - protein, 23 aa, Artificial Sequence
  Description of Artificial Sequence: Synthetic peptide
  Seed: GMDPRMCSLMQGSTLPRRSGAAG
GMDPRMYSLMQVSTVPRRSGAAG

SEQ ID NO: 87136 - protein, 23 aa, Artificial Sequence
  Description of Artificial Sequence: Synthetic peptide
  Seed: GMDPRMCSLMQGSTLPRRSGAAG
GMDPRMYSLNQASTIPRRSGAAG

SEQ ID NO: 87137 - protein, 23 aa, Artificial Sequence
  Description of Artificial Sequence: Synthetic peptide
  Seed: GMDPRMCSLMQGSTLPRRSGAAG
GMDPRMYSLNQASTLPRRSGAAG

SEQ ID NO: 87138 - protein, 23 aa, Artificial Sequence
  Description of Artificial Sequence: Synthetic peptide
  Seed: GMDPRMCSLMQGSTLPRRSGAAG
GMDPRMYSLNQASTVPRRSGAAG

SEQ ID NO: 87139 - protein, 23 aa, Artificial Sequence
  Description of Artificial Sequence: Synthetic peptide
  Seed: GMDPRMCSLMQGSTLPRRSGAAG
GMDPRMYSLQQASTAPRRSGAAG

SEQ ID NO: 87140 - protein, 23 aa, Artificial Sequence
  Description of Artificial Sequence: Synthetic peptide
  Seed: GMDPRMCSLMQGSTLPRRSGAAG
GMDPRMYSLQQASTIPRRSGAAG

SEQ ID NO: 87141 - protein, 23 aa, Artificial Sequence
  Description of Artificial Sequence: Synthetic peptide
  Seed: GMDPRMCSLMQGSTLPRRSGAAG
GMDPRMYSLQQASTLPRRSGAAG

SEQ ID NO: 87142 - protein, 23 aa, Artificial Sequence
  Description of Artificial Sequence: Synthetic peptide
  Seed: GMDPRMCSLMQGSTLPRRSGAAG
GMDPRMYSLQQASTMPRRSGAAG

SEQ ID NO: 87143 - protein, 23 aa, Artificial Sequence
  Description of Artificial Sequence: Synthetic peptide
  Seed: GMDPRMCSLMQGSTLPRRSGAAG
GMDPRMYSLQQASTNPRRSGAAG

SEQ ID NO: 87144 - protein, 23 aa, Artificial Sequence
  Description of Artificial Sequence: Synthetic peptide
  Seed: GMDPRMCSLMQGSTLPRRSGAAG
GMDPRMYSLQQASTSPRRSGAAG

SEQ ID NO: 87145 - protein, 23 aa, Artificial Sequence
  Description of Artificial Sequence: Synthetic peptide
  Seed: GMDPRMCSLMQGSTLPRRSGAAG
GMDPRMYSLQQASTTPRRSGAAG

SEQ ID NO: 87146 - protein, 23 aa, Artificial Sequence
  Description of Artificial Sequence: Synthetic peptide
  Seed: GMDPRMCSLMQGSTLPRRSGAAG
GMDPRMYSLQQASTVPRRSGAAG

SEQ ID NO: 87147 - protein, 23 aa, Artificial Sequence
  Description of Artificial Sequence: Synthetic peptide
  Seed: GMDPRMCSLMQGSTLPRRSGAAG
GMDPRMYSLQQGSTAPRRSGAAG

SEQ ID NO: 87148 - protein, 23 aa, Artificial Sequence
  Description of Artificial Sequence: Synthetic peptide
  Seed: GMDPRMCSLMQGSTLPRRSGAAG
GMDPRMYSLQQGSTIPRRSGAAG

SEQ ID NO: 87149 - protein, 23 aa, Artificial Sequence
  Description of Artificial Sequence: Synthetic peptide
  Seed: GMDPRMCSLMQGSTLPRRSGAAG
GMDPRMYSLQQGSTLPRRSGAAG

SEQ ID NO: 87150 - protein, 23 aa, Artificial Sequence
  Description of Artificial Sequence: Synthetic peptide
  Seed: GMDPRMCSLMQGSTLPRRSGAAG
GMDPRMYSLQQGSTMPRRSGAAG

SEQ ID NO: 87151 - protein, 23 aa, Artificial Sequence
  Description of Artificial Sequence: Synthetic peptide
  Seed: GMDPRMCSLMQGSTLPRRSGAAG
GMDPRMYSLQQGSTVPRRSGAAG

SEQ ID NO: 87152 - protein, 23 aa, Artificial Sequence
  Description of Artificial Sequence: Synthetic peptide
  Seed: GMDPRMCSLMQGSTLPRRSGAAG
GMDPRMYSLQQPSTIPRRSGAAG

SEQ ID NO: 87153 - protein, 23 aa, Artificial Sequence
  Description of Artificial Sequence: Synthetic peptide
  Seed: GMDPRMCSLMQGSTLPRRSGAAG
GMDPRMYSLQQPSTLPRRSGAAG

SEQ ID NO: 87154 - protein, 23 aa, Artificial Sequence
  Description of Artificial Sequence: Synthetic peptide
  Seed: GMDPRMCSLMQGSTLPRRSGAAG
GMDPRMYSLQQPSTVPRRSGAAG

SEQ ID NO: 87155 - protein, 23 aa, Artificial Sequence
  Description of Artificial Sequence: Synthetic peptide
  Seed: GMDPRMCSLMQGSTLPRRSGAAG
GMDPRMYSLQQSSTAPRRSGAAG

SEQ ID NO: 87156 - protein, 23 aa, Artificial Sequence
  Description of Artificial Sequence: Synthetic peptide
  Seed: GMDPRMCSLMQGSTLPRRSGAAG
GMDPRMYSLQQSSTIPRRSGAAG

SEQ ID NO: 87157 - protein, 23 aa, Artificial Sequence
  Description of Artificial Sequence: Synthetic peptide
  Seed: GMDPRMCSLMQGSTLPRRSGAAG
GMDPRMYSLQQSSTLPRRSGAAG

SEQ ID NO: 87158 - protein, 23 aa, Artificial Sequence
  Description of Artificial Sequence: Synthetic peptide
  Seed: GMDPRMCSLMQGSTLPRRSGAAG
GMDPRMYSLQQSSTVPRRSGAAG

SEQ ID NO: 87159 - protein, 23 aa, Artificial Sequence
  Description of Artificial Sequence: Synthetic peptide
  Seed: GMDPRMCSLMQGSTLPRRSGAAG
GMDPRMYSLQQVSTAPRRSGAAG

SEQ ID NO: 87160 - protein, 23 aa, Artificial Sequence
  Description of Artificial Sequence: Synthetic peptide
  Seed: GMDPRMCSLMQGSTLPRRSGAAG
GMDPRMYSLSQASTAPRRSGAAG

SEQ ID NO: 87161 - protein, 23 aa, Artificial Sequence
  Description of Artificial Sequence: Synthetic peptide
  Seed: GMDPRMCSLMQGSTLPRRSGAAG
GMDPRMYSLSQASTIPRRSGAAG

SEQ ID NO: 87162 - protein, 23 aa, Artificial Sequence
  Description of Artificial Sequence: Synthetic peptide
  Seed: GMDPRMCSLMQGSTLPRRSGAAG
GMDPRMYSLSQASTLPRRSGAAG

SEQ ID NO: 87163 - protein, 23 aa, Artificial Sequence
  Description of Artificial Sequence: Synthetic peptide
  Seed: GMDPRMCSLMQGSTLPRRSGAAG
GMDPRMYSLSQASTMPRRSGAAG

SEQ ID NO: 87164 - protein, 23 aa, Artificial Sequence
  Description of Artificial Sequence: Synthetic peptide
  Seed: GMDPRMCSLMQGSTLPRRSGAAG
GMDPRMYSLSQASTVPRRSGAAG

SEQ ID NO: 87165 - protein, 23 aa, Artificial Sequence
  Description of Artificial Sequence: Synthetic peptide
  Seed: GMDPRMCSLMQGSTLPRRSGAAG
GMDPRMYSLSQGSTIPRRSGAAG

SEQ ID NO: 87166 - protein, 23 aa, Artificial Sequence
  Description of Artificial Sequence: Synthetic peptide
  Seed: GMDPRMCSLMQGSTLPRRSGAAG
GMDPRMYSLSQGSTLPRRSGAAG

SEQ ID NO: 87167 - protein, 23 aa, Artificial Sequence
  Description of Artificial Sequence: Synthetic peptide
  Seed: GMDPRMCSLMQGSTLPRRSGAAG
GMDPRMYSLSQGSTVPRRSGAAG

SEQ ID NO: 87168 - protein, 23 aa, Artificial Sequence
  Description of Artificial Sequence: Synthetic peptide
  Seed: GMDPRMCSLMQGSTLPRRSGAAG
GMDPRMYSLSQSSTIPRRSGAAG

SEQ ID NO: 87169 - protein, 23 aa, Artificial Sequence
  Description of Artificial Sequence: Synthetic peptide
  Seed: GMDPRMCSLMQGSTLPRRSGAAG
GMDPRMYSLSQSSTVPRRSGAAG

SEQ ID NO: 87170 - protein, 23 aa, Artificial Sequence
  Description of Artificial Sequence: Synthetic peptide
  Seed: GMDPRMCSLMQGSTLPRRSGAAG
GMDPRMYSLTQASTAPRRSGAAG

SEQ ID NO: 87171 - protein, 23 aa, Artificial Sequence
  Description of Artificial Sequence: Synthetic peptide
  Seed: GMDPRMCSLMQGSTLPRRSGAAG
GMDPRMYSLTQASTIPRRSGAAG

SEQ ID NO: 87172 - protein, 23 aa, Artificial Sequence
  Description of Artificial Sequence: Synthetic peptide
  Seed: GMDPRMCSLMQGSTLPRRSGAAG
GMDPRMYSLTQASTLPRRSGAAG

SEQ ID NO: 87173 - protein, 23 aa, Artificial Sequence
  Description of Artificial Sequence: Synthetic peptide
  Seed: GMDPRMCSLMQGSTLPRRSGAAG
GMDPRMYSLTQASTVPRRSGAAG

SEQ ID NO: 87174 - protein, 23 aa, Artificial Sequence
  Description of Artificial Sequence: Synthetic peptide
  Seed: GMDPRMCSLMQGSTLPRRSGAAG
GMDPRMYSLVQASTAPRRSGAAG

SEQ ID NO: 87175 - protein, 23 aa, Artificial Sequence
  Description of Artificial Sequence: Synthetic peptide
  Seed: GMDPRMCSLMQGSTLPRRSGAAG
GMDPRMYSLVQASTGPRRSGAAG

SEQ ID NO: 87176 - protein, 23 aa, Artificial Sequence
  Description of Artificial Sequence: Synthetic peptide
  Seed: GMDPRMCSLMQGSTLPRRSGAAG
GMDPRMYSLVQASTIPRRSGAAG

SEQ ID NO: 87177 - protein, 23 aa, Artificial Sequence
  Description of Artificial Sequence: Synthetic peptide
  Seed: GMDPRMCSLMQGSTLPRRSGAAG
GMDPRMYSLVQASTLPRRSGAAG

SEQ ID NO: 87178 - protein, 23 aa, Artificial Sequence
  Description of Artificial Sequence: Synthetic peptide
  Seed: GMDPRMCSLMQGSTLPRRSGAAG
GMDPRMYSLVQASTMPRRSGAAG

SEQ ID NO: 87179 - protein, 23 aa, Artificial Sequence
  Description of Artificial Sequence: Synthetic peptide
  Seed: GMDPRMCSLMQGSTLPRRSGAAG
GMDPRMYSLVQASTNPRRSGAAG

SEQ ID NO: 87180 - protein, 23 aa, Artificial Sequence
  Description of Artificial Sequence: Synthetic peptide
  Seed: GMDPRMCSLMQGSTLPRRSGAAG
GMDPRMYSLVQASTSPRRSGAAG

SEQ ID NO: 87181 - protein, 23 aa, Artificial Sequence
  Description of Artificial Sequence: Synthetic peptide
  Seed: GMDPRMCSLMQGSTLPRRSGAAG
GMDPRMYSLVQASTTPRRSGAAG

SEQ ID NO: 87182 - protein, 23 aa, Artificial Sequence
  Description of Artificial Sequence: Synthetic peptide
  Seed: GMDPRMCSLMQGSTLPRRSGAAG
GMDPRMYSLVQASTVPRRSGAAG

SEQ ID NO: 87183 - protein, 23 aa, Artificial Sequence
  Description of Artificial Sequence: Synthetic peptide
  Seed: GMDPRMCSLMQGSTLPRRSGAAG
GMDPRMYSLVQGSTAPRRSGAAG

SEQ ID NO: 87184 - protein, 23 aa, Artificial Sequence
  Description of Artificial Sequence: Synthetic peptide
  Seed: GMDPRMCSLMQGSTLPRRSGAAG
GMDPRMYSLVQGSTIPRRSGAAG

SEQ ID NO: 87185 - protein, 23 aa, Artificial Sequence
  Description of Artificial Sequence: Synthetic peptide
  Seed: GMDPRMCSLMQGSTLPRRSGAAG
GMDPRMYSLVQGSTLPRRSGAAG

SEQ ID NO: 87186 - protein, 23 aa, Artificial Sequence
  Description of Artificial Sequence: Synthetic peptide
  Seed: GMDPRMCSLMQGSTLPRRSGAAG
GMDPRMYSLVQGSTMPRRSGAAG

SEQ ID NO: 87187 - protein, 23 aa, Artificial Sequence
  Description of Artificial Sequence: Synthetic peptide
  Seed: GMDPRMCSLMQGSTLPRRSGAAG
GMDPRMYSLVQGSTSPRRSGAAG

SEQ ID NO: 87188 - protein, 23 aa, Artificial Sequence
  Description of Artificial Sequence: Synthetic peptide
  Seed: GMDPRMCSLMQGSTLPRRSGAAG
GMDPRMYSLVQGSTTPRRSGAAG

SEQ ID NO: 87189 - protein, 23 aa, Artificial Sequence
  Description of Artificial Sequence: Synthetic peptide
  Seed: GMDPRMCSLMQGSTLPRRSGAAG
GMDPRMYSLVQGSTVPRRSGAAG

SEQ ID NO: 87190 - protein, 23 aa, Artificial Sequence
  Description of Artificial Sequence: Synthetic peptide
  Seed: GMDPRMCSLMQGSTLPRRSGAAG
GMDPRMYSLVQISTAPRRSGAAG

SEQ ID NO: 87191 - protein, 23 aa, Artificial Sequence
  Description of Artificial Sequence: Synthetic peptide
  Seed: GMDPRMCSLMQGSTLPRRSGAAG
GMDPRMYSLVQISTNPRRSGAAG

SEQ ID NO: 87192 - protein, 23 aa, Artificial Sequence
  Description of Artificial Sequence: Synthetic peptide
  Seed: GMDPRMCSLMQGSTLPRRSGAAG
GMDPRMYSLVQISTSPRRSGAAG

SEQ ID NO: 87193 - protein, 23 aa, Artificial Sequence
  Description of Artificial Sequence: Synthetic peptide
  Seed: GMDPRMCSLMQGSTLPRRSGAAG
GMDPRMYSLVQPSTAPRRSGAAG

SEQ ID NO: 87194 - protein, 23 aa, Artificial Sequence
  Description of Artificial Sequence: Synthetic peptide
  Seed: GMDPRMCSLMQGSTLPRRSGAAG
GMDPRMYSLVQPSTIPRRSGAAG

SEQ ID NO: 87195 - protein, 23 aa, Artificial Sequence
  Description of Artificial Sequence: Synthetic peptide
  Seed: GMDPRMCSLMQGSTLPRRSGAAG
GMDPRMYSLVQPSTLPRRSGAAG

SEQ ID NO: 87196 - protein, 23 aa, Artificial Sequence
  Description of Artificial Sequence: Synthetic peptide
  Seed: GMDPRMCSLMQGSTLPRRSGAAG
GMDPRMYSLVQPSTMPRRSGAAG

SEQ ID NO: 87197 - protein, 23 aa, Artificial Sequence
  Description of Artificial Sequence: Synthetic peptide
  Seed: GMDPRMCSLMQGSTLPRRSGAAG
GMDPRMYSLVQPSTNPRRSGAAG

SEQ ID NO: 87198 - protein, 23 aa, Artificial Sequence
  Description of Artificial Sequence: Synthetic peptide
  Seed: GMDPRMCSLMQGSTLPRRSGAAG
GMDPRMYSLVQPSTSPRRSGAAG

SEQ ID NO: 87199 - protein, 23 aa, Artificial Sequence
  Description of Artificial Sequence: Synthetic peptide
  Seed: GMDPRMCSLMQGSTLPRRSGAAG
GMDPRMYSLVQPSTTPRRSGAAG

SEQ ID NO: 87200 - protein, 23 aa, Artificial Sequence
  Description of Artificial Sequence: Synthetic peptide
  Seed: GMDPRMCSLMQGSTLPRRSGAAG
GMDPRMYSLVQPSTVPRRSGAAG

SEQ ID NO: 87201 - protein, 23 aa, Artificial Sequence
  Description of Artificial Sequence: Synthetic peptide
  Seed: GMDPRMCSLMQGSTLPRRSGAAG
GMDPRMYSLVQSSTAPRRSGAAG

SEQ ID NO: 87202 - protein, 23 aa, Artificial Sequence
  Description of Artificial Sequence: Synthetic peptide
  Seed: GMDPRMCSLMQGSTLPRRSGAAG
GMDPRMYSLVQSSTIPRRSGAAG

SEQ ID NO: 87203 - protein, 23 aa, Artificial Sequence
  Description of Artificial Sequence: Synthetic peptide
  Seed: GMDPRMCSLMQGSTLPRRSGAAG
GMDPRMYSLVQSSTLPRRSGAAG

SEQ ID NO: 87204 - protein, 23 aa, Artificial Sequence
  Description of Artificial Sequence: Synthetic peptide
  Seed: GMDPRMCSLMQGSTLPRRSGAAG
GMDPRMYSLVQSSTNPRRSGAAG

SEQ ID NO: 87205 - protein, 23 aa, Artificial Sequence
  Description of Artificial Sequence: Synthetic peptide
  Seed: GMDPRMCSLMQGSTLPRRSGAAG
GMDPRMYSLVQSSTSPRRSGAAG

SEQ ID NO: 87206 - protein, 23 aa, Artificial Sequence
  Description of Artificial Sequence: Synthetic peptide
  Seed: GMDPRMCSLMQGSTLPRRSGAAG
GMDPRMYSLVQSSTTPRRSGAAG

SEQ ID NO: 87207 - protein, 23 aa, Artificial Sequence
  Description of Artificial Sequence: Synthetic peptide
  Seed: GMDPRMCSLMQGSTLPRRSGAAG
GMDPRMYSLVQSSTVPRRSGAAG

SEQ ID NO: 87208 - protein, 23 aa, Artificial Sequence
  Description of Artificial Sequence: Synthetic peptide
  Seed: GMDPRMCSLMQGSTLPRRSGAAG
GMDPRMYSLVQTSTAPRRSGAAG

SEQ ID NO: 87209 - protein, 23 aa, Artificial Sequence
  Description of Artificial Sequence: Synthetic peptide
  Seed: GMDPRMCSLMQGSTLPRRSGAAG
GMDPRMYSLVQTSTIPRRSGAAG

SEQ ID NO: 87210 - protein, 23 aa, Artificial Sequence
  Description of Artificial Sequence: Synthetic peptide
  Seed: GMDPRMCSLMQGSTLPRRSGAAG
GMDPRMYSLVQTSTNPRRSGAAG

SEQ ID NO: 87211 - protein, 23 aa, Artificial Sequence
  Description of Artificial Sequence: Synthetic peptide
  Seed: GMDPRMCSLMQGSTLPRRSGAAG
GMDPRMYSLVQTSTSPRRSGAAG

SEQ ID NO: 87212 - protein, 23 aa, Artificial Sequence
  Description of Artificial Sequence: Synthetic peptide
  Seed: GMDPRMCSLMQGSTLPRRSGAAG
GMDPRMYSLVQTSTTPRRSGAAG

SEQ ID NO: 87213 - protein, 23 aa, Artificial Sequence
  Description of Artificial Sequence: Synthetic peptide
  Seed: GMDPRMCSLMQGSTLPRRSGAAG
GMDPRMYSLVQTSTVPRRSGAAG

SEQ ID NO: 87214 - protein, 23 aa, Artificial Sequence
  Description of Artificial Sequence: Synthetic peptide
  Seed: GMDPRMCSLMQGSTLPRRSGAAG
GMDPRMYSLVQVSTAPRRSGAAG

SEQ ID NO: 87215 - protein, 23 aa, Artificial Sequence
  Description of Artificial Sequence: Synthetic peptide
  Seed: GMDPRMCSLMQGSTLPRRSGAAG
GMDPRMYSLVQVSTNPRRSGAAG

SEQ ID NO: 87216 - protein, 23 aa, Artificial Sequence
  Description of Artificial Sequence: Synthetic peptide
  Seed: GMDPRMCSLMQGSTLPRRSGAAG
GMDPRMYSLVQVSTSPRRSGAAG

SEQ ID NO: 87217 - protein, 23 aa, Artificial Sequence
  Description of Artificial Sequence: Synthetic peptide
  Seed: GMDPRMCSLMQGSTLPRRSGAAG
GMDPRMYSLVQVSTTPRRSGAAG

SEQ ID NO: 87218 - protein, 23 aa, Artificial Sequence
  Description of Artificial Sequence: Synthetic peptide
  Seed: GMDPRMCSLMQGSTLPRRSGAAG
GMDPRMYSLVQVSTVPRRSGAAG

SEQ ID NO: 87219 - protein, 23 aa, Artificial Sequence
  Description of Artificial Sequence: Synthetic peptide
  Seed: GMDPRMCSLMQGSTLPRRSGAAG
GMDPRMCSLMQISTMPRRSAAAG

SEQ ID NO: 87220 - protein, 24 aa, Artificial Sequence
  Description of Artificial Sequence: Synthetic peptide
  Seed: GMDPRMCSLMQGSTLPRRSGAAGA
GMDPRMFSLAQASTAPRRSGAAGA

SEQ ID NO: 87221 - protein, 24 aa, Artificial Sequence
  Description of Artificial Sequence: Synthetic peptide
  Seed: GMDPRMCSLMQGSTLPRRSGAAGA
GMDPRMFSLAQASTCPRRSGAAGA

SEQ ID NO: 87222 - protein, 24 aa, Artificial Sequence
  Description of Artificial Sequence: Synthetic peptide
  Seed: GMDPRMCSLMQGSTLPRRSGAAGA
GMDPRMFSLAQASTFPRRSGAAGA

SEQ ID NO: 87223 - protein, 24 aa, Artificial Sequence
  Description of Artificial Sequence: Synthetic peptide
  Seed: GMDPRMCSLMQGSTLPRRSGAAGA
GMDPRMFSLAQASTGPRRSGAAGA

SEQ ID NO: 87224 - protein, 24 aa, Artificial Sequence
  Description of Artificial Sequence: Synthetic peptide
  Seed: GMDPRMCSLMQGSTLPRRSGAAGA
GMDPRMFSLAQASTHPRRSGAAGA

SEQ ID NO: 87225 - protein, 24 aa, Artificial Sequence
  Description of Artificial Sequence: Synthetic peptide
  Seed: GMDPRMCSLMQGSTLPRRSGAAGA
GMDPRMFSLAQASTIPRRSGAAGA

SEQ ID NO: 87226 - protein, 24 aa, Artificial Sequence
  Description of Artificial Sequence: Synthetic peptide
  Seed: GMDPRMCSLMQGSTLPRRSGAAGA
GMDPRMFSLAQASTLPRRSGAAGA

SEQ ID NO: 87227 - protein, 24 aa, Artificial Sequence
  Description of Artificial Sequence: Synthetic peptide
  Seed: GMDPRMCSLMQGSTLPRRSGAAGA
GMDPRMFSLAQASTMPRRSGAAGA

SEQ ID NO: 87228 - protein, 24 aa, Artificial Sequence
  Description of Artificial Sequence: Synthetic peptide
  Seed: GMDPRMCSLMQGSTLPRRSGAAGA
GMDPRMFSLAQASTNPRRSGAAGA

SEQ ID NO: 87229 - protein, 24 aa, Artificial Sequence
  Description of Artificial Sequence: Synthetic peptide
  Seed: GMDPRMCSLMQGSTLPRRSGAAGA
GMDPRMFSLAQASTQPRRSGAAGA

SEQ ID NO: 87230 - protein, 24 aa, Artificial Sequence
  Description of Artificial Sequence: Synthetic peptide
  Seed: GMDPRMCSLMQGSTLPRRSGAAGA
GMDPRMFSLAQASTSPRRSGAAGA

SEQ ID NO: 87231 - protein, 24 aa, Artificial Sequence
  Description of Artificial Sequence: Synthetic peptide
  Seed: GMDPRMCSLMQGSTLPRRSGAAGA
GMDPRMFSLAQASTTPRRSGAAGA

SEQ ID NO: 87232 - protein, 24 aa, Artificial Sequence
  Description of Artificial Sequence: Synthetic peptide
  Seed: GMDPRMCSLMQGSTLPRRSGAAGA
GMDPRMFSLAQASTVPRRSGAAGA

SEQ ID NO: 87233 - protein, 24 aa, Artificial Sequence
  Description of Artificial Sequence: Synthetic peptide
  Seed: GMDPRMCSLMQGSTLPRRSGAAGA
GMDPRMFSLAQGSTAPRRSGAAGA

SEQ ID NO: 87234 - protein, 24 aa, Artificial Sequence
  Description of Artificial Sequence: Synthetic peptide
  Seed: GMDPRMCSLMQGSTLPRRSGAAGA
GMDPRMFSLAQGSTIPRRSGAAGA

SEQ ID NO: 87235 - protein, 24 aa, Artificial Sequence
  Description of Artificial Sequence: Synthetic peptide
  Seed: GMDPRMCSLMQGSTLPRRSGAAGA
GMDPRMFSLAQGSTLPRRSGAAGA

SEQ ID NO: 87236 - protein, 24 aa, Artificial Sequence
  Description of Artificial Sequence: Synthetic peptide
  Seed: GMDPRMCSLMQGSTLPRRSGAAGA
GMDPRMFSLAQGSTMPRRSGAAGA

SEQ ID NO: 87237 - protein, 24 aa, Artificial Sequence
  Description of Artificial Sequence: Synthetic peptide
  Seed: GMDPRMCSLMQGSTLPRRSGAAGA
GMDPRMFSLAQGSTSPRRSGAAGA

SEQ ID NO: 87238 - protein, 24 aa, Artificial Sequence
  Description of Artificial Sequence: Synthetic peptide
  Seed: GMDPRMCSLMQGSTLPRRSGAAGA
GMDPRMFSLAQGSTTPRRSGAAGA

SEQ ID NO: 87239 - protein, 24 aa, Artificial Sequence
  Description of Artificial Sequence: Synthetic peptide
  Seed: GMDPRMCSLMQGSTLPRRSGAAGA
GMDPRMFSLAQGSTVPRRSGAAGA

SEQ ID NO: 87240 - protein, 24 aa, Artificial Sequence
  Description of Artificial Sequence: Synthetic peptide
  Seed: GMDPRMCSLMQGSTLPRRSGAAGA
GMDPRMFSLAQISTAPRRSGAAGA

SEQ ID NO: 87241 - protein, 24 aa, Artificial Sequence
  Description of Artificial Sequence: Synthetic peptide
  Seed: GMDPRMCSLMQGSTLPRRSGAAGA
GMDPRMFSLAQISTNPRRSGAAGA

SEQ ID NO: 87242 - protein, 24 aa, Artificial Sequence
  Description of Artificial Sequence: Synthetic peptide
  Seed: GMDPRMCSLMQGSTLPRRSGAAGA
GMDPRMFSLAQISTSPRRSGAAGA

SEQ ID NO: 87243 - protein, 24 aa, Artificial Sequence
  Description of Artificial Sequence: Synthetic peptide
  Seed: GMDPRMCSLMQGSTLPRRSGAAGA
GMDPRMFSLAQISTTPRRSGAAGA

SEQ ID NO: 87244 - protein, 24 aa, Artificial Sequence
  Description of Artificial Sequence: Synthetic peptide
  Seed: GMDPRMCSLMQGSTLPRRSGAAGA
GMDPRMFSLAQISTVPRRSGAAGA

SEQ ID NO: 87245 - protein, 24 aa, Artificial Sequence
  Description of Artificial Sequence: Synthetic peptide
  Seed: GMDPRMCSLMQGSTLPRRSGAAGA
GMDPRMFSLAQLSTAPRRSGAAGA

SEQ ID NO: 87246 - protein, 24 aa, Artificial Sequence
  Description of Artificial Sequence: Synthetic peptide
  Seed: GMDPRMCSLMQGSTLPRRSGAAGA
GMDPRMFSLAQLSTNPRRSGAAGA

SEQ ID NO: 87247 - protein, 24 aa, Artificial Sequence
  Description of Artificial Sequence: Synthetic peptide
  Seed: GMDPRMCSLMQGSTLPRRSGAAGA
GMDPRMFSLAQMSTAPRRSGAAGA

SEQ ID NO: 87248 - protein, 24 aa, Artificial Sequence
  Description of Artificial Sequence: Synthetic peptide
  Seed: GMDPRMCSLMQGSTLPRRSGAAGA
GMDPRMFSLAQNSTAPRRSGAAGA

SEQ ID NO: 87249 - protein, 24 aa, Artificial Sequence
  Description of Artificial Sequence: Synthetic peptide
  Seed: GMDPRMCSLMQGSTLPRRSGAAGA
GMDPRMFSLAQNSTIPRRSGAAGA

SEQ ID NO: 87250 - protein, 24 aa, Artificial Sequence
  Description of Artificial Sequence: Synthetic peptide
  Seed: GMDPRMCSLMQGSTLPRRSGAAGA
GMDPRMFSLAQNSTLPRRSGAAGA

SEQ ID NO: 87251 - protein, 24 aa, Artificial Sequence
  Description of Artificial Sequence: Synthetic peptide
  Seed: GMDPRMCSLMQGSTLPRRSGAAGA
GMDPRMFSLAQNSTNPRRSGAAGA

SEQ ID NO: 87252 - protein, 24 aa, Artificial Sequence
  Description of Artificial Sequence: Synthetic peptide
  Seed: GMDPRMCSLMQGSTLPRRSGAAGA
GMDPRMFSLAQNSTSPRRSGAAGA

SEQ ID NO: 87253 - protein, 24 aa, Artificial Sequence
  Description of Artificial Sequence: Synthetic peptide
  Seed: GMDPRMCSLMQGSTLPRRSGAAGA
GMDPRMFSLAQNSTVPRRSGAAGA

SEQ ID NO: 87254 - protein, 24 aa, Artificial Sequence
  Description of Artificial Sequence: Synthetic peptide
  Seed: GMDPRMCSLMQGSTLPRRSGAAGA
GMDPRMFSLAQPSTAPRRSGAAGA

SEQ ID NO: 87255 - protein, 24 aa, Artificial Sequence
  Description of Artificial Sequence: Synthetic peptide
  Seed: GMDPRMCSLMQGSTLPRRSGAAGA
GMDPRMFSLAQPSTIPRRSGAAGA

SEQ ID NO: 87256 - protein, 24 aa, Artificial Sequence
  Description of Artificial Sequence: Synthetic peptide
  Seed: GMDPRMCSLMQGSTLPRRSGAAGA
GMDPRMFSLAQPSTLPRRSGAAGA

SEQ ID NO: 87257 - protein, 24 aa, Artificial Sequence
  Description of Artificial Sequence: Synthetic peptide
  Seed: GMDPRMCSLMQGSTLPRRSGAAGA
GMDPRMFSLAQPSTMPRRSGAAGA

SEQ ID NO: 87258 - protein, 24 aa, Artificial Sequence
  Description of Artificial Sequence: Synthetic peptide
  Seed: GMDPRMCSLMQGSTLPRRSGAAGA
GMDPRMFSLAQPSTNPRRSGAAGA

SEQ ID NO: 87259 - protein, 24 aa, Artificial Sequence
  Description of Artificial Sequence: Synthetic peptide
  Seed: GMDPRMCSLMQGSTLPRRSGAAGA
GMDPRMFSLAQPSTQPRRSGAAGA

SEQ ID NO: 87260 - protein, 24 aa, Artificial Sequence
  Description of Artificial Sequence: Synthetic peptide
  Seed: GMDPRMCSLMQGSTLPRRSGAAGA
GMDPRMFSLAQPSTSPRRSGAAGA

SEQ ID NO: 87261 - protein, 24 aa, Artificial Sequence
  Description of Artificial Sequence: Synthetic peptide
  Seed: GMDPRMCSLMQGSTLPRRSGAAGA
GMDPRMFSLAQPSTTPRRSGAAGA

SEQ ID NO: 87262 - protein, 24 aa, Artificial Sequence
  Description of Artificial Sequence: Synthetic peptide
  Seed: GMDPRMCSLMQGSTLPRRSGAAGA
GMDPRMFSLAQPSTVPRRSGAAGA

SEQ ID NO: 87263 - protein, 24 aa, Artificial Sequence
  Description of Artificial Sequence: Synthetic peptide
  Seed: GMDPRMCSLMQGSTLPRRSGAAGA
GMDPRMFSLAQSSTAPRRSGAAGA

SEQ ID NO: 87264 - protein, 24 aa, Artificial Sequence
  Description of Artificial Sequence: Synthetic peptide
  Seed: GMDPRMCSLMQGSTLPRRSGAAGA
GMDPRMFSLAQSSTIPRRSGAAGA

SEQ ID NO: 87265 - protein, 24 aa, Artificial Sequence
  Description of Artificial Sequence: Synthetic peptide
  Seed: GMDPRMCSLMQGSTLPRRSGAAGA
GMDPRMFSLAQSSTLPRRSGAAGA

SEQ ID NO: 87266 - protein, 24 aa, Artificial Sequence
  Description of Artificial Sequence: Synthetic peptide
  Seed: GMDPRMCSLMQGSTLPRRSGAAGA
GMDPRMFSLAQSSTMPRRSGAAGA

SEQ ID NO: 87267 - protein, 24 aa, Artificial Sequence
  Description of Artificial Sequence: Synthetic peptide
  Seed: GMDPRMCSLMQGSTLPRRSGAAGA
GMDPRMFSLAQSSTNPRRSGAAGA

SEQ ID NO: 87268 - protein, 24 aa, Artificial Sequence
  Description of Artificial Sequence: Synthetic peptide
  Seed: GMDPRMCSLMQGSTLPRRSGAAGA
GMDPRMFSLAQSSTSPRRSGAAGA

SEQ ID NO: 87269 - protein, 24 aa, Artificial Sequence
  Description of Artificial Sequence: Synthetic peptide
  Seed: GMDPRMCSLMQGSTLPRRSGAAGA
GMDPRMFSLAQSSTTPRRSGAAGA

SEQ ID NO: 87270 - protein, 24 aa, Artificial Sequence
  Description of Artificial Sequence: Synthetic peptide
  Seed: GMDPRMCSLMQGSTLPRRSGAAGA
GMDPRMFSLAQSSTVPRRSGAAGA

SEQ ID NO: 87271 - protein, 24 aa, Artificial Sequence
  Description of Artificial Sequence: Synthetic peptide
  Seed: GMDPRMCSLMQGSTLPRRSGAAGA
GMDPRMFSLAQTSTAPRRSGAAGA

SEQ ID NO: 87272 - protein, 24 aa, Artificial Sequence
  Description of Artificial Sequence: Synthetic peptide
  Seed: GMDPRMCSLMQGSTLPRRSGAAGA
GMDPRMFSLAQTSTIPRRSGAAGA

SEQ ID NO: 87273 - protein, 24 aa, Artificial Sequence
  Description of Artificial Sequence: Synthetic peptide
  Seed: GMDPRMCSLMQGSTLPRRSGAAGA
GMDPRMFSLAQTSTLPRRSGAAGA

SEQ ID NO: 87274 - protein, 24 aa, Artificial Sequence
  Description of Artificial Sequence: Synthetic peptide
  Seed: GMDPRMCSLMQGSTLPRRSGAAGA
GMDPRMFSLAQTSTMPRRSGAAGA

SEQ ID NO: 87275 - protein, 24 aa, Artificial Sequence
  Description of Artificial Sequence: Synthetic peptide
  Seed: GMDPRMCSLMQGSTLPRRSGAAGA
GMDPRMFSLAQTSTNPRRSGAAGA

SEQ ID NO: 87276 - protein, 24 aa, Artificial Sequence
  Description of Artificial Sequence: Synthetic peptide
  Seed: GMDPRMCSLMQGSTLPRRSGAAGA
GMDPRMFSLAQTSTSPRRSGAAGA

SEQ ID NO: 87277 - protein, 24 aa, Artificial Sequence
  Description of Artificial Sequence: Synthetic peptide
  Seed: GMDPRMCSLMQGSTLPRRSGAAGA
GMDPRMFSLAQTSTTPRRSGAAGA

SEQ ID NO: 87278 - protein, 24 aa, Artificial Sequence
  Description of Artificial Sequence: Synthetic peptide
  Seed: GMDPRMCSLMQGSTLPRRSGAAGA
GMDPRMFSLAQTSTVPRRSGAAGA

SEQ ID NO: 87279 - protein, 24 aa, Artificial Sequence
  Description of Artificial Sequence: Synthetic peptide
  Seed: GMDPRMCSLMQGSTLPRRSGAAGA
GMDPRMFSLAQVSTAPRRSGAAGA

SEQ ID NO: 87280 - protein, 24 aa, Artificial Sequence
  Description of Artificial Sequence: Synthetic peptide
  Seed: GMDPRMCSLMQGSTLPRRSGAAGA
GMDPRMFSLAQVSTGPRRSGAAGA

SEQ ID NO: 87281 - protein, 24 aa, Artificial Sequence
  Description of Artificial Sequence: Synthetic peptide
  Seed: GMDPRMCSLMQGSTLPRRSGAAGA
GMDPRMFSLAQVSTIPRRSGAAGA

SEQ ID NO: 87282 - protein, 24 aa, Artificial Sequence
  Description of Artificial Sequence: Synthetic peptide
  Seed: GMDPRMCSLMQGSTLPRRSGAAGA
GMDPRMFSLAQVSTLPRRSGAAGA

SEQ ID NO: 87283 - protein, 24 aa, Artificial Sequence
  Description of Artificial Sequence: Synthetic peptide
  Seed: GMDPRMCSLMQGSTLPRRSGAAGA
GMDPRMFSLAQVSTMPRRSGAAGA

SEQ ID NO: 87284 - protein, 24 aa, Artificial Sequence
  Description of Artificial Sequence: Synthetic peptide
  Seed: GMDPRMCSLMQGSTLPRRSGAAGA
GMDPRMFSLAQVSTNPRRSGAAGA

SEQ ID NO: 87285 - protein, 24 aa, Artificial Sequence
  Description of Artificial Sequence: Synthetic peptide
  Seed: GMDPRMCSLMQGSTLPRRSGAAGA
GMDPRMFSLAQVSTSPRRSGAAGA

SEQ ID NO: 87286 - protein, 24 aa, Artificial Sequence
  Description of Artificial Sequence: Synthetic peptide
  Seed: GMDPRMCSLMQGSTLPRRSGAAGA
GMDPRMFSLAQVSTTPRRSGAAGA

SEQ ID NO: 87287 - protein, 24 aa, Artificial Sequence
  Description of Artificial Sequence: Synthetic peptide
  Seed: GMDPRMCSLMQGSTLPRRSGAAGA
GMDPRMFSLAQVSTVPRRSGAAGA

SEQ ID NO: 87288 - protein, 24 aa, Artificial Sequence
  Description of Artificial Sequence: Synthetic peptide
  Seed: GMDPRMCSLMQGSTLPRRSGAAGA
GMDPRMFSLCQASTIPRRSGAAGA

SEQ ID NO: 87289 - protein, 24 aa, Artificial Sequence
  Description of Artificial Sequence: Synthetic peptide
  Seed: GMDPRMCSLMQGSTLPRRSGAAGA
GMDPRMFSLCQASTLPRRSGAAGA

SEQ ID NO: 87290 - protein, 24 aa, Artificial Sequence
  Description of Artificial Sequence: Synthetic peptide
  Seed: GMDPRMCSLMQGSTLPRRSGAAGA
GMDPRMFSLCQASTVPRRSGAAGA

SEQ ID NO: 87291 - protein, 24 aa, Artificial Sequence
  Description of Artificial Sequence: Synthetic peptide
  Seed: GMDPRMCSLMQGSTLPRRSGAAGA
GMDPRMFSLEQASTAPRRSGAAGA

SEQ ID NO: 87292 - protein, 24 aa, Artificial Sequence
  Description of Artificial Sequence: Synthetic peptide
  Seed: GMDPRMCSLMQGSTLPRRSGAAGA
GMDPRMFSLEQASTIPRRSGAAGA

SEQ ID NO: 87293 - protein, 24 aa, Artificial Sequence
  Description of Artificial Sequence: Synthetic peptide
  Seed: GMDPRMCSLMQGSTLPRRSGAAGA
GMDPRMFSLEQASTLPRRSGAAGA

SEQ ID NO: 87294 - protein, 24 aa, Artificial Sequence
  Description of Artificial Sequence: Synthetic peptide
  Seed: GMDPRMCSLMQGSTLPRRSGAAGA
GMDPRMFSLEQASTVPRRSGAAGA

SEQ ID NO: 87295 - protein, 24 aa, Artificial Sequence
  Description of Artificial Sequence: Synthetic peptide
  Seed: GMDPRMCSLMQGSTLPRRSGAAGA
GMDPRMFSLEQGSTAPRRSGAAGA

SEQ ID NO: 87296 - protein, 24 aa, Artificial Sequence
  Description of Artificial Sequence: Synthetic peptide
  Seed: GMDPRMCSLMQGSTLPRRSGAAGA
GMDPRMFSLEQGSTIPRRSGAAGA

SEQ ID NO: 87297 - protein, 24 aa, Artificial Sequence
  Description of Artificial Sequence: Synthetic peptide
  Seed: GMDPRMCSLMQGSTLPRRSGAAGA
GMDPRMFSLEQGSTLPRRSGAAGA

SEQ ID NO: 87298 - protein, 24 aa, Artificial Sequence
  Description of Artificial Sequence: Synthetic peptide
  Seed: GMDPRMCSLMQGSTLPRRSGAAGA
GMDPRMFSLEQGSTVPRRSGAAGA

SEQ ID NO: 87299 - protein, 24 aa, Artificial Sequence
  Description of Artificial Sequence: Synthetic peptide
  Seed: GMDPRMCSLMQGSTLPRRSGAAGA
GMDPRMFSLEQSSTIPRRSGAAGA

SEQ ID NO: 87300 - protein, 24 aa, Artificial Sequence
  Description of Artificial Sequence: Synthetic peptide
  Seed: GMDPRMCSLMQGSTLPRRSGAAGA
GMDPRMFSLEQSSTLPRRSGAAGA

SEQ ID NO: 87301 - protein, 24 aa, Artificial Sequence
  Description of Artificial Sequence: Synthetic peptide
  Seed: GMDPRMCSLMQGSTLPRRSGAAGA
GMDPRMFSLEQSSTVPRRSGAAGA

SEQ ID NO: 87302 - protein, 24 aa, Artificial Sequence
  Description of Artificial Sequence: Synthetic peptide
  Seed: GMDPRMCSLMQGSTLPRRSGAAGA
GMDPRMFSLFQASTAPRRSGAAGA

SEQ ID NO: 87303 - protein, 24 aa, Artificial Sequence
  Description of Artificial Sequence: Synthetic peptide
  Seed: GMDPRMCSLMQGSTLPRRSGAAGA
GMDPRMFSLFQASTIPRRSGAAGA

SEQ ID NO: 87304 - protein, 24 aa, Artificial Sequence
  Description of Artificial Sequence: Synthetic peptide
  Seed: GMDPRMCSLMQGSTLPRRSGAAGA
GMDPRMFSLFQASTLPRRSGAAGA

SEQ ID NO: 87305 - protein, 24 aa, Artificial Sequence
  Description of Artificial Sequence: Synthetic peptide
  Seed: GMDPRMCSLMQGSTLPRRSGAAGA
GMDPRMFSLFQASTNPRRSGAAGA

SEQ ID NO: 87306 - protein, 24 aa, Artificial Sequence
  Description of Artificial Sequence: Synthetic peptide
  Seed: GMDPRMCSLMQGSTLPRRSGAAGA
GMDPRMFSLFQASTSPRRSGAAGA

SEQ ID NO: 87307 - protein, 24 aa, Artificial Sequence
  Description of Artificial Sequence: Synthetic peptide
  Seed: GMDPRMCSLMQGSTLPRRSGAAGA
GMDPRMFSLFQASTVPRRSGAAGA

SEQ ID NO: 87308 - protein, 24 aa, Artificial Sequence
  Description of Artificial Sequence: Synthetic peptide
  Seed: GMDPRMCSLMQGSTLPRRSGAAGA
GMDPRMFSLFQGSTAPRRSGAAGA

SEQ ID NO: 87309 - protein, 24 aa, Artificial Sequence
  Description of Artificial Sequence: Synthetic peptide
  Seed: GMDPRMCSLMQGSTLPRRSGAAGA
GMDPRMFSLFQGSTIPRRSGAAGA

SEQ ID NO: 87310 - protein, 24 aa, Artificial Sequence
  Description of Artificial Sequence: Synthetic peptide
  Seed: GMDPRMCSLMQGSTLPRRSGAAGA
GMDPRMFSLFQGSTLPRRSGAAGA

SEQ ID NO: 87311 - protein, 24 aa, Artificial Sequence
  Description of Artificial Sequence: Synthetic peptide
  Seed: GMDPRMCSLMQGSTLPRRSGAAGA
GMDPRMFSLFQGSTVPRRSGAAGA

SEQ ID NO: 87312 - protein, 24 aa, Artificial Sequence
  Description of Artificial Sequence: Synthetic peptide
  Seed: GMDPRMCSLMQGSTLPRRSGAAGA
GMDPRMFSLFQPSTAPRRSGAAGA

SEQ ID NO: 87313 - protein, 24 aa, Artificial Sequence
  Description of Artificial Sequence: Synthetic peptide
  Seed: GMDPRMCSLMQGSTLPRRSGAAGA
GMDPRMFSLFQPSTNPRRSGAAGA

SEQ ID NO: 87314 - protein, 24 aa, Artificial Sequence
  Description of Artificial Sequence: Synthetic peptide
  Seed: GMDPRMCSLMQGSTLPRRSGAAGA
GMDPRMFSLFQPSTSPRRSGAAGA

SEQ ID NO: 87315 - protein, 24 aa, Artificial Sequence
  Description of Artificial Sequence: Synthetic peptide
  Seed: GMDPRMCSLMQGSTLPRRSGAAGA
GMDPRMFSLFQSSTAPRRSGAAGA

SEQ ID NO: 87316 - protein, 24 aa, Artificial Sequence
  Description of Artificial Sequence: Synthetic peptide
  Seed: GMDPRMCSLMQGSTLPRRSGAAGA
GMDPRMFSLFQSSTIPRRSGAAGA

SEQ ID NO: 87317 - protein, 24 aa, Artificial Sequence
  Description of Artificial Sequence: Synthetic peptide
  Seed: GMDPRMCSLMQGSTLPRRSGAAGA
GMDPRMFSLFQSSTLPRRSGAAGA

SEQ ID NO: 87318 - protein, 24 aa, Artificial Sequence
  Description of Artificial Sequence: Synthetic peptide
  Seed: GMDPRMCSLMQGSTLPRRSGAAGA
GMDPRMFSLFQSSTVPRRSGAAGA

SEQ ID NO: 87319 - protein, 24 aa, Artificial Sequence
  Description of Artificial Sequence: Synthetic peptide
  Seed: GMDPRMCSLMQGSTLPRRSGAAGA
GMDPRMFSLFQTSTAPRRSGAAGA

SEQ ID NO: 87320 - protein, 24 aa, Artificial Sequence
  Description of Artificial Sequence: Synthetic peptide
  Seed: GMDPRMCSLMQGSTLPRRSGAAGA
GMDPRMFSLFQTSTSPRRSGAAGA

SEQ ID NO: 87321 - protein, 24 aa, Artificial Sequence
  Description of Artificial Sequence: Synthetic peptide
  Seed: GMDPRMCSLMQGSTLPRRSGAAGA
GMDPRMFSLFQVSTAPRRSGAAGA

SEQ ID NO: 87322 - protein, 24 aa, Artificial Sequence
  Description of Artificial Sequence: Synthetic peptide
  Seed: GMDPRMCSLMQGSTLPRRSGAAGA
GMDPRMFSLFQVSTNPRRSGAAGA

SEQ ID NO: 87323 - protein, 24 aa, Artificial Sequence
  Description of Artificial Sequence: Synthetic peptide
  Seed: GMDPRMCSLMQGSTLPRRSGAAGA
GMDPRMFSLFQVSTSPRRSGAAGA

SEQ ID NO: 87324 - protein, 24 aa, Artificial Sequence
  Description of Artificial Sequence: Synthetic peptide
  Seed: GMDPRMCSLMQGSTLPRRSGAAGA
GMDPRMFSLGQASTAPRRSGAAGA

SEQ ID NO: 87325 - protein, 24 aa, Artificial Sequence
  Description of Artificial Sequence: Synthetic peptide
  Seed: GMDPRMCSLMQGSTLPRRSGAAGA
GMDPRMFSLGQASTIPRRSGAAGA

SEQ ID NO: 87326 - protein, 24 aa, Artificial Sequence
  Description of Artificial Sequence: Synthetic peptide
  Seed: GMDPRMCSLMQGSTLPRRSGAAGA
GMDPRMFSLGQASTLPRRSGAAGA

SEQ ID NO: 87327 - protein, 24 aa, Artificial Sequence
  Description of Artificial Sequence: Synthetic peptide
  Seed: GMDPRMCSLMQGSTLPRRSGAAGA
GMDPRMFSLGQASTMPRRSGAAGA

SEQ ID NO: 87328 - protein, 24 aa, Artificial Sequence
  Description of Artificial Sequence: Synthetic peptide
  Seed: GMDPRMCSLMQGSTLPRRSGAAGA
GMDPRMFSLGQASTVPRRSGAAGA

SEQ ID NO: 87329 - protein, 24 aa, Artificial Sequence
  Description of Artificial Sequence: Synthetic peptide
  Seed: GMDPRMCSLMQGSTLPRRSGAAGA
GMDPRMFSLGQGSTLPRRSGAAGA

SEQ ID NO: 87330 - protein, 24 aa, Artificial Sequence
  Description of Artificial Sequence: Synthetic peptide
  Seed: GMDPRMCSLMQGSTLPRRSGAAGA
GMDPRMFSLGQSSTLPRRSGAAGA

SEQ ID NO: 87331 - protein, 24 aa, Artificial Sequence
  Description of Artificial Sequence: Synthetic peptide
  Seed: GMDPRMCSLMQGSTLPRRSGAAGA
GMDPRMFSLGQSSTVPRRSGAAGA

SEQ ID NO: 87332 - protein, 24 aa, Artificial Sequence
  Description of Artificial Sequence: Synthetic peptide
  Seed: GMDPRMCSLMQGSTLPRRSGAAGA
GMDPRMFSLHQASTIPRRSGAAGA

SEQ ID NO: 87333 - protein, 24 aa, Artificial Sequence
  Description of Artificial Sequence: Synthetic peptide
  Seed: GMDPRMCSLMQGSTLPRRSGAAGA
GMDPRMFSLHQASTLPRRSGAAGA

SEQ ID NO: 87334 - protein, 24 aa, Artificial Sequence
  Description of Artificial Sequence: Synthetic peptide
  Seed: GMDPRMCSLMQGSTLPRRSGAAGA
GMDPRMFSLHQASTVPRRSGAAGA

SEQ ID NO: 87335 - protein, 24 aa, Artificial Sequence
  Description of Artificial Sequence: Synthetic peptide
  Seed: GMDPRMCSLMQGSTLPRRSGAAGA
GMDPRMFSLIQASTAPRRSGAAGA

SEQ ID NO: 87336 - protein, 24 aa, Artificial Sequence
  Description of Artificial Sequence: Synthetic peptide
  Seed: GMDPRMCSLMQGSTLPRRSGAAGA
GMDPRMFSLIQASTCPRRSGAAGA

SEQ ID NO: 87337 - protein, 24 aa, Artificial Sequence
  Description of Artificial Sequence: Synthetic peptide
  Seed: GMDPRMCSLMQGSTLPRRSGAAGA
GMDPRMFSLIQASTDPRRSGAAGA

SEQ ID NO: 87338 - protein, 24 aa, Artificial Sequence
  Description of Artificial Sequence: Synthetic peptide
  Seed: GMDPRMCSLMQGSTLPRRSGAAGA
GMDPRMFSLIQASTEPRRSGAAGA

SEQ ID NO: 87339 - protein, 24 aa, Artificial Sequence
  Description of Artificial Sequence: Synthetic peptide
  Seed: GMDPRMCSLMQGSTLPRRSGAAGA
GMDPRMFSLIQASTFPRRSGAAGA

SEQ ID NO: 87340 - protein, 24 aa, Artificial Sequence
  Description of Artificial Sequence: Synthetic peptide
  Seed: GMDPRMCSLMQGSTLPRRSGAAGA
GMDPRMFSLIQASTGPRRSGAAGA

SEQ ID NO: 87341 - protein, 24 aa, Artificial Sequence
  Description of Artificial Sequence: Synthetic peptide
  Seed: GMDPRMCSLMQGSTLPRRSGAAGA
GMDPRMFSLIQASTHPRRSGAAGA

SEQ ID NO: 87342 - protein, 24 aa, Artificial Sequence
  Description of Artificial Sequence: Synthetic peptide
  Seed: GMDPRMCSLMQGSTLPRRSGAAGA
GMDPRMFSLIQASTIPRRSGAAGA

SEQ ID NO: 87343 - protein, 24 aa, Artificial Sequence
  Description of Artificial Sequence: Synthetic peptide
  Seed: GMDPRMCSLMQGSTLPRRSGAAGA
GMDPRMFSLIQASTLPRRSGAAGA

SEQ ID NO: 87344 - protein, 24 aa, Artificial Sequence
  Description of Artificial Sequence: Synthetic peptide
  Seed: GMDPRMCSLMQGSTLPRRSGAAGA
GMDPRMFSLIQASTMPRRSGAAGA

SEQ ID NO: 87345 - protein, 24 aa, Artificial Sequence
  Description of Artificial Sequence: Synthetic peptide
  Seed: GMDPRMCSLMQGSTLPRRSGAAGA
GMDPRMFSLIQASTNPRRSGAAGA

SEQ ID NO: 87346 - protein, 24 aa, Artificial Sequence
  Description of Artificial Sequence: Synthetic peptide
  Seed: GMDPRMCSLMQGSTLPRRSGAAGA
GMDPRMFSLIQASTPPRRSGAAGA

SEQ ID NO: 87347 - protein, 24 aa, Artificial Sequence
  Description of Artificial Sequence: Synthetic peptide
  Seed: GMDPRMCSLMQGSTLPRRSGAAGA
GMDPRMFSLIQASTQPRRSGAAGA

SEQ ID NO: 87348 - protein, 24 aa, Artificial Sequence
  Description of Artificial Sequence: Synthetic peptide
  Seed: GMDPRMCSLMQGSTLPRRSGAAGA
GMDPRMFSLIQASTSPRRSGAAGA

SEQ ID NO: 87349 - protein, 24 aa, Artificial Sequence
  Description of Artificial Sequence: Synthetic peptide
  Seed: GMDPRMCSLMQGSTLPRRSGAAGA
GMDPRMFSLIQASTTPRRSGAAGA

SEQ ID NO: 87350 - protein, 24 aa, Artificial Sequence
  Description of Artificial Sequence: Synthetic peptide
  Seed: GMDPRMCSLMQGSTLPRRSGAAGA
GMDPRMFSLIQASTVPRRSGAAGA

SEQ ID NO: 87351 - protein, 24 aa, Artificial Sequence
  Description of Artificial Sequence: Synthetic peptide
  Seed: GMDPRMCSLMQGSTLPRRSGAAGA
GMDPRMFSLIQGSTAPRRSGAAGA

SEQ ID NO: 87352 - protein, 24 aa, Artificial Sequence
  Description of Artificial Sequence: Synthetic peptide
  Seed: GMDPRMCSLMQGSTLPRRSGAAGA
GMDPRMFSLIQGSTCPRRSGAAGA

SEQ ID NO: 87353 - protein, 24 aa, Artificial Sequence
  Description of Artificial Sequence: Synthetic peptide
  Seed: GMDPRMCSLMQGSTLPRRSGAAGA
GMDPRMFSLIQGSTGPRRSGAAGA

SEQ ID NO: 87354 - protein, 24 aa, Artificial Sequence
  Description of Artificial Sequence: Synthetic peptide
  Seed: GMDPRMCSLMQGSTLPRRSGAAGA
GMDPRMFSLIQGSTIPRRSGAAGA

SEQ ID NO: 87355 - protein, 24 aa, Artificial Sequence
  Description of Artificial Sequence: Synthetic peptide
  Seed: GMDPRMCSLMQGSTLPRRSGAAGA
GMDPRMFSLIQGSTLPRRSGAAGA

SEQ ID NO: 87356 - protein, 24 aa, Artificial Sequence
  Description of Artificial Sequence: Synthetic peptide
  Seed: GMDPRMCSLMQGSTLPRRSGAAGA
GMDPRMFSLIQGSTMPRRSGAAGA

SEQ ID NO: 87357 - protein, 24 aa, Artificial Sequence
  Description of Artificial Sequence: Synthetic peptide
  Seed: GMDPRMCSLMQGSTLPRRSGAAGA
GMDPRMFSLIQGSTNPRRSGAAGA

SEQ ID NO: 87358 - protein, 24 aa, Artificial Sequence
  Description of Artificial Sequence: Synthetic peptide
  Seed: GMDPRMCSLMQGSTLPRRSGAAGA
GMDPRMFSLIQGSTSPRRSGAAGA

SEQ ID NO: 87359 - protein, 24 aa, Artificial Sequence
  Description of Artificial Sequence: Synthetic peptide
  Seed: GMDPRMCSLMQGSTLPRRSGAAGA
GMDPRMFSLIQGSTTPRRSGAAGA

SEQ ID NO: 87360 - protein, 24 aa, Artificial Sequence
  Description of Artificial Sequence: Synthetic peptide
  Seed: GMDPRMCSLMQGSTLPRRSGAAGA
GMDPRMFSLIQGSTVPRRSGAAGA

SEQ ID NO: 87361 - protein, 24 aa, Artificial Sequence
  Description of Artificial Sequence: Synthetic peptide
  Seed: GMDPRMCSLMQGSTLPRRSGAAGA
GMDPRMFSLIQISTAPRRSGAAGA

SEQ ID NO: 87362 - protein, 24 aa, Artificial Sequence
  Description of Artificial Sequence: Synthetic peptide
  Seed: GMDPRMCSLMQGSTLPRRSGAAGA
GMDPRMFSLIQISTGPRRSGAAGA

SEQ ID NO: 87363 - protein, 24 aa, Artificial Sequence
  Description of Artificial Sequence: Synthetic peptide
  Seed: GMDPRMCSLMQGSTLPRRSGAAGA
GMDPRMFSLIQISTIPRRSGAAGA

SEQ ID NO: 87364 - protein, 24 aa, Artificial Sequence
  Description of Artificial Sequence: Synthetic peptide
  Seed: GMDPRMCSLMQGSTLPRRSGAAGA
GMDPRMFSLIQISTLPRRSGAAGA

SEQ ID NO: 87365 - protein, 24 aa, Artificial Sequence
  Description of Artificial Sequence: Synthetic peptide
  Seed: GMDPRMCSLMQGSTLPRRSGAAGA
GMDPRMFSLIQISTMPRRSGAAGA

SEQ ID NO: 87366 - protein, 24 aa, Artificial Sequence
  Description of Artificial Sequence: Synthetic peptide
  Seed: GMDPRMCSLMQGSTLPRRSGAAGA
GMDPRMFSLIQISTNPRRSGAAGA

SEQ ID NO: 87367 - protein, 24 aa, Artificial Sequence
  Description of Artificial Sequence: Synthetic peptide
  Seed: GMDPRMCSLMQGSTLPRRSGAAGA
GMDPRMFSLIQISTSPRRSGAAGA

SEQ ID NO: 87368 - protein, 24 aa, Artificial Sequence
  Description of Artificial Sequence: Synthetic peptide
  Seed: GMDPRMCSLMQGSTLPRRSGAAGA
GMDPRMFSLIQISTTPRRSGAAGA

SEQ ID NO: 87369 - protein, 24 aa, Artificial Sequence
  Description of Artificial Sequence: Synthetic peptide
  Seed: GMDPRMCSLMQGSTLPRRSGAAGA
GMDPRMFSLIQISTVPRRSGAAGA

SEQ ID NO: 87370 - protein, 24 aa, Artificial Sequence
  Description of Artificial Sequence: Synthetic peptide
  Seed: GMDPRMCSLMQGSTLPRRSGAAGA
GMDPRMFSLIQLSTAPRRSGAAGA

SEQ ID NO: 87371 - protein, 24 aa, Artificial Sequence
  Description of Artificial Sequence: Synthetic peptide
  Seed: GMDPRMCSLMQGSTLPRRSGAAGA
GMDPRMFSLIQLSTNPRRSGAAGA

SEQ ID NO: 87372 - protein, 24 aa, Artificial Sequence
  Description of Artificial Sequence: Synthetic peptide
  Seed: GMDPRMCSLMQGSTLPRRSGAAGA
GMDPRMFSLIQLSTSPRRSGAAGA

SEQ ID NO: 87373 - protein, 24 aa, Artificial Sequence
  Description of Artificial Sequence: Synthetic peptide
  Seed: GMDPRMCSLMQGSTLPRRSGAAGA
GMDPRMFSLIQMSTAPRRSGAAGA

SEQ ID NO: 87374 - protein, 24 aa, Artificial Sequence
  Description of Artificial Sequence: Synthetic peptide
  Seed: GMDPRMCSLMQGSTLPRRSGAAGA
GMDPRMFSLIQMSTNPRRSGAAGA

SEQ ID NO: 87375 - protein, 24 aa, Artificial Sequence
  Description of Artificial Sequence: Synthetic peptide
  Seed: GMDPRMCSLMQGSTLPRRSGAAGA
GMDPRMFSLIQMSTSPRRSGAAGA

SEQ ID NO: 87376 - protein, 24 aa, Artificial Sequence
  Description of Artificial Sequence: Synthetic peptide
  Seed: GMDPRMCSLMQGSTLPRRSGAAGA
GMDPRMFSLIQNSTAPRRSGAAGA

SEQ ID NO: 87377 - protein, 24 aa, Artificial Sequence
  Description of Artificial Sequence: Synthetic peptide
  Seed: GMDPRMCSLMQGSTLPRRSGAAGA
GMDPRMFSLIQNSTIPRRSGAAGA

SEQ ID NO: 87378 - protein, 24 aa, Artificial Sequence
  Description of Artificial Sequence: Synthetic peptide
  Seed: GMDPRMCSLMQGSTLPRRSGAAGA
GMDPRMFSLIQNSTLPRRSGAAGA

SEQ ID NO: 87379 - protein, 24 aa, Artificial Sequence
  Description of Artificial Sequence: Synthetic peptide
  Seed: GMDPRMCSLMQGSTLPRRSGAAGA
GMDPRMFSLIQNSTNPRRSGAAGA

SEQ ID NO: 87380 - protein, 24 aa, Artificial Sequence
  Description of Artificial Sequence: Synthetic peptide
  Seed: GMDPRMCSLMQGSTLPRRSGAAGA
GMDPRMFSLIQNSTSPRRSGAAGA

SEQ ID NO: 87381 - protein, 24 aa, Artificial Sequence
  Description of Artificial Sequence: Synthetic peptide
  Seed: GMDPRMCSLMQGSTLPRRSGAAGA
GMDPRMFSLIQNSTTPRRSGAAGA

SEQ ID NO: 87382 - protein, 24 aa, Artificial Sequence
  Description of Artificial Sequence: Synthetic peptide
  Seed: GMDPRMCSLMQGSTLPRRSGAAGA
GMDPRMFSLIQNSTVPRRSGAAGA

SEQ ID NO: 87383 - protein, 24 aa, Artificial Sequence
  Description of Artificial Sequence: Synthetic peptide
  Seed: GMDPRMCSLMQGSTLPRRSGAAGA
GMDPRMFSLIQPSTAPRRSGAAGA

SEQ ID NO: 87384 - protein, 24 aa, Artificial Sequence
  Description of Artificial Sequence: Synthetic peptide
  Seed: GMDPRMCSLMQGSTLPRRSGAAGA
GMDPRMFSLIQPSTGPRRSGAAGA

SEQ ID NO: 87385 - protein, 24 aa, Artificial Sequence
  Description of Artificial Sequence: Synthetic peptide
  Seed: GMDPRMCSLMQGSTLPRRSGAAGA
GMDPRMFSLIQPSTHPRRSGAAGA

SEQ ID NO: 87386 - protein, 24 aa, Artificial Sequence
  Description of Artificial Sequence: Synthetic peptide
  Seed: GMDPRMCSLMQGSTLPRRSGAAGA
GMDPRMFSLIQPSTIPRRSGAAGA

SEQ ID NO: 87387 - protein, 24 aa, Artificial Sequence
  Description of Artificial Sequence: Synthetic peptide
  Seed: GMDPRMCSLMQGSTLPRRSGAAGA
GMDPRMFSLIQPSTLPRRSGAAGA

SEQ ID NO: 87388 - protein, 24 aa, Artificial Sequence
  Description of Artificial Sequence: Synthetic peptide
  Seed: GMDPRMCSLMQGSTLPRRSGAAGA
GMDPRMFSLIQPSTMPRRSGAAGA

SEQ ID NO: 87389 - protein, 24 aa, Artificial Sequence
  Description of Artificial Sequence: Synthetic peptide
  Seed: GMDPRMCSLMQGSTLPRRSGAAGA
GMDPRMFSLIQPSTNPRRSGAAGA

SEQ ID NO: 87390 - protein, 24 aa, Artificial Sequence
  Description of Artificial Sequence: Synthetic peptide
  Seed: GMDPRMCSLMQGSTLPRRSGAAGA
GMDPRMFSLIQPSTQPRRSGAAGA

SEQ ID NO: 87391 - protein, 24 aa, Artificial Sequence
  Description of Artificial Sequence: Synthetic peptide
  Seed: GMDPRMCSLMQGSTLPRRSGAAGA
GMDPRMFSLIQPSTSPRRSGAAGA

SEQ ID NO: 87392 - protein, 24 aa, Artificial Sequence
  Description of Artificial Sequence: Synthetic peptide
  Seed: GMDPRMCSLMQGSTLPRRSGAAGA
GMDPRMFSLIQPSTTPRRSGAAGA

SEQ ID NO: 87393 - protein, 24 aa, Artificial Sequence
  Description of Artificial Sequence: Synthetic peptide
  Seed: GMDPRMCSLMQGSTLPRRSGAAGA
GMDPRMFSLIQPSTVPRRSGAAGA

SEQ ID NO: 87394 - protein, 24 aa, Artificial Sequence
  Description of Artificial Sequence: Synthetic peptide
  Seed: GMDPRMCSLMQGSTLPRRSGAAGA
GMDPRMFSLIQSSTAPRRSGAAGA

SEQ ID NO: 87395 - protein, 24 aa, Artificial Sequence
  Description of Artificial Sequence: Synthetic peptide
  Seed: GMDPRMCSLMQGSTLPRRSGAAGA
GMDPRMFSLIQSSTGPRRSGAAGA

SEQ ID NO: 87396 - protein, 24 aa, Artificial Sequence
  Description of Artificial Sequence: Synthetic peptide
  Seed: GMDPRMCSLMQGSTLPRRSGAAGA
GMDPRMFSLIQSSTHPRRSGAAGA

SEQ ID NO: 87397 - protein, 24 aa, Artificial Sequence
  Description of Artificial Sequence: Synthetic peptide
  Seed: GMDPRMCSLMQGSTLPRRSGAAGA
GMDPRMFSLIQSSTIPRRSGAAGA

SEQ ID NO: 87398 - protein, 24 aa, Artificial Sequence
  Description of Artificial Sequence: Synthetic peptide
  Seed: GMDPRMCSLMQGSTLPRRSGAAGA
GMDPRMFSLIQSSTLPRRSGAAGA

SEQ ID NO: 87399 - protein, 24 aa, Artificial Sequence
  Description of Artificial Sequence: Synthetic peptide
  Seed: GMDPRMCSLMQGSTLPRRSGAAGA
GMDPRMFSLIQSSTMPRRSGAAGA

SEQ ID NO: 87400 - protein, 24 aa, Artificial Sequence
  Description of Artificial Sequence: Synthetic peptide
  Seed: GMDPRMCSLMQGSTLPRRSGAAGA
GMDPRMFSLIQSSTNPRRSGAAGA

SEQ ID NO: 87401 - protein, 24 aa, Artificial Sequence
  Description of Artificial Sequence: Synthetic peptide
  Seed: GMDPRMCSLMQGSTLPRRSGAAGA
GMDPRMFSLIQSSTQPRRSGAAGA

SEQ ID NO: 87402 - protein, 24 aa, Artificial Sequence
  Description of Artificial Sequence: Synthetic peptide
  Seed: GMDPRMCSLMQGSTLPRRSGAAGA
GMDPRMFSLIQSSTSPRRSGAAGA

SEQ ID NO: 87403 - protein, 24 aa, Artificial Sequence
  Description of Artificial Sequence: Synthetic peptide
  Seed: GMDPRMCSLMQGSTLPRRSGAAGA
GMDPRMFSLIQSSTTPRRSGAAGA

SEQ ID NO: 87404 - protein, 24 aa, Artificial Sequence
  Description of Artificial Sequence: Synthetic peptide
  Seed: GMDPRMCSLMQGSTLPRRSGAAGA
GMDPRMFSLIQSSTVPRRSGAAGA

SEQ ID NO: 87405 - protein, 24 aa, Artificial Sequence
  Description of Artificial Sequence: Synthetic peptide
  Seed: GMDPRMCSLMQGSTLPRRSGAAGA
GMDPRMFSLIQTSTAPRRSGAAGA

SEQ ID NO: 87406 - protein, 24 aa, Artificial Sequence
  Description of Artificial Sequence: Synthetic peptide
  Seed: GMDPRMCSLMQGSTLPRRSGAAGA
GMDPRMFSLIQTSTGPRRSGAAGA

SEQ ID NO: 87407 - protein, 24 aa, Artificial Sequence
  Description of Artificial Sequence: Synthetic peptide
  Seed: GMDPRMCSLMQGSTLPRRSGAAGA
GMDPRMFSLIQTSTHPRRSGAAGA

SEQ ID NO: 87408 - protein, 24 aa, Artificial Sequence
  Description of Artificial Sequence: Synthetic peptide
  Seed: GMDPRMCSLMQGSTLPRRSGAAGA
GMDPRMFSLIQTSTIPRRSGAAGA

SEQ ID NO: 87409 - protein, 24 aa, Artificial Sequence
  Description of Artificial Sequence: Synthetic peptide
  Seed: GMDPRMCSLMQGSTLPRRSGAAGA
GMDPRMFSLIQTSTLPRRSGAAGA

SEQ ID NO: 87410 - protein, 24 aa, Artificial Sequence
  Description of Artificial Sequence: Synthetic peptide
  Seed: GMDPRMCSLMQGSTLPRRSGAAGA
GMDPRMFSLIQTSTMPRRSGAAGA

SEQ ID NO: 87411 - protein, 24 aa, Artificial Sequence
  Description of Artificial Sequence: Synthetic peptide
  Seed: GMDPRMCSLMQGSTLPRRSGAAGA
GMDPRMFSLIQTSTNPRRSGAAGA

SEQ ID NO: 87412 - protein, 24 aa, Artificial Sequence
  Description of Artificial Sequence: Synthetic peptide
  Seed: GMDPRMCSLMQGSTLPRRSGAAGA
GMDPRMFSLIQTSTQPRRSGAAGA

SEQ ID NO: 87413 - protein, 24 aa, Artificial Sequence
  Description of Artificial Sequence: Synthetic peptide
  Seed: GMDPRMCSLMQGSTLPRRSGAAGA
GMDPRMFSLIQTSTSPRRSGAAGA

SEQ ID NO: 87414 - protein, 24 aa, Artificial Sequence
  Description of Artificial Sequence: Synthetic peptide
  Seed: GMDPRMCSLMQGSTLPRRSGAAGA
GMDPRMFSLIQTSTTPRRSGAAGA

SEQ ID NO: 87415 - protein, 24 aa, Artificial Sequence
  Description of Artificial Sequence: Synthetic peptide
  Seed: GMDPRMCSLMQGSTLPRRSGAAGA
GMDPRMFSLIQTSTVPRRSGAAGA

SEQ ID NO: 87416 - protein, 24 aa, Artificial Sequence
  Description of Artificial Sequence: Synthetic peptide
  Seed: GMDPRMCSLMQGSTLPRRSGAAGA
GMDPRMFSLIQVSTAPRRSGAAGA

SEQ ID NO: 87417 - protein, 24 aa, Artificial Sequence
  Description of Artificial Sequence: Synthetic peptide
  Seed: GMDPRMCSLMQGSTLPRRSGAAGA
GMDPRMFSLIQVSTGPRRSGAAGA

SEQ ID NO: 87418 - protein, 24 aa, Artificial Sequence
  Description of Artificial Sequence: Synthetic peptide
  Seed: GMDPRMCSLMQGSTLPRRSGAAGA
GMDPRMFSLIQVSTHPRRSGAAGA

SEQ ID NO: 87419 - protein, 24 aa, Artificial Sequence
  Description of Artificial Sequence: Synthetic peptide
  Seed: GMDPRMCSLMQGSTLPRRSGAAGA
GMDPRMFSLIQVSTIPRRSGAAGA

SEQ ID NO: 87420 - protein, 24 aa, Artificial Sequence
  Description of Artificial Sequence: Synthetic peptide
  Seed: GMDPRMCSLMQGSTLPRRSGAAGA
GMDPRMFSLIQVSTLPRRSGAAGA

SEQ ID NO: 87421 - protein, 24 aa, Artificial Sequence
  Description of Artificial Sequence: Synthetic peptide
  Seed: GMDPRMCSLMQGSTLPRRSGAAGA
GMDPRMFSLIQVSTMPRRSGAAGA

SEQ ID NO: 87422 - protein, 24 aa, Artificial Sequence
  Description of Artificial Sequence: Synthetic peptide
  Seed: GMDPRMCSLMQGSTLPRRSGAAGA
GMDPRMFSLIQVSTNPRRSGAAGA

SEQ ID NO: 87423 - protein, 24 aa, Artificial Sequence
  Description of Artificial Sequence: Synthetic peptide
  Seed: GMDPRMCSLMQGSTLPRRSGAAGA
GMDPRMFSLIQVSTQPRRSGAAGA

SEQ ID NO: 87424 - protein, 24 aa, Artificial Sequence
  Description of Artificial Sequence: Synthetic peptide
  Seed: GMDPRMCSLMQGSTLPRRSGAAGA
GMDPRMFSLIQVSTSPRRSGAAGA

SEQ ID NO: 87425 - protein, 24 aa, Artificial Sequence
  Description of Artificial Sequence: Synthetic peptide
  Seed: GMDPRMCSLMQGSTLPRRSGAAGA
GMDPRMFSLIQVSTTPRRSGAAGA

SEQ ID NO: 87426 - protein, 24 aa, Artificial Sequence
  Description of Artificial Sequence: Synthetic peptide
  Seed: GMDPRMCSLMQGSTLPRRSGAAGA
GMDPRMFSLIQVSTVPRRSGAAGA

SEQ ID NO: 87427 - protein, 24 aa, Artificial Sequence
  Description of Artificial Sequence: Synthetic peptide
  Seed: GMDPRMCSLMQGSTLPRRSGAAGA
GMDPRMFSLLQASTAPRRSGAAGA

SEQ ID NO: 87428 - protein, 24 aa, Artificial Sequence
  Description of Artificial Sequence: Synthetic peptide
  Seed: GMDPRMCSLMQGSTLPRRSGAAGA
GMDPRMFSLLQASTCPRRSGAAGA

SEQ ID NO: 87429 - protein, 24 aa, Artificial Sequence
  Description of Artificial Sequence: Synthetic peptide
  Seed: GMDPRMCSLMQGSTLPRRSGAAGA
GMDPRMFSLLQASTDPRRSGAAGA

SEQ ID NO: 87430 - protein, 24 aa, Artificial Sequence
  Description of Artificial Sequence: Synthetic peptide
  Seed: GMDPRMCSLMQGSTLPRRSGAAGA
GMDPRMFSLLQASTEPRRSGAAGA

SEQ ID NO: 87431 - protein, 24 aa, Artificial Sequence
  Description of Artificial Sequence: Synthetic peptide
  Seed: GMDPRMCSLMQGSTLPRRSGAAGA
GMDPRMFSLLQASTFPRRSGAAGA

SEQ ID NO: 87432 - protein, 24 aa, Artificial Sequence
  Description of Artificial Sequence: Synthetic peptide
  Seed: GMDPRMCSLMQGSTLPRRSGAAGA
GMDPRMFSLLQASTGPRRSGAAGA

SEQ ID NO: 87433 - protein, 24 aa, Artificial Sequence
  Description of Artificial Sequence: Synthetic peptide
  Seed: GMDPRMCSLMQGSTLPRRSGAAGA
GMDPRMFSLLQASTHPRRSGAAGA

SEQ ID NO: 87434 - protein, 24 aa, Artificial Sequence
  Description of Artificial Sequence: Synthetic peptide
  Seed: GMDPRMCSLMQGSTLPRRSGAAGA
GMDPRMFSLLQASTIPRRSGAAGA

SEQ ID NO: 87435 - protein, 24 aa, Artificial Sequence
  Description of Artificial Sequence: Synthetic peptide
  Seed: GMDPRMCSLMQGSTLPRRSGAAGA
GMDPRMFSLLQASTLPRRSGAAGA

SEQ ID NO: 87436 - protein, 24 aa, Artificial Sequence
  Description of Artificial Sequence: Synthetic peptide
  Seed: GMDPRMCSLMQGSTLPRRSGAAGA
GMDPRMFSLLQASTMPRRSGAAGA

SEQ ID NO: 87437 - protein, 24 aa, Artificial Sequence
  Description of Artificial Sequence: Synthetic peptide
  Seed: GMDPRMCSLMQGSTLPRRSGAAGA
GMDPRMFSLLQASTNPRRSGAAGA

SEQ ID NO: 87438 - protein, 24 aa, Artificial Sequence
  Description of Artificial Sequence: Synthetic peptide
  Seed: GMDPRMCSLMQGSTLPRRSGAAGA
GMDPRMFSLLQASTPPRRSGAAGA

SEQ ID NO: 87439 - protein, 24 aa, Artificial Sequence
  Description of Artificial Sequence: Synthetic peptide
  Seed: GMDPRMCSLMQGSTLPRRSGAAGA
GMDPRMFSLLQASTQPRRSGAAGA

SEQ ID NO: 87440 - protein, 24 aa, Artificial Sequence
  Description of Artificial Sequence: Synthetic peptide
  Seed: GMDPRMCSLMQGSTLPRRSGAAGA
GMDPRMFSLLQASTSPRRSGAAGA

SEQ ID NO: 87441 - protein, 24 aa, Artificial Sequence
  Description of Artificial Sequence: Synthetic peptide
  Seed: GMDPRMCSLMQGSTLPRRSGAAGA
GMDPRMFSLLQASTTPRRSGAAGA

SEQ ID NO: 87442 - protein, 24 aa, Artificial Sequence
  Description of Artificial Sequence: Synthetic peptide
  Seed: GMDPRMCSLMQGSTLPRRSGAAGA
GMDPRMFSLLQASTVPRRSGAAGA

SEQ ID NO: 87443 - protein, 24 aa, Artificial Sequence
  Description of Artificial Sequence: Synthetic peptide
  Seed: GMDPRMCSLMQGSTLPRRSGAAGA
GMDPRMFSLLQASTYPRRSGAAGA

SEQ ID NO: 87444 - protein, 24 aa, Artificial Sequence
  Description of Artificial Sequence: Synthetic peptide
  Seed: GMDPRMCSLMQGSTLPRRSGAAGA
GMDPRMFSLLQGSTAPRRSGAAGA

SEQ ID NO: 87445 - protein, 24 aa, Artificial Sequence
  Description of Artificial Sequence: Synthetic peptide
  Seed: GMDPRMCSLMQGSTLPRRSGAAGA
GMDPRMFSLLQGSTCPRRSGAAGA

SEQ ID NO: 87446 - protein, 24 aa, Artificial Sequence
  Description of Artificial Sequence: Synthetic peptide
  Seed: GMDPRMCSLMQGSTLPRRSGAAGA
GMDPRMFSLLQGSTFPRRSGAAGA

SEQ ID NO: 87447 - protein, 24 aa, Artificial Sequence
  Description of Artificial Sequence: Synthetic peptide
  Seed: GMDPRMCSLMQGSTLPRRSGAAGA
GMDPRMFSLLQGSTGPRRSGAAGA

SEQ ID NO: 87448 - protein, 24 aa, Artificial Sequence
  Description of Artificial Sequence: Synthetic peptide
  Seed: GMDPRMCSLMQGSTLPRRSGAAGA
GMDPRMFSLLQGSTIPRRSGAAGA

SEQ ID NO: 87449 - protein, 24 aa, Artificial Sequence
  Description of Artificial Sequence: Synthetic peptide
  Seed: GMDPRMCSLMQGSTLPRRSGAAGA
GMDPRMFSLLQGSTLPRRSGAAGA

SEQ ID NO: 87450 - protein, 24 aa, Artificial Sequence
  Description of Artificial Sequence: Synthetic peptide
  Seed: GMDPRMCSLMQGSTLPRRSGAAGA
GMDPRMFSLLQGSTMPRRSGAAGA

SEQ ID NO: 87451 - protein, 24 aa, Artificial Sequence
  Description of Artificial Sequence: Synthetic peptide
  Seed: GMDPRMCSLMQGSTLPRRSGAAGA
GMDPRMFSLLQGSTNPRRSGAAGA

SEQ ID NO: 87452 - protein, 24 aa, Artificial Sequence
  Description of Artificial Sequence: Synthetic peptide
  Seed: GMDPRMCSLMQGSTLPRRSGAAGA
GMDPRMFSLLQGSTSPRRSGAAGA

SEQ ID NO: 87453 - protein, 24 aa, Artificial Sequence
  Description of Artificial Sequence: Synthetic peptide
  Seed: GMDPRMCSLMQGSTLPRRSGAAGA
GMDPRMFSLLQGSTTPRRSGAAGA

SEQ ID NO: 87454 - protein, 24 aa, Artificial Sequence
  Description of Artificial Sequence: Synthetic peptide
  Seed: GMDPRMCSLMQGSTLPRRSGAAGA
GMDPRMFSLLQGSTVPRRSGAAGA

SEQ ID NO: 87455 - protein, 24 aa, Artificial Sequence
  Description of Artificial Sequence: Synthetic peptide
  Seed: GMDPRMCSLMQGSTLPRRSGAAGA
GMDPRMFSLLQHSTVPRRSGAAGA

SEQ ID NO: 87456 - protein, 24 aa, Artificial Sequence
  Description of Artificial Sequence: Synthetic peptide
  Seed: GMDPRMCSLMQGSTLPRRSGAAGA
GMDPRMFSLLQISTAPRRSGAAGA

SEQ ID NO: 87457 - protein, 24 aa, Artificial Sequence
  Description of Artificial Sequence: Synthetic peptide
  Seed: GMDPRMCSLMQGSTLPRRSGAAGA
GMDPRMFSLLQISTGPRRSGAAGA

SEQ ID NO: 87458 - protein, 24 aa, Artificial Sequence
  Description of Artificial Sequence: Synthetic peptide
  Seed: GMDPRMCSLMQGSTLPRRSGAAGA
GMDPRMFSLLQISTHPRRSGAAGA

SEQ ID NO: 87459 - protein, 24 aa, Artificial Sequence
  Description of Artificial Sequence: Synthetic peptide
  Seed: GMDPRMCSLMQGSTLPRRSGAAGA
GMDPRMFSLLQISTIPRRSGAAGA

SEQ ID NO: 87460 - protein, 24 aa, Artificial Sequence
  Description of Artificial Sequence: Synthetic peptide
  Seed: GMDPRMCSLMQGSTLPRRSGAAGA
GMDPRMFSLLQISTLPRRSGAAGA

SEQ ID NO: 87461 - protein, 24 aa, Artificial Sequence
  Description of Artificial Sequence: Synthetic peptide
  Seed: GMDPRMCSLMQGSTLPRRSGAAGA
GMDPRMFSLLQISTMPRRSGAAGA

SEQ ID NO: 87462 - protein, 24 aa, Artificial Sequence
  Description of Artificial Sequence: Synthetic peptide
  Seed: GMDPRMCSLMQGSTLPRRSGAAGA
GMDPRMFSLLQISTNPRRSGAAGA

SEQ ID NO: 87463 - protein, 24 aa, Artificial Sequence
  Description of Artificial Sequence: Synthetic peptide
  Seed: GMDPRMCSLMQGSTLPRRSGAAGA
GMDPRMFSLLQISTQPRRSGAAGA

SEQ ID NO: 87464 - protein, 24 aa, Artificial Sequence
  Description of Artificial Sequence: Synthetic peptide
  Seed: GMDPRMCSLMQGSTLPRRSGAAGA
GMDPRMFSLLQISTSPRRSGAAGA

SEQ ID NO: 87465 - protein, 24 aa, Artificial Sequence
  Description of Artificial Sequence: Synthetic peptide
  Seed: GMDPRMCSLMQGSTLPRRSGAAGA
GMDPRMFSLLQISTTPRRSGAAGA

SEQ ID NO: 87466 - protein, 24 aa, Artificial Sequence
  Description of Artificial Sequence: Synthetic peptide
  Seed: GMDPRMCSLMQGSTLPRRSGAAGA
GMDPRMFSLLQISTVPRRSGAAGA

SEQ ID NO: 87467 - protein, 24 aa, Artificial Sequence
  Description of Artificial Sequence: Synthetic peptide
  Seed: GMDPRMCSLMQGSTLPRRSGAAGA
GMDPRMFSLLQLSTAPRRSGAAGA

SEQ ID NO: 87468 - protein, 24 aa, Artificial Sequence
  Description of Artificial Sequence: Synthetic peptide
  Seed: GMDPRMCSLMQGSTLPRRSGAAGA
GMDPRMFSLLQLSTNPRRSGAAGA

SEQ ID NO: 87469 - protein, 24 aa, Artificial Sequence
  Description of Artificial Sequence: Synthetic peptide
  Seed: GMDPRMCSLMQGSTLPRRSGAAGA
GMDPRMFSLLQLSTSPRRSGAAGA

SEQ ID NO: 87470 - protein, 24 aa, Artificial Sequence
  Description of Artificial Sequence: Synthetic peptide
  Seed: GMDPRMCSLMQGSTLPRRSGAAGA
GMDPRMFSLLQLSTTPRRSGAAGA

SEQ ID NO: 87471 - protein, 24 aa, Artificial Sequence
  Description of Artificial Sequence: Synthetic peptide
  Seed: GMDPRMCSLMQGSTLPRRSGAAGA
GMDPRMFSLLQMSTAPRRSGAAGA

SEQ ID NO: 87472 - protein, 24 aa, Artificial Sequence
  Description of Artificial Sequence: Synthetic peptide
  Seed: GMDPRMCSLMQGSTLPRRSGAAGA
GMDPRMFSLLQMSTNPRRSGAAGA

SEQ ID NO: 87473 - protein, 24 aa, Artificial Sequence
  Description of Artificial Sequence: Synthetic peptide
  Seed: GMDPRMCSLMQGSTLPRRSGAAGA
GMDPRMFSLLQMSTSPRRSGAAGA

SEQ ID NO: 87474 - protein, 24 aa, Artificial Sequence
  Description of Artificial Sequence: Synthetic peptide
  Seed: GMDPRMCSLMQGSTLPRRSGAAGA
GMDPRMFSLLQMSTVPRRSGAAGA

SEQ ID NO: 87475 - protein, 24 aa, Artificial Sequence
  Description of Artificial Sequence: Synthetic peptide
  Seed: GMDPRMCSLMQGSTLPRRSGAAGA
GMDPRMFSLLQNSTAPRRSGAAGA

SEQ ID NO: 87476 - protein, 24 aa, Artificial Sequence
  Description of Artificial Sequence: Synthetic peptide
  Seed: GMDPRMCSLMQGSTLPRRSGAAGA
GMDPRMFSLLQNSTGPRRSGAAGA

SEQ ID NO: 87477 - protein, 24 aa, Artificial Sequence
  Description of Artificial Sequence: Synthetic peptide
  Seed: GMDPRMCSLMQGSTLPRRSGAAGA
GMDPRMFSLLQNSTIPRRSGAAGA

SEQ ID NO: 87478 - protein, 24 aa, Artificial Sequence
  Description of Artificial Sequence: Synthetic peptide
  Seed: GMDPRMCSLMQGSTLPRRSGAAGA
GMDPRMFSLLQNSTLPRRSGAAGA

SEQ ID NO: 87479 - protein, 24 aa, Artificial Sequence
  Description of Artificial Sequence: Synthetic peptide
  Seed: GMDPRMCSLMQGSTLPRRSGAAGA
GMDPRMFSLLQNSTMPRRSGAAGA

SEQ ID NO: 87480 - protein, 24 aa, Artificial Sequence
  Description of Artificial Sequence: Synthetic peptide
  Seed: GMDPRMCSLMQGSTLPRRSGAAGA
GMDPRMFSLLQNSTNPRRSGAAGA

SEQ ID NO: 87481 - protein, 24 aa, Artificial Sequence
  Description of Artificial Sequence: Synthetic peptide
  Seed: GMDPRMCSLMQGSTLPRRSGAAGA
GMDPRMFSLLQNSTSPRRSGAAGA

SEQ ID NO: 87482 - protein, 24 aa, Artificial Sequence
  Description of Artificial Sequence: Synthetic peptide
  Seed: GMDPRMCSLMQGSTLPRRSGAAGA
GMDPRMFSLLQNSTTPRRSGAAGA

SEQ ID NO: 87483 - protein, 24 aa, Artificial Sequence
  Description of Artificial Sequence: Synthetic peptide
  Seed: GMDPRMCSLMQGSTLPRRSGAAGA
GMDPRMFSLLQNSTVPRRSGAAGA

SEQ ID NO: 87484 - protein, 24 aa, Artificial Sequence
  Description of Artificial Sequence: Synthetic peptide
  Seed: GMDPRMCSLMQGSTLPRRSGAAGA
GMDPRMFSLLQPSTAPRRSGAAGA

SEQ ID NO: 87485 - protein, 24 aa, Artificial Sequence
  Description of Artificial Sequence: Synthetic peptide
  Seed: GMDPRMCSLMQGSTLPRRSGAAGA
GMDPRMFSLLQPSTCPRRSGAAGA

SEQ ID NO: 87486 - protein, 24 aa, Artificial Sequence
  Description of Artificial Sequence: Synthetic peptide
  Seed: GMDPRMCSLMQGSTLPRRSGAAGA
GMDPRMFSLLQPSTDPRRSGAAGA

SEQ ID NO: 87487 - protein, 24 aa, Artificial Sequence
  Description of Artificial Sequence: Synthetic peptide
  Seed: GMDPRMCSLMQGSTLPRRSGAAGA
GMDPRMFSLLQPSTEPRRSGAAGA

SEQ ID NO: 87488 - protein, 24 aa, Artificial Sequence
  Description of Artificial Sequence: Synthetic peptide
  Seed: GMDPRMCSLMQGSTLPRRSGAAGA
GMDPRMFSLLQPSTFPRRSGAAGA

SEQ ID NO: 87489 - protein, 24 aa, Artificial Sequence
  Description of Artificial Sequence: Synthetic peptide
  Seed: GMDPRMCSLMQGSTLPRRSGAAGA
GMDPRMFSLLQPSTGPRRSGAAGA

SEQ ID NO: 87490 - protein, 24 aa, Artificial Sequence
  Description of Artificial Sequence: Synthetic peptide
  Seed: GMDPRMCSLMQGSTLPRRSGAAGA
GMDPRMFSLLQPSTHPRRSGAAGA

SEQ ID NO: 87491 - protein, 24 aa, Artificial Sequence
  Description of Artificial Sequence: Synthetic peptide
  Seed: GMDPRMCSLMQGSTLPRRSGAAGA
GMDPRMFSLLQPSTIPRRSGAAGA

SEQ ID NO: 87492 - protein, 24 aa, Artificial Sequence
  Description of Artificial Sequence: Synthetic peptide
  Seed: GMDPRMCSLMQGSTLPRRSGAAGA
GMDPRMFSLLQPSTLPRRSGAAGA

SEQ ID NO: 87493 - protein, 24 aa, Artificial Sequence
  Description of Artificial Sequence: Synthetic peptide
  Seed: GMDPRMCSLMQGSTLPRRSGAAGA
GMDPRMFSLLQPSTMPRRSGAAGA

SEQ ID NO: 87494 - protein, 24 aa, Artificial Sequence
  Description of Artificial Sequence: Synthetic peptide
  Seed: GMDPRMCSLMQGSTLPRRSGAAGA
GMDPRMFSLLQPSTNPRRSGAAGA

SEQ ID NO: 87495 - protein, 24 aa, Artificial Sequence
  Description of Artificial Sequence: Synthetic peptide
  Seed: GMDPRMCSLMQGSTLPRRSGAAGA
GMDPRMFSLLQPSTPPRRSGAAGA

SEQ ID NO: 87496 - protein, 24 aa, Artificial Sequence
  Description of Artificial Sequence: Synthetic peptide
  Seed: GMDPRMCSLMQGSTLPRRSGAAGA
GMDPRMFSLLQPSTQPRRSGAAGA

SEQ ID NO: 87497 - protein, 24 aa, Artificial Sequence
  Description of Artificial Sequence: Synthetic peptide
  Seed: GMDPRMCSLMQGSTLPRRSGAAGA
GMDPRMFSLLQPSTSPRRSGAAGA

SEQ ID NO: 87498 - protein, 24 aa, Artificial Sequence
  Description of Artificial Sequence: Synthetic peptide
  Seed: GMDPRMCSLMQGSTLPRRSGAAGA
GMDPRMFSLLQPSTTPRRSGAAGA

SEQ ID NO: 87499 - protein, 24 aa, Artificial Sequence
  Description of Artificial Sequence: Synthetic peptide
  Seed: GMDPRMCSLMQGSTLPRRSGAAGA
GMDPRMFSLLQPSTVPRRSGAAGA

SEQ ID NO: 87500 - protein, 24 aa, Artificial Sequence
  Description of Artificial Sequence: Synthetic peptide
  Seed: GMDPRMCSLMQGSTLPRRSGAAGA
GMDPRMFSLLQSSTAPRRSGAAGA

SEQ ID NO: 87501 - protein, 24 aa, Artificial Sequence
  Description of Artificial Sequence: Synthetic peptide
  Seed: GMDPRMCSLMQGSTLPRRSGAAGA
GMDPRMFSLLQSSTCPRRSGAAGA

SEQ ID NO: 87502 - protein, 24 aa, Artificial Sequence
  Description of Artificial Sequence: Synthetic peptide
  Seed: GMDPRMCSLMQGSTLPRRSGAAGA
GMDPRMFSLLQSSTDPRRSGAAGA

SEQ ID NO: 87503 - protein, 24 aa, Artificial Sequence
  Description of Artificial Sequence: Synthetic peptide
  Seed: GMDPRMCSLMQGSTLPRRSGAAGA
GMDPRMFSLLQSSTFPRRSGAAGA

SEQ ID NO: 87504 - protein, 24 aa, Artificial Sequence
  Description of Artificial Sequence: Synthetic peptide
  Seed: GMDPRMCSLMQGSTLPRRSGAAGA
GMDPRMFSLLQSSTGPRRSGAAGA

SEQ ID NO: 87505 - protein, 24 aa, Artificial Sequence
  Description of Artificial Sequence: Synthetic peptide
  Seed: GMDPRMCSLMQGSTLPRRSGAAGA
GMDPRMFSLLQSSTHPRRSGAAGA

SEQ ID NO: 87506 - protein, 24 aa, Artificial Sequence
  Description of Artificial Sequence: Synthetic peptide
  Seed: GMDPRMCSLMQGSTLPRRSGAAGA
GMDPRMFSLLQSSTIPRRSGAAGA

SEQ ID NO: 87507 - protein, 24 aa, Artificial Sequence
  Description of Artificial Sequence: Synthetic peptide
  Seed: GMDPRMCSLMQGSTLPRRSGAAGA
GMDPRMFSLLQSSTLPRRSGAAGA

SEQ ID NO: 87508 - protein, 24 aa, Artificial Sequence
  Description of Artificial Sequence: Synthetic peptide
  Seed: GMDPRMCSLMQGSTLPRRSGAAGA
GMDPRMFSLLQSSTMPRRSGAAGA

SEQ ID NO: 87509 - protein, 24 aa, Artificial Sequence
  Description of Artificial Sequence: Synthetic peptide
  Seed: GMDPRMCSLMQGSTLPRRSGAAGA
GMDPRMFSLLQSSTNPRRSGAAGA

SEQ ID NO: 87510 - protein, 24 aa, Artificial Sequence
  Description of Artificial Sequence: Synthetic peptide
  Seed: GMDPRMCSLMQGSTLPRRSGAAGA
GMDPRMFSLLQSSTQPRRSGAAGA

SEQ ID NO: 87511 - protein, 24 aa, Artificial Sequence
  Description of Artificial Sequence: Synthetic peptide
  Seed: GMDPRMCSLMQGSTLPRRSGAAGA
GMDPRMFSLLQSSTSPRRSGAAGA

SEQ ID NO: 87512 - protein, 24 aa, Artificial Sequence
  Description of Artificial Sequence: Synthetic peptide
  Seed: GMDPRMCSLMQGSTLPRRSGAAGA
GMDPRMFSLLQSSTTPRRSGAAGA

SEQ ID NO: 87513 - protein, 24 aa, Artificial Sequence
  Description of Artificial Sequence: Synthetic peptide
  Seed: GMDPRMCSLMQGSTLPRRSGAAGA
GMDPRMFSLLQSSTVPRRSGAAGA

SEQ ID NO: 87514 - protein, 24 aa, Artificial Sequence
  Description of Artificial Sequence: Synthetic peptide
  Seed: GMDPRMCSLMQGSTLPRRSGAAGA
GMDPRMFSLLQTSTAPRRSGAAGA

SEQ ID NO: 87515 - protein, 24 aa, Artificial Sequence
  Description of Artificial Sequence: Synthetic peptide
  Seed: GMDPRMCSLMQGSTLPRRSGAAGA
GMDPRMFSLLQTSTDPRRSGAAGA

SEQ ID NO: 87516 - protein, 24 aa, Artificial Sequence
  Description of Artificial Sequence: Synthetic peptide
  Seed: GMDPRMCSLMQGSTLPRRSGAAGA
GMDPRMFSLLQTSTGPRRSGAAGA

SEQ ID NO: 87517 - protein, 24 aa, Artificial Sequence
  Description of Artificial Sequence: Synthetic peptide
  Seed: GMDPRMCSLMQGSTLPRRSGAAGA
GMDPRMFSLLQTSTHPRRSGAAGA

SEQ ID NO: 87518 - protein, 24 aa, Artificial Sequence
  Description of Artificial Sequence: Synthetic peptide
  Seed: GMDPRMCSLMQGSTLPRRSGAAGA
GMDPRMFSLLQTSTIPRRSGAAGA

SEQ ID NO: 87519 - protein, 24 aa, Artificial Sequence
  Description of Artificial Sequence: Synthetic peptide
  Seed: GMDPRMCSLMQGSTLPRRSGAAGA
GMDPRMFSLLQTSTLPRRSGAAGA

SEQ ID NO: 87520 - protein, 24 aa, Artificial Sequence
  Description of Artificial Sequence: Synthetic peptide
  Seed: GMDPRMCSLMQGSTLPRRSGAAGA
GMDPRMFSLLQTSTMPRRSGAAGA

SEQ ID NO: 87521 - protein, 24 aa, Artificial Sequence
  Description of Artificial Sequence: Synthetic peptide
  Seed: GMDPRMCSLMQGSTLPRRSGAAGA
GMDPRMFSLLQTSTNPRRSGAAGA

SEQ ID NO: 87522 - protein, 24 aa, Artificial Sequence
  Description of Artificial Sequence: Synthetic peptide
  Seed: GMDPRMCSLMQGSTLPRRSGAAGA
GMDPRMFSLLQTSTPPRRSGAAGA

SEQ ID NO: 87523 - protein, 24 aa, Artificial Sequence
  Description of Artificial Sequence: Synthetic peptide
  Seed: GMDPRMCSLMQGSTLPRRSGAAGA
GMDPRMFSLLQTSTQPRRSGAAGA

SEQ ID NO: 87524 - protein, 24 aa, Artificial Sequence
  Description of Artificial Sequence: Synthetic peptide
  Seed: GMDPRMCSLMQGSTLPRRSGAAGA
GMDPRMFSLLQTSTSPRRSGAAGA

SEQ ID NO: 87525 - protein, 24 aa, Artificial Sequence
  Description of Artificial Sequence: Synthetic peptide
  Seed: GMDPRMCSLMQGSTLPRRSGAAGA
GMDPRMFSLLQTSTTPRRSGAAGA

SEQ ID NO: 87526 - protein, 24 aa, Artificial Sequence
  Description of Artificial Sequence: Synthetic peptide
  Seed: GMDPRMCSLMQGSTLPRRSGAAGA
GMDPRMFSLLQTSTVPRRSGAAGA

SEQ ID NO: 87527 - protein, 24 aa, Artificial Sequence
  Description of Artificial Sequence: Synthetic peptide
  Seed: GMDPRMCSLMQGSTLPRRSGAAGA
GMDPRMFSLLQVSTAPRRSGAAGA

SEQ ID NO: 87528 - protein, 24 aa, Artificial Sequence
  Description of Artificial Sequence: Synthetic peptide
  Seed: GMDPRMCSLMQGSTLPRRSGAAGA
GMDPRMFSLLQVSTDPRRSGAAGA

SEQ ID NO: 87529 - protein, 24 aa, Artificial Sequence
  Description of Artificial Sequence: Synthetic peptide
  Seed: GMDPRMCSLMQGSTLPRRSGAAGA
GMDPRMFSLLQVSTEPRRSGAAGA

SEQ ID NO: 87530 - protein, 24 aa, Artificial Sequence
  Description of Artificial Sequence: Synthetic peptide
  Seed: GMDPRMCSLMQGSTLPRRSGAAGA
GMDPRMFSLLQVSTGPRRSGAAGA

SEQ ID NO: 87531 - protein, 24 aa, Artificial Sequence
  Description of Artificial Sequence: Synthetic peptide
  Seed: GMDPRMCSLMQGSTLPRRSGAAGA
GMDPRMFSLLQVSTHPRRSGAAGA

SEQ ID NO: 87532 - protein, 24 aa, Artificial Sequence
  Description of Artificial Sequence: Synthetic peptide
  Seed: GMDPRMCSLMQGSTLPRRSGAAGA
GMDPRMFSLLQVSTIPRRSGAAGA

SEQ ID NO: 87533 - protein, 24 aa, Artificial Sequence
  Description of Artificial Sequence: Synthetic peptide
  Seed: GMDPRMCSLMQGSTLPRRSGAAGA
GMDPRMFSLLQVSTLPRRSGAAGA

SEQ ID NO: 87534 - protein, 24 aa, Artificial Sequence
  Description of Artificial Sequence: Synthetic peptide
  Seed: GMDPRMCSLMQGSTLPRRSGAAGA
GMDPRMFSLLQVSTMPRRSGAAGA

SEQ ID NO: 87535 - protein, 24 aa, Artificial Sequence
  Description of Artificial Sequence: Synthetic peptide
  Seed: GMDPRMCSLMQGSTLPRRSGAAGA
GMDPRMFSLLQVSTNPRRSGAAGA

SEQ ID NO: 87536 - protein, 24 aa, Artificial Sequence
  Description of Artificial Sequence: Synthetic peptide
  Seed: GMDPRMCSLMQGSTLPRRSGAAGA
GMDPRMFSLLQVSTPPRRSGAAGA

SEQ ID NO: 87537 - protein, 24 aa, Artificial Sequence
  Description of Artificial Sequence: Synthetic peptide
  Seed: GMDPRMCSLMQGSTLPRRSGAAGA
GMDPRMFSLLQVSTQPRRSGAAGA

SEQ ID NO: 87538 - protein, 24 aa, Artificial Sequence
  Description of Artificial Sequence: Synthetic peptide
  Seed: GMDPRMCSLMQGSTLPRRSGAAGA
GMDPRMFSLLQVSTSPRRSGAAGA

SEQ ID NO: 87539 - protein, 24 aa, Artificial Sequence
  Description of Artificial Sequence: Synthetic peptide
  Seed: GMDPRMCSLMQGSTLPRRSGAAGA
GMDPRMFSLLQVSTTPRRSGAAGA

SEQ ID NO: 87540 - protein, 24 aa, Artificial Sequence
  Description of Artificial Sequence: Synthetic peptide
  Seed: GMDPRMCSLMQGSTLPRRSGAAGA
GMDPRMFSLLQVSTVPRRSGAAGA

SEQ ID NO: 87541 - protein, 24 aa, Artificial Sequence
  Description of Artificial Sequence: Synthetic peptide
  Seed: GMDPRMCSLMQGSTLPRRSGAAGA
GMDPRMFSLMQASTAPRRSGAAGA

SEQ ID NO: 87542 - protein, 24 aa, Artificial Sequence
  Description of Artificial Sequence: Synthetic peptide
  Seed: GMDPRMCSLMQGSTLPRRSGAAGA
GMDPRMFSLMQASTCPRRSGAAGA

SEQ ID NO: 87543 - protein, 24 aa, Artificial Sequence
  Description of Artificial Sequence: Synthetic peptide
  Seed: GMDPRMCSLMQGSTLPRRSGAAGA
GMDPRMFSLMQASTDPRRSGAAGA

SEQ ID NO: 87544 - protein, 24 aa, Artificial Sequence
  Description of Artificial Sequence: Synthetic peptide
  Seed: GMDPRMCSLMQGSTLPRRSGAAGA
GMDPRMFSLMQASTEPRRSGAAGA

SEQ ID NO: 87545 - protein, 24 aa, Artificial Sequence
  Description of Artificial Sequence: Synthetic peptide
  Seed: GMDPRMCSLMQGSTLPRRSGAAGA
GMDPRMFSLMQASTFPRRSGAAGA

SEQ ID NO: 87546 - protein, 24 aa, Artificial Sequence
  Description of Artificial Sequence: Synthetic peptide
  Seed: GMDPRMCSLMQGSTLPRRSGAAGA
GMDPRMFSLMQASTGPRRSGAAGA

SEQ ID NO: 87547 - protein, 24 aa, Artificial Sequence
  Description of Artificial Sequence: Synthetic peptide
  Seed: GMDPRMCSLMQGSTLPRRSGAAGA
GMDPRMFSLMQASTHPRRSGAAGA

SEQ ID NO: 87548 - protein, 24 aa, Artificial Sequence
  Description of Artificial Sequence: Synthetic peptide
  Seed: GMDPRMCSLMQGSTLPRRSGAAGA
GMDPRMFSLMQASTIPRRSGAAGA

SEQ ID NO: 87549 - protein, 24 aa, Artificial Sequence
  Description of Artificial Sequence: Synthetic peptide
  Seed: GMDPRMCSLMQGSTLPRRSGAAGA
GMDPRMFSLMQASTLPRRSGAAGA

SEQ ID NO: 87550 - protein, 24 aa, Artificial Sequence
  Description of Artificial Sequence: Synthetic peptide
  Seed: GMDPRMCSLMQGSTLPRRSGAAGA
GMDPRMFSLMQASTMPRRSGAAGA

SEQ ID NO: 87551 - protein, 24 aa, Artificial Sequence
  Description of Artificial Sequence: Synthetic peptide
  Seed: GMDPRMCSLMQGSTLPRRSGAAGA
GMDPRMFSLMQASTNPRRSGAAGA

SEQ ID NO: 87552 - protein, 24 aa, Artificial Sequence
  Description of Artificial Sequence: Synthetic peptide
  Seed: GMDPRMCSLMQGSTLPRRSGAAGA
GMDPRMFSLMQASTPPRRSGAAGA

SEQ ID NO: 87553 - protein, 24 aa, Artificial Sequence
  Description of Artificial Sequence: Synthetic peptide
  Seed: GMDPRMCSLMQGSTLPRRSGAAGA
GMDPRMFSLMQASTQPRRSGAAGA

SEQ ID NO: 87554 - protein, 24 aa, Artificial Sequence
  Description of Artificial Sequence: Synthetic peptide
  Seed: GMDPRMCSLMQGSTLPRRSGAAGA
GMDPRMFSLMQASTSPRRSGAAGA

SEQ ID NO: 87555 - protein, 24 aa, Artificial Sequence
  Description of Artificial Sequence: Synthetic peptide
  Seed: GMDPRMCSLMQGSTLPRRSGAAGA
GMDPRMFSLMQASTTPRRSGAAGA

SEQ ID NO: 87556 - protein, 24 aa, Artificial Sequence
  Description of Artificial Sequence: Synthetic peptide
  Seed: GMDPRMCSLMQGSTLPRRSGAAGA
GMDPRMFSLMQASTVPRRSGAAGA

SEQ ID NO: 87557 - protein, 24 aa, Artificial Sequence
  Description of Artificial Sequence: Synthetic peptide
  Seed: GMDPRMCSLMQGSTLPRRSGAAGA
GMDPRMFSLMQASTYPRRSGAAGA

SEQ ID NO: 87558 - protein, 24 aa, Artificial Sequence
  Description of Artificial Sequence: Synthetic peptide
  Seed: GMDPRMCSLMQGSTLPRRSGAAGA
GMDPRMFSLMQGSTAPRRSGAAGA

SEQ ID NO: 87559 - protein, 24 aa, Artificial Sequence
  Description of Artificial Sequence: Synthetic peptide
  Seed: GMDPRMCSLMQGSTLPRRSGAAGA
GMDPRMFSLMQGSTCPRRSGAAGA

SEQ ID NO: 87560 - protein, 24 aa, Artificial Sequence
  Description of Artificial Sequence: Synthetic peptide
  Seed: GMDPRMCSLMQGSTLPRRSGAAGA
GMDPRMFSLMQGSTFPRRSGAAGA

SEQ ID NO: 87561 - protein, 24 aa, Artificial Sequence
  Description of Artificial Sequence: Synthetic peptide
  Seed: GMDPRMCSLMQGSTLPRRSGAAGA
GMDPRMFSLMQGSTGPRRSGAAGA

SEQ ID NO: 87562 - protein, 24 aa, Artificial Sequence
  Description of Artificial Sequence: Synthetic peptide
  Seed: GMDPRMCSLMQGSTLPRRSGAAGA
GMDPRMFSLMQGSTIPRRSGAAGA

SEQ ID NO: 87563 - protein, 24 aa, Artificial Sequence
  Description of Artificial Sequence: Synthetic peptide
  Seed: GMDPRMCSLMQGSTLPRRSGAAGA
GMDPRMFSLMQGSTLPRRSGAAGA

SEQ ID NO: 87564 - protein, 24 aa, Artificial Sequence
  Description of Artificial Sequence: Synthetic peptide
  Seed: GMDPRMCSLMQGSTLPRRSGAAGA
GMDPRMFSLMQGSTMPRRSGAAGA

SEQ ID NO: 87565 - protein, 24 aa, Artificial Sequence
  Description of Artificial Sequence: Synthetic peptide
  Seed: GMDPRMCSLMQGSTLPRRSGAAGA
GMDPRMFSLMQGSTNPRRSGAAGA

SEQ ID NO: 87566 - protein, 24 aa, Artificial Sequence
  Description of Artificial Sequence: Synthetic peptide
  Seed: GMDPRMCSLMQGSTLPRRSGAAGA
GMDPRMFSLMQGSTQPRRSGAAGA

SEQ ID NO: 87567 - protein, 24 aa, Artificial Sequence
  Description of Artificial Sequence: Synthetic peptide
  Seed: GMDPRMCSLMQGSTLPRRSGAAGA
GMDPRMFSLMQGSTSPRRSGAAGA

SEQ ID NO: 87568 - protein, 24 aa, Artificial Sequence
  Description of Artificial Sequence: Synthetic peptide
  Seed: GMDPRMCSLMQGSTLPRRSGAAGA
GMDPRMFSLMQGSTTPRRSGAAGA

SEQ ID NO: 87569 - protein, 24 aa, Artificial Sequence
  Description of Artificial Sequence: Synthetic peptide
  Seed: GMDPRMCSLMQGSTLPRRSGAAGA
GMDPRMFSLMQGSTVPRRSGAAGA

SEQ ID NO: 87570 - protein, 24 aa, Artificial Sequence
  Description of Artificial Sequence: Synthetic peptide
  Seed: GMDPRMCSLMQGSTLPRRSGAAGA
GMDPRMFSLMQGSTYPRRSGAAGA

SEQ ID NO: 87571 - protein, 24 aa, Artificial Sequence
  Description of Artificial Sequence: Synthetic peptide
  Seed: GMDPRMCSLMQGSTLPRRSGAAGA
GMDPRMFSLMQHSTIPRRSGAAGA

SEQ ID NO: 87572 - protein, 24 aa, Artificial Sequence
  Description of Artificial Sequence: Synthetic peptide
  Seed: GMDPRMCSLMQGSTLPRRSGAAGA
GMDPRMFSLMQHSTLPRRSGAAGA

SEQ ID NO: 87573 - protein, 24 aa, Artificial Sequence
  Description of Artificial Sequence: Synthetic peptide
  Seed: GMDPRMCSLMQGSTLPRRSGAAGA
GMDPRMFSLMQHSTVPRRSGAAGA

SEQ ID NO: 87574 - protein, 24 aa, Artificial Sequence
  Description of Artificial Sequence: Synthetic peptide
  Seed: GMDPRMCSLMQGSTLPRRSGAAGA
GMDPRMFSLMQISTAPRRSGAAGA

SEQ ID NO: 87575 - protein, 24 aa, Artificial Sequence
  Description of Artificial Sequence: Synthetic peptide
  Seed: GMDPRMCSLMQGSTLPRRSGAAGA
GMDPRMFSLMQISTDPRRSGAAGA

SEQ ID NO: 87576 - protein, 24 aa, Artificial Sequence
  Description of Artificial Sequence: Synthetic peptide
  Seed: GMDPRMCSLMQGSTLPRRSGAAGA
GMDPRMFSLMQISTGPRRSGAAGA

SEQ ID NO: 87577 - protein, 24 aa, Artificial Sequence
  Description of Artificial Sequence: Synthetic peptide
  Seed: GMDPRMCSLMQGSTLPRRSGAAGA
GMDPRMFSLMQISTHPRRSGAAGA

SEQ ID NO: 87578 - protein, 24 aa, Artificial Sequence
  Description of Artificial Sequence: Synthetic peptide
  Seed: GMDPRMCSLMQGSTLPRRSGAAGA
GMDPRMFSLMQISTIPRRSGAAGA

SEQ ID NO: 87579 - protein, 24 aa, Artificial Sequence
  Description of Artificial Sequence: Synthetic peptide
  Seed: GMDPRMCSLMQGSTLPRRSGAAGA
GMDPRMFSLMQISTLPRRSGAAGA

SEQ ID NO: 87580 - protein, 24 aa, Artificial Sequence
  Description of Artificial Sequence: Synthetic peptide
  Seed: GMDPRMCSLMQGSTLPRRSGAAGA
GMDPRMFSLMQISTMPRRSGAAGA

SEQ ID NO: 87581 - protein, 24 aa, Artificial Sequence
  Description of Artificial Sequence: Synthetic peptide
  Seed: GMDPRMCSLMQGSTLPRRSGAAGA
GMDPRMFSLMQISTNPRRSGAAGA

SEQ ID NO: 87582 - protein, 24 aa, Artificial Sequence
  Description of Artificial Sequence: Synthetic peptide
  Seed: GMDPRMCSLMQGSTLPRRSGAAGA
GMDPRMFSLMQISTQPRRSGAAGA

SEQ ID NO: 87583 - protein, 24 aa, Artificial Sequence
  Description of Artificial Sequence: Synthetic peptide
  Seed: GMDPRMCSLMQGSTLPRRSGAAGA
GMDPRMFSLMQISTSPRRSGAAGA

SEQ ID NO: 87584 - protein, 24 aa, Artificial Sequence
  Description of Artificial Sequence: Synthetic peptide
  Seed: GMDPRMCSLMQGSTLPRRSGAAGA
GMDPRMFSLMQISTTPRRSGAAGA

SEQ ID NO: 87585 - protein, 24 aa, Artificial Sequence
  Description of Artificial Sequence: Synthetic peptide
  Seed: GMDPRMCSLMQGSTLPRRSGAAGA
GMDPRMFSLMQISTVPRRSGAAGA

SEQ ID NO: 87586 - protein, 24 aa, Artificial Sequence
  Description of Artificial Sequence: Synthetic peptide
  Seed: GMDPRMCSLMQGSTLPRRSGAAGA
GMDPRMFSLMQLSTAPRRSGAAGA

SEQ ID NO: 87587 - protein, 24 aa, Artificial Sequence
  Description of Artificial Sequence: Synthetic peptide
  Seed: GMDPRMCSLMQGSTLPRRSGAAGA
GMDPRMFSLMQLSTMPRRSGAAGA

SEQ ID NO: 87588 - protein, 24 aa, Artificial Sequence
  Description of Artificial Sequence: Synthetic peptide
  Seed: GMDPRMCSLMQGSTLPRRSGAAGA
GMDPRMFSLMQLSTNPRRSGAAGA

SEQ ID NO: 87589 - protein, 24 aa, Artificial Sequence
  Description of Artificial Sequence: Synthetic peptide
  Seed: GMDPRMCSLMQGSTLPRRSGAAGA
GMDPRMFSLMQLSTSPRRSGAAGA

SEQ ID NO: 87590 - protein, 24 aa, Artificial Sequence
  Description of Artificial Sequence: Synthetic peptide
  Seed: GMDPRMCSLMQGSTLPRRSGAAGA
GMDPRMFSLMQLSTTPRRSGAAGA

SEQ ID NO: 87591 - protein, 24 aa, Artificial Sequence
  Description of Artificial Sequence: Synthetic peptide
  Seed: GMDPRMCSLMQGSTLPRRSGAAGA
GMDPRMFSLMQLSTVPRRSGAAGA

SEQ ID NO: 87592 - protein, 24 aa, Artificial Sequence
  Description of Artificial Sequence: Synthetic peptide
  Seed: GMDPRMCSLMQGSTLPRRSGAAGA
GMDPRMFSLMQMSTAPRRSGAAGA

SEQ ID NO: 87593 - protein, 24 aa, Artificial Sequence
  Description of Artificial Sequence: Synthetic peptide
  Seed: GMDPRMCSLMQGSTLPRRSGAAGA
GMDPRMFSLMQMSTIPRRSGAAGA

SEQ ID NO: 87594 - protein, 24 aa, Artificial Sequence
  Description of Artificial Sequence: Synthetic peptide
  Seed: GMDPRMCSLMQGSTLPRRSGAAGA
GMDPRMFSLMQMSTLPRRSGAAGA

SEQ ID NO: 87595 - protein, 24 aa, Artificial Sequence
  Description of Artificial Sequence: Synthetic peptide
  Seed: GMDPRMCSLMQGSTLPRRSGAAGA
GMDPRMFSLMQMSTNPRRSGAAGA

SEQ ID NO: 87596 - protein, 24 aa, Artificial Sequence
  Description of Artificial Sequence: Synthetic peptide
  Seed: GMDPRMCSLMQGSTLPRRSGAAGA
GMDPRMFSLMQMSTSPRRSGAAGA

SEQ ID NO: 87597 - protein, 24 aa, Artificial Sequence
  Description of Artificial Sequence: Synthetic peptide
  Seed: GMDPRMCSLMQGSTLPRRSGAAGA
GMDPRMFSLMQMSTTPRRSGAAGA

SEQ ID NO: 87598 - protein, 24 aa, Artificial Sequence
  Description of Artificial Sequence: Synthetic peptide
  Seed: GMDPRMCSLMQGSTLPRRSGAAGA
GMDPRMFSLMQMSTVPRRSGAAGA

SEQ ID NO: 87599 - protein, 24 aa, Artificial Sequence
  Description of Artificial Sequence: Synthetic peptide
  Seed: GMDPRMCSLMQGSTLPRRSGAAGA
GMDPRMFSLMQNSTAPRRSGAAGA

SEQ ID NO: 87600 - protein, 24 aa, Artificial Sequence
  Description of Artificial Sequence: Synthetic peptide
  Seed: GMDPRMCSLMQGSTLPRRSGAAGA
GMDPRMFSLMQNSTGPRRSGAAGA

SEQ ID NO: 87601 - protein, 24 aa, Artificial Sequence
  Description of Artificial Sequence: Synthetic peptide
  Seed: GMDPRMCSLMQGSTLPRRSGAAGA
GMDPRMFSLMQNSTIPRRSGAAGA

SEQ ID NO: 87602 - protein, 24 aa, Artificial Sequence
  Description of Artificial Sequence: Synthetic peptide
  Seed: GMDPRMCSLMQGSTLPRRSGAAGA
GMDPRMFSLMQNSTLPRRSGAAGA

SEQ ID NO: 87603 - protein, 24 aa, Artificial Sequence
  Description of Artificial Sequence: Synthetic peptide
  Seed: GMDPRMCSLMQGSTLPRRSGAAGA
GMDPRMFSLMQNSTMPRRSGAAGA

SEQ ID NO: 87604 - protein, 24 aa, Artificial Sequence
  Description of Artificial Sequence: Synthetic peptide
  Seed: GMDPRMCSLMQGSTLPRRSGAAGA
GMDPRMFSLMQNSTNPRRSGAAGA

SEQ ID NO: 87605 - protein, 24 aa, Artificial Sequence
  Description of Artificial Sequence: Synthetic peptide
  Seed: GMDPRMCSLMQGSTLPRRSGAAGA
GMDPRMFSLMQNSTSPRRSGAAGA

SEQ ID NO: 87606 - protein, 24 aa, Artificial Sequence
  Description of Artificial Sequence: Synthetic peptide
  Seed: GMDPRMCSLMQGSTLPRRSGAAGA
GMDPRMFSLMQNSTTPRRSGAAGA

SEQ ID NO: 87607 - protein, 24 aa, Artificial Sequence
  Description of Artificial Sequence: Synthetic peptide
  Seed: GMDPRMCSLMQGSTLPRRSGAAGA
GMDPRMFSLMQNSTVPRRSGAAGA

SEQ ID NO: 87608 - protein, 24 aa, Artificial Sequence
  Description of Artificial Sequence: Synthetic peptide
  Seed: GMDPRMCSLMQGSTLPRRSGAAGA
GMDPRMFSLMQPSTAPRRSGAAGA

SEQ ID NO: 87609 - protein, 24 aa, Artificial Sequence
  Description of Artificial Sequence: Synthetic peptide
  Seed: GMDPRMCSLMQGSTLPRRSGAAGA
GMDPRMFSLMQPSTCPRRSGAAGA

SEQ ID NO: 87610 - protein, 24 aa, Artificial Sequence
  Description of Artificial Sequence: Synthetic peptide
  Seed: GMDPRMCSLMQGSTLPRRSGAAGA
GMDPRMFSLMQPSTDPRRSGAAGA

SEQ ID NO: 87611 - protein, 24 aa, Artificial Sequence
  Description of Artificial Sequence: Synthetic peptide
  Seed: GMDPRMCSLMQGSTLPRRSGAAGA
GMDPRMFSLMQPSTEPRRSGAAGA

SEQ ID NO: 87612 - protein, 24 aa, Artificial Sequence
  Description of Artificial Sequence: Synthetic peptide
  Seed: GMDPRMCSLMQGSTLPRRSGAAGA
GMDPRMFSLMQPSTFPRRSGAAGA

SEQ ID NO: 87613 - protein, 24 aa, Artificial Sequence
  Description of Artificial Sequence: Synthetic peptide
  Seed: GMDPRMCSLMQGSTLPRRSGAAGA
GMDPRMFSLMQPSTGPRRSGAAGA

SEQ ID NO: 87614 - protein, 24 aa, Artificial Sequence
  Description of Artificial Sequence: Synthetic peptide
  Seed: GMDPRMCSLMQGSTLPRRSGAAGA
GMDPRMFSLMQPSTHPRRSGAAGA

SEQ ID NO: 87615 - protein, 24 aa, Artificial Sequence
  Description of Artificial Sequence: Synthetic peptide
  Seed: GMDPRMCSLMQGSTLPRRSGAAGA
GMDPRMFSLMQPSTIPRRSGAAGA

SEQ ID NO: 87616 - protein, 24 aa, Artificial Sequence
  Description of Artificial Sequence: Synthetic peptide
  Seed: GMDPRMCSLMQGSTLPRRSGAAGA
GMDPRMFSLMQPSTLPRRSGAAGA

SEQ ID NO: 87617 - protein, 24 aa, Artificial Sequence
  Description of Artificial Sequence: Synthetic peptide
  Seed: GMDPRMCSLMQGSTLPRRSGAAGA
GMDPRMFSLMQPSTMPRRSGAAGA

SEQ ID NO: 87618 - protein, 24 aa, Artificial Sequence
  Description of Artificial Sequence: Synthetic peptide
  Seed: GMDPRMCSLMQGSTLPRRSGAAGA
GMDPRMFSLMQPSTNPRRSGAAGA

SEQ ID NO: 87619 - protein, 24 aa, Artificial Sequence
  Description of Artificial Sequence: Synthetic peptide
  Seed: GMDPRMCSLMQGSTLPRRSGAAGA
GMDPRMFSLMQPSTPPRRSGAAGA

SEQ ID NO: 87620 - protein, 24 aa, Artificial Sequence
  Description of Artificial Sequence: Synthetic peptide
  Seed: GMDPRMCSLMQGSTLPRRSGAAGA
GMDPRMFSLMQPSTQPRRSGAAGA

SEQ ID NO: 87621 - protein, 24 aa, Artificial Sequence
  Description of Artificial Sequence: Synthetic peptide
  Seed: GMDPRMCSLMQGSTLPRRSGAAGA
GMDPRMFSLMQPSTSPRRSGAAGA

SEQ ID NO: 87622 - protein, 24 aa, Artificial Sequence
  Description of Artificial Sequence: Synthetic peptide
  Seed: GMDPRMCSLMQGSTLPRRSGAAGA
GMDPRMFSLMQPSTTPRRSGAAGA

SEQ ID NO: 87623 - protein, 24 aa, Artificial Sequence
  Description of Artificial Sequence: Synthetic peptide
  Seed: GMDPRMCSLMQGSTLPRRSGAAGA
GMDPRMFSLMQPSTVPRRSGAAGA

SEQ ID NO: 87624 - protein, 24 aa, Artificial Sequence
  Description of Artificial Sequence: Synthetic peptide
  Seed: GMDPRMCSLMQGSTLPRRSGAAGA
GMDPRMFSLMQSSTAPRRSGAAGA

SEQ ID NO: 87625 - protein, 24 aa, Artificial Sequence
  Description of Artificial Sequence: Synthetic peptide
  Seed: GMDPRMCSLMQGSTLPRRSGAAGA
GMDPRMFSLMQSSTCPRRSGAAGA

SEQ ID NO: 87626 - protein, 24 aa, Artificial Sequence
  Description of Artificial Sequence: Synthetic peptide
  Seed: GMDPRMCSLMQGSTLPRRSGAAGA
GMDPRMFSLMQSSTDPRRSGAAGA

SEQ ID NO: 87627 - protein, 24 aa, Artificial Sequence
  Description of Artificial Sequence: Synthetic peptide
  Seed: GMDPRMCSLMQGSTLPRRSGAAGA
GMDPRMFSLMQSSTEPRRSGAAGA

SEQ ID NO: 87628 - protein, 24 aa, Artificial Sequence
  Description of Artificial Sequence: Synthetic peptide
  Seed: GMDPRMCSLMQGSTLPRRSGAAGA
GMDPRMFSLMQSSTFPRRSGAAGA

SEQ ID NO: 87629 - protein, 24 aa, Artificial Sequence
  Description of Artificial Sequence: Synthetic peptide
  Seed: GMDPRMCSLMQGSTLPRRSGAAGA
GMDPRMFSLMQSSTGPRRSGAAGA

SEQ ID NO: 87630 - protein, 24 aa, Artificial Sequence
  Description of Artificial Sequence: Synthetic peptide
  Seed: GMDPRMCSLMQGSTLPRRSGAAGA
GMDPRMFSLMQSSTHPRRSGAAGA

SEQ ID NO: 87631 - protein, 24 aa, Artificial Sequence
  Description of Artificial Sequence: Synthetic peptide
  Seed: GMDPRMCSLMQGSTLPRRSGAAGA
GMDPRMFSLMQSSTIPRRSGAAGA

SEQ ID NO: 87632 - protein, 24 aa, Artificial Sequence
  Description of Artificial Sequence: Synthetic peptide
  Seed: GMDPRMCSLMQGSTLPRRSGAAGA
GMDPRMFSLMQSSTLPRRSGAAGA

SEQ ID NO: 87633 - protein, 24 aa, Artificial Sequence
  Description of Artificial Sequence: Synthetic peptide
  Seed: GMDPRMCSLMQGSTLPRRSGAAGA
GMDPRMFSLMQSSTMPRRSGAAGA

SEQ ID NO: 87634 - protein, 24 aa, Artificial Sequence
  Description of Artificial Sequence: Synthetic peptide
  Seed: GMDPRMCSLMQGSTLPRRSGAAGA
GMDPRMFSLMQSSTNPRRSGAAGA

SEQ ID NO: 87635 - protein, 24 aa, Artificial Sequence
  Description of Artificial Sequence: Synthetic peptide
  Seed: GMDPRMCSLMQGSTLPRRSGAAGA
GMDPRMFSLMQSSTPPRRSGAAGA

SEQ ID NO: 87636 - protein, 24 aa, Artificial Sequence
  Description of Artificial Sequence: Synthetic peptide
  Seed: GMDPRMCSLMQGSTLPRRSGAAGA
GMDPRMFSLMQSSTQPRRSGAAGA

SEQ ID NO: 87637 - protein, 24 aa, Artificial Sequence
  Description of Artificial Sequence: Synthetic peptide
  Seed: GMDPRMCSLMQGSTLPRRSGAAGA
GMDPRMFSLMQSSTSPRRSGAAGA

SEQ ID NO: 87638 - protein, 24 aa, Artificial Sequence
  Description of Artificial Sequence: Synthetic peptide
  Seed: GMDPRMCSLMQGSTLPRRSGAAGA
GMDPRMFSLMQSSTTPRRSGAAGA

SEQ ID NO: 87639 - protein, 24 aa, Artificial Sequence
  Description of Artificial Sequence: Synthetic peptide
  Seed: GMDPRMCSLMQGSTLPRRSGAAGA
GMDPRMFSLMQSSTVPRRSGAAGA

SEQ ID NO: 87640 - protein, 24 aa, Artificial Sequence
  Description of Artificial Sequence: Synthetic peptide
  Seed: GMDPRMCSLMQGSTLPRRSGAAGA
GMDPRMFSLMQTSTAPRRSGAAGA

SEQ ID NO: 87641 - protein, 24 aa, Artificial Sequence
  Description of Artificial Sequence: Synthetic peptide
  Seed: GMDPRMCSLMQGSTLPRRSGAAGA
GMDPRMFSLMQTSTCPRRSGAAGA

SEQ ID NO: 87642 - protein, 24 aa, Artificial Sequence
  Description of Artificial Sequence: Synthetic peptide
  Seed: GMDPRMCSLMQGSTLPRRSGAAGA
GMDPRMFSLMQTSTDPRRSGAAGA

SEQ ID NO: 87643 - protein, 24 aa, Artificial Sequence
  Description of Artificial Sequence: Synthetic peptide
  Seed: GMDPRMCSLMQGSTLPRRSGAAGA
GMDPRMFSLMQTSTGPRRSGAAGA

SEQ ID NO: 87644 - protein, 24 aa, Artificial Sequence
  Description of Artificial Sequence: Synthetic peptide
  Seed: GMDPRMCSLMQGSTLPRRSGAAGA
GMDPRMFSLMQTSTHPRRSGAAGA

SEQ ID NO: 87645 - protein, 24 aa, Artificial Sequence
  Description of Artificial Sequence: Synthetic peptide
  Seed: GMDPRMCSLMQGSTLPRRSGAAGA
GMDPRMFSLMQTSTIPRRSGAAGA

SEQ ID NO: 87646 - protein, 24 aa, Artificial Sequence
  Description of Artificial Sequence: Synthetic peptide
  Seed: GMDPRMCSLMQGSTLPRRSGAAGA
GMDPRMFSLMQTSTLPRRSGAAGA

SEQ ID NO: 87647 - protein, 24 aa, Artificial Sequence
  Description of Artificial Sequence: Synthetic peptide
  Seed: GMDPRMCSLMQGSTLPRRSGAAGA
GMDPRMFSLMQTSTMPRRSGAAGA

SEQ ID NO: 87648 - protein, 24 aa, Artificial Sequence
  Description of Artificial Sequence: Synthetic peptide
  Seed: GMDPRMCSLMQGSTLPRRSGAAGA
GMDPRMFSLMQTSTNPRRSGAAGA

SEQ ID NO: 87649 - protein, 24 aa, Artificial Sequence
  Description of Artificial Sequence: Synthetic peptide
  Seed: GMDPRMCSLMQGSTLPRRSGAAGA
GMDPRMFSLMQTSTPPRRSGAAGA

SEQ ID NO: 87650 - protein, 24 aa, Artificial Sequence
  Description of Artificial Sequence: Synthetic peptide
  Seed: GMDPRMCSLMQGSTLPRRSGAAGA
GMDPRMFSLMQTSTQPRRSGAAGA

SEQ ID NO: 87651 - protein, 24 aa, Artificial Sequence
  Description of Artificial Sequence: Synthetic peptide
  Seed: GMDPRMCSLMQGSTLPRRSGAAGA
GMDPRMFSLMQTSTSPRRSGAAGA

SEQ ID NO: 87652 - protein, 24 aa, Artificial Sequence
  Description of Artificial Sequence: Synthetic peptide
  Seed: GMDPRMCSLMQGSTLPRRSGAAGA
GMDPRMFSLMQTSTTPRRSGAAGA

SEQ ID NO: 87653 - protein, 24 aa, Artificial Sequence
  Description of Artificial Sequence: Synthetic peptide
  Seed: GMDPRMCSLMQGSTLPRRSGAAGA
GMDPRMFSLMQTSTVPRRSGAAGA

SEQ ID NO: 87654 - protein, 24 aa, Artificial Sequence
  Description of Artificial Sequence: Synthetic peptide
  Seed: GMDPRMCSLMQGSTLPRRSGAAGA
GMDPRMFSLMQVSTAPRRSGAAGA

SEQ ID NO: 87655 - protein, 24 aa, Artificial Sequence
  Description of Artificial Sequence: Synthetic peptide
  Seed: GMDPRMCSLMQGSTLPRRSGAAGA
GMDPRMFSLMQVSTDPRRSGAAGA

SEQ ID NO: 87656 - protein, 24 aa, Artificial Sequence
  Description of Artificial Sequence: Synthetic peptide
  Seed: GMDPRMCSLMQGSTLPRRSGAAGA
GMDPRMFSLMQVSTEPRRSGAAGA

SEQ ID NO: 87657 - protein, 24 aa, Artificial Sequence
  Description of Artificial Sequence: Synthetic peptide
  Seed: GMDPRMCSLMQGSTLPRRSGAAGA
GMDPRMFSLMQVSTGPRRSGAAGA

SEQ ID NO: 87658 - protein, 24 aa, Artificial Sequence
  Description of Artificial Sequence: Synthetic peptide
  Seed: GMDPRMCSLMQGSTLPRRSGAAGA
GMDPRMFSLMQVSTHPRRSGAAGA

SEQ ID NO: 87659 - protein, 24 aa, Artificial Sequence
  Description of Artificial Sequence: Synthetic peptide
  Seed: GMDPRMCSLMQGSTLPRRSGAAGA
GMDPRMFSLMQVSTIPRRSGAAGA

SEQ ID NO: 87660 - protein, 24 aa, Artificial Sequence
  Description of Artificial Sequence: Synthetic peptide
  Seed: GMDPRMCSLMQGSTLPRRSGAAGA
GMDPRMFSLMQVSTLPRRSGAAGA

SEQ ID NO: 87661 - protein, 24 aa, Artificial Sequence
  Description of Artificial Sequence: Synthetic peptide
  Seed: GMDPRMCSLMQGSTLPRRSGAAGA
GMDPRMFSLMQVSTMPRRSGAAGA

SEQ ID NO: 87662 - protein, 24 aa, Artificial Sequence
  Description of Artificial Sequence: Synthetic peptide
  Seed: GMDPRMCSLMQGSTLPRRSGAAGA
GMDPRMFSLMQVSTNPRRSGAAGA

SEQ ID NO: 87663 - protein, 24 aa, Artificial Sequence
  Description of Artificial Sequence: Synthetic peptide
  Seed: GMDPRMCSLMQGSTLPRRSGAAGA
GMDPRMFSLMQVSTPPRRSGAAGA

SEQ ID NO: 87664 - protein, 24 aa, Artificial Sequence
  Description of Artificial Sequence: Synthetic peptide
  Seed: GMDPRMCSLMQGSTLPRRSGAAGA
GMDPRMFSLMQVSTQPRRSGAAGA

SEQ ID NO: 87665 - protein, 24 aa, Artificial Sequence
  Description of Artificial Sequence: Synthetic peptide
  Seed: GMDPRMCSLMQGSTLPRRSGAAGA
GMDPRMFSLMQVSTSPRRSGAAGA

SEQ ID NO: 87666 - protein, 24 aa, Artificial Sequence
  Description of Artificial Sequence: Synthetic peptide
  Seed: GMDPRMCSLMQGSTLPRRSGAAGA
GMDPRMFSLMQVSTTPRRSGAAGA

SEQ ID NO: 87667 - protein, 24 aa, Artificial Sequence
  Description of Artificial Sequence: Synthetic peptide
  Seed: GMDPRMCSLMQGSTLPRRSGAAGA
GMDPRMFSLMQVSTVPRRSGAAGA

SEQ ID NO: 87668 - protein, 24 aa, Artificial Sequence
  Description of Artificial Sequence: Synthetic peptide
  Seed: GMDPRMCSLMQGSTLPRRSGAAGA
GMDPRMFSLNQASTIPRRSGAAGA

SEQ ID NO: 87669 - protein, 24 aa, Artificial Sequence
  Description of Artificial Sequence: Synthetic peptide
  Seed: GMDPRMCSLMQGSTLPRRSGAAGA
GMDPRMFSLNQASTLPRRSGAAGA

SEQ ID NO: 87670 - protein, 24 aa, Artificial Sequence
  Description of Artificial Sequence: Synthetic peptide
  Seed: GMDPRMCSLMQGSTLPRRSGAAGA
GMDPRMFSLNQASTVPRRSGAAGA

SEQ ID NO: 87671 - protein, 24 aa, Artificial Sequence
  Description of Artificial Sequence: Synthetic peptide
  Seed: GMDPRMCSLMQGSTLPRRSGAAGA
GMDPRMFSLQQASTAPRRSGAAGA

SEQ ID NO: 87672 - protein, 24 aa, Artificial Sequence
  Description of Artificial Sequence: Synthetic peptide
  Seed: GMDPRMCSLMQGSTLPRRSGAAGA
GMDPRMFSLQQASTGPRRSGAAGA

SEQ ID NO: 87673 - protein, 24 aa, Artificial Sequence
  Description of Artificial Sequence: Synthetic peptide
  Seed: GMDPRMCSLMQGSTLPRRSGAAGA
GMDPRMFSLQQASTIPRRSGAAGA

SEQ ID NO: 87674 - protein, 24 aa, Artificial Sequence
  Description of Artificial Sequence: Synthetic peptide
  Seed: GMDPRMCSLMQGSTLPRRSGAAGA
GMDPRMFSLQQASTLPRRSGAAGA

SEQ ID NO: 87675 - protein, 24 aa, Artificial Sequence
  Description of Artificial Sequence: Synthetic peptide
  Seed: GMDPRMCSLMQGSTLPRRSGAAGA
GMDPRMFSLQQASTMPRRSGAAGA

SEQ ID NO: 87676 - protein, 24 aa, Artificial Sequence
  Description of Artificial Sequence: Synthetic peptide
  Seed: GMDPRMCSLMQGSTLPRRSGAAGA
GMDPRMFSLQQASTNPRRSGAAGA

SEQ ID NO: 87677 - protein, 24 aa, Artificial Sequence
  Description of Artificial Sequence: Synthetic peptide
  Seed: GMDPRMCSLMQGSTLPRRSGAAGA
GMDPRMFSLQQASTSPRRSGAAGA

SEQ ID NO: 87678 - protein, 24 aa, Artificial Sequence
  Description of Artificial Sequence: Synthetic peptide
  Seed: GMDPRMCSLMQGSTLPRRSGAAGA
GMDPRMFSLQQASTTPRRSGAAGA

SEQ ID NO: 87679 - protein, 24 aa, Artificial Sequence
  Description of Artificial Sequence: Synthetic peptide
  Seed: GMDPRMCSLMQGSTLPRRSGAAGA
GMDPRMFSLQQASTVPRRSGAAGA

SEQ ID NO: 87680 - protein, 24 aa, Artificial Sequence
  Description of Artificial Sequence: Synthetic peptide
  Seed: GMDPRMCSLMQGSTLPRRSGAAGA
GMDPRMFSLQQGSTAPRRSGAAGA

SEQ ID NO: 87681 - protein, 24 aa, Artificial Sequence
  Description of Artificial Sequence: Synthetic peptide
  Seed: GMDPRMCSLMQGSTLPRRSGAAGA
GMDPRMFSLQQGSTIPRRSGAAGA

SEQ ID NO: 87682 - protein, 24 aa, Artificial Sequence
  Description of Artificial Sequence: Synthetic peptide
  Seed: GMDPRMCSLMQGSTLPRRSGAAGA
GMDPRMFSLQQGSTLPRRSGAAGA

SEQ ID NO: 87683 - protein, 24 aa, Artificial Sequence
  Description of Artificial Sequence: Synthetic peptide
  Seed: GMDPRMCSLMQGSTLPRRSGAAGA
GMDPRMFSLQQGSTMPRRSGAAGA

SEQ ID NO: 87684 - protein, 24 aa, Artificial Sequence
  Description of Artificial Sequence: Synthetic peptide
  Seed: GMDPRMCSLMQGSTLPRRSGAAGA
GMDPRMFSLQQGSTTPRRSGAAGA

SEQ ID NO: 87685 - protein, 24 aa, Artificial Sequence
  Description of Artificial Sequence: Synthetic peptide
  Seed: GMDPRMCSLMQGSTLPRRSGAAGA
GMDPRMFSLQQGSTVPRRSGAAGA

SEQ ID NO: 87686 - protein, 24 aa, Artificial Sequence
  Description of Artificial Sequence: Synthetic peptide
  Seed: GMDPRMCSLMQGSTLPRRSGAAGA
GMDPRMFSLQQISTAPRRSGAAGA

SEQ ID NO: 87687 - protein, 24 aa, Artificial Sequence
  Description of Artificial Sequence: Synthetic peptide
  Seed: GMDPRMCSLMQGSTLPRRSGAAGA
GMDPRMFSLQQISTNPRRSGAAGA

SEQ ID NO: 87688 - protein, 24 aa, Artificial Sequence
  Description of Artificial Sequence: Synthetic peptide
  Seed: GMDPRMCSLMQGSTLPRRSGAAGA
GMDPRMFSLQQISTSPRRSGAAGA

SEQ ID NO: 87689 - protein, 24 aa, Artificial Sequence
  Description of Artificial Sequence: Synthetic peptide
  Seed: GMDPRMCSLMQGSTLPRRSGAAGA
GMDPRMFSLQQNSTIPRRSGAAGA

SEQ ID NO: 87690 - protein, 24 aa, Artificial Sequence
  Description of Artificial Sequence: Synthetic peptide
  Seed: GMDPRMCSLMQGSTLPRRSGAAGA
GMDPRMFSLQQNSTLPRRSGAAGA

SEQ ID NO: 87691 - protein, 24 aa, Artificial Sequence
  Description of Artificial Sequence: Synthetic peptide
  Seed: GMDPRMCSLMQGSTLPRRSGAAGA
GMDPRMFSLQQNSTVPRRSGAAGA

SEQ ID NO: 87692 - protein, 24 aa, Artificial Sequence
  Description of Artificial Sequence: Synthetic peptide
  Seed: GMDPRMCSLMQGSTLPRRSGAAGA
GMDPRMFSLQQPSTAPRRSGAAGA

SEQ ID NO: 87693 - protein, 24 aa, Artificial Sequence
  Description of Artificial Sequence: Synthetic peptide
  Seed: GMDPRMCSLMQGSTLPRRSGAAGA
GMDPRMFSLQQPSTIPRRSGAAGA

SEQ ID NO: 87694 - protein, 24 aa, Artificial Sequence
  Description of Artificial Sequence: Synthetic peptide
  Seed: GMDPRMCSLMQGSTLPRRSGAAGA
GMDPRMFSLQQPSTLPRRSGAAGA

SEQ ID NO: 87695 - protein, 24 aa, Artificial Sequence
  Description of Artificial Sequence: Synthetic peptide
  Seed: GMDPRMCSLMQGSTLPRRSGAAGA
GMDPRMFSLQQPSTSPRRSGAAGA

SEQ ID NO: 87696 - protein, 24 aa, Artificial Sequence
  Description of Artificial Sequence: Synthetic peptide
  Seed: GMDPRMCSLMQGSTLPRRSGAAGA
GMDPRMFSLQQPSTVPRRSGAAGA

SEQ ID NO: 87697 - protein, 24 aa, Artificial Sequence
  Description of Artificial Sequence: Synthetic peptide
  Seed: GMDPRMCSLMQGSTLPRRSGAAGA
GMDPRMFSLQQSSTAPRRSGAAGA

SEQ ID NO: 87698 - protein, 24 aa, Artificial Sequence
  Description of Artificial Sequence: Synthetic peptide
  Seed: GMDPRMCSLMQGSTLPRRSGAAGA
GMDPRMFSLQQSSTIPRRSGAAGA

SEQ ID NO: 87699 - protein, 24 aa, Artificial Sequence
  Description of Artificial Sequence: Synthetic peptide
  Seed: GMDPRMCSLMQGSTLPRRSGAAGA
GMDPRMFSLQQSSTLPRRSGAAGA

SEQ ID NO: 87700 - protein, 24 aa, Artificial Sequence
  Description of Artificial Sequence: Synthetic peptide
  Seed: GMDPRMCSLMQGSTLPRRSGAAGA
GMDPRMFSLQQSSTMPRRSGAAGA

SEQ ID NO: 87701 - protein, 24 aa, Artificial Sequence
  Description of Artificial Sequence: Synthetic peptide
  Seed: GMDPRMCSLMQGSTLPRRSGAAGA
GMDPRMFSLQQSSTNPRRSGAAGA

SEQ ID NO: 87702 - protein, 24 aa, Artificial Sequence
  Description of Artificial Sequence: Synthetic peptide
  Seed: GMDPRMCSLMQGSTLPRRSGAAGA
GMDPRMFSLQQSSTSPRRSGAAGA

SEQ ID NO: 87703 - protein, 24 aa, Artificial Sequence
  Description of Artificial Sequence: Synthetic peptide
  Seed: GMDPRMCSLMQGSTLPRRSGAAGA
GMDPRMFSLQQSSTVPRRSGAAGA

SEQ ID NO: 87704 - protein, 24 aa, Artificial Sequence
  Description of Artificial Sequence: Synthetic peptide
  Seed: GMDPRMCSLMQGSTLPRRSGAAGA
GMDPRMFSLQQTSTAPRRSGAAGA

SEQ ID NO: 87705 - protein, 24 aa, Artificial Sequence
  Description of Artificial Sequence: Synthetic peptide
  Seed: GMDPRMCSLMQGSTLPRRSGAAGA
GMDPRMFSLQQTSTIPRRSGAAGA

SEQ ID NO: 87706 - protein, 24 aa, Artificial Sequence
  Description of Artificial Sequence: Synthetic peptide
  Seed: GMDPRMCSLMQGSTLPRRSGAAGA
GMDPRMFSLQQTSTLPRRSGAAGA

SEQ ID NO: 87707 - protein, 24 aa, Artificial Sequence
  Description of Artificial Sequence: Synthetic peptide
  Seed: GMDPRMCSLMQGSTLPRRSGAAGA
GMDPRMFSLQQTSTNPRRSGAAGA

SEQ ID NO: 87708 - protein, 24 aa, Artificial Sequence
  Description of Artificial Sequence: Synthetic peptide
  Seed: GMDPRMCSLMQGSTLPRRSGAAGA
GMDPRMFSLQQTSTSPRRSGAAGA

SEQ ID NO: 87709 - protein, 24 aa, Artificial Sequence
  Description of Artificial Sequence: Synthetic peptide
  Seed: GMDPRMCSLMQGSTLPRRSGAAGA
GMDPRMFSLQQTSTVPRRSGAAGA

SEQ ID NO: 87710 - protein, 24 aa, Artificial Sequence
  Description of Artificial Sequence: Synthetic peptide
  Seed: GMDPRMCSLMQGSTLPRRSGAAGA
GMDPRMFSLQQVSTAPRRSGAAGA

SEQ ID NO: 87711 - protein, 24 aa, Artificial Sequence
  Description of Artificial Sequence: Synthetic peptide
  Seed: GMDPRMCSLMQGSTLPRRSGAAGA
GMDPRMFSLQQVSTNPRRSGAAGA

SEQ ID NO: 87712 - protein, 24 aa, Artificial Sequence
  Description of Artificial Sequence: Synthetic peptide
  Seed: GMDPRMCSLMQGSTLPRRSGAAGA
GMDPRMFSLQQVSTSPRRSGAAGA

SEQ ID NO: 87713 - protein, 24 aa, Artificial Sequence
  Description of Artificial Sequence: Synthetic peptide
  Seed: GMDPRMCSLMQGSTLPRRSGAAGA
GMDPRMFSLSQASTAPRRSGAAGA

SEQ ID NO: 87714 - protein, 24 aa, Artificial Sequence
  Description of Artificial Sequence: Synthetic peptide
  Seed: GMDPRMCSLMQGSTLPRRSGAAGA
GMDPRMFSLSQASTIPRRSGAAGA

SEQ ID NO: 87715 - protein, 24 aa, Artificial Sequence
  Description of Artificial Sequence: Synthetic peptide
  Seed: GMDPRMCSLMQGSTLPRRSGAAGA
GMDPRMFSLSQASTLPRRSGAAGA

SEQ ID NO: 87716 - protein, 24 aa, Artificial Sequence
  Description of Artificial Sequence: Synthetic peptide
  Seed: GMDPRMCSLMQGSTLPRRSGAAGA
GMDPRMFSLSQASTMPRRSGAAGA

SEQ ID NO: 87717 - protein, 24 aa, Artificial Sequence
  Description of Artificial Sequence: Synthetic peptide
  Seed: GMDPRMCSLMQGSTLPRRSGAAGA
GMDPRMFSLSQASTNPRRSGAAGA

SEQ ID NO: 87718 - protein, 24 aa, Artificial Sequence
  Description of Artificial Sequence: Synthetic peptide
  Seed: GMDPRMCSLMQGSTLPRRSGAAGA
GMDPRMFSLSQASTSPRRSGAAGA

SEQ ID NO: 87719 - protein, 24 aa, Artificial Sequence
  Description of Artificial Sequence: Synthetic peptide
  Seed: GMDPRMCSLMQGSTLPRRSGAAGA
GMDPRMFSLSQASTVPRRSGAAGA

SEQ ID NO: 87720 - protein, 24 aa, Artificial Sequence
  Description of Artificial Sequence: Synthetic peptide
  Seed: GMDPRMCSLMQGSTLPRRSGAAGA
GMDPRMFSLSQGSTIPRRSGAAGA

SEQ ID NO: 87721 - protein, 24 aa, Artificial Sequence
  Description of Artificial Sequence: Synthetic peptide
  Seed: GMDPRMCSLMQGSTLPRRSGAAGA
GMDPRMFSLSQGSTLPRRSGAAGA

SEQ ID NO: 87722 - protein, 24 aa, Artificial Sequence
  Description of Artificial Sequence: Synthetic peptide
  Seed: GMDPRMCSLMQGSTLPRRSGAAGA
GMDPRMFSLSQGSTVPRRSGAAGA

SEQ ID NO: 87723 - protein, 24 aa, Artificial Sequence
  Description of Artificial Sequence: Synthetic peptide
  Seed: GMDPRMCSLMQGSTLPRRSGAAGA
GMDPRMFSLSQPSTIPRRSGAAGA

SEQ ID NO: 87724 - protein, 24 aa, Artificial Sequence
  Description of Artificial Sequence: Synthetic peptide
  Seed: GMDPRMCSLMQGSTLPRRSGAAGA
GMDPRMFSLSQPSTLPRRSGAAGA

SEQ ID NO: 87725 - protein, 24 aa, Artificial Sequence
  Description of Artificial Sequence: Synthetic peptide
  Seed: GMDPRMCSLMQGSTLPRRSGAAGA
GMDPRMFSLSQPSTVPRRSGAAGA

SEQ ID NO: 87726 - protein, 24 aa, Artificial Sequence
  Description of Artificial Sequence: Synthetic peptide
  Seed: GMDPRMCSLMQGSTLPRRSGAAGA
GMDPRMFSLSQSSTIPRRSGAAGA

SEQ ID NO: 87727 - protein, 24 aa, Artificial Sequence
  Description of Artificial Sequence: Synthetic peptide
  Seed: GMDPRMCSLMQGSTLPRRSGAAGA
GMDPRMFSLSQSSTLPRRSGAAGA

SEQ ID NO: 87728 - protein, 24 aa, Artificial Sequence
  Description of Artificial Sequence: Synthetic peptide
  Seed: GMDPRMCSLMQGSTLPRRSGAAGA
GMDPRMFSLSQSSTVPRRSGAAGA

SEQ ID NO: 87729 - protein, 24 aa, Artificial Sequence
  Description of Artificial Sequence: Synthetic peptide
  Seed: GMDPRMCSLMQGSTLPRRSGAAGA
GMDPRMFSLTQASTAPRRSGAAGA

SEQ ID NO: 87730 - protein, 24 aa, Artificial Sequence
  Description of Artificial Sequence: Synthetic peptide
  Seed: GMDPRMCSLMQGSTLPRRSGAAGA
GMDPRMFSLTQASTIPRRSGAAGA

SEQ ID NO: 87731 - protein, 24 aa, Artificial Sequence
  Description of Artificial Sequence: Synthetic peptide
  Seed: GMDPRMCSLMQGSTLPRRSGAAGA
GMDPRMFSLTQASTLPRRSGAAGA

SEQ ID NO: 87732 - protein, 24 aa, Artificial Sequence
  Description of Artificial Sequence: Synthetic peptide
  Seed: GMDPRMCSLMQGSTLPRRSGAAGA
GMDPRMFSLTQASTNPRRSGAAGA

SEQ ID NO: 87733 - protein, 24 aa, Artificial Sequence
  Description of Artificial Sequence: Synthetic peptide
  Seed: GMDPRMCSLMQGSTLPRRSGAAGA
GMDPRMFSLTQASTSPRRSGAAGA

SEQ ID NO: 87734 - protein, 24 aa, Artificial Sequence
  Description of Artificial Sequence: Synthetic peptide
  Seed: GMDPRMCSLMQGSTLPRRSGAAGA
GMDPRMFSLTQASTVPRRSGAAGA

SEQ ID NO: 87735 - protein, 24 aa, Artificial Sequence
  Description of Artificial Sequence: Synthetic peptide
  Seed: GMDPRMCSLMQGSTLPRRSGAAGA
GMDPRMFSLTQGSTIPRRSGAAGA

SEQ ID NO: 87736 - protein, 24 aa, Artificial Sequence
  Description of Artificial Sequence: Synthetic peptide
  Seed: GMDPRMCSLMQGSTLPRRSGAAGA
GMDPRMFSLTQGSTLPRRSGAAGA

SEQ ID NO: 87737 - protein, 24 aa, Artificial Sequence
  Description of Artificial Sequence: Synthetic peptide
  Seed: GMDPRMCSLMQGSTLPRRSGAAGA
GMDPRMFSLTQGSTVPRRSGAAGA

SEQ ID NO: 87738 - protein, 24 aa, Artificial Sequence
  Description of Artificial Sequence: Synthetic peptide
  Seed: GMDPRMCSLMQGSTLPRRSGAAGA
GMDPRMFSLVQASTAPRRSGAAGA

SEQ ID NO: 87739 - protein, 24 aa, Artificial Sequence
  Description of Artificial Sequence: Synthetic peptide
  Seed: GMDPRMCSLMQGSTLPRRSGAAGA
GMDPRMFSLVQASTGPRRSGAAGA

SEQ ID NO: 87740 - protein, 24 aa, Artificial Sequence
  Description of Artificial Sequence: Synthetic peptide
  Seed: GMDPRMCSLMQGSTLPRRSGAAGA
GMDPRMFSLVQASTHPRRSGAAGA

SEQ ID NO: 87741 - protein, 24 aa, Artificial Sequence
  Description of Artificial Sequence: Synthetic peptide
  Seed: GMDPRMCSLMQGSTLPRRSGAAGA
GMDPRMFSLVQASTIPRRSGAAGA

SEQ ID NO: 87742 - protein, 24 aa, Artificial Sequence
  Description of Artificial Sequence: Synthetic peptide
  Seed: GMDPRMCSLMQGSTLPRRSGAAGA
GMDPRMFSLVQASTLPRRSGAAGA

SEQ ID NO: 87743 - protein, 24 aa, Artificial Sequence
  Description of Artificial Sequence: Synthetic peptide
  Seed: GMDPRMCSLMQGSTLPRRSGAAGA
GMDPRMFSLVQASTMPRRSGAAGA

SEQ ID NO: 87744 - protein, 24 aa, Artificial Sequence
  Description of Artificial Sequence: Synthetic peptide
  Seed: GMDPRMCSLMQGSTLPRRSGAAGA
GMDPRMFSLVQASTNPRRSGAAGA

SEQ ID NO: 87745 - protein, 24 aa, Artificial Sequence
  Description of Artificial Sequence: Synthetic peptide
  Seed: GMDPRMCSLMQGSTLPRRSGAAGA
GMDPRMFSLVQASTQPRRSGAAGA

SEQ ID NO: 87746 - protein, 24 aa, Artificial Sequence
  Description of Artificial Sequence: Synthetic peptide
  Seed: GMDPRMCSLMQGSTLPRRSGAAGA
GMDPRMFSLVQASTSPRRSGAAGA

SEQ ID NO: 87747 - protein, 24 aa, Artificial Sequence
  Description of Artificial Sequence: Synthetic peptide
  Seed: GMDPRMCSLMQGSTLPRRSGAAGA
GMDPRMFSLVQASTTPRRSGAAGA

SEQ ID NO: 87748 - protein, 24 aa, Artificial Sequence
  Description of Artificial Sequence: Synthetic peptide
  Seed: GMDPRMCSLMQGSTLPRRSGAAGA
GMDPRMFSLVQASTVPRRSGAAGA

SEQ ID NO: 87749 - protein, 24 aa, Artificial Sequence
  Description of Artificial Sequence: Synthetic peptide
  Seed: GMDPRMCSLMQGSTLPRRSGAAGA
GMDPRMFSLVQGSTAPRRSGAAGA

SEQ ID NO: 87750 - protein, 24 aa, Artificial Sequence
  Description of Artificial Sequence: Synthetic peptide
  Seed: GMDPRMCSLMQGSTLPRRSGAAGA
GMDPRMFSLVQGSTIPRRSGAAGA

SEQ ID NO: 87751 - protein, 24 aa, Artificial Sequence
  Description of Artificial Sequence: Synthetic peptide
  Seed: GMDPRMCSLMQGSTLPRRSGAAGA
GMDPRMFSLVQGSTLPRRSGAAGA

SEQ ID NO: 87752 - protein, 24 aa, Artificial Sequence
  Description of Artificial Sequence: Synthetic peptide
  Seed: GMDPRMCSLMQGSTLPRRSGAAGA
GMDPRMFSLVQGSTMPRRSGAAGA

SEQ ID NO: 87753 - protein, 24 aa, Artificial Sequence
  Description of Artificial Sequence: Synthetic peptide
  Seed: GMDPRMCSLMQGSTLPRRSGAAGA
GMDPRMFSLVQGSTNPRRSGAAGA

SEQ ID NO: 87754 - protein, 24 aa, Artificial Sequence
  Description of Artificial Sequence: Synthetic peptide
  Seed: GMDPRMCSLMQGSTLPRRSGAAGA
GMDPRMFSLVQGSTSPRRSGAAGA

SEQ ID NO: 87755 - protein, 24 aa, Artificial Sequence
  Description of Artificial Sequence: Synthetic peptide
  Seed: GMDPRMCSLMQGSTLPRRSGAAGA
GMDPRMFSLVQGSTTPRRSGAAGA

SEQ ID NO: 87756 - protein, 24 aa, Artificial Sequence
  Description of Artificial Sequence: Synthetic peptide
  Seed: GMDPRMCSLMQGSTLPRRSGAAGA
GMDPRMFSLVQGSTVPRRSGAAGA

SEQ ID NO: 87757 - protein, 24 aa, Artificial Sequence
  Description of Artificial Sequence: Synthetic peptide
  Seed: GMDPRMCSLMQGSTLPRRSGAAGA
GMDPRMFSLVQISTAPRRSGAAGA

SEQ ID NO: 87758 - protein, 24 aa, Artificial Sequence
  Description of Artificial Sequence: Synthetic peptide
  Seed: GMDPRMCSLMQGSTLPRRSGAAGA
GMDPRMFSLVQISTNPRRSGAAGA

SEQ ID NO: 87759 - protein, 24 aa, Artificial Sequence
  Description of Artificial Sequence: Synthetic peptide
  Seed: GMDPRMCSLMQGSTLPRRSGAAGA
GMDPRMFSLVQISTSPRRSGAAGA

SEQ ID NO: 87760 - protein, 24 aa, Artificial Sequence
  Description of Artificial Sequence: Synthetic peptide
  Seed: GMDPRMCSLMQGSTLPRRSGAAGA
GMDPRMFSLVQNSTAPRRSGAAGA

SEQ ID NO: 87761 - protein, 24 aa, Artificial Sequence
  Description of Artificial Sequence: Synthetic peptide
  Seed: GMDPRMCSLMQGSTLPRRSGAAGA
GMDPRMFSLVQNSTIPRRSGAAGA

SEQ ID NO: 87762 - protein, 24 aa, Artificial Sequence
  Description of Artificial Sequence: Synthetic peptide
  Seed: GMDPRMCSLMQGSTLPRRSGAAGA
GMDPRMFSLVQNSTLPRRSGAAGA

SEQ ID NO: 87763 - protein, 24 aa, Artificial Sequence
  Description of Artificial Sequence: Synthetic peptide
  Seed: GMDPRMCSLMQGSTLPRRSGAAGA
GMDPRMFSLVQNSTSPRRSGAAGA

SEQ ID NO: 87764 - protein, 24 aa, Artificial Sequence
  Description of Artificial Sequence: Synthetic peptide
  Seed: GMDPRMCSLMQGSTLPRRSGAAGA
GMDPRMFSLVQNSTVPRRSGAAGA

SEQ ID NO: 87765 - protein, 24 aa, Artificial Sequence
  Description of Artificial Sequence: Synthetic peptide
  Seed: GMDPRMCSLMQGSTLPRRSGAAGA
GMDPRMFSLVQPSTAPRRSGAAGA

SEQ ID NO: 87766 - protein, 24 aa, Artificial Sequence
  Description of Artificial Sequence: Synthetic peptide
  Seed: GMDPRMCSLMQGSTLPRRSGAAGA
GMDPRMFSLVQPSTGPRRSGAAGA

SEQ ID NO: 87767 - protein, 24 aa, Artificial Sequence
  Description of Artificial Sequence: Synthetic peptide
  Seed: GMDPRMCSLMQGSTLPRRSGAAGA
GMDPRMFSLVQPSTIPRRSGAAGA

SEQ ID NO: 87768 - protein, 24 aa, Artificial Sequence
  Description of Artificial Sequence: Synthetic peptide
  Seed: GMDPRMCSLMQGSTLPRRSGAAGA
GMDPRMFSLVQPSTLPRRSGAAGA

SEQ ID NO: 87769 - protein, 24 aa, Artificial Sequence
  Description of Artificial Sequence: Synthetic peptide
  Seed: GMDPRMCSLMQGSTLPRRSGAAGA
GMDPRMFSLVQPSTMPRRSGAAGA

SEQ ID NO: 87770 - protein, 24 aa, Artificial Sequence
  Description of Artificial Sequence: Synthetic peptide
  Seed: GMDPRMCSLMQGSTLPRRSGAAGA
GMDPRMFSLVQPSTNPRRSGAAGA

SEQ ID NO: 87771 - protein, 24 aa, Artificial Sequence
  Description of Artificial Sequence: Synthetic peptide
  Seed: GMDPRMCSLMQGSTLPRRSGAAGA
GMDPRMFSLVQPSTSPRRSGAAGA

SEQ ID NO: 87772 - protein, 24 aa, Artificial Sequence
  Description of Artificial Sequence: Synthetic peptide
  Seed: GMDPRMCSLMQGSTLPRRSGAAGA
GMDPRMFSLVQPSTTPRRSGAAGA

SEQ ID NO: 87773 - protein, 24 aa, Artificial Sequence
  Description of Artificial Sequence: Synthetic peptide
  Seed: GMDPRMCSLMQGSTLPRRSGAAGA
GMDPRMFSLVQPSTVPRRSGAAGA

SEQ ID NO: 87774 - protein, 24 aa, Artificial Sequence
  Description of Artificial Sequence: Synthetic peptide
  Seed: GMDPRMCSLMQGSTLPRRSGAAGA
GMDPRMFSLVQSSTAPRRSGAAGA

SEQ ID NO: 87775 - protein, 24 aa, Artificial Sequence
  Description of Artificial Sequence: Synthetic peptide
  Seed: GMDPRMCSLMQGSTLPRRSGAAGA
GMDPRMFSLVQSSTGPRRSGAAGA

SEQ ID NO: 87776 - protein, 24 aa, Artificial Sequence
  Description of Artificial Sequence: Synthetic peptide
  Seed: GMDPRMCSLMQGSTLPRRSGAAGA
GMDPRMFSLVQSSTIPRRSGAAGA

SEQ ID NO: 87777 - protein, 24 aa, Artificial Sequence
  Description of Artificial Sequence: Synthetic peptide
  Seed: GMDPRMCSLMQGSTLPRRSGAAGA
GMDPRMFSLVQSSTLPRRSGAAGA

SEQ ID NO: 87778 - protein, 24 aa, Artificial Sequence
  Description of Artificial Sequence: Synthetic peptide
  Seed: GMDPRMCSLMQGSTLPRRSGAAGA
GMDPRMFSLVQSSTMPRRSGAAGA

SEQ ID NO: 87779 - protein, 24 aa, Artificial Sequence
  Description of Artificial Sequence: Synthetic peptide
  Seed: GMDPRMCSLMQGSTLPRRSGAAGA
GMDPRMFSLVQSSTNPRRSGAAGA

SEQ ID NO: 87780 - protein, 24 aa, Artificial Sequence
  Description of Artificial Sequence: Synthetic peptide
  Seed: GMDPRMCSLMQGSTLPRRSGAAGA
GMDPRMFSLVQSSTSPRRSGAAGA

SEQ ID NO: 87781 - protein, 24 aa, Artificial Sequence
  Description of Artificial Sequence: Synthetic peptide
  Seed: GMDPRMCSLMQGSTLPRRSGAAGA
GMDPRMFSLVQSSTTPRRSGAAGA

SEQ ID NO: 87782 - protein, 24 aa, Artificial Sequence
  Description of Artificial Sequence: Synthetic peptide
  Seed: GMDPRMCSLMQGSTLPRRSGAAGA
GMDPRMFSLVQSSTVPRRSGAAGA

SEQ ID NO: 87783 - protein, 24 aa, Artificial Sequence
  Description of Artificial Sequence: Synthetic peptide
  Seed: GMDPRMCSLMQGSTLPRRSGAAGA
GMDPRMFSLVQTSTAPRRSGAAGA

SEQ ID NO: 87784 - protein, 24 aa, Artificial Sequence
  Description of Artificial Sequence: Synthetic peptide
  Seed: GMDPRMCSLMQGSTLPRRSGAAGA
GMDPRMFSLVQTSTIPRRSGAAGA

SEQ ID NO: 87785 - protein, 24 aa, Artificial Sequence
  Description of Artificial Sequence: Synthetic peptide
  Seed: GMDPRMCSLMQGSTLPRRSGAAGA
GMDPRMFSLVQTSTLPRRSGAAGA

SEQ ID NO: 87786 - protein, 24 aa, Artificial Sequence
  Description of Artificial Sequence: Synthetic peptide
  Seed: GMDPRMCSLMQGSTLPRRSGAAGA
GMDPRMFSLVQTSTMPRRSGAAGA

SEQ ID NO: 87787 - protein, 24 aa, Artificial Sequence
  Description of Artificial Sequence: Synthetic peptide
  Seed: GMDPRMCSLMQGSTLPRRSGAAGA
GMDPRMFSLVQTSTNPRRSGAAGA

SEQ ID NO: 87788 - protein, 24 aa, Artificial Sequence
  Description of Artificial Sequence: Synthetic peptide
  Seed: GMDPRMCSLMQGSTLPRRSGAAGA
GMDPRMFSLVQTSTSPRRSGAAGA

SEQ ID NO: 87789 - protein, 24 aa, Artificial Sequence
  Description of Artificial Sequence: Synthetic peptide
  Seed: GMDPRMCSLMQGSTLPRRSGAAGA
GMDPRMFSLVQTSTTPRRSGAAGA

SEQ ID NO: 87790 - protein, 24 aa, Artificial Sequence
  Description of Artificial Sequence: Synthetic peptide
  Seed: GMDPRMCSLMQGSTLPRRSGAAGA
GMDPRMFSLVQTSTVPRRSGAAGA

SEQ ID NO: 87791 - protein, 24 aa, Artificial Sequence
  Description of Artificial Sequence: Synthetic peptide
  Seed: GMDPRMCSLMQGSTLPRRSGAAGA
GMDPRMFSLVQVSTAPRRSGAAGA

SEQ ID NO: 87792 - protein, 24 aa, Artificial Sequence
  Description of Artificial Sequence: Synthetic peptide
  Seed: GMDPRMCSLMQGSTLPRRSGAAGA
GMDPRMFSLVQVSTNPRRSGAAGA

SEQ ID NO: 87793 - protein, 24 aa, Artificial Sequence
  Description of Artificial Sequence: Synthetic peptide
  Seed: GMDPRMCSLMQGSTLPRRSGAAGA
GMDPRMFSLVQVSTSPRRSGAAGA

SEQ ID NO: 87794 - protein, 24 aa, Artificial Sequence
  Description of Artificial Sequence: Synthetic peptide
  Seed: GMDPRMCSLMQGSTLPRRSGAAGA
GMDPRMFSLVQVSTTPRRSGAAGA

SEQ ID NO: 87795 - protein, 24 aa, Artificial Sequence
  Description of Artificial Sequence: Synthetic peptide
  Seed: GMDPRMCSLMQGSTLPRRSGAAGA
GMDPRMFSLVQVSTVPRRSGAAGA

SEQ ID NO: 87796 - protein, 24 aa, Artificial Sequence
  Description of Artificial Sequence: Synthetic peptide
  Seed: GMDPRMCSLMQGSTLPRRSGAAGA
GMDPRMISLAQASTAPRRSGAAGA

SEQ ID NO: 87797 - protein, 24 aa, Artificial Sequence
  Description of Artificial Sequence: Synthetic peptide
  Seed: GMDPRMCSLMQGSTLPRRSGAAGA
GMDPRMISLAQASTIPRRSGAAGA

SEQ ID NO: 87798 - protein, 24 aa, Artificial Sequence
  Description of Artificial Sequence: Synthetic peptide
  Seed: GMDPRMCSLMQGSTLPRRSGAAGA
GMDPRMISLAQASTLPRRSGAAGA

SEQ ID NO: 87799 - protein, 24 aa, Artificial Sequence
  Description of Artificial Sequence: Synthetic peptide
  Seed: GMDPRMCSLMQGSTLPRRSGAAGA
GMDPRMISLAQASTVPRRSGAAGA

SEQ ID NO: 87800 - protein, 24 aa, Artificial Sequence
  Description of Artificial Sequence: Synthetic peptide
  Seed: GMDPRMCSLMQGSTLPRRSGAAGA
GMDPRMISLAQGSTIPRRSGAAGA

SEQ ID NO: 87801 - protein, 24 aa, Artificial Sequence
  Description of Artificial Sequence: Synthetic peptide
  Seed: GMDPRMCSLMQGSTLPRRSGAAGA
GMDPRMISLAQGSTLPRRSGAAGA

SEQ ID NO: 87802 - protein, 24 aa, Artificial Sequence
  Description of Artificial Sequence: Synthetic peptide
  Seed: GMDPRMCSLMQGSTLPRRSGAAGA
GMDPRMISLAQGSTVPRRSGAAGA

SEQ ID NO: 87803 - protein, 24 aa, Artificial Sequence
  Description of Artificial Sequence: Synthetic peptide
  Seed: GMDPRMCSLMQGSTLPRRSGAAGA
GMDPRMISLIQASTAPRRSGAAGA

SEQ ID NO: 87804 - protein, 24 aa, Artificial Sequence
  Description of Artificial Sequence: Synthetic peptide
  Seed: GMDPRMCSLMQGSTLPRRSGAAGA
GMDPRMISLIQASTIPRRSGAAGA

SEQ ID NO: 87805 - protein, 24 aa, Artificial Sequence
  Description of Artificial Sequence: Synthetic peptide
  Seed: GMDPRMCSLMQGSTLPRRSGAAGA
GMDPRMISLIQASTLPRRSGAAGA

SEQ ID NO: 87806 - protein, 24 aa, Artificial Sequence
  Description of Artificial Sequence: Synthetic peptide
  Seed: GMDPRMCSLMQGSTLPRRSGAAGA
GMDPRMISLIQASTNPRRSGAAGA

SEQ ID NO: 87807 - protein, 24 aa, Artificial Sequence
  Description of Artificial Sequence: Synthetic peptide
  Seed: GMDPRMCSLMQGSTLPRRSGAAGA
GMDPRMISLIQASTSPRRSGAAGA

SEQ ID NO: 87808 - protein, 24 aa, Artificial Sequence
  Description of Artificial Sequence: Synthetic peptide
  Seed: GMDPRMCSLMQGSTLPRRSGAAGA
GMDPRMISLIQASTVPRRSGAAGA

SEQ ID NO: 87809 - protein, 24 aa, Artificial Sequence
  Description of Artificial Sequence: Synthetic peptide
  Seed: GMDPRMCSLMQGSTLPRRSGAAGA
GMDPRMISLIQGSTAPRRSGAAGA

SEQ ID NO: 87810 - protein, 24 aa, Artificial Sequence
  Description of Artificial Sequence: Synthetic peptide
  Seed: GMDPRMCSLMQGSTLPRRSGAAGA
GMDPRMISLIQGSTIPRRSGAAGA

SEQ ID NO: 87811 - protein, 24 aa, Artificial Sequence
  Description of Artificial Sequence: Synthetic peptide
  Seed: GMDPRMCSLMQGSTLPRRSGAAGA
GMDPRMISLIQGSTLPRRSGAAGA

SEQ ID NO: 87812 - protein, 24 aa, Artificial Sequence
  Description of Artificial Sequence: Synthetic peptide
  Seed: GMDPRMCSLMQGSTLPRRSGAAGA
GMDPRMISLIQGSTVPRRSGAAGA

SEQ ID NO: 87813 - protein, 24 aa, Artificial Sequence
  Description of Artificial Sequence: Synthetic peptide
  Seed: GMDPRMCSLMQGSTLPRRSGAAGA
GMDPRMISLIQPSTAPRRSGAAGA

SEQ ID NO: 87814 - protein, 24 aa, Artificial Sequence
  Description of Artificial Sequence: Synthetic peptide
  Seed: GMDPRMCSLMQGSTLPRRSGAAGA
GMDPRMISLIQPSTVPRRSGAAGA

SEQ ID NO: 87815 - protein, 24 aa, Artificial Sequence
  Description of Artificial Sequence: Synthetic peptide
  Seed: GMDPRMCSLMQGSTLPRRSGAAGA
GMDPRMISLIQSSTAPRRSGAAGA

SEQ ID NO: 87816 - protein, 24 aa, Artificial Sequence
  Description of Artificial Sequence: Synthetic peptide
  Seed: GMDPRMCSLMQGSTLPRRSGAAGA
GMDPRMISLIQSSTIPRRSGAAGA

SEQ ID NO: 87817 - protein, 24 aa, Artificial Sequence
  Description of Artificial Sequence: Synthetic peptide
  Seed: GMDPRMCSLMQGSTLPRRSGAAGA
GMDPRMISLIQSSTLPRRSGAAGA

SEQ ID NO: 87818 - protein, 24 aa, Artificial Sequence
  Description of Artificial Sequence: Synthetic peptide
  Seed: GMDPRMCSLMQGSTLPRRSGAAGA
GMDPRMISLIQSSTVPRRSGAAGA

SEQ ID NO: 87819 - protein, 24 aa, Artificial Sequence
  Description of Artificial Sequence: Synthetic peptide
  Seed: GMDPRMCSLMQGSTLPRRSGAAGA
GMDPRMISLLQASTAPRRSGAAGA

SEQ ID NO: 87820 - protein, 24 aa, Artificial Sequence
  Description of Artificial Sequence: Synthetic peptide
  Seed: GMDPRMCSLMQGSTLPRRSGAAGA
GMDPRMISLLQASTGPRRSGAAGA

SEQ ID NO: 87821 - protein, 24 aa, Artificial Sequence
  Description of Artificial Sequence: Synthetic peptide
  Seed: GMDPRMCSLMQGSTLPRRSGAAGA
GMDPRMISLLQASTIPRRSGAAGA

SEQ ID NO: 87822 - protein, 24 aa, Artificial Sequence
  Description of Artificial Sequence: Synthetic peptide
  Seed: GMDPRMCSLMQGSTLPRRSGAAGA
GMDPRMISLLQASTLPRRSGAAGA

SEQ ID NO: 87823 - protein, 24 aa, Artificial Sequence
  Description of Artificial Sequence: Synthetic peptide
  Seed: GMDPRMCSLMQGSTLPRRSGAAGA
GMDPRMISLLQASTMPRRSGAAGA

SEQ ID NO: 87824 - protein, 24 aa, Artificial Sequence
  Description of Artificial Sequence: Synthetic peptide
  Seed: GMDPRMCSLMQGSTLPRRSGAAGA
GMDPRMISLLQASTNPRRSGAAGA

SEQ ID NO: 87825 - protein, 24 aa, Artificial Sequence
  Description of Artificial Sequence: Synthetic peptide
  Seed: GMDPRMCSLMQGSTLPRRSGAAGA
GMDPRMISLLQASTSPRRSGAAGA

SEQ ID NO: 87826 - protein, 24 aa, Artificial Sequence
  Description of Artificial Sequence: Synthetic peptide
  Seed: GMDPRMCSLMQGSTLPRRSGAAGA
GMDPRMISLLQASTTPRRSGAAGA

SEQ ID NO: 87827 - protein, 24 aa, Artificial Sequence
  Description of Artificial Sequence: Synthetic peptide
  Seed: GMDPRMCSLMQGSTLPRRSGAAGA
GMDPRMISLLQASTVPRRSGAAGA

SEQ ID NO: 87828 - protein, 24 aa, Artificial Sequence
  Description of Artificial Sequence: Synthetic peptide
  Seed: GMDPRMCSLMQGSTLPRRSGAAGA
GMDPRMISLLQGSTAPRRSGAAGA

SEQ ID NO: 87829 - protein, 24 aa, Artificial Sequence
  Description of Artificial Sequence: Synthetic peptide
  Seed: GMDPRMCSLMQGSTLPRRSGAAGA
GMDPRMISLLQGSTGPRRSGAAGA

SEQ ID NO: 87830 - protein, 24 aa, Artificial Sequence
  Description of Artificial Sequence: Synthetic peptide
  Seed: GMDPRMCSLMQGSTLPRRSGAAGA
GMDPRMISLLQGSTIPRRSGAAGA

SEQ ID NO: 87831 - protein, 24 aa, Artificial Sequence
  Description of Artificial Sequence: Synthetic peptide
  Seed: GMDPRMCSLMQGSTLPRRSGAAGA
GMDPRMISLLQGSTLPRRSGAAGA

SEQ ID NO: 87832 - protein, 24 aa, Artificial Sequence
  Description of Artificial Sequence: Synthetic peptide
  Seed: GMDPRMCSLMQGSTLPRRSGAAGA
GMDPRMISLLQGSTMPRRSGAAGA

SEQ ID NO: 87833 - protein, 24 aa, Artificial Sequence
  Description of Artificial Sequence: Synthetic peptide
  Seed: GMDPRMCSLMQGSTLPRRSGAAGA
GMDPRMISLLQGSTSPRRSGAAGA

SEQ ID NO: 87834 - protein, 24 aa, Artificial Sequence
  Description of Artificial Sequence: Synthetic peptide
  Seed: GMDPRMCSLMQGSTLPRRSGAAGA
GMDPRMISLLQGSTTPRRSGAAGA

SEQ ID NO: 87835 - protein, 24 aa, Artificial Sequence
  Description of Artificial Sequence: Synthetic peptide
  Seed: GMDPRMCSLMQGSTLPRRSGAAGA
GMDPRMISLLQGSTVPRRSGAAGA

SEQ ID NO: 87836 - protein, 24 aa, Artificial Sequence
  Description of Artificial Sequence: Synthetic peptide
  Seed: GMDPRMCSLMQGSTLPRRSGAAGA
GMDPRMISLLQNSTAPRRSGAAGA

SEQ ID NO: 87837 - protein, 24 aa, Artificial Sequence
  Description of Artificial Sequence: Synthetic peptide
  Seed: GMDPRMCSLMQGSTLPRRSGAAGA
GMDPRMISLLQNSTIPRRSGAAGA

SEQ ID NO: 87838 - protein, 24 aa, Artificial Sequence
  Description of Artificial Sequence: Synthetic peptide
  Seed: GMDPRMCSLMQGSTLPRRSGAAGA
GMDPRMISLLQNSTLPRRSGAAGA

SEQ ID NO: 87839 - protein, 24 aa, Artificial Sequence
  Description of Artificial Sequence: Synthetic peptide
  Seed: GMDPRMCSLMQGSTLPRRSGAAGA
GMDPRMISLLQNSTVPRRSGAAGA

SEQ ID NO: 87840 - protein, 24 aa, Artificial Sequence
  Description of Artificial Sequence: Synthetic peptide
  Seed: GMDPRMCSLMQGSTLPRRSGAAGA
GMDPRMISLLQPSTAPRRSGAAGA

SEQ ID NO: 87841 - protein, 24 aa, Artificial Sequence
  Description of Artificial Sequence: Synthetic peptide
  Seed: GMDPRMCSLMQGSTLPRRSGAAGA
GMDPRMISLLQPSTIPRRSGAAGA

SEQ ID NO: 87842 - protein, 24 aa, Artificial Sequence
  Description of Artificial Sequence: Synthetic peptide
  Seed: GMDPRMCSLMQGSTLPRRSGAAGA
GMDPRMISLLQPSTLPRRSGAAGA

SEQ ID NO: 87843 - protein, 24 aa, Artificial Sequence
  Description of Artificial Sequence: Synthetic peptide
  Seed: GMDPRMCSLMQGSTLPRRSGAAGA
GMDPRMISLLQPSTMPRRSGAAGA

SEQ ID NO: 87844 - protein, 24 aa, Artificial Sequence
  Description of Artificial Sequence: Synthetic peptide
  Seed: GMDPRMCSLMQGSTLPRRSGAAGA
GMDPRMISLLQPSTNPRRSGAAGA

SEQ ID NO: 87845 - protein, 24 aa, Artificial Sequence
  Description of Artificial Sequence: Synthetic peptide
  Seed: GMDPRMCSLMQGSTLPRRSGAAGA
GMDPRMISLLQPSTSPRRSGAAGA

SEQ ID NO: 87846 - protein, 24 aa, Artificial Sequence
  Description of Artificial Sequence: Synthetic peptide
  Seed: GMDPRMCSLMQGSTLPRRSGAAGA
GMDPRMISLLQPSTTPRRSGAAGA

SEQ ID NO: 87847 - protein, 24 aa, Artificial Sequence
  Description of Artificial Sequence: Synthetic peptide
  Seed: GMDPRMCSLMQGSTLPRRSGAAGA
GMDPRMISLLQPSTVPRRSGAAGA

SEQ ID NO: 87848 - protein, 24 aa, Artificial Sequence
  Description of Artificial Sequence: Synthetic peptide
  Seed: GMDPRMCSLMQGSTLPRRSGAAGA
GMDPRMISLLQSSTAPRRSGAAGA

SEQ ID NO: 87849 - protein, 24 aa, Artificial Sequence
  Description of Artificial Sequence: Synthetic peptide
  Seed: GMDPRMCSLMQGSTLPRRSGAAGA
GMDPRMISLLQSSTIPRRSGAAGA

SEQ ID NO: 87850 - protein, 24 aa, Artificial Sequence
  Description of Artificial Sequence: Synthetic peptide
  Seed: GMDPRMCSLMQGSTLPRRSGAAGA
GMDPRMISLLQSSTLPRRSGAAGA

SEQ ID NO: 87851 - protein, 24 aa, Artificial Sequence
  Description of Artificial Sequence: Synthetic peptide
  Seed: GMDPRMCSLMQGSTLPRRSGAAGA
GMDPRMISLLQSSTMPRRSGAAGA

SEQ ID NO: 87852 - protein, 24 aa, Artificial Sequence
  Description of Artificial Sequence: Synthetic peptide
  Seed: GMDPRMCSLMQGSTLPRRSGAAGA
GMDPRMISLLQSSTNPRRSGAAGA

SEQ ID NO: 87853 - protein, 24 aa, Artificial Sequence
  Description of Artificial Sequence: Synthetic peptide
  Seed: GMDPRMCSLMQGSTLPRRSGAAGA
GMDPRMISLLQSSTSPRRSGAAGA

SEQ ID NO: 87854 - protein, 24 aa, Artificial Sequence
  Description of Artificial Sequence: Synthetic peptide
  Seed: GMDPRMCSLMQGSTLPRRSGAAGA
GMDPRMISLLQSSTTPRRSGAAGA

SEQ ID NO: 87855 - protein, 24 aa, Artificial Sequence
  Description of Artificial Sequence: Synthetic peptide
  Seed: GMDPRMCSLMQGSTLPRRSGAAGA
GMDPRMISLLQSSTVPRRSGAAGA

SEQ ID NO: 87856 - protein, 24 aa, Artificial Sequence
  Description of Artificial Sequence: Synthetic peptide
  Seed: GMDPRMCSLMQGSTLPRRSGAAGA
GMDPRMISLLQTSTAPRRSGAAGA

SEQ ID NO: 87857 - protein, 24 aa, Artificial Sequence
  Description of Artificial Sequence: Synthetic peptide
  Seed: GMDPRMCSLMQGSTLPRRSGAAGA
GMDPRMISLLQTSTIPRRSGAAGA

SEQ ID NO: 87858 - protein, 24 aa, Artificial Sequence
  Description of Artificial Sequence: Synthetic peptide
  Seed: GMDPRMCSLMQGSTLPRRSGAAGA
GMDPRMISLLQTSTLPRRSGAAGA

SEQ ID NO: 87859 - protein, 24 aa, Artificial Sequence
  Description of Artificial Sequence: Synthetic peptide
  Seed: GMDPRMCSLMQGSTLPRRSGAAGA
GMDPRMISLLQTSTNPRRSGAAGA

SEQ ID NO: 87860 - protein, 24 aa, Artificial Sequence
  Description of Artificial Sequence: Synthetic peptide
  Seed: GMDPRMCSLMQGSTLPRRSGAAGA
GMDPRMISLLQTSTSPRRSGAAGA

SEQ ID NO: 87861 - protein, 24 aa, Artificial Sequence
  Description of Artificial Sequence: Synthetic peptide
  Seed: GMDPRMCSLMQGSTLPRRSGAAGA
GMDPRMISLLQTSTVPRRSGAAGA

SEQ ID NO: 87862 - protein, 24 aa, Artificial Sequence
  Description of Artificial Sequence: Synthetic peptide
  Seed: GMDPRMCSLMQGSTLPRRSGAAGA
GMDPRMISLLQVSTAPRRSGAAGA

SEQ ID NO: 87863 - protein, 24 aa, Artificial Sequence
  Description of Artificial Sequence: Synthetic peptide
  Seed: GMDPRMCSLMQGSTLPRRSGAAGA
GMDPRMISLLQVSTNPRRSGAAGA

SEQ ID NO: 87864 - protein, 24 aa, Artificial Sequence
  Description of Artificial Sequence: Synthetic peptide
  Seed: GMDPRMCSLMQGSTLPRRSGAAGA
GMDPRMISLLQVSTSPRRSGAAGA

SEQ ID NO: 87865 - protein, 24 aa, Artificial Sequence
  Description of Artificial Sequence: Synthetic peptide
  Seed: GMDPRMCSLMQGSTLPRRSGAAGA
GMDPRMISLMQASTAPRRSGAAGA

SEQ ID NO: 87866 - protein, 24 aa, Artificial Sequence
  Description of Artificial Sequence: Synthetic peptide
  Seed: GMDPRMCSLMQGSTLPRRSGAAGA
GMDPRMISLMQASTGPRRSGAAGA

SEQ ID NO: 87867 - protein, 24 aa, Artificial Sequence
  Description of Artificial Sequence: Synthetic peptide
  Seed: GMDPRMCSLMQGSTLPRRSGAAGA
GMDPRMISLMQASTIPRRSGAAGA

SEQ ID NO: 87868 - protein, 24 aa, Artificial Sequence
  Description of Artificial Sequence: Synthetic peptide
  Seed: GMDPRMCSLMQGSTLPRRSGAAGA
GMDPRMISLMQASTLPRRSGAAGA

SEQ ID NO: 87869 - protein, 24 aa, Artificial Sequence
  Description of Artificial Sequence: Synthetic peptide
  Seed: GMDPRMCSLMQGSTLPRRSGAAGA
GMDPRMISLMQASTMPRRSGAAGA

SEQ ID NO: 87870 - protein, 24 aa, Artificial Sequence
  Description of Artificial Sequence: Synthetic peptide
  Seed: GMDPRMCSLMQGSTLPRRSGAAGA
GMDPRMISLMQASTNPRRSGAAGA

SEQ ID NO: 87871 - protein, 24 aa, Artificial Sequence
  Description of Artificial Sequence: Synthetic peptide
  Seed: GMDPRMCSLMQGSTLPRRSGAAGA
GMDPRMISLMQASTSPRRSGAAGA

SEQ ID NO: 87872 - protein, 24 aa, Artificial Sequence
  Description of Artificial Sequence: Synthetic peptide
  Seed: GMDPRMCSLMQGSTLPRRSGAAGA
GMDPRMISLMQASTTPRRSGAAGA

SEQ ID NO: 87873 - protein, 24 aa, Artificial Sequence
  Description of Artificial Sequence: Synthetic peptide
  Seed: GMDPRMCSLMQGSTLPRRSGAAGA
GMDPRMISLMQASTVPRRSGAAGA

SEQ ID NO: 87874 - protein, 24 aa, Artificial Sequence
  Description of Artificial Sequence: Synthetic peptide
  Seed: GMDPRMCSLMQGSTLPRRSGAAGA
GMDPRMISLMQGSTAPRRSGAAGA

SEQ ID NO: 87875 - protein, 24 aa, Artificial Sequence
  Description of Artificial Sequence: Synthetic peptide
  Seed: GMDPRMCSLMQGSTLPRRSGAAGA
GMDPRMISLMQGSTIPRRSGAAGA

SEQ ID NO: 87876 - protein, 24 aa, Artificial Sequence
  Description of Artificial Sequence: Synthetic peptide
  Seed: GMDPRMCSLMQGSTLPRRSGAAGA
GMDPRMISLMQGSTLPRRSGAAGA

SEQ ID NO: 87877 - protein, 24 aa, Artificial Sequence
  Description of Artificial Sequence: Synthetic peptide
  Seed: GMDPRMCSLMQGSTLPRRSGAAGA
GMDPRMISLMQGSTMPRRSGAAGA

SEQ ID NO: 87878 - protein, 24 aa, Artificial Sequence
  Description of Artificial Sequence: Synthetic peptide
  Seed: GMDPRMCSLMQGSTLPRRSGAAGA
GMDPRMISLMQGSTSPRRSGAAGA

SEQ ID NO: 87879 - protein, 24 aa, Artificial Sequence
  Description of Artificial Sequence: Synthetic peptide
  Seed: GMDPRMCSLMQGSTLPRRSGAAGA
GMDPRMISLMQGSTTPRRSGAAGA

SEQ ID NO: 87880 - protein, 24 aa, Artificial Sequence
  Description of Artificial Sequence: Synthetic peptide
  Seed: GMDPRMCSLMQGSTLPRRSGAAGA
GMDPRMISLMQGSTVPRRSGAAGA

SEQ ID NO: 87881 - protein, 24 aa, Artificial Sequence
  Description of Artificial Sequence: Synthetic peptide
  Seed: GMDPRMCSLMQGSTLPRRSGAAGA
GMDPRMISLMQISTAPRRSGAAGA

SEQ ID NO: 87882 - protein, 24 aa, Artificial Sequence
  Description of Artificial Sequence: Synthetic peptide
  Seed: GMDPRMCSLMQGSTLPRRSGAAGA
GMDPRMISLMQISTNPRRSGAAGA

SEQ ID NO: 87883 - protein, 24 aa, Artificial Sequence
  Description of Artificial Sequence: Synthetic peptide
  Seed: GMDPRMCSLMQGSTLPRRSGAAGA
GMDPRMISLMQISTSPRRSGAAGA

SEQ ID NO: 87884 - protein, 24 aa, Artificial Sequence
  Description of Artificial Sequence: Synthetic peptide
  Seed: GMDPRMCSLMQGSTLPRRSGAAGA
GMDPRMISLMQNSTAPRRSGAAGA

SEQ ID NO: 87885 - protein, 24 aa, Artificial Sequence
  Description of Artificial Sequence: Synthetic peptide
  Seed: GMDPRMCSLMQGSTLPRRSGAAGA
GMDPRMISLMQNSTIPRRSGAAGA

SEQ ID NO: 87886 - protein, 24 aa, Artificial Sequence
  Description of Artificial Sequence: Synthetic peptide
  Seed: GMDPRMCSLMQGSTLPRRSGAAGA
GMDPRMISLMQNSTLPRRSGAAGA

SEQ ID NO: 87887 - protein, 24 aa, Artificial Sequence
  Description of Artificial Sequence: Synthetic peptide
  Seed: GMDPRMCSLMQGSTLPRRSGAAGA
GMDPRMISLMQNSTVPRRSGAAGA

SEQ ID NO: 87888 - protein, 24 aa, Artificial Sequence
  Description of Artificial Sequence: Synthetic peptide
  Seed: GMDPRMCSLMQGSTLPRRSGAAGA
GMDPRMISLMQPSTAPRRSGAAGA

SEQ ID NO: 87889 - protein, 24 aa, Artificial Sequence
  Description of Artificial Sequence: Synthetic peptide
  Seed: GMDPRMCSLMQGSTLPRRSGAAGA
GMDPRMISLMQPSTIPRRSGAAGA

SEQ ID NO: 87890 - protein, 24 aa, Artificial Sequence
  Description of Artificial Sequence: Synthetic peptide
  Seed: GMDPRMCSLMQGSTLPRRSGAAGA
GMDPRMISLMQPSTLPRRSGAAGA

SEQ ID NO: 87891 - protein, 24 aa, Artificial Sequence
  Description of Artificial Sequence: Synthetic peptide
  Seed: GMDPRMCSLMQGSTLPRRSGAAGA
GMDPRMISLMQPSTMPRRSGAAGA

SEQ ID NO: 87892 - protein, 24 aa, Artificial Sequence
  Description of Artificial Sequence: Synthetic peptide
  Seed: GMDPRMCSLMQGSTLPRRSGAAGA
GMDPRMISLMQPSTNPRRSGAAGA

SEQ ID NO: 87893 - protein, 24 aa, Artificial Sequence
  Description of Artificial Sequence: Synthetic peptide
  Seed: GMDPRMCSLMQGSTLPRRSGAAGA
GMDPRMISLMQPSTSPRRSGAAGA

SEQ ID NO: 87894 - protein, 24 aa, Artificial Sequence
  Description of Artificial Sequence: Synthetic peptide
  Seed: GMDPRMCSLMQGSTLPRRSGAAGA
GMDPRMISLMQPSTTPRRSGAAGA

SEQ ID NO: 87895 - protein, 24 aa, Artificial Sequence
  Description of Artificial Sequence: Synthetic peptide
  Seed: GMDPRMCSLMQGSTLPRRSGAAGA
GMDPRMISLMQPSTVPRRSGAAGA

SEQ ID NO: 87896 - protein, 24 aa, Artificial Sequence
  Description of Artificial Sequence: Synthetic peptide
  Seed: GMDPRMCSLMQGSTLPRRSGAAGA
GMDPRMISLMQSSTAPRRSGAAGA

SEQ ID NO: 87897 - protein, 24 aa, Artificial Sequence
  Description of Artificial Sequence: Synthetic peptide
  Seed: GMDPRMCSLMQGSTLPRRSGAAGA
GMDPRMISLMQSSTIPRRSGAAGA

SEQ ID NO: 87898 - protein, 24 aa, Artificial Sequence
  Description of Artificial Sequence: Synthetic peptide
  Seed: GMDPRMCSLMQGSTLPRRSGAAGA
GMDPRMISLMQSSTLPRRSGAAGA

SEQ ID NO: 87899 - protein, 24 aa, Artificial Sequence
  Description of Artificial Sequence: Synthetic peptide
  Seed: GMDPRMCSLMQGSTLPRRSGAAGA
GMDPRMISLMQSSTMPRRSGAAGA

SEQ ID NO: 87900 - protein, 24 aa, Artificial Sequence
  Description of Artificial Sequence: Synthetic peptide
  Seed: GMDPRMCSLMQGSTLPRRSGAAGA
GMDPRMISLMQSSTNPRRSGAAGA

SEQ ID NO: 87901 - protein, 24 aa, Artificial Sequence
  Description of Artificial Sequence: Synthetic peptide
  Seed: GMDPRMCSLMQGSTLPRRSGAAGA
GMDPRMISLMQSSTSPRRSGAAGA

SEQ ID NO: 87902 - protein, 24 aa, Artificial Sequence
  Description of Artificial Sequence: Synthetic peptide
  Seed: GMDPRMCSLMQGSTLPRRSGAAGA
GMDPRMISLMQSSTTPRRSGAAGA

SEQ ID NO: 87903 - protein, 24 aa, Artificial Sequence
  Description of Artificial Sequence: Synthetic peptide
  Seed: GMDPRMCSLMQGSTLPRRSGAAGA
GMDPRMISLMQSSTVPRRSGAAGA

SEQ ID NO: 87904 - protein, 24 aa, Artificial Sequence
  Description of Artificial Sequence: Synthetic peptide
  Seed: GMDPRMCSLMQGSTLPRRSGAAGA
GMDPRMISLMQTSTAPRRSGAAGA

SEQ ID NO: 87905 - protein, 24 aa, Artificial Sequence
  Description of Artificial Sequence: Synthetic peptide
  Seed: GMDPRMCSLMQGSTLPRRSGAAGA
GMDPRMISLMQTSTIPRRSGAAGA

SEQ ID NO: 87906 - protein, 24 aa, Artificial Sequence
  Description of Artificial Sequence: Synthetic peptide
  Seed: GMDPRMCSLMQGSTLPRRSGAAGA
GMDPRMISLMQTSTLPRRSGAAGA

SEQ ID NO: 87907 - protein, 24 aa, Artificial Sequence
  Description of Artificial Sequence: Synthetic peptide
  Seed: GMDPRMCSLMQGSTLPRRSGAAGA
GMDPRMISLMQTSTNPRRSGAAGA

SEQ ID NO: 87908 - protein, 24 aa, Artificial Sequence
  Description of Artificial Sequence: Synthetic peptide
  Seed: GMDPRMCSLMQGSTLPRRSGAAGA
GMDPRMISLMQTSTSPRRSGAAGA

SEQ ID NO: 87909 - protein, 24 aa, Artificial Sequence
  Description of Artificial Sequence: Synthetic peptide
  Seed: GMDPRMCSLMQGSTLPRRSGAAGA
GMDPRMISLMQTSTVPRRSGAAGA

SEQ ID NO: 87910 - protein, 24 aa, Artificial Sequence
  Description of Artificial Sequence: Synthetic peptide
  Seed: GMDPRMCSLMQGSTLPRRSGAAGA
GMDPRMISLMQVSTAPRRSGAAGA

SEQ ID NO: 87911 - protein, 24 aa, Artificial Sequence
  Description of Artificial Sequence: Synthetic peptide
  Seed: GMDPRMCSLMQGSTLPRRSGAAGA
GMDPRMISLMQVSTNPRRSGAAGA

SEQ ID NO: 87912 - protein, 24 aa, Artificial Sequence
  Description of Artificial Sequence: Synthetic peptide
  Seed: GMDPRMCSLMQGSTLPRRSGAAGA
GMDPRMISLMQVSTSPRRSGAAGA

SEQ ID NO: 87913 - protein, 24 aa, Artificial Sequence
  Description of Artificial Sequence: Synthetic peptide
  Seed: GMDPRMCSLMQGSTLPRRSGAAGA
GMDPRMISLQQASTAPRRSGAAGA

SEQ ID NO: 87914 - protein, 24 aa, Artificial Sequence
  Description of Artificial Sequence: Synthetic peptide
  Seed: GMDPRMCSLMQGSTLPRRSGAAGA
GMDPRMISLQQASTIPRRSGAAGA

SEQ ID NO: 87915 - protein, 24 aa, Artificial Sequence
  Description of Artificial Sequence: Synthetic peptide
  Seed: GMDPRMCSLMQGSTLPRRSGAAGA
GMDPRMISLQQASTLPRRSGAAGA

SEQ ID NO: 87916 - protein, 24 aa, Artificial Sequence
  Description of Artificial Sequence: Synthetic peptide
  Seed: GMDPRMCSLMQGSTLPRRSGAAGA
GMDPRMISLQQASTVPRRSGAAGA

SEQ ID NO: 87917 - protein, 24 aa, Artificial Sequence
  Description of Artificial Sequence: Synthetic peptide
  Seed: GMDPRMCSLMQGSTLPRRSGAAGA
GMDPRMISLQQGSTLPRRSGAAGA

SEQ ID NO: 87918 - protein, 24 aa, Artificial Sequence
  Description of Artificial Sequence: Synthetic peptide
  Seed: GMDPRMCSLMQGSTLPRRSGAAGA
GMDPRMISLQQGSTVPRRSGAAGA

SEQ ID NO: 87919 - protein, 24 aa, Artificial Sequence
  Description of Artificial Sequence: Synthetic peptide
  Seed: GMDPRMCSLMQGSTLPRRSGAAGA
GMDPRMISLVQASTIPRRSGAAGA

SEQ ID NO: 87920 - protein, 24 aa, Artificial Sequence
  Description of Artificial Sequence: Synthetic peptide
  Seed: GMDPRMCSLMQGSTLPRRSGAAGA
GMDPRMISLVQASTLPRRSGAAGA

SEQ ID NO: 87921 - protein, 24 aa, Artificial Sequence
  Description of Artificial Sequence: Synthetic peptide
  Seed: GMDPRMCSLMQGSTLPRRSGAAGA
GMDPRMISLVQASTVPRRSGAAGA

SEQ ID NO: 87922 - protein, 24 aa, Artificial Sequence
  Description of Artificial Sequence: Synthetic peptide
  Seed: GMDPRMCSLMQGSTLPRRSGAAGA
GMDPRMISLVQGSTVPRRSGAAGA

SEQ ID NO: 87923 - protein, 24 aa, Artificial Sequence
  Description of Artificial Sequence: Synthetic peptide
  Seed: GMDPRMCSLMQGSTLPRRSGAAGA
GMDPRMLSLAQASTIPRRSGAAGA

SEQ ID NO: 87924 - protein, 24 aa, Artificial Sequence
  Description of Artificial Sequence: Synthetic peptide
  Seed: GMDPRMCSLMQGSTLPRRSGAAGA
GMDPRMLSLAQASTLPRRSGAAGA

SEQ ID NO: 87925 - protein, 24 aa, Artificial Sequence
  Description of Artificial Sequence: Synthetic peptide
  Seed: GMDPRMCSLMQGSTLPRRSGAAGA
GMDPRMLSLAQASTVPRRSGAAGA

SEQ ID NO: 87926 - protein, 24 aa, Artificial Sequence
  Description of Artificial Sequence: Synthetic peptide
  Seed: GMDPRMCSLMQGSTLPRRSGAAGA
GMDPRMLSLIQASTAPRRSGAAGA

SEQ ID NO: 87927 - protein, 24 aa, Artificial Sequence
  Description of Artificial Sequence: Synthetic peptide
  Seed: GMDPRMCSLMQGSTLPRRSGAAGA
GMDPRMLSLIQASTIPRRSGAAGA

SEQ ID NO: 87928 - protein, 24 aa, Artificial Sequence
  Description of Artificial Sequence: Synthetic peptide
  Seed: GMDPRMCSLMQGSTLPRRSGAAGA
GMDPRMLSLIQASTLPRRSGAAGA

SEQ ID NO: 87929 - protein, 24 aa, Artificial Sequence
  Description of Artificial Sequence: Synthetic peptide
  Seed: GMDPRMCSLMQGSTLPRRSGAAGA
GMDPRMLSLIQASTNPRRSGAAGA

SEQ ID NO: 87930 - protein, 24 aa, Artificial Sequence
  Description of Artificial Sequence: Synthetic peptide
  Seed: GMDPRMCSLMQGSTLPRRSGAAGA
GMDPRMLSLIQASTSPRRSGAAGA

SEQ ID NO: 87931 - protein, 24 aa, Artificial Sequence
  Description of Artificial Sequence: Synthetic peptide
  Seed: GMDPRMCSLMQGSTLPRRSGAAGA
GMDPRMLSLIQASTVPRRSGAAGA

SEQ ID NO: 87932 - protein, 24 aa, Artificial Sequence
  Description of Artificial Sequence: Synthetic peptide
  Seed: GMDPRMCSLMQGSTLPRRSGAAGA
GMDPRMLSLIQGSTAPRRSGAAGA

SEQ ID NO: 87933 - protein, 24 aa, Artificial Sequence
  Description of Artificial Sequence: Synthetic peptide
  Seed: GMDPRMCSLMQGSTLPRRSGAAGA
GMDPRMLSLIQGSTIPRRSGAAGA

SEQ ID NO: 87934 - protein, 24 aa, Artificial Sequence
  Description of Artificial Sequence: Synthetic peptide
  Seed: GMDPRMCSLMQGSTLPRRSGAAGA
GMDPRMLSLIQGSTLPRRSGAAGA

SEQ ID NO: 87935 - protein, 24 aa, Artificial Sequence
  Description of Artificial Sequence: Synthetic peptide
  Seed: GMDPRMCSLMQGSTLPRRSGAAGA
GMDPRMLSLIQGSTVPRRSGAAGA

SEQ ID NO: 87936 - protein, 24 aa, Artificial Sequence
  Description of Artificial Sequence: Synthetic peptide
  Seed: GMDPRMCSLMQGSTLPRRSGAAGA
GMDPRMLSLLQASTAPRRSGAAGA

SEQ ID NO: 87937 - protein, 24 aa, Artificial Sequence
  Description of Artificial Sequence: Synthetic peptide
  Seed: GMDPRMCSLMQGSTLPRRSGAAGA
GMDPRMLSLLQASTIPRRSGAAGA

SEQ ID NO: 87938 - protein, 24 aa, Artificial Sequence
  Description of Artificial Sequence: Synthetic peptide
  Seed: GMDPRMCSLMQGSTLPRRSGAAGA
GMDPRMLSLLQASTLPRRSGAAGA

SEQ ID NO: 87939 - protein, 24 aa, Artificial Sequence
  Description of Artificial Sequence: Synthetic peptide
  Seed: GMDPRMCSLMQGSTLPRRSGAAGA
GMDPRMLSLLQASTMPRRSGAAGA

SEQ ID NO: 87940 - protein, 24 aa, Artificial Sequence
  Description of Artificial Sequence: Synthetic peptide
  Seed: GMDPRMCSLMQGSTLPRRSGAAGA
GMDPRMLSLLQASTNPRRSGAAGA

SEQ ID NO: 87941 - protein, 24 aa, Artificial Sequence
  Description of Artificial Sequence: Synthetic peptide
  Seed: GMDPRMCSLMQGSTLPRRSGAAGA
GMDPRMLSLLQASTSPRRSGAAGA

SEQ ID NO: 87942 - protein, 24 aa, Artificial Sequence
  Description of Artificial Sequence: Synthetic peptide
  Seed: GMDPRMCSLMQGSTLPRRSGAAGA
GMDPRMLSLLQASTTPRRSGAAGA

SEQ ID NO: 87943 - protein, 24 aa, Artificial Sequence
  Description of Artificial Sequence: Synthetic peptide
  Seed: GMDPRMCSLMQGSTLPRRSGAAGA
GMDPRMLSLLQASTVPRRSGAAGA

SEQ ID NO: 87944 - protein, 24 aa, Artificial Sequence
  Description of Artificial Sequence: Synthetic peptide
  Seed: GMDPRMCSLMQGSTLPRRSGAAGA
GMDPRMLSLLQGSTAPRRSGAAGA

SEQ ID NO: 87945 - protein, 24 aa, Artificial Sequence
  Description of Artificial Sequence: Synthetic peptide
  Seed: GMDPRMCSLMQGSTLPRRSGAAGA
GMDPRMLSLLQGSTIPRRSGAAGA

SEQ ID NO: 87946 - protein, 24 aa, Artificial Sequence
  Description of Artificial Sequence: Synthetic peptide
  Seed: GMDPRMCSLMQGSTLPRRSGAAGA
GMDPRMLSLLQGSTLPRRSGAAGA

SEQ ID NO: 87947 - protein, 24 aa, Artificial Sequence
  Description of Artificial Sequence: Synthetic peptide
  Seed: GMDPRMCSLMQGSTLPRRSGAAGA
GMDPRMLSLLQGSTMPRRSGAAGA

SEQ ID NO: 87948 - protein, 24 aa, Artificial Sequence
  Description of Artificial Sequence: Synthetic peptide
  Seed: GMDPRMCSLMQGSTLPRRSGAAGA
GMDPRMLSLLQGSTSPRRSGAAGA

SEQ ID NO: 87949 - protein, 24 aa, Artificial Sequence
  Description of Artificial Sequence: Synthetic peptide
  Seed: GMDPRMCSLMQGSTLPRRSGAAGA
GMDPRMLSLLQGSTTPRRSGAAGA

SEQ ID NO: 87950 - protein, 24 aa, Artificial Sequence
  Description of Artificial Sequence: Synthetic peptide
  Seed: GMDPRMCSLMQGSTLPRRSGAAGA
GMDPRMLSLLQGSTVPRRSGAAGA

SEQ ID NO: 87951 - protein, 24 aa, Artificial Sequence
  Description of Artificial Sequence: Synthetic peptide
  Seed: GMDPRMCSLMQGSTLPRRSGAAGA
GMDPRMLSLLQNSTVPRRSGAAGA

SEQ ID NO: 87952 - protein, 24 aa, Artificial Sequence
  Description of Artificial Sequence: Synthetic peptide
  Seed: GMDPRMCSLMQGSTLPRRSGAAGA
GMDPRMLSLLQPSTAPRRSGAAGA

SEQ ID NO: 87953 - protein, 24 aa, Artificial Sequence
  Description of Artificial Sequence: Synthetic peptide
  Seed: GMDPRMCSLMQGSTLPRRSGAAGA
GMDPRMLSLLQPSTIPRRSGAAGA

SEQ ID NO: 87954 - protein, 24 aa, Artificial Sequence
  Description of Artificial Sequence: Synthetic peptide
  Seed: GMDPRMCSLMQGSTLPRRSGAAGA
GMDPRMLSLLQPSTLPRRSGAAGA

SEQ ID NO: 87955 - protein, 24 aa, Artificial Sequence
  Description of Artificial Sequence: Synthetic peptide
  Seed: GMDPRMCSLMQGSTLPRRSGAAGA
GMDPRMLSLLQPSTNPRRSGAAGA

SEQ ID NO: 87956 - protein, 24 aa, Artificial Sequence
  Description of Artificial Sequence: Synthetic peptide
  Seed: GMDPRMCSLMQGSTLPRRSGAAGA
GMDPRMLSLLQPSTSPRRSGAAGA

SEQ ID NO: 87957 - protein, 24 aa, Artificial Sequence
  Description of Artificial Sequence: Synthetic peptide
  Seed: GMDPRMCSLMQGSTLPRRSGAAGA
GMDPRMLSLLQPSTVPRRSGAAGA

SEQ ID NO: 87958 - protein, 24 aa, Artificial Sequence
  Description of Artificial Sequence: Synthetic peptide
  Seed: GMDPRMCSLMQGSTLPRRSGAAGA
GMDPRMLSLLQSSTAPRRSGAAGA

SEQ ID NO: 87959 - protein, 24 aa, Artificial Sequence
  Description of Artificial Sequence: Synthetic peptide
  Seed: GMDPRMCSLMQGSTLPRRSGAAGA
GMDPRMLSLLQSSTIPRRSGAAGA

SEQ ID NO: 87960 - protein, 24 aa, Artificial Sequence
  Description of Artificial Sequence: Synthetic peptide
  Seed: GMDPRMCSLMQGSTLPRRSGAAGA
GMDPRMLSLLQSSTLPRRSGAAGA

SEQ ID NO: 87961 - protein, 24 aa, Artificial Sequence
  Description of Artificial Sequence: Synthetic peptide
  Seed: GMDPRMCSLMQGSTLPRRSGAAGA
GMDPRMLSLLQSSTNPRRSGAAGA

SEQ ID NO: 87962 - protein, 24 aa, Artificial Sequence
  Description of Artificial Sequence: Synthetic peptide
  Seed: GMDPRMCSLMQGSTLPRRSGAAGA
GMDPRMLSLLQSSTSPRRSGAAGA

SEQ ID NO: 87963 - protein, 24 aa, Artificial Sequence
  Description of Artificial Sequence: Synthetic peptide
  Seed: GMDPRMCSLMQGSTLPRRSGAAGA
GMDPRMLSLLQSSTTPRRSGAAGA

SEQ ID NO: 87964 - protein, 24 aa, Artificial Sequence
  Description of Artificial Sequence: Synthetic peptide
  Seed: GMDPRMCSLMQGSTLPRRSGAAGA
GMDPRMLSLLQSSTVPRRSGAAGA

SEQ ID NO: 87965 - protein, 24 aa, Artificial Sequence
  Description of Artificial Sequence: Synthetic peptide
  Seed: GMDPRMCSLMQGSTLPRRSGAAGA
GMDPRMLSLLQTSTAPRRSGAAGA

SEQ ID NO: 87966 - protein, 24 aa, Artificial Sequence
  Description of Artificial Sequence: Synthetic peptide
  Seed: GMDPRMCSLMQGSTLPRRSGAAGA
GMDPRMLSLLQTSTNPRRSGAAGA

SEQ ID NO: 87967 - protein, 24 aa, Artificial Sequence
  Description of Artificial Sequence: Synthetic peptide
  Seed: GMDPRMCSLMQGSTLPRRSGAAGA
GMDPRMLSLLQTSTSPRRSGAAGA

SEQ ID NO: 87968 - protein, 24 aa, Artificial Sequence
  Description of Artificial Sequence: Synthetic peptide
  Seed: GMDPRMCSLMQGSTLPRRSGAAGA
GMDPRMLSLLQTSTVPRRSGAAGA

SEQ ID NO: 87969 - protein, 24 aa, Artificial Sequence
  Description of Artificial Sequence: Synthetic peptide
  Seed: GMDPRMCSLMQGSTLPRRSGAAGA
GMDPRMLSLLQVSTAPRRSGAAGA

SEQ ID NO: 87970 - protein, 24 aa, Artificial Sequence
  Description of Artificial Sequence: Synthetic peptide
  Seed: GMDPRMCSLMQGSTLPRRSGAAGA
GMDPRMLSLLQVSTNPRRSGAAGA

SEQ ID NO: 87971 - protein, 24 aa, Artificial Sequence
  Description of Artificial Sequence: Synthetic peptide
  Seed: GMDPRMCSLMQGSTLPRRSGAAGA
GMDPRMLSLLQVSTSPRRSGAAGA

SEQ ID NO: 87972 - protein, 24 aa, Artificial Sequence
  Description of Artificial Sequence: Synthetic peptide
  Seed: GMDPRMCSLMQGSTLPRRSGAAGA
GMDPRMLSLMQASTAPRRSGAAGA

SEQ ID NO: 87973 - protein, 24 aa, Artificial Sequence
  Description of Artificial Sequence: Synthetic peptide
  Seed: GMDPRMCSLMQGSTLPRRSGAAGA
GMDPRMLSLMQASTIPRRSGAAGA

SEQ ID NO: 87974 - protein, 24 aa, Artificial Sequence
  Description of Artificial Sequence: Synthetic peptide
  Seed: GMDPRMCSLMQGSTLPRRSGAAGA
GMDPRMLSLMQASTLPRRSGAAGA

SEQ ID NO: 87975 - protein, 24 aa, Artificial Sequence
  Description of Artificial Sequence: Synthetic peptide
  Seed: GMDPRMCSLMQGSTLPRRSGAAGA
GMDPRMLSLMQASTMPRRSGAAGA

SEQ ID NO: 87976 - protein, 24 aa, Artificial Sequence
  Description of Artificial Sequence: Synthetic peptide
  Seed: GMDPRMCSLMQGSTLPRRSGAAGA
GMDPRMLSLMQASTNPRRSGAAGA

SEQ ID NO: 87977 - protein, 24 aa, Artificial Sequence
  Description of Artificial Sequence: Synthetic peptide
  Seed: GMDPRMCSLMQGSTLPRRSGAAGA
GMDPRMLSLMQASTSPRRSGAAGA

SEQ ID NO: 87978 - protein, 24 aa, Artificial Sequence
  Description of Artificial Sequence: Synthetic peptide
  Seed: GMDPRMCSLMQGSTLPRRSGAAGA
GMDPRMLSLMQASTTPRRSGAAGA

SEQ ID NO: 87979 - protein, 24 aa, Artificial Sequence
  Description of Artificial Sequence: Synthetic peptide
  Seed: GMDPRMCSLMQGSTLPRRSGAAGA
GMDPRMLSLMQASTVPRRSGAAGA

SEQ ID NO: 87980 - protein, 24 aa, Artificial Sequence
  Description of Artificial Sequence: Synthetic peptide
  Seed: GMDPRMCSLMQGSTLPRRSGAAGA
GMDPRMLSLMQGSTAPRRSGAAGA

SEQ ID NO: 87981 - protein, 24 aa, Artificial Sequence
  Description of Artificial Sequence: Synthetic peptide
  Seed: GMDPRMCSLMQGSTLPRRSGAAGA
GMDPRMLSLMQGSTIPRRSGAAGA

SEQ ID NO: 87982 - protein, 24 aa, Artificial Sequence
  Description of Artificial Sequence: Synthetic peptide
  Seed: GMDPRMCSLMQGSTLPRRSGAAGA
GMDPRMLSLMQGSTLPRRSGAAGA

SEQ ID NO: 87983 - protein, 24 aa, Artificial Sequence
  Description of Artificial Sequence: Synthetic peptide
  Seed: GMDPRMCSLMQGSTLPRRSGAAGA
GMDPRMLSLMQGSTMPRRSGAAGA

SEQ ID NO: 87984 - protein, 24 aa, Artificial Sequence
  Description of Artificial Sequence: Synthetic peptide
  Seed: GMDPRMCSLMQGSTLPRRSGAAGA
GMDPRMLSLMQGSTSPRRSGAAGA

SEQ ID NO: 87985 - protein, 24 aa, Artificial Sequence
  Description of Artificial Sequence: Synthetic peptide
  Seed: GMDPRMCSLMQGSTLPRRSGAAGA
GMDPRMLSLMQGSTTPRRSGAAGA

SEQ ID NO: 87986 - protein, 24 aa, Artificial Sequence
  Description of Artificial Sequence: Synthetic peptide
  Seed: GMDPRMCSLMQGSTLPRRSGAAGA
GMDPRMLSLMQGSTVPRRSGAAGA

SEQ ID NO: 87987 - protein, 24 aa, Artificial Sequence
  Description of Artificial Sequence: Synthetic peptide
  Seed: GMDPRMCSLMQGSTLPRRSGAAGA
GMDPRMLSLMQISTAPRRSGAAGA

SEQ ID NO: 87988 - protein, 24 aa, Artificial Sequence
  Description of Artificial Sequence: Synthetic peptide
  Seed: GMDPRMCSLMQGSTLPRRSGAAGA
GMDPRMLSLMQISTSPRRSGAAGA

SEQ ID NO: 87989 - protein, 24 aa, Artificial Sequence
  Description of Artificial Sequence: Synthetic peptide
  Seed: GMDPRMCSLMQGSTLPRRSGAAGA
GMDPRMLSLMQNSTLPRRSGAAGA

SEQ ID NO: 87990 - protein, 24 aa, Artificial Sequence
  Description of Artificial Sequence: Synthetic peptide
  Seed: GMDPRMCSLMQGSTLPRRSGAAGA
GMDPRMLSLMQNSTVPRRSGAAGA

SEQ ID NO: 87991 - protein, 24 aa, Artificial Sequence
  Description of Artificial Sequence: Synthetic peptide
  Seed: GMDPRMCSLMQGSTLPRRSGAAGA
GMDPRMLSLMQPSTAPRRSGAAGA

SEQ ID NO: 87992 - protein, 24 aa, Artificial Sequence
  Description of Artificial Sequence: Synthetic peptide
  Seed: GMDPRMCSLMQGSTLPRRSGAAGA
GMDPRMLSLMQPSTIPRRSGAAGA

SEQ ID NO: 87993 - protein, 24 aa, Artificial Sequence
  Description of Artificial Sequence: Synthetic peptide
  Seed: GMDPRMCSLMQGSTLPRRSGAAGA
GMDPRMLSLMQPSTLPRRSGAAGA

SEQ ID NO: 87994 - protein, 24 aa, Artificial Sequence
  Description of Artificial Sequence: Synthetic peptide
  Seed: GMDPRMCSLMQGSTLPRRSGAAGA
GMDPRMLSLMQPSTNPRRSGAAGA

SEQ ID NO: 87995 - protein, 24 aa, Artificial Sequence
  Description of Artificial Sequence: Synthetic peptide
  Seed: GMDPRMCSLMQGSTLPRRSGAAGA
GMDPRMLSLMQPSTSPRRSGAAGA

SEQ ID NO: 87996 - protein, 24 aa, Artificial Sequence
  Description of Artificial Sequence: Synthetic peptide
  Seed: GMDPRMCSLMQGSTLPRRSGAAGA
GMDPRMLSLMQPSTVPRRSGAAGA

SEQ ID NO: 87997 - protein, 24 aa, Artificial Sequence
  Description of Artificial Sequence: Synthetic peptide
  Seed: GMDPRMCSLMQGSTLPRRSGAAGA
GMDPRMLSLMQSSTAPRRSGAAGA

SEQ ID NO: 87998 - protein, 24 aa, Artificial Sequence
  Description of Artificial Sequence: Synthetic peptide
  Seed: GMDPRMCSLMQGSTLPRRSGAAGA
GMDPRMLSLMQSSTIPRRSGAAGA

SEQ ID NO: 87999 - protein, 24 aa, Artificial Sequence
  Description of Artificial Sequence: Synthetic peptide
  Seed: GMDPRMCSLMQGSTLPRRSGAAGA
GMDPRMLSLMQSSTLPRRSGAAGA

SEQ ID NO: 88000 - protein, 24 aa, Artificial Sequence
  Description of Artificial Sequence: Synthetic peptide
  Seed: GMDPRMCSLMQGSTLPRRSGAAGA
GMDPRMLSLMQSSTNPRRSGAAGA

SEQ ID NO: 88001 - protein, 24 aa, Artificial Sequence
  Description of Artificial Sequence: Synthetic peptide
  Seed: GMDPRMCSLMQGSTLPRRSGAAGA
GMDPRMLSLMQSSTSPRRSGAAGA

SEQ ID NO: 88002 - protein, 24 aa, Artificial Sequence
  Description of Artificial Sequence: Synthetic peptide
  Seed: GMDPRMCSLMQGSTLPRRSGAAGA
GMDPRMLSLMQSSTTPRRSGAAGA

SEQ ID NO: 88003 - protein, 24 aa, Artificial Sequence
  Description of Artificial Sequence: Synthetic peptide
  Seed: GMDPRMCSLMQGSTLPRRSGAAGA
GMDPRMLSLMQSSTVPRRSGAAGA

SEQ ID NO: 88004 - protein, 24 aa, Artificial Sequence
  Description of Artificial Sequence: Synthetic peptide
  Seed: GMDPRMCSLMQGSTLPRRSGAAGA
GMDPRMLSLMQTSTAPRRSGAAGA

SEQ ID NO: 88005 - protein, 24 aa, Artificial Sequence
  Description of Artificial Sequence: Synthetic peptide
  Seed: GMDPRMCSLMQGSTLPRRSGAAGA
GMDPRMLSLMQTSTNPRRSGAAGA

SEQ ID NO: 88006 - protein, 24 aa, Artificial Sequence
  Description of Artificial Sequence: Synthetic peptide
  Seed: GMDPRMCSLMQGSTLPRRSGAAGA
GMDPRMLSLMQTSTSPRRSGAAGA

SEQ ID NO: 88007 - protein, 24 aa, Artificial Sequence
  Description of Artificial Sequence: Synthetic peptide
  Seed: GMDPRMCSLMQGSTLPRRSGAAGA
GMDPRMLSLMQTSTVPRRSGAAGA

SEQ ID NO: 88008 - protein, 24 aa, Artificial Sequence
  Description of Artificial Sequence: Synthetic peptide
  Seed: GMDPRMCSLMQGSTLPRRSGAAGA
GMDPRMLSLMQVSTAPRRSGAAGA

SEQ ID NO: 88009 - protein, 24 aa, Artificial Sequence
  Description of Artificial Sequence: Synthetic peptide
  Seed: GMDPRMCSLMQGSTLPRRSGAAGA
GMDPRMLSLMQVSTNPRRSGAAGA

SEQ ID NO: 88010 - protein, 24 aa, Artificial Sequence
  Description of Artificial Sequence: Synthetic peptide
  Seed: GMDPRMCSLMQGSTLPRRSGAAGA
GMDPRMLSLMQVSTSPRRSGAAGA

SEQ ID NO: 88011 - protein, 24 aa, Artificial Sequence
  Description of Artificial Sequence: Synthetic peptide
  Seed: GMDPRMCSLMQGSTLPRRSGAAGA
GMDPRMLSLQQASTLPRRSGAAGA

SEQ ID NO: 88012 - protein, 24 aa, Artificial Sequence
  Description of Artificial Sequence: Synthetic peptide
  Seed: GMDPRMCSLMQGSTLPRRSGAAGA
GMDPRMLSLQQASTVPRRSGAAGA

SEQ ID NO: 88013 - protein, 24 aa, Artificial Sequence
  Description of Artificial Sequence: Synthetic peptide
  Seed: GMDPRMCSLMQGSTLPRRSGAAGA
GMDPRMMSLIQASTVPRRSGAAGA

SEQ ID NO: 88014 - protein, 24 aa, Artificial Sequence
  Description of Artificial Sequence: Synthetic peptide
  Seed: GMDPRMCSLMQGSTLPRRSGAAGA
GMDPRMMSLLQASTAPRRSGAAGA

SEQ ID NO: 88015 - protein, 24 aa, Artificial Sequence
  Description of Artificial Sequence: Synthetic peptide
  Seed: GMDPRMCSLMQGSTLPRRSGAAGA
GMDPRMMSLLQASTIPRRSGAAGA

SEQ ID NO: 88016 - protein, 24 aa, Artificial Sequence
  Description of Artificial Sequence: Synthetic peptide
  Seed: GMDPRMCSLMQGSTLPRRSGAAGA
GMDPRMMSLLQASTLPRRSGAAGA

SEQ ID NO: 88017 - protein, 24 aa, Artificial Sequence
  Description of Artificial Sequence: Synthetic peptide
  Seed: GMDPRMCSLMQGSTLPRRSGAAGA
GMDPRMMSLLQASTMPRRSGAAGA

SEQ ID NO: 88018 - protein, 24 aa, Artificial Sequence
  Description of Artificial Sequence: Synthetic peptide
  Seed: GMDPRMCSLMQGSTLPRRSGAAGA
GMDPRMMSLLQASTNPRRSGAAGA

SEQ ID NO: 88019 - protein, 24 aa, Artificial Sequence
  Description of Artificial Sequence: Synthetic peptide
  Seed: GMDPRMCSLMQGSTLPRRSGAAGA
GMDPRMMSLLQASTSPRRSGAAGA

SEQ ID NO: 88020 - protein, 24 aa, Artificial Sequence
  Description of Artificial Sequence: Synthetic peptide
  Seed: GMDPRMCSLMQGSTLPRRSGAAGA
GMDPRMMSLLQASTTPRRSGAAGA

SEQ ID NO: 88021 - protein, 24 aa, Artificial Sequence
  Description of Artificial Sequence: Synthetic peptide
  Seed: GMDPRMCSLMQGSTLPRRSGAAGA
GMDPRMMSLLQASTVPRRSGAAGA

SEQ ID NO: 88022 - protein, 24 aa, Artificial Sequence
  Description of Artificial Sequence: Synthetic peptide
  Seed: GMDPRMCSLMQGSTLPRRSGAAGA
GMDPRMMSLLQGSTAPRRSGAAGA

SEQ ID NO: 88023 - protein, 24 aa, Artificial Sequence
  Description of Artificial Sequence: Synthetic peptide
  Seed: GMDPRMCSLMQGSTLPRRSGAAGA
GMDPRMMSLLQGSTIPRRSGAAGA

SEQ ID NO: 88024 - protein, 24 aa, Artificial Sequence
  Description of Artificial Sequence: Synthetic peptide
  Seed: GMDPRMCSLMQGSTLPRRSGAAGA
GMDPRMMSLLQGSTLPRRSGAAGA

SEQ ID NO: 88025 - protein, 24 aa, Artificial Sequence
  Description of Artificial Sequence: Synthetic peptide
  Seed: GMDPRMCSLMQGSTLPRRSGAAGA
GMDPRMMSLLQGSTVPRRSGAAGA

SEQ ID NO: 88026 - protein, 24 aa, Artificial Sequence
  Description of Artificial Sequence: Synthetic peptide
  Seed: GMDPRMCSLMQGSTLPRRSGAAGA
GMDPRMMSLLQPSTAPRRSGAAGA

SEQ ID NO: 88027 - protein, 24 aa, Artificial Sequence
  Description of Artificial Sequence: Synthetic peptide
  Seed: GMDPRMCSLMQGSTLPRRSGAAGA
GMDPRMMSLLQPSTIPRRSGAAGA

SEQ ID NO: 88028 - protein, 24 aa, Artificial Sequence
  Description of Artificial Sequence: Synthetic peptide
  Seed: GMDPRMCSLMQGSTLPRRSGAAGA
GMDPRMMSLLQPSTLPRRSGAAGA

SEQ ID NO: 88029 - protein, 24 aa, Artificial Sequence
  Description of Artificial Sequence: Synthetic peptide
  Seed: GMDPRMCSLMQGSTLPRRSGAAGA
GMDPRMMSLLQPSTVPRRSGAAGA

SEQ ID NO: 88030 - protein, 24 aa, Artificial Sequence
  Description of Artificial Sequence: Synthetic peptide
  Seed: GMDPRMCSLMQGSTLPRRSGAAGA
GMDPRMMSLLQSSTAPRRSGAAGA

SEQ ID NO: 88031 - protein, 24 aa, Artificial Sequence
  Description of Artificial Sequence: Synthetic peptide
  Seed: GMDPRMCSLMQGSTLPRRSGAAGA
GMDPRMMSLLQSSTIPRRSGAAGA

SEQ ID NO: 88032 - protein, 24 aa, Artificial Sequence
  Description of Artificial Sequence: Synthetic peptide
  Seed: GMDPRMCSLMQGSTLPRRSGAAGA
GMDPRMMSLLQSSTLPRRSGAAGA

SEQ ID NO: 88033 - protein, 24 aa, Artificial Sequence
  Description of Artificial Sequence: Synthetic peptide
  Seed: GMDPRMCSLMQGSTLPRRSGAAGA
GMDPRMMSLLQSSTVPRRSGAAGA

SEQ ID NO: 88034 - protein, 24 aa, Artificial Sequence
  Description of Artificial Sequence: Synthetic peptide
  Seed: GMDPRMCSLMQGSTLPRRSGAAGA
GMDPRMMSLLQVSTAPRRSGAAGA

SEQ ID NO: 88035 - protein, 24 aa, Artificial Sequence
  Description of Artificial Sequence: Synthetic peptide
  Seed: GMDPRMCSLMQGSTLPRRSGAAGA
GMDPRMMSLMQASTAPRRSGAAGA

SEQ ID NO: 88036 - protein, 24 aa, Artificial Sequence
  Description of Artificial Sequence: Synthetic peptide
  Seed: GMDPRMCSLMQGSTLPRRSGAAGA
GMDPRMMSLMQASTIPRRSGAAGA

SEQ ID NO: 88037 - protein, 24 aa, Artificial Sequence
  Description of Artificial Sequence: Synthetic peptide
  Seed: GMDPRMCSLMQGSTLPRRSGAAGA
GMDPRMMSLMQASTLPRRSGAAGA

SEQ ID NO: 88038 - protein, 24 aa, Artificial Sequence
  Description of Artificial Sequence: Synthetic peptide
  Seed: GMDPRMCSLMQGSTLPRRSGAAGA
GMDPRMMSLMQASTMPRRSGAAGA

SEQ ID NO: 88039 - protein, 24 aa, Artificial Sequence
  Description of Artificial Sequence: Synthetic peptide
  Seed: GMDPRMCSLMQGSTLPRRSGAAGA
GMDPRMMSLMQASTNPRRSGAAGA

SEQ ID NO: 88040 - protein, 24 aa, Artificial Sequence
  Description of Artificial Sequence: Synthetic peptide
  Seed: GMDPRMCSLMQGSTLPRRSGAAGA
GMDPRMMSLMQASTSPRRSGAAGA

SEQ ID NO: 88041 - protein, 24 aa, Artificial Sequence
  Description of Artificial Sequence: Synthetic peptide
  Seed: GMDPRMCSLMQGSTLPRRSGAAGA
GMDPRMMSLMQASTTPRRSGAAGA

SEQ ID NO: 88042 - protein, 24 aa, Artificial Sequence
  Description of Artificial Sequence: Synthetic peptide
  Seed: GMDPRMCSLMQGSTLPRRSGAAGA
GMDPRMMSLMQASTVPRRSGAAGA

SEQ ID NO: 88043 - protein, 24 aa, Artificial Sequence
  Description of Artificial Sequence: Synthetic peptide
  Seed: GMDPRMCSLMQGSTLPRRSGAAGA
GMDPRMMSLMQGSTAPRRSGAAGA

SEQ ID NO: 88044 - protein, 24 aa, Artificial Sequence
  Description of Artificial Sequence: Synthetic peptide
  Seed: GMDPRMCSLMQGSTLPRRSGAAGA
GMDPRMMSLMQGSTIPRRSGAAGA

SEQ ID NO: 88045 - protein, 24 aa, Artificial Sequence
  Description of Artificial Sequence: Synthetic peptide
  Seed: GMDPRMCSLMQGSTLPRRSGAAGA
GMDPRMMSLMQGSTLPRRSGAAGA

SEQ ID NO: 88046 - protein, 24 aa, Artificial Sequence
  Description of Artificial Sequence: Synthetic peptide
  Seed: GMDPRMCSLMQGSTLPRRSGAAGA
GMDPRMMSLMQGSTVPRRSGAAGA

SEQ ID NO: 88047 - protein, 24 aa, Artificial Sequence
  Description of Artificial Sequence: Synthetic peptide
  Seed: GMDPRMCSLMQGSTLPRRSGAAGA
GMDPRMMSLMQISTAPRRSGAAGA

SEQ ID NO: 88048 - protein, 24 aa, Artificial Sequence
  Description of Artificial Sequence: Synthetic peptide
  Seed: GMDPRMCSLMQGSTLPRRSGAAGA
GMDPRMMSLMQPSTAPRRSGAAGA

SEQ ID NO: 88049 - protein, 24 aa, Artificial Sequence
  Description of Artificial Sequence: Synthetic peptide
  Seed: GMDPRMCSLMQGSTLPRRSGAAGA
GMDPRMMSLMQPSTIPRRSGAAGA

SEQ ID NO: 88050 - protein, 24 aa, Artificial Sequence
  Description of Artificial Sequence: Synthetic peptide
  Seed: GMDPRMCSLMQGSTLPRRSGAAGA
GMDPRMMSLMQPSTLPRRSGAAGA

SEQ ID NO: 88051 - protein, 24 aa, Artificial Sequence
  Description of Artificial Sequence: Synthetic peptide
  Seed: GMDPRMCSLMQGSTLPRRSGAAGA
GMDPRMMSLMQPSTVPRRSGAAGA

SEQ ID NO: 88052 - protein, 24 aa, Artificial Sequence
  Description of Artificial Sequence: Synthetic peptide
  Seed: GMDPRMCSLMQGSTLPRRSGAAGA
GMDPRMMSLMQSSTAPRRSGAAGA

SEQ ID NO: 88053 - protein, 24 aa, Artificial Sequence
  Description of Artificial Sequence: Synthetic peptide
  Seed: GMDPRMCSLMQGSTLPRRSGAAGA
GMDPRMMSLMQSSTIPRRSGAAGA

SEQ ID NO: 88054 - protein, 24 aa, Artificial Sequence
  Description of Artificial Sequence: Synthetic peptide
  Seed: GMDPRMCSLMQGSTLPRRSGAAGA
GMDPRMMSLMQSSTLPRRSGAAGA

SEQ ID NO: 88055 - protein, 24 aa, Artificial Sequence
  Description of Artificial Sequence: Synthetic peptide
  Seed: GMDPRMCSLMQGSTLPRRSGAAGA
GMDPRMMSLMQSSTVPRRSGAAGA

SEQ ID NO: 88056 - protein, 24 aa, Artificial Sequence
  Description of Artificial Sequence: Synthetic peptide
  Seed: GMDPRMCSLMQGSTLPRRSGAAGA
GMDPRMMSLMQVSTAPRRSGAAGA

SEQ ID NO: 88057 - protein, 24 aa, Artificial Sequence
  Description of Artificial Sequence: Synthetic peptide
  Seed: GMDPRMCSLMQGSTLPRRSGAAGA
GMDPRMVSLLQASTAPRRSGAAGA

SEQ ID NO: 88058 - protein, 24 aa, Artificial Sequence
  Description of Artificial Sequence: Synthetic peptide
  Seed: GMDPRMCSLMQGSTLPRRSGAAGA
GMDPRMVSLLQASTIPRRSGAAGA

SEQ ID NO: 88059 - protein, 24 aa, Artificial Sequence
  Description of Artificial Sequence: Synthetic peptide
  Seed: GMDPRMCSLMQGSTLPRRSGAAGA
GMDPRMVSLLQASTLPRRSGAAGA

SEQ ID NO: 88060 - protein, 24 aa, Artificial Sequence
  Description of Artificial Sequence: Synthetic peptide
  Seed: GMDPRMCSLMQGSTLPRRSGAAGA
GMDPRMVSLLQASTMPRRSGAAGA

SEQ ID NO: 88061 - protein, 24 aa, Artificial Sequence
  Description of Artificial Sequence: Synthetic peptide
  Seed: GMDPRMCSLMQGSTLPRRSGAAGA
GMDPRMVSLLQASTTPRRSGAAGA

SEQ ID NO: 88062 - protein, 24 aa, Artificial Sequence
  Description of Artificial Sequence: Synthetic peptide
  Seed: GMDPRMCSLMQGSTLPRRSGAAGA
GMDPRMVSLLQASTVPRRSGAAGA

SEQ ID NO: 88063 - protein, 24 aa, Artificial Sequence
  Description of Artificial Sequence: Synthetic peptide
  Seed: GMDPRMCSLMQGSTLPRRSGAAGA
GMDPRMVSLLQGSTAPRRSGAAGA

SEQ ID NO: 88064 - protein, 24 aa, Artificial Sequence
  Description of Artificial Sequence: Synthetic peptide
  Seed: GMDPRMCSLMQGSTLPRRSGAAGA
GMDPRMVSLLQGSTIPRRSGAAGA

SEQ ID NO: 88065 - protein, 24 aa, Artificial Sequence
  Description of Artificial Sequence: Synthetic peptide
  Seed: GMDPRMCSLMQGSTLPRRSGAAGA
GMDPRMVSLLQGSTLPRRSGAAGA

SEQ ID NO: 88066 - protein, 24 aa, Artificial Sequence
  Description of Artificial Sequence: Synthetic peptide
  Seed: GMDPRMCSLMQGSTLPRRSGAAGA
GMDPRMVSLLQGSTVPRRSGAAGA

SEQ ID NO: 88067 - protein, 24 aa, Artificial Sequence
  Description of Artificial Sequence: Synthetic peptide
  Seed: GMDPRMCSLMQGSTLPRRSGAAGA
GMDPRMVSLLQPSTIPRRSGAAGA

SEQ ID NO: 88068 - protein, 24 aa, Artificial Sequence
  Description of Artificial Sequence: Synthetic peptide
  Seed: GMDPRMCSLMQGSTLPRRSGAAGA
GMDPRMVSLLQPSTLPRRSGAAGA

SEQ ID NO: 88069 - protein, 24 aa, Artificial Sequence
  Description of Artificial Sequence: Synthetic peptide
  Seed: GMDPRMCSLMQGSTLPRRSGAAGA
GMDPRMVSLLQPSTVPRRSGAAGA

SEQ ID NO: 88070 - protein, 24 aa, Artificial Sequence
  Description of Artificial Sequence: Synthetic peptide
  Seed: GMDPRMCSLMQGSTLPRRSGAAGA
GMDPRMVSLLQSSTAPRRSGAAGA

SEQ ID NO: 88071 - protein, 24 aa, Artificial Sequence
  Description of Artificial Sequence: Synthetic peptide
  Seed: GMDPRMCSLMQGSTLPRRSGAAGA
GMDPRMVSLLQSSTIPRRSGAAGA

SEQ ID NO: 88072 - protein, 24 aa, Artificial Sequence
  Description of Artificial Sequence: Synthetic peptide
  Seed: GMDPRMCSLMQGSTLPRRSGAAGA
GMDPRMVSLLQSSTLPRRSGAAGA

SEQ ID NO: 88073 - protein, 24 aa, Artificial Sequence
  Description of Artificial Sequence: Synthetic peptide
  Seed: GMDPRMCSLMQGSTLPRRSGAAGA
GMDPRMVSLLQSSTVPRRSGAAGA

SEQ ID NO: 88074 - protein, 24 aa, Artificial Sequence
  Description of Artificial Sequence: Synthetic peptide
  Seed: GMDPRMCSLMQGSTLPRRSGAAGA
GMDPRMVSLMQASTAPRRSGAAGA

SEQ ID NO: 88075 - protein, 24 aa, Artificial Sequence
  Description of Artificial Sequence: Synthetic peptide
  Seed: GMDPRMCSLMQGSTLPRRSGAAGA
GMDPRMVSLMQASTIPRRSGAAGA

SEQ ID NO: 88076 - protein, 24 aa, Artificial Sequence
  Description of Artificial Sequence: Synthetic peptide
  Seed: GMDPRMCSLMQGSTLPRRSGAAGA
GMDPRMVSLMQASTLPRRSGAAGA

SEQ ID NO: 88077 - protein, 24 aa, Artificial Sequence
  Description of Artificial Sequence: Synthetic peptide
  Seed: GMDPRMCSLMQGSTLPRRSGAAGA
GMDPRMVSLMQASTMPRRSGAAGA

SEQ ID NO: 88078 - protein, 24 aa, Artificial Sequence
  Description of Artificial Sequence: Synthetic peptide
  Seed: GMDPRMCSLMQGSTLPRRSGAAGA
GMDPRMVSLMQASTTPRRSGAAGA

SEQ ID NO: 88079 - protein, 24 aa, Artificial Sequence
  Description of Artificial Sequence: Synthetic peptide
  Seed: GMDPRMCSLMQGSTLPRRSGAAGA
GMDPRMVSLMQASTVPRRSGAAGA

SEQ ID NO: 88080 - protein, 24 aa, Artificial Sequence
  Description of Artificial Sequence: Synthetic peptide
  Seed: GMDPRMCSLMQGSTLPRRSGAAGA
GMDPRMVSLMQGSTAPRRSGAAGA

SEQ ID NO: 88081 - protein, 24 aa, Artificial Sequence
  Description of Artificial Sequence: Synthetic peptide
  Seed: GMDPRMCSLMQGSTLPRRSGAAGA
GMDPRMVSLMQGSTIPRRSGAAGA

SEQ ID NO: 88082 - protein, 24 aa, Artificial Sequence
  Description of Artificial Sequence: Synthetic peptide
  Seed: GMDPRMCSLMQGSTLPRRSGAAGA
GMDPRMVSLMQGSTLPRRSGAAGA

SEQ ID NO: 88083 - protein, 24 aa, Artificial Sequence
  Description of Artificial Sequence: Synthetic peptide
  Seed: GMDPRMCSLMQGSTLPRRSGAAGA
GMDPRMVSLMQGSTVPRRSGAAGA

SEQ ID NO: 88084 - protein, 24 aa, Artificial Sequence
  Description of Artificial Sequence: Synthetic peptide
  Seed: GMDPRMCSLMQGSTLPRRSGAAGA
GMDPRMVSLMQPSTIPRRSGAAGA

SEQ ID NO: 88085 - protein, 24 aa, Artificial Sequence
  Description of Artificial Sequence: Synthetic peptide
  Seed: GMDPRMCSLMQGSTLPRRSGAAGA
GMDPRMVSLMQPSTLPRRSGAAGA

SEQ ID NO: 88086 - protein, 24 aa, Artificial Sequence
  Description of Artificial Sequence: Synthetic peptide
  Seed: GMDPRMCSLMQGSTLPRRSGAAGA
GMDPRMVSLMQPSTVPRRSGAAGA

SEQ ID NO: 88087 - protein, 24 aa, Artificial Sequence
  Description of Artificial Sequence: Synthetic peptide
  Seed: GMDPRMCSLMQGSTLPRRSGAAGA
GMDPRMVSLMQSSTAPRRSGAAGA

SEQ ID NO: 88088 - protein, 24 aa, Artificial Sequence
  Description of Artificial Sequence: Synthetic peptide
  Seed: GMDPRMCSLMQGSTLPRRSGAAGA
GMDPRMVSLMQSSTIPRRSGAAGA

SEQ ID NO: 88089 - protein, 24 aa, Artificial Sequence
  Description of Artificial Sequence: Synthetic peptide
  Seed: GMDPRMCSLMQGSTLPRRSGAAGA
GMDPRMVSLMQSSTLPRRSGAAGA

SEQ ID NO: 88090 - protein, 24 aa, Artificial Sequence
  Description of Artificial Sequence: Synthetic peptide
  Seed: GMDPRMCSLMQGSTLPRRSGAAGA
GMDPRMVSLMQSSTVPRRSGAAGA

SEQ ID NO: 88091 - protein, 24 aa, Artificial Sequence
  Description of Artificial Sequence: Synthetic peptide
  Seed: GMDPRMCSLMQGSTLPRRSGAAGA
GMDPRMWSLAQASTAPRRSGAAGA

SEQ ID NO: 88092 - protein, 24 aa, Artificial Sequence
  Description of Artificial Sequence: Synthetic peptide
  Seed: GMDPRMCSLMQGSTLPRRSGAAGA
GMDPRMWSLAQASTIPRRSGAAGA

SEQ ID NO: 88093 - protein, 24 aa, Artificial Sequence
  Description of Artificial Sequence: Synthetic peptide
  Seed: GMDPRMCSLMQGSTLPRRSGAAGA
GMDPRMWSLAQASTLPRRSGAAGA

SEQ ID NO: 88094 - protein, 24 aa, Artificial Sequence
  Description of Artificial Sequence: Synthetic peptide
  Seed: GMDPRMCSLMQGSTLPRRSGAAGA
GMDPRMWSLAQASTMPRRSGAAGA

SEQ ID NO: 88095 - protein, 24 aa, Artificial Sequence
  Description of Artificial Sequence: Synthetic peptide
  Seed: GMDPRMCSLMQGSTLPRRSGAAGA
GMDPRMWSLAQASTNPRRSGAAGA

SEQ ID NO: 88096 - protein, 24 aa, Artificial Sequence
  Description of Artificial Sequence: Synthetic peptide
  Seed: GMDPRMCSLMQGSTLPRRSGAAGA
GMDPRMWSLAQASTSPRRSGAAGA

SEQ ID NO: 88097 - protein, 24 aa, Artificial Sequence
  Description of Artificial Sequence: Synthetic peptide
  Seed: GMDPRMCSLMQGSTLPRRSGAAGA
GMDPRMWSLAQASTTPRRSGAAGA

SEQ ID NO: 88098 - protein, 24 aa, Artificial Sequence
  Description of Artificial Sequence: Synthetic peptide
  Seed: GMDPRMCSLMQGSTLPRRSGAAGA
GMDPRMWSLAQASTVPRRSGAAGA

SEQ ID NO: 88099 - protein, 24 aa, Artificial Sequence
  Description of Artificial Sequence: Synthetic peptide
  Seed: GMDPRMCSLMQGSTLPRRSGAAGA
GMDPRMWSLAQGSTAPRRSGAAGA

SEQ ID NO: 88100 - protein, 24 aa, Artificial Sequence
  Description of Artificial Sequence: Synthetic peptide
  Seed: GMDPRMCSLMQGSTLPRRSGAAGA
GMDPRMWSLAQGSTIPRRSGAAGA

SEQ ID NO: 88101 - protein, 24 aa, Artificial Sequence
  Description of Artificial Sequence: Synthetic peptide
  Seed: GMDPRMCSLMQGSTLPRRSGAAGA
GMDPRMWSLAQGSTLPRRSGAAGA

SEQ ID NO: 88102 - protein, 24 aa, Artificial Sequence
  Description of Artificial Sequence: Synthetic peptide
  Seed: GMDPRMCSLMQGSTLPRRSGAAGA
GMDPRMWSLAQGSTVPRRSGAAGA

SEQ ID NO: 88103 - protein, 24 aa, Artificial Sequence
  Description of Artificial Sequence: Synthetic peptide
  Seed: GMDPRMCSLMQGSTLPRRSGAAGA
GMDPRMWSLAQSSTAPRRSGAAGA

SEQ ID NO: 88104 - protein, 24 aa, Artificial Sequence
  Description of Artificial Sequence: Synthetic peptide
  Seed: GMDPRMCSLMQGSTLPRRSGAAGA
GMDPRMWSLAQSSTIPRRSGAAGA

SEQ ID NO: 88105 - protein, 24 aa, Artificial Sequence
  Description of Artificial Sequence: Synthetic peptide
  Seed: GMDPRMCSLMQGSTLPRRSGAAGA
GMDPRMWSLAQSSTLPRRSGAAGA

SEQ ID NO: 88106 - protein, 24 aa, Artificial Sequence
  Description of Artificial Sequence: Synthetic peptide
  Seed: GMDPRMCSLMQGSTLPRRSGAAGA
GMDPRMWSLAQSSTVPRRSGAAGA

SEQ ID NO: 88107 - protein, 24 aa, Artificial Sequence
  Description of Artificial Sequence: Synthetic peptide
  Seed: GMDPRMCSLMQGSTLPRRSGAAGA
GMDPRMWSLAQVSTAPRRSGAAGA

SEQ ID NO: 88108 - protein, 24 aa, Artificial Sequence
  Description of Artificial Sequence: Synthetic peptide
  Seed: GMDPRMCSLMQGSTLPRRSGAAGA
GMDPRMWSLIQASTAPRRSGAAGA

SEQ ID NO: 88109 - protein, 24 aa, Artificial Sequence
  Description of Artificial Sequence: Synthetic peptide
  Seed: GMDPRMCSLMQGSTLPRRSGAAGA
GMDPRMWSLIQASTGPRRSGAAGA

SEQ ID NO: 88110 - protein, 24 aa, Artificial Sequence
  Description of Artificial Sequence: Synthetic peptide
  Seed: GMDPRMCSLMQGSTLPRRSGAAGA
GMDPRMWSLIQASTIPRRSGAAGA

SEQ ID NO: 88111 - protein, 24 aa, Artificial Sequence
  Description of Artificial Sequence: Synthetic peptide
  Seed: GMDPRMCSLMQGSTLPRRSGAAGA
GMDPRMWSLIQASTLPRRSGAAGA

SEQ ID NO: 88112 - protein, 24 aa, Artificial Sequence
  Description of Artificial Sequence: Synthetic peptide
  Seed: GMDPRMCSLMQGSTLPRRSGAAGA
GMDPRMWSLIQASTMPRRSGAAGA

SEQ ID NO: 88113 - protein, 24 aa, Artificial Sequence
  Description of Artificial Sequence: Synthetic peptide
  Seed: GMDPRMCSLMQGSTLPRRSGAAGA
GMDPRMWSLIQASTNPRRSGAAGA

SEQ ID NO: 88114 - protein, 24 aa, Artificial Sequence
  Description of Artificial Sequence: Synthetic peptide
  Seed: GMDPRMCSLMQGSTLPRRSGAAGA
GMDPRMWSLIQASTSPRRSGAAGA

SEQ ID NO: 88115 - protein, 24 aa, Artificial Sequence
  Description of Artificial Sequence: Synthetic peptide
  Seed: GMDPRMCSLMQGSTLPRRSGAAGA
GMDPRMWSLIQASTTPRRSGAAGA

SEQ ID NO: 88116 - protein, 24 aa, Artificial Sequence
  Description of Artificial Sequence: Synthetic peptide
  Seed: GMDPRMCSLMQGSTLPRRSGAAGA
GMDPRMWSLIQASTVPRRSGAAGA

SEQ ID NO: 88117 - protein, 24 aa, Artificial Sequence
  Description of Artificial Sequence: Synthetic peptide
  Seed: GMDPRMCSLMQGSTLPRRSGAAGA
GMDPRMWSLIQGSTAPRRSGAAGA

SEQ ID NO: 88118 - protein, 24 aa, Artificial Sequence
  Description of Artificial Sequence: Synthetic peptide
  Seed: GMDPRMCSLMQGSTLPRRSGAAGA
GMDPRMWSLIQGSTIPRRSGAAGA

SEQ ID NO: 88119 - protein, 24 aa, Artificial Sequence
  Description of Artificial Sequence: Synthetic peptide
  Seed: GMDPRMCSLMQGSTLPRRSGAAGA
GMDPRMWSLIQGSTLPRRSGAAGA

SEQ ID NO: 88120 - protein, 24 aa, Artificial Sequence
  Description of Artificial Sequence: Synthetic peptide
  Seed: GMDPRMCSLMQGSTLPRRSGAAGA
GMDPRMWSLIQGSTTPRRSGAAGA

SEQ ID NO: 88121 - protein, 24 aa, Artificial Sequence
  Description of Artificial Sequence: Synthetic peptide
  Seed: GMDPRMCSLMQGSTLPRRSGAAGA
GMDPRMWSLIQGSTVPRRSGAAGA

SEQ ID NO: 88122 - protein, 24 aa, Artificial Sequence
  Description of Artificial Sequence: Synthetic peptide
  Seed: GMDPRMCSLMQGSTLPRRSGAAGA
GMDPRMWSLIQISTAPRRSGAAGA

SEQ ID NO: 88123 - protein, 24 aa, Artificial Sequence
  Description of Artificial Sequence: Synthetic peptide
  Seed: GMDPRMCSLMQGSTLPRRSGAAGA
GMDPRMWSLIQISTNPRRSGAAGA

SEQ ID NO: 88124 - protein, 24 aa, Artificial Sequence
  Description of Artificial Sequence: Synthetic peptide
  Seed: GMDPRMCSLMQGSTLPRRSGAAGA
GMDPRMWSLIQPSTAPRRSGAAGA

SEQ ID NO: 88125 - protein, 24 aa, Artificial Sequence
  Description of Artificial Sequence: Synthetic peptide
  Seed: GMDPRMCSLMQGSTLPRRSGAAGA
GMDPRMWSLIQPSTIPRRSGAAGA

SEQ ID NO: 88126 - protein, 24 aa, Artificial Sequence
  Description of Artificial Sequence: Synthetic peptide
  Seed: GMDPRMCSLMQGSTLPRRSGAAGA
GMDPRMWSLIQPSTLPRRSGAAGA

SEQ ID NO: 88127 - protein, 24 aa, Artificial Sequence
  Description of Artificial Sequence: Synthetic peptide
  Seed: GMDPRMCSLMQGSTLPRRSGAAGA
GMDPRMWSLIQPSTNPRRSGAAGA

SEQ ID NO: 88128 - protein, 24 aa, Artificial Sequence
  Description of Artificial Sequence: Synthetic peptide
  Seed: GMDPRMCSLMQGSTLPRRSGAAGA
GMDPRMWSLIQPSTSPRRSGAAGA

SEQ ID NO: 88129 - protein, 24 aa, Artificial Sequence
  Description of Artificial Sequence: Synthetic peptide
  Seed: GMDPRMCSLMQGSTLPRRSGAAGA
GMDPRMWSLIQPSTVPRRSGAAGA

SEQ ID NO: 88130 - protein, 24 aa, Artificial Sequence
  Description of Artificial Sequence: Synthetic peptide
  Seed: GMDPRMCSLMQGSTLPRRSGAAGA
GMDPRMWSLIQSSTAPRRSGAAGA

SEQ ID NO: 88131 - protein, 24 aa, Artificial Sequence
  Description of Artificial Sequence: Synthetic peptide
  Seed: GMDPRMCSLMQGSTLPRRSGAAGA
GMDPRMWSLIQSSTIPRRSGAAGA

SEQ ID NO: 88132 - protein, 24 aa, Artificial Sequence
  Description of Artificial Sequence: Synthetic peptide
  Seed: GMDPRMCSLMQGSTLPRRSGAAGA
GMDPRMWSLIQSSTLPRRSGAAGA

SEQ ID NO: 88133 - protein, 24 aa, Artificial Sequence
  Description of Artificial Sequence: Synthetic peptide
  Seed: GMDPRMCSLMQGSTLPRRSGAAGA
GMDPRMWSLIQSSTNPRRSGAAGA

SEQ ID NO: 88134 - protein, 24 aa, Artificial Sequence
  Description of Artificial Sequence: Synthetic peptide
  Seed: GMDPRMCSLMQGSTLPRRSGAAGA
GMDPRMWSLIQSSTSPRRSGAAGA

SEQ ID NO: 88135 - protein, 24 aa, Artificial Sequence
  Description of Artificial Sequence: Synthetic peptide
  Seed: GMDPRMCSLMQGSTLPRRSGAAGA
GMDPRMWSLIQSSTVPRRSGAAGA

SEQ ID NO: 88136 - protein, 24 aa, Artificial Sequence
  Description of Artificial Sequence: Synthetic peptide
  Seed: GMDPRMCSLMQGSTLPRRSGAAGA
GMDPRMWSLIQTSTAPRRSGAAGA

SEQ ID NO: 88137 - protein, 24 aa, Artificial Sequence
  Description of Artificial Sequence: Synthetic peptide
  Seed: GMDPRMCSLMQGSTLPRRSGAAGA
GMDPRMWSLIQTSTNPRRSGAAGA

SEQ ID NO: 88138 - protein, 24 aa, Artificial Sequence
  Description of Artificial Sequence: Synthetic peptide
  Seed: GMDPRMCSLMQGSTLPRRSGAAGA
GMDPRMWSLIQTSTSPRRSGAAGA

SEQ ID NO: 88139 - protein, 24 aa, Artificial Sequence
  Description of Artificial Sequence: Synthetic peptide
  Seed: GMDPRMCSLMQGSTLPRRSGAAGA
GMDPRMWSLIQTSTTPRRSGAAGA

SEQ ID NO: 88140 - protein, 24 aa, Artificial Sequence
  Description of Artificial Sequence: Synthetic peptide
  Seed: GMDPRMCSLMQGSTLPRRSGAAGA
GMDPRMWSLIQVSTAPRRSGAAGA

SEQ ID NO: 88141 - protein, 24 aa, Artificial Sequence
  Description of Artificial Sequence: Synthetic peptide
  Seed: GMDPRMCSLMQGSTLPRRSGAAGA
GMDPRMWSLIQVSTNPRRSGAAGA

SEQ ID NO: 88142 - protein, 24 aa, Artificial Sequence
  Description of Artificial Sequence: Synthetic peptide
  Seed: GMDPRMCSLMQGSTLPRRSGAAGA
GMDPRMWSLIQVSTSPRRSGAAGA

SEQ ID NO: 88143 - protein, 24 aa, Artificial Sequence
  Description of Artificial Sequence: Synthetic peptide
  Seed: GMDPRMCSLMQGSTLPRRSGAAGA
GMDPRMWSLLQASTAPRRSGAAGA

SEQ ID NO: 88144 - protein, 24 aa, Artificial Sequence
  Description of Artificial Sequence: Synthetic peptide
  Seed: GMDPRMCSLMQGSTLPRRSGAAGA
GMDPRMWSLLQASTGPRRSGAAGA

SEQ ID NO: 88145 - protein, 24 aa, Artificial Sequence
  Description of Artificial Sequence: Synthetic peptide
  Seed: GMDPRMCSLMQGSTLPRRSGAAGA
GMDPRMWSLLQASTIPRRSGAAGA

SEQ ID NO: 88146 - protein, 24 aa, Artificial Sequence
  Description of Artificial Sequence: Synthetic peptide
  Seed: GMDPRMCSLMQGSTLPRRSGAAGA
GMDPRMWSLLQASTLPRRSGAAGA

SEQ ID NO: 88147 - protein, 24 aa, Artificial Sequence
  Description of Artificial Sequence: Synthetic peptide
  Seed: GMDPRMCSLMQGSTLPRRSGAAGA
GMDPRMWSLLQASTMPRRSGAAGA

SEQ ID NO: 88148 - protein, 24 aa, Artificial Sequence
  Description of Artificial Sequence: Synthetic peptide
  Seed: GMDPRMCSLMQGSTLPRRSGAAGA
GMDPRMWSLLQASTNPRRSGAAGA

SEQ ID NO: 88149 - protein, 24 aa, Artificial Sequence
  Description of Artificial Sequence: Synthetic peptide
  Seed: GMDPRMCSLMQGSTLPRRSGAAGA
GMDPRMWSLLQASTSPRRSGAAGA

SEQ ID NO: 88150 - protein, 24 aa, Artificial Sequence
  Description of Artificial Sequence: Synthetic peptide
  Seed: GMDPRMCSLMQGSTLPRRSGAAGA
GMDPRMWSLLQASTTPRRSGAAGA

SEQ ID NO: 88151 - protein, 24 aa, Artificial Sequence
  Description of Artificial Sequence: Synthetic peptide
  Seed: GMDPRMCSLMQGSTLPRRSGAAGA
GMDPRMWSLLQASTVPRRSGAAGA

SEQ ID NO: 88152 - protein, 24 aa, Artificial Sequence
  Description of Artificial Sequence: Synthetic peptide
  Seed: GMDPRMCSLMQGSTLPRRSGAAGA
GMDPRMWSLLQGSTAPRRSGAAGA

SEQ ID NO: 88153 - protein, 24 aa, Artificial Sequence
  Description of Artificial Sequence: Synthetic peptide
  Seed: GMDPRMCSLMQGSTLPRRSGAAGA
GMDPRMWSLLQGSTGPRRSGAAGA

SEQ ID NO: 88154 - protein, 24 aa, Artificial Sequence
  Description of Artificial Sequence: Synthetic peptide
  Seed: GMDPRMCSLMQGSTLPRRSGAAGA
GMDPRMWSLLQGSTIPRRSGAAGA

SEQ ID NO: 88155 - protein, 24 aa, Artificial Sequence
  Description of Artificial Sequence: Synthetic peptide
  Seed: GMDPRMCSLMQGSTLPRRSGAAGA
GMDPRMWSLLQGSTLPRRSGAAGA

SEQ ID NO: 88156 - protein, 24 aa, Artificial Sequence
  Description of Artificial Sequence: Synthetic peptide
  Seed: GMDPRMCSLMQGSTLPRRSGAAGA
GMDPRMWSLLQGSTMPRRSGAAGA

SEQ ID NO: 88157 - protein, 24 aa, Artificial Sequence
  Description of Artificial Sequence: Synthetic peptide
  Seed: GMDPRMCSLMQGSTLPRRSGAAGA
GMDPRMWSLLQGSTSPRRSGAAGA

SEQ ID NO: 88158 - protein, 24 aa, Artificial Sequence
  Description of Artificial Sequence: Synthetic peptide
  Seed: GMDPRMCSLMQGSTLPRRSGAAGA
GMDPRMWSLLQGSTTPRRSGAAGA

SEQ ID NO: 88159 - protein, 24 aa, Artificial Sequence
  Description of Artificial Sequence: Synthetic peptide
  Seed: GMDPRMCSLMQGSTLPRRSGAAGA
GMDPRMWSLLQGSTVPRRSGAAGA

SEQ ID NO: 88160 - protein, 24 aa, Artificial Sequence
  Description of Artificial Sequence: Synthetic peptide
  Seed: GMDPRMCSLMQGSTLPRRSGAAGA
GMDPRMWSLLQISTAPRRSGAAGA

SEQ ID NO: 88161 - protein, 24 aa, Artificial Sequence
  Description of Artificial Sequence: Synthetic peptide
  Seed: GMDPRMCSLMQGSTLPRRSGAAGA
GMDPRMWSLLQISTNPRRSGAAGA

SEQ ID NO: 88162 - protein, 24 aa, Artificial Sequence
  Description of Artificial Sequence: Synthetic peptide
  Seed: GMDPRMCSLMQGSTLPRRSGAAGA
GMDPRMWSLLQISTSPRRSGAAGA

SEQ ID NO: 88163 - protein, 24 aa, Artificial Sequence
  Description of Artificial Sequence: Synthetic peptide
  Seed: GMDPRMCSLMQGSTLPRRSGAAGA
GMDPRMWSLLQNSTAPRRSGAAGA

SEQ ID NO: 88164 - protein, 24 aa, Artificial Sequence
  Description of Artificial Sequence: Synthetic peptide
  Seed: GMDPRMCSLMQGSTLPRRSGAAGA
GMDPRMWSLLQNSTIPRRSGAAGA

SEQ ID NO: 88165 - protein, 24 aa, Artificial Sequence
  Description of Artificial Sequence: Synthetic peptide
  Seed: GMDPRMCSLMQGSTLPRRSGAAGA
GMDPRMWSLLQNSTLPRRSGAAGA

SEQ ID NO: 88166 - protein, 24 aa, Artificial Sequence
  Description of Artificial Sequence: Synthetic peptide
  Seed: GMDPRMCSLMQGSTLPRRSGAAGA
GMDPRMWSLLQNSTVPRRSGAAGA

SEQ ID NO: 88167 - protein, 24 aa, Artificial Sequence
  Description of Artificial Sequence: Synthetic peptide
  Seed: GMDPRMCSLMQGSTLPRRSGAAGA
GMDPRMWSLLQPSTAPRRSGAAGA

SEQ ID NO: 88168 - protein, 24 aa, Artificial Sequence
  Description of Artificial Sequence: Synthetic peptide
  Seed: GMDPRMCSLMQGSTLPRRSGAAGA
GMDPRMWSLLQPSTIPRRSGAAGA

SEQ ID NO: 88169 - protein, 24 aa, Artificial Sequence
  Description of Artificial Sequence: Synthetic peptide
  Seed: GMDPRMCSLMQGSTLPRRSGAAGA
GMDPRMWSLLQPSTLPRRSGAAGA

SEQ ID NO: 88170 - protein, 24 aa, Artificial Sequence
  Description of Artificial Sequence: Synthetic peptide
  Seed: GMDPRMCSLMQGSTLPRRSGAAGA
GMDPRMWSLLQPSTMPRRSGAAGA

SEQ ID NO: 88171 - protein, 24 aa, Artificial Sequence
  Description of Artificial Sequence: Synthetic peptide
  Seed: GMDPRMCSLMQGSTLPRRSGAAGA
GMDPRMWSLLQPSTNPRRSGAAGA

SEQ ID NO: 88172 - protein, 24 aa, Artificial Sequence
  Description of Artificial Sequence: Synthetic peptide
  Seed: GMDPRMCSLMQGSTLPRRSGAAGA
GMDPRMWSLLQPSTSPRRSGAAGA

SEQ ID NO: 88173 - protein, 24 aa, Artificial Sequence
  Description of Artificial Sequence: Synthetic peptide
  Seed: GMDPRMCSLMQGSTLPRRSGAAGA
GMDPRMWSLLQPSTTPRRSGAAGA

SEQ ID NO: 88174 - protein, 24 aa, Artificial Sequence
  Description of Artificial Sequence: Synthetic peptide
  Seed: GMDPRMCSLMQGSTLPRRSGAAGA
GMDPRMWSLLQPSTVPRRSGAAGA

SEQ ID NO: 88175 - protein, 24 aa, Artificial Sequence
  Description of Artificial Sequence: Synthetic peptide
  Seed: GMDPRMCSLMQGSTLPRRSGAAGA
GMDPRMWSLLQSSTAPRRSGAAGA

SEQ ID NO: 88176 - protein, 24 aa, Artificial Sequence
  Description of Artificial Sequence: Synthetic peptide
  Seed: GMDPRMCSLMQGSTLPRRSGAAGA
GMDPRMWSLLQSSTIPRRSGAAGA

SEQ ID NO: 88177 - protein, 24 aa, Artificial Sequence
  Description of Artificial Sequence: Synthetic peptide
  Seed: GMDPRMCSLMQGSTLPRRSGAAGA
GMDPRMWSLLQSSTLPRRSGAAGA

SEQ ID NO: 88178 - protein, 24 aa, Artificial Sequence
  Description of Artificial Sequence: Synthetic peptide
  Seed: GMDPRMCSLMQGSTLPRRSGAAGA
GMDPRMWSLLQSSTMPRRSGAAGA

SEQ ID NO: 88179 - protein, 24 aa, Artificial Sequence
  Description of Artificial Sequence: Synthetic peptide
  Seed: GMDPRMCSLMQGSTLPRRSGAAGA
GMDPRMWSLLQSSTNPRRSGAAGA

SEQ ID NO: 88180 - protein, 24 aa, Artificial Sequence
  Description of Artificial Sequence: Synthetic peptide
  Seed: GMDPRMCSLMQGSTLPRRSGAAGA
GMDPRMWSLLQSSTSPRRSGAAGA

SEQ ID NO: 88181 - protein, 24 aa, Artificial Sequence
  Description of Artificial Sequence: Synthetic peptide
  Seed: GMDPRMCSLMQGSTLPRRSGAAGA
GMDPRMWSLLQSSTTPRRSGAAGA

SEQ ID NO: 88182 - protein, 24 aa, Artificial Sequence
  Description of Artificial Sequence: Synthetic peptide
  Seed: GMDPRMCSLMQGSTLPRRSGAAGA
GMDPRMWSLLQSSTVPRRSGAAGA

SEQ ID NO: 88183 - protein, 24 aa, Artificial Sequence
  Description of Artificial Sequence: Synthetic peptide
  Seed: GMDPRMCSLMQGSTLPRRSGAAGA
GMDPRMWSLLQTSTAPRRSGAAGA

SEQ ID NO: 88184 - protein, 24 aa, Artificial Sequence
  Description of Artificial Sequence: Synthetic peptide
  Seed: GMDPRMCSLMQGSTLPRRSGAAGA
GMDPRMWSLLQTSTIPRRSGAAGA

SEQ ID NO: 88185 - protein, 24 aa, Artificial Sequence
  Description of Artificial Sequence: Synthetic peptide
  Seed: GMDPRMCSLMQGSTLPRRSGAAGA
GMDPRMWSLLQTSTLPRRSGAAGA

SEQ ID NO: 88186 - protein, 24 aa, Artificial Sequence
  Description of Artificial Sequence: Synthetic peptide
  Seed: GMDPRMCSLMQGSTLPRRSGAAGA
GMDPRMWSLLQTSTNPRRSGAAGA

SEQ ID NO: 88187 - protein, 24 aa, Artificial Sequence
  Description of Artificial Sequence: Synthetic peptide
  Seed: GMDPRMCSLMQGSTLPRRSGAAGA
GMDPRMWSLLQTSTSPRRSGAAGA

SEQ ID NO: 88188 - protein, 24 aa, Artificial Sequence
  Description of Artificial Sequence: Synthetic peptide
  Seed: GMDPRMCSLMQGSTLPRRSGAAGA
GMDPRMWSLLQTSTTPRRSGAAGA

SEQ ID NO: 88189 - protein, 24 aa, Artificial Sequence
  Description of Artificial Sequence: Synthetic peptide
  Seed: GMDPRMCSLMQGSTLPRRSGAAGA
GMDPRMWSLLQTSTVPRRSGAAGA

SEQ ID NO: 88190 - protein, 24 aa, Artificial Sequence
  Description of Artificial Sequence: Synthetic peptide
  Seed: GMDPRMCSLMQGSTLPRRSGAAGA
GMDPRMWSLLQVSTAPRRSGAAGA

SEQ ID NO: 88191 - protein, 24 aa, Artificial Sequence
  Description of Artificial Sequence: Synthetic peptide
  Seed: GMDPRMCSLMQGSTLPRRSGAAGA
GMDPRMWSLLQVSTNPRRSGAAGA

SEQ ID NO: 88192 - protein, 24 aa, Artificial Sequence
  Description of Artificial Sequence: Synthetic peptide
  Seed: GMDPRMCSLMQGSTLPRRSGAAGA
GMDPRMWSLLQVSTSPRRSGAAGA

SEQ ID NO: 88193 - protein, 24 aa, Artificial Sequence
  Description of Artificial Sequence: Synthetic peptide
  Seed: GMDPRMCSLMQGSTLPRRSGAAGA
GMDPRMWSLLQVSTTPRRSGAAGA

SEQ ID NO: 88194 - protein, 24 aa, Artificial Sequence
  Description of Artificial Sequence: Synthetic peptide
  Seed: GMDPRMCSLMQGSTLPRRSGAAGA
GMDPRMWSLMQASTAPRRSGAAGA

SEQ ID NO: 88195 - protein, 24 aa, Artificial Sequence
  Description of Artificial Sequence: Synthetic peptide
  Seed: GMDPRMCSLMQGSTLPRRSGAAGA
GMDPRMWSLMQASTGPRRSGAAGA

SEQ ID NO: 88196 - protein, 24 aa, Artificial Sequence
  Description of Artificial Sequence: Synthetic peptide
  Seed: GMDPRMCSLMQGSTLPRRSGAAGA
GMDPRMWSLMQASTHPRRSGAAGA

SEQ ID NO: 88197 - protein, 24 aa, Artificial Sequence
  Description of Artificial Sequence: Synthetic peptide
  Seed: GMDPRMCSLMQGSTLPRRSGAAGA
GMDPRMWSLMQASTIPRRSGAAGA

SEQ ID NO: 88198 - protein, 24 aa, Artificial Sequence
  Description of Artificial Sequence: Synthetic peptide
  Seed: GMDPRMCSLMQGSTLPRRSGAAGA
GMDPRMWSLMQASTLPRRSGAAGA

SEQ ID NO: 88199 - protein, 24 aa, Artificial Sequence
  Description of Artificial Sequence: Synthetic peptide
  Seed: GMDPRMCSLMQGSTLPRRSGAAGA
GMDPRMWSLMQASTMPRRSGAAGA

SEQ ID NO: 88200 - protein, 24 aa, Artificial Sequence
  Description of Artificial Sequence: Synthetic peptide
  Seed: GMDPRMCSLMQGSTLPRRSGAAGA
GMDPRMWSLMQASTNPRRSGAAGA

SEQ ID NO: 88201 - protein, 24 aa, Artificial Sequence
  Description of Artificial Sequence: Synthetic peptide
  Seed: GMDPRMCSLMQGSTLPRRSGAAGA
GMDPRMWSLMQASTQPRRSGAAGA

SEQ ID NO: 88202 - protein, 24 aa, Artificial Sequence
  Description of Artificial Sequence: Synthetic peptide
  Seed: GMDPRMCSLMQGSTLPRRSGAAGA
GMDPRMWSLMQASTSPRRSGAAGA

SEQ ID NO: 88203 - protein, 24 aa, Artificial Sequence
  Description of Artificial Sequence: Synthetic peptide
  Seed: GMDPRMCSLMQGSTLPRRSGAAGA
GMDPRMWSLMQASTTPRRSGAAGA

SEQ ID NO: 88204 - protein, 24 aa, Artificial Sequence
  Description of Artificial Sequence: Synthetic peptide
  Seed: GMDPRMCSLMQGSTLPRRSGAAGA
GMDPRMWSLMQASTVPRRSGAAGA

SEQ ID NO: 88205 - protein, 24 aa, Artificial Sequence
  Description of Artificial Sequence: Synthetic peptide
  Seed: GMDPRMCSLMQGSTLPRRSGAAGA
GMDPRMWSLMQGSTAPRRSGAAGA

SEQ ID NO: 88206 - protein, 24 aa, Artificial Sequence
  Description of Artificial Sequence: Synthetic peptide
  Seed: GMDPRMCSLMQGSTLPRRSGAAGA
GMDPRMWSLMQGSTGPRRSGAAGA

SEQ ID NO: 88207 - protein, 24 aa, Artificial Sequence
  Description of Artificial Sequence: Synthetic peptide
  Seed: GMDPRMCSLMQGSTLPRRSGAAGA
GMDPRMWSLMQGSTIPRRSGAAGA

SEQ ID NO: 88208 - protein, 24 aa, Artificial Sequence
  Description of Artificial Sequence: Synthetic peptide
  Seed: GMDPRMCSLMQGSTLPRRSGAAGA
GMDPRMWSLMQGSTLPRRSGAAGA

SEQ ID NO: 88209 - protein, 24 aa, Artificial Sequence
  Description of Artificial Sequence: Synthetic peptide
  Seed: GMDPRMCSLMQGSTLPRRSGAAGA
GMDPRMWSLMQGSTMPRRSGAAGA

SEQ ID NO: 88210 - protein, 24 aa, Artificial Sequence
  Description of Artificial Sequence: Synthetic peptide
  Seed: GMDPRMCSLMQGSTLPRRSGAAGA
GMDPRMWSLMQGSTSPRRSGAAGA

SEQ ID NO: 88211 - protein, 24 aa, Artificial Sequence
  Description of Artificial Sequence: Synthetic peptide
  Seed: GMDPRMCSLMQGSTLPRRSGAAGA
GMDPRMWSLMQGSTTPRRSGAAGA

SEQ ID NO: 88212 - protein, 24 aa, Artificial Sequence
  Description of Artificial Sequence: Synthetic peptide
  Seed: GMDPRMCSLMQGSTLPRRSGAAGA
GMDPRMWSLMQGSTVPRRSGAAGA

SEQ ID NO: 88213 - protein, 24 aa, Artificial Sequence
  Description of Artificial Sequence: Synthetic peptide
  Seed: GMDPRMCSLMQGSTLPRRSGAAGA
GMDPRMWSLMQISTAPRRSGAAGA

SEQ ID NO: 88214 - protein, 24 aa, Artificial Sequence
  Description of Artificial Sequence: Synthetic peptide
  Seed: GMDPRMCSLMQGSTLPRRSGAAGA
GMDPRMWSLMQISTNPRRSGAAGA

SEQ ID NO: 88215 - protein, 24 aa, Artificial Sequence
  Description of Artificial Sequence: Synthetic peptide
  Seed: GMDPRMCSLMQGSTLPRRSGAAGA
GMDPRMWSLMQISTSPRRSGAAGA

SEQ ID NO: 88216 - protein, 24 aa, Artificial Sequence
  Description of Artificial Sequence: Synthetic peptide
  Seed: GMDPRMCSLMQGSTLPRRSGAAGA
GMDPRMWSLMQNSTAPRRSGAAGA

SEQ ID NO: 88217 - protein, 24 aa, Artificial Sequence
  Description of Artificial Sequence: Synthetic peptide
  Seed: GMDPRMCSLMQGSTLPRRSGAAGA
GMDPRMWSLMQNSTIPRRSGAAGA

SEQ ID NO: 88218 - protein, 24 aa, Artificial Sequence
  Description of Artificial Sequence: Synthetic peptide
  Seed: GMDPRMCSLMQGSTLPRRSGAAGA
GMDPRMWSLMQNSTLPRRSGAAGA

SEQ ID NO: 88219 - protein, 24 aa, Artificial Sequence
  Description of Artificial Sequence: Synthetic peptide
  Seed: GMDPRMCSLMQGSTLPRRSGAAGA
GMDPRMWSLMQNSTVPRRSGAAGA

SEQ ID NO: 88220 - protein, 24 aa, Artificial Sequence
  Description of Artificial Sequence: Synthetic peptide
  Seed: GMDPRMCSLMQGSTLPRRSGAAGA
GMDPRMWSLMQPSTAPRRSGAAGA

SEQ ID NO: 88221 - protein, 24 aa, Artificial Sequence
  Description of Artificial Sequence: Synthetic peptide
  Seed: GMDPRMCSLMQGSTLPRRSGAAGA
GMDPRMWSLMQPSTIPRRSGAAGA

SEQ ID NO: 88222 - protein, 24 aa, Artificial Sequence
  Description of Artificial Sequence: Synthetic peptide
  Seed: GMDPRMCSLMQGSTLPRRSGAAGA
GMDPRMWSLMQPSTLPRRSGAAGA

SEQ ID NO: 88223 - protein, 24 aa, Artificial Sequence
  Description of Artificial Sequence: Synthetic peptide
  Seed: GMDPRMCSLMQGSTLPRRSGAAGA
GMDPRMWSLMQPSTMPRRSGAAGA

SEQ ID NO: 88224 - protein, 24 aa, Artificial Sequence
  Description of Artificial Sequence: Synthetic peptide
  Seed: GMDPRMCSLMQGSTLPRRSGAAGA
GMDPRMWSLMQPSTNPRRSGAAGA

SEQ ID NO: 88225 - protein, 24 aa, Artificial Sequence
  Description of Artificial Sequence: Synthetic peptide
  Seed: GMDPRMCSLMQGSTLPRRSGAAGA
GMDPRMWSLMQPSTSPRRSGAAGA

SEQ ID NO: 88226 - protein, 24 aa, Artificial Sequence
  Description of Artificial Sequence: Synthetic peptide
  Seed: GMDPRMCSLMQGSTLPRRSGAAGA
GMDPRMWSLMQPSTTPRRSGAAGA

SEQ ID NO: 88227 - protein, 24 aa, Artificial Sequence
  Description of Artificial Sequence: Synthetic peptide
  Seed: GMDPRMCSLMQGSTLPRRSGAAGA
GMDPRMWSLMQPSTVPRRSGAAGA

SEQ ID NO: 88228 - protein, 24 aa, Artificial Sequence
  Description of Artificial Sequence: Synthetic peptide
  Seed: GMDPRMCSLMQGSTLPRRSGAAGA
GMDPRMWSLMQSSTAPRRSGAAGA

SEQ ID NO: 88229 - protein, 24 aa, Artificial Sequence
  Description of Artificial Sequence: Synthetic peptide
  Seed: GMDPRMCSLMQGSTLPRRSGAAGA
GMDPRMWSLMQSSTIPRRSGAAGA

SEQ ID NO: 88230 - protein, 24 aa, Artificial Sequence
  Description of Artificial Sequence: Synthetic peptide
  Seed: GMDPRMCSLMQGSTLPRRSGAAGA
GMDPRMWSLMQSSTLPRRSGAAGA

SEQ ID NO: 88231 - protein, 24 aa, Artificial Sequence
  Description of Artificial Sequence: Synthetic peptide
  Seed: GMDPRMCSLMQGSTLPRRSGAAGA
GMDPRMWSLMQSSTMPRRSGAAGA

SEQ ID NO: 88232 - protein, 24 aa, Artificial Sequence
  Description of Artificial Sequence: Synthetic peptide
  Seed: GMDPRMCSLMQGSTLPRRSGAAGA
GMDPRMWSLMQSSTNPRRSGAAGA

SEQ ID NO: 88233 - protein, 24 aa, Artificial Sequence
  Description of Artificial Sequence: Synthetic peptide
  Seed: GMDPRMCSLMQGSTLPRRSGAAGA
GMDPRMWSLMQSSTSPRRSGAAGA

SEQ ID NO: 88234 - protein, 24 aa, Artificial Sequence
  Description of Artificial Sequence: Synthetic peptide
  Seed: GMDPRMCSLMQGSTLPRRSGAAGA
GMDPRMWSLMQSSTTPRRSGAAGA

SEQ ID NO: 88235 - protein, 24 aa, Artificial Sequence
  Description of Artificial Sequence: Synthetic peptide
  Seed: GMDPRMCSLMQGSTLPRRSGAAGA
GMDPRMWSLMQSSTVPRRSGAAGA

SEQ ID NO: 88236 - protein, 24 aa, Artificial Sequence
  Description of Artificial Sequence: Synthetic peptide
  Seed: GMDPRMCSLMQGSTLPRRSGAAGA
GMDPRMWSLMQTSTAPRRSGAAGA

SEQ ID NO: 88237 - protein, 24 aa, Artificial Sequence
  Description of Artificial Sequence: Synthetic peptide
  Seed: GMDPRMCSLMQGSTLPRRSGAAGA
GMDPRMWSLMQTSTIPRRSGAAGA

SEQ ID NO: 88238 - protein, 24 aa, Artificial Sequence
  Description of Artificial Sequence: Synthetic peptide
  Seed: GMDPRMCSLMQGSTLPRRSGAAGA
GMDPRMWSLMQTSTLPRRSGAAGA

SEQ ID NO: 88239 - protein, 24 aa, Artificial Sequence
  Description of Artificial Sequence: Synthetic peptide
  Seed: GMDPRMCSLMQGSTLPRRSGAAGA
GMDPRMWSLMQTSTMPRRSGAAGA

SEQ ID NO: 88240 - protein, 24 aa, Artificial Sequence
  Description of Artificial Sequence: Synthetic peptide
  Seed: GMDPRMCSLMQGSTLPRRSGAAGA
GMDPRMWSLMQTSTNPRRSGAAGA

SEQ ID NO: 88241 - protein, 24 aa, Artificial Sequence
  Description of Artificial Sequence: Synthetic peptide
  Seed: GMDPRMCSLMQGSTLPRRSGAAGA
GMDPRMWSLMQTSTSPRRSGAAGA

SEQ ID NO: 88242 - protein, 24 aa, Artificial Sequence
  Description of Artificial Sequence: Synthetic peptide
  Seed: GMDPRMCSLMQGSTLPRRSGAAGA
GMDPRMWSLMQTSTTPRRSGAAGA

SEQ ID NO: 88243 - protein, 24 aa, Artificial Sequence
  Description of Artificial Sequence: Synthetic peptide
  Seed: GMDPRMCSLMQGSTLPRRSGAAGA
GMDPRMWSLMQTSTVPRRSGAAGA

SEQ ID NO: 88244 - protein, 24 aa, Artificial Sequence
  Description of Artificial Sequence: Synthetic peptide
  Seed: GMDPRMCSLMQGSTLPRRSGAAGA
GMDPRMWSLMQVSTAPRRSGAAGA

SEQ ID NO: 88245 - protein, 24 aa, Artificial Sequence
  Description of Artificial Sequence: Synthetic peptide
  Seed: GMDPRMCSLMQGSTLPRRSGAAGA
GMDPRMWSLMQVSTNPRRSGAAGA

SEQ ID NO: 88246 - protein, 24 aa, Artificial Sequence
  Description of Artificial Sequence: Synthetic peptide
  Seed: GMDPRMCSLMQGSTLPRRSGAAGA
GMDPRMWSLMQVSTSPRRSGAAGA

SEQ ID NO: 88247 - protein, 24 aa, Artificial Sequence
  Description of Artificial Sequence: Synthetic peptide
  Seed: GMDPRMCSLMQGSTLPRRSGAAGA
GMDPRMWSLMQVSTTPRRSGAAGA

SEQ ID NO: 88248 - protein, 24 aa, Artificial Sequence
  Description of Artificial Sequence: Synthetic peptide
  Seed: GMDPRMCSLMQGSTLPRRSGAAGA
GMDPRMWSLMQVSTVPRRSGAAGA

SEQ ID NO: 88249 - protein, 24 aa, Artificial Sequence
  Description of Artificial Sequence: Synthetic peptide
  Seed: GMDPRMCSLMQGSTLPRRSGAAGA
GMDPRMWSLQQASTAPRRSGAAGA

SEQ ID NO: 88250 - protein, 24 aa, Artificial Sequence
  Description of Artificial Sequence: Synthetic peptide
  Seed: GMDPRMCSLMQGSTLPRRSGAAGA
GMDPRMWSLQQASTIPRRSGAAGA

SEQ ID NO: 88251 - protein, 24 aa, Artificial Sequence
  Description of Artificial Sequence: Synthetic peptide
  Seed: GMDPRMCSLMQGSTLPRRSGAAGA
GMDPRMWSLQQASTLPRRSGAAGA

SEQ ID NO: 88252 - protein, 24 aa, Artificial Sequence
  Description of Artificial Sequence: Synthetic peptide
  Seed: GMDPRMCSLMQGSTLPRRSGAAGA
GMDPRMWSLQQASTVPRRSGAAGA

SEQ ID NO: 88253 - protein, 24 aa, Artificial Sequence
  Description of Artificial Sequence: Synthetic peptide
  Seed: GMDPRMCSLMQGSTLPRRSGAAGA
GMDPRMWSLQQGSTIPRRSGAAGA

SEQ ID NO: 88254 - protein, 24 aa, Artificial Sequence
  Description of Artificial Sequence: Synthetic peptide
  Seed: GMDPRMCSLMQGSTLPRRSGAAGA
GMDPRMWSLQQGSTLPRRSGAAGA

SEQ ID NO: 88255 - protein, 24 aa, Artificial Sequence
  Description of Artificial Sequence: Synthetic peptide
  Seed: GMDPRMCSLMQGSTLPRRSGAAGA
GMDPRMWSLQQGSTVPRRSGAAGA

SEQ ID NO: 88256 - protein, 24 aa, Artificial Sequence
  Description of Artificial Sequence: Synthetic peptide
  Seed: GMDPRMCSLMQGSTLPRRSGAAGA
GMDPRMWSLQQSSTVPRRSGAAGA

SEQ ID NO: 88257 - protein, 24 aa, Artificial Sequence
  Description of Artificial Sequence: Synthetic peptide
  Seed: GMDPRMCSLMQGSTLPRRSGAAGA
GMDPRMWSLVQASTAPRRSGAAGA

SEQ ID NO: 88258 - protein, 24 aa, Artificial Sequence
  Description of Artificial Sequence: Synthetic peptide
  Seed: GMDPRMCSLMQGSTLPRRSGAAGA
GMDPRMWSLVQASTIPRRSGAAGA

SEQ ID NO: 88259 - protein, 24 aa, Artificial Sequence
  Description of Artificial Sequence: Synthetic peptide
  Seed: GMDPRMCSLMQGSTLPRRSGAAGA
GMDPRMWSLVQASTLPRRSGAAGA

SEQ ID NO: 88260 - protein, 24 aa, Artificial Sequence
  Description of Artificial Sequence: Synthetic peptide
  Seed: GMDPRMCSLMQGSTLPRRSGAAGA
GMDPRMWSLVQASTNPRRSGAAGA

SEQ ID NO: 88261 - protein, 24 aa, Artificial Sequence
  Description of Artificial Sequence: Synthetic peptide
  Seed: GMDPRMCSLMQGSTLPRRSGAAGA
GMDPRMWSLVQASTSPRRSGAAGA

SEQ ID NO: 88262 - protein, 24 aa, Artificial Sequence
  Description of Artificial Sequence: Synthetic peptide
  Seed: GMDPRMCSLMQGSTLPRRSGAAGA
GMDPRMWSLVQASTVPRRSGAAGA

SEQ ID NO: 88263 - protein, 24 aa, Artificial Sequence
  Description of Artificial Sequence: Synthetic peptide
  Seed: GMDPRMCSLMQGSTLPRRSGAAGA
GMDPRMWSLVQGSTAPRRSGAAGA

SEQ ID NO: 88264 - protein, 24 aa, Artificial Sequence
  Description of Artificial Sequence: Synthetic peptide
  Seed: GMDPRMCSLMQGSTLPRRSGAAGA
GMDPRMWSLVQGSTIPRRSGAAGA

SEQ ID NO: 88265 - protein, 24 aa, Artificial Sequence
  Description of Artificial Sequence: Synthetic peptide
  Seed: GMDPRMCSLMQGSTLPRRSGAAGA
GMDPRMWSLVQGSTLPRRSGAAGA

SEQ ID NO: 88266 - protein, 24 aa, Artificial Sequence
  Description of Artificial Sequence: Synthetic peptide
  Seed: GMDPRMCSLMQGSTLPRRSGAAGA
GMDPRMWSLVQGSTVPRRSGAAGA

SEQ ID NO: 88267 - protein, 24 aa, Artificial Sequence
  Description of Artificial Sequence: Synthetic peptide
  Seed: GMDPRMCSLMQGSTLPRRSGAAGA
GMDPRMWSLVQPSTAPRRSGAAGA

SEQ ID NO: 88268 - protein, 24 aa, Artificial Sequence
  Description of Artificial Sequence: Synthetic peptide
  Seed: GMDPRMCSLMQGSTLPRRSGAAGA
GMDPRMWSLVQSSTVPRRSGAAGA

SEQ ID NO: 88269 - protein, 24 aa, Artificial Sequence
  Description of Artificial Sequence: Synthetic peptide
  Seed: GMDPRMCSLMQGSTLPRRSGAAGA
GMDPRMYSLAQASTAPRRSGAAGA

SEQ ID NO: 88270 - protein, 24 aa, Artificial Sequence
  Description of Artificial Sequence: Synthetic peptide
  Seed: GMDPRMCSLMQGSTLPRRSGAAGA
GMDPRMYSLAQASTGPRRSGAAGA

SEQ ID NO: 88271 - protein, 24 aa, Artificial Sequence
  Description of Artificial Sequence: Synthetic peptide
  Seed: GMDPRMCSLMQGSTLPRRSGAAGA
GMDPRMYSLAQASTIPRRSGAAGA

SEQ ID NO: 88272 - protein, 24 aa, Artificial Sequence
  Description of Artificial Sequence: Synthetic peptide
  Seed: GMDPRMCSLMQGSTLPRRSGAAGA
GMDPRMYSLAQASTLPRRSGAAGA

SEQ ID NO: 88273 - protein, 24 aa, Artificial Sequence
  Description of Artificial Sequence: Synthetic peptide
  Seed: GMDPRMCSLMQGSTLPRRSGAAGA
GMDPRMYSLAQASTMPRRSGAAGA

SEQ ID NO: 88274 - protein, 24 aa, Artificial Sequence
  Description of Artificial Sequence: Synthetic peptide
  Seed: GMDPRMCSLMQGSTLPRRSGAAGA
GMDPRMYSLAQASTNPRRSGAAGA

SEQ ID NO: 88275 - protein, 24 aa, Artificial Sequence
  Description of Artificial Sequence: Synthetic peptide
  Seed: GMDPRMCSLMQGSTLPRRSGAAGA
GMDPRMYSLAQASTQPRRSGAAGA

SEQ ID NO: 88276 - protein, 24 aa, Artificial Sequence
  Description of Artificial Sequence: Synthetic peptide
  Seed: GMDPRMCSLMQGSTLPRRSGAAGA
GMDPRMYSLAQASTSPRRSGAAGA

SEQ ID NO: 88277 - protein, 24 aa, Artificial Sequence
  Description of Artificial Sequence: Synthetic peptide
  Seed: GMDPRMCSLMQGSTLPRRSGAAGA
GMDPRMYSLAQASTTPRRSGAAGA

SEQ ID NO: 88278 - protein, 24 aa, Artificial Sequence
  Description of Artificial Sequence: Synthetic peptide
  Seed: GMDPRMCSLMQGSTLPRRSGAAGA
GMDPRMYSLAQASTVPRRSGAAGA

SEQ ID NO: 88279 - protein, 24 aa, Artificial Sequence
  Description of Artificial Sequence: Synthetic peptide
  Seed: GMDPRMCSLMQGSTLPRRSGAAGA
GMDPRMYSLAQGSTAPRRSGAAGA

SEQ ID NO: 88280 - protein, 24 aa, Artificial Sequence
  Description of Artificial Sequence: Synthetic peptide
  Seed: GMDPRMCSLMQGSTLPRRSGAAGA
GMDPRMYSLAQGSTIPRRSGAAGA

SEQ ID NO: 88281 - protein, 24 aa, Artificial Sequence
  Description of Artificial Sequence: Synthetic peptide
  Seed: GMDPRMCSLMQGSTLPRRSGAAGA
GMDPRMYSLAQGSTLPRRSGAAGA

SEQ ID NO: 88282 - protein, 24 aa, Artificial Sequence
  Description of Artificial Sequence: Synthetic peptide
  Seed: GMDPRMCSLMQGSTLPRRSGAAGA
GMDPRMYSLAQGSTMPRRSGAAGA

SEQ ID NO: 88283 - protein, 24 aa, Artificial Sequence
  Description of Artificial Sequence: Synthetic peptide
  Seed: GMDPRMCSLMQGSTLPRRSGAAGA
GMDPRMYSLAQGSTTPRRSGAAGA

SEQ ID NO: 88284 - protein, 24 aa, Artificial Sequence
  Description of Artificial Sequence: Synthetic peptide
  Seed: GMDPRMCSLMQGSTLPRRSGAAGA
GMDPRMYSLAQGSTVPRRSGAAGA

SEQ ID NO: 88285 - protein, 24 aa, Artificial Sequence
  Description of Artificial Sequence: Synthetic peptide
  Seed: GMDPRMCSLMQGSTLPRRSGAAGA
GMDPRMYSLAQISTAPRRSGAAGA

SEQ ID NO: 88286 - protein, 24 aa, Artificial Sequence
  Description of Artificial Sequence: Synthetic peptide
  Seed: GMDPRMCSLMQGSTLPRRSGAAGA
GMDPRMYSLAQISTIPRRSGAAGA

SEQ ID NO: 88287 - protein, 24 aa, Artificial Sequence
  Description of Artificial Sequence: Synthetic peptide
  Seed: GMDPRMCSLMQGSTLPRRSGAAGA
GMDPRMYSLAQISTNPRRSGAAGA

SEQ ID NO: 88288 - protein, 24 aa, Artificial Sequence
  Description of Artificial Sequence: Synthetic peptide
  Seed: GMDPRMCSLMQGSTLPRRSGAAGA
GMDPRMYSLAQISTSPRRSGAAGA

SEQ ID NO: 88289 - protein, 24 aa, Artificial Sequence
  Description of Artificial Sequence: Synthetic peptide
  Seed: GMDPRMCSLMQGSTLPRRSGAAGA
GMDPRMYSLAQISTVPRRSGAAGA

SEQ ID NO: 88290 - protein, 24 aa, Artificial Sequence
  Description of Artificial Sequence: Synthetic peptide
  Seed: GMDPRMCSLMQGSTLPRRSGAAGA
GMDPRMYSLAQNSTIPRRSGAAGA

SEQ ID NO: 88291 - protein, 24 aa, Artificial Sequence
  Description of Artificial Sequence: Synthetic peptide
  Seed: GMDPRMCSLMQGSTLPRRSGAAGA
GMDPRMYSLAQNSTLPRRSGAAGA

SEQ ID NO: 88292 - protein, 24 aa, Artificial Sequence
  Description of Artificial Sequence: Synthetic peptide
  Seed: GMDPRMCSLMQGSTLPRRSGAAGA
GMDPRMYSLAQNSTVPRRSGAAGA

SEQ ID NO: 88293 - protein, 24 aa, Artificial Sequence
  Description of Artificial Sequence: Synthetic peptide
  Seed: GMDPRMCSLMQGSTLPRRSGAAGA
GMDPRMYSLAQPSTAPRRSGAAGA

SEQ ID NO: 88294 - protein, 24 aa, Artificial Sequence
  Description of Artificial Sequence: Synthetic peptide
  Seed: GMDPRMCSLMQGSTLPRRSGAAGA
GMDPRMYSLAQPSTIPRRSGAAGA

SEQ ID NO: 88295 - protein, 24 aa, Artificial Sequence
  Description of Artificial Sequence: Synthetic peptide
  Seed: GMDPRMCSLMQGSTLPRRSGAAGA
GMDPRMYSLAQPSTLPRRSGAAGA

SEQ ID NO: 88296 - protein, 24 aa, Artificial Sequence
  Description of Artificial Sequence: Synthetic peptide
  Seed: GMDPRMCSLMQGSTLPRRSGAAGA
GMDPRMYSLAQPSTMPRRSGAAGA

SEQ ID NO: 88297 - protein, 24 aa, Artificial Sequence
  Description of Artificial Sequence: Synthetic peptide
  Seed: GMDPRMCSLMQGSTLPRRSGAAGA
GMDPRMYSLAQPSTNPRRSGAAGA

SEQ ID NO: 88298 - protein, 24 aa, Artificial Sequence
  Description of Artificial Sequence: Synthetic peptide
  Seed: GMDPRMCSLMQGSTLPRRSGAAGA
GMDPRMYSLAQPSTSPRRSGAAGA

SEQ ID NO: 88299 - protein, 24 aa, Artificial Sequence
  Description of Artificial Sequence: Synthetic peptide
  Seed: GMDPRMCSLMQGSTLPRRSGAAGA
GMDPRMYSLAQPSTVPRRSGAAGA

SEQ ID NO: 88300 - protein, 24 aa, Artificial Sequence
  Description of Artificial Sequence: Synthetic peptide
  Seed: GMDPRMCSLMQGSTLPRRSGAAGA
GMDPRMYSLAQSSTAPRRSGAAGA

SEQ ID NO: 88301 - protein, 24 aa, Artificial Sequence
  Description of Artificial Sequence: Synthetic peptide
  Seed: GMDPRMCSLMQGSTLPRRSGAAGA
GMDPRMYSLAQSSTIPRRSGAAGA

SEQ ID NO: 88302 - protein, 24 aa, Artificial Sequence
  Description of Artificial Sequence: Synthetic peptide
  Seed: GMDPRMCSLMQGSTLPRRSGAAGA
GMDPRMYSLAQSSTLPRRSGAAGA

SEQ ID NO: 88303 - protein, 24 aa, Artificial Sequence
  Description of Artificial Sequence: Synthetic peptide
  Seed: GMDPRMCSLMQGSTLPRRSGAAGA
GMDPRMYSLAQSSTMPRRSGAAGA

SEQ ID NO: 88304 - protein, 24 aa, Artificial Sequence
  Description of Artificial Sequence: Synthetic peptide
  Seed: GMDPRMCSLMQGSTLPRRSGAAGA
GMDPRMYSLAQSSTNPRRSGAAGA

SEQ ID NO: 88305 - protein, 24 aa, Artificial Sequence
  Description of Artificial Sequence: Synthetic peptide
  Seed: GMDPRMCSLMQGSTLPRRSGAAGA
GMDPRMYSLAQSSTSPRRSGAAGA

SEQ ID NO: 88306 - protein, 24 aa, Artificial Sequence
  Description of Artificial Sequence: Synthetic peptide
  Seed: GMDPRMCSLMQGSTLPRRSGAAGA
GMDPRMYSLAQSSTTPRRSGAAGA

SEQ ID NO: 88307 - protein, 24 aa, Artificial Sequence
  Description of Artificial Sequence: Synthetic peptide
  Seed: GMDPRMCSLMQGSTLPRRSGAAGA
GMDPRMYSLAQSSTVPRRSGAAGA

SEQ ID NO: 88308 - protein, 24 aa, Artificial Sequence
  Description of Artificial Sequence: Synthetic peptide
  Seed: GMDPRMCSLMQGSTLPRRSGAAGA
GMDPRMYSLAQTSTAPRRSGAAGA

SEQ ID NO: 88309 - protein, 24 aa, Artificial Sequence
  Description of Artificial Sequence: Synthetic peptide
  Seed: GMDPRMCSLMQGSTLPRRSGAAGA
GMDPRMYSLAQTSTIPRRSGAAGA

SEQ ID NO: 88310 - protein, 24 aa, Artificial Sequence
  Description of Artificial Sequence: Synthetic peptide
  Seed: GMDPRMCSLMQGSTLPRRSGAAGA
GMDPRMYSLAQTSTLPRRSGAAGA

SEQ ID NO: 88311 - protein, 24 aa, Artificial Sequence
  Description of Artificial Sequence: Synthetic peptide
  Seed: GMDPRMCSLMQGSTLPRRSGAAGA
GMDPRMYSLAQTSTMPRRSGAAGA

SEQ ID NO: 88312 - protein, 24 aa, Artificial Sequence
  Description of Artificial Sequence: Synthetic peptide
  Seed: GMDPRMCSLMQGSTLPRRSGAAGA
GMDPRMYSLAQTSTNPRRSGAAGA

SEQ ID NO: 88313 - protein, 24 aa, Artificial Sequence
  Description of Artificial Sequence: Synthetic peptide
  Seed: GMDPRMCSLMQGSTLPRRSGAAGA
GMDPRMYSLAQTSTSPRRSGAAGA

SEQ ID NO: 88314 - protein, 24 aa, Artificial Sequence
  Description of Artificial Sequence: Synthetic peptide
  Seed: GMDPRMCSLMQGSTLPRRSGAAGA
GMDPRMYSLAQTSTVPRRSGAAGA

SEQ ID NO: 88315 - protein, 24 aa, Artificial Sequence
  Description of Artificial Sequence: Synthetic peptide
  Seed: GMDPRMCSLMQGSTLPRRSGAAGA
GMDPRMYSLAQVSTAPRRSGAAGA

SEQ ID NO: 88316 - protein, 24 aa, Artificial Sequence
  Description of Artificial Sequence: Synthetic peptide
  Seed: GMDPRMCSLMQGSTLPRRSGAAGA
GMDPRMYSLAQVSTIPRRSGAAGA

SEQ ID NO: 88317 - protein, 24 aa, Artificial Sequence
  Description of Artificial Sequence: Synthetic peptide
  Seed: GMDPRMCSLMQGSTLPRRSGAAGA
GMDPRMYSLAQVSTLPRRSGAAGA

SEQ ID NO: 88318 - protein, 24 aa, Artificial Sequence
  Description of Artificial Sequence: Synthetic peptide
  Seed: GMDPRMCSLMQGSTLPRRSGAAGA
GMDPRMYSLAQVSTMPRRSGAAGA

SEQ ID NO: 88319 - protein, 24 aa, Artificial Sequence
  Description of Artificial Sequence: Synthetic peptide
  Seed: GMDPRMCSLMQGSTLPRRSGAAGA
GMDPRMYSLAQVSTNPRRSGAAGA

SEQ ID NO: 88320 - protein, 24 aa, Artificial Sequence
  Description of Artificial Sequence: Synthetic peptide
  Seed: GMDPRMCSLMQGSTLPRRSGAAGA
GMDPRMYSLAQVSTSPRRSGAAGA

SEQ ID NO: 88321 - protein, 24 aa, Artificial Sequence
  Description of Artificial Sequence: Synthetic peptide
  Seed: GMDPRMCSLMQGSTLPRRSGAAGA
GMDPRMYSLAQVSTTPRRSGAAGA

SEQ ID NO: 88322 - protein, 24 aa, Artificial Sequence
  Description of Artificial Sequence: Synthetic peptide
  Seed: GMDPRMCSLMQGSTLPRRSGAAGA
GMDPRMYSLAQVSTVPRRSGAAGA

SEQ ID NO: 88323 - protein, 24 aa, Artificial Sequence
  Description of Artificial Sequence: Synthetic peptide
  Seed: GMDPRMCSLMQGSTLPRRSGAAGA
GMDPRMYSLEQASTAPRRSGAAGA

SEQ ID NO: 88324 - protein, 24 aa, Artificial Sequence
  Description of Artificial Sequence: Synthetic peptide
  Seed: GMDPRMCSLMQGSTLPRRSGAAGA
GMDPRMYSLEQASTIPRRSGAAGA

SEQ ID NO: 88325 - protein, 24 aa, Artificial Sequence
  Description of Artificial Sequence: Synthetic peptide
  Seed: GMDPRMCSLMQGSTLPRRSGAAGA
GMDPRMYSLEQASTLPRRSGAAGA

SEQ ID NO: 88326 - protein, 24 aa, Artificial Sequence
  Description of Artificial Sequence: Synthetic peptide
  Seed: GMDPRMCSLMQGSTLPRRSGAAGA
GMDPRMYSLEQASTVPRRSGAAGA

SEQ ID NO: 88327 - protein, 24 aa, Artificial Sequence
  Description of Artificial Sequence: Synthetic peptide
  Seed: GMDPRMCSLMQGSTLPRRSGAAGA
GMDPRMYSLEQGSTLPRRSGAAGA

SEQ ID NO: 88328 - protein, 24 aa, Artificial Sequence
  Description of Artificial Sequence: Synthetic peptide
  Seed: GMDPRMCSLMQGSTLPRRSGAAGA
GMDPRMYSLFQASTAPRRSGAAGA

SEQ ID NO: 88329 - protein, 24 aa, Artificial Sequence
  Description of Artificial Sequence: Synthetic peptide
  Seed: GMDPRMCSLMQGSTLPRRSGAAGA
GMDPRMYSLFQASTIPRRSGAAGA

SEQ ID NO: 88330 - protein, 24 aa, Artificial Sequence
  Description of Artificial Sequence: Synthetic peptide
  Seed: GMDPRMCSLMQGSTLPRRSGAAGA
GMDPRMYSLFQASTLPRRSGAAGA

SEQ ID NO: 88331 - protein, 24 aa, Artificial Sequence
  Description of Artificial Sequence: Synthetic peptide
  Seed: GMDPRMCSLMQGSTLPRRSGAAGA
GMDPRMYSLFQASTNPRRSGAAGA

SEQ ID NO: 88332 - protein, 24 aa, Artificial Sequence
  Description of Artificial Sequence: Synthetic peptide
  Seed: GMDPRMCSLMQGSTLPRRSGAAGA
GMDPRMYSLFQASTSPRRSGAAGA

SEQ ID NO: 88333 - protein, 24 aa, Artificial Sequence
  Description of Artificial Sequence: Synthetic peptide
  Seed: GMDPRMCSLMQGSTLPRRSGAAGA
GMDPRMYSLFQASTVPRRSGAAGA

SEQ ID NO: 88334 - protein, 24 aa, Artificial Sequence
  Description of Artificial Sequence: Synthetic peptide
  Seed: GMDPRMCSLMQGSTLPRRSGAAGA
GMDPRMYSLFQGSTVPRRSGAAGA

SEQ ID NO: 88335 - protein, 24 aa, Artificial Sequence
  Description of Artificial Sequence: Synthetic peptide
  Seed: GMDPRMCSLMQGSTLPRRSGAAGA
GMDPRMYSLFQPSTAPRRSGAAGA

SEQ ID NO: 88336 - protein, 24 aa, Artificial Sequence
  Description of Artificial Sequence: Synthetic peptide
  Seed: GMDPRMCSLMQGSTLPRRSGAAGA
GMDPRMYSLFQSSTAPRRSGAAGA

SEQ ID NO: 88337 - protein, 24 aa, Artificial Sequence
  Description of Artificial Sequence: Synthetic peptide
  Seed: GMDPRMCSLMQGSTLPRRSGAAGA
GMDPRMYSLFQSSTLPRRSGAAGA

SEQ ID NO: 88338 - protein, 24 aa, Artificial Sequence
  Description of Artificial Sequence: Synthetic peptide
  Seed: GMDPRMCSLMQGSTLPRRSGAAGA
GMDPRMYSLFQSSTVPRRSGAAGA

SEQ ID NO: 88339 - protein, 24 aa, Artificial Sequence
  Description of Artificial Sequence: Synthetic peptide
  Seed: GMDPRMCSLMQGSTLPRRSGAAGA
GMDPRMYSLFQTSTAPRRSGAAGA

SEQ ID NO: 88340 - protein, 24 aa, Artificial Sequence
  Description of Artificial Sequence: Synthetic peptide
  Seed: GMDPRMCSLMQGSTLPRRSGAAGA
GMDPRMYSLFQVSTAPRRSGAAGA

SEQ ID NO: 88341 - protein, 24 aa, Artificial Sequence
  Description of Artificial Sequence: Synthetic peptide
  Seed: GMDPRMCSLMQGSTLPRRSGAAGA
GMDPRMYSLGQASTIPRRSGAAGA

SEQ ID NO: 88342 - protein, 24 aa, Artificial Sequence
  Description of Artificial Sequence: Synthetic peptide
  Seed: GMDPRMCSLMQGSTLPRRSGAAGA
GMDPRMYSLGQASTLPRRSGAAGA

SEQ ID NO: 88343 - protein, 24 aa, Artificial Sequence
  Description of Artificial Sequence: Synthetic peptide
  Seed: GMDPRMCSLMQGSTLPRRSGAAGA
GMDPRMYSLGQASTVPRRSGAAGA

SEQ ID NO: 88344 - protein, 24 aa, Artificial Sequence
  Description of Artificial Sequence: Synthetic peptide
  Seed: GMDPRMCSLMQGSTLPRRSGAAGA
GMDPRMYSLIQASTAPRRSGAAGA

SEQ ID NO: 88345 - protein, 24 aa, Artificial Sequence
  Description of Artificial Sequence: Synthetic peptide
  Seed: GMDPRMCSLMQGSTLPRRSGAAGA
GMDPRMYSLIQASTCPRRSGAAGA

SEQ ID NO: 88346 - protein, 24 aa, Artificial Sequence
  Description of Artificial Sequence: Synthetic peptide
  Seed: GMDPRMCSLMQGSTLPRRSGAAGA
GMDPRMYSLIQASTGPRRSGAAGA

SEQ ID NO: 88347 - protein, 24 aa, Artificial Sequence
  Description of Artificial Sequence: Synthetic peptide
  Seed: GMDPRMCSLMQGSTLPRRSGAAGA
GMDPRMYSLIQASTHPRRSGAAGA

SEQ ID NO: 88348 - protein, 24 aa, Artificial Sequence
  Description of Artificial Sequence: Synthetic peptide
  Seed: GMDPRMCSLMQGSTLPRRSGAAGA
GMDPRMYSLIQASTIPRRSGAAGA

SEQ ID NO: 88349 - protein, 24 aa, Artificial Sequence
  Description of Artificial Sequence: Synthetic peptide
  Seed: GMDPRMCSLMQGSTLPRRSGAAGA
GMDPRMYSLIQASTLPRRSGAAGA

SEQ ID NO: 88350 - protein, 24 aa, Artificial Sequence
  Description of Artificial Sequence: Synthetic peptide
  Seed: GMDPRMCSLMQGSTLPRRSGAAGA
GMDPRMYSLIQASTMPRRSGAAGA

SEQ ID NO: 88351 - protein, 24 aa, Artificial Sequence
  Description of Artificial Sequence: Synthetic peptide
  Seed: GMDPRMCSLMQGSTLPRRSGAAGA
GMDPRMYSLIQASTNPRRSGAAGA

SEQ ID NO: 88352 - protein, 24 aa, Artificial Sequence
  Description of Artificial Sequence: Synthetic peptide
  Seed: GMDPRMCSLMQGSTLPRRSGAAGA
GMDPRMYSLIQASTPPRRSGAAGA

SEQ ID NO: 88353 - protein, 24 aa, Artificial Sequence
  Description of Artificial Sequence: Synthetic peptide
  Seed: GMDPRMCSLMQGSTLPRRSGAAGA
GMDPRMYSLIQASTQPRRSGAAGA

SEQ ID NO: 88354 - protein, 24 aa, Artificial Sequence
  Description of Artificial Sequence: Synthetic peptide
  Seed: GMDPRMCSLMQGSTLPRRSGAAGA
GMDPRMYSLIQASTSPRRSGAAGA

SEQ ID NO: 88355 - protein, 24 aa, Artificial Sequence
  Description of Artificial Sequence: Synthetic peptide
  Seed: GMDPRMCSLMQGSTLPRRSGAAGA
GMDPRMYSLIQASTTPRRSGAAGA

SEQ ID NO: 88356 - protein, 24 aa, Artificial Sequence
  Description of Artificial Sequence: Synthetic peptide
  Seed: GMDPRMCSLMQGSTLPRRSGAAGA
GMDPRMYSLIQASTVPRRSGAAGA

SEQ ID NO: 88357 - protein, 24 aa, Artificial Sequence
  Description of Artificial Sequence: Synthetic peptide
  Seed: GMDPRMCSLMQGSTLPRRSGAAGA
GMDPRMYSLIQGSTAPRRSGAAGA

SEQ ID NO: 88358 - protein, 24 aa, Artificial Sequence
  Description of Artificial Sequence: Synthetic peptide
  Seed: GMDPRMCSLMQGSTLPRRSGAAGA
GMDPRMYSLIQGSTGPRRSGAAGA

SEQ ID NO: 88359 - protein, 24 aa, Artificial Sequence
  Description of Artificial Sequence: Synthetic peptide
  Seed: GMDPRMCSLMQGSTLPRRSGAAGA
GMDPRMYSLIQGSTIPRRSGAAGA

SEQ ID NO: 88360 - protein, 24 aa, Artificial Sequence
  Description of Artificial Sequence: Synthetic peptide
  Seed: GMDPRMCSLMQGSTLPRRSGAAGA
GMDPRMYSLIQGSTLPRRSGAAGA

SEQ ID NO: 88361 - protein, 24 aa, Artificial Sequence
  Description of Artificial Sequence: Synthetic peptide
  Seed: GMDPRMCSLMQGSTLPRRSGAAGA
GMDPRMYSLIQGSTMPRRSGAAGA

SEQ ID NO: 88362 - protein, 24 aa, Artificial Sequence
  Description of Artificial Sequence: Synthetic peptide
  Seed: GMDPRMCSLMQGSTLPRRSGAAGA
GMDPRMYSLIQGSTNPRRSGAAGA

SEQ ID NO: 88363 - protein, 24 aa, Artificial Sequence
  Description of Artificial Sequence: Synthetic peptide
  Seed: GMDPRMCSLMQGSTLPRRSGAAGA
GMDPRMYSLIQGSTSPRRSGAAGA

SEQ ID NO: 88364 - protein, 24 aa, Artificial Sequence
  Description of Artificial Sequence: Synthetic peptide
  Seed: GMDPRMCSLMQGSTLPRRSGAAGA
GMDPRMYSLIQGSTTPRRSGAAGA

SEQ ID NO: 88365 - protein, 24 aa, Artificial Sequence
  Description of Artificial Sequence: Synthetic peptide
  Seed: GMDPRMCSLMQGSTLPRRSGAAGA
GMDPRMYSLIQGSTVPRRSGAAGA

SEQ ID NO: 88366 - protein, 24 aa, Artificial Sequence
  Description of Artificial Sequence: Synthetic peptide
  Seed: GMDPRMCSLMQGSTLPRRSGAAGA
GMDPRMYSLIQISTAPRRSGAAGA

SEQ ID NO: 88367 - protein, 24 aa, Artificial Sequence
  Description of Artificial Sequence: Synthetic peptide
  Seed: GMDPRMCSLMQGSTLPRRSGAAGA
GMDPRMYSLIQISTGPRRSGAAGA

SEQ ID NO: 88368 - protein, 24 aa, Artificial Sequence
  Description of Artificial Sequence: Synthetic peptide
  Seed: GMDPRMCSLMQGSTLPRRSGAAGA
GMDPRMYSLIQISTIPRRSGAAGA

SEQ ID NO: 88369 - protein, 24 aa, Artificial Sequence
  Description of Artificial Sequence: Synthetic peptide
  Seed: GMDPRMCSLMQGSTLPRRSGAAGA
GMDPRMYSLIQISTLPRRSGAAGA

SEQ ID NO: 88370 - protein, 24 aa, Artificial Sequence
  Description of Artificial Sequence: Synthetic peptide
  Seed: GMDPRMCSLMQGSTLPRRSGAAGA
GMDPRMYSLIQISTMPRRSGAAGA

SEQ ID NO: 88371 - protein, 24 aa, Artificial Sequence
  Description of Artificial Sequence: Synthetic peptide
  Seed: GMDPRMCSLMQGSTLPRRSGAAGA
GMDPRMYSLIQISTNPRRSGAAGA

SEQ ID NO: 88372 - protein, 24 aa, Artificial Sequence
  Description of Artificial Sequence: Synthetic peptide
  Seed: GMDPRMCSLMQGSTLPRRSGAAGA
GMDPRMYSLIQISTSPRRSGAAGA

SEQ ID NO: 88373 - protein, 24 aa, Artificial Sequence
  Description of Artificial Sequence: Synthetic peptide
  Seed: GMDPRMCSLMQGSTLPRRSGAAGA
GMDPRMYSLIQISTTPRRSGAAGA

SEQ ID NO: 88374 - protein, 24 aa, Artificial Sequence
  Description of Artificial Sequence: Synthetic peptide
  Seed: GMDPRMCSLMQGSTLPRRSGAAGA
GMDPRMYSLIQISTVPRRSGAAGA

SEQ ID NO: 88375 - protein, 24 aa, Artificial Sequence
  Description of Artificial Sequence: Synthetic peptide
  Seed: GMDPRMCSLMQGSTLPRRSGAAGA
GMDPRMYSLIQLSTAPRRSGAAGA

SEQ ID NO: 88376 - protein, 24 aa, Artificial Sequence
  Description of Artificial Sequence: Synthetic peptide
  Seed: GMDPRMCSLMQGSTLPRRSGAAGA
GMDPRMYSLIQLSTNPRRSGAAGA

SEQ ID NO: 88377 - protein, 24 aa, Artificial Sequence
  Description of Artificial Sequence: Synthetic peptide
  Seed: GMDPRMCSLMQGSTLPRRSGAAGA
GMDPRMYSLIQLSTSPRRSGAAGA

SEQ ID NO: 88378 - protein, 24 aa, Artificial Sequence
  Description of Artificial Sequence: Synthetic peptide
  Seed: GMDPRMCSLMQGSTLPRRSGAAGA
GMDPRMYSLIQMSTAPRRSGAAGA

SEQ ID NO: 88379 - protein, 24 aa, Artificial Sequence
  Description of Artificial Sequence: Synthetic peptide
  Seed: GMDPRMCSLMQGSTLPRRSGAAGA
GMDPRMYSLIQNSTAPRRSGAAGA

SEQ ID NO: 88380 - protein, 24 aa, Artificial Sequence
  Description of Artificial Sequence: Synthetic peptide
  Seed: GMDPRMCSLMQGSTLPRRSGAAGA
GMDPRMYSLIQNSTIPRRSGAAGA

SEQ ID NO: 88381 - protein, 24 aa, Artificial Sequence
  Description of Artificial Sequence: Synthetic peptide
  Seed: GMDPRMCSLMQGSTLPRRSGAAGA
GMDPRMYSLIQNSTLPRRSGAAGA

SEQ ID NO: 88382 - protein, 24 aa, Artificial Sequence
  Description of Artificial Sequence: Synthetic peptide
  Seed: GMDPRMCSLMQGSTLPRRSGAAGA
GMDPRMYSLIQNSTNPRRSGAAGA

SEQ ID NO: 88383 - protein, 24 aa, Artificial Sequence
  Description of Artificial Sequence: Synthetic peptide
  Seed: GMDPRMCSLMQGSTLPRRSGAAGA
GMDPRMYSLIQNSTSPRRSGAAGA

SEQ ID NO: 88384 - protein, 24 aa, Artificial Sequence
  Description of Artificial Sequence: Synthetic peptide
  Seed: GMDPRMCSLMQGSTLPRRSGAAGA
GMDPRMYSLIQNSTVPRRSGAAGA

SEQ ID NO: 88385 - protein, 24 aa, Artificial Sequence
  Description of Artificial Sequence: Synthetic peptide
  Seed: GMDPRMCSLMQGSTLPRRSGAAGA
GMDPRMYSLIQPSTAPRRSGAAGA

SEQ ID NO: 88386 - protein, 24 aa, Artificial Sequence
  Description of Artificial Sequence: Synthetic peptide
  Seed: GMDPRMCSLMQGSTLPRRSGAAGA
GMDPRMYSLIQPSTGPRRSGAAGA

SEQ ID NO: 88387 - protein, 24 aa, Artificial Sequence
  Description of Artificial Sequence: Synthetic peptide
  Seed: GMDPRMCSLMQGSTLPRRSGAAGA
GMDPRMYSLIQPSTIPRRSGAAGA

SEQ ID NO: 88388 - protein, 24 aa, Artificial Sequence
  Description of Artificial Sequence: Synthetic peptide
  Seed: GMDPRMCSLMQGSTLPRRSGAAGA
GMDPRMYSLIQPSTLPRRSGAAGA

SEQ ID NO: 88389 - protein, 24 aa, Artificial Sequence
  Description of Artificial Sequence: Synthetic peptide
  Seed: GMDPRMCSLMQGSTLPRRSGAAGA
GMDPRMYSLIQPSTMPRRSGAAGA

SEQ ID NO: 88390 - protein, 24 aa, Artificial Sequence
  Description of Artificial Sequence: Synthetic peptide
  Seed: GMDPRMCSLMQGSTLPRRSGAAGA
GMDPRMYSLIQPSTNPRRSGAAGA

SEQ ID NO: 88391 - protein, 24 aa, Artificial Sequence
  Description of Artificial Sequence: Synthetic peptide
  Seed: GMDPRMCSLMQGSTLPRRSGAAGA
GMDPRMYSLIQPSTQPRRSGAAGA

SEQ ID NO: 88392 - protein, 24 aa, Artificial Sequence
  Description of Artificial Sequence: Synthetic peptide
  Seed: GMDPRMCSLMQGSTLPRRSGAAGA
GMDPRMYSLIQPSTSPRRSGAAGA

SEQ ID NO: 88393 - protein, 24 aa, Artificial Sequence
  Description of Artificial Sequence: Synthetic peptide
  Seed: GMDPRMCSLMQGSTLPRRSGAAGA
GMDPRMYSLIQPSTTPRRSGAAGA

SEQ ID NO: 88394 - protein, 24 aa, Artificial Sequence
  Description of Artificial Sequence: Synthetic peptide
  Seed: GMDPRMCSLMQGSTLPRRSGAAGA
GMDPRMYSLIQPSTVPRRSGAAGA

SEQ ID NO: 88395 - protein, 24 aa, Artificial Sequence
  Description of Artificial Sequence: Synthetic peptide
  Seed: GMDPRMCSLMQGSTLPRRSGAAGA
GMDPRMYSLIQSSTAPRRSGAAGA

SEQ ID NO: 88396 - protein, 24 aa, Artificial Sequence
  Description of Artificial Sequence: Synthetic peptide
  Seed: GMDPRMCSLMQGSTLPRRSGAAGA
GMDPRMYSLIQSSTGPRRSGAAGA

SEQ ID NO: 88397 - protein, 24 aa, Artificial Sequence
  Description of Artificial Sequence: Synthetic peptide
  Seed: GMDPRMCSLMQGSTLPRRSGAAGA
GMDPRMYSLIQSSTIPRRSGAAGA

SEQ ID NO: 88398 - protein, 24 aa, Artificial Sequence
  Description of Artificial Sequence: Synthetic peptide
  Seed: GMDPRMCSLMQGSTLPRRSGAAGA
GMDPRMYSLIQSSTLPRRSGAAGA

SEQ ID NO: 88399 - protein, 24 aa, Artificial Sequence
  Description of Artificial Sequence: Synthetic peptide
  Seed: GMDPRMCSLMQGSTLPRRSGAAGA
GMDPRMYSLIQSSTMPRRSGAAGA

SEQ ID NO: 88400 - protein, 24 aa, Artificial Sequence
  Description of Artificial Sequence: Synthetic peptide
  Seed: GMDPRMCSLMQGSTLPRRSGAAGA
GMDPRMYSLIQSSTNPRRSGAAGA

SEQ ID NO: 88401 - protein, 24 aa, Artificial Sequence
  Description of Artificial Sequence: Synthetic peptide
  Seed: GMDPRMCSLMQGSTLPRRSGAAGA
GMDPRMYSLIQSSTSPRRSGAAGA

SEQ ID NO: 88402 - protein, 24 aa, Artificial Sequence
  Description of Artificial Sequence: Synthetic peptide
  Seed: GMDPRMCSLMQGSTLPRRSGAAGA
GMDPRMYSLIQSSTTPRRSGAAGA

SEQ ID NO: 88403 - protein, 24 aa, Artificial Sequence
  Description of Artificial Sequence: Synthetic peptide
  Seed: GMDPRMCSLMQGSTLPRRSGAAGA
GMDPRMYSLIQSSTVPRRSGAAGA

SEQ ID NO: 88404 - protein, 24 aa, Artificial Sequence
  Description of Artificial Sequence: Synthetic peptide
  Seed: GMDPRMCSLMQGSTLPRRSGAAGA
GMDPRMYSLIQTSTAPRRSGAAGA

SEQ ID NO: 88405 - protein, 24 aa, Artificial Sequence
  Description of Artificial Sequence: Synthetic peptide
  Seed: GMDPRMCSLMQGSTLPRRSGAAGA
GMDPRMYSLIQTSTGPRRSGAAGA

SEQ ID NO: 88406 - protein, 24 aa, Artificial Sequence
  Description of Artificial Sequence: Synthetic peptide
  Seed: GMDPRMCSLMQGSTLPRRSGAAGA
GMDPRMYSLIQTSTIPRRSGAAGA

SEQ ID NO: 88407 - protein, 24 aa, Artificial Sequence
  Description of Artificial Sequence: Synthetic peptide
  Seed: GMDPRMCSLMQGSTLPRRSGAAGA
GMDPRMYSLIQTSTLPRRSGAAGA

SEQ ID NO: 88408 - protein, 24 aa, Artificial Sequence
  Description of Artificial Sequence: Synthetic peptide
  Seed: GMDPRMCSLMQGSTLPRRSGAAGA
GMDPRMYSLIQTSTMPRRSGAAGA

SEQ ID NO: 88409 - protein, 24 aa, Artificial Sequence
  Description of Artificial Sequence: Synthetic peptide
  Seed: GMDPRMCSLMQGSTLPRRSGAAGA
GMDPRMYSLIQTSTNPRRSGAAGA

SEQ ID NO: 88410 - protein, 24 aa, Artificial Sequence
  Description of Artificial Sequence: Synthetic peptide
  Seed: GMDPRMCSLMQGSTLPRRSGAAGA
GMDPRMYSLIQTSTSPRRSGAAGA

SEQ ID NO: 88411 - protein, 24 aa, Artificial Sequence
  Description of Artificial Sequence: Synthetic peptide
  Seed: GMDPRMCSLMQGSTLPRRSGAAGA
GMDPRMYSLIQTSTTPRRSGAAGA

SEQ ID NO: 88412 - protein, 24 aa, Artificial Sequence
  Description of Artificial Sequence: Synthetic peptide
  Seed: GMDPRMCSLMQGSTLPRRSGAAGA
GMDPRMYSLIQTSTVPRRSGAAGA

SEQ ID NO: 88413 - protein, 24 aa, Artificial Sequence
  Description of Artificial Sequence: Synthetic peptide
  Seed: GMDPRMCSLMQGSTLPRRSGAAGA
GMDPRMYSLIQVSTAPRRSGAAGA

SEQ ID NO: 88414 - protein, 24 aa, Artificial Sequence
  Description of Artificial Sequence: Synthetic peptide
  Seed: GMDPRMCSLMQGSTLPRRSGAAGA
GMDPRMYSLIQVSTGPRRSGAAGA

SEQ ID NO: 88415 - protein, 24 aa, Artificial Sequence
  Description of Artificial Sequence: Synthetic peptide
  Seed: GMDPRMCSLMQGSTLPRRSGAAGA
GMDPRMYSLIQVSTHPRRSGAAGA

SEQ ID NO: 88416 - protein, 24 aa, Artificial Sequence
  Description of Artificial Sequence: Synthetic peptide
  Seed: GMDPRMCSLMQGSTLPRRSGAAGA
GMDPRMYSLIQVSTIPRRSGAAGA

SEQ ID NO: 88417 - protein, 24 aa, Artificial Sequence
  Description of Artificial Sequence: Synthetic peptide
  Seed: GMDPRMCSLMQGSTLPRRSGAAGA
GMDPRMYSLIQVSTLPRRSGAAGA

SEQ ID NO: 88418 - protein, 24 aa, Artificial Sequence
  Description of Artificial Sequence: Synthetic peptide
  Seed: GMDPRMCSLMQGSTLPRRSGAAGA
GMDPRMYSLIQVSTMPRRSGAAGA

SEQ ID NO: 88419 - protein, 24 aa, Artificial Sequence
  Description of Artificial Sequence: Synthetic peptide
  Seed: GMDPRMCSLMQGSTLPRRSGAAGA
GMDPRMYSLIQVSTNPRRSGAAGA

SEQ ID NO: 88420 - protein, 24 aa, Artificial Sequence
  Description of Artificial Sequence: Synthetic peptide
  Seed: GMDPRMCSLMQGSTLPRRSGAAGA
GMDPRMYSLIQVSTSPRRSGAAGA

SEQ ID NO: 88421 - protein, 24 aa, Artificial Sequence
  Description of Artificial Sequence: Synthetic peptide
  Seed: GMDPRMCSLMQGSTLPRRSGAAGA
GMDPRMYSLIQVSTTPRRSGAAGA

SEQ ID NO: 88422 - protein, 24 aa, Artificial Sequence
  Description of Artificial Sequence: Synthetic peptide
  Seed: GMDPRMCSLMQGSTLPRRSGAAGA
GMDPRMYSLIQVSTVPRRSGAAGA

SEQ ID NO: 88423 - protein, 24 aa, Artificial Sequence
  Description of Artificial Sequence: Synthetic peptide
  Seed: GMDPRMCSLMQGSTLPRRSGAAGA
GMDPRMYSLLQASTAPRRSGAAGA

SEQ ID NO: 88424 - protein, 24 aa, Artificial Sequence
  Description of Artificial Sequence: Synthetic peptide
  Seed: GMDPRMCSLMQGSTLPRRSGAAGA
GMDPRMYSLLQASTCPRRSGAAGA

SEQ ID NO: 88425 - protein, 24 aa, Artificial Sequence
  Description of Artificial Sequence: Synthetic peptide
  Seed: GMDPRMCSLMQGSTLPRRSGAAGA
GMDPRMYSLLQASTDPRRSGAAGA

SEQ ID NO: 88426 - protein, 24 aa, Artificial Sequence
  Description of Artificial Sequence: Synthetic peptide
  Seed: GMDPRMCSLMQGSTLPRRSGAAGA
GMDPRMYSLLQASTEPRRSGAAGA

SEQ ID NO: 88427 - protein, 24 aa, Artificial Sequence
  Description of Artificial Sequence: Synthetic peptide
  Seed: GMDPRMCSLMQGSTLPRRSGAAGA
GMDPRMYSLLQASTFPRRSGAAGA

SEQ ID NO: 88428 - protein, 24 aa, Artificial Sequence
  Description of Artificial Sequence: Synthetic peptide
  Seed: GMDPRMCSLMQGSTLPRRSGAAGA
GMDPRMYSLLQASTGPRRSGAAGA

SEQ ID NO: 88429 - protein, 24 aa, Artificial Sequence
  Description of Artificial Sequence: Synthetic peptide
  Seed: GMDPRMCSLMQGSTLPRRSGAAGA
GMDPRMYSLLQASTHPRRSGAAGA

SEQ ID NO: 88430 - protein, 24 aa, Artificial Sequence
  Description of Artificial Sequence: Synthetic peptide
  Seed: GMDPRMCSLMQGSTLPRRSGAAGA
GMDPRMYSLLQASTIPRRSGAAGA

SEQ ID NO: 88431 - protein, 24 aa, Artificial Sequence
  Description of Artificial Sequence: Synthetic peptide
  Seed: GMDPRMCSLMQGSTLPRRSGAAGA
GMDPRMYSLLQASTLPRRSGAAGA

SEQ ID NO: 88432 - protein, 24 aa, Artificial Sequence
  Description of Artificial Sequence: Synthetic peptide
  Seed: GMDPRMCSLMQGSTLPRRSGAAGA
GMDPRMYSLLQASTMPRRSGAAGA

SEQ ID NO: 88433 - protein, 24 aa, Artificial Sequence
  Description of Artificial Sequence: Synthetic peptide
  Seed: GMDPRMCSLMQGSTLPRRSGAAGA
GMDPRMYSLLQASTNPRRSGAAGA

SEQ ID NO: 88434 - protein, 24 aa, Artificial Sequence
  Description of Artificial Sequence: Synthetic peptide
  Seed: GMDPRMCSLMQGSTLPRRSGAAGA
GMDPRMYSLLQASTPPRRSGAAGA

SEQ ID NO: 88435 - protein, 24 aa, Artificial Sequence
  Description of Artificial Sequence: Synthetic peptide
  Seed: GMDPRMCSLMQGSTLPRRSGAAGA
GMDPRMYSLLQASTQPRRSGAAGA

SEQ ID NO: 88436 - protein, 24 aa, Artificial Sequence
  Description of Artificial Sequence: Synthetic peptide
  Seed: GMDPRMCSLMQGSTLPRRSGAAGA
GMDPRMYSLLQASTSPRRSGAAGA

SEQ ID NO: 88437 - protein, 24 aa, Artificial Sequence
  Description of Artificial Sequence: Synthetic peptide
  Seed: GMDPRMCSLMQGSTLPRRSGAAGA
GMDPRMYSLLQASTTPRRSGAAGA

SEQ ID NO: 88438 - protein, 24 aa, Artificial Sequence
  Description of Artificial Sequence: Synthetic peptide
  Seed: GMDPRMCSLMQGSTLPRRSGAAGA
GMDPRMYSLLQASTVPRRSGAAGA

SEQ ID NO: 88439 - protein, 24 aa, Artificial Sequence
  Description of Artificial Sequence: Synthetic peptide
  Seed: GMDPRMCSLMQGSTLPRRSGAAGA
GMDPRMYSLLQGSTAPRRSGAAGA

SEQ ID NO: 88440 - protein, 24 aa, Artificial Sequence
  Description of Artificial Sequence: Synthetic peptide
  Seed: GMDPRMCSLMQGSTLPRRSGAAGA
GMDPRMYSLLQGSTCPRRSGAAGA

SEQ ID NO: 88441 - protein, 24 aa, Artificial Sequence
  Description of Artificial Sequence: Synthetic peptide
  Seed: GMDPRMCSLMQGSTLPRRSGAAGA
GMDPRMYSLLQGSTFPRRSGAAGA

SEQ ID NO: 88442 - protein, 24 aa, Artificial Sequence
  Description of Artificial Sequence: Synthetic peptide
  Seed: GMDPRMCSLMQGSTLPRRSGAAGA
GMDPRMYSLLQGSTGPRRSGAAGA

SEQ ID NO: 88443 - protein, 24 aa, Artificial Sequence
  Description of Artificial Sequence: Synthetic peptide
  Seed: GMDPRMCSLMQGSTLPRRSGAAGA
GMDPRMYSLLQGSTIPRRSGAAGA

SEQ ID NO: 88444 - protein, 24 aa, Artificial Sequence
  Description of Artificial Sequence: Synthetic peptide
  Seed: GMDPRMCSLMQGSTLPRRSGAAGA
GMDPRMYSLLQGSTLPRRSGAAGA

SEQ ID NO: 88445 - protein, 24 aa, Artificial Sequence
  Description of Artificial Sequence: Synthetic peptide
  Seed: GMDPRMCSLMQGSTLPRRSGAAGA
GMDPRMYSLLQGSTMPRRSGAAGA

SEQ ID NO: 88446 - protein, 24 aa, Artificial Sequence
  Description of Artificial Sequence: Synthetic peptide
  Seed: GMDPRMCSLMQGSTLPRRSGAAGA
GMDPRMYSLLQGSTNPRRSGAAGA

SEQ ID NO: 88447 - protein, 24 aa, Artificial Sequence
  Description of Artificial Sequence: Synthetic peptide
  Seed: GMDPRMCSLMQGSTLPRRSGAAGA
GMDPRMYSLLQGSTSPRRSGAAGA

SEQ ID NO: 88448 - protein, 24 aa, Artificial Sequence
  Description of Artificial Sequence: Synthetic peptide
  Seed: GMDPRMCSLMQGSTLPRRSGAAGA
GMDPRMYSLLQGSTTPRRSGAAGA

SEQ ID NO: 88449 - protein, 24 aa, Artificial Sequence
  Description of Artificial Sequence: Synthetic peptide
  Seed: GMDPRMCSLMQGSTLPRRSGAAGA
GMDPRMYSLLQGSTVPRRSGAAGA

SEQ ID NO: 88450 - protein, 24 aa, Artificial Sequence
  Description of Artificial Sequence: Synthetic peptide
  Seed: GMDPRMCSLMQGSTLPRRSGAAGA
GMDPRMYSLLQISTAPRRSGAAGA

SEQ ID NO: 88451 - protein, 24 aa, Artificial Sequence
  Description of Artificial Sequence: Synthetic peptide
  Seed: GMDPRMCSLMQGSTLPRRSGAAGA
GMDPRMYSLLQISTGPRRSGAAGA

SEQ ID NO: 88452 - protein, 24 aa, Artificial Sequence
  Description of Artificial Sequence: Synthetic peptide
  Seed: GMDPRMCSLMQGSTLPRRSGAAGA
GMDPRMYSLLQISTIPRRSGAAGA

SEQ ID NO: 88453 - protein, 24 aa, Artificial Sequence
  Description of Artificial Sequence: Synthetic peptide
  Seed: GMDPRMCSLMQGSTLPRRSGAAGA
GMDPRMYSLLQISTLPRRSGAAGA

SEQ ID NO: 88454 - protein, 24 aa, Artificial Sequence
  Description of Artificial Sequence: Synthetic peptide
  Seed: GMDPRMCSLMQGSTLPRRSGAAGA
GMDPRMYSLLQISTMPRRSGAAGA

SEQ ID NO: 88455 - protein, 24 aa, Artificial Sequence
  Description of Artificial Sequence: Synthetic peptide
  Seed: GMDPRMCSLMQGSTLPRRSGAAGA
GMDPRMYSLLQISTNPRRSGAAGA

SEQ ID NO: 88456 - protein, 24 aa, Artificial Sequence
  Description of Artificial Sequence: Synthetic peptide
  Seed: GMDPRMCSLMQGSTLPRRSGAAGA
GMDPRMYSLLQISTSPRRSGAAGA

SEQ ID NO: 88457 - protein, 24 aa, Artificial Sequence
  Description of Artificial Sequence: Synthetic peptide
  Seed: GMDPRMCSLMQGSTLPRRSGAAGA
GMDPRMYSLLQISTTPRRSGAAGA

SEQ ID NO: 88458 - protein, 24 aa, Artificial Sequence
  Description of Artificial Sequence: Synthetic peptide
  Seed: GMDPRMCSLMQGSTLPRRSGAAGA
GMDPRMYSLLQISTVPRRSGAAGA

SEQ ID NO: 88459 - protein, 24 aa, Artificial Sequence
  Description of Artificial Sequence: Synthetic peptide
  Seed: GMDPRMCSLMQGSTLPRRSGAAGA
GMDPRMYSLLQLSTAPRRSGAAGA

SEQ ID NO: 88460 - protein, 24 aa, Artificial Sequence
  Description of Artificial Sequence: Synthetic peptide
  Seed: GMDPRMCSLMQGSTLPRRSGAAGA
GMDPRMYSLLQLSTNPRRSGAAGA

SEQ ID NO: 88461 - protein, 24 aa, Artificial Sequence
  Description of Artificial Sequence: Synthetic peptide
  Seed: GMDPRMCSLMQGSTLPRRSGAAGA
GMDPRMYSLLQLSTSPRRSGAAGA

SEQ ID NO: 88462 - protein, 24 aa, Artificial Sequence
  Description of Artificial Sequence: Synthetic peptide
  Seed: GMDPRMCSLMQGSTLPRRSGAAGA
GMDPRMYSLLQMSTAPRRSGAAGA

SEQ ID NO: 88463 - protein, 24 aa, Artificial Sequence
  Description of Artificial Sequence: Synthetic peptide
  Seed: GMDPRMCSLMQGSTLPRRSGAAGA
GMDPRMYSLLQMSTNPRRSGAAGA

SEQ ID NO: 88464 - protein, 24 aa, Artificial Sequence
  Description of Artificial Sequence: Synthetic peptide
  Seed: GMDPRMCSLMQGSTLPRRSGAAGA
GMDPRMYSLLQMSTSPRRSGAAGA

SEQ ID NO: 88465 - protein, 24 aa, Artificial Sequence
  Description of Artificial Sequence: Synthetic peptide
  Seed: GMDPRMCSLMQGSTLPRRSGAAGA
GMDPRMYSLLQNSTAPRRSGAAGA

SEQ ID NO: 88466 - protein, 24 aa, Artificial Sequence
  Description of Artificial Sequence: Synthetic peptide
  Seed: GMDPRMCSLMQGSTLPRRSGAAGA
GMDPRMYSLLQNSTIPRRSGAAGA

SEQ ID NO: 88467 - protein, 24 aa, Artificial Sequence
  Description of Artificial Sequence: Synthetic peptide
  Seed: GMDPRMCSLMQGSTLPRRSGAAGA
GMDPRMYSLLQNSTLPRRSGAAGA

SEQ ID NO: 88468 - protein, 24 aa, Artificial Sequence
  Description of Artificial Sequence: Synthetic peptide
  Seed: GMDPRMCSLMQGSTLPRRSGAAGA
GMDPRMYSLLQNSTMPRRSGAAGA

SEQ ID NO: 88469 - protein, 24 aa, Artificial Sequence
  Description of Artificial Sequence: Synthetic peptide
  Seed: GMDPRMCSLMQGSTLPRRSGAAGA
GMDPRMYSLLQNSTNPRRSGAAGA

SEQ ID NO: 88470 - protein, 24 aa, Artificial Sequence
  Description of Artificial Sequence: Synthetic peptide
  Seed: GMDPRMCSLMQGSTLPRRSGAAGA
GMDPRMYSLLQNSTSPRRSGAAGA

SEQ ID NO: 88471 - protein, 24 aa, Artificial Sequence
  Description of Artificial Sequence: Synthetic peptide
  Seed: GMDPRMCSLMQGSTLPRRSGAAGA
GMDPRMYSLLQNSTTPRRSGAAGA

SEQ ID NO: 88472 - protein, 24 aa, Artificial Sequence
  Description of Artificial Sequence: Synthetic peptide
  Seed: GMDPRMCSLMQGSTLPRRSGAAGA
GMDPRMYSLLQNSTVPRRSGAAGA

SEQ ID NO: 88473 - protein, 24 aa, Artificial Sequence
  Description of Artificial Sequence: Synthetic peptide
  Seed: GMDPRMCSLMQGSTLPRRSGAAGA
GMDPRMYSLLQPSTAPRRSGAAGA

SEQ ID NO: 88474 - protein, 24 aa, Artificial Sequence
  Description of Artificial Sequence: Synthetic peptide
  Seed: GMDPRMCSLMQGSTLPRRSGAAGA
GMDPRMYSLLQPSTFPRRSGAAGA

SEQ ID NO: 88475 - protein, 24 aa, Artificial Sequence
  Description of Artificial Sequence: Synthetic peptide
  Seed: GMDPRMCSLMQGSTLPRRSGAAGA
GMDPRMYSLLQPSTGPRRSGAAGA

SEQ ID NO: 88476 - protein, 24 aa, Artificial Sequence
  Description of Artificial Sequence: Synthetic peptide
  Seed: GMDPRMCSLMQGSTLPRRSGAAGA
GMDPRMYSLLQPSTHPRRSGAAGA

SEQ ID NO: 88477 - protein, 24 aa, Artificial Sequence
  Description of Artificial Sequence: Synthetic peptide
  Seed: GMDPRMCSLMQGSTLPRRSGAAGA
GMDPRMYSLLQPSTIPRRSGAAGA

SEQ ID NO: 88478 - protein, 24 aa, Artificial Sequence
  Description of Artificial Sequence: Synthetic peptide
  Seed: GMDPRMCSLMQGSTLPRRSGAAGA
GMDPRMYSLLQPSTLPRRSGAAGA

SEQ ID NO: 88479 - protein, 24 aa, Artificial Sequence
  Description of Artificial Sequence: Synthetic peptide
  Seed: GMDPRMCSLMQGSTLPRRSGAAGA
GMDPRMYSLLQPSTMPRRSGAAGA

SEQ ID NO: 88480 - protein, 24 aa, Artificial Sequence
  Description of Artificial Sequence: Synthetic peptide
  Seed: GMDPRMCSLMQGSTLPRRSGAAGA
GMDPRMYSLLQPSTNPRRSGAAGA

SEQ ID NO: 88481 - protein, 24 aa, Artificial Sequence
  Description of Artificial Sequence: Synthetic peptide
  Seed: GMDPRMCSLMQGSTLPRRSGAAGA
GMDPRMYSLLQPSTPPRRSGAAGA

SEQ ID NO: 88482 - protein, 24 aa, Artificial Sequence
  Description of Artificial Sequence: Synthetic peptide
  Seed: GMDPRMCSLMQGSTLPRRSGAAGA
GMDPRMYSLLQPSTQPRRSGAAGA

SEQ ID NO: 88483 - protein, 24 aa, Artificial Sequence
  Description of Artificial Sequence: Synthetic peptide
  Seed: GMDPRMCSLMQGSTLPRRSGAAGA
GMDPRMYSLLQPSTSPRRSGAAGA

SEQ ID NO: 88484 - protein, 24 aa, Artificial Sequence
  Description of Artificial Sequence: Synthetic peptide
  Seed: GMDPRMCSLMQGSTLPRRSGAAGA
GMDPRMYSLLQPSTTPRRSGAAGA

SEQ ID NO: 88485 - protein, 24 aa, Artificial Sequence
  Description of Artificial Sequence: Synthetic peptide
  Seed: GMDPRMCSLMQGSTLPRRSGAAGA
GMDPRMYSLLQPSTVPRRSGAAGA

SEQ ID NO: 88486 - protein, 24 aa, Artificial Sequence
  Description of Artificial Sequence: Synthetic peptide
  Seed: GMDPRMCSLMQGSTLPRRSGAAGA
GMDPRMYSLLQSSTAPRRSGAAGA

SEQ ID NO: 88487 - protein, 24 aa, Artificial Sequence
  Description of Artificial Sequence: Synthetic peptide
  Seed: GMDPRMCSLMQGSTLPRRSGAAGA
GMDPRMYSLLQSSTCPRRSGAAGA

SEQ ID NO: 88488 - protein, 24 aa, Artificial Sequence
  Description of Artificial Sequence: Synthetic peptide
  Seed: GMDPRMCSLMQGSTLPRRSGAAGA
GMDPRMYSLLQSSTFPRRSGAAGA

SEQ ID NO: 88489 - protein, 24 aa, Artificial Sequence
  Description of Artificial Sequence: Synthetic peptide
  Seed: GMDPRMCSLMQGSTLPRRSGAAGA
GMDPRMYSLLQSSTGPRRSGAAGA

SEQ ID NO: 88490 - protein, 24 aa, Artificial Sequence
  Description of Artificial Sequence: Synthetic peptide
  Seed: GMDPRMCSLMQGSTLPRRSGAAGA
GMDPRMYSLLQSSTIPRRSGAAGA

SEQ ID NO: 88491 - protein, 24 aa, Artificial Sequence
  Description of Artificial Sequence: Synthetic peptide
  Seed: GMDPRMCSLMQGSTLPRRSGAAGA
GMDPRMYSLLQSSTLPRRSGAAGA

SEQ ID NO: 88492 - protein, 24 aa, Artificial Sequence
  Description of Artificial Sequence: Synthetic peptide
  Seed: GMDPRMCSLMQGSTLPRRSGAAGA
GMDPRMYSLLQSSTMPRRSGAAGA

SEQ ID NO: 88493 - protein, 24 aa, Artificial Sequence
  Description of Artificial Sequence: Synthetic peptide
  Seed: GMDPRMCSLMQGSTLPRRSGAAGA
GMDPRMYSLLQSSTNPRRSGAAGA

SEQ ID NO: 88494 - protein, 24 aa, Artificial Sequence
  Description of Artificial Sequence: Synthetic peptide
  Seed: GMDPRMCSLMQGSTLPRRSGAAGA
GMDPRMYSLLQSSTQPRRSGAAGA

SEQ ID NO: 88495 - protein, 24 aa, Artificial Sequence
  Description of Artificial Sequence: Synthetic peptide
  Seed: GMDPRMCSLMQGSTLPRRSGAAGA
GMDPRMYSLLQSSTSPRRSGAAGA

SEQ ID NO: 88496 - protein, 24 aa, Artificial Sequence
  Description of Artificial Sequence: Synthetic peptide
  Seed: GMDPRMCSLMQGSTLPRRSGAAGA
GMDPRMYSLLQSSTTPRRSGAAGA

SEQ ID NO: 88497 - protein, 24 aa, Artificial Sequence
  Description of Artificial Sequence: Synthetic peptide
  Seed: GMDPRMCSLMQGSTLPRRSGAAGA
GMDPRMYSLLQSSTVPRRSGAAGA

SEQ ID NO: 88498 - protein, 24 aa, Artificial Sequence
  Description of Artificial Sequence: Synthetic peptide
  Seed: GMDPRMCSLMQGSTLPRRSGAAGA
GMDPRMYSLLQTSTAPRRSGAAGA

SEQ ID NO: 88499 - protein, 24 aa, Artificial Sequence
  Description of Artificial Sequence: Synthetic peptide
  Seed: GMDPRMCSLMQGSTLPRRSGAAGA
GMDPRMYSLLQTSTGPRRSGAAGA

SEQ ID NO: 88500 - protein, 24 aa, Artificial Sequence
  Description of Artificial Sequence: Synthetic peptide
  Seed: GMDPRMCSLMQGSTLPRRSGAAGA
GMDPRMYSLLQTSTHPRRSGAAGA

SEQ ID NO: 88501 - protein, 24 aa, Artificial Sequence
  Description of Artificial Sequence: Synthetic peptide
  Seed: GMDPRMCSLMQGSTLPRRSGAAGA
GMDPRMYSLLQTSTIPRRSGAAGA

SEQ ID NO: 88502 - protein, 24 aa, Artificial Sequence
  Description of Artificial Sequence: Synthetic peptide
  Seed: GMDPRMCSLMQGSTLPRRSGAAGA
GMDPRMYSLLQTSTLPRRSGAAGA

SEQ ID NO: 88503 - protein, 24 aa, Artificial Sequence
  Description of Artificial Sequence: Synthetic peptide
  Seed: GMDPRMCSLMQGSTLPRRSGAAGA
GMDPRMYSLLQTSTMPRRSGAAGA

SEQ ID NO: 88504 - protein, 24 aa, Artificial Sequence
  Description of Artificial Sequence: Synthetic peptide
  Seed: GMDPRMCSLMQGSTLPRRSGAAGA
GMDPRMYSLLQTSTNPRRSGAAGA

SEQ ID NO: 88505 - protein, 24 aa, Artificial Sequence
  Description of Artificial Sequence: Synthetic peptide
  Seed: GMDPRMCSLMQGSTLPRRSGAAGA
GMDPRMYSLLQTSTSPRRSGAAGA

SEQ ID NO: 88506 - protein, 24 aa, Artificial Sequence
  Description of Artificial Sequence: Synthetic peptide
  Seed: GMDPRMCSLMQGSTLPRRSGAAGA
GMDPRMYSLLQTSTTPRRSGAAGA

SEQ ID NO: 88507 - protein, 24 aa, Artificial Sequence
  Description of Artificial Sequence: Synthetic peptide
  Seed: GMDPRMCSLMQGSTLPRRSGAAGA
GMDPRMYSLLQTSTVPRRSGAAGA

SEQ ID NO: 88508 - protein, 24 aa, Artificial Sequence
  Description of Artificial Sequence: Synthetic peptide
  Seed: GMDPRMCSLMQGSTLPRRSGAAGA
GMDPRMYSLLQVSTAPRRSGAAGA

SEQ ID NO: 88509 - protein, 24 aa, Artificial Sequence
  Description of Artificial Sequence: Synthetic peptide
  Seed: GMDPRMCSLMQGSTLPRRSGAAGA
GMDPRMYSLLQVSTGPRRSGAAGA

SEQ ID NO: 88510 - protein, 24 aa, Artificial Sequence
  Description of Artificial Sequence: Synthetic peptide
  Seed: GMDPRMCSLMQGSTLPRRSGAAGA
GMDPRMYSLLQVSTHPRRSGAAGA

SEQ ID NO: 88511 - protein, 24 aa, Artificial Sequence
  Description of Artificial Sequence: Synthetic peptide
  Seed: GMDPRMCSLMQGSTLPRRSGAAGA
GMDPRMYSLLQVSTIPRRSGAAGA

SEQ ID NO: 88512 - protein, 24 aa, Artificial Sequence
  Description of Artificial Sequence: Synthetic peptide
  Seed: GMDPRMCSLMQGSTLPRRSGAAGA
GMDPRMYSLLQVSTLPRRSGAAGA

SEQ ID NO: 88513 - protein, 24 aa, Artificial Sequence
  Description of Artificial Sequence: Synthetic peptide
  Seed: GMDPRMCSLMQGSTLPRRSGAAGA
GMDPRMYSLLQVSTMPRRSGAAGA

SEQ ID NO: 88514 - protein, 24 aa, Artificial Sequence
  Description of Artificial Sequence: Synthetic peptide
  Seed: GMDPRMCSLMQGSTLPRRSGAAGA
GMDPRMYSLLQVSTNPRRSGAAGA

SEQ ID NO: 88515 - protein, 24 aa, Artificial Sequence
  Description of Artificial Sequence: Synthetic peptide
  Seed: GMDPRMCSLMQGSTLPRRSGAAGA
GMDPRMYSLLQVSTQPRRSGAAGA

SEQ ID NO: 88516 - protein, 24 aa, Artificial Sequence
  Description of Artificial Sequence: Synthetic peptide
  Seed: GMDPRMCSLMQGSTLPRRSGAAGA
GMDPRMYSLLQVSTSPRRSGAAGA

SEQ ID NO: 88517 - protein, 24 aa, Artificial Sequence
  Description of Artificial Sequence: Synthetic peptide
  Seed: GMDPRMCSLMQGSTLPRRSGAAGA
GMDPRMYSLLQVSTTPRRSGAAGA

SEQ ID NO: 88518 - protein, 24 aa, Artificial Sequence
  Description of Artificial Sequence: Synthetic peptide
  Seed: GMDPRMCSLMQGSTLPRRSGAAGA
GMDPRMYSLLQVSTVPRRSGAAGA

SEQ ID NO: 88519 - protein, 24 aa, Artificial Sequence
  Description of Artificial Sequence: Synthetic peptide
  Seed: GMDPRMCSLMQGSTLPRRSGAAGA
GMDPRMYSLMQASTAPRRSGAAGA

SEQ ID NO: 88520 - protein, 24 aa, Artificial Sequence
  Description of Artificial Sequence: Synthetic peptide
  Seed: GMDPRMCSLMQGSTLPRRSGAAGA
GMDPRMYSLMQASTCPRRSGAAGA

SEQ ID NO: 88521 - protein, 24 aa, Artificial Sequence
  Description of Artificial Sequence: Synthetic peptide
  Seed: GMDPRMCSLMQGSTLPRRSGAAGA
GMDPRMYSLMQASTDPRRSGAAGA

SEQ ID NO: 88522 - protein, 24 aa, Artificial Sequence
  Description of Artificial Sequence: Synthetic peptide
  Seed: GMDPRMCSLMQGSTLPRRSGAAGA
GMDPRMYSLMQASTEPRRSGAAGA

SEQ ID NO: 88523 - protein, 24 aa, Artificial Sequence
  Description of Artificial Sequence: Synthetic peptide
  Seed: GMDPRMCSLMQGSTLPRRSGAAGA
GMDPRMYSLMQASTFPRRSGAAGA

SEQ ID NO: 88524 - protein, 24 aa, Artificial Sequence
  Description of Artificial Sequence: Synthetic peptide
  Seed: GMDPRMCSLMQGSTLPRRSGAAGA
GMDPRMYSLMQASTGPRRSGAAGA

SEQ ID NO: 88525 - protein, 24 aa, Artificial Sequence
  Description of Artificial Sequence: Synthetic peptide
  Seed: GMDPRMCSLMQGSTLPRRSGAAGA
GMDPRMYSLMQASTHPRRSGAAGA

SEQ ID NO: 88526 - protein, 24 aa, Artificial Sequence
  Description of Artificial Sequence: Synthetic peptide
  Seed: GMDPRMCSLMQGSTLPRRSGAAGA
GMDPRMYSLMQASTIPRRSGAAGA

SEQ ID NO: 88527 - protein, 24 aa, Artificial Sequence
  Description of Artificial Sequence: Synthetic peptide
  Seed: GMDPRMCSLMQGSTLPRRSGAAGA
GMDPRMYSLMQASTLPRRSGAAGA

SEQ ID NO: 88528 - protein, 24 aa, Artificial Sequence
  Description of Artificial Sequence: Synthetic peptide
  Seed: GMDPRMCSLMQGSTLPRRSGAAGA
GMDPRMYSLMQASTMPRRSGAAGA

SEQ ID NO: 88529 - protein, 24 aa, Artificial Sequence
  Description of Artificial Sequence: Synthetic peptide
  Seed: GMDPRMCSLMQGSTLPRRSGAAGA
GMDPRMYSLMQASTNPRRSGAAGA

SEQ ID NO: 88530 - protein, 24 aa, Artificial Sequence
  Description of Artificial Sequence: Synthetic peptide
  Seed: GMDPRMCSLMQGSTLPRRSGAAGA
GMDPRMYSLMQASTPPRRSGAAGA

SEQ ID NO: 88531 - protein, 24 aa, Artificial Sequence
  Description of Artificial Sequence: Synthetic peptide
  Seed: GMDPRMCSLMQGSTLPRRSGAAGA
GMDPRMYSLMQASTQPRRSGAAGA

SEQ ID NO: 88532 - protein, 24 aa, Artificial Sequence
  Description of Artificial Sequence: Synthetic peptide
  Seed: GMDPRMCSLMQGSTLPRRSGAAGA
GMDPRMYSLMQASTSPRRSGAAGA

SEQ ID NO: 88533 - protein, 24 aa, Artificial Sequence
  Description of Artificial Sequence: Synthetic peptide
  Seed: GMDPRMCSLMQGSTLPRRSGAAGA
GMDPRMYSLMQASTTPRRSGAAGA

SEQ ID NO: 88534 - protein, 24 aa, Artificial Sequence
  Description of Artificial Sequence: Synthetic peptide
  Seed: GMDPRMCSLMQGSTLPRRSGAAGA
GMDPRMYSLMQASTVPRRSGAAGA

SEQ ID NO: 88535 - protein, 24 aa, Artificial Sequence
  Description of Artificial Sequence: Synthetic peptide
  Seed: GMDPRMCSLMQGSTLPRRSGAAGA
GMDPRMYSLMQGSTAPRRSGAAGA

SEQ ID NO: 88536 - protein, 24 aa, Artificial Sequence
  Description of Artificial Sequence: Synthetic peptide
  Seed: GMDPRMCSLMQGSTLPRRSGAAGA
GMDPRMYSLMQGSTCPRRSGAAGA

SEQ ID NO: 88537 - protein, 24 aa, Artificial Sequence
  Description of Artificial Sequence: Synthetic peptide
  Seed: GMDPRMCSLMQGSTLPRRSGAAGA
GMDPRMYSLMQGSTFPRRSGAAGA

SEQ ID NO: 88538 - protein, 24 aa, Artificial Sequence
  Description of Artificial Sequence: Synthetic peptide
  Seed: GMDPRMCSLMQGSTLPRRSGAAGA
GMDPRMYSLMQGSTGPRRSGAAGA

SEQ ID NO: 88539 - protein, 24 aa, Artificial Sequence
  Description of Artificial Sequence: Synthetic peptide
  Seed: GMDPRMCSLMQGSTLPRRSGAAGA
GMDPRMYSLMQGSTIPRRSGAAGA

SEQ ID NO: 88540 - protein, 24 aa, Artificial Sequence
  Description of Artificial Sequence: Synthetic peptide
  Seed: GMDPRMCSLMQGSTLPRRSGAAGA
GMDPRMYSLMQGSTLPRRSGAAGA

SEQ ID NO: 88541 - protein, 24 aa, Artificial Sequence
  Description of Artificial Sequence: Synthetic peptide
  Seed: GMDPRMCSLMQGSTLPRRSGAAGA
GMDPRMYSLMQGSTMPRRSGAAGA

SEQ ID NO: 88542 - protein, 24 aa, Artificial Sequence
  Description of Artificial Sequence: Synthetic peptide
  Seed: GMDPRMCSLMQGSTLPRRSGAAGA
GMDPRMYSLMQGSTNPRRSGAAGA

SEQ ID NO: 88543 - protein, 24 aa, Artificial Sequence
  Description of Artificial Sequence: Synthetic peptide
  Seed: GMDPRMCSLMQGSTLPRRSGAAGA
GMDPRMYSLMQGSTSPRRSGAAGA

SEQ ID NO: 88544 - protein, 24 aa, Artificial Sequence
  Description of Artificial Sequence: Synthetic peptide
  Seed: GMDPRMCSLMQGSTLPRRSGAAGA
GMDPRMYSLMQGSTTPRRSGAAGA

SEQ ID NO: 88545 - protein, 24 aa, Artificial Sequence
  Description of Artificial Sequence: Synthetic peptide
  Seed: GMDPRMCSLMQGSTLPRRSGAAGA
GMDPRMYSLMQGSTVPRRSGAAGA

SEQ ID NO: 88546 - protein, 24 aa, Artificial Sequence
  Description of Artificial Sequence: Synthetic peptide
  Seed: GMDPRMCSLMQGSTLPRRSGAAGA
GMDPRMYSLMQISTAPRRSGAAGA

SEQ ID NO: 88547 - protein, 24 aa, Artificial Sequence
  Description of Artificial Sequence: Synthetic peptide
  Seed: GMDPRMCSLMQGSTLPRRSGAAGA
GMDPRMYSLMQISTGPRRSGAAGA

SEQ ID NO: 88548 - protein, 24 aa, Artificial Sequence
  Description of Artificial Sequence: Synthetic peptide
  Seed: GMDPRMCSLMQGSTLPRRSGAAGA
GMDPRMYSLMQISTHPRRSGAAGA

SEQ ID NO: 88549 - protein, 24 aa, Artificial Sequence
  Description of Artificial Sequence: Synthetic peptide
  Seed: GMDPRMCSLMQGSTLPRRSGAAGA
GMDPRMYSLMQISTIPRRSGAAGA

SEQ ID NO: 88550 - protein, 24 aa, Artificial Sequence
  Description of Artificial Sequence: Synthetic peptide
  Seed: GMDPRMCSLMQGSTLPRRSGAAGA
GMDPRMYSLMQISTLPRRSGAAGA

SEQ ID NO: 88551 - protein, 24 aa, Artificial Sequence
  Description of Artificial Sequence: Synthetic peptide
  Seed: GMDPRMCSLMQGSTLPRRSGAAGA
GMDPRMYSLMQISTMPRRSGAAGA

SEQ ID NO: 88552 - protein, 24 aa, Artificial Sequence
  Description of Artificial Sequence: Synthetic peptide
  Seed: GMDPRMCSLMQGSTLPRRSGAAGA
GMDPRMYSLMQISTNPRRSGAAGA

SEQ ID NO: 88553 - protein, 24 aa, Artificial Sequence
  Description of Artificial Sequence: Synthetic peptide
  Seed: GMDPRMCSLMQGSTLPRRSGAAGA
GMDPRMYSLMQISTQPRRSGAAGA

SEQ ID NO: 88554 - protein, 24 aa, Artificial Sequence
  Description of Artificial Sequence: Synthetic peptide
  Seed: GMDPRMCSLMQGSTLPRRSGAAGA
GMDPRMYSLMQISTSPRRSGAAGA

SEQ ID NO: 88555 - protein, 24 aa, Artificial Sequence
  Description of Artificial Sequence: Synthetic peptide
  Seed: GMDPRMCSLMQGSTLPRRSGAAGA
GMDPRMYSLMQISTTPRRSGAAGA

SEQ ID NO: 88556 - protein, 24 aa, Artificial Sequence
  Description of Artificial Sequence: Synthetic peptide
  Seed: GMDPRMCSLMQGSTLPRRSGAAGA
GMDPRMYSLMQISTVPRRSGAAGA

SEQ ID NO: 88557 - protein, 24 aa, Artificial Sequence
  Description of Artificial Sequence: Synthetic peptide
  Seed: GMDPRMCSLMQGSTLPRRSGAAGA
GMDPRMYSLMQLSTAPRRSGAAGA

SEQ ID NO: 88558 - protein, 24 aa, Artificial Sequence
  Description of Artificial Sequence: Synthetic peptide
  Seed: GMDPRMCSLMQGSTLPRRSGAAGA
GMDPRMYSLMQLSTNPRRSGAAGA

SEQ ID NO: 88559 - protein, 24 aa, Artificial Sequence
  Description of Artificial Sequence: Synthetic peptide
  Seed: GMDPRMCSLMQGSTLPRRSGAAGA
GMDPRMYSLMQLSTSPRRSGAAGA

SEQ ID NO: 88560 - protein, 24 aa, Artificial Sequence
  Description of Artificial Sequence: Synthetic peptide
  Seed: GMDPRMCSLMQGSTLPRRSGAAGA
GMDPRMYSLMQLSTTPRRSGAAGA

SEQ ID NO: 88561 - protein, 24 aa, Artificial Sequence
  Description of Artificial Sequence: Synthetic peptide
  Seed: GMDPRMCSLMQGSTLPRRSGAAGA
GMDPRMYSLMQLSTVPRRSGAAGA

SEQ ID NO: 88562 - protein, 24 aa, Artificial Sequence
  Description of Artificial Sequence: Synthetic peptide
  Seed: GMDPRMCSLMQGSTLPRRSGAAGA
GMDPRMYSLMQMSTAPRRSGAAGA

SEQ ID NO: 88563 - protein, 24 aa, Artificial Sequence
  Description of Artificial Sequence: Synthetic peptide
  Seed: GMDPRMCSLMQGSTLPRRSGAAGA
GMDPRMYSLMQMSTNPRRSGAAGA

SEQ ID NO: 88564 - protein, 24 aa, Artificial Sequence
  Description of Artificial Sequence: Synthetic peptide
  Seed: GMDPRMCSLMQGSTLPRRSGAAGA
GMDPRMYSLMQMSTSPRRSGAAGA

SEQ ID NO: 88565 - protein, 24 aa, Artificial Sequence
  Description of Artificial Sequence: Synthetic peptide
  Seed: GMDPRMCSLMQGSTLPRRSGAAGA
GMDPRMYSLMQNSTAPRRSGAAGA

SEQ ID NO: 88566 - protein, 24 aa, Artificial Sequence
  Description of Artificial Sequence: Synthetic peptide
  Seed: GMDPRMCSLMQGSTLPRRSGAAGA
GMDPRMYSLMQNSTIPRRSGAAGA

SEQ ID NO: 88567 - protein, 24 aa, Artificial Sequence
  Description of Artificial Sequence: Synthetic peptide
  Seed: GMDPRMCSLMQGSTLPRRSGAAGA
GMDPRMYSLMQNSTLPRRSGAAGA

SEQ ID NO: 88568 - protein, 24 aa, Artificial Sequence
  Description of Artificial Sequence: Synthetic peptide
  Seed: GMDPRMCSLMQGSTLPRRSGAAGA
GMDPRMYSLMQNSTMPRRSGAAGA

SEQ ID NO: 88569 - protein, 24 aa, Artificial Sequence
  Description of Artificial Sequence: Synthetic peptide
  Seed: GMDPRMCSLMQGSTLPRRSGAAGA
GMDPRMYSLMQNSTNPRRSGAAGA

SEQ ID NO: 88570 - protein, 24 aa, Artificial Sequence
  Description of Artificial Sequence: Synthetic peptide
  Seed: GMDPRMCSLMQGSTLPRRSGAAGA
GMDPRMYSLMQNSTSPRRSGAAGA

SEQ ID NO: 88571 - protein, 24 aa, Artificial Sequence
  Description of Artificial Sequence: Synthetic peptide
  Seed: GMDPRMCSLMQGSTLPRRSGAAGA
GMDPRMYSLMQNSTTPRRSGAAGA

SEQ ID NO: 88572 - protein, 24 aa, Artificial Sequence
  Description of Artificial Sequence: Synthetic peptide
  Seed: GMDPRMCSLMQGSTLPRRSGAAGA
GMDPRMYSLMQNSTVPRRSGAAGA

SEQ ID NO: 88573 - protein, 24 aa, Artificial Sequence
  Description of Artificial Sequence: Synthetic peptide
  Seed: GMDPRMCSLMQGSTLPRRSGAAGA
GMDPRMYSLMQPSTAPRRSGAAGA

SEQ ID NO: 88574 - protein, 24 aa, Artificial Sequence
  Description of Artificial Sequence: Synthetic peptide
  Seed: GMDPRMCSLMQGSTLPRRSGAAGA
GMDPRMYSLMQPSTGPRRSGAAGA

SEQ ID NO: 88575 - protein, 24 aa, Artificial Sequence
  Description of Artificial Sequence: Synthetic peptide
  Seed: GMDPRMCSLMQGSTLPRRSGAAGA
GMDPRMYSLMQPSTHPRRSGAAGA

SEQ ID NO: 88576 - protein, 24 aa, Artificial Sequence
  Description of Artificial Sequence: Synthetic peptide
  Seed: GMDPRMCSLMQGSTLPRRSGAAGA
GMDPRMYSLMQPSTIPRRSGAAGA

SEQ ID NO: 88577 - protein, 24 aa, Artificial Sequence
  Description of Artificial Sequence: Synthetic peptide
  Seed: GMDPRMCSLMQGSTLPRRSGAAGA
GMDPRMYSLMQPSTLPRRSGAAGA

SEQ ID NO: 88578 - protein, 24 aa, Artificial Sequence
  Description of Artificial Sequence: Synthetic peptide
  Seed: GMDPRMCSLMQGSTLPRRSGAAGA
GMDPRMYSLMQPSTMPRRSGAAGA

SEQ ID NO: 88579 - protein, 24 aa, Artificial Sequence
  Description of Artificial Sequence: Synthetic peptide
  Seed: GMDPRMCSLMQGSTLPRRSGAAGA
GMDPRMYSLMQPSTNPRRSGAAGA

SEQ ID NO: 88580 - protein, 24 aa, Artificial Sequence
  Description of Artificial Sequence: Synthetic peptide
  Seed: GMDPRMCSLMQGSTLPRRSGAAGA
GMDPRMYSLMQPSTPPRRSGAAGA

SEQ ID NO: 88581 - protein, 24 aa, Artificial Sequence
  Description of Artificial Sequence: Synthetic peptide
  Seed: GMDPRMCSLMQGSTLPRRSGAAGA
GMDPRMYSLMQPSTQPRRSGAAGA

SEQ ID NO: 88582 - protein, 24 aa, Artificial Sequence
  Description of Artificial Sequence: Synthetic peptide
  Seed: GMDPRMCSLMQGSTLPRRSGAAGA
GMDPRMYSLMQPSTSPRRSGAAGA

SEQ ID NO: 88583 - protein, 24 aa, Artificial Sequence
  Description of Artificial Sequence: Synthetic peptide
  Seed: GMDPRMCSLMQGSTLPRRSGAAGA
GMDPRMYSLMQPSTTPRRSGAAGA

SEQ ID NO: 88584 - protein, 24 aa, Artificial Sequence
  Description of Artificial Sequence: Synthetic peptide
  Seed: GMDPRMCSLMQGSTLPRRSGAAGA
GMDPRMYSLMQPSTVPRRSGAAGA

SEQ ID NO: 88585 - protein, 24 aa, Artificial Sequence
  Description of Artificial Sequence: Synthetic peptide
  Seed: GMDPRMCSLMQGSTLPRRSGAAGA
GMDPRMYSLMQSSTAPRRSGAAGA

SEQ ID NO: 88586 - protein, 24 aa, Artificial Sequence
  Description of Artificial Sequence: Synthetic peptide
  Seed: GMDPRMCSLMQGSTLPRRSGAAGA
GMDPRMYSLMQSSTCPRRSGAAGA

SEQ ID NO: 88587 - protein, 24 aa, Artificial Sequence
  Description of Artificial Sequence: Synthetic peptide
  Seed: GMDPRMCSLMQGSTLPRRSGAAGA
GMDPRMYSLMQSSTGPRRSGAAGA

SEQ ID NO: 88588 - protein, 24 aa, Artificial Sequence
  Description of Artificial Sequence: Synthetic peptide
  Seed: GMDPRMCSLMQGSTLPRRSGAAGA
GMDPRMYSLMQSSTHPRRSGAAGA

SEQ ID NO: 88589 - protein, 24 aa, Artificial Sequence
  Description of Artificial Sequence: Synthetic peptide
  Seed: GMDPRMCSLMQGSTLPRRSGAAGA
GMDPRMYSLMQSSTIPRRSGAAGA

SEQ ID NO: 88590 - protein, 24 aa, Artificial Sequence
  Description of Artificial Sequence: Synthetic peptide
  Seed: GMDPRMCSLMQGSTLPRRSGAAGA
GMDPRMYSLMQSSTLPRRSGAAGA

SEQ ID NO: 88591 - protein, 24 aa, Artificial Sequence
  Description of Artificial Sequence: Synthetic peptide
  Seed: GMDPRMCSLMQGSTLPRRSGAAGA
GMDPRMYSLMQSSTMPRRSGAAGA

SEQ ID NO: 88592 - protein, 24 aa, Artificial Sequence
  Description of Artificial Sequence: Synthetic peptide
  Seed: GMDPRMCSLMQGSTLPRRSGAAGA
GMDPRMYSLMQSSTNPRRSGAAGA

SEQ ID NO: 88593 - protein, 24 aa, Artificial Sequence
  Description of Artificial Sequence: Synthetic peptide
  Seed: GMDPRMCSLMQGSTLPRRSGAAGA
GMDPRMYSLMQSSTQPRRSGAAGA

SEQ ID NO: 88594 - protein, 24 aa, Artificial Sequence
  Description of Artificial Sequence: Synthetic peptide
  Seed: GMDPRMCSLMQGSTLPRRSGAAGA
GMDPRMYSLMQSSTSPRRSGAAGA

SEQ ID NO: 88595 - protein, 24 aa, Artificial Sequence
  Description of Artificial Sequence: Synthetic peptide
  Seed: GMDPRMCSLMQGSTLPRRSGAAGA
GMDPRMYSLMQSSTTPRRSGAAGA

SEQ ID NO: 88596 - protein, 24 aa, Artificial Sequence
  Description of Artificial Sequence: Synthetic peptide
  Seed: GMDPRMCSLMQGSTLPRRSGAAGA
GMDPRMYSLMQSSTVPRRSGAAGA

SEQ ID NO: 88597 - protein, 24 aa, Artificial Sequence
  Description of Artificial Sequence: Synthetic peptide
  Seed: GMDPRMCSLMQGSTLPRRSGAAGA
GMDPRMYSLMQTSTAPRRSGAAGA

SEQ ID NO: 88598 - protein, 24 aa, Artificial Sequence
  Description of Artificial Sequence: Synthetic peptide
  Seed: GMDPRMCSLMQGSTLPRRSGAAGA
GMDPRMYSLMQTSTGPRRSGAAGA

SEQ ID NO: 88599 - protein, 24 aa, Artificial Sequence
  Description of Artificial Sequence: Synthetic peptide
  Seed: GMDPRMCSLMQGSTLPRRSGAAGA
GMDPRMYSLMQTSTHPRRSGAAGA

SEQ ID NO: 88600 - protein, 24 aa, Artificial Sequence
  Description of Artificial Sequence: Synthetic peptide
  Seed: GMDPRMCSLMQGSTLPRRSGAAGA
GMDPRMYSLMQTSTIPRRSGAAGA

SEQ ID NO: 88601 - protein, 24 aa, Artificial Sequence
  Description of Artificial Sequence: Synthetic peptide
  Seed: GMDPRMCSLMQGSTLPRRSGAAGA
GMDPRMYSLMQTSTLPRRSGAAGA

SEQ ID NO: 88602 - protein, 24 aa, Artificial Sequence
  Description of Artificial Sequence: Synthetic peptide
  Seed: GMDPRMCSLMQGSTLPRRSGAAGA
GMDPRMYSLMQTSTMPRRSGAAGA

SEQ ID NO: 88603 - protein, 24 aa, Artificial Sequence
  Description of Artificial Sequence: Synthetic peptide
  Seed: GMDPRMCSLMQGSTLPRRSGAAGA
GMDPRMYSLMQTSTNPRRSGAAGA

SEQ ID NO: 88604 - protein, 24 aa, Artificial Sequence
  Description of Artificial Sequence: Synthetic peptide
  Seed: GMDPRMCSLMQGSTLPRRSGAAGA
GMDPRMYSLMQTSTQPRRSGAAGA

SEQ ID NO: 88605 - protein, 24 aa, Artificial Sequence
  Description of Artificial Sequence: Synthetic peptide
  Seed: GMDPRMCSLMQGSTLPRRSGAAGA
GMDPRMYSLMQTSTSPRRSGAAGA

SEQ ID NO: 88606 - protein, 24 aa, Artificial Sequence
  Description of Artificial Sequence: Synthetic peptide
  Seed: GMDPRMCSLMQGSTLPRRSGAAGA
GMDPRMYSLMQTSTTPRRSGAAGA

SEQ ID NO: 88607 - protein, 24 aa, Artificial Sequence
  Description of Artificial Sequence: Synthetic peptide
  Seed: GMDPRMCSLMQGSTLPRRSGAAGA
GMDPRMYSLMQTSTVPRRSGAAGA

SEQ ID NO: 88608 - protein, 24 aa, Artificial Sequence
  Description of Artificial Sequence: Synthetic peptide
  Seed: GMDPRMCSLMQGSTLPRRSGAAGA
GMDPRMYSLMQVSTAPRRSGAAGA

SEQ ID NO: 88609 - protein, 24 aa, Artificial Sequence
  Description of Artificial Sequence: Synthetic peptide
  Seed: GMDPRMCSLMQGSTLPRRSGAAGA
GMDPRMYSLMQVSTGPRRSGAAGA

SEQ ID NO: 88610 - protein, 24 aa, Artificial Sequence
  Description of Artificial Sequence: Synthetic peptide
  Seed: GMDPRMCSLMQGSTLPRRSGAAGA
GMDPRMYSLMQVSTHPRRSGAAGA

SEQ ID NO: 88611 - protein, 24 aa, Artificial Sequence
  Description of Artificial Sequence: Synthetic peptide
  Seed: GMDPRMCSLMQGSTLPRRSGAAGA
GMDPRMYSLMQVSTIPRRSGAAGA

SEQ ID NO: 88612 - protein, 24 aa, Artificial Sequence
  Description of Artificial Sequence: Synthetic peptide
  Seed: GMDPRMCSLMQGSTLPRRSGAAGA
GMDPRMYSLMQVSTLPRRSGAAGA

SEQ ID NO: 88613 - protein, 24 aa, Artificial Sequence
  Description of Artificial Sequence: Synthetic peptide
  Seed: GMDPRMCSLMQGSTLPRRSGAAGA
GMDPRMYSLMQVSTMPRRSGAAGA

SEQ ID NO: 88614 - protein, 24 aa, Artificial Sequence
  Description of Artificial Sequence: Synthetic peptide
  Seed: GMDPRMCSLMQGSTLPRRSGAAGA
GMDPRMYSLMQVSTNPRRSGAAGA

SEQ ID NO: 88615 - protein, 24 aa, Artificial Sequence
  Description of Artificial Sequence: Synthetic peptide
  Seed: GMDPRMCSLMQGSTLPRRSGAAGA
GMDPRMYSLMQVSTPPRRSGAAGA

SEQ ID NO: 88616 - protein, 24 aa, Artificial Sequence
  Description of Artificial Sequence: Synthetic peptide
  Seed: GMDPRMCSLMQGSTLPRRSGAAGA
GMDPRMYSLMQVSTQPRRSGAAGA

SEQ ID NO: 88617 - protein, 24 aa, Artificial Sequence
  Description of Artificial Sequence: Synthetic peptide
  Seed: GMDPRMCSLMQGSTLPRRSGAAGA
GMDPRMYSLMQVSTSPRRSGAAGA

SEQ ID NO: 88618 - protein, 24 aa, Artificial Sequence
  Description of Artificial Sequence: Synthetic peptide
  Seed: GMDPRMCSLMQGSTLPRRSGAAGA
GMDPRMYSLMQVSTTPRRSGAAGA

SEQ ID NO: 88619 - protein, 24 aa, Artificial Sequence
  Description of Artificial Sequence: Synthetic peptide
  Seed: GMDPRMCSLMQGSTLPRRSGAAGA
GMDPRMYSLMQVSTVPRRSGAAGA

SEQ ID NO: 88620 - protein, 24 aa, Artificial Sequence
  Description of Artificial Sequence: Synthetic peptide
  Seed: GMDPRMCSLMQGSTLPRRSGAAGA
GMDPRMYSLNQASTIPRRSGAAGA

SEQ ID NO: 88621 - protein, 24 aa, Artificial Sequence
  Description of Artificial Sequence: Synthetic peptide
  Seed: GMDPRMCSLMQGSTLPRRSGAAGA
GMDPRMYSLNQASTLPRRSGAAGA

SEQ ID NO: 88622 - protein, 24 aa, Artificial Sequence
  Description of Artificial Sequence: Synthetic peptide
  Seed: GMDPRMCSLMQGSTLPRRSGAAGA
GMDPRMYSLNQASTVPRRSGAAGA

SEQ ID NO: 88623 - protein, 24 aa, Artificial Sequence
  Description of Artificial Sequence: Synthetic peptide
  Seed: GMDPRMCSLMQGSTLPRRSGAAGA
GMDPRMYSLQQASTAPRRSGAAGA

SEQ ID NO: 88624 - protein, 24 aa, Artificial Sequence
  Description of Artificial Sequence: Synthetic peptide
  Seed: GMDPRMCSLMQGSTLPRRSGAAGA
GMDPRMYSLQQASTIPRRSGAAGA

SEQ ID NO: 88625 - protein, 24 aa, Artificial Sequence
  Description of Artificial Sequence: Synthetic peptide
  Seed: GMDPRMCSLMQGSTLPRRSGAAGA
GMDPRMYSLQQASTLPRRSGAAGA

SEQ ID NO: 88626 - protein, 24 aa, Artificial Sequence
  Description of Artificial Sequence: Synthetic peptide
  Seed: GMDPRMCSLMQGSTLPRRSGAAGA
GMDPRMYSLQQASTMPRRSGAAGA

SEQ ID NO: 88627 - protein, 24 aa, Artificial Sequence
  Description of Artificial Sequence: Synthetic peptide
  Seed: GMDPRMCSLMQGSTLPRRSGAAGA
GMDPRMYSLQQASTNPRRSGAAGA

SEQ ID NO: 88628 - protein, 24 aa, Artificial Sequence
  Description of Artificial Sequence: Synthetic peptide
  Seed: GMDPRMCSLMQGSTLPRRSGAAGA
GMDPRMYSLQQASTSPRRSGAAGA

SEQ ID NO: 88629 - protein, 24 aa, Artificial Sequence
  Description of Artificial Sequence: Synthetic peptide
  Seed: GMDPRMCSLMQGSTLPRRSGAAGA
GMDPRMYSLQQASTTPRRSGAAGA

SEQ ID NO: 88630 - protein, 24 aa, Artificial Sequence
  Description of Artificial Sequence: Synthetic peptide
  Seed: GMDPRMCSLMQGSTLPRRSGAAGA
GMDPRMYSLQQASTVPRRSGAAGA

SEQ ID NO: 88631 - protein, 24 aa, Artificial Sequence
  Description of Artificial Sequence: Synthetic peptide
  Seed: GMDPRMCSLMQGSTLPRRSGAAGA
GMDPRMYSLQQGSTAPRRSGAAGA

SEQ ID NO: 88632 - protein, 24 aa, Artificial Sequence
  Description of Artificial Sequence: Synthetic peptide
  Seed: GMDPRMCSLMQGSTLPRRSGAAGA
GMDPRMYSLQQGSTIPRRSGAAGA

SEQ ID NO: 88633 - protein, 24 aa, Artificial Sequence
  Description of Artificial Sequence: Synthetic peptide
  Seed: GMDPRMCSLMQGSTLPRRSGAAGA
GMDPRMYSLQQGSTLPRRSGAAGA

SEQ ID NO: 88634 - protein, 24 aa, Artificial Sequence
  Description of Artificial Sequence: Synthetic peptide
  Seed: GMDPRMCSLMQGSTLPRRSGAAGA
GMDPRMYSLQQGSTMPRRSGAAGA

SEQ ID NO: 88635 - protein, 24 aa, Artificial Sequence
  Description of Artificial Sequence: Synthetic peptide
  Seed: GMDPRMCSLMQGSTLPRRSGAAGA
GMDPRMYSLQQGSTVPRRSGAAGA

SEQ ID NO: 88636 - protein, 24 aa, Artificial Sequence
  Description of Artificial Sequence: Synthetic peptide
  Seed: GMDPRMCSLMQGSTLPRRSGAAGA
GMDPRMYSLQQPSTIPRRSGAAGA

SEQ ID NO: 88637 - protein, 24 aa, Artificial Sequence
  Description of Artificial Sequence: Synthetic peptide
  Seed: GMDPRMCSLMQGSTLPRRSGAAGA
GMDPRMYSLQQPSTLPRRSGAAGA

SEQ ID NO: 88638 - protein, 24 aa, Artificial Sequence
  Description of Artificial Sequence: Synthetic peptide
  Seed: GMDPRMCSLMQGSTLPRRSGAAGA
GMDPRMYSLQQPSTVPRRSGAAGA

SEQ ID NO: 88639 - protein, 24 aa, Artificial Sequence
  Description of Artificial Sequence: Synthetic peptide
  Seed: GMDPRMCSLMQGSTLPRRSGAAGA
GMDPRMYSLQQSSTAPRRSGAAGA

SEQ ID NO: 88640 - protein, 24 aa, Artificial Sequence
  Description of Artificial Sequence: Synthetic peptide
  Seed: GMDPRMCSLMQGSTLPRRSGAAGA
GMDPRMYSLQQSSTIPRRSGAAGA

SEQ ID NO: 88641 - protein, 24 aa, Artificial Sequence
  Description of Artificial Sequence: Synthetic peptide
  Seed: GMDPRMCSLMQGSTLPRRSGAAGA
GMDPRMYSLQQSSTLPRRSGAAGA

SEQ ID NO: 88642 - protein, 24 aa, Artificial Sequence
  Description of Artificial Sequence: Synthetic peptide
  Seed: GMDPRMCSLMQGSTLPRRSGAAGA
GMDPRMYSLQQSSTVPRRSGAAGA

SEQ ID NO: 88643 - protein, 24 aa, Artificial Sequence
  Description of Artificial Sequence: Synthetic peptide
  Seed: GMDPRMCSLMQGSTLPRRSGAAGA
GMDPRMYSLQQVSTAPRRSGAAGA

SEQ ID NO: 88644 - protein, 24 aa, Artificial Sequence
  Description of Artificial Sequence: Synthetic peptide
  Seed: GMDPRMCSLMQGSTLPRRSGAAGA
GMDPRMYSLSQASTAPRRSGAAGA

SEQ ID NO: 88645 - protein, 24 aa, Artificial Sequence
  Description of Artificial Sequence: Synthetic peptide
  Seed: GMDPRMCSLMQGSTLPRRSGAAGA
GMDPRMYSLSQASTIPRRSGAAGA

SEQ ID NO: 88646 - protein, 24 aa, Artificial Sequence
  Description of Artificial Sequence: Synthetic peptide
  Seed: GMDPRMCSLMQGSTLPRRSGAAGA
GMDPRMYSLSQASTLPRRSGAAGA

SEQ ID NO: 88647 - protein, 24 aa, Artificial Sequence
  Description of Artificial Sequence: Synthetic peptide
  Seed: GMDPRMCSLMQGSTLPRRSGAAGA
GMDPRMYSLSQASTMPRRSGAAGA

SEQ ID NO: 88648 - protein, 24 aa, Artificial Sequence
  Description of Artificial Sequence: Synthetic peptide
  Seed: GMDPRMCSLMQGSTLPRRSGAAGA
GMDPRMYSLSQASTVPRRSGAAGA

SEQ ID NO: 88649 - protein, 24 aa, Artificial Sequence
  Description of Artificial Sequence: Synthetic peptide
  Seed: GMDPRMCSLMQGSTLPRRSGAAGA
GMDPRMYSLSQGSTIPRRSGAAGA

SEQ ID NO: 88650 - protein, 24 aa, Artificial Sequence
  Description of Artificial Sequence: Synthetic peptide
  Seed: GMDPRMCSLMQGSTLPRRSGAAGA
GMDPRMYSLSQGSTLPRRSGAAGA

SEQ ID NO: 88651 - protein, 24 aa, Artificial Sequence
  Description of Artificial Sequence: Synthetic peptide
  Seed: GMDPRMCSLMQGSTLPRRSGAAGA
GMDPRMYSLSQGSTVPRRSGAAGA

SEQ ID NO: 88652 - protein, 24 aa, Artificial Sequence
  Description of Artificial Sequence: Synthetic peptide
  Seed: GMDPRMCSLMQGSTLPRRSGAAGA
GMDPRMYSLSQSSTIPRRSGAAGA

SEQ ID NO: 88653 - protein, 24 aa, Artificial Sequence
  Description of Artificial Sequence: Synthetic peptide
  Seed: GMDPRMCSLMQGSTLPRRSGAAGA
GMDPRMYSLSQSSTLPRRSGAAGA

SEQ ID NO: 88654 - protein, 24 aa, Artificial Sequence
  Description of Artificial Sequence: Synthetic peptide
  Seed: GMDPRMCSLMQGSTLPRRSGAAGA
GMDPRMYSLSQSSTVPRRSGAAGA

SEQ ID NO: 88655 - protein, 24 aa, Artificial Sequence
  Description of Artificial Sequence: Synthetic peptide
  Seed: GMDPRMCSLMQGSTLPRRSGAAGA
GMDPRMYSLTQASTAPRRSGAAGA

SEQ ID NO: 88656 - protein, 24 aa, Artificial Sequence
  Description of Artificial Sequence: Synthetic peptide
  Seed: GMDPRMCSLMQGSTLPRRSGAAGA
GMDPRMYSLTQASTIPRRSGAAGA

SEQ ID NO: 88657 - protein, 24 aa, Artificial Sequence
  Description of Artificial Sequence: Synthetic peptide
  Seed: GMDPRMCSLMQGSTLPRRSGAAGA
GMDPRMYSLTQASTLPRRSGAAGA

SEQ ID NO: 88658 - protein, 24 aa, Artificial Sequence
  Description of Artificial Sequence: Synthetic peptide
  Seed: GMDPRMCSLMQGSTLPRRSGAAGA
GMDPRMYSLTQASTVPRRSGAAGA

SEQ ID NO: 88659 - protein, 24 aa, Artificial Sequence
  Description of Artificial Sequence: Synthetic peptide
  Seed: GMDPRMCSLMQGSTLPRRSGAAGA
GMDPRMYSLVQASTAPRRSGAAGA

SEQ ID NO: 88660 - protein, 24 aa, Artificial Sequence
  Description of Artificial Sequence: Synthetic peptide
  Seed: GMDPRMCSLMQGSTLPRRSGAAGA
GMDPRMYSLVQASTGPRRSGAAGA

SEQ ID NO: 88661 - protein, 24 aa, Artificial Sequence
  Description of Artificial Sequence: Synthetic peptide
  Seed: GMDPRMCSLMQGSTLPRRSGAAGA
GMDPRMYSLVQASTIPRRSGAAGA

SEQ ID NO: 88662 - protein, 24 aa, Artificial Sequence
  Description of Artificial Sequence: Synthetic peptide
  Seed: GMDPRMCSLMQGSTLPRRSGAAGA
GMDPRMYSLVQASTLPRRSGAAGA

SEQ ID NO: 88663 - protein, 24 aa, Artificial Sequence
  Description of Artificial Sequence: Synthetic peptide
  Seed: GMDPRMCSLMQGSTLPRRSGAAGA
GMDPRMYSLVQASTMPRRSGAAGA

SEQ ID NO: 88664 - protein, 24 aa, Artificial Sequence
  Description of Artificial Sequence: Synthetic peptide
  Seed: GMDPRMCSLMQGSTLPRRSGAAGA
GMDPRMYSLVQASTNPRRSGAAGA

SEQ ID NO: 88665 - protein, 24 aa, Artificial Sequence
  Description of Artificial Sequence: Synthetic peptide
  Seed: GMDPRMCSLMQGSTLPRRSGAAGA
GMDPRMYSLVQASTSPRRSGAAGA

SEQ ID NO: 88666 - protein, 24 aa, Artificial Sequence
  Description of Artificial Sequence: Synthetic peptide
  Seed: GMDPRMCSLMQGSTLPRRSGAAGA
GMDPRMYSLVQASTTPRRSGAAGA

SEQ ID NO: 88667 - protein, 24 aa, Artificial Sequence
  Description of Artificial Sequence: Synthetic peptide
  Seed: GMDPRMCSLMQGSTLPRRSGAAGA
GMDPRMYSLVQASTVPRRSGAAGA

SEQ ID NO: 88668 - protein, 24 aa, Artificial Sequence
  Description of Artificial Sequence: Synthetic peptide
  Seed: GMDPRMCSLMQGSTLPRRSGAAGA
GMDPRMYSLVQGSTAPRRSGAAGA

SEQ ID NO: 88669 - protein, 24 aa, Artificial Sequence
  Description of Artificial Sequence: Synthetic peptide
  Seed: GMDPRMCSLMQGSTLPRRSGAAGA
GMDPRMYSLVQGSTIPRRSGAAGA

SEQ ID NO: 88670 - protein, 24 aa, Artificial Sequence
  Description of Artificial Sequence: Synthetic peptide
  Seed: GMDPRMCSLMQGSTLPRRSGAAGA
GMDPRMYSLVQGSTLPRRSGAAGA

SEQ ID NO: 88671 - protein, 24 aa, Artificial Sequence
  Description of Artificial Sequence: Synthetic peptide
  Seed: GMDPRMCSLMQGSTLPRRSGAAGA
GMDPRMYSLVQGSTMPRRSGAAGA

SEQ ID NO: 88672 - protein, 24 aa, Artificial Sequence
  Description of Artificial Sequence: Synthetic peptide
  Seed: GMDPRMCSLMQGSTLPRRSGAAGA
GMDPRMYSLVQGSTSPRRSGAAGA

SEQ ID NO: 88673 - protein, 24 aa, Artificial Sequence
  Description of Artificial Sequence: Synthetic peptide
  Seed: GMDPRMCSLMQGSTLPRRSGAAGA
GMDPRMYSLVQGSTTPRRSGAAGA

SEQ ID NO: 88674 - protein, 24 aa, Artificial Sequence
  Description of Artificial Sequence: Synthetic peptide
  Seed: GMDPRMCSLMQGSTLPRRSGAAGA
GMDPRMYSLVQGSTVPRRSGAAGA

SEQ ID NO: 88675 - protein, 24 aa, Artificial Sequence
  Description of Artificial Sequence: Synthetic peptide
  Seed: GMDPRMCSLMQGSTLPRRSGAAGA
GMDPRMYSLVQISTAPRRSGAAGA

SEQ ID NO: 88676 - protein, 24 aa, Artificial Sequence
  Description of Artificial Sequence: Synthetic peptide
  Seed: GMDPRMCSLMQGSTLPRRSGAAGA
GMDPRMYSLVQISTNPRRSGAAGA

SEQ ID NO: 88677 - protein, 24 aa, Artificial Sequence
  Description of Artificial Sequence: Synthetic peptide
  Seed: GMDPRMCSLMQGSTLPRRSGAAGA
GMDPRMYSLVQISTSPRRSGAAGA

SEQ ID NO: 88678 - protein, 24 aa, Artificial Sequence
  Description of Artificial Sequence: Synthetic peptide
  Seed: GMDPRMCSLMQGSTLPRRSGAAGA
GMDPRMYSLVQPSTAPRRSGAAGA

SEQ ID NO: 88679 - protein, 24 aa, Artificial Sequence
  Description of Artificial Sequence: Synthetic peptide
  Seed: GMDPRMCSLMQGSTLPRRSGAAGA
GMDPRMYSLVQPSTIPRRSGAAGA

SEQ ID NO: 88680 - protein, 24 aa, Artificial Sequence
  Description of Artificial Sequence: Synthetic peptide
  Seed: GMDPRMCSLMQGSTLPRRSGAAGA
GMDPRMYSLVQPSTLPRRSGAAGA

SEQ ID NO: 88681 - protein, 24 aa, Artificial Sequence
  Description of Artificial Sequence: Synthetic peptide
  Seed: GMDPRMCSLMQGSTLPRRSGAAGA
GMDPRMYSLVQPSTMPRRSGAAGA

SEQ ID NO: 88682 - protein, 24 aa, Artificial Sequence
  Description of Artificial Sequence: Synthetic peptide
  Seed: GMDPRMCSLMQGSTLPRRSGAAGA
GMDPRMYSLVQPSTNPRRSGAAGA

SEQ ID NO: 88683 - protein, 24 aa, Artificial Sequence
  Description of Artificial Sequence: Synthetic peptide
  Seed: GMDPRMCSLMQGSTLPRRSGAAGA
GMDPRMYSLVQPSTSPRRSGAAGA

SEQ ID NO: 88684 - protein, 24 aa, Artificial Sequence
  Description of Artificial Sequence: Synthetic peptide
  Seed: GMDPRMCSLMQGSTLPRRSGAAGA
GMDPRMYSLVQPSTTPRRSGAAGA

SEQ ID NO: 88685 - protein, 24 aa, Artificial Sequence
  Description of Artificial Sequence: Synthetic peptide
  Seed: GMDPRMCSLMQGSTLPRRSGAAGA
GMDPRMYSLVQPSTVPRRSGAAGA

SEQ ID NO: 88686 - protein, 24 aa, Artificial Sequence
  Description of Artificial Sequence: Synthetic peptide
  Seed: GMDPRMCSLMQGSTLPRRSGAAGA
GMDPRMYSLVQSSTAPRRSGAAGA

SEQ ID NO: 88687 - protein, 24 aa, Artificial Sequence
  Description of Artificial Sequence: Synthetic peptide
  Seed: GMDPRMCSLMQGSTLPRRSGAAGA
GMDPRMYSLVQSSTIPRRSGAAGA

SEQ ID NO: 88688 - protein, 24 aa, Artificial Sequence
  Description of Artificial Sequence: Synthetic peptide
  Seed: GMDPRMCSLMQGSTLPRRSGAAGA
GMDPRMYSLVQSSTLPRRSGAAGA

SEQ ID NO: 88689 - protein, 24 aa, Artificial Sequence
  Description of Artificial Sequence: Synthetic peptide
  Seed: GMDPRMCSLMQGSTLPRRSGAAGA
GMDPRMYSLVQSSTNPRRSGAAGA

SEQ ID NO: 88690 - protein, 24 aa, Artificial Sequence
  Description of Artificial Sequence: Synthetic peptide
  Seed: GMDPRMCSLMQGSTLPRRSGAAGA
GMDPRMYSLVQSSTSPRRSGAAGA

SEQ ID NO: 88691 - protein, 24 aa, Artificial Sequence
  Description of Artificial Sequence: Synthetic peptide
  Seed: GMDPRMCSLMQGSTLPRRSGAAGA
GMDPRMYSLVQSSTTPRRSGAAGA

SEQ ID NO: 88692 - protein, 24 aa, Artificial Sequence
  Description of Artificial Sequence: Synthetic peptide
  Seed: GMDPRMCSLMQGSTLPRRSGAAGA
GMDPRMYSLVQSSTVPRRSGAAGA

SEQ ID NO: 88693 - protein, 24 aa, Artificial Sequence
  Description of Artificial Sequence: Synthetic peptide
  Seed: GMDPRMCSLMQGSTLPRRSGAAGA
GMDPRMYSLVQTSTAPRRSGAAGA

SEQ ID NO: 88694 - protein, 24 aa, Artificial Sequence
  Description of Artificial Sequence: Synthetic peptide
  Seed: GMDPRMCSLMQGSTLPRRSGAAGA
GMDPRMYSLVQTSTIPRRSGAAGA

SEQ ID NO: 88695 - protein, 24 aa, Artificial Sequence
  Description of Artificial Sequence: Synthetic peptide
  Seed: GMDPRMCSLMQGSTLPRRSGAAGA
GMDPRMYSLVQTSTLPRRSGAAGA

SEQ ID NO: 88696 - protein, 24 aa, Artificial Sequence
  Description of Artificial Sequence: Synthetic peptide
  Seed: GMDPRMCSLMQGSTLPRRSGAAGA
GMDPRMYSLVQTSTNPRRSGAAGA

SEQ ID NO: 88697 - protein, 24 aa, Artificial Sequence
  Description of Artificial Sequence: Synthetic peptide
  Seed: GMDPRMCSLMQGSTLPRRSGAAGA
GMDPRMYSLVQTSTSPRRSGAAGA

SEQ ID NO: 88698 - protein, 24 aa, Artificial Sequence
  Description of Artificial Sequence: Synthetic peptide
  Seed: GMDPRMCSLMQGSTLPRRSGAAGA
GMDPRMYSLVQTSTTPRRSGAAGA

SEQ ID NO: 88699 - protein, 24 aa, Artificial Sequence
  Description of Artificial Sequence: Synthetic peptide
  Seed: GMDPRMCSLMQGSTLPRRSGAAGA
GMDPRMYSLVQTSTVPRRSGAAGA

SEQ ID NO: 88700 - protein, 24 aa, Artificial Sequence
  Description of Artificial Sequence: Synthetic peptide
  Seed: GMDPRMCSLMQGSTLPRRSGAAGA
GMDPRMYSLVQVSTAPRRSGAAGA

SEQ ID NO: 88701 - protein, 24 aa, Artificial Sequence
  Description of Artificial Sequence: Synthetic peptide
  Seed: GMDPRMCSLMQGSTLPRRSGAAGA
GMDPRMYSLVQVSTNPRRSGAAGA

SEQ ID NO: 88702 - protein, 24 aa, Artificial Sequence
  Description of Artificial Sequence: Synthetic peptide
  Seed: GMDPRMCSLMQGSTLPRRSGAAGA
GMDPRMYSLVQVSTSPRRSGAAGA

SEQ ID NO: 88703 - protein, 24 aa, Artificial Sequence
  Description of Artificial Sequence: Synthetic peptide
  Seed: GMDPRMCSLMQGSTLPRRSGAAGA
GMDPRMYSLVQVSTTPRRSGAAGA

SEQ ID NO: 88704 - protein, 24 aa, Artificial Sequence
  Description of Artificial Sequence: Synthetic peptide
  Seed: GMDPRMCSLMQGSTLPRRSGAAGA
GMDPRMYSLVQVSTVPRRSGAAGA

SEQ ID NO: 88705 - protein, 24 aa, Artificial Sequence
  Description of Artificial Sequence: Synthetic peptide
  Seed: GMDPRMCSLMQGSTLPRRSGAAGA
GMDPRMCSLMQISTFPRRSAAAGA

SEQ ID NO: 88706 - protein, 24 aa, Artificial Sequence
  Description of Artificial Sequence: Synthetic peptide
  Seed: GMDPRMCSLMQGSTLPRRSGAAGA
GMDPRMCSLMQISTIPRRSAAAGA

SEQ ID NO: 88707 - protein, 24 aa, Artificial Sequence
  Description of Artificial Sequence: Synthetic peptide
  Seed: GMDPRMCSLMQGSTLPRRSGAAGA
GMDPRMCSLMQISTMPRRSAAAGA

SEQ ID NO: 88708 - protein, 15 aa, Artificial Sequence
  Description of Artificial Sequence: Synthetic peptide
  Seed: LMQGSTLPRRSGAAG
LMQFSTAPRRSAAAG

SEQ ID NO: 88709 - protein, 15 aa, Artificial Sequence
  Description of Artificial Sequence: Synthetic peptide
  Seed: LMQGSTLPRRSGAAG
LMQFSTFPRRSAAAG

SEQ ID NO: 88710 - protein, 15 aa, Artificial Sequence
  Description of Artificial Sequence: Synthetic peptide
  Seed: LMQGSTLPRRSGAAG
LMQFSTFPRRSSAAG

SEQ ID NO: 88711 - protein, 15 aa, Artificial Sequence
  Description of Artificial Sequence: Synthetic peptide
  Seed: LMQGSTLPRRSGAAG
LMQFSTIPKRSAAAG

SEQ ID NO: 88712 - protein, 15 aa, Artificial Sequence
  Description of Artificial Sequence: Synthetic peptide
  Seed: LMQGSTLPRRSGAAG
LMQFSTIPKRSSAAG

SEQ ID NO: 88713 - protein, 15 aa, Artificial Sequence
  Description of Artificial Sequence: Synthetic peptide
  Seed: LMQGSTLPRRSGAAG
LMQFSTIPRRSAAAG

SEQ ID NO: 88714 - protein, 15 aa, Artificial Sequence
  Description of Artificial Sequence: Synthetic peptide
  Seed: LMQGSTLPRRSGAAG
LMQFSTIPRRSGAAG

SEQ ID NO: 88715 - protein, 15 aa, Artificial Sequence
  Description of Artificial Sequence: Synthetic peptide
  Seed: LMQGSTLPRRSGAAG
LMQFSTIPRRSHAAG

SEQ ID NO: 88716 - protein, 15 aa, Artificial Sequence
  Description of Artificial Sequence: Synthetic peptide
  Seed: LMQGSTLPRRSGAAG
LMQFSTIPRRSKAAG

SEQ ID NO: 88717 - protein, 15 aa, Artificial Sequence
  Description of Artificial Sequence: Synthetic peptide
  Seed: LMQGSTLPRRSGAAG
LMQFSTIPRRSMAAG

SEQ ID NO: 88718 - protein, 15 aa, Artificial Sequence
  Description of Artificial Sequence: Synthetic peptide
  Seed: LMQGSTLPRRSGAAG
LMQFSTIPRRSQAAG

SEQ ID NO: 88719 - protein, 15 aa, Artificial Sequence
  Description of Artificial Sequence: Synthetic peptide
  Seed: LMQGSTLPRRSGAAG
LMQFSTIPRRSRAAG

SEQ ID NO: 88720 - protein, 15 aa, Artificial Sequence
  Description of Artificial Sequence: Synthetic peptide
  Seed: LMQGSTLPRRSGAAG
LMQFSTIPRRSSAAG

SEQ ID NO: 88721 - protein, 15 aa, Artificial Sequence
  Description of Artificial Sequence: Synthetic peptide
  Seed: LMQGSTLPRRSGAAG
LMQFSTIPRRSTAAG

SEQ ID NO: 88722 - protein, 15 aa, Artificial Sequence
  Description of Artificial Sequence: Synthetic peptide
  Seed: LMQGSTLPRRSGAAG
LMQFSTIPRRSVAAG

SEQ ID NO: 88723 - protein, 15 aa, Artificial Sequence
  Description of Artificial Sequence: Synthetic peptide
  Seed: LMQGSTLPRRSGAAG
LMQFSTIPRRSYAAG

SEQ ID NO: 88724 - protein, 15 aa, Artificial Sequence
  Description of Artificial Sequence: Synthetic peptide
  Seed: LMQGSTLPRRSGAAG
LMQFSTLPKRSAAAG

SEQ ID NO: 88725 - protein, 15 aa, Artificial Sequence
  Description of Artificial Sequence: Synthetic peptide
  Seed: LMQGSTLPRRSGAAG
LMQFSTLPKRSSAAG

SEQ ID NO: 88726 - protein, 15 aa, Artificial Sequence
  Description of Artificial Sequence: Synthetic peptide
  Seed: LMQGSTLPRRSGAAG
LMQFSTLPRRSAAAG

SEQ ID NO: 88727 - protein, 15 aa, Artificial Sequence
  Description of Artificial Sequence: Synthetic peptide
  Seed: LMQGSTLPRRSGAAG
LMQFSTLPRRSGAAG

SEQ ID NO: 88728 - protein, 15 aa, Artificial Sequence
  Description of Artificial Sequence: Synthetic peptide
  Seed: LMQGSTLPRRSGAAG
LMQFSTLPRRSHAAG

SEQ ID NO: 88729 - protein, 15 aa, Artificial Sequence
  Description of Artificial Sequence: Synthetic peptide
  Seed: LMQGSTLPRRSGAAG
LMQFSTLPRRSIAAG

SEQ ID NO: 88730 - protein, 15 aa, Artificial Sequence
  Description of Artificial Sequence: Synthetic peptide
  Seed: LMQGSTLPRRSGAAG
LMQFSTLPRRSKAAG

SEQ ID NO: 88731 - protein, 15 aa, Artificial Sequence
  Description of Artificial Sequence: Synthetic peptide
  Seed: LMQGSTLPRRSGAAG
LMQFSTLPRRSMAAG

SEQ ID NO: 88732 - protein, 15 aa, Artificial Sequence
  Description of Artificial Sequence: Synthetic peptide
  Seed: LMQGSTLPRRSGAAG
LMQFSTLPRRSQAAG

SEQ ID NO: 88733 - protein, 15 aa, Artificial Sequence
  Description of Artificial Sequence: Synthetic peptide
  Seed: LMQGSTLPRRSGAAG
LMQFSTLPRRSRAAG

SEQ ID NO: 88734 - protein, 15 aa, Artificial Sequence
  Description of Artificial Sequence: Synthetic peptide
  Seed: LMQGSTLPRRSGAAG
LMQFSTLPRRSSAAG

SEQ ID NO: 88735 - protein, 15 aa, Artificial Sequence
  Description of Artificial Sequence: Synthetic peptide
  Seed: LMQGSTLPRRSGAAG
LMQFSTLPRRSTAAG

SEQ ID NO: 88736 - protein, 15 aa, Artificial Sequence
  Description of Artificial Sequence: Synthetic peptide
  Seed: LMQGSTLPRRSGAAG
LMQFSTLPRRSVAAG

SEQ ID NO: 88737 - protein, 15 aa, Artificial Sequence
  Description of Artificial Sequence: Synthetic peptide
  Seed: LMQGSTLPRRSGAAG
LMQFSTLPRRSYAAG

SEQ ID NO: 88738 - protein, 15 aa, Artificial Sequence
  Description of Artificial Sequence: Synthetic peptide
  Seed: LMQGSTLPRRSGAAG
LMQFSTMPKRSAAAG

SEQ ID NO: 88739 - protein, 15 aa, Artificial Sequence
  Description of Artificial Sequence: Synthetic peptide
  Seed: LMQGSTLPRRSGAAG
LMQFSTMPKRSSAAG

SEQ ID NO: 88740 - protein, 15 aa, Artificial Sequence
  Description of Artificial Sequence: Synthetic peptide
  Seed: LMQGSTLPRRSGAAG
LMQFSTMPRRSAAAG

SEQ ID NO: 88741 - protein, 15 aa, Artificial Sequence
  Description of Artificial Sequence: Synthetic peptide
  Seed: LMQGSTLPRRSGAAG
LMQFSTMPRRSGAAG

SEQ ID NO: 88742 - protein, 15 aa, Artificial Sequence
  Description of Artificial Sequence: Synthetic peptide
  Seed: LMQGSTLPRRSGAAG
LMQFSTMPRRSHAAG

SEQ ID NO: 88743 - protein, 15 aa, Artificial Sequence
  Description of Artificial Sequence: Synthetic peptide
  Seed: LMQGSTLPRRSGAAG
LMQFSTMPRRSIAAG

SEQ ID NO: 88744 - protein, 15 aa, Artificial Sequence
  Description of Artificial Sequence: Synthetic peptide
  Seed: LMQGSTLPRRSGAAG
LMQFSTMPRRSKAAG

SEQ ID NO: 88745 - protein, 15 aa, Artificial Sequence
  Description of Artificial Sequence: Synthetic peptide
  Seed: LMQGSTLPRRSGAAG
LMQFSTMPRRSLAAG

SEQ ID NO: 88746 - protein, 15 aa, Artificial Sequence
  Description of Artificial Sequence: Synthetic peptide
  Seed: LMQGSTLPRRSGAAG
LMQFSTMPRRSMAAG

SEQ ID NO: 88747 - protein, 15 aa, Artificial Sequence
  Description of Artificial Sequence: Synthetic peptide
  Seed: LMQGSTLPRRSGAAG
LMQFSTMPRRSQAAG

SEQ ID NO: 88748 - protein, 15 aa, Artificial Sequence
  Description of Artificial Sequence: Synthetic peptide
  Seed: LMQGSTLPRRSGAAG
LMQFSTMPRRSRAAG

SEQ ID NO: 88749 - protein, 15 aa, Artificial Sequence
  Description of Artificial Sequence: Synthetic peptide
  Seed: LMQGSTLPRRSGAAG
LMQFSTMPRRSSAAG

SEQ ID NO: 88750 - protein, 15 aa, Artificial Sequence
  Description of Artificial Sequence: Synthetic peptide
  Seed: LMQGSTLPRRSGAAG
LMQFSTMPRRSTAAG

SEQ ID NO: 88751 - protein, 15 aa, Artificial Sequence
  Description of Artificial Sequence: Synthetic peptide
  Seed: LMQGSTLPRRSGAAG
LMQFSTMPRRSVAAG

SEQ ID NO: 88752 - protein, 15 aa, Artificial Sequence
  Description of Artificial Sequence: Synthetic peptide
  Seed: LMQGSTLPRRSGAAG
LMQFSTMPRRSYAAG

SEQ ID NO: 88753 - protein, 15 aa, Artificial Sequence
  Description of Artificial Sequence: Synthetic peptide
  Seed: LMQGSTLPRRSGAAG
LMQFSTRPRRSAAAG

SEQ ID NO: 88754 - protein, 15 aa, Artificial Sequence
  Description of Artificial Sequence: Synthetic peptide
  Seed: LMQGSTLPRRSGAAG
LMQFSTVPKRSAAAG

SEQ ID NO: 88755 - protein, 15 aa, Artificial Sequence
  Description of Artificial Sequence: Synthetic peptide
  Seed: LMQGSTLPRRSGAAG
LMQFSTVPRRSAAAG

SEQ ID NO: 88756 - protein, 15 aa, Artificial Sequence
  Description of Artificial Sequence: Synthetic peptide
  Seed: LMQGSTLPRRSGAAG
LMQFSTVPRRSSAAG

SEQ ID NO: 88757 - protein, 15 aa, Artificial Sequence
  Description of Artificial Sequence: Synthetic peptide
  Seed: LMQGSTLPRRSGAAG
LMQISTAPKRSAAAG

SEQ ID NO: 88758 - protein, 15 aa, Artificial Sequence
  Description of Artificial Sequence: Synthetic peptide
  Seed: LMQGSTLPRRSGAAG
LMQISTAPRRSAAAG

SEQ ID NO: 88759 - protein, 15 aa, Artificial Sequence
  Description of Artificial Sequence: Synthetic peptide
  Seed: LMQGSTLPRRSGAAG
LMQISTAPRRSIAAG

SEQ ID NO: 88760 - protein, 15 aa, Artificial Sequence
  Description of Artificial Sequence: Synthetic peptide
  Seed: LMQGSTLPRRSGAAG
LMQISTAPRRSLAAG

SEQ ID NO: 88761 - protein, 15 aa, Artificial Sequence
  Description of Artificial Sequence: Synthetic peptide
  Seed: LMQGSTLPRRSGAAG
LMQISTAPRRSQAAG

SEQ ID NO: 88762 - protein, 15 aa, Artificial Sequence
  Description of Artificial Sequence: Synthetic peptide
  Seed: LMQGSTLPRRSGAAG
LMQISTAPRRSRAAG

SEQ ID NO: 88763 - protein, 15 aa, Artificial Sequence
  Description of Artificial Sequence: Synthetic peptide
  Seed: LMQGSTLPRRSGAAG
LMQISTAPRRSSAAG

SEQ ID NO: 88764 - protein, 15 aa, Artificial Sequence
  Description of Artificial Sequence: Synthetic peptide
  Seed: LMQGSTLPRRSGAAG
LMQISTAPRRSVAAG

SEQ ID NO: 88765 - protein, 15 aa, Artificial Sequence
  Description of Artificial Sequence: Synthetic peptide
  Seed: LMQGSTLPRRSGAAG
LMQISTFPKRSAAAG

SEQ ID NO: 88766 - protein, 15 aa, Artificial Sequence
  Description of Artificial Sequence: Synthetic peptide
  Seed: LMQGSTLPRRSGAAG
LMQISTFPKRSKAAG

SEQ ID NO: 88767 - protein, 15 aa, Artificial Sequence
  Description of Artificial Sequence: Synthetic peptide
  Seed: LMQGSTLPRRSGAAG
LMQISTFPKRSRAAG

SEQ ID NO: 88768 - protein, 15 aa, Artificial Sequence
  Description of Artificial Sequence: Synthetic peptide
  Seed: LMQGSTLPRRSGAAG
LMQISTFPKRSSAAG

SEQ ID NO: 88769 - protein, 15 aa, Artificial Sequence
  Description of Artificial Sequence: Synthetic peptide
  Seed: LMQGSTLPRRSGAAG
LMQISTFPKRSVAAG

SEQ ID NO: 88770 - protein, 15 aa, Artificial Sequence
  Description of Artificial Sequence: Synthetic peptide
  Seed: LMQGSTLPRRSGAAG
LMQISTFPRRSAAAG

SEQ ID NO: 88771 - protein, 15 aa, Artificial Sequence
  Description of Artificial Sequence: Synthetic peptide
  Seed: LMQGSTLPRRSGAAG
LMQISTFPRRSGAAG

SEQ ID NO: 88772 - protein, 15 aa, Artificial Sequence
  Description of Artificial Sequence: Synthetic peptide
  Seed: LMQGSTLPRRSGAAG
LMQISTFPRRSHAAG

SEQ ID NO: 88773 - protein, 15 aa, Artificial Sequence
  Description of Artificial Sequence: Synthetic peptide
  Seed: LMQGSTLPRRSGAAG
LMQISTFPRRSIAAG

SEQ ID NO: 88774 - protein, 15 aa, Artificial Sequence
  Description of Artificial Sequence: Synthetic peptide
  Seed: LMQGSTLPRRSGAAG
LMQISTFPRRSKAAG

SEQ ID NO: 88775 - protein, 15 aa, Artificial Sequence
  Description of Artificial Sequence: Synthetic peptide
  Seed: LMQGSTLPRRSGAAG
LMQISTFPRRSLAAG

SEQ ID NO: 88776 - protein, 15 aa, Artificial Sequence
  Description of Artificial Sequence: Synthetic peptide
  Seed: LMQGSTLPRRSGAAG
LMQISTFPRRSMAAG

SEQ ID NO: 88777 - protein, 15 aa, Artificial Sequence
  Description of Artificial Sequence: Synthetic peptide
  Seed: LMQGSTLPRRSGAAG
LMQISTFPRRSQAAG

SEQ ID NO: 88778 - protein, 15 aa, Artificial Sequence
  Description of Artificial Sequence: Synthetic peptide
  Seed: LMQGSTLPRRSGAAG
LMQISTFPRRSRAAG

SEQ ID NO: 88779 - protein, 15 aa, Artificial Sequence
  Description of Artificial Sequence: Synthetic peptide
  Seed: LMQGSTLPRRSGAAG
LMQISTFPRRSSAAG

SEQ ID NO: 88780 - protein, 15 aa, Artificial Sequence
  Description of Artificial Sequence: Synthetic peptide
  Seed: LMQGSTLPRRSGAAG
LMQISTFPRRSTAAG

SEQ ID NO: 88781 - protein, 15 aa, Artificial Sequence
  Description of Artificial Sequence: Synthetic peptide
  Seed: LMQGSTLPRRSGAAG
LMQISTFPRRSVAAG

SEQ ID NO: 88782 - protein, 15 aa, Artificial Sequence
  Description of Artificial Sequence: Synthetic peptide
  Seed: LMQGSTLPRRSGAAG
LMQISTFPRRSYAAG

SEQ ID NO: 88783 - protein, 15 aa, Artificial Sequence
  Description of Artificial Sequence: Synthetic peptide
  Seed: LMQGSTLPRRSGAAG
LMQISTHPRRSAAAG

SEQ ID NO: 88784 - protein, 15 aa, Artificial Sequence
  Description of Artificial Sequence: Synthetic peptide
  Seed: LMQGSTLPRRSGAAG
LMQISTHPRRSKAAG

SEQ ID NO: 88785 - protein, 15 aa, Artificial Sequence
  Description of Artificial Sequence: Synthetic peptide
  Seed: LMQGSTLPRRSGAAG
LMQISTHPRRSRAAG

SEQ ID NO: 88786 - protein, 15 aa, Artificial Sequence
  Description of Artificial Sequence: Synthetic peptide
  Seed: LMQGSTLPRRSGAAG
LMQISTHPRRSSAAG

SEQ ID NO: 88787 - protein, 15 aa, Artificial Sequence
  Description of Artificial Sequence: Synthetic peptide
  Seed: LMQGSTLPRRSGAAG
LMQISTIPKRSAAAG

SEQ ID NO: 88788 - protein, 15 aa, Artificial Sequence
  Description of Artificial Sequence: Synthetic peptide
  Seed: LMQGSTLPRRSGAAG
LMQISTIPKRSGAAG

SEQ ID NO: 88789 - protein, 15 aa, Artificial Sequence
  Description of Artificial Sequence: Synthetic peptide
  Seed: LMQGSTLPRRSGAAG
LMQISTIPKRSHAAG

SEQ ID NO: 88790 - protein, 15 aa, Artificial Sequence
  Description of Artificial Sequence: Synthetic peptide
  Seed: LMQGSTLPRRSGAAG
LMQISTIPKRSIAAG

SEQ ID NO: 88791 - protein, 15 aa, Artificial Sequence
  Description of Artificial Sequence: Synthetic peptide
  Seed: LMQGSTLPRRSGAAG
LMQISTIPKRSKAAG

SEQ ID NO: 88792 - protein, 15 aa, Artificial Sequence
  Description of Artificial Sequence: Synthetic peptide
  Seed: LMQGSTLPRRSGAAG
LMQISTIPKRSLAAG

SEQ ID NO: 88793 - protein, 15 aa, Artificial Sequence
  Description of Artificial Sequence: Synthetic peptide
  Seed: LMQGSTLPRRSGAAG
LMQISTIPKRSMAAG

SEQ ID NO: 88794 - protein, 15 aa, Artificial Sequence
  Description of Artificial Sequence: Synthetic peptide
  Seed: LMQGSTLPRRSGAAG
LMQISTIPKRSQAAG

SEQ ID NO: 88795 - protein, 15 aa, Artificial Sequence
  Description of Artificial Sequence: Synthetic peptide
  Seed: LMQGSTLPRRSGAAG
LMQISTIPKRSSAAG

SEQ ID NO: 88796 - protein, 15 aa, Artificial Sequence
  Description of Artificial Sequence: Synthetic peptide
  Seed: LMQGSTLPRRSGAAG
LMQISTIPKRSTAAG

SEQ ID NO: 88797 - protein, 15 aa, Artificial Sequence
  Description of Artificial Sequence: Synthetic peptide
  Seed: LMQGSTLPRRSGAAG
LMQISTIPKRSVAAG

SEQ ID NO: 88798 - protein, 15 aa, Artificial Sequence
  Description of Artificial Sequence: Synthetic peptide
  Seed: LMQGSTLPRRSGAAG
LMQISTIPRRSAAAG

SEQ ID NO: 88799 - protein, 15 aa, Artificial Sequence
  Description of Artificial Sequence: Synthetic peptide
  Seed: LMQGSTLPRRSGAAG
LMQISTIPRRSFAAG

SEQ ID NO: 88800 - protein, 15 aa, Artificial Sequence
  Description of Artificial Sequence: Synthetic peptide
  Seed: LMQGSTLPRRSGAAG
LMQISTIPRRSGAAG

SEQ ID NO: 88801 - protein, 15 aa, Artificial Sequence
  Description of Artificial Sequence: Synthetic peptide
  Seed: LMQGSTLPRRSGAAG
LMQISTIPRRSHAAG

SEQ ID NO: 88802 - protein, 15 aa, Artificial Sequence
  Description of Artificial Sequence: Synthetic peptide
  Seed: LMQGSTLPRRSGAAG
LMQISTIPRRSIAAG

SEQ ID NO: 88803 - protein, 15 aa, Artificial Sequence
  Description of Artificial Sequence: Synthetic peptide
  Seed: LMQGSTLPRRSGAAG
LMQISTIPRRSKAAG

SEQ ID NO: 88804 - protein, 15 aa, Artificial Sequence
  Description of Artificial Sequence: Synthetic peptide
  Seed: LMQGSTLPRRSGAAG
LMQISTIPRRSLAAG

SEQ ID NO: 88805 - protein, 15 aa, Artificial Sequence
  Description of Artificial Sequence: Synthetic peptide
  Seed: LMQGSTLPRRSGAAG
LMQISTIPRRSMAAG

SEQ ID NO: 88806 - protein, 15 aa, Artificial Sequence
  Description of Artificial Sequence: Synthetic peptide
  Seed: LMQGSTLPRRSGAAG
LMQISTIPRRSNAAG

SEQ ID NO: 88807 - protein, 15 aa, Artificial Sequence
  Description of Artificial Sequence: Synthetic peptide
  Seed: LMQGSTLPRRSGAAG
LMQISTIPRRSPAAG

SEQ ID NO: 88808 - protein, 15 aa, Artificial Sequence
  Description of Artificial Sequence: Synthetic peptide
  Seed: LMQGSTLPRRSGAAG
LMQISTIPRRSQAAG

SEQ ID NO: 88809 - protein, 15 aa, Artificial Sequence
  Description of Artificial Sequence: Synthetic peptide
  Seed: LMQGSTLPRRSGAAG
LMQISTIPRRSRAAG

SEQ ID NO: 88810 - protein, 15 aa, Artificial Sequence
  Description of Artificial Sequence: Synthetic peptide
  Seed: LMQGSTLPRRSGAAG
LMQISTIPRRSSAAG

SEQ ID NO: 88811 - protein, 15 aa, Artificial Sequence
  Description of Artificial Sequence: Synthetic peptide
  Seed: LMQGSTLPRRSGAAG
LMQISTIPRRSTAAG

SEQ ID NO: 88812 - protein, 15 aa, Artificial Sequence
  Description of Artificial Sequence: Synthetic peptide
  Seed: LMQGSTLPRRSGAAG
LMQISTIPRRSVAAG

SEQ ID NO: 88813 - protein, 15 aa, Artificial Sequence
  Description of Artificial Sequence: Synthetic peptide
  Seed: LMQGSTLPRRSGAAG
LMQISTIPRRSWAAG

SEQ ID NO: 88814 - protein, 15 aa, Artificial Sequence
  Description of Artificial Sequence: Synthetic peptide
  Seed: LMQGSTLPRRSGAAG
LMQISTIPRRSYAAG

SEQ ID NO: 88815 - protein, 15 aa, Artificial Sequence
  Description of Artificial Sequence: Synthetic peptide
  Seed: LMQGSTLPRRSGAAG
LMQISTKPRRSAAAG

SEQ ID NO: 88816 - protein, 15 aa, Artificial Sequence
  Description of Artificial Sequence: Synthetic peptide
  Seed: LMQGSTLPRRSGAAG
LMQISTKPRRSIAAG

SEQ ID NO: 88817 - protein, 15 aa, Artificial Sequence
  Description of Artificial Sequence: Synthetic peptide
  Seed: LMQGSTLPRRSGAAG
LMQISTKPRRSLAAG

SEQ ID NO: 88818 - protein, 15 aa, Artificial Sequence
  Description of Artificial Sequence: Synthetic peptide
  Seed: LMQGSTLPRRSGAAG
LMQISTKPRRSMAAG

SEQ ID NO: 88819 - protein, 15 aa, Artificial Sequence
  Description of Artificial Sequence: Synthetic peptide
  Seed: LMQGSTLPRRSGAAG
LMQISTKPRRSQAAG

SEQ ID NO: 88820 - protein, 15 aa, Artificial Sequence
  Description of Artificial Sequence: Synthetic peptide
  Seed: LMQGSTLPRRSGAAG
LMQISTKPRRSRAAG

SEQ ID NO: 88821 - protein, 15 aa, Artificial Sequence
  Description of Artificial Sequence: Synthetic peptide
  Seed: LMQGSTLPRRSGAAG
LMQISTKPRRSSAAG

SEQ ID NO: 88822 - protein, 15 aa, Artificial Sequence
  Description of Artificial Sequence: Synthetic peptide
  Seed: LMQGSTLPRRSGAAG
LMQISTKPRRSVAAG

SEQ ID NO: 88823 - protein, 15 aa, Artificial Sequence
  Description of Artificial Sequence: Synthetic peptide
  Seed: LMQGSTLPRRSGAAG
LMQISTLPKRSAAAG

SEQ ID NO: 88824 - protein, 15 aa, Artificial Sequence
  Description of Artificial Sequence: Synthetic peptide
  Seed: LMQGSTLPRRSGAAG
LMQISTLPKRSGAAG

SEQ ID NO: 88825 - protein, 15 aa, Artificial Sequence
  Description of Artificial Sequence: Synthetic peptide
  Seed: LMQGSTLPRRSGAAG
LMQISTLPKRSHAAG

SEQ ID NO: 88826 - protein, 15 aa, Artificial Sequence
  Description of Artificial Sequence: Synthetic peptide
  Seed: LMQGSTLPRRSGAAG
LMQISTLPKRSIAAG

SEQ ID NO: 88827 - protein, 15 aa, Artificial Sequence
  Description of Artificial Sequence: Synthetic peptide
  Seed: LMQGSTLPRRSGAAG
LMQISTLPKRSKAAG

SEQ ID NO: 88828 - protein, 15 aa, Artificial Sequence
  Description of Artificial Sequence: Synthetic peptide
  Seed: LMQGSTLPRRSGAAG
LMQISTLPKRSLAAG

SEQ ID NO: 88829 - protein, 15 aa, Artificial Sequence
  Description of Artificial Sequence: Synthetic peptide
  Seed: LMQGSTLPRRSGAAG
LMQISTLPKRSMAAG

SEQ ID NO: 88830 - protein, 15 aa, Artificial Sequence
  Description of Artificial Sequence: Synthetic peptide
  Seed: LMQGSTLPRRSGAAG
LMQISTLPKRSQAAG

SEQ ID NO: 88831 - protein, 15 aa, Artificial Sequence
  Description of Artificial Sequence: Synthetic peptide
  Seed: LMQGSTLPRRSGAAG
LMQISTLPKRSRAAG

SEQ ID NO: 88832 - protein, 15 aa, Artificial Sequence
  Description of Artificial Sequence: Synthetic peptide
  Seed: LMQGSTLPRRSGAAG
LMQISTLPKRSSAAG

SEQ ID NO: 88833 - protein, 15 aa, Artificial Sequence
  Description of Artificial Sequence: Synthetic peptide
  Seed: LMQGSTLPRRSGAAG
LMQISTLPKRSTAAG

SEQ ID NO: 88834 - protein, 15 aa, Artificial Sequence
  Description of Artificial Sequence: Synthetic peptide
  Seed: LMQGSTLPRRSGAAG
LMQISTLPKRSVAAG

SEQ ID NO: 88835 - protein, 15 aa, Artificial Sequence
  Description of Artificial Sequence: Synthetic peptide
  Seed: LMQGSTLPRRSGAAG
LMQISTLPRRSAAAG

SEQ ID NO: 88836 - protein, 15 aa, Artificial Sequence
  Description of Artificial Sequence: Synthetic peptide
  Seed: LMQGSTLPRRSGAAG
LMQISTLPRRSFAAG

SEQ ID NO: 88837 - protein, 15 aa, Artificial Sequence
  Description of Artificial Sequence: Synthetic peptide
  Seed: LMQGSTLPRRSGAAG
LMQISTLPRRSGAAG

SEQ ID NO: 88838 - protein, 15 aa, Artificial Sequence
  Description of Artificial Sequence: Synthetic peptide
  Seed: LMQGSTLPRRSGAAG
LMQISTLPRRSHAAG

SEQ ID NO: 88839 - protein, 15 aa, Artificial Sequence
  Description of Artificial Sequence: Synthetic peptide
  Seed: LMQGSTLPRRSGAAG
LMQISTLPRRSIAAG

SEQ ID NO: 88840 - protein, 15 aa, Artificial Sequence
  Description of Artificial Sequence: Synthetic peptide
  Seed: LMQGSTLPRRSGAAG
LMQISTLPRRSKAAG

SEQ ID NO: 88841 - protein, 15 aa, Artificial Sequence
  Description of Artificial Sequence: Synthetic peptide
  Seed: LMQGSTLPRRSGAAG
LMQISTLPRRSLAAG

SEQ ID NO: 88842 - protein, 15 aa, Artificial Sequence
  Description of Artificial Sequence: Synthetic peptide
  Seed: LMQGSTLPRRSGAAG
LMQISTLPRRSMAAG

SEQ ID NO: 88843 - protein, 15 aa, Artificial Sequence
  Description of Artificial Sequence: Synthetic peptide
  Seed: LMQGSTLPRRSGAAG
LMQISTLPRRSNAAG

SEQ ID NO: 88844 - protein, 15 aa, Artificial Sequence
  Description of Artificial Sequence: Synthetic peptide
  Seed: LMQGSTLPRRSGAAG
LMQISTLPRRSPAAG

SEQ ID NO: 88845 - protein, 15 aa, Artificial Sequence
  Description of Artificial Sequence: Synthetic peptide
  Seed: LMQGSTLPRRSGAAG
LMQISTLPRRSQAAG

SEQ ID NO: 88846 - protein, 15 aa, Artificial Sequence
  Description of Artificial Sequence: Synthetic peptide
  Seed: LMQGSTLPRRSGAAG
LMQISTLPRRSRAAG

SEQ ID NO: 88847 - protein, 15 aa, Artificial Sequence
  Description of Artificial Sequence: Synthetic peptide
  Seed: LMQGSTLPRRSGAAG
LMQISTLPRRSSAAG

SEQ ID NO: 88848 - protein, 15 aa, Artificial Sequence
  Description of Artificial Sequence: Synthetic peptide
  Seed: LMQGSTLPRRSGAAG
LMQISTLPRRSTAAG

SEQ ID NO: 88849 - protein, 15 aa, Artificial Sequence
  Description of Artificial Sequence: Synthetic peptide
  Seed: LMQGSTLPRRSGAAG
LMQISTLPRRSVAAG

SEQ ID NO: 88850 - protein, 15 aa, Artificial Sequence
  Description of Artificial Sequence: Synthetic peptide
  Seed: LMQGSTLPRRSGAAG
LMQISTLPRRSWAAG

SEQ ID NO: 88851 - protein, 15 aa, Artificial Sequence
  Description of Artificial Sequence: Synthetic peptide
  Seed: LMQGSTLPRRSGAAG
LMQISTLPRRSYAAG

SEQ ID NO: 88852 - protein, 15 aa, Artificial Sequence
  Description of Artificial Sequence: Synthetic peptide
  Seed: LMQGSTLPRRSGAAG
LMQISTMPKRSAAAG

SEQ ID NO: 88853 - protein, 15 aa, Artificial Sequence
  Description of Artificial Sequence: Synthetic peptide
  Seed: LMQGSTLPRRSGAAG
LMQISTMPKRSGAAG

SEQ ID NO: 88854 - protein, 15 aa, Artificial Sequence
  Description of Artificial Sequence: Synthetic peptide
  Seed: LMQGSTLPRRSGAAG
LMQISTMPKRSHAAG

SEQ ID NO: 88855 - protein, 15 aa, Artificial Sequence
  Description of Artificial Sequence: Synthetic peptide
  Seed: LMQGSTLPRRSGAAG
LMQISTMPKRSIAAG

SEQ ID NO: 88856 - protein, 15 aa, Artificial Sequence
  Description of Artificial Sequence: Synthetic peptide
  Seed: LMQGSTLPRRSGAAG
LMQISTMPKRSKAAG

SEQ ID NO: 88857 - protein, 15 aa, Artificial Sequence
  Description of Artificial Sequence: Synthetic peptide
  Seed: LMQGSTLPRRSGAAG
LMQISTMPKRSLAAG

SEQ ID NO: 88858 - protein, 15 aa, Artificial Sequence
  Description of Artificial Sequence: Synthetic peptide
  Seed: LMQGSTLPRRSGAAG
LMQISTMPKRSMAAG

SEQ ID NO: 88859 - protein, 15 aa, Artificial Sequence
  Description of Artificial Sequence: Synthetic peptide
  Seed: LMQGSTLPRRSGAAG
LMQISTMPKRSQAAG

SEQ ID NO: 88860 - protein, 15 aa, Artificial Sequence
  Description of Artificial Sequence: Synthetic peptide
  Seed: LMQGSTLPRRSGAAG
LMQISTMPKRSRAAG

SEQ ID NO: 88861 - protein, 15 aa, Artificial Sequence
  Description of Artificial Sequence: Synthetic peptide
  Seed: LMQGSTLPRRSGAAG
LMQISTMPKRSSAAG

SEQ ID NO: 88862 - protein, 15 aa, Artificial Sequence
  Description of Artificial Sequence: Synthetic peptide
  Seed: LMQGSTLPRRSGAAG
LMQISTMPKRSTAAG

SEQ ID NO: 88863 - protein, 15 aa, Artificial Sequence
  Description of Artificial Sequence: Synthetic peptide
  Seed: LMQGSTLPRRSGAAG
LMQISTMPKRSVAAG

SEQ ID NO: 88864 - protein, 15 aa, Artificial Sequence
  Description of Artificial Sequence: Synthetic peptide
  Seed: LMQGSTLPRRSGAAG
LMQISTMPKRSYAAG

SEQ ID NO: 88865 - protein, 15 aa, Artificial Sequence
  Description of Artificial Sequence: Synthetic peptide
  Seed: LMQGSTLPRRSGAAG
LMQISTMPRRSAAAG

SEQ ID NO: 88866 - protein, 15 aa, Artificial Sequence
  Description of Artificial Sequence: Synthetic peptide
  Seed: LMQGSTLPRRSGAAG
LMQISTMPRRSFAAG

SEQ ID NO: 88867 - protein, 15 aa, Artificial Sequence
  Description of Artificial Sequence: Synthetic peptide
  Seed: LMQGSTLPRRSGAAG
LMQISTMPRRSGAAG

SEQ ID NO: 88868 - protein, 15 aa, Artificial Sequence
  Description of Artificial Sequence: Synthetic peptide
  Seed: LMQGSTLPRRSGAAG
LMQISTMPRRSHAAG

SEQ ID NO: 88869 - protein, 15 aa, Artificial Sequence
  Description of Artificial Sequence: Synthetic peptide
  Seed: LMQGSTLPRRSGAAG
LMQISTMPRRSIAAG

SEQ ID NO: 88870 - protein, 15 aa, Artificial Sequence
  Description of Artificial Sequence: Synthetic peptide
  Seed: LMQGSTLPRRSGAAG
LMQISTMPRRSKAAG

SEQ ID NO: 88871 - protein, 15 aa, Artificial Sequence
  Description of Artificial Sequence: Synthetic peptide
  Seed: LMQGSTLPRRSGAAG
LMQISTMPRRSLAAG

SEQ ID NO: 88872 - protein, 15 aa, Artificial Sequence
  Description of Artificial Sequence: Synthetic peptide
  Seed: LMQGSTLPRRSGAAG
LMQISTMPRRSMAAG

SEQ ID NO: 88873 - protein, 15 aa, Artificial Sequence
  Description of Artificial Sequence: Synthetic peptide
  Seed: LMQGSTLPRRSGAAG
LMQISTMPRRSNAAG

SEQ ID NO: 88874 - protein, 15 aa, Artificial Sequence
  Description of Artificial Sequence: Synthetic peptide
  Seed: LMQGSTLPRRSGAAG
LMQISTMPRRSPAAG

SEQ ID NO: 88875 - protein, 15 aa, Artificial Sequence
  Description of Artificial Sequence: Synthetic peptide
  Seed: LMQGSTLPRRSGAAG
LMQISTMPRRSQAAG

SEQ ID NO: 88876 - protein, 15 aa, Artificial Sequence
  Description of Artificial Sequence: Synthetic peptide
  Seed: LMQGSTLPRRSGAAG
LMQISTMPRRSRAAG

SEQ ID NO: 88877 - protein, 15 aa, Artificial Sequence
  Description of Artificial Sequence: Synthetic peptide
  Seed: LMQGSTLPRRSGAAG
LMQISTMPRRSSAAG

SEQ ID NO: 88878 - protein, 15 aa, Artificial Sequence
  Description of Artificial Sequence: Synthetic peptide
  Seed: LMQGSTLPRRSGAAG
LMQISTMPRRSTAAG

SEQ ID NO: 88879 - protein, 15 aa, Artificial Sequence
  Description of Artificial Sequence: Synthetic peptide
  Seed: LMQGSTLPRRSGAAG
LMQISTMPRRSVAAG

SEQ ID NO: 88880 - protein, 15 aa, Artificial Sequence
  Description of Artificial Sequence: Synthetic peptide
  Seed: LMQGSTLPRRSGAAG
LMQISTMPRRSWAAG

SEQ ID NO: 88881 - protein, 15 aa, Artificial Sequence
  Description of Artificial Sequence: Synthetic peptide
  Seed: LMQGSTLPRRSGAAG
LMQISTMPRRSYAAG

SEQ ID NO: 88882 - protein, 15 aa, Artificial Sequence
  Description of Artificial Sequence: Synthetic peptide
  Seed: LMQGSTLPRRSGAAG
LMQISTQPRRSAAAG

SEQ ID NO: 88883 - protein, 15 aa, Artificial Sequence
  Description of Artificial Sequence: Synthetic peptide
  Seed: LMQGSTLPRRSGAAG
LMQISTQPRRSSAAG

SEQ ID NO: 88884 - protein, 15 aa, Artificial Sequence
  Description of Artificial Sequence: Synthetic peptide
  Seed: LMQGSTLPRRSGAAG
LMQISTRPRRSAAAG

SEQ ID NO: 88885 - protein, 15 aa, Artificial Sequence
  Description of Artificial Sequence: Synthetic peptide
  Seed: LMQGSTLPRRSGAAG
LMQISTRPRRSHAAG

SEQ ID NO: 88886 - protein, 15 aa, Artificial Sequence
  Description of Artificial Sequence: Synthetic peptide
  Seed: LMQGSTLPRRSGAAG
LMQISTRPRRSIAAG

SEQ ID NO: 88887 - protein, 15 aa, Artificial Sequence
  Description of Artificial Sequence: Synthetic peptide
  Seed: LMQGSTLPRRSGAAG
LMQISTRPRRSKAAG

SEQ ID NO: 88888 - protein, 15 aa, Artificial Sequence
  Description of Artificial Sequence: Synthetic peptide
  Seed: LMQGSTLPRRSGAAG
LMQISTRPRRSLAAG

SEQ ID NO: 88889 - protein, 15 aa, Artificial Sequence
  Description of Artificial Sequence: Synthetic peptide
  Seed: LMQGSTLPRRSGAAG
LMQISTRPRRSMAAG

SEQ ID NO: 88890 - protein, 15 aa, Artificial Sequence
  Description of Artificial Sequence: Synthetic peptide
  Seed: LMQGSTLPRRSGAAG
LMQISTRPRRSQAAG

SEQ ID NO: 88891 - protein, 15 aa, Artificial Sequence
  Description of Artificial Sequence: Synthetic peptide
  Seed: LMQGSTLPRRSGAAG
LMQISTRPRRSRAAG

SEQ ID NO: 88892 - protein, 15 aa, Artificial Sequence
  Description of Artificial Sequence: Synthetic peptide
  Seed: LMQGSTLPRRSGAAG
LMQISTRPRRSSAAG

SEQ ID NO: 88893 - protein, 15 aa, Artificial Sequence
  Description of Artificial Sequence: Synthetic peptide
  Seed: LMQGSTLPRRSGAAG
LMQISTRPRRSVAAG

SEQ ID NO: 88894 - protein, 15 aa, Artificial Sequence
  Description of Artificial Sequence: Synthetic peptide
  Seed: LMQGSTLPRRSGAAG
LMQISTRPRRSYAAG

SEQ ID NO: 88895 - protein, 15 aa, Artificial Sequence
  Description of Artificial Sequence: Synthetic peptide
  Seed: LMQGSTLPRRSGAAG
LMQISTVPKRSAAAG

SEQ ID NO: 88896 - protein, 15 aa, Artificial Sequence
  Description of Artificial Sequence: Synthetic peptide
  Seed: LMQGSTLPRRSGAAG
LMQISTVPKRSQAAG

SEQ ID NO: 88897 - protein, 15 aa, Artificial Sequence
  Description of Artificial Sequence: Synthetic peptide
  Seed: LMQGSTLPRRSGAAG
LMQISTVPKRSSAAG

SEQ ID NO: 88898 - protein, 15 aa, Artificial Sequence
  Description of Artificial Sequence: Synthetic peptide
  Seed: LMQGSTLPRRSGAAG
LMQISTVPRRSAAAG

SEQ ID NO: 88899 - protein, 15 aa, Artificial Sequence
  Description of Artificial Sequence: Synthetic peptide
  Seed: LMQGSTLPRRSGAAG
LMQISTVPRRSGAAG

SEQ ID NO: 88900 - protein, 15 aa, Artificial Sequence
  Description of Artificial Sequence: Synthetic peptide
  Seed: LMQGSTLPRRSGAAG
LMQISTVPRRSHAAG

SEQ ID NO: 88901 - protein, 15 aa, Artificial Sequence
  Description of Artificial Sequence: Synthetic peptide
  Seed: LMQGSTLPRRSGAAG
LMQISTVPRRSIAAG

SEQ ID NO: 88902 - protein, 15 aa, Artificial Sequence
  Description of Artificial Sequence: Synthetic peptide
  Seed: LMQGSTLPRRSGAAG
LMQISTVPRRSKAAG

SEQ ID NO: 88903 - protein, 15 aa, Artificial Sequence
  Description of Artificial Sequence: Synthetic peptide
  Seed: LMQGSTLPRRSGAAG
LMQISTVPRRSLAAG

SEQ ID NO: 88904 - protein, 15 aa, Artificial Sequence
  Description of Artificial Sequence: Synthetic peptide
  Seed: LMQGSTLPRRSGAAG
LMQISTVPRRSMAAG

SEQ ID NO: 88905 - protein, 15 aa, Artificial Sequence
  Description of Artificial Sequence: Synthetic peptide
  Seed: LMQGSTLPRRSGAAG
LMQISTVPRRSQAAG

SEQ ID NO: 88906 - protein, 15 aa, Artificial Sequence
  Description of Artificial Sequence: Synthetic peptide
  Seed: LMQGSTLPRRSGAAG
LMQISTVPRRSRAAG

SEQ ID NO: 88907 - protein, 15 aa, Artificial Sequence
  Description of Artificial Sequence: Synthetic peptide
  Seed: LMQGSTLPRRSGAAG
LMQISTVPRRSSAAG

SEQ ID NO: 88908 - protein, 15 aa, Artificial Sequence
  Description of Artificial Sequence: Synthetic peptide
  Seed: LMQGSTLPRRSGAAG
LMQISTVPRRSTAAG

SEQ ID NO: 88909 - protein, 15 aa, Artificial Sequence
  Description of Artificial Sequence: Synthetic peptide
  Seed: LMQGSTLPRRSGAAG
LMQISTVPRRSVAAG

SEQ ID NO: 88910 - protein, 15 aa, Artificial Sequence
  Description of Artificial Sequence: Synthetic peptide
  Seed: LMQGSTLPRRSGAAG
LMQISTVPRRSYAAG

SEQ ID NO: 88911 - protein, 15 aa, Artificial Sequence
  Description of Artificial Sequence: Synthetic peptide
  Seed: LMQGSTLPRRSGAAG
LMQISTWPRRSAAAG

SEQ ID NO: 88912 - protein, 15 aa, Artificial Sequence
  Description of Artificial Sequence: Synthetic peptide
  Seed: LMQGSTLPRRSGAAG
LMQISTWPRRSKAAG

SEQ ID NO: 88913 - protein, 15 aa, Artificial Sequence
  Description of Artificial Sequence: Synthetic peptide
  Seed: LMQGSTLPRRSGAAG
LMQISTWPRRSSAAG

SEQ ID NO: 88914 - protein, 15 aa, Artificial Sequence
  Description of Artificial Sequence: Synthetic peptide
  Seed: LMQGSTLPRRSGAAG
LMQISTWPRRSVAAG

SEQ ID NO: 88915 - protein, 15 aa, Artificial Sequence
  Description of Artificial Sequence: Synthetic peptide
  Seed: LMQGSTLPRRSGAAG
LMQISTYPRRSAAAG

SEQ ID NO: 88916 - protein, 15 aa, Artificial Sequence
  Description of Artificial Sequence: Synthetic peptide
  Seed: LMQGSTLPRRSGAAG
LMQISTYPRRSHAAG

SEQ ID NO: 88917 - protein, 15 aa, Artificial Sequence
  Description of Artificial Sequence: Synthetic peptide
  Seed: LMQGSTLPRRSGAAG
LMQISTYPRRSSAAG

SEQ ID NO: 88918 - protein, 15 aa, Artificial Sequence
  Description of Artificial Sequence: Synthetic peptide
  Seed: LMQGSTLPRRSGAAG
LMQLSTAPRRSAAAG

SEQ ID NO: 88919 - protein, 15 aa, Artificial Sequence
  Description of Artificial Sequence: Synthetic peptide
  Seed: LMQGSTLPRRSGAAG
LMQLSTAPRRSQAAG

SEQ ID NO: 88920 - protein, 15 aa, Artificial Sequence
  Description of Artificial Sequence: Synthetic peptide
  Seed: LMQGSTLPRRSGAAG
LMQLSTAPRRSSAAG

SEQ ID NO: 88921 - protein, 15 aa, Artificial Sequence
  Description of Artificial Sequence: Synthetic peptide
  Seed: LMQGSTLPRRSGAAG
LMQLSTFPKRSAAAG

SEQ ID NO: 88922 - protein, 15 aa, Artificial Sequence
  Description of Artificial Sequence: Synthetic peptide
  Seed: LMQGSTLPRRSGAAG
LMQLSTFPKRSSAAG

SEQ ID NO: 88923 - protein, 15 aa, Artificial Sequence
  Description of Artificial Sequence: Synthetic peptide
  Seed: LMQGSTLPRRSGAAG
LMQLSTFPRRSAAAG

SEQ ID NO: 88924 - protein, 15 aa, Artificial Sequence
  Description of Artificial Sequence: Synthetic peptide
  Seed: LMQGSTLPRRSGAAG
LMQLSTFPRRSGAAG

SEQ ID NO: 88925 - protein, 15 aa, Artificial Sequence
  Description of Artificial Sequence: Synthetic peptide
  Seed: LMQGSTLPRRSGAAG
LMQLSTFPRRSHAAG

SEQ ID NO: 88926 - protein, 15 aa, Artificial Sequence
  Description of Artificial Sequence: Synthetic peptide
  Seed: LMQGSTLPRRSGAAG
LMQLSTFPRRSKAAG

SEQ ID NO: 88927 - protein, 15 aa, Artificial Sequence
  Description of Artificial Sequence: Synthetic peptide
  Seed: LMQGSTLPRRSGAAG
LMQLSTFPRRSRAAG

SEQ ID NO: 88928 - protein, 15 aa, Artificial Sequence
  Description of Artificial Sequence: Synthetic peptide
  Seed: LMQGSTLPRRSGAAG
LMQLSTFPRRSSAAG

SEQ ID NO: 88929 - protein, 15 aa, Artificial Sequence
  Description of Artificial Sequence: Synthetic peptide
  Seed: LMQGSTLPRRSGAAG
LMQLSTFPRRSVAAG

SEQ ID NO: 88930 - protein, 15 aa, Artificial Sequence
  Description of Artificial Sequence: Synthetic peptide
  Seed: LMQGSTLPRRSGAAG
LMQLSTFPRRSYAAG

SEQ ID NO: 88931 - protein, 15 aa, Artificial Sequence
  Description of Artificial Sequence: Synthetic peptide
  Seed: LMQGSTLPRRSGAAG
LMQLSTIPKRSAAAG

SEQ ID NO: 88932 - protein, 15 aa, Artificial Sequence
  Description of Artificial Sequence: Synthetic peptide
  Seed: LMQGSTLPRRSGAAG
LMQLSTIPKRSGAAG

SEQ ID NO: 88933 - protein, 15 aa, Artificial Sequence
  Description of Artificial Sequence: Synthetic peptide
  Seed: LMQGSTLPRRSGAAG
LMQLSTIPKRSQAAG

SEQ ID NO: 88934 - protein, 15 aa, Artificial Sequence
  Description of Artificial Sequence: Synthetic peptide
  Seed: LMQGSTLPRRSGAAG
LMQLSTIPKRSSAAG

SEQ ID NO: 88935 - protein, 15 aa, Artificial Sequence
  Description of Artificial Sequence: Synthetic peptide
  Seed: LMQGSTLPRRSGAAG
LMQLSTIPKRSTAAG

SEQ ID NO: 88936 - protein, 15 aa, Artificial Sequence
  Description of Artificial Sequence: Synthetic peptide
  Seed: LMQGSTLPRRSGAAG
LMQLSTIPRRSAAAG

SEQ ID NO: 88937 - protein, 15 aa, Artificial Sequence
  Description of Artificial Sequence: Synthetic peptide
  Seed: LMQGSTLPRRSGAAG
LMQLSTIPRRSGAAG

SEQ ID NO: 88938 - protein, 15 aa, Artificial Sequence
  Description of Artificial Sequence: Synthetic peptide
  Seed: LMQGSTLPRRSGAAG
LMQLSTIPRRSHAAG

SEQ ID NO: 88939 - protein, 15 aa, Artificial Sequence
  Description of Artificial Sequence: Synthetic peptide
  Seed: LMQGSTLPRRSGAAG
LMQLSTIPRRSIAAG

SEQ ID NO: 88940 - protein, 15 aa, Artificial Sequence
  Description of Artificial Sequence: Synthetic peptide
  Seed: LMQGSTLPRRSGAAG
LMQLSTIPRRSKAAG

SEQ ID NO: 88941 - protein, 15 aa, Artificial Sequence
  Description of Artificial Sequence: Synthetic peptide
  Seed: LMQGSTLPRRSGAAG
LMQLSTIPRRSLAAG

SEQ ID NO: 88942 - protein, 15 aa, Artificial Sequence
  Description of Artificial Sequence: Synthetic peptide
  Seed: LMQGSTLPRRSGAAG
LMQLSTIPRRSMAAG

SEQ ID NO: 88943 - protein, 15 aa, Artificial Sequence
  Description of Artificial Sequence: Synthetic peptide
  Seed: LMQGSTLPRRSGAAG
LMQLSTIPRRSQAAG

SEQ ID NO: 88944 - protein, 15 aa, Artificial Sequence
  Description of Artificial Sequence: Synthetic peptide
  Seed: LMQGSTLPRRSGAAG
LMQLSTIPRRSRAAG

SEQ ID NO: 88945 - protein, 15 aa, Artificial Sequence
  Description of Artificial Sequence: Synthetic peptide
  Seed: LMQGSTLPRRSGAAG
LMQLSTIPRRSSAAG

SEQ ID NO: 88946 - protein, 15 aa, Artificial Sequence
  Description of Artificial Sequence: Synthetic peptide
  Seed: LMQGSTLPRRSGAAG
LMQLSTIPRRSTAAG

SEQ ID NO: 88947 - protein, 15 aa, Artificial Sequence
  Description of Artificial Sequence: Synthetic peptide
  Seed: LMQGSTLPRRSGAAG
LMQLSTIPRRSVAAG

SEQ ID NO: 88948 - protein, 15 aa, Artificial Sequence
  Description of Artificial Sequence: Synthetic peptide
  Seed: LMQGSTLPRRSGAAG
LMQLSTIPRRSYAAG

SEQ ID NO: 88949 - protein, 15 aa, Artificial Sequence
  Description of Artificial Sequence: Synthetic peptide
  Seed: LMQGSTLPRRSGAAG
LMQLSTKPRRSAAAG

SEQ ID NO: 88950 - protein, 15 aa, Artificial Sequence
  Description of Artificial Sequence: Synthetic peptide
  Seed: LMQGSTLPRRSGAAG
LMQLSTLPKRSAAAG

SEQ ID NO: 88951 - protein, 15 aa, Artificial Sequence
  Description of Artificial Sequence: Synthetic peptide
  Seed: LMQGSTLPRRSGAAG
LMQLSTLPKRSGAAG

SEQ ID NO: 88952 - protein, 15 aa, Artificial Sequence
  Description of Artificial Sequence: Synthetic peptide
  Seed: LMQGSTLPRRSGAAG
LMQLSTLPKRSQAAG

SEQ ID NO: 88953 - protein, 15 aa, Artificial Sequence
  Description of Artificial Sequence: Synthetic peptide
  Seed: LMQGSTLPRRSGAAG
LMQLSTLPKRSSAAG

SEQ ID NO: 88954 - protein, 15 aa, Artificial Sequence
  Description of Artificial Sequence: Synthetic peptide
  Seed: LMQGSTLPRRSGAAG
LMQLSTLPKRSTAAG

SEQ ID NO: 88955 - protein, 15 aa, Artificial Sequence
  Description of Artificial Sequence: Synthetic peptide
  Seed: LMQGSTLPRRSGAAG
LMQLSTLPRRSAAAG

SEQ ID NO: 88956 - protein, 15 aa, Artificial Sequence
  Description of Artificial Sequence: Synthetic peptide
  Seed: LMQGSTLPRRSGAAG
LMQLSTLPRRSGAAG

SEQ ID NO: 88957 - protein, 15 aa, Artificial Sequence
  Description of Artificial Sequence: Synthetic peptide
  Seed: LMQGSTLPRRSGAAG
LMQLSTLPRRSHAAG

SEQ ID NO: 88958 - protein, 15 aa, Artificial Sequence
  Description of Artificial Sequence: Synthetic peptide
  Seed: LMQGSTLPRRSGAAG
LMQLSTLPRRSIAAG

SEQ ID NO: 88959 - protein, 15 aa, Artificial Sequence
  Description of Artificial Sequence: Synthetic peptide
  Seed: LMQGSTLPRRSGAAG
LMQLSTLPRRSKAAG

SEQ ID NO: 88960 - protein, 15 aa, Artificial Sequence
  Description of Artificial Sequence: Synthetic peptide
  Seed: LMQGSTLPRRSGAAG
LMQLSTLPRRSLAAG

SEQ ID NO: 88961 - protein, 15 aa, Artificial Sequence
  Description of Artificial Sequence: Synthetic peptide
  Seed: LMQGSTLPRRSGAAG
LMQLSTLPRRSMAAG

SEQ ID NO: 88962 - protein, 15 aa, Artificial Sequence
  Description of Artificial Sequence: Synthetic peptide
  Seed: LMQGSTLPRRSGAAG
LMQLSTLPRRSNAAG

SEQ ID NO: 88963 - protein, 15 aa, Artificial Sequence
  Description of Artificial Sequence: Synthetic peptide
  Seed: LMQGSTLPRRSGAAG
LMQLSTLPRRSQAAG

SEQ ID NO: 88964 - protein, 15 aa, Artificial Sequence
  Description of Artificial Sequence: Synthetic peptide
  Seed: LMQGSTLPRRSGAAG
LMQLSTLPRRSRAAG

SEQ ID NO: 88965 - protein, 15 aa, Artificial Sequence
  Description of Artificial Sequence: Synthetic peptide
  Seed: LMQGSTLPRRSGAAG
LMQLSTLPRRSSAAG

SEQ ID NO: 88966 - protein, 15 aa, Artificial Sequence
  Description of Artificial Sequence: Synthetic peptide
  Seed: LMQGSTLPRRSGAAG
LMQLSTLPRRSTAAG

SEQ ID NO: 88967 - protein, 15 aa, Artificial Sequence
  Description of Artificial Sequence: Synthetic peptide
  Seed: LMQGSTLPRRSGAAG
LMQLSTLPRRSVAAG

SEQ ID NO: 88968 - protein, 15 aa, Artificial Sequence
  Description of Artificial Sequence: Synthetic peptide
  Seed: LMQGSTLPRRSGAAG
LMQLSTLPRRSYAAG

SEQ ID NO: 88969 - protein, 15 aa, Artificial Sequence
  Description of Artificial Sequence: Synthetic peptide
  Seed: LMQGSTLPRRSGAAG
LMQLSTMPKRSAAAG

SEQ ID NO: 88970 - protein, 15 aa, Artificial Sequence
  Description of Artificial Sequence: Synthetic peptide
  Seed: LMQGSTLPRRSGAAG
LMQLSTMPKRSGAAG

SEQ ID NO: 88971 - protein, 15 aa, Artificial Sequence
  Description of Artificial Sequence: Synthetic peptide
  Seed: LMQGSTLPRRSGAAG
LMQLSTMPKRSHAAG

SEQ ID NO: 88972 - protein, 15 aa, Artificial Sequence
  Description of Artificial Sequence: Synthetic peptide
  Seed: LMQGSTLPRRSGAAG
LMQLSTMPKRSMAAG

SEQ ID NO: 88973 - protein, 15 aa, Artificial Sequence
  Description of Artificial Sequence: Synthetic peptide
  Seed: LMQGSTLPRRSGAAG
LMQLSTMPKRSQAAG

SEQ ID NO: 88974 - protein, 15 aa, Artificial Sequence
  Description of Artificial Sequence: Synthetic peptide
  Seed: LMQGSTLPRRSGAAG
LMQLSTMPKRSSAAG

SEQ ID NO: 88975 - protein, 15 aa, Artificial Sequence
  Description of Artificial Sequence: Synthetic peptide
  Seed: LMQGSTLPRRSGAAG
LMQLSTMPKRSTAAG

SEQ ID NO: 88976 - protein, 15 aa, Artificial Sequence
  Description of Artificial Sequence: Synthetic peptide
  Seed: LMQGSTLPRRSGAAG
LMQLSTMPKRSVAAG

SEQ ID NO: 88977 - protein, 15 aa, Artificial Sequence
  Description of Artificial Sequence: Synthetic peptide
  Seed: LMQGSTLPRRSGAAG
LMQLSTMPRRSAAAG

SEQ ID NO: 88978 - protein, 15 aa, Artificial Sequence
  Description of Artificial Sequence: Synthetic peptide
  Seed: LMQGSTLPRRSGAAG
LMQLSTMPRRSFAAG

SEQ ID NO: 88979 - protein, 15 aa, Artificial Sequence
  Description of Artificial Sequence: Synthetic peptide
  Seed: LMQGSTLPRRSGAAG
LMQLSTMPRRSGAAG

SEQ ID NO: 88980 - protein, 15 aa, Artificial Sequence
  Description of Artificial Sequence: Synthetic peptide
  Seed: LMQGSTLPRRSGAAG
LMQLSTMPRRSHAAG

SEQ ID NO: 88981 - protein, 15 aa, Artificial Sequence
  Description of Artificial Sequence: Synthetic peptide
  Seed: LMQGSTLPRRSGAAG
LMQLSTMPRRSIAAG

SEQ ID NO: 88982 - protein, 15 aa, Artificial Sequence
  Description of Artificial Sequence: Synthetic peptide
  Seed: LMQGSTLPRRSGAAG
LMQLSTMPRRSKAAG

SEQ ID NO: 88983 - protein, 15 aa, Artificial Sequence
  Description of Artificial Sequence: Synthetic peptide
  Seed: LMQGSTLPRRSGAAG
LMQLSTMPRRSLAAG

SEQ ID NO: 88984 - protein, 15 aa, Artificial Sequence
  Description of Artificial Sequence: Synthetic peptide
  Seed: LMQGSTLPRRSGAAG
LMQLSTMPRRSMAAG

SEQ ID NO: 88985 - protein, 15 aa, Artificial Sequence
  Description of Artificial Sequence: Synthetic peptide
  Seed: LMQGSTLPRRSGAAG
LMQLSTMPRRSNAAG

SEQ ID NO: 88986 - protein, 15 aa, Artificial Sequence
  Description of Artificial Sequence: Synthetic peptide
  Seed: LMQGSTLPRRSGAAG
LMQLSTMPRRSPAAG

SEQ ID NO: 88987 - protein, 15 aa, Artificial Sequence
  Description of Artificial Sequence: Synthetic peptide
  Seed: LMQGSTLPRRSGAAG
LMQLSTMPRRSQAAG

SEQ ID NO: 88988 - protein, 15 aa, Artificial Sequence
  Description of Artificial Sequence: Synthetic peptide
  Seed: LMQGSTLPRRSGAAG
LMQLSTMPRRSRAAG

SEQ ID NO: 88989 - protein, 15 aa, Artificial Sequence
  Description of Artificial Sequence: Synthetic peptide
  Seed: LMQGSTLPRRSGAAG
LMQLSTMPRRSSAAG

SEQ ID NO: 88990 - protein, 15 aa, Artificial Sequence
  Description of Artificial Sequence: Synthetic peptide
  Seed: LMQGSTLPRRSGAAG
LMQLSTMPRRSTAAG

SEQ ID NO: 88991 - protein, 15 aa, Artificial Sequence
  Description of Artificial Sequence: Synthetic peptide
  Seed: LMQGSTLPRRSGAAG
LMQLSTMPRRSVAAG

SEQ ID NO: 88992 - protein, 15 aa, Artificial Sequence
  Description of Artificial Sequence: Synthetic peptide
  Seed: LMQGSTLPRRSGAAG
LMQLSTMPRRSWAAG

SEQ ID NO: 88993 - protein, 15 aa, Artificial Sequence
  Description of Artificial Sequence: Synthetic peptide
  Seed: LMQGSTLPRRSGAAG
LMQLSTMPRRSYAAG

SEQ ID NO: 88994 - protein, 15 aa, Artificial Sequence
  Description of Artificial Sequence: Synthetic peptide
  Seed: LMQGSTLPRRSGAAG
LMQLSTRPRRSAAAG

SEQ ID NO: 88995 - protein, 15 aa, Artificial Sequence
  Description of Artificial Sequence: Synthetic peptide
  Seed: LMQGSTLPRRSGAAG
LMQLSTRPRRSIAAG

SEQ ID NO: 88996 - protein, 15 aa, Artificial Sequence
  Description of Artificial Sequence: Synthetic peptide
  Seed: LMQGSTLPRRSGAAG
LMQLSTRPRRSLAAG

SEQ ID NO: 88997 - protein, 15 aa, Artificial Sequence
  Description of Artificial Sequence: Synthetic peptide
  Seed: LMQGSTLPRRSGAAG
LMQLSTRPRRSMAAG

SEQ ID NO: 88998 - protein, 15 aa, Artificial Sequence
  Description of Artificial Sequence: Synthetic peptide
  Seed: LMQGSTLPRRSGAAG
LMQLSTRPRRSRAAG

SEQ ID NO: 88999 - protein, 15 aa, Artificial Sequence
  Description of Artificial Sequence: Synthetic peptide
  Seed: LMQGSTLPRRSGAAG
LMQLSTRPRRSSAAG

SEQ ID NO: 89000 - protein, 15 aa, Artificial Sequence
  Description of Artificial Sequence: Synthetic peptide
  Seed: LMQGSTLPRRSGAAG
LMQLSTRPRRSVAAG

SEQ ID NO: 89001 - protein, 15 aa, Artificial Sequence
  Description of Artificial Sequence: Synthetic peptide
  Seed: LMQGSTLPRRSGAAG
LMQLSTVPKRSAAAG

SEQ ID NO: 89002 - protein, 15 aa, Artificial Sequence
  Description of Artificial Sequence: Synthetic peptide
  Seed: LMQGSTLPRRSGAAG
LMQLSTVPKRSSAAG

SEQ ID NO: 89003 - protein, 15 aa, Artificial Sequence
  Description of Artificial Sequence: Synthetic peptide
  Seed: LMQGSTLPRRSGAAG
LMQLSTVPRRSAAAG

SEQ ID NO: 89004 - protein, 15 aa, Artificial Sequence
  Description of Artificial Sequence: Synthetic peptide
  Seed: LMQGSTLPRRSGAAG
LMQLSTVPRRSGAAG

SEQ ID NO: 89005 - protein, 15 aa, Artificial Sequence
  Description of Artificial Sequence: Synthetic peptide
  Seed: LMQGSTLPRRSGAAG
LMQLSTVPRRSHAAG

SEQ ID NO: 89006 - protein, 15 aa, Artificial Sequence
  Description of Artificial Sequence: Synthetic peptide
  Seed: LMQGSTLPRRSGAAG
LMQLSTVPRRSKAAG

SEQ ID NO: 89007 - protein, 15 aa, Artificial Sequence
  Description of Artificial Sequence: Synthetic peptide
  Seed: LMQGSTLPRRSGAAG
LMQLSTVPRRSQAAG

SEQ ID NO: 89008 - protein, 15 aa, Artificial Sequence
  Description of Artificial Sequence: Synthetic peptide
  Seed: LMQGSTLPRRSGAAG
LMQLSTVPRRSRAAG

SEQ ID NO: 89009 - protein, 15 aa, Artificial Sequence
  Description of Artificial Sequence: Synthetic peptide
  Seed: LMQGSTLPRRSGAAG
LMQLSTVPRRSSAAG

SEQ ID NO: 89010 - protein, 15 aa, Artificial Sequence
  Description of Artificial Sequence: Synthetic peptide
  Seed: LMQGSTLPRRSGAAG
LMQLSTVPRRSTAAG

SEQ ID NO: 89011 - protein, 15 aa, Artificial Sequence
  Description of Artificial Sequence: Synthetic peptide
  Seed: LMQGSTLPRRSGAAG
LMQLSTVPRRSVAAG

SEQ ID NO: 89012 - protein, 15 aa, Artificial Sequence
  Description of Artificial Sequence: Synthetic peptide
  Seed: LMQGSTLPRRSGAAG
LMQLSTWPRRSAAAG

SEQ ID NO: 89013 - protein, 15 aa, Artificial Sequence
  Description of Artificial Sequence: Synthetic peptide
  Seed: LMQGSTLPRRSGAAG
LMQMSTFPRRSAAAG

SEQ ID NO: 89014 - protein, 15 aa, Artificial Sequence
  Description of Artificial Sequence: Synthetic peptide
  Seed: LMQGSTLPRRSGAAG
LMQMSTFPRRSSAAG

SEQ ID NO: 89015 - protein, 15 aa, Artificial Sequence
  Description of Artificial Sequence: Synthetic peptide
  Seed: LMQGSTLPRRSGAAG
LMQMSTIPKRSAAAG

SEQ ID NO: 89016 - protein, 15 aa, Artificial Sequence
  Description of Artificial Sequence: Synthetic peptide
  Seed: LMQGSTLPRRSGAAG
LMQMSTIPKRSSAAG

SEQ ID NO: 89017 - protein, 15 aa, Artificial Sequence
  Description of Artificial Sequence: Synthetic peptide
  Seed: LMQGSTLPRRSGAAG
LMQMSTIPRRSAAAG

SEQ ID NO: 89018 - protein, 15 aa, Artificial Sequence
  Description of Artificial Sequence: Synthetic peptide
  Seed: LMQGSTLPRRSGAAG
LMQMSTIPRRSGAAG

SEQ ID NO: 89019 - protein, 15 aa, Artificial Sequence
  Description of Artificial Sequence: Synthetic peptide
  Seed: LMQGSTLPRRSGAAG
LMQMSTIPRRSQAAG

SEQ ID NO: 89020 - protein, 15 aa, Artificial Sequence
  Description of Artificial Sequence: Synthetic peptide
  Seed: LMQGSTLPRRSGAAG
LMQMSTIPRRSSAAG

SEQ ID NO: 89021 - protein, 15 aa, Artificial Sequence
  Description of Artificial Sequence: Synthetic peptide
  Seed: LMQGSTLPRRSGAAG
LMQMSTIPRRSTAAG

SEQ ID NO: 89022 - protein, 15 aa, Artificial Sequence
  Description of Artificial Sequence: Synthetic peptide
  Seed: LMQGSTLPRRSGAAG
LMQMSTLPKRSAAAG

SEQ ID NO: 89023 - protein, 15 aa, Artificial Sequence
  Description of Artificial Sequence: Synthetic peptide
  Seed: LMQGSTLPRRSGAAG
LMQMSTLPKRSSAAG

SEQ ID NO: 89024 - protein, 15 aa, Artificial Sequence
  Description of Artificial Sequence: Synthetic peptide
  Seed: LMQGSTLPRRSGAAG
LMQMSTLPRRSAAAG

SEQ ID NO: 89025 - protein, 15 aa, Artificial Sequence
  Description of Artificial Sequence: Synthetic peptide
  Seed: LMQGSTLPRRSGAAG
LMQMSTLPRRSGAAG

SEQ ID NO: 89026 - protein, 15 aa, Artificial Sequence
  Description of Artificial Sequence: Synthetic peptide
  Seed: LMQGSTLPRRSGAAG
LMQMSTLPRRSHAAG

SEQ ID NO: 89027 - protein, 15 aa, Artificial Sequence
  Description of Artificial Sequence: Synthetic peptide
  Seed: LMQGSTLPRRSGAAG
LMQMSTLPRRSQAAG

SEQ ID NO: 89028 - protein, 15 aa, Artificial Sequence
  Description of Artificial Sequence: Synthetic peptide
  Seed: LMQGSTLPRRSGAAG
LMQMSTLPRRSSAAG

SEQ ID NO: 89029 - protein, 15 aa, Artificial Sequence
  Description of Artificial Sequence: Synthetic peptide
  Seed: LMQGSTLPRRSGAAG
LMQMSTLPRRSTAAG

SEQ ID NO: 89030 - protein, 15 aa, Artificial Sequence
  Description of Artificial Sequence: Synthetic peptide
  Seed: LMQGSTLPRRSGAAG
LMQMSTLPRRSVAAG

SEQ ID NO: 89031 - protein, 15 aa, Artificial Sequence
  Description of Artificial Sequence: Synthetic peptide
  Seed: LMQGSTLPRRSGAAG
LMQMSTMPKRSAAAG

SEQ ID NO: 89032 - protein, 15 aa, Artificial Sequence
  Description of Artificial Sequence: Synthetic peptide
  Seed: LMQGSTLPRRSGAAG
LMQMSTMPKRSSAAG

SEQ ID NO: 89033 - protein, 15 aa, Artificial Sequence
  Description of Artificial Sequence: Synthetic peptide
  Seed: LMQGSTLPRRSGAAG
LMQMSTMPRRSAAAG

SEQ ID NO: 89034 - protein, 15 aa, Artificial Sequence
  Description of Artificial Sequence: Synthetic peptide
  Seed: LMQGSTLPRRSGAAG
LMQMSTMPRRSGAAG

SEQ ID NO: 89035 - protein, 15 aa, Artificial Sequence
  Description of Artificial Sequence: Synthetic peptide
  Seed: LMQGSTLPRRSGAAG
LMQMSTMPRRSHAAG

SEQ ID NO: 89036 - protein, 15 aa, Artificial Sequence
  Description of Artificial Sequence: Synthetic peptide
  Seed: LMQGSTLPRRSGAAG
LMQMSTMPRRSIAAG

SEQ ID NO: 89037 - protein, 15 aa, Artificial Sequence
  Description of Artificial Sequence: Synthetic peptide
  Seed: LMQGSTLPRRSGAAG
LMQMSTMPRRSLAAG

SEQ ID NO: 89038 - protein, 15 aa, Artificial Sequence
  Description of Artificial Sequence: Synthetic peptide
  Seed: LMQGSTLPRRSGAAG
LMQMSTMPRRSMAAG

SEQ ID NO: 89039 - protein, 15 aa, Artificial Sequence
  Description of Artificial Sequence: Synthetic peptide
  Seed: LMQGSTLPRRSGAAG
LMQMSTMPRRSQAAG

SEQ ID NO: 89040 - protein, 15 aa, Artificial Sequence
  Description of Artificial Sequence: Synthetic peptide
  Seed: LMQGSTLPRRSGAAG
LMQMSTMPRRSSAAG

SEQ ID NO: 89041 - protein, 15 aa, Artificial Sequence
  Description of Artificial Sequence: Synthetic peptide
  Seed: LMQGSTLPRRSGAAG
LMQMSTMPRRSTAAG

SEQ ID NO: 89042 - protein, 15 aa, Artificial Sequence
  Description of Artificial Sequence: Synthetic peptide
  Seed: LMQGSTLPRRSGAAG
LMQMSTMPRRSVAAG

SEQ ID NO: 89043 - protein, 15 aa, Artificial Sequence
  Description of Artificial Sequence: Synthetic peptide
  Seed: LMQGSTLPRRSGAAG
LMQMSTVPRRSAAAG

SEQ ID NO: 89044 - protein, 15 aa, Artificial Sequence
  Description of Artificial Sequence: Synthetic peptide
  Seed: LMQGSTLPRRSGAAG
LMQMSTVPRRSSAAG

SEQ ID NO: 89045 - protein, 15 aa, Artificial Sequence
  Description of Artificial Sequence: Synthetic peptide
  Seed: LMQGSTLPRRSGAAG
LMQVSTFPRRSAAAG

SEQ ID NO: 89046 - protein, 15 aa, Artificial Sequence
  Description of Artificial Sequence: Synthetic peptide
  Seed: LMQGSTLPRRSGAAG
LMQVSTFPRRSSAAG

SEQ ID NO: 89047 - protein, 15 aa, Artificial Sequence
  Description of Artificial Sequence: Synthetic peptide
  Seed: LMQGSTLPRRSGAAG
LMQVSTIPKRSAAAG

SEQ ID NO: 89048 - protein, 15 aa, Artificial Sequence
  Description of Artificial Sequence: Synthetic peptide
  Seed: LMQGSTLPRRSGAAG
LMQVSTIPKRSSAAG

SEQ ID NO: 89049 - protein, 15 aa, Artificial Sequence
  Description of Artificial Sequence: Synthetic peptide
  Seed: LMQGSTLPRRSGAAG
LMQVSTIPRRSAAAG

SEQ ID NO: 89050 - protein, 15 aa, Artificial Sequence
  Description of Artificial Sequence: Synthetic peptide
  Seed: LMQGSTLPRRSGAAG
LMQVSTIPRRSGAAG

SEQ ID NO: 89051 - protein, 15 aa, Artificial Sequence
  Description of Artificial Sequence: Synthetic peptide
  Seed: LMQGSTLPRRSGAAG
LMQVSTIPRRSQAAG

SEQ ID NO: 89052 - protein, 15 aa, Artificial Sequence
  Description of Artificial Sequence: Synthetic peptide
  Seed: LMQGSTLPRRSGAAG
LMQVSTIPRRSSAAG

SEQ ID NO: 89053 - protein, 15 aa, Artificial Sequence
  Description of Artificial Sequence: Synthetic peptide
  Seed: LMQGSTLPRRSGAAG
LMQVSTIPRRSTAAG

SEQ ID NO: 89054 - protein, 15 aa, Artificial Sequence
  Description of Artificial Sequence: Synthetic peptide
  Seed: LMQGSTLPRRSGAAG
LMQVSTLPKRSAAAG

SEQ ID NO: 89055 - protein, 15 aa, Artificial Sequence
  Description of Artificial Sequence: Synthetic peptide
  Seed: LMQGSTLPRRSGAAG
LMQVSTLPKRSSAAG

SEQ ID NO: 89056 - protein, 15 aa, Artificial Sequence
  Description of Artificial Sequence: Synthetic peptide
  Seed: LMQGSTLPRRSGAAG
LMQVSTLPRRSAAAG

SEQ ID NO: 89057 - protein, 15 aa, Artificial Sequence
  Description of Artificial Sequence: Synthetic peptide
  Seed: LMQGSTLPRRSGAAG
LMQVSTLPRRSGAAG

SEQ ID NO: 89058 - protein, 15 aa, Artificial Sequence
  Description of Artificial Sequence: Synthetic peptide
  Seed: LMQGSTLPRRSGAAG
LMQVSTLPRRSHAAG

SEQ ID NO: 89059 - protein, 15 aa, Artificial Sequence
  Description of Artificial Sequence: Synthetic peptide
  Seed: LMQGSTLPRRSGAAG
LMQVSTLPRRSIAAG

SEQ ID NO: 89060 - protein, 15 aa, Artificial Sequence
  Description of Artificial Sequence: Synthetic peptide
  Seed: LMQGSTLPRRSGAAG
LMQVSTLPRRSLAAG

SEQ ID NO: 89061 - protein, 15 aa, Artificial Sequence
  Description of Artificial Sequence: Synthetic peptide
  Seed: LMQGSTLPRRSGAAG
LMQVSTLPRRSMAAG

SEQ ID NO: 89062 - protein, 15 aa, Artificial Sequence
  Description of Artificial Sequence: Synthetic peptide
  Seed: LMQGSTLPRRSGAAG
LMQVSTLPRRSQAAG

SEQ ID NO: 89063 - protein, 15 aa, Artificial Sequence
  Description of Artificial Sequence: Synthetic peptide
  Seed: LMQGSTLPRRSGAAG
LMQVSTLPRRSSAAG

SEQ ID NO: 89064 - protein, 15 aa, Artificial Sequence
  Description of Artificial Sequence: Synthetic peptide
  Seed: LMQGSTLPRRSGAAG
LMQVSTLPRRSTAAG

SEQ ID NO: 89065 - protein, 15 aa, Artificial Sequence
  Description of Artificial Sequence: Synthetic peptide
  Seed: LMQGSTLPRRSGAAG
LMQVSTLPRRSVAAG

SEQ ID NO: 89066 - protein, 15 aa, Artificial Sequence
  Description of Artificial Sequence: Synthetic peptide
  Seed: LMQGSTLPRRSGAAG
LMQVSTMPKRSAAAG

SEQ ID NO: 89067 - protein, 15 aa, Artificial Sequence
  Description of Artificial Sequence: Synthetic peptide
  Seed: LMQGSTLPRRSGAAG
LMQVSTMPKRSSAAG

SEQ ID NO: 89068 - protein, 15 aa, Artificial Sequence
  Description of Artificial Sequence: Synthetic peptide
  Seed: LMQGSTLPRRSGAAG
LMQVSTMPRRSAAAG

SEQ ID NO: 89069 - protein, 15 aa, Artificial Sequence
  Description of Artificial Sequence: Synthetic peptide
  Seed: LMQGSTLPRRSGAAG
LMQVSTMPRRSGAAG

SEQ ID NO: 89070 - protein, 15 aa, Artificial Sequence
  Description of Artificial Sequence: Synthetic peptide
  Seed: LMQGSTLPRRSGAAG
LMQVSTMPRRSHAAG

SEQ ID NO: 89071 - protein, 15 aa, Artificial Sequence
  Description of Artificial Sequence: Synthetic peptide
  Seed: LMQGSTLPRRSGAAG
LMQVSTMPRRSIAAG

SEQ ID NO: 89072 - protein, 15 aa, Artificial Sequence
  Description of Artificial Sequence: Synthetic peptide
  Seed: LMQGSTLPRRSGAAG
LMQVSTMPRRSLAAG

SEQ ID NO: 89073 - protein, 15 aa, Artificial Sequence
  Description of Artificial Sequence: Synthetic peptide
  Seed: LMQGSTLPRRSGAAG
LMQVSTMPRRSMAAG

SEQ ID NO: 89074 - protein, 15 aa, Artificial Sequence
  Description of Artificial Sequence: Synthetic peptide
  Seed: LMQGSTLPRRSGAAG
LMQVSTMPRRSQAAG

SEQ ID NO: 89075 - protein, 15 aa, Artificial Sequence
  Description of Artificial Sequence: Synthetic peptide
  Seed: LMQGSTLPRRSGAAG
LMQVSTMPRRSSAAG

SEQ ID NO: 89076 - protein, 15 aa, Artificial Sequence
  Description of Artificial Sequence: Synthetic peptide
  Seed: LMQGSTLPRRSGAAG
LMQVSTMPRRSTAAG

SEQ ID NO: 89077 - protein, 15 aa, Artificial Sequence
  Description of Artificial Sequence: Synthetic peptide
  Seed: LMQGSTLPRRSGAAG
LMQVSTMPRRSVAAG

SEQ ID NO: 89078 - protein, 15 aa, Artificial Sequence
  Description of Artificial Sequence: Synthetic peptide
  Seed: LMQGSTLPRRSGAAG
LMQVSTVPRRSAAAG

SEQ ID NO: 89079 - protein, 15 aa, Artificial Sequence
  Description of Artificial Sequence: Synthetic peptide
  Seed: LMQGSTLPRRSGAAG
LMQVSTVPRRSSAAG

SEQ ID NO: 89080 - protein, 15 aa, Artificial Sequence
  Description of Artificial Sequence: Synthetic peptide
  Seed: LMQGSTLPRRSGAAG
LMQYSTIPRRSAAAG

SEQ ID NO: 89081 - protein, 15 aa, Artificial Sequence
  Description of Artificial Sequence: Synthetic peptide
  Seed: LMQGSTLPRRSGAAG
LMQYSTLPRRSAAAG

SEQ ID NO: 89082 - protein, 15 aa, Artificial Sequence
  Description of Artificial Sequence: Synthetic peptide
  Seed: LMQGSTLPRRSGAAG
LMQYSTMPRRSAAAG

SEQ ID NO: 89083 - protein, 15 aa, Artificial Sequence
  Description of Artificial Sequence: Synthetic peptide
  Seed: LMQGSTLPRRSGAAG
LMAGSALARRAGAAG

SEQ ID NO: 89084 - protein, 15 aa, Artificial Sequence
  Description of Artificial Sequence: Synthetic peptide
  Seed: LMQGSTLPRRSGAAG
LMAGSALARRSGAAG

SEQ ID NO: 89085 - protein, 15 aa, Artificial Sequence
  Description of Artificial Sequence: Synthetic peptide
  Seed: LMQGSTLPRRSGAAG
LMAGSALARRTGAAG

SEQ ID NO: 89086 - protein, 15 aa, Artificial Sequence
  Description of Artificial Sequence: Synthetic peptide
  Seed: LMQGSTLPRRSGAAG
LMAGSALARRVGAAG

SEQ ID NO: 89087 - protein, 15 aa, Artificial Sequence
  Description of Artificial Sequence: Synthetic peptide
  Seed: LMQGSTLPRRSGAAG
LMAGSGLARRAGAAG

SEQ ID NO: 89088 - protein, 15 aa, Artificial Sequence
  Description of Artificial Sequence: Synthetic peptide
  Seed: LMQGSTLPRRSGAAG
LMAGSGLARRIGAAG

SEQ ID NO: 89089 - protein, 15 aa, Artificial Sequence
  Description of Artificial Sequence: Synthetic peptide
  Seed: LMQGSTLPRRSGAAG
LMAGSGLARRVGAAG

SEQ ID NO: 89090 - protein, 15 aa, Artificial Sequence
  Description of Artificial Sequence: Synthetic peptide
  Seed: LMQGSTLPRRSGAAG
LMFGSALARRAGAAG

SEQ ID NO: 89091 - protein, 15 aa, Artificial Sequence
  Description of Artificial Sequence: Synthetic peptide
  Seed: LMQGSTLPRRSGAAG
LMFGSALARRIGAAG

SEQ ID NO: 89092 - protein, 15 aa, Artificial Sequence
  Description of Artificial Sequence: Synthetic peptide
  Seed: LMQGSTLPRRSGAAG
LMFGSALARRSGAAG

SEQ ID NO: 89093 - protein, 15 aa, Artificial Sequence
  Description of Artificial Sequence: Synthetic peptide
  Seed: LMQGSTLPRRSGAAG
LMFGSALARRTGAAG

SEQ ID NO: 89094 - protein, 15 aa, Artificial Sequence
  Description of Artificial Sequence: Synthetic peptide
  Seed: LMQGSTLPRRSGAAG
LMFGSALARRVGAAG

SEQ ID NO: 89095 - protein, 15 aa, Artificial Sequence
  Description of Artificial Sequence: Synthetic peptide
  Seed: LMQGSTLPRRSGAAG
LMFGSALPRRAGAAG

SEQ ID NO: 89096 - protein, 15 aa, Artificial Sequence
  Description of Artificial Sequence: Synthetic peptide
  Seed: LMQGSTLPRRSGAAG
LMFGSALPRRVGAAG

SEQ ID NO: 89097 - protein, 15 aa, Artificial Sequence
  Description of Artificial Sequence: Synthetic peptide
  Seed: LMQGSTLPRRSGAAG
LMFGSALVRRAGAAG

SEQ ID NO: 89098 - protein, 15 aa, Artificial Sequence
  Description of Artificial Sequence: Synthetic peptide
  Seed: LMQGSTLPRRSGAAG
LMFGSALVRRIGAAG

SEQ ID NO: 89099 - protein, 15 aa, Artificial Sequence
  Description of Artificial Sequence: Synthetic peptide
  Seed: LMQGSTLPRRSGAAG
LMFGSALVRRSGAAG

SEQ ID NO: 89100 - protein, 15 aa, Artificial Sequence
  Description of Artificial Sequence: Synthetic peptide
  Seed: LMQGSTLPRRSGAAG
LMFGSALVRRTGAAG

SEQ ID NO: 89101 - protein, 15 aa, Artificial Sequence
  Description of Artificial Sequence: Synthetic peptide
  Seed: LMQGSTLPRRSGAAG
LMFGSALVRRVGAAG

SEQ ID NO: 89102 - protein, 15 aa, Artificial Sequence
  Description of Artificial Sequence: Synthetic peptide
  Seed: LMQGSTLPRRSGAAG
LMFGSGLARRAGAAG

SEQ ID NO: 89103 - protein, 15 aa, Artificial Sequence
  Description of Artificial Sequence: Synthetic peptide
  Seed: LMQGSTLPRRSGAAG
LMFGSGLARRIGAAG

SEQ ID NO: 89104 - protein, 15 aa, Artificial Sequence
  Description of Artificial Sequence: Synthetic peptide
  Seed: LMQGSTLPRRSGAAG
LMFGSGLARRSGAAG

SEQ ID NO: 89105 - protein, 15 aa, Artificial Sequence
  Description of Artificial Sequence: Synthetic peptide
  Seed: LMQGSTLPRRSGAAG
LMFGSGLARRTGAAG

SEQ ID NO: 89106 - protein, 15 aa, Artificial Sequence
  Description of Artificial Sequence: Synthetic peptide
  Seed: LMQGSTLPRRSGAAG
LMFGSGLARRVGAAG

SEQ ID NO: 89107 - protein, 15 aa, Artificial Sequence
  Description of Artificial Sequence: Synthetic peptide
  Seed: LMQGSTLPRRSGAAG
LMFGSGLIRRAGAAG

SEQ ID NO: 89108 - protein, 15 aa, Artificial Sequence
  Description of Artificial Sequence: Synthetic peptide
  Seed: LMQGSTLPRRSGAAG
LMFGSGLPRRVGAAG

SEQ ID NO: 89109 - protein, 15 aa, Artificial Sequence
  Description of Artificial Sequence: Synthetic peptide
  Seed: LMQGSTLPRRSGAAG
LMFGSGLVRRAGAAG

SEQ ID NO: 89110 - protein, 15 aa, Artificial Sequence
  Description of Artificial Sequence: Synthetic peptide
  Seed: LMQGSTLPRRSGAAG
LMFGSGLVRRIGAAG

SEQ ID NO: 89111 - protein, 15 aa, Artificial Sequence
  Description of Artificial Sequence: Synthetic peptide
  Seed: LMQGSTLPRRSGAAG
LMFGSGLVRRSGAAG

SEQ ID NO: 89112 - protein, 15 aa, Artificial Sequence
  Description of Artificial Sequence: Synthetic peptide
  Seed: LMQGSTLPRRSGAAG
LMFGSGLVRRTGAAG

SEQ ID NO: 89113 - protein, 15 aa, Artificial Sequence
  Description of Artificial Sequence: Synthetic peptide
  Seed: LMQGSTLPRRSGAAG
LMFGSGLVRRVGAAG

SEQ ID NO: 89114 - protein, 15 aa, Artificial Sequence
  Description of Artificial Sequence: Synthetic peptide
  Seed: LMQGSTLPRRSGAAG
LMIGSALARRAGAAG

SEQ ID NO: 89115 - protein, 15 aa, Artificial Sequence
  Description of Artificial Sequence: Synthetic peptide
  Seed: LMQGSTLPRRSGAAG
LMIGSALARRGGAAG

SEQ ID NO: 89116 - protein, 15 aa, Artificial Sequence
  Description of Artificial Sequence: Synthetic peptide
  Seed: LMQGSTLPRRSGAAG
LMIGSALARRIGAAG

SEQ ID NO: 89117 - protein, 15 aa, Artificial Sequence
  Description of Artificial Sequence: Synthetic peptide
  Seed: LMQGSTLPRRSGAAG
LMIGSALARRLGAAG

SEQ ID NO: 89118 - protein, 15 aa, Artificial Sequence
  Description of Artificial Sequence: Synthetic peptide
  Seed: LMQGSTLPRRSGAAG
LMIGSALARRMGAAG

SEQ ID NO: 89119 - protein, 15 aa, Artificial Sequence
  Description of Artificial Sequence: Synthetic peptide
  Seed: LMQGSTLPRRSGAAG
LMIGSALARRNGAAG

SEQ ID NO: 89120 - protein, 15 aa, Artificial Sequence
  Description of Artificial Sequence: Synthetic peptide
  Seed: LMQGSTLPRRSGAAG
LMIGSALARRSGAAG

SEQ ID NO: 89121 - protein, 15 aa, Artificial Sequence
  Description of Artificial Sequence: Synthetic peptide
  Seed: LMQGSTLPRRSGAAG
LMIGSALARRTGAAG

SEQ ID NO: 89122 - protein, 15 aa, Artificial Sequence
  Description of Artificial Sequence: Synthetic peptide
  Seed: LMQGSTLPRRSGAAG
LMIGSALARRVGAAG

SEQ ID NO: 89123 - protein, 15 aa, Artificial Sequence
  Description of Artificial Sequence: Synthetic peptide
  Seed: LMQGSTLPRRSGAAG
LMIGSALIRRAGAAG

SEQ ID NO: 89124 - protein, 15 aa, Artificial Sequence
  Description of Artificial Sequence: Synthetic peptide
  Seed: LMQGSTLPRRSGAAG
LMIGSALIRRSGAAG

SEQ ID NO: 89125 - protein, 15 aa, Artificial Sequence
  Description of Artificial Sequence: Synthetic peptide
  Seed: LMQGSTLPRRSGAAG
LMIGSALIRRVGAAG

SEQ ID NO: 89126 - protein, 15 aa, Artificial Sequence
  Description of Artificial Sequence: Synthetic peptide
  Seed: LMQGSTLPRRSGAAG
LMIGSALPRRAGAAG

SEQ ID NO: 89127 - protein, 15 aa, Artificial Sequence
  Description of Artificial Sequence: Synthetic peptide
  Seed: LMQGSTLPRRSGAAG
LMIGSALPRRIGAAG

SEQ ID NO: 89128 - protein, 15 aa, Artificial Sequence
  Description of Artificial Sequence: Synthetic peptide
  Seed: LMQGSTLPRRSGAAG
LMIGSALPRRSGAAG

SEQ ID NO: 89129 - protein, 15 aa, Artificial Sequence
  Description of Artificial Sequence: Synthetic peptide
  Seed: LMQGSTLPRRSGAAG
LMIGSALPRRTGAAG

SEQ ID NO: 89130 - protein, 15 aa, Artificial Sequence
  Description of Artificial Sequence: Synthetic peptide
  Seed: LMQGSTLPRRSGAAG
LMIGSALPRRVGAAG

SEQ ID NO: 89131 - protein, 15 aa, Artificial Sequence
  Description of Artificial Sequence: Synthetic peptide
  Seed: LMQGSTLPRRSGAAG
LMIGSALVRRAGAAG

SEQ ID NO: 89132 - protein, 15 aa, Artificial Sequence
  Description of Artificial Sequence: Synthetic peptide
  Seed: LMQGSTLPRRSGAAG
LMIGSALVRRIGAAG

SEQ ID NO: 89133 - protein, 15 aa, Artificial Sequence
  Description of Artificial Sequence: Synthetic peptide
  Seed: LMQGSTLPRRSGAAG
LMIGSALVRRSGAAG

SEQ ID NO: 89134 - protein, 15 aa, Artificial Sequence
  Description of Artificial Sequence: Synthetic peptide
  Seed: LMQGSTLPRRSGAAG
LMIGSALVRRTGAAG

SEQ ID NO: 89135 - protein, 15 aa, Artificial Sequence
  Description of Artificial Sequence: Synthetic peptide
  Seed: LMQGSTLPRRSGAAG
LMIGSALVRRVGAAG

SEQ ID NO: 89136 - protein, 15 aa, Artificial Sequence
  Description of Artificial Sequence: Synthetic peptide
  Seed: LMQGSTLPRRSGAAG
LMIGSGLARRAGAAG

SEQ ID NO: 89137 - protein, 15 aa, Artificial Sequence
  Description of Artificial Sequence: Synthetic peptide
  Seed: LMQGSTLPRRSGAAG
LMIGSGLARRGGAAG

SEQ ID NO: 89138 - protein, 15 aa, Artificial Sequence
  Description of Artificial Sequence: Synthetic peptide
  Seed: LMQGSTLPRRSGAAG
LMIGSGLARRIGAAG

SEQ ID NO: 89139 - protein, 15 aa, Artificial Sequence
  Description of Artificial Sequence: Synthetic peptide
  Seed: LMQGSTLPRRSGAAG
LMIGSGLARRLGAAG

SEQ ID NO: 89140 - protein, 15 aa, Artificial Sequence
  Description of Artificial Sequence: Synthetic peptide
  Seed: LMQGSTLPRRSGAAG
LMIGSGLARRMGAAG

SEQ ID NO: 89141 - protein, 15 aa, Artificial Sequence
  Description of Artificial Sequence: Synthetic peptide
  Seed: LMQGSTLPRRSGAAG
LMIGSGLARRNGAAG

SEQ ID NO: 89142 - protein, 15 aa, Artificial Sequence
  Description of Artificial Sequence: Synthetic peptide
  Seed: LMQGSTLPRRSGAAG
LMIGSGLARRSGAAG

SEQ ID NO: 89143 - protein, 15 aa, Artificial Sequence
  Description of Artificial Sequence: Synthetic peptide
  Seed: LMQGSTLPRRSGAAG
LMIGSGLARRTGAAG

SEQ ID NO: 89144 - protein, 15 aa, Artificial Sequence
  Description of Artificial Sequence: Synthetic peptide
  Seed: LMQGSTLPRRSGAAG
LMIGSGLARRVGAAG

SEQ ID NO: 89145 - protein, 15 aa, Artificial Sequence
  Description of Artificial Sequence: Synthetic peptide
  Seed: LMQGSTLPRRSGAAG
LMIGSGLIRRAGAAG

SEQ ID NO: 89146 - protein, 15 aa, Artificial Sequence
  Description of Artificial Sequence: Synthetic peptide
  Seed: LMQGSTLPRRSGAAG
LMIGSGLIRRSGAAG

SEQ ID NO: 89147 - protein, 15 aa, Artificial Sequence
  Description of Artificial Sequence: Synthetic peptide
  Seed: LMQGSTLPRRSGAAG
LMIGSGLIRRVGAAG

SEQ ID NO: 89148 - protein, 15 aa, Artificial Sequence
  Description of Artificial Sequence: Synthetic peptide
  Seed: LMQGSTLPRRSGAAG
LMIGSGLPRRAGAAG

SEQ ID NO: 89149 - protein, 15 aa, Artificial Sequence
  Description of Artificial Sequence: Synthetic peptide
  Seed: LMQGSTLPRRSGAAG
LMIGSGLPRRIGAAG

SEQ ID NO: 89150 - protein, 15 aa, Artificial Sequence
  Description of Artificial Sequence: Synthetic peptide
  Seed: LMQGSTLPRRSGAAG
LMIGSGLPRRSGAAG

SEQ ID NO: 89151 - protein, 15 aa, Artificial Sequence
  Description of Artificial Sequence: Synthetic peptide
  Seed: LMQGSTLPRRSGAAG
LMIGSGLPRRVGAAG

SEQ ID NO: 89152 - protein, 15 aa, Artificial Sequence
  Description of Artificial Sequence: Synthetic peptide
  Seed: LMQGSTLPRRSGAAG
LMIGSGLSRRVGAAG

SEQ ID NO: 89153 - protein, 15 aa, Artificial Sequence
  Description of Artificial Sequence: Synthetic peptide
  Seed: LMQGSTLPRRSGAAG
LMIGSGLTRRVGAAG

SEQ ID NO: 89154 - protein, 15 aa, Artificial Sequence
  Description of Artificial Sequence: Synthetic peptide
  Seed: LMQGSTLPRRSGAAG
LMIGSGLVRRAGAAG

SEQ ID NO: 89155 - protein, 15 aa, Artificial Sequence
  Description of Artificial Sequence: Synthetic peptide
  Seed: LMQGSTLPRRSGAAG
LMIGSGLVRRIGAAG

SEQ ID NO: 89156 - protein, 15 aa, Artificial Sequence
  Description of Artificial Sequence: Synthetic peptide
  Seed: LMQGSTLPRRSGAAG
LMIGSGLVRRSGAAG

SEQ ID NO: 89157 - protein, 15 aa, Artificial Sequence
  Description of Artificial Sequence: Synthetic peptide
  Seed: LMQGSTLPRRSGAAG
LMIGSGLVRRTGAAG

SEQ ID NO: 89158 - protein, 15 aa, Artificial Sequence
  Description of Artificial Sequence: Synthetic peptide
  Seed: LMQGSTLPRRSGAAG
LMIGSGLVRRVGAAG

SEQ ID NO: 89159 - protein, 15 aa, Artificial Sequence
  Description of Artificial Sequence: Synthetic peptide
  Seed: LMQGSTLPRRSGAAG
LMIGSSLARRAGAAG

SEQ ID NO: 89160 - protein, 15 aa, Artificial Sequence
  Description of Artificial Sequence: Synthetic peptide
  Seed: LMQGSTLPRRSGAAG
LMIGSSLARRIGAAG

SEQ ID NO: 89161 - protein, 15 aa, Artificial Sequence
  Description of Artificial Sequence: Synthetic peptide
  Seed: LMQGSTLPRRSGAAG
LMIGSSLARRSGAAG

SEQ ID NO: 89162 - protein, 15 aa, Artificial Sequence
  Description of Artificial Sequence: Synthetic peptide
  Seed: LMQGSTLPRRSGAAG
LMIGSSLARRTGAAG

SEQ ID NO: 89163 - protein, 15 aa, Artificial Sequence
  Description of Artificial Sequence: Synthetic peptide
  Seed: LMQGSTLPRRSGAAG
LMIGSSLARRVGAAG

SEQ ID NO: 89164 - protein, 15 aa, Artificial Sequence
  Description of Artificial Sequence: Synthetic peptide
  Seed: LMQGSTLPRRSGAAG
LMIGSSLVRRAGAAG

SEQ ID NO: 89165 - protein, 15 aa, Artificial Sequence
  Description of Artificial Sequence: Synthetic peptide
  Seed: LMQGSTLPRRSGAAG
LMLGSALARRAGAAG

SEQ ID NO: 89166 - protein, 15 aa, Artificial Sequence
  Description of Artificial Sequence: Synthetic peptide
  Seed: LMQGSTLPRRSGAAG
LMLGSALARRSGAAG

SEQ ID NO: 89167 - protein, 15 aa, Artificial Sequence
  Description of Artificial Sequence: Synthetic peptide
  Seed: LMQGSTLPRRSGAAG
LMLGSALARRTGAAG

SEQ ID NO: 89168 - protein, 15 aa, Artificial Sequence
  Description of Artificial Sequence: Synthetic peptide
  Seed: LMQGSTLPRRSGAAG
LMLGSALARRVGAAG

SEQ ID NO: 89169 - protein, 15 aa, Artificial Sequence
  Description of Artificial Sequence: Synthetic peptide
  Seed: LMQGSTLPRRSGAAG
LMLGSGLARRAGAAG

SEQ ID NO: 89170 - protein, 15 aa, Artificial Sequence
  Description of Artificial Sequence: Synthetic peptide
  Seed: LMQGSTLPRRSGAAG
LMLGSGLARRIGAAG

SEQ ID NO: 89171 - protein, 15 aa, Artificial Sequence
  Description of Artificial Sequence: Synthetic peptide
  Seed: LMQGSTLPRRSGAAG
LMLGSGLARRVGAAG

SEQ ID NO: 89172 - protein, 15 aa, Artificial Sequence
  Description of Artificial Sequence: Synthetic peptide
  Seed: LMQGSTLPRRSGAAG
LMLGSGLVRRAGAAG

SEQ ID NO: 89173 - protein, 15 aa, Artificial Sequence
  Description of Artificial Sequence: Synthetic peptide
  Seed: LMQGSTLPRRSGAAG
LMMGSALARRAGAAG

SEQ ID NO: 89174 - protein, 15 aa, Artificial Sequence
  Description of Artificial Sequence: Synthetic peptide
  Seed: LMQGSTLPRRSGAAG
LMMGSALARRIGAAG

SEQ ID NO: 89175 - protein, 15 aa, Artificial Sequence
  Description of Artificial Sequence: Synthetic peptide
  Seed: LMQGSTLPRRSGAAG
LMMGSALARRSGAAG

SEQ ID NO: 89176 - protein, 15 aa, Artificial Sequence
  Description of Artificial Sequence: Synthetic peptide
  Seed: LMQGSTLPRRSGAAG
LMMGSALARRTGAAG

SEQ ID NO: 89177 - protein, 15 aa, Artificial Sequence
  Description of Artificial Sequence: Synthetic peptide
  Seed: LMQGSTLPRRSGAAG
LMMGSALARRVGAAG

SEQ ID NO: 89178 - protein, 15 aa, Artificial Sequence
  Description of Artificial Sequence: Synthetic peptide
  Seed: LMQGSTLPRRSGAAG
LMMGSALVRRAGAAG

SEQ ID NO: 89179 - protein, 15 aa, Artificial Sequence
  Description of Artificial Sequence: Synthetic peptide
  Seed: LMQGSTLPRRSGAAG
LMMGSGLARRAGAAG

SEQ ID NO: 89180 - protein, 15 aa, Artificial Sequence
  Description of Artificial Sequence: Synthetic peptide
  Seed: LMQGSTLPRRSGAAG
LMMGSGLARRIGAAG

SEQ ID NO: 89181 - protein, 15 aa, Artificial Sequence
  Description of Artificial Sequence: Synthetic peptide
  Seed: LMQGSTLPRRSGAAG
LMMGSGLARRSGAAG

SEQ ID NO: 89182 - protein, 15 aa, Artificial Sequence
  Description of Artificial Sequence: Synthetic peptide
  Seed: LMQGSTLPRRSGAAG
LMMGSGLARRTGAAG

SEQ ID NO: 89183 - protein, 15 aa, Artificial Sequence
  Description of Artificial Sequence: Synthetic peptide
  Seed: LMQGSTLPRRSGAAG
LMMGSGLARRVGAAG

SEQ ID NO: 89184 - protein, 15 aa, Artificial Sequence
  Description of Artificial Sequence: Synthetic peptide
  Seed: LMQGSTLPRRSGAAG
LMMGSGLVRRAGAAG

SEQ ID NO: 89185 - protein, 15 aa, Artificial Sequence
  Description of Artificial Sequence: Synthetic peptide
  Seed: LMQGSTLPRRSGAAG
LMMGSGLVRRVGAAG

SEQ ID NO: 89186 - protein, 15 aa, Artificial Sequence
  Description of Artificial Sequence: Synthetic peptide
  Seed: LMQGSTLPRRSGAAG
LMPGSALARRAGAAG

SEQ ID NO: 89187 - protein, 15 aa, Artificial Sequence
  Description of Artificial Sequence: Synthetic peptide
  Seed: LMQGSTLPRRSGAAG
LMPGSALARRIGAAG

SEQ ID NO: 89188 - protein, 15 aa, Artificial Sequence
  Description of Artificial Sequence: Synthetic peptide
  Seed: LMQGSTLPRRSGAAG
LMPGSALARRSGAAG

SEQ ID NO: 89189 - protein, 15 aa, Artificial Sequence
  Description of Artificial Sequence: Synthetic peptide
  Seed: LMQGSTLPRRSGAAG
LMPGSALARRTGAAG

SEQ ID NO: 89190 - protein, 15 aa, Artificial Sequence
  Description of Artificial Sequence: Synthetic peptide
  Seed: LMQGSTLPRRSGAAG
LMPGSALARRVGAAG

SEQ ID NO: 89191 - protein, 15 aa, Artificial Sequence
  Description of Artificial Sequence: Synthetic peptide
  Seed: LMQGSTLPRRSGAAG
LMPGSALVRRAGAAG

SEQ ID NO: 89192 - protein, 15 aa, Artificial Sequence
  Description of Artificial Sequence: Synthetic peptide
  Seed: LMQGSTLPRRSGAAG
LMPGSALVRRSGAAG

SEQ ID NO: 89193 - protein, 15 aa, Artificial Sequence
  Description of Artificial Sequence: Synthetic peptide
  Seed: LMQGSTLPRRSGAAG
LMPGSALVRRTGAAG

SEQ ID NO: 89194 - protein, 15 aa, Artificial Sequence
  Description of Artificial Sequence: Synthetic peptide
  Seed: LMQGSTLPRRSGAAG
LMPGSALVRRVGAAG

SEQ ID NO: 89195 - protein, 15 aa, Artificial Sequence
  Description of Artificial Sequence: Synthetic peptide
  Seed: LMQGSTLPRRSGAAG
LMPGSGLARRAGAAG

SEQ ID NO: 89196 - protein, 15 aa, Artificial Sequence
  Description of Artificial Sequence: Synthetic peptide
  Seed: LMQGSTLPRRSGAAG
LMPGSGLARRIGAAG

SEQ ID NO: 89197 - protein, 15 aa, Artificial Sequence
  Description of Artificial Sequence: Synthetic peptide
  Seed: LMQGSTLPRRSGAAG
LMPGSGLARRSGAAG

SEQ ID NO: 89198 - protein, 15 aa, Artificial Sequence
  Description of Artificial Sequence: Synthetic peptide
  Seed: LMQGSTLPRRSGAAG
LMPGSGLARRTGAAG

SEQ ID NO: 89199 - protein, 15 aa, Artificial Sequence
  Description of Artificial Sequence: Synthetic peptide
  Seed: LMQGSTLPRRSGAAG
LMPGSGLARRVGAAG

SEQ ID NO: 89200 - protein, 15 aa, Artificial Sequence
  Description of Artificial Sequence: Synthetic peptide
  Seed: LMQGSTLPRRSGAAG
LMPGSGLIRRAGAAG

SEQ ID NO: 89201 - protein, 15 aa, Artificial Sequence
  Description of Artificial Sequence: Synthetic peptide
  Seed: LMQGSTLPRRSGAAG
LMPGSGLIRRVGAAG

SEQ ID NO: 89202 - protein, 15 aa, Artificial Sequence
  Description of Artificial Sequence: Synthetic peptide
  Seed: LMQGSTLPRRSGAAG
LMPGSGLVRRAGAAG

SEQ ID NO: 89203 - protein, 15 aa, Artificial Sequence
  Description of Artificial Sequence: Synthetic peptide
  Seed: LMQGSTLPRRSGAAG
LMPGSGLVRRIGAAG

SEQ ID NO: 89204 - protein, 15 aa, Artificial Sequence
  Description of Artificial Sequence: Synthetic peptide
  Seed: LMQGSTLPRRSGAAG
LMPGSGLVRRSGAAG

SEQ ID NO: 89205 - protein, 15 aa, Artificial Sequence
  Description of Artificial Sequence: Synthetic peptide
  Seed: LMQGSTLPRRSGAAG
LMPGSGLVRRTGAAG

SEQ ID NO: 89206 - protein, 15 aa, Artificial Sequence
  Description of Artificial Sequence: Synthetic peptide
  Seed: LMQGSTLPRRSGAAG
LMPGSGLVRRVGAAG

SEQ ID NO: 89207 - protein, 15 aa, Artificial Sequence
  Description of Artificial Sequence: Synthetic peptide
  Seed: LMQGSTLPRRSGAAG
LMPGSSLARRAGAAG

SEQ ID NO: 89208 - protein, 15 aa, Artificial Sequence
  Description of Artificial Sequence: Synthetic peptide
  Seed: LMQGSTLPRRSGAAG
LMTGSALARRAGAAG

SEQ ID NO: 89209 - protein, 15 aa, Artificial Sequence
  Description of Artificial Sequence: Synthetic peptide
  Seed: LMQGSTLPRRSGAAG
LMTGSALARRVGAAG

SEQ ID NO: 89210 - protein, 15 aa, Artificial Sequence
  Description of Artificial Sequence: Synthetic peptide
  Seed: LMQGSTLPRRSGAAG
LMTGSGLARRVGAAG

SEQ ID NO: 89211 - protein, 15 aa, Artificial Sequence
  Description of Artificial Sequence: Synthetic peptide
  Seed: LMQGSTLPRRSGAAG
LMVGSALARRAGAAG

SEQ ID NO: 89212 - protein, 15 aa, Artificial Sequence
  Description of Artificial Sequence: Synthetic peptide
  Seed: LMQGSTLPRRSGAAG
LMVGSALARRIGAAG

SEQ ID NO: 89213 - protein, 15 aa, Artificial Sequence
  Description of Artificial Sequence: Synthetic peptide
  Seed: LMQGSTLPRRSGAAG
LMVGSALARRSGAAG

SEQ ID NO: 89214 - protein, 15 aa, Artificial Sequence
  Description of Artificial Sequence: Synthetic peptide
  Seed: LMQGSTLPRRSGAAG
LMVGSALARRTGAAG

SEQ ID NO: 89215 - protein, 15 aa, Artificial Sequence
  Description of Artificial Sequence: Synthetic peptide
  Seed: LMQGSTLPRRSGAAG
LMVGSALARRVGAAG

SEQ ID NO: 89216 - protein, 15 aa, Artificial Sequence
  Description of Artificial Sequence: Synthetic peptide
  Seed: LMQGSTLPRRSGAAG
LMVGSALPRRAGAAG

SEQ ID NO: 89217 - protein, 15 aa, Artificial Sequence
  Description of Artificial Sequence: Synthetic peptide
  Seed: LMQGSTLPRRSGAAG
LMVGSALPRRVGAAG

SEQ ID NO: 89218 - protein, 15 aa, Artificial Sequence
  Description of Artificial Sequence: Synthetic peptide
  Seed: LMQGSTLPRRSGAAG
LMVGSALVRRAGAAG

SEQ ID NO: 89219 - protein, 15 aa, Artificial Sequence
  Description of Artificial Sequence: Synthetic peptide
  Seed: LMQGSTLPRRSGAAG
LMVGSALVRRIGAAG

SEQ ID NO: 89220 - protein, 15 aa, Artificial Sequence
  Description of Artificial Sequence: Synthetic peptide
  Seed: LMQGSTLPRRSGAAG
LMVGSALVRRSGAAG

SEQ ID NO: 89221 - protein, 15 aa, Artificial Sequence
  Description of Artificial Sequence: Synthetic peptide
  Seed: LMQGSTLPRRSGAAG
LMVGSALVRRTGAAG

SEQ ID NO: 89222 - protein, 15 aa, Artificial Sequence
  Description of Artificial Sequence: Synthetic peptide
  Seed: LMQGSTLPRRSGAAG
LMVGSALVRRVGAAG

SEQ ID NO: 89223 - protein, 15 aa, Artificial Sequence
  Description of Artificial Sequence: Synthetic peptide
  Seed: LMQGSTLPRRSGAAG
LMVGSGLARRAGAAG

SEQ ID NO: 89224 - protein, 15 aa, Artificial Sequence
  Description of Artificial Sequence: Synthetic peptide
  Seed: LMQGSTLPRRSGAAG
LMVGSGLARRIGAAG

SEQ ID NO: 89225 - protein, 15 aa, Artificial Sequence
  Description of Artificial Sequence: Synthetic peptide
  Seed: LMQGSTLPRRSGAAG
LMVGSGLARRLGAAG

SEQ ID NO: 89226 - protein, 15 aa, Artificial Sequence
  Description of Artificial Sequence: Synthetic peptide
  Seed: LMQGSTLPRRSGAAG
LMVGSGLARRMGAAG

SEQ ID NO: 89227 - protein, 15 aa, Artificial Sequence
  Description of Artificial Sequence: Synthetic peptide
  Seed: LMQGSTLPRRSGAAG
LMVGSGLARRSGAAG

SEQ ID NO: 89228 - protein, 15 aa, Artificial Sequence
  Description of Artificial Sequence: Synthetic peptide
  Seed: LMQGSTLPRRSGAAG
LMVGSGLARRTGAAG

SEQ ID NO: 89229 - protein, 15 aa, Artificial Sequence
  Description of Artificial Sequence: Synthetic peptide
  Seed: LMQGSTLPRRSGAAG
LMVGSGLARRVGAAG

SEQ ID NO: 89230 - protein, 15 aa, Artificial Sequence
  Description of Artificial Sequence: Synthetic peptide
  Seed: LMQGSTLPRRSGAAG
LMVGSGLIRRAGAAG

SEQ ID NO: 89231 - protein, 15 aa, Artificial Sequence
  Description of Artificial Sequence: Synthetic peptide
  Seed: LMQGSTLPRRSGAAG
LMVGSGLIRRVGAAG

SEQ ID NO: 89232 - protein, 15 aa, Artificial Sequence
  Description of Artificial Sequence: Synthetic peptide
  Seed: LMQGSTLPRRSGAAG
LMVGSGLPRRAGAAG

SEQ ID NO: 89233 - protein, 15 aa, Artificial Sequence
  Description of Artificial Sequence: Synthetic peptide
  Seed: LMQGSTLPRRSGAAG
LMVGSGLPRRIGAAG

SEQ ID NO: 89234 - protein, 15 aa, Artificial Sequence
  Description of Artificial Sequence: Synthetic peptide
  Seed: LMQGSTLPRRSGAAG
LMVGSGLPRRVGAAG

SEQ ID NO: 89235 - protein, 15 aa, Artificial Sequence
  Description of Artificial Sequence: Synthetic peptide
  Seed: LMQGSTLPRRSGAAG
LMVGSGLVRRAGAAG

SEQ ID NO: 89236 - protein, 15 aa, Artificial Sequence
  Description of Artificial Sequence: Synthetic peptide
  Seed: LMQGSTLPRRSGAAG
LMVGSGLVRRIGAAG

SEQ ID NO: 89237 - protein, 15 aa, Artificial Sequence
  Description of Artificial Sequence: Synthetic peptide
  Seed: LMQGSTLPRRSGAAG
LMVGSGLVRRSGAAG

SEQ ID NO: 89238 - protein, 15 aa, Artificial Sequence
  Description of Artificial Sequence: Synthetic peptide
  Seed: LMQGSTLPRRSGAAG
LMVGSGLVRRTGAAG

SEQ ID NO: 89239 - protein, 15 aa, Artificial Sequence
  Description of Artificial Sequence: Synthetic peptide
  Seed: LMQGSTLPRRSGAAG
LMVGSGLVRRVGAAG

SEQ ID NO: 89240 - protein, 15 aa, Artificial Sequence
  Description of Artificial Sequence: Synthetic peptide
  Seed: LMQGSTLPRRSGAAG
LMVGSSLARRAGAAG

SEQ ID NO: 89241 - protein, 15 aa, Artificial Sequence
  Description of Artificial Sequence: Synthetic peptide
  Seed: LMQGSTLPRRSGAAG
LMVGSSLARRSGAAG

SEQ ID NO: 89242 - protein, 15 aa, Artificial Sequence
  Description of Artificial Sequence: Synthetic peptide
  Seed: LMQGSTLPRRSGAAG
LMVGSSLARRVGAAG

SEQ ID NO: 89243 - protein, 15 aa, Artificial Sequence
  Description of Artificial Sequence: Synthetic peptide
  Seed: LMQGSTLPRRSGAAG
LMWGSALARRAGAAG

SEQ ID NO: 89244 - protein, 15 aa, Artificial Sequence
  Description of Artificial Sequence: Synthetic peptide
  Seed: LMQGSTLPRRSGAAG
LMWGSALARRVGAAG

SEQ ID NO: 89245 - protein, 15 aa, Artificial Sequence
  Description of Artificial Sequence: Synthetic peptide
  Seed: LMQGSTLPRRSGAAG
LMWGSGLARRAGAAG

SEQ ID NO: 89246 - protein, 15 aa, Artificial Sequence
  Description of Artificial Sequence: Synthetic peptide
  Seed: LMQGSTLPRRSGAAG
LMWGSGLARRIGAAG

SEQ ID NO: 89247 - protein, 15 aa, Artificial Sequence
  Description of Artificial Sequence: Synthetic peptide
  Seed: LMQGSTLPRRSGAAG
LMWGSGLARRVGAAG

SEQ ID NO: 89248 - protein, 15 aa, Artificial Sequence
  Description of Artificial Sequence: Synthetic peptide
  Seed: LMQGSTLPRRSGAAG
LMWGSGLVRRAGAAG

SEQ ID NO: 89249 - protein, 15 aa, Artificial Sequence
  Description of Artificial Sequence: Synthetic peptide
  Seed: LMQGSTLPRRSGAAG
LMWGSGLVRRVGAAG

SEQ ID NO: 89250 - protein, 15 aa, Artificial Sequence
  Description of Artificial Sequence: Synthetic peptide
  Seed: LMQGSTLPRRSGAAG
LMYGSALARRAGAAG

SEQ ID NO: 89251 - protein, 15 aa, Artificial Sequence
  Description of Artificial Sequence: Synthetic peptide
  Seed: LMQGSTLPRRSGAAG
LMYGSALARRVGAAG

SEQ ID NO: 89252 - protein, 15 aa, Artificial Sequence
  Description of Artificial Sequence: Synthetic peptide
  Seed: LMQGSTLPRRSGAAG
LMYGSGLARRAGAAG

SEQ ID NO: 89253 - protein, 15 aa, Artificial Sequence
  Description of Artificial Sequence: Synthetic peptide
  Seed: LMQGSTLPRRSGAAG
LMYGSGLARRIGAAG

SEQ ID NO: 89254 - protein, 15 aa, Artificial Sequence
  Description of Artificial Sequence: Synthetic peptide
  Seed: LMQGSTLPRRSGAAG
LMYGSGLARRVGAAG

SEQ ID NO: 89255 - protein, 15 aa, Artificial Sequence
  Description of Artificial Sequence: Synthetic peptide
  Seed: LMQGSTLPRRSGAAG
LMYGSGLVRRAGAAG

SEQ ID NO: 89256 - protein, 15 aa, Artificial Sequence
  Description of Artificial Sequence: Synthetic peptide
  Seed: LMQGSTLPRRSGAAG
LMYGSGLVRRVGAAG

SEQ ID NO: 89257 - protein, 13 aa, Artificial Sequence
  Description of Artificial Sequence: Synthetic peptide
  Seed: MCSLMQGSTLPRR
MFSLIQASTAPRR

SEQ ID NO: 89258 - protein, 13 aa, Artificial Sequence
  Description of Artificial Sequence: Synthetic peptide
  Seed: MCSLMQGSTLPRR
MFSLIQASTIPRR

SEQ ID NO: 89259 - protein, 13 aa, Artificial Sequence
  Description of Artificial Sequence: Synthetic peptide
  Seed: MCSLMQGSTLPRR
MFSLIQASTLPRR

SEQ ID NO: 89260 - protein, 13 aa, Artificial Sequence
  Description of Artificial Sequence: Synthetic peptide
  Seed: MCSLMQGSTLPRR
MFSLIQASTVPRR

SEQ ID NO: 89261 - protein, 13 aa, Artificial Sequence
  Description of Artificial Sequence: Synthetic peptide
  Seed: MCSLMQGSTLPRR
MFSLIQGSTLPRR

SEQ ID NO: 89262 - protein, 13 aa, Artificial Sequence
  Description of Artificial Sequence: Synthetic peptide
  Seed: MCSLMQGSTLPRR
MFSLIQGSTVPRR

SEQ ID NO: 89263 - protein, 13 aa, Artificial Sequence
  Description of Artificial Sequence: Synthetic peptide
  Seed: MCSLMQGSTLPRR
MFSLIQSSTVPRR

SEQ ID NO: 89264 - protein, 13 aa, Artificial Sequence
  Description of Artificial Sequence: Synthetic peptide
  Seed: MCSLMQGSTLPRR
MFSLLQASTAPRR

SEQ ID NO: 89265 - protein, 13 aa, Artificial Sequence
  Description of Artificial Sequence: Synthetic peptide
  Seed: MCSLMQGSTLPRR
MFSLLQASTIPRR

SEQ ID NO: 89266 - protein, 13 aa, Artificial Sequence
  Description of Artificial Sequence: Synthetic peptide
  Seed: MCSLMQGSTLPRR
MFSLLQASTLPRR

SEQ ID NO: 89267 - protein, 13 aa, Artificial Sequence
  Description of Artificial Sequence: Synthetic peptide
  Seed: MCSLMQGSTLPRR
MFSLLQASTMPRR

SEQ ID NO: 89268 - protein, 13 aa, Artificial Sequence
  Description of Artificial Sequence: Synthetic peptide
  Seed: MCSLMQGSTLPRR
MFSLLQASTTPRR

SEQ ID NO: 89269 - protein, 13 aa, Artificial Sequence
  Description of Artificial Sequence: Synthetic peptide
  Seed: MCSLMQGSTLPRR
MFSLLQASTVPRR

SEQ ID NO: 89270 - protein, 13 aa, Artificial Sequence
  Description of Artificial Sequence: Synthetic peptide
  Seed: MCSLMQGSTLPRR
MFSLLQGSTAPRR

SEQ ID NO: 89271 - protein, 13 aa, Artificial Sequence
  Description of Artificial Sequence: Synthetic peptide
  Seed: MCSLMQGSTLPRR
MFSLLQGSTIPRR

SEQ ID NO: 89272 - protein, 13 aa, Artificial Sequence
  Description of Artificial Sequence: Synthetic peptide
  Seed: MCSLMQGSTLPRR
MFSLLQGSTLPRR

SEQ ID NO: 89273 - protein, 13 aa, Artificial Sequence
  Description of Artificial Sequence: Synthetic peptide
  Seed: MCSLMQGSTLPRR
MFSLLQGSTMPRR

SEQ ID NO: 89274 - protein, 13 aa, Artificial Sequence
  Description of Artificial Sequence: Synthetic peptide
  Seed: MCSLMQGSTLPRR
MFSLLQGSTTPRR

SEQ ID NO: 89275 - protein, 13 aa, Artificial Sequence
  Description of Artificial Sequence: Synthetic peptide
  Seed: MCSLMQGSTLPRR
MFSLLQGSTVPRR

SEQ ID NO: 89276 - protein, 13 aa, Artificial Sequence
  Description of Artificial Sequence: Synthetic peptide
  Seed: MCSLMQGSTLPRR
MFSLLQPSTIPRR

SEQ ID NO: 89277 - protein, 13 aa, Artificial Sequence
  Description of Artificial Sequence: Synthetic peptide
  Seed: MCSLMQGSTLPRR
MFSLLQPSTLPRR

SEQ ID NO: 89278 - protein, 13 aa, Artificial Sequence
  Description of Artificial Sequence: Synthetic peptide
  Seed: MCSLMQGSTLPRR
MFSLLQPSTVPRR

SEQ ID NO: 89279 - protein, 13 aa, Artificial Sequence
  Description of Artificial Sequence: Synthetic peptide
  Seed: MCSLMQGSTLPRR
MFSLLQSSTAPRR

SEQ ID NO: 89280 - protein, 13 aa, Artificial Sequence
  Description of Artificial Sequence: Synthetic peptide
  Seed: MCSLMQGSTLPRR
MFSLLQSSTIPRR

SEQ ID NO: 89281 - protein, 13 aa, Artificial Sequence
  Description of Artificial Sequence: Synthetic peptide
  Seed: MCSLMQGSTLPRR
MFSLLQSSTLPRR

SEQ ID NO: 89282 - protein, 13 aa, Artificial Sequence
  Description of Artificial Sequence: Synthetic peptide
  Seed: MCSLMQGSTLPRR
MFSLLQSSTVPRR

SEQ ID NO: 89283 - protein, 13 aa, Artificial Sequence
  Description of Artificial Sequence: Synthetic peptide
  Seed: MCSLMQGSTLPRR
MFSLMQASTAPRR

SEQ ID NO: 89284 - protein, 13 aa, Artificial Sequence
  Description of Artificial Sequence: Synthetic peptide
  Seed: MCSLMQGSTLPRR
MFSLMQASTIPRR

SEQ ID NO: 89285 - protein, 13 aa, Artificial Sequence
  Description of Artificial Sequence: Synthetic peptide
  Seed: MCSLMQGSTLPRR
MFSLMQASTLPRR

SEQ ID NO: 89286 - protein, 13 aa, Artificial Sequence
  Description of Artificial Sequence: Synthetic peptide
  Seed: MCSLMQGSTLPRR
MFSLMQASTMPRR

SEQ ID NO: 89287 - protein, 13 aa, Artificial Sequence
  Description of Artificial Sequence: Synthetic peptide
  Seed: MCSLMQGSTLPRR
MFSLMQASTTPRR

SEQ ID NO: 89288 - protein, 13 aa, Artificial Sequence
  Description of Artificial Sequence: Synthetic peptide
  Seed: MCSLMQGSTLPRR
MFSLMQASTVPRR

SEQ ID NO: 89289 - protein, 13 aa, Artificial Sequence
  Description of Artificial Sequence: Synthetic peptide
  Seed: MCSLMQGSTLPRR
MFSLMQGSTAPRR

SEQ ID NO: 89290 - protein, 13 aa, Artificial Sequence
  Description of Artificial Sequence: Synthetic peptide
  Seed: MCSLMQGSTLPRR
MFSLMQGSTIPRR

SEQ ID NO: 89291 - protein, 13 aa, Artificial Sequence
  Description of Artificial Sequence: Synthetic peptide
  Seed: MCSLMQGSTLPRR
MFSLMQGSTLPRR

SEQ ID NO: 89292 - protein, 13 aa, Artificial Sequence
  Description of Artificial Sequence: Synthetic peptide
  Seed: MCSLMQGSTLPRR
MFSLMQGSTMPRR

SEQ ID NO: 89293 - protein, 13 aa, Artificial Sequence
  Description of Artificial Sequence: Synthetic peptide
  Seed: MCSLMQGSTLPRR
MFSLMQGSTVPRR

SEQ ID NO: 89294 - protein, 13 aa, Artificial Sequence
  Description of Artificial Sequence: Synthetic peptide
  Seed: MCSLMQGSTLPRR
MFSLMQPSTIPRR

SEQ ID NO: 89295 - protein, 13 aa, Artificial Sequence
  Description of Artificial Sequence: Synthetic peptide
  Seed: MCSLMQGSTLPRR
MFSLMQPSTLPRR

SEQ ID NO: 89296 - protein, 13 aa, Artificial Sequence
  Description of Artificial Sequence: Synthetic peptide
  Seed: MCSLMQGSTLPRR
MFSLMQPSTVPRR

SEQ ID NO: 89297 - protein, 13 aa, Artificial Sequence
  Description of Artificial Sequence: Synthetic peptide
  Seed: MCSLMQGSTLPRR
MFSLMQSSTAPRR

SEQ ID NO: 89298 - protein, 13 aa, Artificial Sequence
  Description of Artificial Sequence: Synthetic peptide
  Seed: MCSLMQGSTLPRR
MFSLMQSSTIPRR

SEQ ID NO: 89299 - protein, 13 aa, Artificial Sequence
  Description of Artificial Sequence: Synthetic peptide
  Seed: MCSLMQGSTLPRR
MFSLMQSSTLPRR

SEQ ID NO: 89300 - protein, 13 aa, Artificial Sequence
  Description of Artificial Sequence: Synthetic peptide
  Seed: MCSLMQGSTLPRR
MFSLMQSSTVPRR

SEQ ID NO: 89301 - protein, 13 aa, Artificial Sequence
  Description of Artificial Sequence: Synthetic peptide
  Seed: MCSLMQGSTLPRR
MYSLLQASTAPRR

SEQ ID NO: 89302 - protein, 13 aa, Artificial Sequence
  Description of Artificial Sequence: Synthetic peptide
  Seed: MCSLMQGSTLPRR
MYSLLQASTIPRR

SEQ ID NO: 89303 - protein, 13 aa, Artificial Sequence
  Description of Artificial Sequence: Synthetic peptide
  Seed: MCSLMQGSTLPRR
MYSLLQASTLPRR

SEQ ID NO: 89304 - protein, 13 aa, Artificial Sequence
  Description of Artificial Sequence: Synthetic peptide
  Seed: MCSLMQGSTLPRR
MYSLLQASTVPRR

SEQ ID NO: 89305 - protein, 13 aa, Artificial Sequence
  Description of Artificial Sequence: Synthetic peptide
  Seed: MCSLMQGSTLPRR
MYSLLQGSTAPRR

SEQ ID NO: 89306 - protein, 13 aa, Artificial Sequence
  Description of Artificial Sequence: Synthetic peptide
  Seed: MCSLMQGSTLPRR
MYSLLQGSTIPRR

SEQ ID NO: 89307 - protein, 13 aa, Artificial Sequence
  Description of Artificial Sequence: Synthetic peptide
  Seed: MCSLMQGSTLPRR
MYSLLQGSTLPRR

SEQ ID NO: 89308 - protein, 13 aa, Artificial Sequence
  Description of Artificial Sequence: Synthetic peptide
  Seed: MCSLMQGSTLPRR
MYSLLQGSTVPRR

SEQ ID NO: 89309 - protein, 13 aa, Artificial Sequence
  Description of Artificial Sequence: Synthetic peptide
  Seed: MCSLMQGSTLPRR
MYSLLQSSTAPRR

SEQ ID NO: 89310 - protein, 13 aa, Artificial Sequence
  Description of Artificial Sequence: Synthetic peptide
  Seed: MCSLMQGSTLPRR
MYSLLQSSTIPRR

SEQ ID NO: 89311 - protein, 13 aa, Artificial Sequence
  Description of Artificial Sequence: Synthetic peptide
  Seed: MCSLMQGSTLPRR
MYSLLQSSTLPRR

SEQ ID NO: 89312 - protein, 13 aa, Artificial Sequence
  Description of Artificial Sequence: Synthetic peptide
  Seed: MCSLMQGSTLPRR
MYSLLQSSTVPRR

SEQ ID NO: 89313 - protein, 13 aa, Artificial Sequence
  Description of Artificial Sequence: Synthetic peptide
  Seed: MCSLMQGSTLPRR
MYSLMQASTAPRR

SEQ ID NO: 89314 - protein, 13 aa, Artificial Sequence
  Description of Artificial Sequence: Synthetic peptide
  Seed: MCSLMQGSTLPRR
MYSLMQASTIPRR

SEQ ID NO: 89315 - protein, 13 aa, Artificial Sequence
  Description of Artificial Sequence: Synthetic peptide
  Seed: MCSLMQGSTLPRR
MYSLMQASTLPRR

SEQ ID NO: 89316 - protein, 13 aa, Artificial Sequence
  Description of Artificial Sequence: Synthetic peptide
  Seed: MCSLMQGSTLPRR
MYSLMQASTVPRR

SEQ ID NO: 89317 - protein, 13 aa, Artificial Sequence
  Description of Artificial Sequence: Synthetic peptide
  Seed: MCSLMQGSTLPRR
MYSLMQGSTIPRR

SEQ ID NO: 89318 - protein, 13 aa, Artificial Sequence
  Description of Artificial Sequence: Synthetic peptide
  Seed: MCSLMQGSTLPRR
MYSLMQGSTLPRR

SEQ ID NO: 89319 - protein, 13 aa, Artificial Sequence
  Description of Artificial Sequence: Synthetic peptide
  Seed: MCSLMQGSTLPRR
MYSLMQGSTVPRR

SEQ ID NO: 89320 - protein, 13 aa, Artificial Sequence
  Description of Artificial Sequence: Synthetic peptide
  Seed: MCSLMQGSTLPRR
MYSLMQSSTLPRR

SEQ ID NO: 89321 - protein, 13 aa, Artificial Sequence
  Description of Artificial Sequence: Synthetic peptide
  Seed: MCSLMQGSTLPRR
MYSLMQSSTVPRR

SEQ ID NO: 89322 - protein, 14 aa, Artificial Sequence
  Description of Artificial Sequence: Synthetic peptide
  Seed: MCSLMQGSTLPRRS
MFSLAQASTAPRRS

SEQ ID NO: 89323 - protein, 14 aa, Artificial Sequence
  Description of Artificial Sequence: Synthetic peptide
  Seed: MCSLMQGSTLPRRS
MFSLAQASTIPRRS

SEQ ID NO: 89324 - protein, 14 aa, Artificial Sequence
  Description of Artificial Sequence: Synthetic peptide
  Seed: MCSLMQGSTLPRRS
MFSLAQASTLPRRS

SEQ ID NO: 89325 - protein, 14 aa, Artificial Sequence
  Description of Artificial Sequence: Synthetic peptide
  Seed: MCSLMQGSTLPRRS
MFSLAQASTMPRRS

SEQ ID NO: 89326 - protein, 14 aa, Artificial Sequence
  Description of Artificial Sequence: Synthetic peptide
  Seed: MCSLMQGSTLPRRS
MFSLAQASTVPRRS

SEQ ID NO: 89327 - protein, 14 aa, Artificial Sequence
  Description of Artificial Sequence: Synthetic peptide
  Seed: MCSLMQGSTLPRRS
MFSLAQGSTAPRRS

SEQ ID NO: 89328 - protein, 14 aa, Artificial Sequence
  Description of Artificial Sequence: Synthetic peptide
  Seed: MCSLMQGSTLPRRS
MFSLAQGSTIPRRS

SEQ ID NO: 89329 - protein, 14 aa, Artificial Sequence
  Description of Artificial Sequence: Synthetic peptide
  Seed: MCSLMQGSTLPRRS
MFSLAQGSTLPRRS

SEQ ID NO: 89330 - protein, 14 aa, Artificial Sequence
  Description of Artificial Sequence: Synthetic peptide
  Seed: MCSLMQGSTLPRRS
MFSLAQGSTVPRRS

SEQ ID NO: 89331 - protein, 14 aa, Artificial Sequence
  Description of Artificial Sequence: Synthetic peptide
  Seed: MCSLMQGSTLPRRS
MFSLAQSSTIPRRS

SEQ ID NO: 89332 - protein, 14 aa, Artificial Sequence
  Description of Artificial Sequence: Synthetic peptide
  Seed: MCSLMQGSTLPRRS
MFSLAQSSTLPRRS

SEQ ID NO: 89333 - protein, 14 aa, Artificial Sequence
  Description of Artificial Sequence: Synthetic peptide
  Seed: MCSLMQGSTLPRRS
MFSLAQSSTVPRRS

SEQ ID NO: 89334 - protein, 14 aa, Artificial Sequence
  Description of Artificial Sequence: Synthetic peptide
  Seed: MCSLMQGSTLPRRS
MFSLIQASTAPRRS

SEQ ID NO: 89335 - protein, 14 aa, Artificial Sequence
  Description of Artificial Sequence: Synthetic peptide
  Seed: MCSLMQGSTLPRRS
MFSLIQASTIPRRS

SEQ ID NO: 89336 - protein, 14 aa, Artificial Sequence
  Description of Artificial Sequence: Synthetic peptide
  Seed: MCSLMQGSTLPRRS
MFSLIQASTLPRRS

SEQ ID NO: 89337 - protein, 14 aa, Artificial Sequence
  Description of Artificial Sequence: Synthetic peptide
  Seed: MCSLMQGSTLPRRS
MFSLIQASTMPRRS

SEQ ID NO: 89338 - protein, 14 aa, Artificial Sequence
  Description of Artificial Sequence: Synthetic peptide
  Seed: MCSLMQGSTLPRRS
MFSLIQASTSPRRS

SEQ ID NO: 89339 - protein, 14 aa, Artificial Sequence
  Description of Artificial Sequence: Synthetic peptide
  Seed: MCSLMQGSTLPRRS
MFSLIQASTTPRRS

SEQ ID NO: 89340 - protein, 14 aa, Artificial Sequence
  Description of Artificial Sequence: Synthetic peptide
  Seed: MCSLMQGSTLPRRS
MFSLIQASTVPRRS

SEQ ID NO: 89341 - protein, 14 aa, Artificial Sequence
  Description of Artificial Sequence: Synthetic peptide
  Seed: MCSLMQGSTLPRRS
MFSLIQGSTAPRRS

SEQ ID NO: 89342 - protein, 14 aa, Artificial Sequence
  Description of Artificial Sequence: Synthetic peptide
  Seed: MCSLMQGSTLPRRS
MFSLIQGSTIPRRS

SEQ ID NO: 89343 - protein, 14 aa, Artificial Sequence
  Description of Artificial Sequence: Synthetic peptide
  Seed: MCSLMQGSTLPRRS
MFSLIQGSTLPRRS

SEQ ID NO: 89344 - protein, 14 aa, Artificial Sequence
  Description of Artificial Sequence: Synthetic peptide
  Seed: MCSLMQGSTLPRRS
MFSLIQGSTMPRRS

SEQ ID NO: 89345 - protein, 14 aa, Artificial Sequence
  Description of Artificial Sequence: Synthetic peptide
  Seed: MCSLMQGSTLPRRS
MFSLIQGSTTPRRS

SEQ ID NO: 89346 - protein, 14 aa, Artificial Sequence
  Description of Artificial Sequence: Synthetic peptide
  Seed: MCSLMQGSTLPRRS
MFSLIQGSTVPRRS

SEQ ID NO: 89347 - protein, 14 aa, Artificial Sequence
  Description of Artificial Sequence: Synthetic peptide
  Seed: MCSLMQGSTLPRRS
MFSLIQPSTAPRRS

SEQ ID NO: 89348 - protein, 14 aa, Artificial Sequence
  Description of Artificial Sequence: Synthetic peptide
  Seed: MCSLMQGSTLPRRS
MFSLIQPSTIPRRS

SEQ ID NO: 89349 - protein, 14 aa, Artificial Sequence
  Description of Artificial Sequence: Synthetic peptide
  Seed: MCSLMQGSTLPRRS
MFSLIQPSTLPRRS

SEQ ID NO: 89350 - protein, 14 aa, Artificial Sequence
  Description of Artificial Sequence: Synthetic peptide
  Seed: MCSLMQGSTLPRRS
MFSLIQPSTVPRRS

SEQ ID NO: 89351 - protein, 14 aa, Artificial Sequence
  Description of Artificial Sequence: Synthetic peptide
  Seed: MCSLMQGSTLPRRS
MFSLIQSSTAPRRS

SEQ ID NO: 89352 - protein, 14 aa, Artificial Sequence
  Description of Artificial Sequence: Synthetic peptide
  Seed: MCSLMQGSTLPRRS
MFSLIQSSTIPRRS

SEQ ID NO: 89353 - protein, 14 aa, Artificial Sequence
  Description of Artificial Sequence: Synthetic peptide
  Seed: MCSLMQGSTLPRRS
MFSLIQSSTLPRRS

SEQ ID NO: 89354 - protein, 14 aa, Artificial Sequence
  Description of Artificial Sequence: Synthetic peptide
  Seed: MCSLMQGSTLPRRS
MFSLIQSSTVPRRS

SEQ ID NO: 89355 - protein, 14 aa, Artificial Sequence
  Description of Artificial Sequence: Synthetic peptide
  Seed: MCSLMQGSTLPRRS
MFSLLQASTAPRRS

SEQ ID NO: 89356 - protein, 14 aa, Artificial Sequence
  Description of Artificial Sequence: Synthetic peptide
  Seed: MCSLMQGSTLPRRS
MFSLLQASTGPRRS

SEQ ID NO: 89357 - protein, 14 aa, Artificial Sequence
  Description of Artificial Sequence: Synthetic peptide
  Seed: MCSLMQGSTLPRRS
MFSLLQASTIPRRS

SEQ ID NO: 89358 - protein, 14 aa, Artificial Sequence
  Description of Artificial Sequence: Synthetic peptide
  Seed: MCSLMQGSTLPRRS
MFSLLQASTLPRRS

SEQ ID NO: 89359 - protein, 14 aa, Artificial Sequence
  Description of Artificial Sequence: Synthetic peptide
  Seed: MCSLMQGSTLPRRS
MFSLLQASTMPRRS

SEQ ID NO: 89360 - protein, 14 aa, Artificial Sequence
  Description of Artificial Sequence: Synthetic peptide
  Seed: MCSLMQGSTLPRRS
MFSLLQASTSPRRS

SEQ ID NO: 89361 - protein, 14 aa, Artificial Sequence
  Description of Artificial Sequence: Synthetic peptide
  Seed: MCSLMQGSTLPRRS
MFSLLQASTTPRRS

SEQ ID NO: 89362 - protein, 14 aa, Artificial Sequence
  Description of Artificial Sequence: Synthetic peptide
  Seed: MCSLMQGSTLPRRS
MFSLLQASTVPRRS

SEQ ID NO: 89363 - protein, 14 aa, Artificial Sequence
  Description of Artificial Sequence: Synthetic peptide
  Seed: MCSLMQGSTLPRRS
MFSLLQGSTAPRRS

SEQ ID NO: 89364 - protein, 14 aa, Artificial Sequence
  Description of Artificial Sequence: Synthetic peptide
  Seed: MCSLMQGSTLPRRS
MFSLLQGSTGPRRS

SEQ ID NO: 89365 - protein, 14 aa, Artificial Sequence
  Description of Artificial Sequence: Synthetic peptide
  Seed: MCSLMQGSTLPRRS
MFSLLQGSTIPRRS

SEQ ID NO: 89366 - protein, 14 aa, Artificial Sequence
  Description of Artificial Sequence: Synthetic peptide
  Seed: MCSLMQGSTLPRRS
MFSLLQGSTLPRRS

SEQ ID NO: 89367 - protein, 14 aa, Artificial Sequence
  Description of Artificial Sequence: Synthetic peptide
  Seed: MCSLMQGSTLPRRS
MFSLLQGSTMPRRS

SEQ ID NO: 89368 - protein, 14 aa, Artificial Sequence
  Description of Artificial Sequence: Synthetic peptide
  Seed: MCSLMQGSTLPRRS
MFSLLQGSTSPRRS

SEQ ID NO: 89369 - protein, 14 aa, Artificial Sequence
  Description of Artificial Sequence: Synthetic peptide
  Seed: MCSLMQGSTLPRRS
MFSLLQGSTTPRRS

SEQ ID NO: 89370 - protein, 14 aa, Artificial Sequence
  Description of Artificial Sequence: Synthetic peptide
  Seed: MCSLMQGSTLPRRS
MFSLLQGSTVPRRS

SEQ ID NO: 89371 - protein, 14 aa, Artificial Sequence
  Description of Artificial Sequence: Synthetic peptide
  Seed: MCSLMQGSTLPRRS
MFSLLQNSTAPRRS

SEQ ID NO: 89372 - protein, 14 aa, Artificial Sequence
  Description of Artificial Sequence: Synthetic peptide
  Seed: MCSLMQGSTLPRRS
MFSLLQNSTIPRRS

SEQ ID NO: 89373 - protein, 14 aa, Artificial Sequence
  Description of Artificial Sequence: Synthetic peptide
  Seed: MCSLMQGSTLPRRS
MFSLLQNSTLPRRS

SEQ ID NO: 89374 - protein, 14 aa, Artificial Sequence
  Description of Artificial Sequence: Synthetic peptide
  Seed: MCSLMQGSTLPRRS
MFSLLQNSTVPRRS

SEQ ID NO: 89375 - protein, 14 aa, Artificial Sequence
  Description of Artificial Sequence: Synthetic peptide
  Seed: MCSLMQGSTLPRRS
MFSLLQPSTAPRRS

SEQ ID NO: 89376 - protein, 14 aa, Artificial Sequence
  Description of Artificial Sequence: Synthetic peptide
  Seed: MCSLMQGSTLPRRS
MFSLLQPSTIPRRS

SEQ ID NO: 89377 - protein, 14 aa, Artificial Sequence
  Description of Artificial Sequence: Synthetic peptide
  Seed: MCSLMQGSTLPRRS
MFSLLQPSTLPRRS

SEQ ID NO: 89378 - protein, 14 aa, Artificial Sequence
  Description of Artificial Sequence: Synthetic peptide
  Seed: MCSLMQGSTLPRRS
MFSLLQPSTMPRRS

SEQ ID NO: 89379 - protein, 14 aa, Artificial Sequence
  Description of Artificial Sequence: Synthetic peptide
  Seed: MCSLMQGSTLPRRS
MFSLLQPSTSPRRS

SEQ ID NO: 89380 - protein, 14 aa, Artificial Sequence
  Description of Artificial Sequence: Synthetic peptide
  Seed: MCSLMQGSTLPRRS
MFSLLQPSTTPRRS

SEQ ID NO: 89381 - protein, 14 aa, Artificial Sequence
  Description of Artificial Sequence: Synthetic peptide
  Seed: MCSLMQGSTLPRRS
MFSLLQPSTVPRRS

SEQ ID NO: 89382 - protein, 14 aa, Artificial Sequence
  Description of Artificial Sequence: Synthetic peptide
  Seed: MCSLMQGSTLPRRS
MFSLLQSSTAPRRS

SEQ ID NO: 89383 - protein, 14 aa, Artificial Sequence
  Description of Artificial Sequence: Synthetic peptide
  Seed: MCSLMQGSTLPRRS
MFSLLQSSTIPRRS

SEQ ID NO: 89384 - protein, 14 aa, Artificial Sequence
  Description of Artificial Sequence: Synthetic peptide
  Seed: MCSLMQGSTLPRRS
MFSLLQSSTLPRRS

SEQ ID NO: 89385 - protein, 14 aa, Artificial Sequence
  Description of Artificial Sequence: Synthetic peptide
  Seed: MCSLMQGSTLPRRS
MFSLLQSSTMPRRS

SEQ ID NO: 89386 - protein, 14 aa, Artificial Sequence
  Description of Artificial Sequence: Synthetic peptide
  Seed: MCSLMQGSTLPRRS
MFSLLQSSTSPRRS

SEQ ID NO: 89387 - protein, 14 aa, Artificial Sequence
  Description of Artificial Sequence: Synthetic peptide
  Seed: MCSLMQGSTLPRRS
MFSLLQSSTTPRRS

SEQ ID NO: 89388 - protein, 14 aa, Artificial Sequence
  Description of Artificial Sequence: Synthetic peptide
  Seed: MCSLMQGSTLPRRS
MFSLLQSSTVPRRS

SEQ ID NO: 89389 - protein, 14 aa, Artificial Sequence
  Description of Artificial Sequence: Synthetic peptide
  Seed: MCSLMQGSTLPRRS
MFSLLQTSTAPRRS

SEQ ID NO: 89390 - protein, 14 aa, Artificial Sequence
  Description of Artificial Sequence: Synthetic peptide
  Seed: MCSLMQGSTLPRRS
MFSLLQTSTIPRRS

SEQ ID NO: 89391 - protein, 14 aa, Artificial Sequence
  Description of Artificial Sequence: Synthetic peptide
  Seed: MCSLMQGSTLPRRS
MFSLLQTSTLPRRS

SEQ ID NO: 89392 - protein, 14 aa, Artificial Sequence
  Description of Artificial Sequence: Synthetic peptide
  Seed: MCSLMQGSTLPRRS
MFSLLQTSTTPRRS

SEQ ID NO: 89393 - protein, 14 aa, Artificial Sequence
  Description of Artificial Sequence: Synthetic peptide
  Seed: MCSLMQGSTLPRRS
MFSLLQTSTVPRRS

SEQ ID NO: 89394 - protein, 14 aa, Artificial Sequence
  Description of Artificial Sequence: Synthetic peptide
  Seed: MCSLMQGSTLPRRS
MFSLLQVSTIPRRS

SEQ ID NO: 89395 - protein, 14 aa, Artificial Sequence
  Description of Artificial Sequence: Synthetic peptide
  Seed: MCSLMQGSTLPRRS
MFSLLQVSTLPRRS

SEQ ID NO: 89396 - protein, 14 aa, Artificial Sequence
  Description of Artificial Sequence: Synthetic peptide
  Seed: MCSLMQGSTLPRRS
MFSLLQVSTVPRRS

SEQ ID NO: 89397 - protein, 14 aa, Artificial Sequence
  Description of Artificial Sequence: Synthetic peptide
  Seed: MCSLMQGSTLPRRS
MFSLMQASTAPRRS

SEQ ID NO: 89398 - protein, 14 aa, Artificial Sequence
  Description of Artificial Sequence: Synthetic peptide
  Seed: MCSLMQGSTLPRRS
MFSLMQASTGPRRS

SEQ ID NO: 89399 - protein, 14 aa, Artificial Sequence
  Description of Artificial Sequence: Synthetic peptide
  Seed: MCSLMQGSTLPRRS
MFSLMQASTIPRRS

SEQ ID NO: 89400 - protein, 14 aa, Artificial Sequence
  Description of Artificial Sequence: Synthetic peptide
  Seed: MCSLMQGSTLPRRS
MFSLMQASTLPRRS

SEQ ID NO: 89401 - protein, 14 aa, Artificial Sequence
  Description of Artificial Sequence: Synthetic peptide
  Seed: MCSLMQGSTLPRRS
MFSLMQASTMPRRS

SEQ ID NO: 89402 - protein, 14 aa, Artificial Sequence
  Description of Artificial Sequence: Synthetic peptide
  Seed: MCSLMQGSTLPRRS
MFSLMQASTSPRRS

SEQ ID NO: 89403 - protein, 14 aa, Artificial Sequence
  Description of Artificial Sequence: Synthetic peptide
  Seed: MCSLMQGSTLPRRS
MFSLMQASTTPRRS

SEQ ID NO: 89404 - protein, 14 aa, Artificial Sequence
  Description of Artificial Sequence: Synthetic peptide
  Seed: MCSLMQGSTLPRRS
MFSLMQASTVPRRS

SEQ ID NO: 89405 - protein, 14 aa, Artificial Sequence
  Description of Artificial Sequence: Synthetic peptide
  Seed: MCSLMQGSTLPRRS
MFSLMQGSTAPRRS

SEQ ID NO: 89406 - protein, 14 aa, Artificial Sequence
  Description of Artificial Sequence: Synthetic peptide
  Seed: MCSLMQGSTLPRRS
MFSLMQGSTGPRRS

SEQ ID NO: 89407 - protein, 14 aa, Artificial Sequence
  Description of Artificial Sequence: Synthetic peptide
  Seed: MCSLMQGSTLPRRS
MFSLMQGSTIPRRS

SEQ ID NO: 89408 - protein, 14 aa, Artificial Sequence
  Description of Artificial Sequence: Synthetic peptide
  Seed: MCSLMQGSTLPRRS
MFSLMQGSTLPRRS

SEQ ID NO: 89409 - protein, 14 aa, Artificial Sequence
  Description of Artificial Sequence: Synthetic peptide
  Seed: MCSLMQGSTLPRRS
MFSLMQGSTMPRRS

SEQ ID NO: 89410 - protein, 14 aa, Artificial Sequence
  Description of Artificial Sequence: Synthetic peptide
  Seed: MCSLMQGSTLPRRS
MFSLMQGSTSPRRS

SEQ ID NO: 89411 - protein, 14 aa, Artificial Sequence
  Description of Artificial Sequence: Synthetic peptide
  Seed: MCSLMQGSTLPRRS
MFSLMQGSTTPRRS

SEQ ID NO: 89412 - protein, 14 aa, Artificial Sequence
  Description of Artificial Sequence: Synthetic peptide
  Seed: MCSLMQGSTLPRRS
MFSLMQGSTVPRRS

SEQ ID NO: 89413 - protein, 14 aa, Artificial Sequence
  Description of Artificial Sequence: Synthetic peptide
  Seed: MCSLMQGSTLPRRS
MFSLMQNSTAPRRS

SEQ ID NO: 89414 - protein, 14 aa, Artificial Sequence
  Description of Artificial Sequence: Synthetic peptide
  Seed: MCSLMQGSTLPRRS
MFSLMQNSTIPRRS

SEQ ID NO: 89415 - protein, 14 aa, Artificial Sequence
  Description of Artificial Sequence: Synthetic peptide
  Seed: MCSLMQGSTLPRRS
MFSLMQNSTLPRRS

SEQ ID NO: 89416 - protein, 14 aa, Artificial Sequence
  Description of Artificial Sequence: Synthetic peptide
  Seed: MCSLMQGSTLPRRS
MFSLMQNSTVPRRS

SEQ ID NO: 89417 - protein, 14 aa, Artificial Sequence
  Description of Artificial Sequence: Synthetic peptide
  Seed: MCSLMQGSTLPRRS
MFSLMQPSTAPRRS

SEQ ID NO: 89418 - protein, 14 aa, Artificial Sequence
  Description of Artificial Sequence: Synthetic peptide
  Seed: MCSLMQGSTLPRRS
MFSLMQPSTIPRRS

SEQ ID NO: 89419 - protein, 14 aa, Artificial Sequence
  Description of Artificial Sequence: Synthetic peptide
  Seed: MCSLMQGSTLPRRS
MFSLMQPSTLPRRS

SEQ ID NO: 89420 - protein, 14 aa, Artificial Sequence
  Description of Artificial Sequence: Synthetic peptide
  Seed: MCSLMQGSTLPRRS
MFSLMQPSTMPRRS

SEQ ID NO: 89421 - protein, 14 aa, Artificial Sequence
  Description of Artificial Sequence: Synthetic peptide
  Seed: MCSLMQGSTLPRRS
MFSLMQPSTTPRRS

SEQ ID NO: 89422 - protein, 14 aa, Artificial Sequence
  Description of Artificial Sequence: Synthetic peptide
  Seed: MCSLMQGSTLPRRS
MFSLMQPSTVPRRS

SEQ ID NO: 89423 - protein, 14 aa, Artificial Sequence
  Description of Artificial Sequence: Synthetic peptide
  Seed: MCSLMQGSTLPRRS
MFSLMQSSTAPRRS

SEQ ID NO: 89424 - protein, 14 aa, Artificial Sequence
  Description of Artificial Sequence: Synthetic peptide
  Seed: MCSLMQGSTLPRRS
MFSLMQSSTIPRRS

SEQ ID NO: 89425 - protein, 14 aa, Artificial Sequence
  Description of Artificial Sequence: Synthetic peptide
  Seed: MCSLMQGSTLPRRS
MFSLMQSSTLPRRS

SEQ ID NO: 89426 - protein, 14 aa, Artificial Sequence
  Description of Artificial Sequence: Synthetic peptide
  Seed: MCSLMQGSTLPRRS
MFSLMQSSTMPRRS

SEQ ID NO: 89427 - protein, 14 aa, Artificial Sequence
  Description of Artificial Sequence: Synthetic peptide
  Seed: MCSLMQGSTLPRRS
MFSLMQSSTSPRRS

SEQ ID NO: 89428 - protein, 14 aa, Artificial Sequence
  Description of Artificial Sequence: Synthetic peptide
  Seed: MCSLMQGSTLPRRS
MFSLMQSSTTPRRS

SEQ ID NO: 89429 - protein, 14 aa, Artificial Sequence
  Description of Artificial Sequence: Synthetic peptide
  Seed: MCSLMQGSTLPRRS
MFSLMQSSTVPRRS

SEQ ID NO: 89430 - protein, 14 aa, Artificial Sequence
  Description of Artificial Sequence: Synthetic peptide
  Seed: MCSLMQGSTLPRRS
MFSLMQTSTAPRRS

SEQ ID NO: 89431 - protein, 14 aa, Artificial Sequence
  Description of Artificial Sequence: Synthetic peptide
  Seed: MCSLMQGSTLPRRS
MFSLMQTSTIPRRS

SEQ ID NO: 89432 - protein, 14 aa, Artificial Sequence
  Description of Artificial Sequence: Synthetic peptide
  Seed: MCSLMQGSTLPRRS
MFSLMQTSTLPRRS

SEQ ID NO: 89433 - protein, 14 aa, Artificial Sequence
  Description of Artificial Sequence: Synthetic peptide
  Seed: MCSLMQGSTLPRRS
MFSLMQTSTVPRRS

SEQ ID NO: 89434 - protein, 14 aa, Artificial Sequence
  Description of Artificial Sequence: Synthetic peptide
  Seed: MCSLMQGSTLPRRS
MFSLMQVSTLPRRS

SEQ ID NO: 89435 - protein, 14 aa, Artificial Sequence
  Description of Artificial Sequence: Synthetic peptide
  Seed: MCSLMQGSTLPRRS
MFSLMQVSTVPRRS

SEQ ID NO: 89436 - protein, 14 aa, Artificial Sequence
  Description of Artificial Sequence: Synthetic peptide
  Seed: MCSLMQGSTLPRRS
MFSLQQASTAPRRS

SEQ ID NO: 89437 - protein, 14 aa, Artificial Sequence
  Description of Artificial Sequence: Synthetic peptide
  Seed: MCSLMQGSTLPRRS
MFSLQQASTIPRRS

SEQ ID NO: 89438 - protein, 14 aa, Artificial Sequence
  Description of Artificial Sequence: Synthetic peptide
  Seed: MCSLMQGSTLPRRS
MFSLQQASTLPRRS

SEQ ID NO: 89439 - protein, 14 aa, Artificial Sequence
  Description of Artificial Sequence: Synthetic peptide
  Seed: MCSLMQGSTLPRRS
MFSLQQASTVPRRS

SEQ ID NO: 89440 - protein, 14 aa, Artificial Sequence
  Description of Artificial Sequence: Synthetic peptide
  Seed: MCSLMQGSTLPRRS
MFSLQQGSTIPRRS

SEQ ID NO: 89441 - protein, 14 aa, Artificial Sequence
  Description of Artificial Sequence: Synthetic peptide
  Seed: MCSLMQGSTLPRRS
MFSLQQGSTLPRRS

SEQ ID NO: 89442 - protein, 14 aa, Artificial Sequence
  Description of Artificial Sequence: Synthetic peptide
  Seed: MCSLMQGSTLPRRS
MFSLQQGSTVPRRS

SEQ ID NO: 89443 - protein, 14 aa, Artificial Sequence
  Description of Artificial Sequence: Synthetic peptide
  Seed: MCSLMQGSTLPRRS
MFSLQQSSTIPRRS

SEQ ID NO: 89444 - protein, 14 aa, Artificial Sequence
  Description of Artificial Sequence: Synthetic peptide
  Seed: MCSLMQGSTLPRRS
MFSLQQSSTLPRRS

SEQ ID NO: 89445 - protein, 14 aa, Artificial Sequence
  Description of Artificial Sequence: Synthetic peptide
  Seed: MCSLMQGSTLPRRS
MFSLQQSSTVPRRS

SEQ ID NO: 89446 - protein, 14 aa, Artificial Sequence
  Description of Artificial Sequence: Synthetic peptide
  Seed: MCSLMQGSTLPRRS
MFSLVQASTAPRRS

SEQ ID NO: 89447 - protein, 14 aa, Artificial Sequence
  Description of Artificial Sequence: Synthetic peptide
  Seed: MCSLMQGSTLPRRS
MFSLVQASTIPRRS

SEQ ID NO: 89448 - protein, 14 aa, Artificial Sequence
  Description of Artificial Sequence: Synthetic peptide
  Seed: MCSLMQGSTLPRRS
MFSLVQASTLPRRS

SEQ ID NO: 89449 - protein, 14 aa, Artificial Sequence
  Description of Artificial Sequence: Synthetic peptide
  Seed: MCSLMQGSTLPRRS
MFSLVQASTVPRRS

SEQ ID NO: 89450 - protein, 14 aa, Artificial Sequence
  Description of Artificial Sequence: Synthetic peptide
  Seed: MCSLMQGSTLPRRS
MFSLVQGSTAPRRS

SEQ ID NO: 89451 - protein, 14 aa, Artificial Sequence
  Description of Artificial Sequence: Synthetic peptide
  Seed: MCSLMQGSTLPRRS
MFSLVQGSTIPRRS

SEQ ID NO: 89452 - protein, 14 aa, Artificial Sequence
  Description of Artificial Sequence: Synthetic peptide
  Seed: MCSLMQGSTLPRRS
MFSLVQGSTLPRRS

SEQ ID NO: 89453 - protein, 14 aa, Artificial Sequence
  Description of Artificial Sequence: Synthetic peptide
  Seed: MCSLMQGSTLPRRS
MFSLVQGSTVPRRS

SEQ ID NO: 89454 - protein, 14 aa, Artificial Sequence
  Description of Artificial Sequence: Synthetic peptide
  Seed: MCSLMQGSTLPRRS
MFSLVQSSTVPRRS

SEQ ID NO: 89455 - protein, 14 aa, Artificial Sequence
  Description of Artificial Sequence: Synthetic peptide
  Seed: MCSLMQGSTLPRRS
MISLLQASTAPRRS

SEQ ID NO: 89456 - protein, 14 aa, Artificial Sequence
  Description of Artificial Sequence: Synthetic peptide
  Seed: MCSLMQGSTLPRRS
MISLLQASTIPRRS

SEQ ID NO: 89457 - protein, 14 aa, Artificial Sequence
  Description of Artificial Sequence: Synthetic peptide
  Seed: MCSLMQGSTLPRRS
MISLLQASTLPRRS

SEQ ID NO: 89458 - protein, 14 aa, Artificial Sequence
  Description of Artificial Sequence: Synthetic peptide
  Seed: MCSLMQGSTLPRRS
MISLLQASTVPRRS

SEQ ID NO: 89459 - protein, 14 aa, Artificial Sequence
  Description of Artificial Sequence: Synthetic peptide
  Seed: MCSLMQGSTLPRRS
MISLLQGSTAPRRS

SEQ ID NO: 89460 - protein, 14 aa, Artificial Sequence
  Description of Artificial Sequence: Synthetic peptide
  Seed: MCSLMQGSTLPRRS
MISLLQGSTIPRRS

SEQ ID NO: 89461 - protein, 14 aa, Artificial Sequence
  Description of Artificial Sequence: Synthetic peptide
  Seed: MCSLMQGSTLPRRS
MISLLQGSTLPRRS

SEQ ID NO: 89462 - protein, 14 aa, Artificial Sequence
  Description of Artificial Sequence: Synthetic peptide
  Seed: MCSLMQGSTLPRRS
MISLLQGSTVPRRS

SEQ ID NO: 89463 - protein, 14 aa, Artificial Sequence
  Description of Artificial Sequence: Synthetic peptide
  Seed: MCSLMQGSTLPRRS
MISLLQSSTAPRRS

SEQ ID NO: 89464 - protein, 14 aa, Artificial Sequence
  Description of Artificial Sequence: Synthetic peptide
  Seed: MCSLMQGSTLPRRS
MISLLQSSTIPRRS

SEQ ID NO: 89465 - protein, 14 aa, Artificial Sequence
  Description of Artificial Sequence: Synthetic peptide
  Seed: MCSLMQGSTLPRRS
MISLLQSSTLPRRS

SEQ ID NO: 89466 - protein, 14 aa, Artificial Sequence
  Description of Artificial Sequence: Synthetic peptide
  Seed: MCSLMQGSTLPRRS
MISLLQSSTVPRRS

SEQ ID NO: 89467 - protein, 14 aa, Artificial Sequence
  Description of Artificial Sequence: Synthetic peptide
  Seed: MCSLMQGSTLPRRS
MISLMQASTAPRRS

SEQ ID NO: 89468 - protein, 14 aa, Artificial Sequence
  Description of Artificial Sequence: Synthetic peptide
  Seed: MCSLMQGSTLPRRS
MISLMQASTIPRRS

SEQ ID NO: 89469 - protein, 14 aa, Artificial Sequence
  Description of Artificial Sequence: Synthetic peptide
  Seed: MCSLMQGSTLPRRS
MISLMQASTLPRRS

SEQ ID NO: 89470 - protein, 14 aa, Artificial Sequence
  Description of Artificial Sequence: Synthetic peptide
  Seed: MCSLMQGSTLPRRS
MISLMQASTVPRRS

SEQ ID NO: 89471 - protein, 14 aa, Artificial Sequence
  Description of Artificial Sequence: Synthetic peptide
  Seed: MCSLMQGSTLPRRS
MISLMQGSTAPRRS

SEQ ID NO: 89472 - protein, 14 aa, Artificial Sequence
  Description of Artificial Sequence: Synthetic peptide
  Seed: MCSLMQGSTLPRRS
MISLMQGSTIPRRS

SEQ ID NO: 89473 - protein, 14 aa, Artificial Sequence
  Description of Artificial Sequence: Synthetic peptide
  Seed: MCSLMQGSTLPRRS
MISLMQGSTLPRRS

SEQ ID NO: 89474 - protein, 14 aa, Artificial Sequence
  Description of Artificial Sequence: Synthetic peptide
  Seed: MCSLMQGSTLPRRS
MISLMQGSTVPRRS

SEQ ID NO: 89475 - protein, 14 aa, Artificial Sequence
  Description of Artificial Sequence: Synthetic peptide
  Seed: MCSLMQGSTLPRRS
MISLMQSSTIPRRS

SEQ ID NO: 89476 - protein, 14 aa, Artificial Sequence
  Description of Artificial Sequence: Synthetic peptide
  Seed: MCSLMQGSTLPRRS
MISLMQSSTLPRRS

SEQ ID NO: 89477 - protein, 14 aa, Artificial Sequence
  Description of Artificial Sequence: Synthetic peptide
  Seed: MCSLMQGSTLPRRS
MISLMQSSTVPRRS

SEQ ID NO: 89478 - protein, 14 aa, Artificial Sequence
  Description of Artificial Sequence: Synthetic peptide
  Seed: MCSLMQGSTLPRRS
MLSLLQASTAPRRS

SEQ ID NO: 89479 - protein, 14 aa, Artificial Sequence
  Description of Artificial Sequence: Synthetic peptide
  Seed: MCSLMQGSTLPRRS
MLSLLQASTIPRRS

SEQ ID NO: 89480 - protein, 14 aa, Artificial Sequence
  Description of Artificial Sequence: Synthetic peptide
  Seed: MCSLMQGSTLPRRS
MLSLLQASTLPRRS

SEQ ID NO: 89481 - protein, 14 aa, Artificial Sequence
  Description of Artificial Sequence: Synthetic peptide
  Seed: MCSLMQGSTLPRRS
MLSLLQASTVPRRS

SEQ ID NO: 89482 - protein, 14 aa, Artificial Sequence
  Description of Artificial Sequence: Synthetic peptide
  Seed: MCSLMQGSTLPRRS
MLSLLQGSTAPRRS

SEQ ID NO: 89483 - protein, 14 aa, Artificial Sequence
  Description of Artificial Sequence: Synthetic peptide
  Seed: MCSLMQGSTLPRRS
MLSLLQGSTIPRRS

SEQ ID NO: 89484 - protein, 14 aa, Artificial Sequence
  Description of Artificial Sequence: Synthetic peptide
  Seed: MCSLMQGSTLPRRS
MLSLLQGSTLPRRS

SEQ ID NO: 89485 - protein, 14 aa, Artificial Sequence
  Description of Artificial Sequence: Synthetic peptide
  Seed: MCSLMQGSTLPRRS
MLSLLQGSTVPRRS

SEQ ID NO: 89486 - protein, 14 aa, Artificial Sequence
  Description of Artificial Sequence: Synthetic peptide
  Seed: MCSLMQGSTLPRRS
MLSLLQSSTVPRRS

SEQ ID NO: 89487 - protein, 14 aa, Artificial Sequence
  Description of Artificial Sequence: Synthetic peptide
  Seed: MCSLMQGSTLPRRS
MLSLMQASTAPRRS

SEQ ID NO: 89488 - protein, 14 aa, Artificial Sequence
  Description of Artificial Sequence: Synthetic peptide
  Seed: MCSLMQGSTLPRRS
MLSLMQASTIPRRS

SEQ ID NO: 89489 - protein, 14 aa, Artificial Sequence
  Description of Artificial Sequence: Synthetic peptide
  Seed: MCSLMQGSTLPRRS
MLSLMQASTLPRRS

SEQ ID NO: 89490 - protein, 14 aa, Artificial Sequence
  Description of Artificial Sequence: Synthetic peptide
  Seed: MCSLMQGSTLPRRS
MLSLMQASTVPRRS

SEQ ID NO: 89491 - protein, 14 aa, Artificial Sequence
  Description of Artificial Sequence: Synthetic peptide
  Seed: MCSLMQGSTLPRRS
MLSLMQGSTIPRRS

SEQ ID NO: 89492 - protein, 14 aa, Artificial Sequence
  Description of Artificial Sequence: Synthetic peptide
  Seed: MCSLMQGSTLPRRS
MLSLMQGSTLPRRS

SEQ ID NO: 89493 - protein, 14 aa, Artificial Sequence
  Description of Artificial Sequence: Synthetic peptide
  Seed: MCSLMQGSTLPRRS
MLSLMQGSTVPRRS

SEQ ID NO: 89494 - protein, 14 aa, Artificial Sequence
  Description of Artificial Sequence: Synthetic peptide
  Seed: MCSLMQGSTLPRRS
MLSLMQSSTVPRRS

SEQ ID NO: 89495 - protein, 14 aa, Artificial Sequence
  Description of Artificial Sequence: Synthetic peptide
  Seed: MCSLMQGSTLPRRS
MWSLLQASTAPRRS

SEQ ID NO: 89496 - protein, 14 aa, Artificial Sequence
  Description of Artificial Sequence: Synthetic peptide
  Seed: MCSLMQGSTLPRRS
MWSLLQASTIPRRS

SEQ ID NO: 89497 - protein, 14 aa, Artificial Sequence
  Description of Artificial Sequence: Synthetic peptide
  Seed: MCSLMQGSTLPRRS
MWSLLQASTLPRRS

SEQ ID NO: 89498 - protein, 14 aa, Artificial Sequence
  Description of Artificial Sequence: Synthetic peptide
  Seed: MCSLMQGSTLPRRS
MWSLLQASTVPRRS

SEQ ID NO: 89499 - protein, 14 aa, Artificial Sequence
  Description of Artificial Sequence: Synthetic peptide
  Seed: MCSLMQGSTLPRRS
MWSLLQGSTAPRRS

SEQ ID NO: 89500 - protein, 14 aa, Artificial Sequence
  Description of Artificial Sequence: Synthetic peptide
  Seed: MCSLMQGSTLPRRS
MWSLLQGSTIPRRS

SEQ ID NO: 89501 - protein, 14 aa, Artificial Sequence
  Description of Artificial Sequence: Synthetic peptide
  Seed: MCSLMQGSTLPRRS
MWSLLQGSTLPRRS

SEQ ID NO: 89502 - protein, 14 aa, Artificial Sequence
  Description of Artificial Sequence: Synthetic peptide
  Seed: MCSLMQGSTLPRRS
MWSLLQGSTVPRRS

SEQ ID NO: 89503 - protein, 14 aa, Artificial Sequence
  Description of Artificial Sequence: Synthetic peptide
  Seed: MCSLMQGSTLPRRS
MWSLLQSSTAPRRS

SEQ ID NO: 89504 - protein, 14 aa, Artificial Sequence
  Description of Artificial Sequence: Synthetic peptide
  Seed: MCSLMQGSTLPRRS
MWSLLQSSTIPRRS

SEQ ID NO: 89505 - protein, 14 aa, Artificial Sequence
  Description of Artificial Sequence: Synthetic peptide
  Seed: MCSLMQGSTLPRRS
MWSLLQSSTLPRRS

SEQ ID NO: 89506 - protein, 14 aa, Artificial Sequence
  Description of Artificial Sequence: Synthetic peptide
  Seed: MCSLMQGSTLPRRS
MWSLLQSSTVPRRS

SEQ ID NO: 89507 - protein, 14 aa, Artificial Sequence
  Description of Artificial Sequence: Synthetic peptide
  Seed: MCSLMQGSTLPRRS
MWSLMQASTAPRRS

SEQ ID NO: 89508 - protein, 14 aa, Artificial Sequence
  Description of Artificial Sequence: Synthetic peptide
  Seed: MCSLMQGSTLPRRS
MWSLMQASTIPRRS

SEQ ID NO: 89509 - protein, 14 aa, Artificial Sequence
  Description of Artificial Sequence: Synthetic peptide
  Seed: MCSLMQGSTLPRRS
MWSLMQASTLPRRS

SEQ ID NO: 89510 - protein, 14 aa, Artificial Sequence
  Description of Artificial Sequence: Synthetic peptide
  Seed: MCSLMQGSTLPRRS
MWSLMQASTVPRRS

SEQ ID NO: 89511 - protein, 14 aa, Artificial Sequence
  Description of Artificial Sequence: Synthetic peptide
  Seed: MCSLMQGSTLPRRS
MWSLMQGSTAPRRS

SEQ ID NO: 89512 - protein, 14 aa, Artificial Sequence
  Description of Artificial Sequence: Synthetic peptide
  Seed: MCSLMQGSTLPRRS
MWSLMQGSTIPRRS

SEQ ID NO: 89513 - protein, 14 aa, Artificial Sequence
  Description of Artificial Sequence: Synthetic peptide
  Seed: MCSLMQGSTLPRRS
MWSLMQGSTLPRRS

SEQ ID NO: 89514 - protein, 14 aa, Artificial Sequence
  Description of Artificial Sequence: Synthetic peptide
  Seed: MCSLMQGSTLPRRS
MWSLMQGSTVPRRS

SEQ ID NO: 89515 - protein, 14 aa, Artificial Sequence
  Description of Artificial Sequence: Synthetic peptide
  Seed: MCSLMQGSTLPRRS
MWSLMQSSTAPRRS

SEQ ID NO: 89516 - protein, 14 aa, Artificial Sequence
  Description of Artificial Sequence: Synthetic peptide
  Seed: MCSLMQGSTLPRRS
MWSLMQSSTIPRRS

SEQ ID NO: 89517 - protein, 14 aa, Artificial Sequence
  Description of Artificial Sequence: Synthetic peptide
  Seed: MCSLMQGSTLPRRS
MWSLMQSSTLPRRS

SEQ ID NO: 89518 - protein, 14 aa, Artificial Sequence
  Description of Artificial Sequence: Synthetic peptide
  Seed: MCSLMQGSTLPRRS
MWSLMQSSTVPRRS

SEQ ID NO: 89519 - protein, 14 aa, Artificial Sequence
  Description of Artificial Sequence: Synthetic peptide
  Seed: MCSLMQGSTLPRRS
MYSLAQASTIPRRS

SEQ ID NO: 89520 - protein, 14 aa, Artificial Sequence
  Description of Artificial Sequence: Synthetic peptide
  Seed: MCSLMQGSTLPRRS
MYSLAQASTLPRRS

SEQ ID NO: 89521 - protein, 14 aa, Artificial Sequence
  Description of Artificial Sequence: Synthetic peptide
  Seed: MCSLMQGSTLPRRS
MYSLAQASTVPRRS

SEQ ID NO: 89522 - protein, 14 aa, Artificial Sequence
  Description of Artificial Sequence: Synthetic peptide
  Seed: MCSLMQGSTLPRRS
MYSLAQGSTLPRRS

SEQ ID NO: 89523 - protein, 14 aa, Artificial Sequence
  Description of Artificial Sequence: Synthetic peptide
  Seed: MCSLMQGSTLPRRS
MYSLAQGSTVPRRS

SEQ ID NO: 89524 - protein, 14 aa, Artificial Sequence
  Description of Artificial Sequence: Synthetic peptide
  Seed: MCSLMQGSTLPRRS
MYSLIQASTAPRRS

SEQ ID NO: 89525 - protein, 14 aa, Artificial Sequence
  Description of Artificial Sequence: Synthetic peptide
  Seed: MCSLMQGSTLPRRS
MYSLIQASTIPRRS

SEQ ID NO: 89526 - protein, 14 aa, Artificial Sequence
  Description of Artificial Sequence: Synthetic peptide
  Seed: MCSLMQGSTLPRRS
MYSLIQASTLPRRS

SEQ ID NO: 89527 - protein, 14 aa, Artificial Sequence
  Description of Artificial Sequence: Synthetic peptide
  Seed: MCSLMQGSTLPRRS
MYSLIQASTVPRRS

SEQ ID NO: 89528 - protein, 14 aa, Artificial Sequence
  Description of Artificial Sequence: Synthetic peptide
  Seed: MCSLMQGSTLPRRS
MYSLIQGSTAPRRS

SEQ ID NO: 89529 - protein, 14 aa, Artificial Sequence
  Description of Artificial Sequence: Synthetic peptide
  Seed: MCSLMQGSTLPRRS
MYSLIQGSTIPRRS

SEQ ID NO: 89530 - protein, 14 aa, Artificial Sequence
  Description of Artificial Sequence: Synthetic peptide
  Seed: MCSLMQGSTLPRRS
MYSLIQGSTLPRRS

SEQ ID NO: 89531 - protein, 14 aa, Artificial Sequence
  Description of Artificial Sequence: Synthetic peptide
  Seed: MCSLMQGSTLPRRS
MYSLIQGSTVPRRS

SEQ ID NO: 89532 - protein, 14 aa, Artificial Sequence
  Description of Artificial Sequence: Synthetic peptide
  Seed: MCSLMQGSTLPRRS
MYSLIQPSTIPRRS

SEQ ID NO: 89533 - protein, 14 aa, Artificial Sequence
  Description of Artificial Sequence: Synthetic peptide
  Seed: MCSLMQGSTLPRRS
MYSLIQPSTLPRRS

SEQ ID NO: 89534 - protein, 14 aa, Artificial Sequence
  Description of Artificial Sequence: Synthetic peptide
  Seed: MCSLMQGSTLPRRS
MYSLIQPSTVPRRS

SEQ ID NO: 89535 - protein, 14 aa, Artificial Sequence
  Description of Artificial Sequence: Synthetic peptide
  Seed: MCSLMQGSTLPRRS
MYSLIQSSTAPRRS

SEQ ID NO: 89536 - protein, 14 aa, Artificial Sequence
  Description of Artificial Sequence: Synthetic peptide
  Seed: MCSLMQGSTLPRRS
MYSLIQSSTIPRRS

SEQ ID NO: 89537 - protein, 14 aa, Artificial Sequence
  Description of Artificial Sequence: Synthetic peptide
  Seed: MCSLMQGSTLPRRS
MYSLIQSSTLPRRS

SEQ ID NO: 89538 - protein, 14 aa, Artificial Sequence
  Description of Artificial Sequence: Synthetic peptide
  Seed: MCSLMQGSTLPRRS
MYSLIQSSTVPRRS

SEQ ID NO: 89539 - protein, 14 aa, Artificial Sequence
  Description of Artificial Sequence: Synthetic peptide
  Seed: MCSLMQGSTLPRRS
MYSLLQASTAPRRS

SEQ ID NO: 89540 - protein, 14 aa, Artificial Sequence
  Description of Artificial Sequence: Synthetic peptide
  Seed: MCSLMQGSTLPRRS
MYSLLQASTIPRRS

SEQ ID NO: 89541 - protein, 14 aa, Artificial Sequence
  Description of Artificial Sequence: Synthetic peptide
  Seed: MCSLMQGSTLPRRS
MYSLLQASTLPRRS

SEQ ID NO: 89542 - protein, 14 aa, Artificial Sequence
  Description of Artificial Sequence: Synthetic peptide
  Seed: MCSLMQGSTLPRRS
MYSLLQASTMPRRS

SEQ ID NO: 89543 - protein, 14 aa, Artificial Sequence
  Description of Artificial Sequence: Synthetic peptide
  Seed: MCSLMQGSTLPRRS
MYSLLQASTSPRRS

SEQ ID NO: 89544 - protein, 14 aa, Artificial Sequence
  Description of Artificial Sequence: Synthetic peptide
  Seed: MCSLMQGSTLPRRS
MYSLLQASTTPRRS

SEQ ID NO: 89545 - protein, 14 aa, Artificial Sequence
  Description of Artificial Sequence: Synthetic peptide
  Seed: MCSLMQGSTLPRRS
MYSLLQASTVPRRS

SEQ ID NO: 89546 - protein, 14 aa, Artificial Sequence
  Description of Artificial Sequence: Synthetic peptide
  Seed: MCSLMQGSTLPRRS
MYSLLQGSTAPRRS

SEQ ID NO: 89547 - protein, 14 aa, Artificial Sequence
  Description of Artificial Sequence: Synthetic peptide
  Seed: MCSLMQGSTLPRRS
MYSLLQGSTIPRRS

SEQ ID NO: 89548 - protein, 14 aa, Artificial Sequence
  Description of Artificial Sequence: Synthetic peptide
  Seed: MCSLMQGSTLPRRS
MYSLLQGSTLPRRS

SEQ ID NO: 89549 - protein, 14 aa, Artificial Sequence
  Description of Artificial Sequence: Synthetic peptide
  Seed: MCSLMQGSTLPRRS
MYSLLQGSTMPRRS

SEQ ID NO: 89550 - protein, 14 aa, Artificial Sequence
  Description of Artificial Sequence: Synthetic peptide
  Seed: MCSLMQGSTLPRRS
MYSLLQGSTSPRRS

SEQ ID NO: 89551 - protein, 14 aa, Artificial Sequence
  Description of Artificial Sequence: Synthetic peptide
  Seed: MCSLMQGSTLPRRS
MYSLLQGSTTPRRS

SEQ ID NO: 89552 - protein, 14 aa, Artificial Sequence
  Description of Artificial Sequence: Synthetic peptide
  Seed: MCSLMQGSTLPRRS
MYSLLQGSTVPRRS

SEQ ID NO: 89553 - protein, 14 aa, Artificial Sequence
  Description of Artificial Sequence: Synthetic peptide
  Seed: MCSLMQGSTLPRRS
MYSLLQNSTIPRRS

SEQ ID NO: 89554 - protein, 14 aa, Artificial Sequence
  Description of Artificial Sequence: Synthetic peptide
  Seed: MCSLMQGSTLPRRS
MYSLLQNSTLPRRS

SEQ ID NO: 89555 - protein, 14 aa, Artificial Sequence
  Description of Artificial Sequence: Synthetic peptide
  Seed: MCSLMQGSTLPRRS
MYSLLQNSTVPRRS

SEQ ID NO: 89556 - protein, 14 aa, Artificial Sequence
  Description of Artificial Sequence: Synthetic peptide
  Seed: MCSLMQGSTLPRRS
MYSLLQPSTAPRRS

SEQ ID NO: 89557 - protein, 14 aa, Artificial Sequence
  Description of Artificial Sequence: Synthetic peptide
  Seed: MCSLMQGSTLPRRS
MYSLLQPSTIPRRS

SEQ ID NO: 89558 - protein, 14 aa, Artificial Sequence
  Description of Artificial Sequence: Synthetic peptide
  Seed: MCSLMQGSTLPRRS
MYSLLQPSTLPRRS

SEQ ID NO: 89559 - protein, 14 aa, Artificial Sequence
  Description of Artificial Sequence: Synthetic peptide
  Seed: MCSLMQGSTLPRRS
MYSLLQPSTMPRRS

SEQ ID NO: 89560 - protein, 14 aa, Artificial Sequence
  Description of Artificial Sequence: Synthetic peptide
  Seed: MCSLMQGSTLPRRS
MYSLLQPSTVPRRS

SEQ ID NO: 89561 - protein, 14 aa, Artificial Sequence
  Description of Artificial Sequence: Synthetic peptide
  Seed: MCSLMQGSTLPRRS
MYSLLQSSTAPRRS

SEQ ID NO: 89562 - protein, 14 aa, Artificial Sequence
  Description of Artificial Sequence: Synthetic peptide
  Seed: MCSLMQGSTLPRRS
MYSLLQSSTIPRRS

SEQ ID NO: 89563 - protein, 14 aa, Artificial Sequence
  Description of Artificial Sequence: Synthetic peptide
  Seed: MCSLMQGSTLPRRS
MYSLLQSSTLPRRS

SEQ ID NO: 89564 - protein, 14 aa, Artificial Sequence
  Description of Artificial Sequence: Synthetic peptide
  Seed: MCSLMQGSTLPRRS
MYSLLQSSTMPRRS

SEQ ID NO: 89565 - protein, 14 aa, Artificial Sequence
  Description of Artificial Sequence: Synthetic peptide
  Seed: MCSLMQGSTLPRRS
MYSLLQSSTSPRRS

SEQ ID NO: 89566 - protein, 14 aa, Artificial Sequence
  Description of Artificial Sequence: Synthetic peptide
  Seed: MCSLMQGSTLPRRS
MYSLLQSSTTPRRS

SEQ ID NO: 89567 - protein, 14 aa, Artificial Sequence
  Description of Artificial Sequence: Synthetic peptide
  Seed: MCSLMQGSTLPRRS
MYSLLQSSTVPRRS

SEQ ID NO: 89568 - protein, 14 aa, Artificial Sequence
  Description of Artificial Sequence: Synthetic peptide
  Seed: MCSLMQGSTLPRRS
MYSLLQTSTAPRRS

SEQ ID NO: 89569 - protein, 14 aa, Artificial Sequence
  Description of Artificial Sequence: Synthetic peptide
  Seed: MCSLMQGSTLPRRS
MYSLLQTSTIPRRS

SEQ ID NO: 89570 - protein, 14 aa, Artificial Sequence
  Description of Artificial Sequence: Synthetic peptide
  Seed: MCSLMQGSTLPRRS
MYSLLQTSTLPRRS

SEQ ID NO: 89571 - protein, 14 aa, Artificial Sequence
  Description of Artificial Sequence: Synthetic peptide
  Seed: MCSLMQGSTLPRRS
MYSLLQTSTVPRRS

SEQ ID NO: 89572 - protein, 14 aa, Artificial Sequence
  Description of Artificial Sequence: Synthetic peptide
  Seed: MCSLMQGSTLPRRS
MYSLMQASTAPRRS

SEQ ID NO: 89573 - protein, 14 aa, Artificial Sequence
  Description of Artificial Sequence: Synthetic peptide
  Seed: MCSLMQGSTLPRRS
MYSLMQASTIPRRS

SEQ ID NO: 89574 - protein, 14 aa, Artificial Sequence
  Description of Artificial Sequence: Synthetic peptide
  Seed: MCSLMQGSTLPRRS
MYSLMQASTLPRRS

SEQ ID NO: 89575 - protein, 14 aa, Artificial Sequence
  Description of Artificial Sequence: Synthetic peptide
  Seed: MCSLMQGSTLPRRS
MYSLMQASTMPRRS

SEQ ID NO: 89576 - protein, 14 aa, Artificial Sequence
  Description of Artificial Sequence: Synthetic peptide
  Seed: MCSLMQGSTLPRRS
MYSLMQASTSPRRS

SEQ ID NO: 89577 - protein, 14 aa, Artificial Sequence
  Description of Artificial Sequence: Synthetic peptide
  Seed: MCSLMQGSTLPRRS
MYSLMQASTTPRRS

SEQ ID NO: 89578 - protein, 14 aa, Artificial Sequence
  Description of Artificial Sequence: Synthetic peptide
  Seed: MCSLMQGSTLPRRS
MYSLMQASTVPRRS

SEQ ID NO: 89579 - protein, 14 aa, Artificial Sequence
  Description of Artificial Sequence: Synthetic peptide
  Seed: MCSLMQGSTLPRRS
MYSLMQGSTAPRRS

SEQ ID NO: 89580 - protein, 14 aa, Artificial Sequence
  Description of Artificial Sequence: Synthetic peptide
  Seed: MCSLMQGSTLPRRS
MYSLMQGSTIPRRS

SEQ ID NO: 89581 - protein, 14 aa, Artificial Sequence
  Description of Artificial Sequence: Synthetic peptide
  Seed: MCSLMQGSTLPRRS
MYSLMQGSTLPRRS

SEQ ID NO: 89582 - protein, 14 aa, Artificial Sequence
  Description of Artificial Sequence: Synthetic peptide
  Seed: MCSLMQGSTLPRRS
MYSLMQGSTMPRRS

SEQ ID NO: 89583 - protein, 14 aa, Artificial Sequence
  Description of Artificial Sequence: Synthetic peptide
  Seed: MCSLMQGSTLPRRS
MYSLMQGSTSPRRS

SEQ ID NO: 89584 - protein, 14 aa, Artificial Sequence
  Description of Artificial Sequence: Synthetic peptide
  Seed: MCSLMQGSTLPRRS
MYSLMQGSTTPRRS

SEQ ID NO: 89585 - protein, 14 aa, Artificial Sequence
  Description of Artificial Sequence: Synthetic peptide
  Seed: MCSLMQGSTLPRRS
MYSLMQGSTVPRRS

SEQ ID NO: 89586 - protein, 14 aa, Artificial Sequence
  Description of Artificial Sequence: Synthetic peptide
  Seed: MCSLMQGSTLPRRS
MYSLMQNSTIPRRS

SEQ ID NO: 89587 - protein, 14 aa, Artificial Sequence
  Description of Artificial Sequence: Synthetic peptide
  Seed: MCSLMQGSTLPRRS
MYSLMQNSTLPRRS

SEQ ID NO: 89588 - protein, 14 aa, Artificial Sequence
  Description of Artificial Sequence: Synthetic peptide
  Seed: MCSLMQGSTLPRRS
MYSLMQNSTVPRRS

SEQ ID NO: 89589 - protein, 14 aa, Artificial Sequence
  Description of Artificial Sequence: Synthetic peptide
  Seed: MCSLMQGSTLPRRS
MYSLMQPSTAPRRS

SEQ ID NO: 89590 - protein, 14 aa, Artificial Sequence
  Description of Artificial Sequence: Synthetic peptide
  Seed: MCSLMQGSTLPRRS
MYSLMQPSTIPRRS

SEQ ID NO: 89591 - protein, 14 aa, Artificial Sequence
  Description of Artificial Sequence: Synthetic peptide
  Seed: MCSLMQGSTLPRRS
MYSLMQPSTLPRRS

SEQ ID NO: 89592 - protein, 14 aa, Artificial Sequence
  Description of Artificial Sequence: Synthetic peptide
  Seed: MCSLMQGSTLPRRS
MYSLMQPSTVPRRS

SEQ ID NO: 89593 - protein, 14 aa, Artificial Sequence
  Description of Artificial Sequence: Synthetic peptide
  Seed: MCSLMQGSTLPRRS
MYSLMQSSTAPRRS

SEQ ID NO: 89594 - protein, 14 aa, Artificial Sequence
  Description of Artificial Sequence: Synthetic peptide
  Seed: MCSLMQGSTLPRRS
MYSLMQSSTIPRRS

SEQ ID NO: 89595 - protein, 14 aa, Artificial Sequence
  Description of Artificial Sequence: Synthetic peptide
  Seed: MCSLMQGSTLPRRS
MYSLMQSSTLPRRS

SEQ ID NO: 89596 - protein, 14 aa, Artificial Sequence
  Description of Artificial Sequence: Synthetic peptide
  Seed: MCSLMQGSTLPRRS
MYSLMQSSTMPRRS

SEQ ID NO: 89597 - protein, 14 aa, Artificial Sequence
  Description of Artificial Sequence: Synthetic peptide
  Seed: MCSLMQGSTLPRRS
MYSLMQSSTTPRRS

SEQ ID NO: 89598 - protein, 14 aa, Artificial Sequence
  Description of Artificial Sequence: Synthetic peptide
  Seed: MCSLMQGSTLPRRS
MYSLMQSSTVPRRS

SEQ ID NO: 89599 - protein, 14 aa, Artificial Sequence
  Description of Artificial Sequence: Synthetic peptide
  Seed: MCSLMQGSTLPRRS
MYSLMQTSTIPRRS

SEQ ID NO: 89600 - protein, 14 aa, Artificial Sequence
  Description of Artificial Sequence: Synthetic peptide
  Seed: MCSLMQGSTLPRRS
MYSLMQTSTLPRRS

SEQ ID NO: 89601 - protein, 14 aa, Artificial Sequence
  Description of Artificial Sequence: Synthetic peptide
  Seed: MCSLMQGSTLPRRS
MYSLMQTSTVPRRS

SEQ ID NO: 89602 - protein, 14 aa, Artificial Sequence
  Description of Artificial Sequence: Synthetic peptide
  Seed: MCSLMQGSTLPRRS
MYSLQQASTIPRRS

SEQ ID NO: 89603 - protein, 14 aa, Artificial Sequence
  Description of Artificial Sequence: Synthetic peptide
  Seed: MCSLMQGSTLPRRS
MYSLQQASTLPRRS

SEQ ID NO: 89604 - protein, 14 aa, Artificial Sequence
  Description of Artificial Sequence: Synthetic peptide
  Seed: MCSLMQGSTLPRRS
MYSLQQASTVPRRS

SEQ ID NO: 89605 - protein, 14 aa, Artificial Sequence
  Description of Artificial Sequence: Synthetic peptide
  Seed: MCSLMQGSTLPRRS
MYSLVQASTIPRRS

SEQ ID NO: 89606 - protein, 14 aa, Artificial Sequence
  Description of Artificial Sequence: Synthetic peptide
  Seed: MCSLMQGSTLPRRS
MYSLVQASTLPRRS

SEQ ID NO: 89607 - protein, 14 aa, Artificial Sequence
  Description of Artificial Sequence: Synthetic peptide
  Seed: MCSLMQGSTLPRRS
MYSLVQASTVPRRS

SEQ ID NO: 89608 - protein, 14 aa, Artificial Sequence
  Description of Artificial Sequence: Synthetic peptide
  Seed: MCSLMQGSTLPRRS
MCSFMQASALPARS

SEQ ID NO: 89609 - protein, 14 aa, Artificial Sequence
  Description of Artificial Sequence: Synthetic peptide
  Seed: MCSLMQGSTLPRRS
MCSFMQASALPGRS

SEQ ID NO: 89610 - protein, 14 aa, Artificial Sequence
  Description of Artificial Sequence: Synthetic peptide
  Seed: MCSLMQGSTLPRRS
MCSFMQASALPIRS

SEQ ID NO: 89611 - protein, 14 aa, Artificial Sequence
  Description of Artificial Sequence: Synthetic peptide
  Seed: MCSLMQGSTLPRRS
MCSFMQASALPLRS

SEQ ID NO: 89612 - protein, 14 aa, Artificial Sequence
  Description of Artificial Sequence: Synthetic peptide
  Seed: MCSLMQGSTLPRRS
MCSFMQASALPMRS

SEQ ID NO: 89613 - protein, 14 aa, Artificial Sequence
  Description of Artificial Sequence: Synthetic peptide
  Seed: MCSLMQGSTLPRRS
MCSFMQASALPNRS

SEQ ID NO: 89614 - protein, 14 aa, Artificial Sequence
  Description of Artificial Sequence: Synthetic peptide
  Seed: MCSLMQGSTLPRRS
MCSFMQASALPQRS

SEQ ID NO: 89615 - protein, 14 aa, Artificial Sequence
  Description of Artificial Sequence: Synthetic peptide
  Seed: MCSLMQGSTLPRRS
MCSFMQASALPSRS

SEQ ID NO: 89616 - protein, 14 aa, Artificial Sequence
  Description of Artificial Sequence: Synthetic peptide
  Seed: MCSLMQGSTLPRRS
MCSFMQASALPTRS

SEQ ID NO: 89617 - protein, 14 aa, Artificial Sequence
  Description of Artificial Sequence: Synthetic peptide
  Seed: MCSLMQGSTLPRRS
MCSFMQASALPVRS

SEQ ID NO: 89618 - protein, 14 aa, Artificial Sequence
  Description of Artificial Sequence: Synthetic peptide
  Seed: MCSLMQGSTLPRRS
MCSFMQASGLPARS

SEQ ID NO: 89619 - protein, 14 aa, Artificial Sequence
  Description of Artificial Sequence: Synthetic peptide
  Seed: MCSLMQGSTLPRRS
MCSFMQASILPARS

SEQ ID NO: 89620 - protein, 14 aa, Artificial Sequence
  Description of Artificial Sequence: Synthetic peptide
  Seed: MCSLMQGSTLPRRS
MCSFMQASILPLRS

SEQ ID NO: 89621 - protein, 14 aa, Artificial Sequence
  Description of Artificial Sequence: Synthetic peptide
  Seed: MCSLMQGSTLPRRS
MCSFMQASILPNRS

SEQ ID NO: 89622 - protein, 14 aa, Artificial Sequence
  Description of Artificial Sequence: Synthetic peptide
  Seed: MCSLMQGSTLPRRS
MCSFMQASILPSRS

SEQ ID NO: 89623 - protein, 14 aa, Artificial Sequence
  Description of Artificial Sequence: Synthetic peptide
  Seed: MCSLMQGSTLPRRS
MCSFMQASILPVRS

SEQ ID NO: 89624 - protein, 14 aa, Artificial Sequence
  Description of Artificial Sequence: Synthetic peptide
  Seed: MCSLMQGSTLPRRS
MCSFMQASPLPARS

SEQ ID NO: 89625 - protein, 14 aa, Artificial Sequence
  Description of Artificial Sequence: Synthetic peptide
  Seed: MCSLMQGSTLPRRS
MCSFMQASPLPIRS

SEQ ID NO: 89626 - protein, 14 aa, Artificial Sequence
  Description of Artificial Sequence: Synthetic peptide
  Seed: MCSLMQGSTLPRRS
MCSFMQASPLPLRS

SEQ ID NO: 89627 - protein, 14 aa, Artificial Sequence
  Description of Artificial Sequence: Synthetic peptide
  Seed: MCSLMQGSTLPRRS
MCSFMQASPLPMRS

SEQ ID NO: 89628 - protein, 14 aa, Artificial Sequence
  Description of Artificial Sequence: Synthetic peptide
  Seed: MCSLMQGSTLPRRS
MCSFMQASPLPNRS

SEQ ID NO: 89629 - protein, 14 aa, Artificial Sequence
  Description of Artificial Sequence: Synthetic peptide
  Seed: MCSLMQGSTLPRRS
MCSFMQASPLPSRS

SEQ ID NO: 89630 - protein, 14 aa, Artificial Sequence
  Description of Artificial Sequence: Synthetic peptide
  Seed: MCSLMQGSTLPRRS
MCSFMQASPLPVRS

SEQ ID NO: 89631 - protein, 14 aa, Artificial Sequence
  Description of Artificial Sequence: Synthetic peptide
  Seed: MCSLMQGSTLPRRS
MCSFMQASSLPARS

SEQ ID NO: 89632 - protein, 14 aa, Artificial Sequence
  Description of Artificial Sequence: Synthetic peptide
  Seed: MCSLMQGSTLPRRS
MCSFMQASSLPIRS

SEQ ID NO: 89633 - protein, 14 aa, Artificial Sequence
  Description of Artificial Sequence: Synthetic peptide
  Seed: MCSLMQGSTLPRRS
MCSFMQASSLPLRS

SEQ ID NO: 89634 - protein, 14 aa, Artificial Sequence
  Description of Artificial Sequence: Synthetic peptide
  Seed: MCSLMQGSTLPRRS
MCSFMQASSLPMRS

SEQ ID NO: 89635 - protein, 14 aa, Artificial Sequence
  Description of Artificial Sequence: Synthetic peptide
  Seed: MCSLMQGSTLPRRS
MCSFMQASSLPNRS

SEQ ID NO: 89636 - protein, 14 aa, Artificial Sequence
  Description of Artificial Sequence: Synthetic peptide
  Seed: MCSLMQGSTLPRRS
MCSFMQASSLPSRS

SEQ ID NO: 89637 - protein, 14 aa, Artificial Sequence
  Description of Artificial Sequence: Synthetic peptide
  Seed: MCSLMQGSTLPRRS
MCSFMQASSLPTRS

SEQ ID NO: 89638 - protein, 14 aa, Artificial Sequence
  Description of Artificial Sequence: Synthetic peptide
  Seed: MCSLMQGSTLPRRS
MCSFMQASSLPVRS

SEQ ID NO: 89639 - protein, 14 aa, Artificial Sequence
  Description of Artificial Sequence: Synthetic peptide
  Seed: MCSLMQGSTLPRRS
MCSFMQASTLPARS

SEQ ID NO: 89640 - protein, 14 aa, Artificial Sequence
  Description of Artificial Sequence: Synthetic peptide
  Seed: MCSLMQGSTLPRRS
MCSFMQASTLPIRS

SEQ ID NO: 89641 - protein, 14 aa, Artificial Sequence
  Description of Artificial Sequence: Synthetic peptide
  Seed: MCSLMQGSTLPRRS
MCSFMQASTLPLRS

SEQ ID NO: 89642 - protein, 14 aa, Artificial Sequence
  Description of Artificial Sequence: Synthetic peptide
  Seed: MCSLMQGSTLPRRS
MCSFMQASTLPMRS

SEQ ID NO: 89643 - protein, 14 aa, Artificial Sequence
  Description of Artificial Sequence: Synthetic peptide
  Seed: MCSLMQGSTLPRRS
MCSFMQASTLPNRS

SEQ ID NO: 89644 - protein, 14 aa, Artificial Sequence
  Description of Artificial Sequence: Synthetic peptide
  Seed: MCSLMQGSTLPRRS
MCSFMQASTLPSRS

SEQ ID NO: 89645 - protein, 14 aa, Artificial Sequence
  Description of Artificial Sequence: Synthetic peptide
  Seed: MCSLMQGSTLPRRS
MCSFMQASTLPTRS

SEQ ID NO: 89646 - protein, 14 aa, Artificial Sequence
  Description of Artificial Sequence: Synthetic peptide
  Seed: MCSLMQGSTLPRRS
MCSFMQASTLPVRS

SEQ ID NO: 89647 - protein, 14 aa, Artificial Sequence
  Description of Artificial Sequence: Synthetic peptide
  Seed: MCSLMQGSTLPRRS
MCSFMQASVLPARS

SEQ ID NO: 89648 - protein, 14 aa, Artificial Sequence
  Description of Artificial Sequence: Synthetic peptide
  Seed: MCSLMQGSTLPRRS
MCSFMQASVLPIRS

SEQ ID NO: 89649 - protein, 14 aa, Artificial Sequence
  Description of Artificial Sequence: Synthetic peptide
  Seed: MCSLMQGSTLPRRS
MCSFMQASVLPLRS

SEQ ID NO: 89650 - protein, 14 aa, Artificial Sequence
  Description of Artificial Sequence: Synthetic peptide
  Seed: MCSLMQGSTLPRRS
MCSFMQASVLPMRS

SEQ ID NO: 89651 - protein, 14 aa, Artificial Sequence
  Description of Artificial Sequence: Synthetic peptide
  Seed: MCSLMQGSTLPRRS
MCSFMQASVLPNRS

SEQ ID NO: 89652 - protein, 14 aa, Artificial Sequence
  Description of Artificial Sequence: Synthetic peptide
  Seed: MCSLMQGSTLPRRS
MCSFMQASVLPSRS

SEQ ID NO: 89653 - protein, 14 aa, Artificial Sequence
  Description of Artificial Sequence: Synthetic peptide
  Seed: MCSLMQGSTLPRRS
MCSFMQASVLPTRS

SEQ ID NO: 89654 - protein, 14 aa, Artificial Sequence
  Description of Artificial Sequence: Synthetic peptide
  Seed: MCSLMQGSTLPRRS
MCSFMQASVLPVRS

SEQ ID NO: 89655 - protein, 14 aa, Artificial Sequence
  Description of Artificial Sequence: Synthetic peptide
  Seed: MCSLMQGSTLPRRS
MCSFMQESALPARS

SEQ ID NO: 89656 - protein, 14 aa, Artificial Sequence
  Description of Artificial Sequence: Synthetic peptide
  Seed: MCSLMQGSTLPRRS
MCSFMQFSALPARS

SEQ ID NO: 89657 - protein, 14 aa, Artificial Sequence
  Description of Artificial Sequence: Synthetic peptide
  Seed: MCSLMQGSTLPRRS
MCSFMQFSALPSRS

SEQ ID NO: 89658 - protein, 14 aa, Artificial Sequence
  Description of Artificial Sequence: Synthetic peptide
  Seed: MCSLMQGSTLPRRS
MCSFMQISALPARS

SEQ ID NO: 89659 - protein, 14 aa, Artificial Sequence
  Description of Artificial Sequence: Synthetic peptide
  Seed: MCSLMQGSTLPRRS
MCSFMQISALPGRS

SEQ ID NO: 89660 - protein, 14 aa, Artificial Sequence
  Description of Artificial Sequence: Synthetic peptide
  Seed: MCSLMQGSTLPRRS
MCSFMQISALPHRS

SEQ ID NO: 89661 - protein, 14 aa, Artificial Sequence
  Description of Artificial Sequence: Synthetic peptide
  Seed: MCSLMQGSTLPRRS
MCSFMQISALPIRS

SEQ ID NO: 89662 - protein, 14 aa, Artificial Sequence
  Description of Artificial Sequence: Synthetic peptide
  Seed: MCSLMQGSTLPRRS
MCSFMQISALPLRS

SEQ ID NO: 89663 - protein, 14 aa, Artificial Sequence
  Description of Artificial Sequence: Synthetic peptide
  Seed: MCSLMQGSTLPRRS
MCSFMQISALPMRS

SEQ ID NO: 89664 - protein, 14 aa, Artificial Sequence
  Description of Artificial Sequence: Synthetic peptide
  Seed: MCSLMQGSTLPRRS
MCSFMQISALPNRS

SEQ ID NO: 89665 - protein, 14 aa, Artificial Sequence
  Description of Artificial Sequence: Synthetic peptide
  Seed: MCSLMQGSTLPRRS
MCSFMQISALPPRS

SEQ ID NO: 89666 - protein, 14 aa, Artificial Sequence
  Description of Artificial Sequence: Synthetic peptide
  Seed: MCSLMQGSTLPRRS
MCSFMQISALPQRS

SEQ ID NO: 89667 - protein, 14 aa, Artificial Sequence
  Description of Artificial Sequence: Synthetic peptide
  Seed: MCSLMQGSTLPRRS
MCSFMQISALPSRS

SEQ ID NO: 89668 - protein, 14 aa, Artificial Sequence
  Description of Artificial Sequence: Synthetic peptide
  Seed: MCSLMQGSTLPRRS
MCSFMQISALPTRS

SEQ ID NO: 89669 - protein, 14 aa, Artificial Sequence
  Description of Artificial Sequence: Synthetic peptide
  Seed: MCSLMQGSTLPRRS
MCSFMQISALPVRS

SEQ ID NO: 89670 - protein, 14 aa, Artificial Sequence
  Description of Artificial Sequence: Synthetic peptide
  Seed: MCSLMQGSTLPRRS
MCSFMQISGLPARS

SEQ ID NO: 89671 - protein, 14 aa, Artificial Sequence
  Description of Artificial Sequence: Synthetic peptide
  Seed: MCSLMQGSTLPRRS
MCSFMQISGLPIRS

SEQ ID NO: 89672 - protein, 14 aa, Artificial Sequence
  Description of Artificial Sequence: Synthetic peptide
  Seed: MCSLMQGSTLPRRS
MCSFMQISGLPLRS

SEQ ID NO: 89673 - protein, 14 aa, Artificial Sequence
  Description of Artificial Sequence: Synthetic peptide
  Seed: MCSLMQGSTLPRRS
MCSFMQISGLPNRS

SEQ ID NO: 89674 - protein, 14 aa, Artificial Sequence
  Description of Artificial Sequence: Synthetic peptide
  Seed: MCSLMQGSTLPRRS
MCSFMQISGLPSRS

SEQ ID NO: 89675 - protein, 14 aa, Artificial Sequence
  Description of Artificial Sequence: Synthetic peptide
  Seed: MCSLMQGSTLPRRS
MCSFMQISGLPTRS

SEQ ID NO: 89676 - protein, 14 aa, Artificial Sequence
  Description of Artificial Sequence: Synthetic peptide
  Seed: MCSLMQGSTLPRRS
MCSFMQISGLPVRS

SEQ ID NO: 89677 - protein, 14 aa, Artificial Sequence
  Description of Artificial Sequence: Synthetic peptide
  Seed: MCSLMQGSTLPRRS
MCSFMQISILPARS

SEQ ID NO: 89678 - protein, 14 aa, Artificial Sequence
  Description of Artificial Sequence: Synthetic peptide
  Seed: MCSLMQGSTLPRRS
MCSFMQISILPLRS

SEQ ID NO: 89679 - protein, 14 aa, Artificial Sequence
  Description of Artificial Sequence: Synthetic peptide
  Seed: MCSLMQGSTLPRRS
MCSFMQISILPNRS

SEQ ID NO: 89680 - protein, 14 aa, Artificial Sequence
  Description of Artificial Sequence: Synthetic peptide
  Seed: MCSLMQGSTLPRRS
MCSFMQISILPSRS

SEQ ID NO: 89681 - protein, 14 aa, Artificial Sequence
  Description of Artificial Sequence: Synthetic peptide
  Seed: MCSLMQGSTLPRRS
MCSFMQISILPTRS

SEQ ID NO: 89682 - protein, 14 aa, Artificial Sequence
  Description of Artificial Sequence: Synthetic peptide
  Seed: MCSLMQGSTLPRRS
MCSFMQISILPVRS

SEQ ID NO: 89683 - protein, 14 aa, Artificial Sequence
  Description of Artificial Sequence: Synthetic peptide
  Seed: MCSLMQGSTLPRRS
MCSFMQISMLPARS

SEQ ID NO: 89684 - protein, 14 aa, Artificial Sequence
  Description of Artificial Sequence: Synthetic peptide
  Seed: MCSLMQGSTLPRRS
MCSFMQISNLPARS

SEQ ID NO: 89685 - protein, 14 aa, Artificial Sequence
  Description of Artificial Sequence: Synthetic peptide
  Seed: MCSLMQGSTLPRRS
MCSFMQISNLPSRS

SEQ ID NO: 89686 - protein, 14 aa, Artificial Sequence
  Description of Artificial Sequence: Synthetic peptide
  Seed: MCSLMQGSTLPRRS
MCSFMQISNLPVRS

SEQ ID NO: 89687 - protein, 14 aa, Artificial Sequence
  Description of Artificial Sequence: Synthetic peptide
  Seed: MCSLMQGSTLPRRS
MCSFMQISPLPARS

SEQ ID NO: 89688 - protein, 14 aa, Artificial Sequence
  Description of Artificial Sequence: Synthetic peptide
  Seed: MCSLMQGSTLPRRS
MCSFMQISPLPGRS

SEQ ID NO: 89689 - protein, 14 aa, Artificial Sequence
  Description of Artificial Sequence: Synthetic peptide
  Seed: MCSLMQGSTLPRRS
MCSFMQISPLPIRS

SEQ ID NO: 89690 - protein, 14 aa, Artificial Sequence
  Description of Artificial Sequence: Synthetic peptide
  Seed: MCSLMQGSTLPRRS
MCSFMQISPLPLRS

SEQ ID NO: 89691 - protein, 14 aa, Artificial Sequence
  Description of Artificial Sequence: Synthetic peptide
  Seed: MCSLMQGSTLPRRS
MCSFMQISPLPMRS

SEQ ID NO: 89692 - protein, 14 aa, Artificial Sequence
  Description of Artificial Sequence: Synthetic peptide
  Seed: MCSLMQGSTLPRRS
MCSFMQISPLPNRS

SEQ ID NO: 89693 - protein, 14 aa, Artificial Sequence
  Description of Artificial Sequence: Synthetic peptide
  Seed: MCSLMQGSTLPRRS
MCSFMQISPLPSRS

SEQ ID NO: 89694 - protein, 14 aa, Artificial Sequence
  Description of Artificial Sequence: Synthetic peptide
  Seed: MCSLMQGSTLPRRS
MCSFMQISPLPTRS

SEQ ID NO: 89695 - protein, 14 aa, Artificial Sequence
  Description of Artificial Sequence: Synthetic peptide
  Seed: MCSLMQGSTLPRRS
MCSFMQISPLPVRS

SEQ ID NO: 89696 - protein, 14 aa, Artificial Sequence
  Description of Artificial Sequence: Synthetic peptide
  Seed: MCSLMQGSTLPRRS
MCSFMQISSLPARS

SEQ ID NO: 89697 - protein, 14 aa, Artificial Sequence
  Description of Artificial Sequence: Synthetic peptide
  Seed: MCSLMQGSTLPRRS
MCSFMQISSLPGRS

SEQ ID NO: 89698 - protein, 14 aa, Artificial Sequence
  Description of Artificial Sequence: Synthetic peptide
  Seed: MCSLMQGSTLPRRS
MCSFMQISSLPIRS

SEQ ID NO: 89699 - protein, 14 aa, Artificial Sequence
  Description of Artificial Sequence: Synthetic peptide
  Seed: MCSLMQGSTLPRRS
MCSFMQISSLPLRS

SEQ ID NO: 89700 - protein, 14 aa, Artificial Sequence
  Description of Artificial Sequence: Synthetic peptide
  Seed: MCSLMQGSTLPRRS
MCSFMQISSLPMRS

SEQ ID NO: 89701 - protein, 14 aa, Artificial Sequence
  Description of Artificial Sequence: Synthetic peptide
  Seed: MCSLMQGSTLPRRS
MCSFMQISSLPNRS

SEQ ID NO: 89702 - protein, 14 aa, Artificial Sequence
  Description of Artificial Sequence: Synthetic peptide
  Seed: MCSLMQGSTLPRRS
MCSFMQISSLPSRS

SEQ ID NO: 89703 - protein, 14 aa, Artificial Sequence
  Description of Artificial Sequence: Synthetic peptide
  Seed: MCSLMQGSTLPRRS
MCSFMQISSLPTRS

SEQ ID NO: 89704 - protein, 14 aa, Artificial Sequence
  Description of Artificial Sequence: Synthetic peptide
  Seed: MCSLMQGSTLPRRS
MCSFMQISSLPVRS

SEQ ID NO: 89705 - protein, 14 aa, Artificial Sequence
  Description of Artificial Sequence: Synthetic peptide
  Seed: MCSLMQGSTLPRRS
MCSFMQISTLPARS

SEQ ID NO: 89706 - protein, 14 aa, Artificial Sequence
  Description of Artificial Sequence: Synthetic peptide
  Seed: MCSLMQGSTLPRRS
MCSFMQISTLPGRS

SEQ ID NO: 89707 - protein, 14 aa, Artificial Sequence
  Description of Artificial Sequence: Synthetic peptide
  Seed: MCSLMQGSTLPRRS
MCSFMQISTLPIRS

SEQ ID NO: 89708 - protein, 14 aa, Artificial Sequence
  Description of Artificial Sequence: Synthetic peptide
  Seed: MCSLMQGSTLPRRS
MCSFMQISTLPLRS

SEQ ID NO: 89709 - protein, 14 aa, Artificial Sequence
  Description of Artificial Sequence: Synthetic peptide
  Seed: MCSLMQGSTLPRRS
MCSFMQISTLPMRS

SEQ ID NO: 89710 - protein, 14 aa, Artificial Sequence
  Description of Artificial Sequence: Synthetic peptide
  Seed: MCSLMQGSTLPRRS
MCSFMQISTLPNRS

SEQ ID NO: 89711 - protein, 14 aa, Artificial Sequence
  Description of Artificial Sequence: Synthetic peptide
  Seed: MCSLMQGSTLPRRS
MCSFMQISTLPSRS

SEQ ID NO: 89712 - protein, 14 aa, Artificial Sequence
  Description of Artificial Sequence: Synthetic peptide
  Seed: MCSLMQGSTLPRRS
MCSFMQISTLPTRS

SEQ ID NO: 89713 - protein, 14 aa, Artificial Sequence
  Description of Artificial Sequence: Synthetic peptide
  Seed: MCSLMQGSTLPRRS
MCSFMQISTLPVRS

SEQ ID NO: 89714 - protein, 14 aa, Artificial Sequence
  Description of Artificial Sequence: Synthetic peptide
  Seed: MCSLMQGSTLPRRS
MCSFMQISVLPARS

SEQ ID NO: 89715 - protein, 14 aa, Artificial Sequence
  Description of Artificial Sequence: Synthetic peptide
  Seed: MCSLMQGSTLPRRS
MCSFMQISVLPGRS

SEQ ID NO: 89716 - protein, 14 aa, Artificial Sequence
  Description of Artificial Sequence: Synthetic peptide
  Seed: MCSLMQGSTLPRRS
MCSFMQISVLPHRS

SEQ ID NO: 89717 - protein, 14 aa, Artificial Sequence
  Description of Artificial Sequence: Synthetic peptide
  Seed: MCSLMQGSTLPRRS
MCSFMQISVLPIRS

SEQ ID NO: 89718 - protein, 14 aa, Artificial Sequence
  Description of Artificial Sequence: Synthetic peptide
  Seed: MCSLMQGSTLPRRS
MCSFMQISVLPLRS

SEQ ID NO: 89719 - protein, 14 aa, Artificial Sequence
  Description of Artificial Sequence: Synthetic peptide
  Seed: MCSLMQGSTLPRRS
MCSFMQISVLPMRS

SEQ ID NO: 89720 - protein, 14 aa, Artificial Sequence
  Description of Artificial Sequence: Synthetic peptide
  Seed: MCSLMQGSTLPRRS
MCSFMQISVLPNRS

SEQ ID NO: 89721 - protein, 14 aa, Artificial Sequence
  Description of Artificial Sequence: Synthetic peptide
  Seed: MCSLMQGSTLPRRS
MCSFMQISVLPSRS

SEQ ID NO: 89722 - protein, 14 aa, Artificial Sequence
  Description of Artificial Sequence: Synthetic peptide
  Seed: MCSLMQGSTLPRRS
MCSFMQISVLPTRS

SEQ ID NO: 89723 - protein, 14 aa, Artificial Sequence
  Description of Artificial Sequence: Synthetic peptide
  Seed: MCSLMQGSTLPRRS
MCSFMQISVLPVRS

SEQ ID NO: 89724 - protein, 14 aa, Artificial Sequence
  Description of Artificial Sequence: Synthetic peptide
  Seed: MCSLMQGSTLPRRS
MCSFMQLSALPARS

SEQ ID NO: 89725 - protein, 14 aa, Artificial Sequence
  Description of Artificial Sequence: Synthetic peptide
  Seed: MCSLMQGSTLPRRS
MCSFMQLSALPDRS

SEQ ID NO: 89726 - protein, 14 aa, Artificial Sequence
  Description of Artificial Sequence: Synthetic peptide
  Seed: MCSLMQGSTLPRRS
MCSFMQLSALPERS

SEQ ID NO: 89727 - protein, 14 aa, Artificial Sequence
  Description of Artificial Sequence: Synthetic peptide
  Seed: MCSLMQGSTLPRRS
MCSFMQLSALPFRS

SEQ ID NO: 89728 - protein, 14 aa, Artificial Sequence
  Description of Artificial Sequence: Synthetic peptide
  Seed: MCSLMQGSTLPRRS
MCSFMQLSALPGRS

SEQ ID NO: 89729 - protein, 14 aa, Artificial Sequence
  Description of Artificial Sequence: Synthetic peptide
  Seed: MCSLMQGSTLPRRS
MCSFMQLSALPHRS

SEQ ID NO: 89730 - protein, 14 aa, Artificial Sequence
  Description of Artificial Sequence: Synthetic peptide
  Seed: MCSLMQGSTLPRRS
MCSFMQLSALPIRS

SEQ ID NO: 89731 - protein, 14 aa, Artificial Sequence
  Description of Artificial Sequence: Synthetic peptide
  Seed: MCSLMQGSTLPRRS
MCSFMQLSALPLRS

SEQ ID NO: 89732 - protein, 14 aa, Artificial Sequence
  Description of Artificial Sequence: Synthetic peptide
  Seed: MCSLMQGSTLPRRS
MCSFMQLSALPMRS

SEQ ID NO: 89733 - protein, 14 aa, Artificial Sequence
  Description of Artificial Sequence: Synthetic peptide
  Seed: MCSLMQGSTLPRRS
MCSFMQLSALPNRS

SEQ ID NO: 89734 - protein, 14 aa, Artificial Sequence
  Description of Artificial Sequence: Synthetic peptide
  Seed: MCSLMQGSTLPRRS
MCSFMQLSALPPRS

SEQ ID NO: 89735 - protein, 14 aa, Artificial Sequence
  Description of Artificial Sequence: Synthetic peptide
  Seed: MCSLMQGSTLPRRS
MCSFMQLSALPQRS

SEQ ID NO: 89736 - protein, 14 aa, Artificial Sequence
  Description of Artificial Sequence: Synthetic peptide
  Seed: MCSLMQGSTLPRRS
MCSFMQLSALPSRS

SEQ ID NO: 89737 - protein, 14 aa, Artificial Sequence
  Description of Artificial Sequence: Synthetic peptide
  Seed: MCSLMQGSTLPRRS
MCSFMQLSALPTRS

SEQ ID NO: 89738 - protein, 14 aa, Artificial Sequence
  Description of Artificial Sequence: Synthetic peptide
  Seed: MCSLMQGSTLPRRS
MCSFMQLSALPVRS

SEQ ID NO: 89739 - protein, 14 aa, Artificial Sequence
  Description of Artificial Sequence: Synthetic peptide
  Seed: MCSLMQGSTLPRRS
MCSFMQLSGLPARS

SEQ ID NO: 89740 - protein, 14 aa, Artificial Sequence
  Description of Artificial Sequence: Synthetic peptide
  Seed: MCSLMQGSTLPRRS
MCSFMQLSGLPIRS

SEQ ID NO: 89741 - protein, 14 aa, Artificial Sequence
  Description of Artificial Sequence: Synthetic peptide
  Seed: MCSLMQGSTLPRRS
MCSFMQLSGLPLRS

SEQ ID NO: 89742 - protein, 14 aa, Artificial Sequence
  Description of Artificial Sequence: Synthetic peptide
  Seed: MCSLMQGSTLPRRS
MCSFMQLSGLPMRS

SEQ ID NO: 89743 - protein, 14 aa, Artificial Sequence
  Description of Artificial Sequence: Synthetic peptide
  Seed: MCSLMQGSTLPRRS
MCSFMQLSGLPNRS

SEQ ID NO: 89744 - protein, 14 aa, Artificial Sequence
  Description of Artificial Sequence: Synthetic peptide
  Seed: MCSLMQGSTLPRRS
MCSFMQLSGLPSRS

SEQ ID NO: 89745 - protein, 14 aa, Artificial Sequence
  Description of Artificial Sequence: Synthetic peptide
  Seed: MCSLMQGSTLPRRS
MCSFMQLSGLPTRS

SEQ ID NO: 89746 - protein, 14 aa, Artificial Sequence
  Description of Artificial Sequence: Synthetic peptide
  Seed: MCSLMQGSTLPRRS
MCSFMQLSGLPVRS

SEQ ID NO: 89747 - protein, 14 aa, Artificial Sequence
  Description of Artificial Sequence: Synthetic peptide
  Seed: MCSLMQGSTLPRRS
MCSFMQLSILPARS

SEQ ID NO: 89748 - protein, 14 aa, Artificial Sequence
  Description of Artificial Sequence: Synthetic peptide
  Seed: MCSLMQGSTLPRRS
MCSFMQLSILPGRS

SEQ ID NO: 89749 - protein, 14 aa, Artificial Sequence
  Description of Artificial Sequence: Synthetic peptide
  Seed: MCSLMQGSTLPRRS
MCSFMQLSILPHRS

SEQ ID NO: 89750 - protein, 14 aa, Artificial Sequence
  Description of Artificial Sequence: Synthetic peptide
  Seed: MCSLMQGSTLPRRS
MCSFMQLSILPIRS

SEQ ID NO: 89751 - protein, 14 aa, Artificial Sequence
  Description of Artificial Sequence: Synthetic peptide
  Seed: MCSLMQGSTLPRRS
MCSFMQLSILPLRS

SEQ ID NO: 89752 - protein, 14 aa, Artificial Sequence
  Description of Artificial Sequence: Synthetic peptide
  Seed: MCSLMQGSTLPRRS
MCSFMQLSILPMRS

SEQ ID NO: 89753 - protein, 14 aa, Artificial Sequence
  Description of Artificial Sequence: Synthetic peptide
  Seed: MCSLMQGSTLPRRS
MCSFMQLSILPNRS

SEQ ID NO: 89754 - protein, 14 aa, Artificial Sequence
  Description of Artificial Sequence: Synthetic peptide
  Seed: MCSLMQGSTLPRRS
MCSFMQLSILPSRS

SEQ ID NO: 89755 - protein, 14 aa, Artificial Sequence
  Description of Artificial Sequence: Synthetic peptide
  Seed: MCSLMQGSTLPRRS
MCSFMQLSILPTRS

SEQ ID NO: 89756 - protein, 14 aa, Artificial Sequence
  Description of Artificial Sequence: Synthetic peptide
  Seed: MCSLMQGSTLPRRS
MCSFMQLSILPVRS

SEQ ID NO: 89757 - protein, 14 aa, Artificial Sequence
  Description of Artificial Sequence: Synthetic peptide
  Seed: MCSLMQGSTLPRRS
MCSFMQLSLLPARS

SEQ ID NO: 89758 - protein, 14 aa, Artificial Sequence
  Description of Artificial Sequence: Synthetic peptide
  Seed: MCSLMQGSTLPRRS
MCSFMQLSMLPARS

SEQ ID NO: 89759 - protein, 14 aa, Artificial Sequence
  Description of Artificial Sequence: Synthetic peptide
  Seed: MCSLMQGSTLPRRS
MCSFMQLSNLPARS

SEQ ID NO: 89760 - protein, 14 aa, Artificial Sequence
  Description of Artificial Sequence: Synthetic peptide
  Seed: MCSLMQGSTLPRRS
MCSFMQLSNLPIRS

SEQ ID NO: 89761 - protein, 14 aa, Artificial Sequence
  Description of Artificial Sequence: Synthetic peptide
  Seed: MCSLMQGSTLPRRS
MCSFMQLSNLPLRS

SEQ ID NO: 89762 - protein, 14 aa, Artificial Sequence
  Description of Artificial Sequence: Synthetic peptide
  Seed: MCSLMQGSTLPRRS
MCSFMQLSNLPMRS

SEQ ID NO: 89763 - protein, 14 aa, Artificial Sequence
  Description of Artificial Sequence: Synthetic peptide
  Seed: MCSLMQGSTLPRRS
MCSFMQLSNLPNRS

SEQ ID NO: 89764 - protein, 14 aa, Artificial Sequence
  Description of Artificial Sequence: Synthetic peptide
  Seed: MCSLMQGSTLPRRS
MCSFMQLSNLPSRS

SEQ ID NO: 89765 - protein, 14 aa, Artificial Sequence
  Description of Artificial Sequence: Synthetic peptide
  Seed: MCSLMQGSTLPRRS
MCSFMQLSNLPTRS

SEQ ID NO: 89766 - protein, 14 aa, Artificial Sequence
  Description of Artificial Sequence: Synthetic peptide
  Seed: MCSLMQGSTLPRRS
MCSFMQLSNLPVRS

SEQ ID NO: 89767 - protein, 14 aa, Artificial Sequence
  Description of Artificial Sequence: Synthetic peptide
  Seed: MCSLMQGSTLPRRS
MCSFMQLSPLPARS

SEQ ID NO: 89768 - protein, 14 aa, Artificial Sequence
  Description of Artificial Sequence: Synthetic peptide
  Seed: MCSLMQGSTLPRRS
MCSFMQLSPLPGRS

SEQ ID NO: 89769 - protein, 14 aa, Artificial Sequence
  Description of Artificial Sequence: Synthetic peptide
  Seed: MCSLMQGSTLPRRS
MCSFMQLSPLPHRS

SEQ ID NO: 89770 - protein, 14 aa, Artificial Sequence
  Description of Artificial Sequence: Synthetic peptide
  Seed: MCSLMQGSTLPRRS
MCSFMQLSPLPIRS

SEQ ID NO: 89771 - protein, 14 aa, Artificial Sequence
  Description of Artificial Sequence: Synthetic peptide
  Seed: MCSLMQGSTLPRRS
MCSFMQLSPLPLRS

SEQ ID NO: 89772 - protein, 14 aa, Artificial Sequence
  Description of Artificial Sequence: Synthetic peptide
  Seed: MCSLMQGSTLPRRS
MCSFMQLSPLPMRS

SEQ ID NO: 89773 - protein, 14 aa, Artificial Sequence
  Description of Artificial Sequence: Synthetic peptide
  Seed: MCSLMQGSTLPRRS
MCSFMQLSPLPNRS

SEQ ID NO: 89774 - protein, 14 aa, Artificial Sequence
  Description of Artificial Sequence: Synthetic peptide
  Seed: MCSLMQGSTLPRRS
MCSFMQLSPLPPRS

SEQ ID NO: 89775 - protein, 14 aa, Artificial Sequence
  Description of Artificial Sequence: Synthetic peptide
  Seed: MCSLMQGSTLPRRS
MCSFMQLSPLPQRS

SEQ ID NO: 89776 - protein, 14 aa, Artificial Sequence
  Description of Artificial Sequence: Synthetic peptide
  Seed: MCSLMQGSTLPRRS
MCSFMQLSPLPSRS

SEQ ID NO: 89777 - protein, 14 aa, Artificial Sequence
  Description of Artificial Sequence: Synthetic peptide
  Seed: MCSLMQGSTLPRRS
MCSFMQLSPLPTRS

SEQ ID NO: 89778 - protein, 14 aa, Artificial Sequence
  Description of Artificial Sequence: Synthetic peptide
  Seed: MCSLMQGSTLPRRS
MCSFMQLSPLPVRS

SEQ ID NO: 89779 - protein, 14 aa, Artificial Sequence
  Description of Artificial Sequence: Synthetic peptide
  Seed: MCSLMQGSTLPRRS
MCSFMQLSSLPARS

SEQ ID NO: 89780 - protein, 14 aa, Artificial Sequence
  Description of Artificial Sequence: Synthetic peptide
  Seed: MCSLMQGSTLPRRS
MCSFMQLSSLPGRS

SEQ ID NO: 89781 - protein, 14 aa, Artificial Sequence
  Description of Artificial Sequence: Synthetic peptide
  Seed: MCSLMQGSTLPRRS
MCSFMQLSSLPHRS

SEQ ID NO: 89782 - protein, 14 aa, Artificial Sequence
  Description of Artificial Sequence: Synthetic peptide
  Seed: MCSLMQGSTLPRRS
MCSFMQLSSLPIRS

SEQ ID NO: 89783 - protein, 14 aa, Artificial Sequence
  Description of Artificial Sequence: Synthetic peptide
  Seed: MCSLMQGSTLPRRS
MCSFMQLSSLPLRS

SEQ ID NO: 89784 - protein, 14 aa, Artificial Sequence
  Description of Artificial Sequence: Synthetic peptide
  Seed: MCSLMQGSTLPRRS
MCSFMQLSSLPMRS

SEQ ID NO: 89785 - protein, 14 aa, Artificial Sequence
  Description of Artificial Sequence: Synthetic peptide
  Seed: MCSLMQGSTLPRRS
MCSFMQLSSLPNRS

SEQ ID NO: 89786 - protein, 14 aa, Artificial Sequence
  Description of Artificial Sequence: Synthetic peptide
  Seed: MCSLMQGSTLPRRS
MCSFMQLSSLPQRS

SEQ ID NO: 89787 - protein, 14 aa, Artificial Sequence
  Description of Artificial Sequence: Synthetic peptide
  Seed: MCSLMQGSTLPRRS
MCSFMQLSSLPSRS

SEQ ID NO: 89788 - protein, 14 aa, Artificial Sequence
  Description of Artificial Sequence: Synthetic peptide
  Seed: MCSLMQGSTLPRRS
MCSFMQLSSLPTRS

SEQ ID NO: 89789 - protein, 14 aa, Artificial Sequence
  Description of Artificial Sequence: Synthetic peptide
  Seed: MCSLMQGSTLPRRS
MCSFMQLSSLPVRS

SEQ ID NO: 89790 - protein, 14 aa, Artificial Sequence
  Description of Artificial Sequence: Synthetic peptide
  Seed: MCSLMQGSTLPRRS
MCSFMQLSTLPARS

SEQ ID NO: 89791 - protein, 14 aa, Artificial Sequence
  Description of Artificial Sequence: Synthetic peptide
  Seed: MCSLMQGSTLPRRS
MCSFMQLSTLPGRS

SEQ ID NO: 89792 - protein, 14 aa, Artificial Sequence
  Description of Artificial Sequence: Synthetic peptide
  Seed: MCSLMQGSTLPRRS
MCSFMQLSTLPHRS

SEQ ID NO: 89793 - protein, 14 aa, Artificial Sequence
  Description of Artificial Sequence: Synthetic peptide
  Seed: MCSLMQGSTLPRRS
MCSFMQLSTLPIRS

SEQ ID NO: 89794 - protein, 14 aa, Artificial Sequence
  Description of Artificial Sequence: Synthetic peptide
  Seed: MCSLMQGSTLPRRS
MCSFMQLSTLPLRS

SEQ ID NO: 89795 - protein, 14 aa, Artificial Sequence
  Description of Artificial Sequence: Synthetic peptide
  Seed: MCSLMQGSTLPRRS
MCSFMQLSTLPMRS

SEQ ID NO: 89796 - protein, 14 aa, Artificial Sequence
  Description of Artificial Sequence: Synthetic peptide
  Seed: MCSLMQGSTLPRRS
MCSFMQLSTLPNRS

SEQ ID NO: 89797 - protein, 14 aa, Artificial Sequence
  Description of Artificial Sequence: Synthetic peptide
  Seed: MCSLMQGSTLPRRS
MCSFMQLSTLPPRS

SEQ ID NO: 89798 - protein, 14 aa, Artificial Sequence
  Description of Artificial Sequence: Synthetic peptide
  Seed: MCSLMQGSTLPRRS
MCSFMQLSTLPQRS

SEQ ID NO: 89799 - protein, 14 aa, Artificial Sequence
  Description of Artificial Sequence: Synthetic peptide
  Seed: MCSLMQGSTLPRRS
MCSFMQLSTLPSRS

SEQ ID NO: 89800 - protein, 14 aa, Artificial Sequence
  Description of Artificial Sequence: Synthetic peptide
  Seed: MCSLMQGSTLPRRS
MCSFMQLSTLPTRS

SEQ ID NO: 89801 - protein, 14 aa, Artificial Sequence
  Description of Artificial Sequence: Synthetic peptide
  Seed: MCSLMQGSTLPRRS
MCSFMQLSTLPVRS

SEQ ID NO: 89802 - protein, 14 aa, Artificial Sequence
  Description of Artificial Sequence: Synthetic peptide
  Seed: MCSLMQGSTLPRRS
MCSFMQLSVLPARS

SEQ ID NO: 89803 - protein, 14 aa, Artificial Sequence
  Description of Artificial Sequence: Synthetic peptide
  Seed: MCSLMQGSTLPRRS
MCSFMQLSVLPGRS

SEQ ID NO: 89804 - protein, 14 aa, Artificial Sequence
  Description of Artificial Sequence: Synthetic peptide
  Seed: MCSLMQGSTLPRRS
MCSFMQLSVLPHRS

SEQ ID NO: 89805 - protein, 14 aa, Artificial Sequence
  Description of Artificial Sequence: Synthetic peptide
  Seed: MCSLMQGSTLPRRS
MCSFMQLSVLPIRS

SEQ ID NO: 89806 - protein, 14 aa, Artificial Sequence
  Description of Artificial Sequence: Synthetic peptide
  Seed: MCSLMQGSTLPRRS
MCSFMQLSVLPLRS

SEQ ID NO: 89807 - protein, 14 aa, Artificial Sequence
  Description of Artificial Sequence: Synthetic peptide
  Seed: MCSLMQGSTLPRRS
MCSFMQLSVLPMRS

SEQ ID NO: 89808 - protein, 14 aa, Artificial Sequence
  Description of Artificial Sequence: Synthetic peptide
  Seed: MCSLMQGSTLPRRS
MCSFMQLSVLPNRS

SEQ ID NO: 89809 - protein, 14 aa, Artificial Sequence
  Description of Artificial Sequence: Synthetic peptide
  Seed: MCSLMQGSTLPRRS
MCSFMQLSVLPPRS

SEQ ID NO: 89810 - protein, 14 aa, Artificial Sequence
  Description of Artificial Sequence: Synthetic peptide
  Seed: MCSLMQGSTLPRRS
MCSFMQLSVLPQRS

SEQ ID NO: 89811 - protein, 14 aa, Artificial Sequence
  Description of Artificial Sequence: Synthetic peptide
  Seed: MCSLMQGSTLPRRS
MCSFMQLSVLPSRS

SEQ ID NO: 89812 - protein, 14 aa, Artificial Sequence
  Description of Artificial Sequence: Synthetic peptide
  Seed: MCSLMQGSTLPRRS
MCSFMQLSVLPTRS

SEQ ID NO: 89813 - protein, 14 aa, Artificial Sequence
  Description of Artificial Sequence: Synthetic peptide
  Seed: MCSLMQGSTLPRRS
MCSFMQLSVLPVRS

SEQ ID NO: 89814 - protein, 14 aa, Artificial Sequence
  Description of Artificial Sequence: Synthetic peptide
  Seed: MCSLMQGSTLPRRS
MCSFMQMSALPARS

SEQ ID NO: 89815 - protein, 14 aa, Artificial Sequence
  Description of Artificial Sequence: Synthetic peptide
  Seed: MCSLMQGSTLPRRS
MCSFMQMSALPDRS

SEQ ID NO: 89816 - protein, 14 aa, Artificial Sequence
  Description of Artificial Sequence: Synthetic peptide
  Seed: MCSLMQGSTLPRRS
MCSFMQMSALPERS

SEQ ID NO: 89817 - protein, 14 aa, Artificial Sequence
  Description of Artificial Sequence: Synthetic peptide
  Seed: MCSLMQGSTLPRRS
MCSFMQMSALPFRS

SEQ ID NO: 89818 - protein, 14 aa, Artificial Sequence
  Description of Artificial Sequence: Synthetic peptide
  Seed: MCSLMQGSTLPRRS
MCSFMQMSALPGRS

SEQ ID NO: 89819 - protein, 14 aa, Artificial Sequence
  Description of Artificial Sequence: Synthetic peptide
  Seed: MCSLMQGSTLPRRS
MCSFMQMSALPHRS

SEQ ID NO: 89820 - protein, 14 aa, Artificial Sequence
  Description of Artificial Sequence: Synthetic peptide
  Seed: MCSLMQGSTLPRRS
MCSFMQMSALPIRS

SEQ ID NO: 89821 - protein, 14 aa, Artificial Sequence
  Description of Artificial Sequence: Synthetic peptide
  Seed: MCSLMQGSTLPRRS
MCSFMQMSALPLRS

SEQ ID NO: 89822 - protein, 14 aa, Artificial Sequence
  Description of Artificial Sequence: Synthetic peptide
  Seed: MCSLMQGSTLPRRS
MCSFMQMSALPMRS

SEQ ID NO: 89823 - protein, 14 aa, Artificial Sequence
  Description of Artificial Sequence: Synthetic peptide
  Seed: MCSLMQGSTLPRRS
MCSFMQMSALPNRS

SEQ ID NO: 89824 - protein, 14 aa, Artificial Sequence
  Description of Artificial Sequence: Synthetic peptide
  Seed: MCSLMQGSTLPRRS
MCSFMQMSALPPRS

SEQ ID NO: 89825 - protein, 14 aa, Artificial Sequence
  Description of Artificial Sequence: Synthetic peptide
  Seed: MCSLMQGSTLPRRS
MCSFMQMSALPQRS

SEQ ID NO: 89826 - protein, 14 aa, Artificial Sequence
  Description of Artificial Sequence: Synthetic peptide
  Seed: MCSLMQGSTLPRRS
MCSFMQMSALPSRS

SEQ ID NO: 89827 - protein, 14 aa, Artificial Sequence
  Description of Artificial Sequence: Synthetic peptide
  Seed: MCSLMQGSTLPRRS
MCSFMQMSALPTRS

SEQ ID NO: 89828 - protein, 14 aa, Artificial Sequence
  Description of Artificial Sequence: Synthetic peptide
  Seed: MCSLMQGSTLPRRS
MCSFMQMSALPVRS

SEQ ID NO: 89829 - protein, 14 aa, Artificial Sequence
  Description of Artificial Sequence: Synthetic peptide
  Seed: MCSLMQGSTLPRRS
MCSFMQMSGLPARS

SEQ ID NO: 89830 - protein, 14 aa, Artificial Sequence
  Description of Artificial Sequence: Synthetic peptide
  Seed: MCSLMQGSTLPRRS
MCSFMQMSGLPIRS

SEQ ID NO: 89831 - protein, 14 aa, Artificial Sequence
  Description of Artificial Sequence: Synthetic peptide
  Seed: MCSLMQGSTLPRRS
MCSFMQMSGLPLRS

SEQ ID NO: 89832 - protein, 14 aa, Artificial Sequence
  Description of Artificial Sequence: Synthetic peptide
  Seed: MCSLMQGSTLPRRS
MCSFMQMSGLPMRS

SEQ ID NO: 89833 - protein, 14 aa, Artificial Sequence
  Description of Artificial Sequence: Synthetic peptide
  Seed: MCSLMQGSTLPRRS
MCSFMQMSGLPNRS

SEQ ID NO: 89834 - protein, 14 aa, Artificial Sequence
  Description of Artificial Sequence: Synthetic peptide
  Seed: MCSLMQGSTLPRRS
MCSFMQMSGLPSRS

SEQ ID NO: 89835 - protein, 14 aa, Artificial Sequence
  Description of Artificial Sequence: Synthetic peptide
  Seed: MCSLMQGSTLPRRS
MCSFMQMSGLPTRS

SEQ ID NO: 89836 - protein, 14 aa, Artificial Sequence
  Description of Artificial Sequence: Synthetic peptide
  Seed: MCSLMQGSTLPRRS
MCSFMQMSGLPVRS

SEQ ID NO: 89837 - protein, 14 aa, Artificial Sequence
  Description of Artificial Sequence: Synthetic peptide
  Seed: MCSLMQGSTLPRRS
MCSFMQMSILPARS

SEQ ID NO: 89838 - protein, 14 aa, Artificial Sequence
  Description of Artificial Sequence: Synthetic peptide
  Seed: MCSLMQGSTLPRRS
MCSFMQMSILPGRS

SEQ ID NO: 89839 - protein, 14 aa, Artificial Sequence
  Description of Artificial Sequence: Synthetic peptide
  Seed: MCSLMQGSTLPRRS
MCSFMQMSILPHRS

SEQ ID NO: 89840 - protein, 14 aa, Artificial Sequence
  Description of Artificial Sequence: Synthetic peptide
  Seed: MCSLMQGSTLPRRS
MCSFMQMSILPIRS

SEQ ID NO: 89841 - protein, 14 aa, Artificial Sequence
  Description of Artificial Sequence: Synthetic peptide
  Seed: MCSLMQGSTLPRRS
MCSFMQMSILPLRS

SEQ ID NO: 89842 - protein, 14 aa, Artificial Sequence
  Description of Artificial Sequence: Synthetic peptide
  Seed: MCSLMQGSTLPRRS
MCSFMQMSILPMRS

SEQ ID NO: 89843 - protein, 14 aa, Artificial Sequence
  Description of Artificial Sequence: Synthetic peptide
  Seed: MCSLMQGSTLPRRS
MCSFMQMSILPNRS

SEQ ID NO: 89844 - protein, 14 aa, Artificial Sequence
  Description of Artificial Sequence: Synthetic peptide
  Seed: MCSLMQGSTLPRRS
MCSFMQMSILPSRS

SEQ ID NO: 89845 - protein, 14 aa, Artificial Sequence
  Description of Artificial Sequence: Synthetic peptide
  Seed: MCSLMQGSTLPRRS
MCSFMQMSILPTRS

SEQ ID NO: 89846 - protein, 14 aa, Artificial Sequence
  Description of Artificial Sequence: Synthetic peptide
  Seed: MCSLMQGSTLPRRS
MCSFMQMSILPVRS

SEQ ID NO: 89847 - protein, 14 aa, Artificial Sequence
  Description of Artificial Sequence: Synthetic peptide
  Seed: MCSLMQGSTLPRRS
MCSFMQMSLLPARS

SEQ ID NO: 89848 - protein, 14 aa, Artificial Sequence
  Description of Artificial Sequence: Synthetic peptide
  Seed: MCSLMQGSTLPRRS
MCSFMQMSLLPNRS

SEQ ID NO: 89849 - protein, 14 aa, Artificial Sequence
  Description of Artificial Sequence: Synthetic peptide
  Seed: MCSLMQGSTLPRRS
MCSFMQMSLLPSRS

SEQ ID NO: 89850 - protein, 14 aa, Artificial Sequence
  Description of Artificial Sequence: Synthetic peptide
  Seed: MCSLMQGSTLPRRS
MCSFMQMSMLPARS

SEQ ID NO: 89851 - protein, 14 aa, Artificial Sequence
  Description of Artificial Sequence: Synthetic peptide
  Seed: MCSLMQGSTLPRRS
MCSFMQMSMLPNRS

SEQ ID NO: 89852 - protein, 14 aa, Artificial Sequence
  Description of Artificial Sequence: Synthetic peptide
  Seed: MCSLMQGSTLPRRS
MCSFMQMSMLPSRS

SEQ ID NO: 89853 - protein, 14 aa, Artificial Sequence
  Description of Artificial Sequence: Synthetic peptide
  Seed: MCSLMQGSTLPRRS
MCSFMQMSNLPARS

SEQ ID NO: 89854 - protein, 14 aa, Artificial Sequence
  Description of Artificial Sequence: Synthetic peptide
  Seed: MCSLMQGSTLPRRS
MCSFMQMSNLPIRS

SEQ ID NO: 89855 - protein, 14 aa, Artificial Sequence
  Description of Artificial Sequence: Synthetic peptide
  Seed: MCSLMQGSTLPRRS
MCSFMQMSNLPLRS

SEQ ID NO: 89856 - protein, 14 aa, Artificial Sequence
  Description of Artificial Sequence: Synthetic peptide
  Seed: MCSLMQGSTLPRRS
MCSFMQMSNLPMRS

SEQ ID NO: 89857 - protein, 14 aa, Artificial Sequence
  Description of Artificial Sequence: Synthetic peptide
  Seed: MCSLMQGSTLPRRS
MCSFMQMSNLPNRS

SEQ ID NO: 89858 - protein, 14 aa, Artificial Sequence
  Description of Artificial Sequence: Synthetic peptide
  Seed: MCSLMQGSTLPRRS
MCSFMQMSNLPSRS

SEQ ID NO: 89859 - protein, 14 aa, Artificial Sequence
  Description of Artificial Sequence: Synthetic peptide
  Seed: MCSLMQGSTLPRRS
MCSFMQMSNLPTRS

SEQ ID NO: 89860 - protein, 14 aa, Artificial Sequence
  Description of Artificial Sequence: Synthetic peptide
  Seed: MCSLMQGSTLPRRS
MCSFMQMSNLPVRS

SEQ ID NO: 89861 - protein, 14 aa, Artificial Sequence
  Description of Artificial Sequence: Synthetic peptide
  Seed: MCSLMQGSTLPRRS
MCSFMQMSPLPARS

SEQ ID NO: 89862 - protein, 14 aa, Artificial Sequence
  Description of Artificial Sequence: Synthetic peptide
  Seed: MCSLMQGSTLPRRS
MCSFMQMSPLPGRS

SEQ ID NO: 89863 - protein, 14 aa, Artificial Sequence
  Description of Artificial Sequence: Synthetic peptide
  Seed: MCSLMQGSTLPRRS
MCSFMQMSPLPHRS

SEQ ID NO: 89864 - protein, 14 aa, Artificial Sequence
  Description of Artificial Sequence: Synthetic peptide
  Seed: MCSLMQGSTLPRRS
MCSFMQMSPLPIRS

SEQ ID NO: 89865 - protein, 14 aa, Artificial Sequence
  Description of Artificial Sequence: Synthetic peptide
  Seed: MCSLMQGSTLPRRS
MCSFMQMSPLPLRS

SEQ ID NO: 89866 - protein, 14 aa, Artificial Sequence
  Description of Artificial Sequence: Synthetic peptide
  Seed: MCSLMQGSTLPRRS
MCSFMQMSPLPMRS

SEQ ID NO: 89867 - protein, 14 aa, Artificial Sequence
  Description of Artificial Sequence: Synthetic peptide
  Seed: MCSLMQGSTLPRRS
MCSFMQMSPLPNRS

SEQ ID NO: 89868 - protein, 14 aa, Artificial Sequence
  Description of Artificial Sequence: Synthetic peptide
  Seed: MCSLMQGSTLPRRS
MCSFMQMSPLPPRS

SEQ ID NO: 89869 - protein, 14 aa, Artificial Sequence
  Description of Artificial Sequence: Synthetic peptide
  Seed: MCSLMQGSTLPRRS
MCSFMQMSPLPQRS

SEQ ID NO: 89870 - protein, 14 aa, Artificial Sequence
  Description of Artificial Sequence: Synthetic peptide
  Seed: MCSLMQGSTLPRRS
MCSFMQMSPLPSRS

SEQ ID NO: 89871 - protein, 14 aa, Artificial Sequence
  Description of Artificial Sequence: Synthetic peptide
  Seed: MCSLMQGSTLPRRS
MCSFMQMSPLPTRS

SEQ ID NO: 89872 - protein, 14 aa, Artificial Sequence
  Description of Artificial Sequence: Synthetic peptide
  Seed: MCSLMQGSTLPRRS
MCSFMQMSPLPVRS

SEQ ID NO: 89873 - protein, 14 aa, Artificial Sequence
  Description of Artificial Sequence: Synthetic peptide
  Seed: MCSLMQGSTLPRRS
MCSFMQMSSLPARS

SEQ ID NO: 89874 - protein, 14 aa, Artificial Sequence
  Description of Artificial Sequence: Synthetic peptide
  Seed: MCSLMQGSTLPRRS
MCSFMQMSSLPGRS

SEQ ID NO: 89875 - protein, 14 aa, Artificial Sequence
  Description of Artificial Sequence: Synthetic peptide
  Seed: MCSLMQGSTLPRRS
MCSFMQMSSLPHRS

SEQ ID NO: 89876 - protein, 14 aa, Artificial Sequence
  Description of Artificial Sequence: Synthetic peptide
  Seed: MCSLMQGSTLPRRS
MCSFMQMSSLPIRS

SEQ ID NO: 89877 - protein, 14 aa, Artificial Sequence
  Description of Artificial Sequence: Synthetic peptide
  Seed: MCSLMQGSTLPRRS
MCSFMQMSSLPLRS

SEQ ID NO: 89878 - protein, 14 aa, Artificial Sequence
  Description of Artificial Sequence: Synthetic peptide
  Seed: MCSLMQGSTLPRRS
MCSFMQMSSLPMRS

SEQ ID NO: 89879 - protein, 14 aa, Artificial Sequence
  Description of Artificial Sequence: Synthetic peptide
  Seed: MCSLMQGSTLPRRS
MCSFMQMSSLPNRS

SEQ ID NO: 89880 - protein, 14 aa, Artificial Sequence
  Description of Artificial Sequence: Synthetic peptide
  Seed: MCSLMQGSTLPRRS
MCSFMQMSSLPQRS

SEQ ID NO: 89881 - protein, 14 aa, Artificial Sequence
  Description of Artificial Sequence: Synthetic peptide
  Seed: MCSLMQGSTLPRRS
MCSFMQMSSLPSRS

SEQ ID NO: 89882 - protein, 14 aa, Artificial Sequence
  Description of Artificial Sequence: Synthetic peptide
  Seed: MCSLMQGSTLPRRS
MCSFMQMSSLPTRS

SEQ ID NO: 89883 - protein, 14 aa, Artificial Sequence
  Description of Artificial Sequence: Synthetic peptide
  Seed: MCSLMQGSTLPRRS
MCSFMQMSSLPVRS

SEQ ID NO: 89884 - protein, 14 aa, Artificial Sequence
  Description of Artificial Sequence: Synthetic peptide
  Seed: MCSLMQGSTLPRRS
MCSFMQMSTLPARS

SEQ ID NO: 89885 - protein, 14 aa, Artificial Sequence
  Description of Artificial Sequence: Synthetic peptide
  Seed: MCSLMQGSTLPRRS
MCSFMQMSTLPGRS

SEQ ID NO: 89886 - protein, 14 aa, Artificial Sequence
  Description of Artificial Sequence: Synthetic peptide
  Seed: MCSLMQGSTLPRRS
MCSFMQMSTLPHRS

SEQ ID NO: 89887 - protein, 14 aa, Artificial Sequence
  Description of Artificial Sequence: Synthetic peptide
  Seed: MCSLMQGSTLPRRS
MCSFMQMSTLPIRS

SEQ ID NO: 89888 - protein, 14 aa, Artificial Sequence
  Description of Artificial Sequence: Synthetic peptide
  Seed: MCSLMQGSTLPRRS
MCSFMQMSTLPLRS

SEQ ID NO: 89889 - protein, 14 aa, Artificial Sequence
  Description of Artificial Sequence: Synthetic peptide
  Seed: MCSLMQGSTLPRRS
MCSFMQMSTLPMRS

SEQ ID NO: 89890 - protein, 14 aa, Artificial Sequence
  Description of Artificial Sequence: Synthetic peptide
  Seed: MCSLMQGSTLPRRS
MCSFMQMSTLPNRS

SEQ ID NO: 89891 - protein, 14 aa, Artificial Sequence
  Description of Artificial Sequence: Synthetic peptide
  Seed: MCSLMQGSTLPRRS
MCSFMQMSTLPQRS

SEQ ID NO: 89892 - protein, 14 aa, Artificial Sequence
  Description of Artificial Sequence: Synthetic peptide
  Seed: MCSLMQGSTLPRRS
MCSFMQMSTLPSRS

SEQ ID NO: 89893 - protein, 14 aa, Artificial Sequence
  Description of Artificial Sequence: Synthetic peptide
  Seed: MCSLMQGSTLPRRS
MCSFMQMSTLPTRS

SEQ ID NO: 89894 - protein, 14 aa, Artificial Sequence
  Description of Artificial Sequence: Synthetic peptide
  Seed: MCSLMQGSTLPRRS
MCSFMQMSTLPVRS

SEQ ID NO: 89895 - protein, 14 aa, Artificial Sequence
  Description of Artificial Sequence: Synthetic peptide
  Seed: MCSLMQGSTLPRRS
MCSFMQMSVLPARS

SEQ ID NO: 89896 - protein, 14 aa, Artificial Sequence
  Description of Artificial Sequence: Synthetic peptide
  Seed: MCSLMQGSTLPRRS
MCSFMQMSVLPGRS

SEQ ID NO: 89897 - protein, 14 aa, Artificial Sequence
  Description of Artificial Sequence: Synthetic peptide
  Seed: MCSLMQGSTLPRRS
MCSFMQMSVLPHRS

SEQ ID NO: 89898 - protein, 14 aa, Artificial Sequence
  Description of Artificial Sequence: Synthetic peptide
  Seed: MCSLMQGSTLPRRS
MCSFMQMSVLPIRS

SEQ ID NO: 89899 - protein, 14 aa, Artificial Sequence
  Description of Artificial Sequence: Synthetic peptide
  Seed: MCSLMQGSTLPRRS
MCSFMQMSVLPLRS

SEQ ID NO: 89900 - protein, 14 aa, Artificial Sequence
  Description of Artificial Sequence: Synthetic peptide
  Seed: MCSLMQGSTLPRRS
MCSFMQMSVLPMRS

SEQ ID NO: 89901 - protein, 14 aa, Artificial Sequence
  Description of Artificial Sequence: Synthetic peptide
  Seed: MCSLMQGSTLPRRS
MCSFMQMSVLPNRS

SEQ ID NO: 89902 - protein, 14 aa, Artificial Sequence
  Description of Artificial Sequence: Synthetic peptide
  Seed: MCSLMQGSTLPRRS
MCSFMQMSVLPPRS

SEQ ID NO: 89903 - protein, 14 aa, Artificial Sequence
  Description of Artificial Sequence: Synthetic peptide
  Seed: MCSLMQGSTLPRRS
MCSFMQMSVLPQRS

SEQ ID NO: 89904 - protein, 14 aa, Artificial Sequence
  Description of Artificial Sequence: Synthetic peptide
  Seed: MCSLMQGSTLPRRS
MCSFMQMSVLPSRS

SEQ ID NO: 89905 - protein, 14 aa, Artificial Sequence
  Description of Artificial Sequence: Synthetic peptide
  Seed: MCSLMQGSTLPRRS
MCSFMQMSVLPTRS

SEQ ID NO: 89906 - protein, 14 aa, Artificial Sequence
  Description of Artificial Sequence: Synthetic peptide
  Seed: MCSLMQGSTLPRRS
MCSFMQMSVLPVRS

SEQ ID NO: 89907 - protein, 14 aa, Artificial Sequence
  Description of Artificial Sequence: Synthetic peptide
  Seed: MCSLMQGSTLPRRS
MCSFMQQSALPARS

SEQ ID NO: 89908 - protein, 14 aa, Artificial Sequence
  Description of Artificial Sequence: Synthetic peptide
  Seed: MCSLMQGSTLPRRS
MCSFMQQSALPLRS

SEQ ID NO: 89909 - protein, 14 aa, Artificial Sequence
  Description of Artificial Sequence: Synthetic peptide
  Seed: MCSLMQGSTLPRRS
MCSFMQQSALPSRS

SEQ ID NO: 89910 - protein, 14 aa, Artificial Sequence
  Description of Artificial Sequence: Synthetic peptide
  Seed: MCSLMQGSTLPRRS
MCSFMQQSALPVRS

SEQ ID NO: 89911 - protein, 14 aa, Artificial Sequence
  Description of Artificial Sequence: Synthetic peptide
  Seed: MCSLMQGSTLPRRS
MCSFMQQSVLPARS

SEQ ID NO: 89912 - protein, 14 aa, Artificial Sequence
  Description of Artificial Sequence: Synthetic peptide
  Seed: MCSLMQGSTLPRRS
MCSFMQSSALPARS

SEQ ID NO: 89913 - protein, 14 aa, Artificial Sequence
  Description of Artificial Sequence: Synthetic peptide
  Seed: MCSLMQGSTLPRRS
MCSFMQSSALPSRS

SEQ ID NO: 89914 - protein, 14 aa, Artificial Sequence
  Description of Artificial Sequence: Synthetic peptide
  Seed: MCSLMQGSTLPRRS
MCSFMQTSALPARS

SEQ ID NO: 89915 - protein, 14 aa, Artificial Sequence
  Description of Artificial Sequence: Synthetic peptide
  Seed: MCSLMQGSTLPRRS
MCSFMQVSALPARS

SEQ ID NO: 89916 - protein, 14 aa, Artificial Sequence
  Description of Artificial Sequence: Synthetic peptide
  Seed: MCSLMQGSTLPRRS
MCSFMQVSALPGRS

SEQ ID NO: 89917 - protein, 14 aa, Artificial Sequence
  Description of Artificial Sequence: Synthetic peptide
  Seed: MCSLMQGSTLPRRS
MCSFMQVSALPIRS

SEQ ID NO: 89918 - protein, 14 aa, Artificial Sequence
  Description of Artificial Sequence: Synthetic peptide
  Seed: MCSLMQGSTLPRRS
MCSFMQVSALPLRS

SEQ ID NO: 89919 - protein, 14 aa, Artificial Sequence
  Description of Artificial Sequence: Synthetic peptide
  Seed: MCSLMQGSTLPRRS
MCSFMQVSALPMRS

SEQ ID NO: 89920 - protein, 14 aa, Artificial Sequence
  Description of Artificial Sequence: Synthetic peptide
  Seed: MCSLMQGSTLPRRS
MCSFMQVSALPNRS

SEQ ID NO: 89921 - protein, 14 aa, Artificial Sequence
  Description of Artificial Sequence: Synthetic peptide
  Seed: MCSLMQGSTLPRRS
MCSFMQVSALPSRS

SEQ ID NO: 89922 - protein, 14 aa, Artificial Sequence
  Description of Artificial Sequence: Synthetic peptide
  Seed: MCSLMQGSTLPRRS
MCSFMQVSALPTRS

SEQ ID NO: 89923 - protein, 14 aa, Artificial Sequence
  Description of Artificial Sequence: Synthetic peptide
  Seed: MCSLMQGSTLPRRS
MCSFMQVSALPVRS

SEQ ID NO: 89924 - protein, 14 aa, Artificial Sequence
  Description of Artificial Sequence: Synthetic peptide
  Seed: MCSLMQGSTLPRRS
MCSFMQVSGLPARS

SEQ ID NO: 89925 - protein, 14 aa, Artificial Sequence
  Description of Artificial Sequence: Synthetic peptide
  Seed: MCSLMQGSTLPRRS
MCSFMQVSILPARS

SEQ ID NO: 89926 - protein, 14 aa, Artificial Sequence
  Description of Artificial Sequence: Synthetic peptide
  Seed: MCSLMQGSTLPRRS
MCSFMQVSPLPARS

SEQ ID NO: 89927 - protein, 14 aa, Artificial Sequence
  Description of Artificial Sequence: Synthetic peptide
  Seed: MCSLMQGSTLPRRS
MCSFMQVSPLPIRS

SEQ ID NO: 89928 - protein, 14 aa, Artificial Sequence
  Description of Artificial Sequence: Synthetic peptide
  Seed: MCSLMQGSTLPRRS
MCSFMQVSPLPLRS

SEQ ID NO: 89929 - protein, 14 aa, Artificial Sequence
  Description of Artificial Sequence: Synthetic peptide
  Seed: MCSLMQGSTLPRRS
MCSFMQVSPLPMRS

SEQ ID NO: 89930 - protein, 14 aa, Artificial Sequence
  Description of Artificial Sequence: Synthetic peptide
  Seed: MCSLMQGSTLPRRS
MCSFMQVSPLPNRS

SEQ ID NO: 89931 - protein, 14 aa, Artificial Sequence
  Description of Artificial Sequence: Synthetic peptide
  Seed: MCSLMQGSTLPRRS
MCSFMQVSPLPSRS

SEQ ID NO: 89932 - protein, 14 aa, Artificial Sequence
  Description of Artificial Sequence: Synthetic peptide
  Seed: MCSLMQGSTLPRRS
MCSFMQVSPLPTRS

SEQ ID NO: 89933 - protein, 14 aa, Artificial Sequence
  Description of Artificial Sequence: Synthetic peptide
  Seed: MCSLMQGSTLPRRS
MCSFMQVSPLPVRS

SEQ ID NO: 89934 - protein, 14 aa, Artificial Sequence
  Description of Artificial Sequence: Synthetic peptide
  Seed: MCSLMQGSTLPRRS
MCSFMQVSSLPARS

SEQ ID NO: 89935 - protein, 14 aa, Artificial Sequence
  Description of Artificial Sequence: Synthetic peptide
  Seed: MCSLMQGSTLPRRS
MCSFMQVSSLPIRS

SEQ ID NO: 89936 - protein, 14 aa, Artificial Sequence
  Description of Artificial Sequence: Synthetic peptide
  Seed: MCSLMQGSTLPRRS
MCSFMQVSSLPLRS

SEQ ID NO: 89937 - protein, 14 aa, Artificial Sequence
  Description of Artificial Sequence: Synthetic peptide
  Seed: MCSLMQGSTLPRRS
MCSFMQVSSLPNRS

SEQ ID NO: 89938 - protein, 14 aa, Artificial Sequence
  Description of Artificial Sequence: Synthetic peptide
  Seed: MCSLMQGSTLPRRS
MCSFMQVSSLPSRS

SEQ ID NO: 89939 - protein, 14 aa, Artificial Sequence
  Description of Artificial Sequence: Synthetic peptide
  Seed: MCSLMQGSTLPRRS
MCSFMQVSSLPTRS

SEQ ID NO: 89940 - protein, 14 aa, Artificial Sequence
  Description of Artificial Sequence: Synthetic peptide
  Seed: MCSLMQGSTLPRRS
MCSFMQVSSLPVRS

SEQ ID NO: 89941 - protein, 14 aa, Artificial Sequence
  Description of Artificial Sequence: Synthetic peptide
  Seed: MCSLMQGSTLPRRS
MCSFMQVSTLPARS

SEQ ID NO: 89942 - protein, 14 aa, Artificial Sequence
  Description of Artificial Sequence: Synthetic peptide
  Seed: MCSLMQGSTLPRRS
MCSFMQVSTLPIRS

SEQ ID NO: 89943 - protein, 14 aa, Artificial Sequence
  Description of Artificial Sequence: Synthetic peptide
  Seed: MCSLMQGSTLPRRS
MCSFMQVSTLPLRS

SEQ ID NO: 89944 - protein, 14 aa, Artificial Sequence
  Description of Artificial Sequence: Synthetic peptide
  Seed: MCSLMQGSTLPRRS
MCSFMQVSTLPMRS

SEQ ID NO: 89945 - protein, 14 aa, Artificial Sequence
  Description of Artificial Sequence: Synthetic peptide
  Seed: MCSLMQGSTLPRRS
MCSFMQVSTLPNRS

SEQ ID NO: 89946 - protein, 14 aa, Artificial Sequence
  Description of Artificial Sequence: Synthetic peptide
  Seed: MCSLMQGSTLPRRS
MCSFMQVSTLPSRS

SEQ ID NO: 89947 - protein, 14 aa, Artificial Sequence
  Description of Artificial Sequence: Synthetic peptide
  Seed: MCSLMQGSTLPRRS
MCSFMQVSTLPTRS

SEQ ID NO: 89948 - protein, 14 aa, Artificial Sequence
  Description of Artificial Sequence: Synthetic peptide
  Seed: MCSLMQGSTLPRRS
MCSFMQVSTLPVRS

SEQ ID NO: 89949 - protein, 14 aa, Artificial Sequence
  Description of Artificial Sequence: Synthetic peptide
  Seed: MCSLMQGSTLPRRS
MCSFMQVSVLPARS

SEQ ID NO: 89950 - protein, 14 aa, Artificial Sequence
  Description of Artificial Sequence: Synthetic peptide
  Seed: MCSLMQGSTLPRRS
MCSFMQVSVLPNRS

SEQ ID NO: 89951 - protein, 14 aa, Artificial Sequence
  Description of Artificial Sequence: Synthetic peptide
  Seed: MCSLMQGSTLPRRS
MCSFMQVSVLPSRS

SEQ ID NO: 89952 - protein, 14 aa, Artificial Sequence
  Description of Artificial Sequence: Synthetic peptide
  Seed: MCSLMQGSTLPRRS
MCSWMQISALPARS

SEQ ID NO: 89953 - protein, 14 aa, Artificial Sequence
  Description of Artificial Sequence: Synthetic peptide
  Seed: MCSLMQGSTLPRRS
MCSWMQLSALPARS

SEQ ID NO: 89954 - protein, 14 aa, Artificial Sequence
  Description of Artificial Sequence: Synthetic peptide
  Seed: MCSLMQGSTLPRRS
MCSWMQLSALPSRS

SEQ ID NO: 89955 - protein, 14 aa, Artificial Sequence
  Description of Artificial Sequence: Synthetic peptide
  Seed: MCSLMQGSTLPRRS
MCSWMQLSPLPARS

SEQ ID NO: 89956 - protein, 14 aa, Artificial Sequence
  Description of Artificial Sequence: Synthetic peptide
  Seed: MCSLMQGSTLPRRS
MCSWMQLSSLPARS

SEQ ID NO: 89957 - protein, 14 aa, Artificial Sequence
  Description of Artificial Sequence: Synthetic peptide
  Seed: MCSLMQGSTLPRRS
MCSWMQLSSLPSRS

SEQ ID NO: 89958 - protein, 14 aa, Artificial Sequence
  Description of Artificial Sequence: Synthetic peptide
  Seed: MCSLMQGSTLPRRS
MCSWMQLSTLPARS

SEQ ID NO: 89959 - protein, 14 aa, Artificial Sequence
  Description of Artificial Sequence: Synthetic peptide
  Seed: MCSLMQGSTLPRRS
MCSWMQMSALPARS

SEQ ID NO: 89960 - protein, 14 aa, Artificial Sequence
  Description of Artificial Sequence: Synthetic peptide
  Seed: MCSLMQGSTLPRRS
MCSWMQMSALPSRS

SEQ ID NO: 89961 - protein, 14 aa, Artificial Sequence
  Description of Artificial Sequence: Synthetic peptide
  Seed: MCSLMQGSTLPRRS
MCSWMQMSSLPARS

SEQ ID NO: 89962 - protein, 14 aa, Artificial Sequence
  Description of Artificial Sequence: Synthetic peptide
  Seed: MCSLMQGSTLPRRS
MCSWMQMSTLPARS

SEQ ID NO: 89963 - protein, 14 aa, Artificial Sequence
  Description of Artificial Sequence: Synthetic peptide
  Seed: MCSLMQGSTLPRRS
MCSYMQASALPARS

SEQ ID NO: 89964 - protein, 14 aa, Artificial Sequence
  Description of Artificial Sequence: Synthetic peptide
  Seed: MCSLMQGSTLPRRS
MCSYMQASALPIRS

SEQ ID NO: 89965 - protein, 14 aa, Artificial Sequence
  Description of Artificial Sequence: Synthetic peptide
  Seed: MCSLMQGSTLPRRS
MCSYMQASALPLRS

SEQ ID NO: 89966 - protein, 14 aa, Artificial Sequence
  Description of Artificial Sequence: Synthetic peptide
  Seed: MCSLMQGSTLPRRS
MCSYMQASALPMRS

SEQ ID NO: 89967 - protein, 14 aa, Artificial Sequence
  Description of Artificial Sequence: Synthetic peptide
  Seed: MCSLMQGSTLPRRS
MCSYMQASALPNRS

SEQ ID NO: 89968 - protein, 14 aa, Artificial Sequence
  Description of Artificial Sequence: Synthetic peptide
  Seed: MCSLMQGSTLPRRS
MCSYMQASALPSRS

SEQ ID NO: 89969 - protein, 14 aa, Artificial Sequence
  Description of Artificial Sequence: Synthetic peptide
  Seed: MCSLMQGSTLPRRS
MCSYMQASALPTRS

SEQ ID NO: 89970 - protein, 14 aa, Artificial Sequence
  Description of Artificial Sequence: Synthetic peptide
  Seed: MCSLMQGSTLPRRS
MCSYMQASALPVRS

SEQ ID NO: 89971 - protein, 14 aa, Artificial Sequence
  Description of Artificial Sequence: Synthetic peptide
  Seed: MCSLMQGSTLPRRS
MCSYMQASILPARS

SEQ ID NO: 89972 - protein, 14 aa, Artificial Sequence
  Description of Artificial Sequence: Synthetic peptide
  Seed: MCSLMQGSTLPRRS
MCSYMQASILPNRS

SEQ ID NO: 89973 - protein, 14 aa, Artificial Sequence
  Description of Artificial Sequence: Synthetic peptide
  Seed: MCSLMQGSTLPRRS
MCSYMQASPLPARS

SEQ ID NO: 89974 - protein, 14 aa, Artificial Sequence
  Description of Artificial Sequence: Synthetic peptide
  Seed: MCSLMQGSTLPRRS
MCSYMQASPLPIRS

SEQ ID NO: 89975 - protein, 14 aa, Artificial Sequence
  Description of Artificial Sequence: Synthetic peptide
  Seed: MCSLMQGSTLPRRS
MCSYMQASPLPLRS

SEQ ID NO: 89976 - protein, 14 aa, Artificial Sequence
  Description of Artificial Sequence: Synthetic peptide
  Seed: MCSLMQGSTLPRRS
MCSYMQASPLPMRS

SEQ ID NO: 89977 - protein, 14 aa, Artificial Sequence
  Description of Artificial Sequence: Synthetic peptide
  Seed: MCSLMQGSTLPRRS
MCSYMQASPLPVRS

SEQ ID NO: 89978 - protein, 14 aa, Artificial Sequence
  Description of Artificial Sequence: Synthetic peptide
  Seed: MCSLMQGSTLPRRS
MCSYMQASSLPARS

SEQ ID NO: 89979 - protein, 14 aa, Artificial Sequence
  Description of Artificial Sequence: Synthetic peptide
  Seed: MCSLMQGSTLPRRS
MCSYMQASSLPIRS

SEQ ID NO: 89980 - protein, 14 aa, Artificial Sequence
  Description of Artificial Sequence: Synthetic peptide
  Seed: MCSLMQGSTLPRRS
MCSYMQASSLPLRS

SEQ ID NO: 89981 - protein, 14 aa, Artificial Sequence
  Description of Artificial Sequence: Synthetic peptide
  Seed: MCSLMQGSTLPRRS
MCSYMQASSLPMRS

SEQ ID NO: 89982 - protein, 14 aa, Artificial Sequence
  Description of Artificial Sequence: Synthetic peptide
  Seed: MCSLMQGSTLPRRS
MCSYMQASSLPSRS

SEQ ID NO: 89983 - protein, 14 aa, Artificial Sequence
  Description of Artificial Sequence: Synthetic peptide
  Seed: MCSLMQGSTLPRRS
MCSYMQASSLPVRS

SEQ ID NO: 89984 - protein, 14 aa, Artificial Sequence
  Description of Artificial Sequence: Synthetic peptide
  Seed: MCSLMQGSTLPRRS
MCSYMQASTLPARS

SEQ ID NO: 89985 - protein, 14 aa, Artificial Sequence
  Description of Artificial Sequence: Synthetic peptide
  Seed: MCSLMQGSTLPRRS
MCSYMQASTLPIRS

SEQ ID NO: 89986 - protein, 14 aa, Artificial Sequence
  Description of Artificial Sequence: Synthetic peptide
  Seed: MCSLMQGSTLPRRS
MCSYMQASTLPLRS

SEQ ID NO: 89987 - protein, 14 aa, Artificial Sequence
  Description of Artificial Sequence: Synthetic peptide
  Seed: MCSLMQGSTLPRRS
MCSYMQASTLPMRS

SEQ ID NO: 89988 - protein, 14 aa, Artificial Sequence
  Description of Artificial Sequence: Synthetic peptide
  Seed: MCSLMQGSTLPRRS
MCSYMQASTLPVRS

SEQ ID NO: 89989 - protein, 14 aa, Artificial Sequence
  Description of Artificial Sequence: Synthetic peptide
  Seed: MCSLMQGSTLPRRS
MCSYMQASVLPARS

SEQ ID NO: 89990 - protein, 14 aa, Artificial Sequence
  Description of Artificial Sequence: Synthetic peptide
  Seed: MCSLMQGSTLPRRS
MCSYMQASVLPIRS

SEQ ID NO: 89991 - protein, 14 aa, Artificial Sequence
  Description of Artificial Sequence: Synthetic peptide
  Seed: MCSLMQGSTLPRRS
MCSYMQASVLPLRS

SEQ ID NO: 89992 - protein, 14 aa, Artificial Sequence
  Description of Artificial Sequence: Synthetic peptide
  Seed: MCSLMQGSTLPRRS
MCSYMQASVLPNRS

SEQ ID NO: 89993 - protein, 14 aa, Artificial Sequence
  Description of Artificial Sequence: Synthetic peptide
  Seed: MCSLMQGSTLPRRS
MCSYMQASVLPSRS

SEQ ID NO: 89994 - protein, 14 aa, Artificial Sequence
  Description of Artificial Sequence: Synthetic peptide
  Seed: MCSLMQGSTLPRRS
MCSYMQASVLPVRS

SEQ ID NO: 89995 - protein, 14 aa, Artificial Sequence
  Description of Artificial Sequence: Synthetic peptide
  Seed: MCSLMQGSTLPRRS
MCSYMQFSALPARS

SEQ ID NO: 89996 - protein, 14 aa, Artificial Sequence
  Description of Artificial Sequence: Synthetic peptide
  Seed: MCSLMQGSTLPRRS
MCSYMQISALPARS

SEQ ID NO: 89997 - protein, 14 aa, Artificial Sequence
  Description of Artificial Sequence: Synthetic peptide
  Seed: MCSLMQGSTLPRRS
MCSYMQISALPGRS

SEQ ID NO: 89998 - protein, 14 aa, Artificial Sequence
  Description of Artificial Sequence: Synthetic peptide
  Seed: MCSLMQGSTLPRRS
MCSYMQISALPIRS

SEQ ID NO: 89999 - protein, 14 aa, Artificial Sequence
  Description of Artificial Sequence: Synthetic peptide
  Seed: MCSLMQGSTLPRRS
MCSYMQISALPLRS

SEQ ID NO: 90000 - protein, 14 aa, Artificial Sequence
  Description of Artificial Sequence: Synthetic peptide
  Seed: MCSLMQGSTLPRRS
MCSYMQISALPMRS

SEQ ID NO: 90001 - protein, 14 aa, Artificial Sequence
  Description of Artificial Sequence: Synthetic peptide
  Seed: MCSLMQGSTLPRRS
MCSYMQISALPNRS

SEQ ID NO: 90002 - protein, 14 aa, Artificial Sequence
  Description of Artificial Sequence: Synthetic peptide
  Seed: MCSLMQGSTLPRRS
MCSYMQISALPSRS

SEQ ID NO: 90003 - protein, 14 aa, Artificial Sequence
  Description of Artificial Sequence: Synthetic peptide
  Seed: MCSLMQGSTLPRRS
MCSYMQISALPTRS

SEQ ID NO: 90004 - protein, 14 aa, Artificial Sequence
  Description of Artificial Sequence: Synthetic peptide
  Seed: MCSLMQGSTLPRRS
MCSYMQISALPVRS

SEQ ID NO: 90005 - protein, 14 aa, Artificial Sequence
  Description of Artificial Sequence: Synthetic peptide
  Seed: MCSLMQGSTLPRRS
MCSYMQISGLPARS

SEQ ID NO: 90006 - protein, 14 aa, Artificial Sequence
  Description of Artificial Sequence: Synthetic peptide
  Seed: MCSLMQGSTLPRRS
MCSYMQISGLPSRS

SEQ ID NO: 90007 - protein, 14 aa, Artificial Sequence
  Description of Artificial Sequence: Synthetic peptide
  Seed: MCSLMQGSTLPRRS
MCSYMQISGLPVRS

SEQ ID NO: 90008 - protein, 14 aa, Artificial Sequence
  Description of Artificial Sequence: Synthetic peptide
  Seed: MCSLMQGSTLPRRS
MCSYMQISILPARS

SEQ ID NO: 90009 - protein, 14 aa, Artificial Sequence
  Description of Artificial Sequence: Synthetic peptide
  Seed: MCSLMQGSTLPRRS
MCSYMQISILPNRS

SEQ ID NO: 90010 - protein, 14 aa, Artificial Sequence
  Description of Artificial Sequence: Synthetic peptide
  Seed: MCSLMQGSTLPRRS
MCSYMQISILPSRS

SEQ ID NO: 90011 - protein, 14 aa, Artificial Sequence
  Description of Artificial Sequence: Synthetic peptide
  Seed: MCSLMQGSTLPRRS
MCSYMQISILPVRS

SEQ ID NO: 90012 - protein, 14 aa, Artificial Sequence
  Description of Artificial Sequence: Synthetic peptide
  Seed: MCSLMQGSTLPRRS
MCSYMQISMLPARS

SEQ ID NO: 90013 - protein, 14 aa, Artificial Sequence
  Description of Artificial Sequence: Synthetic peptide
  Seed: MCSLMQGSTLPRRS
MCSYMQISPLPARS

SEQ ID NO: 90014 - protein, 14 aa, Artificial Sequence
  Description of Artificial Sequence: Synthetic peptide
  Seed: MCSLMQGSTLPRRS
MCSYMQISPLPIRS

SEQ ID NO: 90015 - protein, 14 aa, Artificial Sequence
  Description of Artificial Sequence: Synthetic peptide
  Seed: MCSLMQGSTLPRRS
MCSYMQISPLPLRS

SEQ ID NO: 90016 - protein, 14 aa, Artificial Sequence
  Description of Artificial Sequence: Synthetic peptide
  Seed: MCSLMQGSTLPRRS
MCSYMQISPLPMRS

SEQ ID NO: 90017 - protein, 14 aa, Artificial Sequence
  Description of Artificial Sequence: Synthetic peptide
  Seed: MCSLMQGSTLPRRS
MCSYMQISPLPNRS

SEQ ID NO: 90018 - protein, 14 aa, Artificial Sequence
  Description of Artificial Sequence: Synthetic peptide
  Seed: MCSLMQGSTLPRRS
MCSYMQISPLPSRS

SEQ ID NO: 90019 - protein, 14 aa, Artificial Sequence
  Description of Artificial Sequence: Synthetic peptide
  Seed: MCSLMQGSTLPRRS
MCSYMQISPLPTRS

SEQ ID NO: 90020 - protein, 14 aa, Artificial Sequence
  Description of Artificial Sequence: Synthetic peptide
  Seed: MCSLMQGSTLPRRS
MCSYMQISPLPVRS

SEQ ID NO: 90021 - protein, 14 aa, Artificial Sequence
  Description of Artificial Sequence: Synthetic peptide
  Seed: MCSLMQGSTLPRRS
MCSYMQISSLPARS

SEQ ID NO: 90022 - protein, 14 aa, Artificial Sequence
  Description of Artificial Sequence: Synthetic peptide
  Seed: MCSLMQGSTLPRRS
MCSYMQISSLPIRS

SEQ ID NO: 90023 - protein, 14 aa, Artificial Sequence
  Description of Artificial Sequence: Synthetic peptide
  Seed: MCSLMQGSTLPRRS
MCSYMQISSLPLRS

SEQ ID NO: 90024 - protein, 14 aa, Artificial Sequence
  Description of Artificial Sequence: Synthetic peptide
  Seed: MCSLMQGSTLPRRS
MCSYMQISSLPMRS

SEQ ID NO: 90025 - protein, 14 aa, Artificial Sequence
  Description of Artificial Sequence: Synthetic peptide
  Seed: MCSLMQGSTLPRRS
MCSYMQISSLPNRS

SEQ ID NO: 90026 - protein, 14 aa, Artificial Sequence
  Description of Artificial Sequence: Synthetic peptide
  Seed: MCSLMQGSTLPRRS
MCSYMQISSLPSRS

SEQ ID NO: 90027 - protein, 14 aa, Artificial Sequence
  Description of Artificial Sequence: Synthetic peptide
  Seed: MCSLMQGSTLPRRS
MCSYMQISSLPTRS

SEQ ID NO: 90028 - protein, 14 aa, Artificial Sequence
  Description of Artificial Sequence: Synthetic peptide
  Seed: MCSLMQGSTLPRRS
MCSYMQISSLPVRS

SEQ ID NO: 90029 - protein, 14 aa, Artificial Sequence
  Description of Artificial Sequence: Synthetic peptide
  Seed: MCSLMQGSTLPRRS
MCSYMQISTLPARS

SEQ ID NO: 90030 - protein, 14 aa, Artificial Sequence
  Description of Artificial Sequence: Synthetic peptide
  Seed: MCSLMQGSTLPRRS
MCSYMQISTLPIRS

SEQ ID NO: 90031 - protein, 14 aa, Artificial Sequence
  Description of Artificial Sequence: Synthetic peptide
  Seed: MCSLMQGSTLPRRS
MCSYMQISTLPLRS

SEQ ID NO: 90032 - protein, 14 aa, Artificial Sequence
  Description of Artificial Sequence: Synthetic peptide
  Seed: MCSLMQGSTLPRRS
MCSYMQISTLPMRS

SEQ ID NO: 90033 - protein, 14 aa, Artificial Sequence
  Description of Artificial Sequence: Synthetic peptide
  Seed: MCSLMQGSTLPRRS
MCSYMQISTLPNRS

SEQ ID NO: 90034 - protein, 14 aa, Artificial Sequence
  Description of Artificial Sequence: Synthetic peptide
  Seed: MCSLMQGSTLPRRS
MCSYMQISTLPSRS

SEQ ID NO: 90035 - protein, 14 aa, Artificial Sequence
  Description of Artificial Sequence: Synthetic peptide
  Seed: MCSLMQGSTLPRRS
MCSYMQISTLPTRS

SEQ ID NO: 90036 - protein, 14 aa, Artificial Sequence
  Description of Artificial Sequence: Synthetic peptide
  Seed: MCSLMQGSTLPRRS
MCSYMQISTLPVRS

SEQ ID NO: 90037 - protein, 14 aa, Artificial Sequence
  Description of Artificial Sequence: Synthetic peptide
  Seed: MCSLMQGSTLPRRS
MCSYMQISVLPARS

SEQ ID NO: 90038 - protein, 14 aa, Artificial Sequence
  Description of Artificial Sequence: Synthetic peptide
  Seed: MCSLMQGSTLPRRS
MCSYMQISVLPIRS

SEQ ID NO: 90039 - protein, 14 aa, Artificial Sequence
  Description of Artificial Sequence: Synthetic peptide
  Seed: MCSLMQGSTLPRRS
MCSYMQISVLPLRS

SEQ ID NO: 90040 - protein, 14 aa, Artificial Sequence
  Description of Artificial Sequence: Synthetic peptide
  Seed: MCSLMQGSTLPRRS
MCSYMQISVLPMRS

SEQ ID NO: 90041 - protein, 14 aa, Artificial Sequence
  Description of Artificial Sequence: Synthetic peptide
  Seed: MCSLMQGSTLPRRS
MCSYMQISVLPNRS

SEQ ID NO: 90042 - protein, 14 aa, Artificial Sequence
  Description of Artificial Sequence: Synthetic peptide
  Seed: MCSLMQGSTLPRRS
MCSYMQISVLPSRS

SEQ ID NO: 90043 - protein, 14 aa, Artificial Sequence
  Description of Artificial Sequence: Synthetic peptide
  Seed: MCSLMQGSTLPRRS
MCSYMQISVLPTRS

SEQ ID NO: 90044 - protein, 14 aa, Artificial Sequence
  Description of Artificial Sequence: Synthetic peptide
  Seed: MCSLMQGSTLPRRS
MCSYMQISVLPVRS

SEQ ID NO: 90045 - protein, 14 aa, Artificial Sequence
  Description of Artificial Sequence: Synthetic peptide
  Seed: MCSLMQGSTLPRRS
MCSYMQLSALPARS

SEQ ID NO: 90046 - protein, 14 aa, Artificial Sequence
  Description of Artificial Sequence: Synthetic peptide
  Seed: MCSLMQGSTLPRRS
MCSYMQLSALPGRS

SEQ ID NO: 90047 - protein, 14 aa, Artificial Sequence
  Description of Artificial Sequence: Synthetic peptide
  Seed: MCSLMQGSTLPRRS
MCSYMQLSALPHRS

SEQ ID NO: 90048 - protein, 14 aa, Artificial Sequence
  Description of Artificial Sequence: Synthetic peptide
  Seed: MCSLMQGSTLPRRS
MCSYMQLSALPIRS

SEQ ID NO: 90049 - protein, 14 aa, Artificial Sequence
  Description of Artificial Sequence: Synthetic peptide
  Seed: MCSLMQGSTLPRRS
MCSYMQLSALPLRS

SEQ ID NO: 90050 - protein, 14 aa, Artificial Sequence
  Description of Artificial Sequence: Synthetic peptide
  Seed: MCSLMQGSTLPRRS
MCSYMQLSALPMRS

SEQ ID NO: 90051 - protein, 14 aa, Artificial Sequence
  Description of Artificial Sequence: Synthetic peptide
  Seed: MCSLMQGSTLPRRS
MCSYMQLSALPNRS

SEQ ID NO: 90052 - protein, 14 aa, Artificial Sequence
  Description of Artificial Sequence: Synthetic peptide
  Seed: MCSLMQGSTLPRRS
MCSYMQLSALPPRS

SEQ ID NO: 90053 - protein, 14 aa, Artificial Sequence
  Description of Artificial Sequence: Synthetic peptide
  Seed: MCSLMQGSTLPRRS
MCSYMQLSALPQRS

SEQ ID NO: 90054 - protein, 14 aa, Artificial Sequence
  Description of Artificial Sequence: Synthetic peptide
  Seed: MCSLMQGSTLPRRS
MCSYMQLSALPSRS

SEQ ID NO: 90055 - protein, 14 aa, Artificial Sequence
  Description of Artificial Sequence: Synthetic peptide
  Seed: MCSLMQGSTLPRRS
MCSYMQLSALPTRS

SEQ ID NO: 90056 - protein, 14 aa, Artificial Sequence
  Description of Artificial Sequence: Synthetic peptide
  Seed: MCSLMQGSTLPRRS
MCSYMQLSALPVRS

SEQ ID NO: 90057 - protein, 14 aa, Artificial Sequence
  Description of Artificial Sequence: Synthetic peptide
  Seed: MCSLMQGSTLPRRS
MCSYMQLSGLPARS

SEQ ID NO: 90058 - protein, 14 aa, Artificial Sequence
  Description of Artificial Sequence: Synthetic peptide
  Seed: MCSLMQGSTLPRRS
MCSYMQLSGLPIRS

SEQ ID NO: 90059 - protein, 14 aa, Artificial Sequence
  Description of Artificial Sequence: Synthetic peptide
  Seed: MCSLMQGSTLPRRS
MCSYMQLSGLPLRS

SEQ ID NO: 90060 - protein, 14 aa, Artificial Sequence
  Description of Artificial Sequence: Synthetic peptide
  Seed: MCSLMQGSTLPRRS
MCSYMQLSGLPSRS

SEQ ID NO: 90061 - protein, 14 aa, Artificial Sequence
  Description of Artificial Sequence: Synthetic peptide
  Seed: MCSLMQGSTLPRRS
MCSYMQLSGLPVRS

SEQ ID NO: 90062 - protein, 14 aa, Artificial Sequence
  Description of Artificial Sequence: Synthetic peptide
  Seed: MCSLMQGSTLPRRS
MCSYMQLSILPARS

SEQ ID NO: 90063 - protein, 14 aa, Artificial Sequence
  Description of Artificial Sequence: Synthetic peptide
  Seed: MCSLMQGSTLPRRS
MCSYMQLSILPIRS

SEQ ID NO: 90064 - protein, 14 aa, Artificial Sequence
  Description of Artificial Sequence: Synthetic peptide
  Seed: MCSLMQGSTLPRRS
MCSYMQLSILPLRS

SEQ ID NO: 90065 - protein, 14 aa, Artificial Sequence
  Description of Artificial Sequence: Synthetic peptide
  Seed: MCSLMQGSTLPRRS
MCSYMQLSILPMRS

SEQ ID NO: 90066 - protein, 14 aa, Artificial Sequence
  Description of Artificial Sequence: Synthetic peptide
  Seed: MCSLMQGSTLPRRS
MCSYMQLSILPNRS

SEQ ID NO: 90067 - protein, 14 aa, Artificial Sequence
  Description of Artificial Sequence: Synthetic peptide
  Seed: MCSLMQGSTLPRRS
MCSYMQLSILPSRS

SEQ ID NO: 90068 - protein, 14 aa, Artificial Sequence
  Description of Artificial Sequence: Synthetic peptide
  Seed: MCSLMQGSTLPRRS
MCSYMQLSILPTRS

SEQ ID NO: 90069 - protein, 14 aa, Artificial Sequence
  Description of Artificial Sequence: Synthetic peptide
  Seed: MCSLMQGSTLPRRS
MCSYMQLSILPVRS

SEQ ID NO: 90070 - protein, 14 aa, Artificial Sequence
  Description of Artificial Sequence: Synthetic peptide
  Seed: MCSLMQGSTLPRRS
MCSYMQLSMLPARS

SEQ ID NO: 90071 - protein, 14 aa, Artificial Sequence
  Description of Artificial Sequence: Synthetic peptide
  Seed: MCSLMQGSTLPRRS
MCSYMQLSNLPARS

SEQ ID NO: 90072 - protein, 14 aa, Artificial Sequence
  Description of Artificial Sequence: Synthetic peptide
  Seed: MCSLMQGSTLPRRS
MCSYMQLSNLPVRS

SEQ ID NO: 90073 - protein, 14 aa, Artificial Sequence
  Description of Artificial Sequence: Synthetic peptide
  Seed: MCSLMQGSTLPRRS
MCSYMQLSPLPARS

SEQ ID NO: 90074 - protein, 14 aa, Artificial Sequence
  Description of Artificial Sequence: Synthetic peptide
  Seed: MCSLMQGSTLPRRS
MCSYMQLSPLPIRS

SEQ ID NO: 90075 - protein, 14 aa, Artificial Sequence
  Description of Artificial Sequence: Synthetic peptide
  Seed: MCSLMQGSTLPRRS
MCSYMQLSPLPLRS

SEQ ID NO: 90076 - protein, 14 aa, Artificial Sequence
  Description of Artificial Sequence: Synthetic peptide
  Seed: MCSLMQGSTLPRRS
MCSYMQLSPLPMRS

SEQ ID NO: 90077 - protein, 14 aa, Artificial Sequence
  Description of Artificial Sequence: Synthetic peptide
  Seed: MCSLMQGSTLPRRS
MCSYMQLSPLPNRS

SEQ ID NO: 90078 - protein, 14 aa, Artificial Sequence
  Description of Artificial Sequence: Synthetic peptide
  Seed: MCSLMQGSTLPRRS
MCSYMQLSPLPSRS

SEQ ID NO: 90079 - protein, 14 aa, Artificial Sequence
  Description of Artificial Sequence: Synthetic peptide
  Seed: MCSLMQGSTLPRRS
MCSYMQLSPLPTRS

SEQ ID NO: 90080 - protein, 14 aa, Artificial Sequence
  Description of Artificial Sequence: Synthetic peptide
  Seed: MCSLMQGSTLPRRS
MCSYMQLSPLPVRS

SEQ ID NO: 90081 - protein, 14 aa, Artificial Sequence
  Description of Artificial Sequence: Synthetic peptide
  Seed: MCSLMQGSTLPRRS
MCSYMQLSSLPARS

SEQ ID NO: 90082 - protein, 14 aa, Artificial Sequence
  Description of Artificial Sequence: Synthetic peptide
  Seed: MCSLMQGSTLPRRS
MCSYMQLSSLPIRS

SEQ ID NO: 90083 - protein, 14 aa, Artificial Sequence
  Description of Artificial Sequence: Synthetic peptide
  Seed: MCSLMQGSTLPRRS
MCSYMQLSSLPLRS

SEQ ID NO: 90084 - protein, 14 aa, Artificial Sequence
  Description of Artificial Sequence: Synthetic peptide
  Seed: MCSLMQGSTLPRRS
MCSYMQLSSLPMRS

SEQ ID NO: 90085 - protein, 14 aa, Artificial Sequence
  Description of Artificial Sequence: Synthetic peptide
  Seed: MCSLMQGSTLPRRS
MCSYMQLSSLPNRS

SEQ ID NO: 90086 - protein, 14 aa, Artificial Sequence
  Description of Artificial Sequence: Synthetic peptide
  Seed: MCSLMQGSTLPRRS
MCSYMQLSSLPSRS

SEQ ID NO: 90087 - protein, 14 aa, Artificial Sequence
  Description of Artificial Sequence: Synthetic peptide
  Seed: MCSLMQGSTLPRRS
MCSYMQLSSLPTRS

SEQ ID NO: 90088 - protein, 14 aa, Artificial Sequence
  Description of Artificial Sequence: Synthetic peptide
  Seed: MCSLMQGSTLPRRS
MCSYMQLSSLPVRS

SEQ ID NO: 90089 - protein, 14 aa, Artificial Sequence
  Description of Artificial Sequence: Synthetic peptide
  Seed: MCSLMQGSTLPRRS
MCSYMQLSTLPARS

SEQ ID NO: 90090 - protein, 14 aa, Artificial Sequence
  Description of Artificial Sequence: Synthetic peptide
  Seed: MCSLMQGSTLPRRS
MCSYMQLSTLPIRS

SEQ ID NO: 90091 - protein, 14 aa, Artificial Sequence
  Description of Artificial Sequence: Synthetic peptide
  Seed: MCSLMQGSTLPRRS
MCSYMQLSTLPLRS

SEQ ID NO: 90092 - protein, 14 aa, Artificial Sequence
  Description of Artificial Sequence: Synthetic peptide
  Seed: MCSLMQGSTLPRRS
MCSYMQLSTLPMRS

SEQ ID NO: 90093 - protein, 14 aa, Artificial Sequence
  Description of Artificial Sequence: Synthetic peptide
  Seed: MCSLMQGSTLPRRS
MCSYMQLSTLPNRS

SEQ ID NO: 90094 - protein, 14 aa, Artificial Sequence
  Description of Artificial Sequence: Synthetic peptide
  Seed: MCSLMQGSTLPRRS
MCSYMQLSTLPSRS

SEQ ID NO: 90095 - protein, 14 aa, Artificial Sequence
  Description of Artificial Sequence: Synthetic peptide
  Seed: MCSLMQGSTLPRRS
MCSYMQLSTLPTRS

SEQ ID NO: 90096 - protein, 14 aa, Artificial Sequence
  Description of Artificial Sequence: Synthetic peptide
  Seed: MCSLMQGSTLPRRS
MCSYMQLSTLPVRS

SEQ ID NO: 90097 - protein, 14 aa, Artificial Sequence
  Description of Artificial Sequence: Synthetic peptide
  Seed: MCSLMQGSTLPRRS
MCSYMQLSVLPARS

SEQ ID NO: 90098 - protein, 14 aa, Artificial Sequence
  Description of Artificial Sequence: Synthetic peptide
  Seed: MCSLMQGSTLPRRS
MCSYMQLSVLPIRS

SEQ ID NO: 90099 - protein, 14 aa, Artificial Sequence
  Description of Artificial Sequence: Synthetic peptide
  Seed: MCSLMQGSTLPRRS
MCSYMQLSVLPLRS

SEQ ID NO: 90100 - protein, 14 aa, Artificial Sequence
  Description of Artificial Sequence: Synthetic peptide
  Seed: MCSLMQGSTLPRRS
MCSYMQLSVLPMRS

SEQ ID NO: 90101 - protein, 14 aa, Artificial Sequence
  Description of Artificial Sequence: Synthetic peptide
  Seed: MCSLMQGSTLPRRS
MCSYMQLSVLPNRS

SEQ ID NO: 90102 - protein, 14 aa, Artificial Sequence
  Description of Artificial Sequence: Synthetic peptide
  Seed: MCSLMQGSTLPRRS
MCSYMQLSVLPSRS

SEQ ID NO: 90103 - protein, 14 aa, Artificial Sequence
  Description of Artificial Sequence: Synthetic peptide
  Seed: MCSLMQGSTLPRRS
MCSYMQLSVLPTRS

SEQ ID NO: 90104 - protein, 14 aa, Artificial Sequence
  Description of Artificial Sequence: Synthetic peptide
  Seed: MCSLMQGSTLPRRS
MCSYMQLSVLPVRS

SEQ ID NO: 90105 - protein, 14 aa, Artificial Sequence
  Description of Artificial Sequence: Synthetic peptide
  Seed: MCSLMQGSTLPRRS
MCSYMQMSALPARS

SEQ ID NO: 90106 - protein, 14 aa, Artificial Sequence
  Description of Artificial Sequence: Synthetic peptide
  Seed: MCSLMQGSTLPRRS
MCSYMQMSALPHRS

SEQ ID NO: 90107 - protein, 14 aa, Artificial Sequence
  Description of Artificial Sequence: Synthetic peptide
  Seed: MCSLMQGSTLPRRS
MCSYMQMSALPIRS

SEQ ID NO: 90108 - protein, 14 aa, Artificial Sequence
  Description of Artificial Sequence: Synthetic peptide
  Seed: MCSLMQGSTLPRRS
MCSYMQMSALPLRS

SEQ ID NO: 90109 - protein, 14 aa, Artificial Sequence
  Description of Artificial Sequence: Synthetic peptide
  Seed: MCSLMQGSTLPRRS
MCSYMQMSALPMRS

SEQ ID NO: 90110 - protein, 14 aa, Artificial Sequence
  Description of Artificial Sequence: Synthetic peptide
  Seed: MCSLMQGSTLPRRS
MCSYMQMSALPNRS

SEQ ID NO: 90111 - protein, 14 aa, Artificial Sequence
  Description of Artificial Sequence: Synthetic peptide
  Seed: MCSLMQGSTLPRRS
MCSYMQMSALPPRS

SEQ ID NO: 90112 - protein, 14 aa, Artificial Sequence
  Description of Artificial Sequence: Synthetic peptide
  Seed: MCSLMQGSTLPRRS
MCSYMQMSALPQRS

SEQ ID NO: 90113 - protein, 14 aa, Artificial Sequence
  Description of Artificial Sequence: Synthetic peptide
  Seed: MCSLMQGSTLPRRS
MCSYMQMSALPSRS

SEQ ID NO: 90114 - protein, 14 aa, Artificial Sequence
  Description of Artificial Sequence: Synthetic peptide
  Seed: MCSLMQGSTLPRRS
MCSYMQMSALPTRS

SEQ ID NO: 90115 - protein, 14 aa, Artificial Sequence
  Description of Artificial Sequence: Synthetic peptide
  Seed: MCSLMQGSTLPRRS
MCSYMQMSALPVRS

SEQ ID NO: 90116 - protein, 14 aa, Artificial Sequence
  Description of Artificial Sequence: Synthetic peptide
  Seed: MCSLMQGSTLPRRS
MCSYMQMSGLPARS

SEQ ID NO: 90117 - protein, 14 aa, Artificial Sequence
  Description of Artificial Sequence: Synthetic peptide
  Seed: MCSLMQGSTLPRRS
MCSYMQMSGLPIRS

SEQ ID NO: 90118 - protein, 14 aa, Artificial Sequence
  Description of Artificial Sequence: Synthetic peptide
  Seed: MCSLMQGSTLPRRS
MCSYMQMSGLPLRS

SEQ ID NO: 90119 - protein, 14 aa, Artificial Sequence
  Description of Artificial Sequence: Synthetic peptide
  Seed: MCSLMQGSTLPRRS
MCSYMQMSGLPSRS

SEQ ID NO: 90120 - protein, 14 aa, Artificial Sequence
  Description of Artificial Sequence: Synthetic peptide
  Seed: MCSLMQGSTLPRRS
MCSYMQMSGLPVRS

SEQ ID NO: 90121 - protein, 14 aa, Artificial Sequence
  Description of Artificial Sequence: Synthetic peptide
  Seed: MCSLMQGSTLPRRS
MCSYMQMSILPARS

SEQ ID NO: 90122 - protein, 14 aa, Artificial Sequence
  Description of Artificial Sequence: Synthetic peptide
  Seed: MCSLMQGSTLPRRS
MCSYMQMSILPIRS

SEQ ID NO: 90123 - protein, 14 aa, Artificial Sequence
  Description of Artificial Sequence: Synthetic peptide
  Seed: MCSLMQGSTLPRRS
MCSYMQMSILPLRS

SEQ ID NO: 90124 - protein, 14 aa, Artificial Sequence
  Description of Artificial Sequence: Synthetic peptide
  Seed: MCSLMQGSTLPRRS
MCSYMQMSILPMRS

SEQ ID NO: 90125 - protein, 14 aa, Artificial Sequence
  Description of Artificial Sequence: Synthetic peptide
  Seed: MCSLMQGSTLPRRS
MCSYMQMSILPNRS

SEQ ID NO: 90126 - protein, 14 aa, Artificial Sequence
  Description of Artificial Sequence: Synthetic peptide
  Seed: MCSLMQGSTLPRRS
MCSYMQMSILPSRS

SEQ ID NO: 90127 - protein, 14 aa, Artificial Sequence
  Description of Artificial Sequence: Synthetic peptide
  Seed: MCSLMQGSTLPRRS
MCSYMQMSILPTRS

SEQ ID NO: 90128 - protein, 14 aa, Artificial Sequence
  Description of Artificial Sequence: Synthetic peptide
  Seed: MCSLMQGSTLPRRS
MCSYMQMSILPVRS

SEQ ID NO: 90129 - protein, 14 aa, Artificial Sequence
  Description of Artificial Sequence: Synthetic peptide
  Seed: MCSLMQGSTLPRRS
MCSYMQMSLLPARS

SEQ ID NO: 90130 - protein, 14 aa, Artificial Sequence
  Description of Artificial Sequence: Synthetic peptide
  Seed: MCSLMQGSTLPRRS
MCSYMQMSMLPARS

SEQ ID NO: 90131 - protein, 14 aa, Artificial Sequence
  Description of Artificial Sequence: Synthetic peptide
  Seed: MCSLMQGSTLPRRS
MCSYMQMSNLPARS

SEQ ID NO: 90132 - protein, 14 aa, Artificial Sequence
  Description of Artificial Sequence: Synthetic peptide
  Seed: MCSLMQGSTLPRRS
MCSYMQMSNLPVRS

SEQ ID NO: 90133 - protein, 14 aa, Artificial Sequence
  Description of Artificial Sequence: Synthetic peptide
  Seed: MCSLMQGSTLPRRS
MCSYMQMSPLPARS

SEQ ID NO: 90134 - protein, 14 aa, Artificial Sequence
  Description of Artificial Sequence: Synthetic peptide
  Seed: MCSLMQGSTLPRRS
MCSYMQMSPLPIRS

SEQ ID NO: 90135 - protein, 14 aa, Artificial Sequence
  Description of Artificial Sequence: Synthetic peptide
  Seed: MCSLMQGSTLPRRS
MCSYMQMSPLPLRS

SEQ ID NO: 90136 - protein, 14 aa, Artificial Sequence
  Description of Artificial Sequence: Synthetic peptide
  Seed: MCSLMQGSTLPRRS
MCSYMQMSPLPMRS

SEQ ID NO: 90137 - protein, 14 aa, Artificial Sequence
  Description of Artificial Sequence: Synthetic peptide
  Seed: MCSLMQGSTLPRRS
MCSYMQMSPLPNRS

SEQ ID NO: 90138 - protein, 14 aa, Artificial Sequence
  Description of Artificial Sequence: Synthetic peptide
  Seed: MCSLMQGSTLPRRS
MCSYMQMSPLPSRS

SEQ ID NO: 90139 - protein, 14 aa, Artificial Sequence
  Description of Artificial Sequence: Synthetic peptide
  Seed: MCSLMQGSTLPRRS
MCSYMQMSPLPTRS

SEQ ID NO: 90140 - protein, 14 aa, Artificial Sequence
  Description of Artificial Sequence: Synthetic peptide
  Seed: MCSLMQGSTLPRRS
MCSYMQMSPLPVRS

SEQ ID NO: 90141 - protein, 14 aa, Artificial Sequence
  Description of Artificial Sequence: Synthetic peptide
  Seed: MCSLMQGSTLPRRS
MCSYMQMSSLPARS

SEQ ID NO: 90142 - protein, 14 aa, Artificial Sequence
  Description of Artificial Sequence: Synthetic peptide
  Seed: MCSLMQGSTLPRRS
MCSYMQMSSLPIRS

SEQ ID NO: 90143 - protein, 14 aa, Artificial Sequence
  Description of Artificial Sequence: Synthetic peptide
  Seed: MCSLMQGSTLPRRS
MCSYMQMSSLPLRS

SEQ ID NO: 90144 - protein, 14 aa, Artificial Sequence
  Description of Artificial Sequence: Synthetic peptide
  Seed: MCSLMQGSTLPRRS
MCSYMQMSSLPMRS

SEQ ID NO: 90145 - protein, 14 aa, Artificial Sequence
  Description of Artificial Sequence: Synthetic peptide
  Seed: MCSLMQGSTLPRRS
MCSYMQMSSLPNRS

SEQ ID NO: 90146 - protein, 14 aa, Artificial Sequence
  Description of Artificial Sequence: Synthetic peptide
  Seed: MCSLMQGSTLPRRS
MCSYMQMSSLPSRS

SEQ ID NO: 90147 - protein, 14 aa, Artificial Sequence
  Description of Artificial Sequence: Synthetic peptide
  Seed: MCSLMQGSTLPRRS
MCSYMQMSSLPTRS

SEQ ID NO: 90148 - protein, 14 aa, Artificial Sequence
  Description of Artificial Sequence: Synthetic peptide
  Seed: MCSLMQGSTLPRRS
MCSYMQMSSLPVRS

SEQ ID NO: 90149 - protein, 14 aa, Artificial Sequence
  Description of Artificial Sequence: Synthetic peptide
  Seed: MCSLMQGSTLPRRS
MCSYMQMSTLPARS

SEQ ID NO: 90150 - protein, 14 aa, Artificial Sequence
  Description of Artificial Sequence: Synthetic peptide
  Seed: MCSLMQGSTLPRRS
MCSYMQMSTLPIRS

SEQ ID NO: 90151 - protein, 14 aa, Artificial Sequence
  Description of Artificial Sequence: Synthetic peptide
  Seed: MCSLMQGSTLPRRS
MCSYMQMSTLPLRS

SEQ ID NO: 90152 - protein, 14 aa, Artificial Sequence
  Description of Artificial Sequence: Synthetic peptide
  Seed: MCSLMQGSTLPRRS
MCSYMQMSTLPMRS

SEQ ID NO: 90153 - protein, 14 aa, Artificial Sequence
  Description of Artificial Sequence: Synthetic peptide
  Seed: MCSLMQGSTLPRRS
MCSYMQMSTLPNRS

SEQ ID NO: 90154 - protein, 14 aa, Artificial Sequence
  Description of Artificial Sequence: Synthetic peptide
  Seed: MCSLMQGSTLPRRS
MCSYMQMSTLPSRS

SEQ ID NO: 90155 - protein, 14 aa, Artificial Sequence
  Description of Artificial Sequence: Synthetic peptide
  Seed: MCSLMQGSTLPRRS
MCSYMQMSTLPTRS

SEQ ID NO: 90156 - protein, 14 aa, Artificial Sequence
  Description of Artificial Sequence: Synthetic peptide
  Seed: MCSLMQGSTLPRRS
MCSYMQMSTLPVRS

SEQ ID NO: 90157 - protein, 14 aa, Artificial Sequence
  Description of Artificial Sequence: Synthetic peptide
  Seed: MCSLMQGSTLPRRS
MCSYMQMSVLPARS

SEQ ID NO: 90158 - protein, 14 aa, Artificial Sequence
  Description of Artificial Sequence: Synthetic peptide
  Seed: MCSLMQGSTLPRRS
MCSYMQMSVLPHRS

SEQ ID NO: 90159 - protein, 14 aa, Artificial Sequence
  Description of Artificial Sequence: Synthetic peptide
  Seed: MCSLMQGSTLPRRS
MCSYMQMSVLPIRS

SEQ ID NO: 90160 - protein, 14 aa, Artificial Sequence
  Description of Artificial Sequence: Synthetic peptide
  Seed: MCSLMQGSTLPRRS
MCSYMQMSVLPLRS

SEQ ID NO: 90161 - protein, 14 aa, Artificial Sequence
  Description of Artificial Sequence: Synthetic peptide
  Seed: MCSLMQGSTLPRRS
MCSYMQMSVLPMRS

SEQ ID NO: 90162 - protein, 14 aa, Artificial Sequence
  Description of Artificial Sequence: Synthetic peptide
  Seed: MCSLMQGSTLPRRS
MCSYMQMSVLPNRS

SEQ ID NO: 90163 - protein, 14 aa, Artificial Sequence
  Description of Artificial Sequence: Synthetic peptide
  Seed: MCSLMQGSTLPRRS
MCSYMQMSVLPSRS

SEQ ID NO: 90164 - protein, 14 aa, Artificial Sequence
  Description of Artificial Sequence: Synthetic peptide
  Seed: MCSLMQGSTLPRRS
MCSYMQMSVLPTRS

SEQ ID NO: 90165 - protein, 14 aa, Artificial Sequence
  Description of Artificial Sequence: Synthetic peptide
  Seed: MCSLMQGSTLPRRS
MCSYMQMSVLPVRS

SEQ ID NO: 90166 - protein, 14 aa, Artificial Sequence
  Description of Artificial Sequence: Synthetic peptide
  Seed: MCSLMQGSTLPRRS
MCSYMQVSALPARS

SEQ ID NO: 90167 - protein, 14 aa, Artificial Sequence
  Description of Artificial Sequence: Synthetic peptide
  Seed: MCSLMQGSTLPRRS
MCSYMQVSALPIRS

SEQ ID NO: 90168 - protein, 14 aa, Artificial Sequence
  Description of Artificial Sequence: Synthetic peptide
  Seed: MCSLMQGSTLPRRS
MCSYMQVSALPLRS

SEQ ID NO: 90169 - protein, 14 aa, Artificial Sequence
  Description of Artificial Sequence: Synthetic peptide
  Seed: MCSLMQGSTLPRRS
MCSYMQVSALPMRS

SEQ ID NO: 90170 - protein, 14 aa, Artificial Sequence
  Description of Artificial Sequence: Synthetic peptide
  Seed: MCSLMQGSTLPRRS
MCSYMQVSALPNRS

SEQ ID NO: 90171 - protein, 14 aa, Artificial Sequence
  Description of Artificial Sequence: Synthetic peptide
  Seed: MCSLMQGSTLPRRS
MCSYMQVSALPSRS

SEQ ID NO: 90172 - protein, 14 aa, Artificial Sequence
  Description of Artificial Sequence: Synthetic peptide
  Seed: MCSLMQGSTLPRRS
MCSYMQVSALPTRS

SEQ ID NO: 90173 - protein, 14 aa, Artificial Sequence
  Description of Artificial Sequence: Synthetic peptide
  Seed: MCSLMQGSTLPRRS
MCSYMQVSALPVRS

SEQ ID NO: 90174 - protein, 14 aa, Artificial Sequence
  Description of Artificial Sequence: Synthetic peptide
  Seed: MCSLMQGSTLPRRS
MCSYMQVSPLPARS

SEQ ID NO: 90175 - protein, 14 aa, Artificial Sequence
  Description of Artificial Sequence: Synthetic peptide
  Seed: MCSLMQGSTLPRRS
MCSYMQVSPLPSRS

SEQ ID NO: 90176 - protein, 14 aa, Artificial Sequence
  Description of Artificial Sequence: Synthetic peptide
  Seed: MCSLMQGSTLPRRS
MCSYMQVSPLPVRS

SEQ ID NO: 90177 - protein, 14 aa, Artificial Sequence
  Description of Artificial Sequence: Synthetic peptide
  Seed: MCSLMQGSTLPRRS
MCSYMQVSSLPARS

SEQ ID NO: 90178 - protein, 14 aa, Artificial Sequence
  Description of Artificial Sequence: Synthetic peptide
  Seed: MCSLMQGSTLPRRS
MCSYMQVSSLPSRS

SEQ ID NO: 90179 - protein, 14 aa, Artificial Sequence
  Description of Artificial Sequence: Synthetic peptide
  Seed: MCSLMQGSTLPRRS
MCSYMQVSSLPVRS

SEQ ID NO: 90180 - protein, 14 aa, Artificial Sequence
  Description of Artificial Sequence: Synthetic peptide
  Seed: MCSLMQGSTLPRRS
MCSYMQVSTLPARS

SEQ ID NO: 90181 - protein, 14 aa, Artificial Sequence
  Description of Artificial Sequence: Synthetic peptide
  Seed: MCSLMQGSTLPRRS
MCSYMQVSTLPVRS

SEQ ID NO: 90182 - protein, 14 aa, Artificial Sequence
  Description of Artificial Sequence: Synthetic peptide
  Seed: MCSLMQGSTLPRRS
MCSYMQVSVLPARS

SEQ ID NO: 90183 - protein, 15 aa, Artificial Sequence
  Description of Artificial Sequence: Synthetic peptide
  Seed: MCSLMQGSTLPRRSG
MCSLMQASTVPRRSG

SEQ ID NO: 90184 - protein, 15 aa, Artificial Sequence
  Description of Artificial Sequence: Synthetic peptide
  Seed: MCSLMQGSTLPRRSG
MFSLAQASTAPRRSG

SEQ ID NO: 90185 - protein, 15 aa, Artificial Sequence
  Description of Artificial Sequence: Synthetic peptide
  Seed: MCSLMQGSTLPRRSG
MFSLAQASTCPRRSG

SEQ ID NO: 90186 - protein, 15 aa, Artificial Sequence
  Description of Artificial Sequence: Synthetic peptide
  Seed: MCSLMQGSTLPRRSG
MFSLAQASTFPRRSG

SEQ ID NO: 90187 - protein, 15 aa, Artificial Sequence
  Description of Artificial Sequence: Synthetic peptide
  Seed: MCSLMQGSTLPRRSG
MFSLAQASTGPRRSG

SEQ ID NO: 90188 - protein, 15 aa, Artificial Sequence
  Description of Artificial Sequence: Synthetic peptide
  Seed: MCSLMQGSTLPRRSG
MFSLAQASTIPRRSG

SEQ ID NO: 90189 - protein, 15 aa, Artificial Sequence
  Description of Artificial Sequence: Synthetic peptide
  Seed: MCSLMQGSTLPRRSG
MFSLAQASTLPRRSG

SEQ ID NO: 90190 - protein, 15 aa, Artificial Sequence
  Description of Artificial Sequence: Synthetic peptide
  Seed: MCSLMQGSTLPRRSG
MFSLAQASTMPRRSG

SEQ ID NO: 90191 - protein, 15 aa, Artificial Sequence
  Description of Artificial Sequence: Synthetic peptide
  Seed: MCSLMQGSTLPRRSG
MFSLAQASTNPRRSG

SEQ ID NO: 90192 - protein, 15 aa, Artificial Sequence
  Description of Artificial Sequence: Synthetic peptide
  Seed: MCSLMQGSTLPRRSG
MFSLAQASTSPRRSG

SEQ ID NO: 90193 - protein, 15 aa, Artificial Sequence
  Description of Artificial Sequence: Synthetic peptide
  Seed: MCSLMQGSTLPRRSG
MFSLAQASTTPRRSG

SEQ ID NO: 90194 - protein, 15 aa, Artificial Sequence
  Description of Artificial Sequence: Synthetic peptide
  Seed: MCSLMQGSTLPRRSG
MFSLAQASTVPRRSG

SEQ ID NO: 90195 - protein, 15 aa, Artificial Sequence
  Description of Artificial Sequence: Synthetic peptide
  Seed: MCSLMQGSTLPRRSG
MFSLAQGSTAPRRSG

SEQ ID NO: 90196 - protein, 15 aa, Artificial Sequence
  Description of Artificial Sequence: Synthetic peptide
  Seed: MCSLMQGSTLPRRSG
MFSLAQGSTIPRRSG

SEQ ID NO: 90197 - protein, 15 aa, Artificial Sequence
  Description of Artificial Sequence: Synthetic peptide
  Seed: MCSLMQGSTLPRRSG
MFSLAQGSTLPRRSG

SEQ ID NO: 90198 - protein, 15 aa, Artificial Sequence
  Description of Artificial Sequence: Synthetic peptide
  Seed: MCSLMQGSTLPRRSG
MFSLAQGSTMPRRSG

SEQ ID NO: 90199 - protein, 15 aa, Artificial Sequence
  Description of Artificial Sequence: Synthetic peptide
  Seed: MCSLMQGSTLPRRSG
MFSLAQGSTSPRRSG

SEQ ID NO: 90200 - protein, 15 aa, Artificial Sequence
  Description of Artificial Sequence: Synthetic peptide
  Seed: MCSLMQGSTLPRRSG
MFSLAQGSTTPRRSG

SEQ ID NO: 90201 - protein, 15 aa, Artificial Sequence
  Description of Artificial Sequence: Synthetic peptide
  Seed: MCSLMQGSTLPRRSG
MFSLAQGSTVPRRSG

SEQ ID NO: 90202 - protein, 15 aa, Artificial Sequence
  Description of Artificial Sequence: Synthetic peptide
  Seed: MCSLMQGSTLPRRSG
MFSLAQNSTAPRRSG

SEQ ID NO: 90203 - protein, 15 aa, Artificial Sequence
  Description of Artificial Sequence: Synthetic peptide
  Seed: MCSLMQGSTLPRRSG
MFSLAQNSTIPRRSG

SEQ ID NO: 90204 - protein, 15 aa, Artificial Sequence
  Description of Artificial Sequence: Synthetic peptide
  Seed: MCSLMQGSTLPRRSG
MFSLAQNSTLPRRSG

SEQ ID NO: 90205 - protein, 15 aa, Artificial Sequence
  Description of Artificial Sequence: Synthetic peptide
  Seed: MCSLMQGSTLPRRSG
MFSLAQNSTVPRRSG

SEQ ID NO: 90206 - protein, 15 aa, Artificial Sequence
  Description of Artificial Sequence: Synthetic peptide
  Seed: MCSLMQGSTLPRRSG
MFSLAQPSTAPRRSG

SEQ ID NO: 90207 - protein, 15 aa, Artificial Sequence
  Description of Artificial Sequence: Synthetic peptide
  Seed: MCSLMQGSTLPRRSG
MFSLAQPSTIPRRSG

SEQ ID NO: 90208 - protein, 15 aa, Artificial Sequence
  Description of Artificial Sequence: Synthetic peptide
  Seed: MCSLMQGSTLPRRSG
MFSLAQPSTLPRRSG

SEQ ID NO: 90209 - protein, 15 aa, Artificial Sequence
  Description of Artificial Sequence: Synthetic peptide
  Seed: MCSLMQGSTLPRRSG
MFSLAQPSTMPRRSG

SEQ ID NO: 90210 - protein, 15 aa, Artificial Sequence
  Description of Artificial Sequence: Synthetic peptide
  Seed: MCSLMQGSTLPRRSG
MFSLAQPSTSPRRSG

SEQ ID NO: 90211 - protein, 15 aa, Artificial Sequence
  Description of Artificial Sequence: Synthetic peptide
  Seed: MCSLMQGSTLPRRSG
MFSLAQPSTTPRRSG

SEQ ID NO: 90212 - protein, 15 aa, Artificial Sequence
  Description of Artificial Sequence: Synthetic peptide
  Seed: MCSLMQGSTLPRRSG
MFSLAQPSTVPRRSG

SEQ ID NO: 90213 - protein, 15 aa, Artificial Sequence
  Description of Artificial Sequence: Synthetic peptide
  Seed: MCSLMQGSTLPRRSG
MFSLAQSSTAPRRSG

SEQ ID NO: 90214 - protein, 15 aa, Artificial Sequence
  Description of Artificial Sequence: Synthetic peptide
  Seed: MCSLMQGSTLPRRSG
MFSLAQSSTIPRRSG

SEQ ID NO: 90215 - protein, 15 aa, Artificial Sequence
  Description of Artificial Sequence: Synthetic peptide
  Seed: MCSLMQGSTLPRRSG
MFSLAQSSTLPRRSG

SEQ ID NO: 90216 - protein, 15 aa, Artificial Sequence
  Description of Artificial Sequence: Synthetic peptide
  Seed: MCSLMQGSTLPRRSG
MFSLAQSSTMPRRSG

SEQ ID NO: 90217 - protein, 15 aa, Artificial Sequence
  Description of Artificial Sequence: Synthetic peptide
  Seed: MCSLMQGSTLPRRSG
MFSLAQSSTSPRRSG

SEQ ID NO: 90218 - protein, 15 aa, Artificial Sequence
  Description of Artificial Sequence: Synthetic peptide
  Seed: MCSLMQGSTLPRRSG
MFSLAQSSTTPRRSG

SEQ ID NO: 90219 - protein, 15 aa, Artificial Sequence
  Description of Artificial Sequence: Synthetic peptide
  Seed: MCSLMQGSTLPRRSG
MFSLAQSSTVPRRSG

SEQ ID NO: 90220 - protein, 15 aa, Artificial Sequence
  Description of Artificial Sequence: Synthetic peptide
  Seed: MCSLMQGSTLPRRSG
MFSLAQTSTAPRRSG

SEQ ID NO: 90221 - protein, 15 aa, Artificial Sequence
  Description of Artificial Sequence: Synthetic peptide
  Seed: MCSLMQGSTLPRRSG
MFSLAQTSTIPRRSG

SEQ ID NO: 90222 - protein, 15 aa, Artificial Sequence
  Description of Artificial Sequence: Synthetic peptide
  Seed: MCSLMQGSTLPRRSG
MFSLAQTSTLPRRSG

SEQ ID NO: 90223 - protein, 15 aa, Artificial Sequence
  Description of Artificial Sequence: Synthetic peptide
  Seed: MCSLMQGSTLPRRSG
MFSLAQTSTVPRRSG

SEQ ID NO: 90224 - protein, 15 aa, Artificial Sequence
  Description of Artificial Sequence: Synthetic peptide
  Seed: MCSLMQGSTLPRRSG
MFSLAQVSTAPRRSG

SEQ ID NO: 90225 - protein, 15 aa, Artificial Sequence
  Description of Artificial Sequence: Synthetic peptide
  Seed: MCSLMQGSTLPRRSG
MFSLAQVSTIPRRSG

SEQ ID NO: 90226 - protein, 15 aa, Artificial Sequence
  Description of Artificial Sequence: Synthetic peptide
  Seed: MCSLMQGSTLPRRSG
MFSLAQVSTLPRRSG

SEQ ID NO: 90227 - protein, 15 aa, Artificial Sequence
  Description of Artificial Sequence: Synthetic peptide
  Seed: MCSLMQGSTLPRRSG
MFSLAQVSTVPRRSG

SEQ ID NO: 90228 - protein, 15 aa, Artificial Sequence
  Description of Artificial Sequence: Synthetic peptide
  Seed: MCSLMQGSTLPRRSG
MFSLCQASTIPRRSG

SEQ ID NO: 90229 - protein, 15 aa, Artificial Sequence
  Description of Artificial Sequence: Synthetic peptide
  Seed: MCSLMQGSTLPRRSG
MFSLCQASTLPRRSG

SEQ ID NO: 90230 - protein, 15 aa, Artificial Sequence
  Description of Artificial Sequence: Synthetic peptide
  Seed: MCSLMQGSTLPRRSG
MFSLCQASTVPRRSG

SEQ ID NO: 90231 - protein, 15 aa, Artificial Sequence
  Description of Artificial Sequence: Synthetic peptide
  Seed: MCSLMQGSTLPRRSG
MFSLEQASTAPRRSG

SEQ ID NO: 90232 - protein, 15 aa, Artificial Sequence
  Description of Artificial Sequence: Synthetic peptide
  Seed: MCSLMQGSTLPRRSG
MFSLEQASTIPRRSG

SEQ ID NO: 90233 - protein, 15 aa, Artificial Sequence
  Description of Artificial Sequence: Synthetic peptide
  Seed: MCSLMQGSTLPRRSG
MFSLEQASTLPRRSG

SEQ ID NO: 90234 - protein, 15 aa, Artificial Sequence
  Description of Artificial Sequence: Synthetic peptide
  Seed: MCSLMQGSTLPRRSG
MFSLEQASTMPRRSG

SEQ ID NO: 90235 - protein, 15 aa, Artificial Sequence
  Description of Artificial Sequence: Synthetic peptide
  Seed: MCSLMQGSTLPRRSG
MFSLEQASTVPRRSG

SEQ ID NO: 90236 - protein, 15 aa, Artificial Sequence
  Description of Artificial Sequence: Synthetic peptide
  Seed: MCSLMQGSTLPRRSG
MFSLEQGSTAPRRSG

SEQ ID NO: 90237 - protein, 15 aa, Artificial Sequence
  Description of Artificial Sequence: Synthetic peptide
  Seed: MCSLMQGSTLPRRSG
MFSLEQGSTIPRRSG

SEQ ID NO: 90238 - protein, 15 aa, Artificial Sequence
  Description of Artificial Sequence: Synthetic peptide
  Seed: MCSLMQGSTLPRRSG
MFSLEQGSTLPRRSG

SEQ ID NO: 90239 - protein, 15 aa, Artificial Sequence
  Description of Artificial Sequence: Synthetic peptide
  Seed: MCSLMQGSTLPRRSG
MFSLEQGSTVPRRSG

SEQ ID NO: 90240 - protein, 15 aa, Artificial Sequence
  Description of Artificial Sequence: Synthetic peptide
  Seed: MCSLMQGSTLPRRSG
MFSLEQSSTIPRRSG

SEQ ID NO: 90241 - protein, 15 aa, Artificial Sequence
  Description of Artificial Sequence: Synthetic peptide
  Seed: MCSLMQGSTLPRRSG
MFSLEQSSTLPRRSG

SEQ ID NO: 90242 - protein, 15 aa, Artificial Sequence
  Description of Artificial Sequence: Synthetic peptide
  Seed: MCSLMQGSTLPRRSG
MFSLEQSSTVPRRSG

SEQ ID NO: 90243 - protein, 15 aa, Artificial Sequence
  Description of Artificial Sequence: Synthetic peptide
  Seed: MCSLMQGSTLPRRSG
MFSLFQASTIPRRSG

SEQ ID NO: 90244 - protein, 15 aa, Artificial Sequence
  Description of Artificial Sequence: Synthetic peptide
  Seed: MCSLMQGSTLPRRSG
MFSLFQASTLPRRSG

SEQ ID NO: 90245 - protein, 15 aa, Artificial Sequence
  Description of Artificial Sequence: Synthetic peptide
  Seed: MCSLMQGSTLPRRSG
MFSLFQASTMPRRSG

SEQ ID NO: 90246 - protein, 15 aa, Artificial Sequence
  Description of Artificial Sequence: Synthetic peptide
  Seed: MCSLMQGSTLPRRSG
MFSLFQASTVPRRSG

SEQ ID NO: 90247 - protein, 15 aa, Artificial Sequence
  Description of Artificial Sequence: Synthetic peptide
  Seed: MCSLMQGSTLPRRSG
MFSLFQGSTAPRRSG

SEQ ID NO: 90248 - protein, 15 aa, Artificial Sequence
  Description of Artificial Sequence: Synthetic peptide
  Seed: MCSLMQGSTLPRRSG
MFSLFQGSTIPRRSG

SEQ ID NO: 90249 - protein, 15 aa, Artificial Sequence
  Description of Artificial Sequence: Synthetic peptide
  Seed: MCSLMQGSTLPRRSG
MFSLFQGSTLPRRSG

SEQ ID NO: 90250 - protein, 15 aa, Artificial Sequence
  Description of Artificial Sequence: Synthetic peptide
  Seed: MCSLMQGSTLPRRSG
MFSLFQGSTVPRRSG

SEQ ID NO: 90251 - protein, 15 aa, Artificial Sequence
  Description of Artificial Sequence: Synthetic peptide
  Seed: MCSLMQGSTLPRRSG
MFSLFQPSTIPRRSG

SEQ ID NO: 90252 - protein, 15 aa, Artificial Sequence
  Description of Artificial Sequence: Synthetic peptide
  Seed: MCSLMQGSTLPRRSG
MFSLFQPSTLPRRSG

SEQ ID NO: 90253 - protein, 15 aa, Artificial Sequence
  Description of Artificial Sequence: Synthetic peptide
  Seed: MCSLMQGSTLPRRSG
MFSLFQPSTVPRRSG

SEQ ID NO: 90254 - protein, 15 aa, Artificial Sequence
  Description of Artificial Sequence: Synthetic peptide
  Seed: MCSLMQGSTLPRRSG
MFSLFQSSTIPRRSG

SEQ ID NO: 90255 - protein, 15 aa, Artificial Sequence
  Description of Artificial Sequence: Synthetic peptide
  Seed: MCSLMQGSTLPRRSG
MFSLFQSSTLPRRSG

SEQ ID NO: 90256 - protein, 15 aa, Artificial Sequence
  Description of Artificial Sequence: Synthetic peptide
  Seed: MCSLMQGSTLPRRSG
MFSLGQASTAPRRSG

SEQ ID NO: 90257 - protein, 15 aa, Artificial Sequence
  Description of Artificial Sequence: Synthetic peptide
  Seed: MCSLMQGSTLPRRSG
MFSLGQASTIPRRSG

SEQ ID NO: 90258 - protein, 15 aa, Artificial Sequence
  Description of Artificial Sequence: Synthetic peptide
  Seed: MCSLMQGSTLPRRSG
MFSLGQASTLPRRSG

SEQ ID NO: 90259 - protein, 15 aa, Artificial Sequence
  Description of Artificial Sequence: Synthetic peptide
  Seed: MCSLMQGSTLPRRSG
MFSLGQASTMPRRSG

SEQ ID NO: 90260 - protein, 15 aa, Artificial Sequence
  Description of Artificial Sequence: Synthetic peptide
  Seed: MCSLMQGSTLPRRSG
MFSLGQASTVPRRSG

SEQ ID NO: 90261 - protein, 15 aa, Artificial Sequence
  Description of Artificial Sequence: Synthetic peptide
  Seed: MCSLMQGSTLPRRSG
MFSLGQGSTIPRRSG

SEQ ID NO: 90262 - protein, 15 aa, Artificial Sequence
  Description of Artificial Sequence: Synthetic peptide
  Seed: MCSLMQGSTLPRRSG
MFSLGQGSTLPRRSG

SEQ ID NO: 90263 - protein, 15 aa, Artificial Sequence
  Description of Artificial Sequence: Synthetic peptide
  Seed: MCSLMQGSTLPRRSG
MFSLGQGSTVPRRSG

SEQ ID NO: 90264 - protein, 15 aa, Artificial Sequence
  Description of Artificial Sequence: Synthetic peptide
  Seed: MCSLMQGSTLPRRSG
MFSLGQSSTIPRRSG

SEQ ID NO: 90265 - protein, 15 aa, Artificial Sequence
  Description of Artificial Sequence: Synthetic peptide
  Seed: MCSLMQGSTLPRRSG
MFSLGQSSTLPRRSG

SEQ ID NO: 90266 - protein, 15 aa, Artificial Sequence
  Description of Artificial Sequence: Synthetic peptide
  Seed: MCSLMQGSTLPRRSG
MFSLGQSSTVPRRSG

SEQ ID NO: 90267 - protein, 15 aa, Artificial Sequence
  Description of Artificial Sequence: Synthetic peptide
  Seed: MCSLMQGSTLPRRSG
MFSLHQASTIPRRSG

SEQ ID NO: 90268 - protein, 15 aa, Artificial Sequence
  Description of Artificial Sequence: Synthetic peptide
  Seed: MCSLMQGSTLPRRSG
MFSLHQASTLPRRSG

SEQ ID NO: 90269 - protein, 15 aa, Artificial Sequence
  Description of Artificial Sequence: Synthetic peptide
  Seed: MCSLMQGSTLPRRSG
MFSLHQASTVPRRSG

SEQ ID NO: 90270 - protein, 15 aa, Artificial Sequence
  Description of Artificial Sequence: Synthetic peptide
  Seed: MCSLMQGSTLPRRSG
MFSLIQASTAPRRSG

SEQ ID NO: 90271 - protein, 15 aa, Artificial Sequence
  Description of Artificial Sequence: Synthetic peptide
  Seed: MCSLMQGSTLPRRSG
MFSLIQASTCPRRSG

SEQ ID NO: 90272 - protein, 15 aa, Artificial Sequence
  Description of Artificial Sequence: Synthetic peptide
  Seed: MCSLMQGSTLPRRSG
MFSLIQASTGPRRSG

SEQ ID NO: 90273 - protein, 15 aa, Artificial Sequence
  Description of Artificial Sequence: Synthetic peptide
  Seed: MCSLMQGSTLPRRSG
MFSLIQASTIPRRSG

SEQ ID NO: 90274 - protein, 15 aa, Artificial Sequence
  Description of Artificial Sequence: Synthetic peptide
  Seed: MCSLMQGSTLPRRSG
MFSLIQASTLPRRSG

SEQ ID NO: 90275 - protein, 15 aa, Artificial Sequence
  Description of Artificial Sequence: Synthetic peptide
  Seed: MCSLMQGSTLPRRSG
MFSLIQASTMPRRSG

SEQ ID NO: 90276 - protein, 15 aa, Artificial Sequence
  Description of Artificial Sequence: Synthetic peptide
  Seed: MCSLMQGSTLPRRSG
MFSLIQASTNPRRSG

SEQ ID NO: 90277 - protein, 15 aa, Artificial Sequence
  Description of Artificial Sequence: Synthetic peptide
  Seed: MCSLMQGSTLPRRSG
MFSLIQASTSPRRSG

SEQ ID NO: 90278 - protein, 15 aa, Artificial Sequence
  Description of Artificial Sequence: Synthetic peptide
  Seed: MCSLMQGSTLPRRSG
MFSLIQASTTPRRSG

SEQ ID NO: 90279 - protein, 15 aa, Artificial Sequence
  Description of Artificial Sequence: Synthetic peptide
  Seed: MCSLMQGSTLPRRSG
MFSLIQASTVPRRSG

SEQ ID NO: 90280 - protein, 15 aa, Artificial Sequence
  Description of Artificial Sequence: Synthetic peptide
  Seed: MCSLMQGSTLPRRSG
MFSLIQGSTAPRRSG

SEQ ID NO: 90281 - protein, 15 aa, Artificial Sequence
  Description of Artificial Sequence: Synthetic peptide
  Seed: MCSLMQGSTLPRRSG
MFSLIQGSTCPRRSG

SEQ ID NO: 90282 - protein, 15 aa, Artificial Sequence
  Description of Artificial Sequence: Synthetic peptide
  Seed: MCSLMQGSTLPRRSG
MFSLIQGSTFPRRSG

SEQ ID NO: 90283 - protein, 15 aa, Artificial Sequence
  Description of Artificial Sequence: Synthetic peptide
  Seed: MCSLMQGSTLPRRSG
MFSLIQGSTGPRRSG

SEQ ID NO: 90284 - protein, 15 aa, Artificial Sequence
  Description of Artificial Sequence: Synthetic peptide
  Seed: MCSLMQGSTLPRRSG
MFSLIQGSTIPRRSG

SEQ ID NO: 90285 - protein, 15 aa, Artificial Sequence
  Description of Artificial Sequence: Synthetic peptide
  Seed: MCSLMQGSTLPRRSG
MFSLIQGSTLPRRSG

SEQ ID NO: 90286 - protein, 15 aa, Artificial Sequence
  Description of Artificial Sequence: Synthetic peptide
  Seed: MCSLMQGSTLPRRSG
MFSLIQGSTMPRRSG

SEQ ID NO: 90287 - protein, 15 aa, Artificial Sequence
  Description of Artificial Sequence: Synthetic peptide
  Seed: MCSLMQGSTLPRRSG
MFSLIQGSTNPRRSG

SEQ ID NO: 90288 - protein, 15 aa, Artificial Sequence
  Description of Artificial Sequence: Synthetic peptide
  Seed: MCSLMQGSTLPRRSG
MFSLIQGSTSPRRSG

SEQ ID NO: 90289 - protein, 15 aa, Artificial Sequence
  Description of Artificial Sequence: Synthetic peptide
  Seed: MCSLMQGSTLPRRSG
MFSLIQGSTTPRRSG

SEQ ID NO: 90290 - protein, 15 aa, Artificial Sequence
  Description of Artificial Sequence: Synthetic peptide
  Seed: MCSLMQGSTLPRRSG
MFSLIQGSTVPRRSG

SEQ ID NO: 90291 - protein, 15 aa, Artificial Sequence
  Description of Artificial Sequence: Synthetic peptide
  Seed: MCSLMQGSTLPRRSG
MFSLIQNSTAPRRSG

SEQ ID NO: 90292 - protein, 15 aa, Artificial Sequence
  Description of Artificial Sequence: Synthetic peptide
  Seed: MCSLMQGSTLPRRSG
MFSLIQNSTIPRRSG

SEQ ID NO: 90293 - protein, 15 aa, Artificial Sequence
  Description of Artificial Sequence: Synthetic peptide
  Seed: MCSLMQGSTLPRRSG
MFSLIQNSTLPRRSG

SEQ ID NO: 90294 - protein, 15 aa, Artificial Sequence
  Description of Artificial Sequence: Synthetic peptide
  Seed: MCSLMQGSTLPRRSG
MFSLIQNSTMPRRSG

SEQ ID NO: 90295 - protein, 15 aa, Artificial Sequence
  Description of Artificial Sequence: Synthetic peptide
  Seed: MCSLMQGSTLPRRSG
MFSLIQNSTSPRRSG

SEQ ID NO: 90296 - protein, 15 aa, Artificial Sequence
  Description of Artificial Sequence: Synthetic peptide
  Seed: MCSLMQGSTLPRRSG
MFSLIQNSTTPRRSG

SEQ ID NO: 90297 - protein, 15 aa, Artificial Sequence
  Description of Artificial Sequence: Synthetic peptide
  Seed: MCSLMQGSTLPRRSG
MFSLIQNSTVPRRSG

SEQ ID NO: 90298 - protein, 15 aa, Artificial Sequence
  Description of Artificial Sequence: Synthetic peptide
  Seed: MCSLMQGSTLPRRSG
MFSLIQPSTAPRRSG

SEQ ID NO: 90299 - protein, 15 aa, Artificial Sequence
  Description of Artificial Sequence: Synthetic peptide
  Seed: MCSLMQGSTLPRRSG
MFSLIQPSTGPRRSG

SEQ ID NO: 90300 - protein, 15 aa, Artificial Sequence
  Description of Artificial Sequence: Synthetic peptide
  Seed: MCSLMQGSTLPRRSG
MFSLIQPSTIPRRSG

SEQ ID NO: 90301 - protein, 15 aa, Artificial Sequence
  Description of Artificial Sequence: Synthetic peptide
  Seed: MCSLMQGSTLPRRSG
MFSLIQPSTLPRRSG

SEQ ID NO: 90302 - protein, 15 aa, Artificial Sequence
  Description of Artificial Sequence: Synthetic peptide
  Seed: MCSLMQGSTLPRRSG
MFSLIQPSTMPRRSG

SEQ ID NO: 90303 - protein, 15 aa, Artificial Sequence
  Description of Artificial Sequence: Synthetic peptide
  Seed: MCSLMQGSTLPRRSG
MFSLIQPSTNPRRSG

SEQ ID NO: 90304 - protein, 15 aa, Artificial Sequence
  Description of Artificial Sequence: Synthetic peptide
  Seed: MCSLMQGSTLPRRSG
MFSLIQPSTSPRRSG

SEQ ID NO: 90305 - protein, 15 aa, Artificial Sequence
  Description of Artificial Sequence: Synthetic peptide
  Seed: MCSLMQGSTLPRRSG
MFSLIQPSTTPRRSG

SEQ ID NO: 90306 - protein, 15 aa, Artificial Sequence
  Description of Artificial Sequence: Synthetic peptide
  Seed: MCSLMQGSTLPRRSG
MFSLIQPSTVPRRSG

SEQ ID NO: 90307 - protein, 15 aa, Artificial Sequence
  Description of Artificial Sequence: Synthetic peptide
  Seed: MCSLMQGSTLPRRSG
MFSLIQSSTAPRRSG

SEQ ID NO: 90308 - protein, 15 aa, Artificial Sequence
  Description of Artificial Sequence: Synthetic peptide
  Seed: MCSLMQGSTLPRRSG
MFSLIQSSTCPRRSG

SEQ ID NO: 90309 - protein, 15 aa, Artificial Sequence
  Description of Artificial Sequence: Synthetic peptide
  Seed: MCSLMQGSTLPRRSG
MFSLIQSSTGPRRSG

SEQ ID NO: 90310 - protein, 15 aa, Artificial Sequence
  Description of Artificial Sequence: Synthetic peptide
  Seed: MCSLMQGSTLPRRSG
MFSLIQSSTIPRRSG

SEQ ID NO: 90311 - protein, 15 aa, Artificial Sequence
  Description of Artificial Sequence: Synthetic peptide
  Seed: MCSLMQGSTLPRRSG
MFSLIQSSTLPRRSG

SEQ ID NO: 90312 - protein, 15 aa, Artificial Sequence
  Description of Artificial Sequence: Synthetic peptide
  Seed: MCSLMQGSTLPRRSG
MFSLIQSSTMPRRSG

SEQ ID NO: 90313 - protein, 15 aa, Artificial Sequence
  Description of Artificial Sequence: Synthetic peptide
  Seed: MCSLMQGSTLPRRSG
MFSLIQSSTNPRRSG

SEQ ID NO: 90314 - protein, 15 aa, Artificial Sequence
  Description of Artificial Sequence: Synthetic peptide
  Seed: MCSLMQGSTLPRRSG
MFSLIQSSTSPRRSG

SEQ ID NO: 90315 - protein, 15 aa, Artificial Sequence
  Description of Artificial Sequence: Synthetic peptide
  Seed: MCSLMQGSTLPRRSG
MFSLIQSSTTPRRSG

SEQ ID NO: 90316 - protein, 15 aa, Artificial Sequence
  Description of Artificial Sequence: Synthetic peptide
  Seed: MCSLMQGSTLPRRSG
MFSLIQSSTVPRRSG

SEQ ID NO: 90317 - protein, 15 aa, Artificial Sequence
  Description of Artificial Sequence: Synthetic peptide
  Seed: MCSLMQGSTLPRRSG
MFSLIQTSTAPRRSG

SEQ ID NO: 90318 - protein, 15 aa, Artificial Sequence
  Description of Artificial Sequence: Synthetic peptide
  Seed: MCSLMQGSTLPRRSG
MFSLIQTSTIPRRSG

SEQ ID NO: 90319 - protein, 15 aa, Artificial Sequence
  Description of Artificial Sequence: Synthetic peptide
  Seed: MCSLMQGSTLPRRSG
MFSLIQTSTLPRRSG

SEQ ID NO: 90320 - protein, 15 aa, Artificial Sequence
  Description of Artificial Sequence: Synthetic peptide
  Seed: MCSLMQGSTLPRRSG
MFSLIQTSTMPRRSG

SEQ ID NO: 90321 - protein, 15 aa, Artificial Sequence
  Description of Artificial Sequence: Synthetic peptide
  Seed: MCSLMQGSTLPRRSG
MFSLIQTSTSPRRSG

SEQ ID NO: 90322 - protein, 15 aa, Artificial Sequence
  Description of Artificial Sequence: Synthetic peptide
  Seed: MCSLMQGSTLPRRSG
MFSLIQTSTTPRRSG

SEQ ID NO: 90323 - protein, 15 aa, Artificial Sequence
  Description of Artificial Sequence: Synthetic peptide
  Seed: MCSLMQGSTLPRRSG
MFSLIQTSTVPRRSG

SEQ ID NO: 90324 - protein, 15 aa, Artificial Sequence
  Description of Artificial Sequence: Synthetic peptide
  Seed: MCSLMQGSTLPRRSG
MFSLIQVSTLPRRSG

SEQ ID NO: 90325 - protein, 15 aa, Artificial Sequence
  Description of Artificial Sequence: Synthetic peptide
  Seed: MCSLMQGSTLPRRSG
MFSLIQVSTMPRRSG

SEQ ID NO: 90326 - protein, 15 aa, Artificial Sequence
  Description of Artificial Sequence: Synthetic peptide
  Seed: MCSLMQGSTLPRRSG
MFSLIQVSTVPRRSG

SEQ ID NO: 90327 - protein, 15 aa, Artificial Sequence
  Description of Artificial Sequence: Synthetic peptide
  Seed: MCSLMQGSTLPRRSG
MFSLLQASTAPRRSG

SEQ ID NO: 90328 - protein, 15 aa, Artificial Sequence
  Description of Artificial Sequence: Synthetic peptide
  Seed: MCSLMQGSTLPRRSG
MFSLLQASTCPRRSG

SEQ ID NO: 90329 - protein, 15 aa, Artificial Sequence
  Description of Artificial Sequence: Synthetic peptide
  Seed: MCSLMQGSTLPRRSG
MFSLLQASTFPRRSG

SEQ ID NO: 90330 - protein, 15 aa, Artificial Sequence
  Description of Artificial Sequence: Synthetic peptide
  Seed: MCSLMQGSTLPRRSG
MFSLLQASTGPRRSG

SEQ ID NO: 90331 - protein, 15 aa, Artificial Sequence
  Description of Artificial Sequence: Synthetic peptide
  Seed: MCSLMQGSTLPRRSG
MFSLLQASTHPRRSG

SEQ ID NO: 90332 - protein, 15 aa, Artificial Sequence
  Description of Artificial Sequence: Synthetic peptide
  Seed: MCSLMQGSTLPRRSG
MFSLLQASTIPRRSG

SEQ ID NO: 90333 - protein, 15 aa, Artificial Sequence
  Description of Artificial Sequence: Synthetic peptide
  Seed: MCSLMQGSTLPRRSG
MFSLLQASTKPRRSG

SEQ ID NO: 90334 - protein, 15 aa, Artificial Sequence
  Description of Artificial Sequence: Synthetic peptide
  Seed: MCSLMQGSTLPRRSG
MFSLLQASTLPRRSG

SEQ ID NO: 90335 - protein, 15 aa, Artificial Sequence
  Description of Artificial Sequence: Synthetic peptide
  Seed: MCSLMQGSTLPRRSG
MFSLLQASTMPRRSG

SEQ ID NO: 90336 - protein, 15 aa, Artificial Sequence
  Description of Artificial Sequence: Synthetic peptide
  Seed: MCSLMQGSTLPRRSG
MFSLLQASTNPRRSG

SEQ ID NO: 90337 - protein, 15 aa, Artificial Sequence
  Description of Artificial Sequence: Synthetic peptide
  Seed: MCSLMQGSTLPRRSG
MFSLLQASTPPRRSG

SEQ ID NO: 90338 - protein, 15 aa, Artificial Sequence
  Description of Artificial Sequence: Synthetic peptide
  Seed: MCSLMQGSTLPRRSG
MFSLLQASTQPRRSG

SEQ ID NO: 90339 - protein, 15 aa, Artificial Sequence
  Description of Artificial Sequence: Synthetic peptide
  Seed: MCSLMQGSTLPRRSG
MFSLLQASTRPRRSG

SEQ ID NO: 90340 - protein, 15 aa, Artificial Sequence
  Description of Artificial Sequence: Synthetic peptide
  Seed: MCSLMQGSTLPRRSG
MFSLLQASTSPRRSG

SEQ ID NO: 90341 - protein, 15 aa, Artificial Sequence
  Description of Artificial Sequence: Synthetic peptide
  Seed: MCSLMQGSTLPRRSG
MFSLLQASTTPRRSG

SEQ ID NO: 90342 - protein, 15 aa, Artificial Sequence
  Description of Artificial Sequence: Synthetic peptide
  Seed: MCSLMQGSTLPRRSG
MFSLLQASTVPRRSG

SEQ ID NO: 90343 - protein, 15 aa, Artificial Sequence
  Description of Artificial Sequence: Synthetic peptide
  Seed: MCSLMQGSTLPRRSG
MFSLLQASTWPRRSG

SEQ ID NO: 90344 - protein, 15 aa, Artificial Sequence
  Description of Artificial Sequence: Synthetic peptide
  Seed: MCSLMQGSTLPRRSG
MFSLLQASTYPRRSG

SEQ ID NO: 90345 - protein, 15 aa, Artificial Sequence
  Description of Artificial Sequence: Synthetic peptide
  Seed: MCSLMQGSTLPRRSG
MFSLLQESTVPRRSG

SEQ ID NO: 90346 - protein, 15 aa, Artificial Sequence
  Description of Artificial Sequence: Synthetic peptide
  Seed: MCSLMQGSTLPRRSG
MFSLLQGSTAPRRSG

SEQ ID NO: 90347 - protein, 15 aa, Artificial Sequence
  Description of Artificial Sequence: Synthetic peptide
  Seed: MCSLMQGSTLPRRSG
MFSLLQGSTCPRRSG

SEQ ID NO: 90348 - protein, 15 aa, Artificial Sequence
  Description of Artificial Sequence: Synthetic peptide
  Seed: MCSLMQGSTLPRRSG
MFSLLQGSTFPRRSG

SEQ ID NO: 90349 - protein, 15 aa, Artificial Sequence
  Description of Artificial Sequence: Synthetic peptide
  Seed: MCSLMQGSTLPRRSG
MFSLLQGSTGPRRSG

SEQ ID NO: 90350 - protein, 15 aa, Artificial Sequence
  Description of Artificial Sequence: Synthetic peptide
  Seed: MCSLMQGSTLPRRSG
MFSLLQGSTHPRRSG

SEQ ID NO: 90351 - protein, 15 aa, Artificial Sequence
  Description of Artificial Sequence: Synthetic peptide
  Seed: MCSLMQGSTLPRRSG
MFSLLQGSTIPRRSG

SEQ ID NO: 90352 - protein, 15 aa, Artificial Sequence
  Description of Artificial Sequence: Synthetic peptide
  Seed: MCSLMQGSTLPRRSG
MFSLLQGSTLPRRSG

SEQ ID NO: 90353 - protein, 15 aa, Artificial Sequence
  Description of Artificial Sequence: Synthetic peptide
  Seed: MCSLMQGSTLPRRSG
MFSLLQGSTMPRRSG

SEQ ID NO: 90354 - protein, 15 aa, Artificial Sequence
  Description of Artificial Sequence: Synthetic peptide
  Seed: MCSLMQGSTLPRRSG
MFSLLQGSTNPRRSG

SEQ ID NO: 90355 - protein, 15 aa, Artificial Sequence
  Description of Artificial Sequence: Synthetic peptide
  Seed: MCSLMQGSTLPRRSG
MFSLLQGSTPPRRSG

SEQ ID NO: 90356 - protein, 15 aa, Artificial Sequence
  Description of Artificial Sequence: Synthetic peptide
  Seed: MCSLMQGSTLPRRSG
MFSLLQGSTQPRRSG

SEQ ID NO: 90357 - protein, 15 aa, Artificial Sequence
  Description of Artificial Sequence: Synthetic peptide
  Seed: MCSLMQGSTLPRRSG
MFSLLQGSTSPRRSG

SEQ ID NO: 90358 - protein, 15 aa, Artificial Sequence
  Description of Artificial Sequence: Synthetic peptide
  Seed: MCSLMQGSTLPRRSG
MFSLLQGSTTPRRSG

SEQ ID NO: 90359 - protein, 15 aa, Artificial Sequence
  Description of Artificial Sequence: Synthetic peptide
  Seed: MCSLMQGSTLPRRSG
MFSLLQGSTVPRRSG

SEQ ID NO: 90360 - protein, 15 aa, Artificial Sequence
  Description of Artificial Sequence: Synthetic peptide
  Seed: MCSLMQGSTLPRRSG
MFSLLQGSTYPRRSG

SEQ ID NO: 90361 - protein, 15 aa, Artificial Sequence
  Description of Artificial Sequence: Synthetic peptide
  Seed: MCSLMQGSTLPRRSG
MFSLLQHSTAPRRSG

SEQ ID NO: 90362 - protein, 15 aa, Artificial Sequence
  Description of Artificial Sequence: Synthetic peptide
  Seed: MCSLMQGSTLPRRSG
MFSLLQHSTIPRRSG

SEQ ID NO: 90363 - protein, 15 aa, Artificial Sequence
  Description of Artificial Sequence: Synthetic peptide
  Seed: MCSLMQGSTLPRRSG
MFSLLQHSTLPRRSG

SEQ ID NO: 90364 - protein, 15 aa, Artificial Sequence
  Description of Artificial Sequence: Synthetic peptide
  Seed: MCSLMQGSTLPRRSG
MFSLLQHSTVPRRSG

SEQ ID NO: 90365 - protein, 15 aa, Artificial Sequence
  Description of Artificial Sequence: Synthetic peptide
  Seed: MCSLMQGSTLPRRSG
MFSLLQISTAPRRSG

SEQ ID NO: 90366 - protein, 15 aa, Artificial Sequence
  Description of Artificial Sequence: Synthetic peptide
  Seed: MCSLMQGSTLPRRSG
MFSLLQISTLPRRSG

SEQ ID NO: 90367 - protein, 15 aa, Artificial Sequence
  Description of Artificial Sequence: Synthetic peptide
  Seed: MCSLMQGSTLPRRSG
MFSLLQISTMPRRSG

SEQ ID NO: 90368 - protein, 15 aa, Artificial Sequence
  Description of Artificial Sequence: Synthetic peptide
  Seed: MCSLMQGSTLPRRSG
MFSLLQISTSPRRSG

SEQ ID NO: 90369 - protein, 15 aa, Artificial Sequence
  Description of Artificial Sequence: Synthetic peptide
  Seed: MCSLMQGSTLPRRSG
MFSLLQISTVPRRSG

SEQ ID NO: 90370 - protein, 15 aa, Artificial Sequence
  Description of Artificial Sequence: Synthetic peptide
  Seed: MCSLMQGSTLPRRSG
MFSLLQNSTAPRRSG

SEQ ID NO: 90371 - protein, 15 aa, Artificial Sequence
  Description of Artificial Sequence: Synthetic peptide
  Seed: MCSLMQGSTLPRRSG
MFSLLQNSTGPRRSG

SEQ ID NO: 90372 - protein, 15 aa, Artificial Sequence
  Description of Artificial Sequence: Synthetic peptide
  Seed: MCSLMQGSTLPRRSG
MFSLLQNSTIPRRSG

SEQ ID NO: 90373 - protein, 15 aa, Artificial Sequence
  Description of Artificial Sequence: Synthetic peptide
  Seed: MCSLMQGSTLPRRSG
MFSLLQNSTLPRRSG

SEQ ID NO: 90374 - protein, 15 aa, Artificial Sequence
  Description of Artificial Sequence: Synthetic peptide
  Seed: MCSLMQGSTLPRRSG
MFSLLQNSTMPRRSG

SEQ ID NO: 90375 - protein, 15 aa, Artificial Sequence
  Description of Artificial Sequence: Synthetic peptide
  Seed: MCSLMQGSTLPRRSG
MFSLLQNSTNPRRSG

SEQ ID NO: 90376 - protein, 15 aa, Artificial Sequence
  Description of Artificial Sequence: Synthetic peptide
  Seed: MCSLMQGSTLPRRSG
MFSLLQNSTSPRRSG

SEQ ID NO: 90377 - protein, 15 aa, Artificial Sequence
  Description of Artificial Sequence: Synthetic peptide
  Seed: MCSLMQGSTLPRRSG
MFSLLQNSTTPRRSG

SEQ ID NO: 90378 - protein, 15 aa, Artificial Sequence
  Description of Artificial Sequence: Synthetic peptide
  Seed: MCSLMQGSTLPRRSG
MFSLLQNSTVPRRSG

SEQ ID NO: 90379 - protein, 15 aa, Artificial Sequence
  Description of Artificial Sequence: Synthetic peptide
  Seed: MCSLMQGSTLPRRSG
MFSLLQPSTAPRRSG

SEQ ID NO: 90380 - protein, 15 aa, Artificial Sequence
  Description of Artificial Sequence: Synthetic peptide
  Seed: MCSLMQGSTLPRRSG
MFSLLQPSTCPRRSG

SEQ ID NO: 90381 - protein, 15 aa, Artificial Sequence
  Description of Artificial Sequence: Synthetic peptide
  Seed: MCSLMQGSTLPRRSG
MFSLLQPSTFPRRSG

SEQ ID NO: 90382 - protein, 15 aa, Artificial Sequence
  Description of Artificial Sequence: Synthetic peptide
  Seed: MCSLMQGSTLPRRSG
MFSLLQPSTGPRRSG

SEQ ID NO: 90383 - protein, 15 aa, Artificial Sequence
  Description of Artificial Sequence: Synthetic peptide
  Seed: MCSLMQGSTLPRRSG
MFSLLQPSTIPRRSG

SEQ ID NO: 90384 - protein, 15 aa, Artificial Sequence
  Description of Artificial Sequence: Synthetic peptide
  Seed: MCSLMQGSTLPRRSG
MFSLLQPSTLPRRSG

SEQ ID NO: 90385 - protein, 15 aa, Artificial Sequence
  Description of Artificial Sequence: Synthetic peptide
  Seed: MCSLMQGSTLPRRSG
MFSLLQPSTMPRRSG

SEQ ID NO: 90386 - protein, 15 aa, Artificial Sequence
  Description of Artificial Sequence: Synthetic peptide
  Seed: MCSLMQGSTLPRRSG
MFSLLQPSTNPRRSG

SEQ ID NO: 90387 - protein, 15 aa, Artificial Sequence
  Description of Artificial Sequence: Synthetic peptide
  Seed: MCSLMQGSTLPRRSG
MFSLLQPSTPPRRSG

SEQ ID NO: 90388 - protein, 15 aa, Artificial Sequence
  Description of Artificial Sequence: Synthetic peptide
  Seed: MCSLMQGSTLPRRSG
MFSLLQPSTSPRRSG

SEQ ID NO: 90389 - protein, 15 aa, Artificial Sequence
  Description of Artificial Sequence: Synthetic peptide
  Seed: MCSLMQGSTLPRRSG
MFSLLQPSTTPRRSG

SEQ ID NO: 90390 - protein, 15 aa, Artificial Sequence
  Description of Artificial Sequence: Synthetic peptide
  Seed: MCSLMQGSTLPRRSG
MFSLLQPSTVPRRSG

SEQ ID NO: 90391 - protein, 15 aa, Artificial Sequence
  Description of Artificial Sequence: Synthetic peptide
  Seed: MCSLMQGSTLPRRSG
MFSLLQPSTYPRRSG

SEQ ID NO: 90392 - protein, 15 aa, Artificial Sequence
  Description of Artificial Sequence: Synthetic peptide
  Seed: MCSLMQGSTLPRRSG
MFSLLQQSTLPRRSG

SEQ ID NO: 90393 - protein, 15 aa, Artificial Sequence
  Description of Artificial Sequence: Synthetic peptide
  Seed: MCSLMQGSTLPRRSG
MFSLLQSSTAPRRSG

SEQ ID NO: 90394 - protein, 15 aa, Artificial Sequence
  Description of Artificial Sequence: Synthetic peptide
  Seed: MCSLMQGSTLPRRSG
MFSLLQSSTCPRRSG

SEQ ID NO: 90395 - protein, 15 aa, Artificial Sequence
  Description of Artificial Sequence: Synthetic peptide
  Seed: MCSLMQGSTLPRRSG
MFSLLQSSTFPRRSG

SEQ ID NO: 90396 - protein, 15 aa, Artificial Sequence
  Description of Artificial Sequence: Synthetic peptide
  Seed: MCSLMQGSTLPRRSG
MFSLLQSSTGPRRSG

SEQ ID NO: 90397 - protein, 15 aa, Artificial Sequence
  Description of Artificial Sequence: Synthetic peptide
  Seed: MCSLMQGSTLPRRSG
MFSLLQSSTHPRRSG

SEQ ID NO: 90398 - protein, 15 aa, Artificial Sequence
  Description of Artificial Sequence: Synthetic peptide
  Seed: MCSLMQGSTLPRRSG
MFSLLQSSTIPRRSG

SEQ ID NO: 90399 - protein, 15 aa, Artificial Sequence
  Description of Artificial Sequence: Synthetic peptide
  Seed: MCSLMQGSTLPRRSG
MFSLLQSSTLPRRSG

SEQ ID NO: 90400 - protein, 15 aa, Artificial Sequence
  Description of Artificial Sequence: Synthetic peptide
  Seed: MCSLMQGSTLPRRSG
MFSLLQSSTMPRRSG

SEQ ID NO: 90401 - protein, 15 aa, Artificial Sequence
  Description of Artificial Sequence: Synthetic peptide
  Seed: MCSLMQGSTLPRRSG
MFSLLQSSTNPRRSG

SEQ ID NO: 90402 - protein, 15 aa, Artificial Sequence
  Description of Artificial Sequence: Synthetic peptide
  Seed: MCSLMQGSTLPRRSG
MFSLLQSSTPPRRSG

SEQ ID NO: 90403 - protein, 15 aa, Artificial Sequence
  Description of Artificial Sequence: Synthetic peptide
  Seed: MCSLMQGSTLPRRSG
MFSLLQSSTSPRRSG

SEQ ID NO: 90404 - protein, 15 aa, Artificial Sequence
  Description of Artificial Sequence: Synthetic peptide
  Seed: MCSLMQGSTLPRRSG
MFSLLQSSTTPRRSG

SEQ ID NO: 90405 - protein, 15 aa, Artificial Sequence
  Description of Artificial Sequence: Synthetic peptide
  Seed: MCSLMQGSTLPRRSG
MFSLLQSSTVPRRSG

SEQ ID NO: 90406 - protein, 15 aa, Artificial Sequence
  Description of Artificial Sequence: Synthetic peptide
  Seed: MCSLMQGSTLPRRSG
MFSLLQSSTYPRRSG

SEQ ID NO: 90407 - protein, 15 aa, Artificial Sequence
  Description of Artificial Sequence: Synthetic peptide
  Seed: MCSLMQGSTLPRRSG
MFSLLQTSTAPRRSG

SEQ ID NO: 90408 - protein, 15 aa, Artificial Sequence
  Description of Artificial Sequence: Synthetic peptide
  Seed: MCSLMQGSTLPRRSG
MFSLLQTSTCPRRSG

SEQ ID NO: 90409 - protein, 15 aa, Artificial Sequence
  Description of Artificial Sequence: Synthetic peptide
  Seed: MCSLMQGSTLPRRSG
MFSLLQTSTGPRRSG

SEQ ID NO: 90410 - protein, 15 aa, Artificial Sequence
  Description of Artificial Sequence: Synthetic peptide
  Seed: MCSLMQGSTLPRRSG
MFSLLQTSTIPRRSG

SEQ ID NO: 90411 - protein, 15 aa, Artificial Sequence
  Description of Artificial Sequence: Synthetic peptide
  Seed: MCSLMQGSTLPRRSG
MFSLLQTSTLPRRSG

SEQ ID NO: 90412 - protein, 15 aa, Artificial Sequence
  Description of Artificial Sequence: Synthetic peptide
  Seed: MCSLMQGSTLPRRSG
MFSLLQTSTMPRRSG

SEQ ID NO: 90413 - protein, 15 aa, Artificial Sequence
  Description of Artificial Sequence: Synthetic peptide
  Seed: MCSLMQGSTLPRRSG
MFSLLQTSTNPRRSG

SEQ ID NO: 90414 - protein, 15 aa, Artificial Sequence
  Description of Artificial Sequence: Synthetic peptide
  Seed: MCSLMQGSTLPRRSG
MFSLLQTSTSPRRSG

SEQ ID NO: 90415 - protein, 15 aa, Artificial Sequence
  Description of Artificial Sequence: Synthetic peptide
  Seed: MCSLMQGSTLPRRSG
MFSLLQTSTTPRRSG

SEQ ID NO: 90416 - protein, 15 aa, Artificial Sequence
  Description of Artificial Sequence: Synthetic peptide
  Seed: MCSLMQGSTLPRRSG
MFSLLQTSTVPRRSG

SEQ ID NO: 90417 - protein, 15 aa, Artificial Sequence
  Description of Artificial Sequence: Synthetic peptide
  Seed: MCSLMQGSTLPRRSG
MFSLLQVSTAPRRSG

SEQ ID NO: 90418 - protein, 15 aa, Artificial Sequence
  Description of Artificial Sequence: Synthetic peptide
  Seed: MCSLMQGSTLPRRSG
MFSLLQVSTGPRRSG

SEQ ID NO: 90419 - protein, 15 aa, Artificial Sequence
  Description of Artificial Sequence: Synthetic peptide
  Seed: MCSLMQGSTLPRRSG
MFSLLQVSTIPRRSG

SEQ ID NO: 90420 - protein, 15 aa, Artificial Sequence
  Description of Artificial Sequence: Synthetic peptide
  Seed: MCSLMQGSTLPRRSG
MFSLLQVSTLPRRSG

SEQ ID NO: 90421 - protein, 15 aa, Artificial Sequence
  Description of Artificial Sequence: Synthetic peptide
  Seed: MCSLMQGSTLPRRSG
MFSLLQVSTMPRRSG

SEQ ID NO: 90422 - protein, 15 aa, Artificial Sequence
  Description of Artificial Sequence: Synthetic peptide
  Seed: MCSLMQGSTLPRRSG
MFSLLQVSTNPRRSG

SEQ ID NO: 90423 - protein, 15 aa, Artificial Sequence
  Description of Artificial Sequence: Synthetic peptide
  Seed: MCSLMQGSTLPRRSG
MFSLLQVSTSPRRSG

SEQ ID NO: 90424 - protein, 15 aa, Artificial Sequence
  Description of Artificial Sequence: Synthetic peptide
  Seed: MCSLMQGSTLPRRSG
MFSLLQVSTTPRRSG

SEQ ID NO: 90425 - protein, 15 aa, Artificial Sequence
  Description of Artificial Sequence: Synthetic peptide
  Seed: MCSLMQGSTLPRRSG
MFSLLQVSTVPRRSG

SEQ ID NO: 90426 - protein, 15 aa, Artificial Sequence
  Description of Artificial Sequence: Synthetic peptide
  Seed: MCSLMQGSTLPRRSG
MFSLMQASTAPRRSG

SEQ ID NO: 90427 - protein, 15 aa, Artificial Sequence
  Description of Artificial Sequence: Synthetic peptide
  Seed: MCSLMQGSTLPRRSG
MFSLMQASTCPRRSG

SEQ ID NO: 90428 - protein, 15 aa, Artificial Sequence
  Description of Artificial Sequence: Synthetic peptide
  Seed: MCSLMQGSTLPRRSG
MFSLMQASTFPRRSG

SEQ ID NO: 90429 - protein, 15 aa, Artificial Sequence
  Description of Artificial Sequence: Synthetic peptide
  Seed: MCSLMQGSTLPRRSG
MFSLMQASTGPRRSG

SEQ ID NO: 90430 - protein, 15 aa, Artificial Sequence
  Description of Artificial Sequence: Synthetic peptide
  Seed: MCSLMQGSTLPRRSG
MFSLMQASTHPRRSG

SEQ ID NO: 90431 - protein, 15 aa, Artificial Sequence
  Description of Artificial Sequence: Synthetic peptide
  Seed: MCSLMQGSTLPRRSG
MFSLMQASTIPRRSG

SEQ ID NO: 90432 - protein, 15 aa, Artificial Sequence
  Description of Artificial Sequence: Synthetic peptide
  Seed: MCSLMQGSTLPRRSG
MFSLMQASTKPRRSG

SEQ ID NO: 90433 - protein, 15 aa, Artificial Sequence
  Description of Artificial Sequence: Synthetic peptide
  Seed: MCSLMQGSTLPRRSG
MFSLMQASTLPRRSG

SEQ ID NO: 90434 - protein, 15 aa, Artificial Sequence
  Description of Artificial Sequence: Synthetic peptide
  Seed: MCSLMQGSTLPRRSG
MFSLMQASTMPRRSG

SEQ ID NO: 90435 - protein, 15 aa, Artificial Sequence
  Description of Artificial Sequence: Synthetic peptide
  Seed: MCSLMQGSTLPRRSG
MFSLMQASTNPRRSG

SEQ ID NO: 90436 - protein, 15 aa, Artificial Sequence
  Description of Artificial Sequence: Synthetic peptide
  Seed: MCSLMQGSTLPRRSG
MFSLMQASTPPRRSG

SEQ ID NO: 90437 - protein, 15 aa, Artificial Sequence
  Description of Artificial Sequence: Synthetic peptide
  Seed: MCSLMQGSTLPRRSG
MFSLMQASTQPRRSG

SEQ ID NO: 90438 - protein, 15 aa, Artificial Sequence
  Description of Artificial Sequence: Synthetic peptide
  Seed: MCSLMQGSTLPRRSG
MFSLMQASTRPRRSG

SEQ ID NO: 90439 - protein, 15 aa, Artificial Sequence
  Description of Artificial Sequence: Synthetic peptide
  Seed: MCSLMQGSTLPRRSG
MFSLMQASTSPRRSG

SEQ ID NO: 90440 - protein, 15 aa, Artificial Sequence
  Description of Artificial Sequence: Synthetic peptide
  Seed: MCSLMQGSTLPRRSG
MFSLMQASTTPRRSG

SEQ ID NO: 90441 - protein, 15 aa, Artificial Sequence
  Description of Artificial Sequence: Synthetic peptide
  Seed: MCSLMQGSTLPRRSG
MFSLMQASTVPRRSG

SEQ ID NO: 90442 - protein, 15 aa, Artificial Sequence
  Description of Artificial Sequence: Synthetic peptide
  Seed: MCSLMQGSTLPRRSG
MFSLMQASTWPRRSG

SEQ ID NO: 90443 - protein, 15 aa, Artificial Sequence
  Description of Artificial Sequence: Synthetic peptide
  Seed: MCSLMQGSTLPRRSG
MFSLMQASTYPRRSG

SEQ ID NO: 90444 - protein, 15 aa, Artificial Sequence
  Description of Artificial Sequence: Synthetic peptide
  Seed: MCSLMQGSTLPRRSG
MFSLMQESTLPRRSG

SEQ ID NO: 90445 - protein, 15 aa, Artificial Sequence
  Description of Artificial Sequence: Synthetic peptide
  Seed: MCSLMQGSTLPRRSG
MFSLMQESTVPRRSG

SEQ ID NO: 90446 - protein, 15 aa, Artificial Sequence
  Description of Artificial Sequence: Synthetic peptide
  Seed: MCSLMQGSTLPRRSG
MFSLMQGSTAPRRSG

SEQ ID NO: 90447 - protein, 15 aa, Artificial Sequence
  Description of Artificial Sequence: Synthetic peptide
  Seed: MCSLMQGSTLPRRSG
MFSLMQGSTCPRRSG

SEQ ID NO: 90448 - protein, 15 aa, Artificial Sequence
  Description of Artificial Sequence: Synthetic peptide
  Seed: MCSLMQGSTLPRRSG
MFSLMQGSTFPRRSG

SEQ ID NO: 90449 - protein, 15 aa, Artificial Sequence
  Description of Artificial Sequence: Synthetic peptide
  Seed: MCSLMQGSTLPRRSG
MFSLMQGSTGPRRSG

SEQ ID NO: 90450 - protein, 15 aa, Artificial Sequence
  Description of Artificial Sequence: Synthetic peptide
  Seed: MCSLMQGSTLPRRSG
MFSLMQGSTHPRRSG

SEQ ID NO: 90451 - protein, 15 aa, Artificial Sequence
  Description of Artificial Sequence: Synthetic peptide
  Seed: MCSLMQGSTLPRRSG
MFSLMQGSTIPRRSG

SEQ ID NO: 90452 - protein, 15 aa, Artificial Sequence
  Description of Artificial Sequence: Synthetic peptide
  Seed: MCSLMQGSTLPRRSG
MFSLMQGSTLPRRSG

SEQ ID NO: 90453 - protein, 15 aa, Artificial Sequence
  Description of Artificial Sequence: Synthetic peptide
  Seed: MCSLMQGSTLPRRSG
MFSLMQGSTMPRRSG

SEQ ID NO: 90454 - protein, 15 aa, Artificial Sequence
  Description of Artificial Sequence: Synthetic peptide
  Seed: MCSLMQGSTLPRRSG
MFSLMQGSTNPRRSG

SEQ ID NO: 90455 - protein, 15 aa, Artificial Sequence
  Description of Artificial Sequence: Synthetic peptide
  Seed: MCSLMQGSTLPRRSG
MFSLMQGSTPPRRSG

SEQ ID NO: 90456 - protein, 15 aa, Artificial Sequence
  Description of Artificial Sequence: Synthetic peptide
  Seed: MCSLMQGSTLPRRSG
MFSLMQGSTQPRRSG

SEQ ID NO: 90457 - protein, 15 aa, Artificial Sequence
  Description of Artificial Sequence: Synthetic peptide
  Seed: MCSLMQGSTLPRRSG
MFSLMQGSTSPRRSG

SEQ ID NO: 90458 - protein, 15 aa, Artificial Sequence
  Description of Artificial Sequence: Synthetic peptide
  Seed: MCSLMQGSTLPRRSG
MFSLMQGSTTPRRSG

SEQ ID NO: 90459 - protein, 15 aa, Artificial Sequence
  Description of Artificial Sequence: Synthetic peptide
  Seed: MCSLMQGSTLPRRSG
MFSLMQGSTVPRRSG

SEQ ID NO: 90460 - protein, 15 aa, Artificial Sequence
  Description of Artificial Sequence: Synthetic peptide
  Seed: MCSLMQGSTLPRRSG
MFSLMQGSTYPRRSG

SEQ ID NO: 90461 - protein, 15 aa, Artificial Sequence
  Description of Artificial Sequence: Synthetic peptide
  Seed: MCSLMQGSTLPRRSG
MFSLMQHSTAPRRSG

SEQ ID NO: 90462 - protein, 15 aa, Artificial Sequence
  Description of Artificial Sequence: Synthetic peptide
  Seed: MCSLMQGSTLPRRSG
MFSLMQHSTIPRRSG

SEQ ID NO: 90463 - protein, 15 aa, Artificial Sequence
  Description of Artificial Sequence: Synthetic peptide
  Seed: MCSLMQGSTLPRRSG
MFSLMQHSTLPRRSG

SEQ ID NO: 90464 - protein, 15 aa, Artificial Sequence
  Description of Artificial Sequence: Synthetic peptide
  Seed: MCSLMQGSTLPRRSG
MFSLMQHSTMPRRSG

SEQ ID NO: 90465 - protein, 15 aa, Artificial Sequence
  Description of Artificial Sequence: Synthetic peptide
  Seed: MCSLMQGSTLPRRSG
MFSLMQHSTVPRRSG

SEQ ID NO: 90466 - protein, 15 aa, Artificial Sequence
  Description of Artificial Sequence: Synthetic peptide
  Seed: MCSLMQGSTLPRRSG
MFSLMQISTAPRRSG

SEQ ID NO: 90467 - protein, 15 aa, Artificial Sequence
  Description of Artificial Sequence: Synthetic peptide
  Seed: MCSLMQGSTLPRRSG
MFSLMQISTLPRRSG

SEQ ID NO: 90468 - protein, 15 aa, Artificial Sequence
  Description of Artificial Sequence: Synthetic peptide
  Seed: MCSLMQGSTLPRRSG
MFSLMQISTMPRRSG

SEQ ID NO: 90469 - protein, 15 aa, Artificial Sequence
  Description of Artificial Sequence: Synthetic peptide
  Seed: MCSLMQGSTLPRRSG
MFSLMQISTSPRRSG

SEQ ID NO: 90470 - protein, 15 aa, Artificial Sequence
  Description of Artificial Sequence: Synthetic peptide
  Seed: MCSLMQGSTLPRRSG
MFSLMQISTTPRRSG

SEQ ID NO: 90471 - protein, 15 aa, Artificial Sequence
  Description of Artificial Sequence: Synthetic peptide
  Seed: MCSLMQGSTLPRRSG
MFSLMQISTVPRRSG

SEQ ID NO: 90472 - protein, 15 aa, Artificial Sequence
  Description of Artificial Sequence: Synthetic peptide
  Seed: MCSLMQGSTLPRRSG
MFSLMQNSTAPRRSG

SEQ ID NO: 90473 - protein, 15 aa, Artificial Sequence
  Description of Artificial Sequence: Synthetic peptide
  Seed: MCSLMQGSTLPRRSG
MFSLMQNSTGPRRSG

SEQ ID NO: 90474 - protein, 15 aa, Artificial Sequence
  Description of Artificial Sequence: Synthetic peptide
  Seed: MCSLMQGSTLPRRSG
MFSLMQNSTIPRRSG

SEQ ID NO: 90475 - protein, 15 aa, Artificial Sequence
  Description of Artificial Sequence: Synthetic peptide
  Seed: MCSLMQGSTLPRRSG
MFSLMQNSTLPRRSG

SEQ ID NO: 90476 - protein, 15 aa, Artificial Sequence
  Description of Artificial Sequence: Synthetic peptide
  Seed: MCSLMQGSTLPRRSG
MFSLMQNSTMPRRSG

SEQ ID NO: 90477 - protein, 15 aa, Artificial Sequence
  Description of Artificial Sequence: Synthetic peptide
  Seed: MCSLMQGSTLPRRSG
MFSLMQNSTSPRRSG

SEQ ID NO: 90478 - protein, 15 aa, Artificial Sequence
  Description of Artificial Sequence: Synthetic peptide
  Seed: MCSLMQGSTLPRRSG
MFSLMQNSTTPRRSG

SEQ ID NO: 90479 - protein, 15 aa, Artificial Sequence
  Description of Artificial Sequence: Synthetic peptide
  Seed: MCSLMQGSTLPRRSG
MFSLMQNSTVPRRSG

SEQ ID NO: 90480 - protein, 15 aa, Artificial Sequence
  Description of Artificial Sequence: Synthetic peptide
  Seed: MCSLMQGSTLPRRSG
MFSLMQPSTAPRRSG

SEQ ID NO: 90481 - protein, 15 aa, Artificial Sequence
  Description of Artificial Sequence: Synthetic peptide
  Seed: MCSLMQGSTLPRRSG
MFSLMQPSTCPRRSG

SEQ ID NO: 90482 - protein, 15 aa, Artificial Sequence
  Description of Artificial Sequence: Synthetic peptide
  Seed: MCSLMQGSTLPRRSG
MFSLMQPSTFPRRSG

SEQ ID NO: 90483 - protein, 15 aa, Artificial Sequence
  Description of Artificial Sequence: Synthetic peptide
  Seed: MCSLMQGSTLPRRSG
MFSLMQPSTGPRRSG

SEQ ID NO: 90484 - protein, 15 aa, Artificial Sequence
  Description of Artificial Sequence: Synthetic peptide
  Seed: MCSLMQGSTLPRRSG
MFSLMQPSTIPRRSG

SEQ ID NO: 90485 - protein, 15 aa, Artificial Sequence
  Description of Artificial Sequence: Synthetic peptide
  Seed: MCSLMQGSTLPRRSG
MFSLMQPSTLPRRSG

SEQ ID NO: 90486 - protein, 15 aa, Artificial Sequence
  Description of Artificial Sequence: Synthetic peptide
  Seed: MCSLMQGSTLPRRSG
MFSLMQPSTMPRRSG

SEQ ID NO: 90487 - protein, 15 aa, Artificial Sequence
  Description of Artificial Sequence: Synthetic peptide
  Seed: MCSLMQGSTLPRRSG
MFSLMQPSTNPRRSG

SEQ ID NO: 90488 - protein, 15 aa, Artificial Sequence
  Description of Artificial Sequence: Synthetic peptide
  Seed: MCSLMQGSTLPRRSG
MFSLMQPSTSPRRSG

SEQ ID NO: 90489 - protein, 15 aa, Artificial Sequence
  Description of Artificial Sequence: Synthetic peptide
  Seed: MCSLMQGSTLPRRSG
MFSLMQPSTTPRRSG

SEQ ID NO: 90490 - protein, 15 aa, Artificial Sequence
  Description of Artificial Sequence: Synthetic peptide
  Seed: MCSLMQGSTLPRRSG
MFSLMQPSTVPRRSG

SEQ ID NO: 90491 - protein, 15 aa, Artificial Sequence
  Description of Artificial Sequence: Synthetic peptide
  Seed: MCSLMQGSTLPRRSG
MFSLMQPSTYPRRSG

SEQ ID NO: 90492 - protein, 15 aa, Artificial Sequence
  Description of Artificial Sequence: Synthetic peptide
  Seed: MCSLMQGSTLPRRSG
MFSLMQSSTAPRRSG

SEQ ID NO: 90493 - protein, 15 aa, Artificial Sequence
  Description of Artificial Sequence: Synthetic peptide
  Seed: MCSLMQGSTLPRRSG
MFSLMQSSTCPRRSG

SEQ ID NO: 90494 - protein, 15 aa, Artificial Sequence
  Description of Artificial Sequence: Synthetic peptide
  Seed: MCSLMQGSTLPRRSG
MFSLMQSSTFPRRSG

SEQ ID NO: 90495 - protein, 15 aa, Artificial Sequence
  Description of Artificial Sequence: Synthetic peptide
  Seed: MCSLMQGSTLPRRSG
MFSLMQSSTGPRRSG

SEQ ID NO: 90496 - protein, 15 aa, Artificial Sequence
  Description of Artificial Sequence: Synthetic peptide
  Seed: MCSLMQGSTLPRRSG
MFSLMQSSTHPRRSG

SEQ ID NO: 90497 - protein, 15 aa, Artificial Sequence
  Description of Artificial Sequence: Synthetic peptide
  Seed: MCSLMQGSTLPRRSG
MFSLMQSSTIPRRSG

SEQ ID NO: 90498 - protein, 15 aa, Artificial Sequence
  Description of Artificial Sequence: Synthetic peptide
  Seed: MCSLMQGSTLPRRSG
MFSLMQSSTLPRRSG

SEQ ID NO: 90499 - protein, 15 aa, Artificial Sequence
  Description of Artificial Sequence: Synthetic peptide
  Seed: MCSLMQGSTLPRRSG
MFSLMQSSTMPRRSG

SEQ ID NO: 90500 - protein, 15 aa, Artificial Sequence
  Description of Artificial Sequence: Synthetic peptide
  Seed: MCSLMQGSTLPRRSG
MFSLMQSSTNPRRSG

SEQ ID NO: 90501 - protein, 15 aa, Artificial Sequence
  Description of Artificial Sequence: Synthetic peptide
  Seed: MCSLMQGSTLPRRSG
MFSLMQSSTQPRRSG

SEQ ID NO: 90502 - protein, 15 aa, Artificial Sequence
  Description of Artificial Sequence: Synthetic peptide
  Seed: MCSLMQGSTLPRRSG
MFSLMQSSTSPRRSG

SEQ ID NO: 90503 - protein, 15 aa, Artificial Sequence
  Description of Artificial Sequence: Synthetic peptide
  Seed: MCSLMQGSTLPRRSG
MFSLMQSSTTPRRSG

SEQ ID NO: 90504 - protein, 15 aa, Artificial Sequence
  Description of Artificial Sequence: Synthetic peptide
  Seed: MCSLMQGSTLPRRSG
MFSLMQSSTVPRRSG

SEQ ID NO: 90505 - protein, 15 aa, Artificial Sequence
  Description of Artificial Sequence: Synthetic peptide
  Seed: MCSLMQGSTLPRRSG
MFSLMQSSTYPRRSG

SEQ ID NO: 90506 - protein, 15 aa, Artificial Sequence
  Description of Artificial Sequence: Synthetic peptide
  Seed: MCSLMQGSTLPRRSG
MFSLMQTSTAPRRSG

SEQ ID NO: 90507 - protein, 15 aa, Artificial Sequence
  Description of Artificial Sequence: Synthetic peptide
  Seed: MCSLMQGSTLPRRSG
MFSLMQTSTGPRRSG

SEQ ID NO: 90508 - protein, 15 aa, Artificial Sequence
  Description of Artificial Sequence: Synthetic peptide
  Seed: MCSLMQGSTLPRRSG
MFSLMQTSTIPRRSG

SEQ ID NO: 90509 - protein, 15 aa, Artificial Sequence
  Description of Artificial Sequence: Synthetic peptide
  Seed: MCSLMQGSTLPRRSG
MFSLMQTSTLPRRSG

SEQ ID NO: 90510 - protein, 15 aa, Artificial Sequence
  Description of Artificial Sequence: Synthetic peptide
  Seed: MCSLMQGSTLPRRSG
MFSLMQTSTMPRRSG

SEQ ID NO: 90511 - protein, 15 aa, Artificial Sequence
  Description of Artificial Sequence: Synthetic peptide
  Seed: MCSLMQGSTLPRRSG
MFSLMQTSTNPRRSG

SEQ ID NO: 90512 - protein, 15 aa, Artificial Sequence
  Description of Artificial Sequence: Synthetic peptide
  Seed: MCSLMQGSTLPRRSG
MFSLMQTSTSPRRSG

SEQ ID NO: 90513 - protein, 15 aa, Artificial Sequence
  Description of Artificial Sequence: Synthetic peptide
  Seed: MCSLMQGSTLPRRSG
MFSLMQTSTTPRRSG

SEQ ID NO: 90514 - protein, 15 aa, Artificial Sequence
  Description of Artificial Sequence: Synthetic peptide
  Seed: MCSLMQGSTLPRRSG
MFSLMQTSTVPRRSG

SEQ ID NO: 90515 - protein, 15 aa, Artificial Sequence
  Description of Artificial Sequence: Synthetic peptide
  Seed: MCSLMQGSTLPRRSG
MFSLMQVSTAPRRSG

SEQ ID NO: 90516 - protein, 15 aa, Artificial Sequence
  Description of Artificial Sequence: Synthetic peptide
  Seed: MCSLMQGSTLPRRSG
MFSLMQVSTGPRRSG

SEQ ID NO: 90517 - protein, 15 aa, Artificial Sequence
  Description of Artificial Sequence: Synthetic peptide
  Seed: MCSLMQGSTLPRRSG
MFSLMQVSTIPRRSG

SEQ ID NO: 90518 - protein, 15 aa, Artificial Sequence
  Description of Artificial Sequence: Synthetic peptide
  Seed: MCSLMQGSTLPRRSG
MFSLMQVSTLPRRSG

SEQ ID NO: 90519 - protein, 15 aa, Artificial Sequence
  Description of Artificial Sequence: Synthetic peptide
  Seed: MCSLMQGSTLPRRSG
MFSLMQVSTMPRRSG

SEQ ID NO: 90520 - protein, 15 aa, Artificial Sequence
  Description of Artificial Sequence: Synthetic peptide
  Seed: MCSLMQGSTLPRRSG
MFSLMQVSTNPRRSG

SEQ ID NO: 90521 - protein, 15 aa, Artificial Sequence
  Description of Artificial Sequence: Synthetic peptide
  Seed: MCSLMQGSTLPRRSG
MFSLMQVSTSPRRSG

SEQ ID NO: 90522 - protein, 15 aa, Artificial Sequence
  Description of Artificial Sequence: Synthetic peptide
  Seed: MCSLMQGSTLPRRSG
MFSLMQVSTTPRRSG

SEQ ID NO: 90523 - protein, 15 aa, Artificial Sequence
  Description of Artificial Sequence: Synthetic peptide
  Seed: MCSLMQGSTLPRRSG
MFSLMQVSTVPRRSG

SEQ ID NO: 90524 - protein, 15 aa, Artificial Sequence
  Description of Artificial Sequence: Synthetic peptide
  Seed: MCSLMQGSTLPRRSG
MFSLNQASTAPRRSG

SEQ ID NO: 90525 - protein, 15 aa, Artificial Sequence
  Description of Artificial Sequence: Synthetic peptide
  Seed: MCSLMQGSTLPRRSG
MFSLNQASTIPRRSG

SEQ ID NO: 90526 - protein, 15 aa, Artificial Sequence
  Description of Artificial Sequence: Synthetic peptide
  Seed: MCSLMQGSTLPRRSG
MFSLNQASTLPRRSG

SEQ ID NO: 90527 - protein, 15 aa, Artificial Sequence
  Description of Artificial Sequence: Synthetic peptide
  Seed: MCSLMQGSTLPRRSG
MFSLNQASTVPRRSG

SEQ ID NO: 90528 - protein, 15 aa, Artificial Sequence
  Description of Artificial Sequence: Synthetic peptide
  Seed: MCSLMQGSTLPRRSG
MFSLNQGSTLPRRSG

SEQ ID NO: 90529 - protein, 15 aa, Artificial Sequence
  Description of Artificial Sequence: Synthetic peptide
  Seed: MCSLMQGSTLPRRSG
MFSLQQASTAPRRSG

SEQ ID NO: 90530 - protein, 15 aa, Artificial Sequence
  Description of Artificial Sequence: Synthetic peptide
  Seed: MCSLMQGSTLPRRSG
MFSLQQASTGPRRSG

SEQ ID NO: 90531 - protein, 15 aa, Artificial Sequence
  Description of Artificial Sequence: Synthetic peptide
  Seed: MCSLMQGSTLPRRSG
MFSLQQASTIPRRSG

SEQ ID NO: 90532 - protein, 15 aa, Artificial Sequence
  Description of Artificial Sequence: Synthetic peptide
  Seed: MCSLMQGSTLPRRSG
MFSLQQASTLPRRSG

SEQ ID NO: 90533 - protein, 15 aa, Artificial Sequence
  Description of Artificial Sequence: Synthetic peptide
  Seed: MCSLMQGSTLPRRSG
MFSLQQASTMPRRSG

SEQ ID NO: 90534 - protein, 15 aa, Artificial Sequence
  Description of Artificial Sequence: Synthetic peptide
  Seed: MCSLMQGSTLPRRSG
MFSLQQASTSPRRSG

SEQ ID NO: 90535 - protein, 15 aa, Artificial Sequence
  Description of Artificial Sequence: Synthetic peptide
  Seed: MCSLMQGSTLPRRSG
MFSLQQASTTPRRSG

SEQ ID NO: 90536 - protein, 15 aa, Artificial Sequence
  Description of Artificial Sequence: Synthetic peptide
  Seed: MCSLMQGSTLPRRSG
MFSLQQASTVPRRSG

SEQ ID NO: 90537 - protein, 15 aa, Artificial Sequence
  Description of Artificial Sequence: Synthetic peptide
  Seed: MCSLMQGSTLPRRSG
MFSLQQGSTAPRRSG

SEQ ID NO: 90538 - protein, 15 aa, Artificial Sequence
  Description of Artificial Sequence: Synthetic peptide
  Seed: MCSLMQGSTLPRRSG
MFSLQQGSTIPRRSG

SEQ ID NO: 90539 - protein, 15 aa, Artificial Sequence
  Description of Artificial Sequence: Synthetic peptide
  Seed: MCSLMQGSTLPRRSG
MFSLQQGSTLPRRSG

SEQ ID NO: 90540 - protein, 15 aa, Artificial Sequence
  Description of Artificial Sequence: Synthetic peptide
  Seed: MCSLMQGSTLPRRSG
MFSLQQGSTMPRRSG

SEQ ID NO: 90541 - protein, 15 aa, Artificial Sequence
  Description of Artificial Sequence: Synthetic peptide
  Seed: MCSLMQGSTLPRRSG
MFSLQQGSTSPRRSG

SEQ ID NO: 90542 - protein, 15 aa, Artificial Sequence
  Description of Artificial Sequence: Synthetic peptide
  Seed: MCSLMQGSTLPRRSG
MFSLQQGSTTPRRSG

SEQ ID NO: 90543 - protein, 15 aa, Artificial Sequence
  Description of Artificial Sequence: Synthetic peptide
  Seed: MCSLMQGSTLPRRSG
MFSLQQGSTVPRRSG

SEQ ID NO: 90544 - protein, 15 aa, Artificial Sequence
  Description of Artificial Sequence: Synthetic peptide
  Seed: MCSLMQGSTLPRRSG
MFSLQQNSTAPRRSG

SEQ ID NO: 90545 - protein, 15 aa, Artificial Sequence
  Description of Artificial Sequence: Synthetic peptide
  Seed: MCSLMQGSTLPRRSG
MFSLQQNSTIPRRSG

SEQ ID NO: 90546 - protein, 15 aa, Artificial Sequence
  Description of Artificial Sequence: Synthetic peptide
  Seed: MCSLMQGSTLPRRSG
MFSLQQNSTLPRRSG

SEQ ID NO: 90547 - protein, 15 aa, Artificial Sequence
  Description of Artificial Sequence: Synthetic peptide
  Seed: MCSLMQGSTLPRRSG
MFSLQQNSTVPRRSG

SEQ ID NO: 90548 - protein, 15 aa, Artificial Sequence
  Description of Artificial Sequence: Synthetic peptide
  Seed: MCSLMQGSTLPRRSG
MFSLQQPSTAPRRSG

SEQ ID NO: 90549 - protein, 15 aa, Artificial Sequence
  Description of Artificial Sequence: Synthetic peptide
  Seed: MCSLMQGSTLPRRSG
MFSLQQPSTIPRRSG

SEQ ID NO: 90550 - protein, 15 aa, Artificial Sequence
  Description of Artificial Sequence: Synthetic peptide
  Seed: MCSLMQGSTLPRRSG
MFSLQQPSTLPRRSG

SEQ ID NO: 90551 - protein, 15 aa, Artificial Sequence
  Description of Artificial Sequence: Synthetic peptide
  Seed: MCSLMQGSTLPRRSG
MFSLQQPSTMPRRSG

SEQ ID NO: 90552 - protein, 15 aa, Artificial Sequence
  Description of Artificial Sequence: Synthetic peptide
  Seed: MCSLMQGSTLPRRSG
MFSLQQPSTVPRRSG

SEQ ID NO: 90553 - protein, 15 aa, Artificial Sequence
  Description of Artificial Sequence: Synthetic peptide
  Seed: MCSLMQGSTLPRRSG
MFSLQQSSTAPRRSG

SEQ ID NO: 90554 - protein, 15 aa, Artificial Sequence
  Description of Artificial Sequence: Synthetic peptide
  Seed: MCSLMQGSTLPRRSG
MFSLQQSSTIPRRSG

SEQ ID NO: 90555 - protein, 15 aa, Artificial Sequence
  Description of Artificial Sequence: Synthetic peptide
  Seed: MCSLMQGSTLPRRSG
MFSLQQSSTLPRRSG

SEQ ID NO: 90556 - protein, 15 aa, Artificial Sequence
  Description of Artificial Sequence: Synthetic peptide
  Seed: MCSLMQGSTLPRRSG
MFSLQQSSTMPRRSG

SEQ ID NO: 90557 - protein, 15 aa, Artificial Sequence
  Description of Artificial Sequence: Synthetic peptide
  Seed: MCSLMQGSTLPRRSG
MFSLQQSSTSPRRSG

SEQ ID NO: 90558 - protein, 15 aa, Artificial Sequence
  Description of Artificial Sequence: Synthetic peptide
  Seed: MCSLMQGSTLPRRSG
MFSLQQSSTTPRRSG

SEQ ID NO: 90559 - protein, 15 aa, Artificial Sequence
  Description of Artificial Sequence: Synthetic peptide
  Seed: MCSLMQGSTLPRRSG
MFSLQQSSTVPRRSG

SEQ ID NO: 90560 - protein, 15 aa, Artificial Sequence
  Description of Artificial Sequence: Synthetic peptide
  Seed: MCSLMQGSTLPRRSG
MFSLQQTSTAPRRSG

SEQ ID NO: 90561 - protein, 15 aa, Artificial Sequence
  Description of Artificial Sequence: Synthetic peptide
  Seed: MCSLMQGSTLPRRSG
MFSLQQTSTIPRRSG

SEQ ID NO: 90562 - protein, 15 aa, Artificial Sequence
  Description of Artificial Sequence: Synthetic peptide
  Seed: MCSLMQGSTLPRRSG
MFSLQQTSTLPRRSG

SEQ ID NO: 90563 - protein, 15 aa, Artificial Sequence
  Description of Artificial Sequence: Synthetic peptide
  Seed: MCSLMQGSTLPRRSG
MFSLQQTSTVPRRSG

SEQ ID NO: 90564 - protein, 15 aa, Artificial Sequence
  Description of Artificial Sequence: Synthetic peptide
  Seed: MCSLMQGSTLPRRSG
MFSLSQASTAPRRSG

SEQ ID NO: 90565 - protein, 15 aa, Artificial Sequence
  Description of Artificial Sequence: Synthetic peptide
  Seed: MCSLMQGSTLPRRSG
MFSLSQASTIPRRSG

SEQ ID NO: 90566 - protein, 15 aa, Artificial Sequence
  Description of Artificial Sequence: Synthetic peptide
  Seed: MCSLMQGSTLPRRSG
MFSLSQASTLPRRSG

SEQ ID NO: 90567 - protein, 15 aa, Artificial Sequence
  Description of Artificial Sequence: Synthetic peptide
  Seed: MCSLMQGSTLPRRSG
MFSLSQASTMPRRSG

SEQ ID NO: 90568 - protein, 15 aa, Artificial Sequence
  Description of Artificial Sequence: Synthetic peptide
  Seed: MCSLMQGSTLPRRSG
MFSLSQASTSPRRSG

SEQ ID NO: 90569 - protein, 15 aa, Artificial Sequence
  Description of Artificial Sequence: Synthetic peptide
  Seed: MCSLMQGSTLPRRSG
MFSLSQASTTPRRSG

SEQ ID NO: 90570 - protein, 15 aa, Artificial Sequence
  Description of Artificial Sequence: Synthetic peptide
  Seed: MCSLMQGSTLPRRSG
MFSLSQASTVPRRSG

SEQ ID NO: 90571 - protein, 15 aa, Artificial Sequence
  Description of Artificial Sequence: Synthetic peptide
  Seed: MCSLMQGSTLPRRSG
MFSLSQGSTAPRRSG

SEQ ID NO: 90572 - protein, 15 aa, Artificial Sequence
  Description of Artificial Sequence: Synthetic peptide
  Seed: MCSLMQGSTLPRRSG
MFSLSQGSTIPRRSG

SEQ ID NO: 90573 - protein, 15 aa, Artificial Sequence
  Description of Artificial Sequence: Synthetic peptide
  Seed: MCSLMQGSTLPRRSG
MFSLSQGSTLPRRSG

SEQ ID NO: 90574 - protein, 15 aa, Artificial Sequence
  Description of Artificial Sequence: Synthetic peptide
  Seed: MCSLMQGSTLPRRSG
MFSLSQGSTVPRRSG

SEQ ID NO: 90575 - protein, 15 aa, Artificial Sequence
  Description of Artificial Sequence: Synthetic peptide
  Seed: MCSLMQGSTLPRRSG
MFSLSQPSTIPRRSG

SEQ ID NO: 90576 - protein, 15 aa, Artificial Sequence
  Description of Artificial Sequence: Synthetic peptide
  Seed: MCSLMQGSTLPRRSG
MFSLSQPSTLPRRSG

SEQ ID NO: 90577 - protein, 15 aa, Artificial Sequence
  Description of Artificial Sequence: Synthetic peptide
  Seed: MCSLMQGSTLPRRSG
MFSLSQPSTVPRRSG

SEQ ID NO: 90578 - protein, 15 aa, Artificial Sequence
  Description of Artificial Sequence: Synthetic peptide
  Seed: MCSLMQGSTLPRRSG
MFSLSQSSTIPRRSG

SEQ ID NO: 90579 - protein, 15 aa, Artificial Sequence
  Description of Artificial Sequence: Synthetic peptide
  Seed: MCSLMQGSTLPRRSG
MFSLSQSSTLPRRSG

SEQ ID NO: 90580 - protein, 15 aa, Artificial Sequence
  Description of Artificial Sequence: Synthetic peptide
  Seed: MCSLMQGSTLPRRSG
MFSLSQSSTVPRRSG

SEQ ID NO: 90581 - protein, 15 aa, Artificial Sequence
  Description of Artificial Sequence: Synthetic peptide
  Seed: MCSLMQGSTLPRRSG
MFSLTQASTAPRRSG

SEQ ID NO: 90582 - protein, 15 aa, Artificial Sequence
  Description of Artificial Sequence: Synthetic peptide
  Seed: MCSLMQGSTLPRRSG
MFSLTQASTIPRRSG

SEQ ID NO: 90583 - protein, 15 aa, Artificial Sequence
  Description of Artificial Sequence: Synthetic peptide
  Seed: MCSLMQGSTLPRRSG
MFSLTQASTLPRRSG

SEQ ID NO: 90584 - protein, 15 aa, Artificial Sequence
  Description of Artificial Sequence: Synthetic peptide
  Seed: MCSLMQGSTLPRRSG
MFSLTQASTMPRRSG

SEQ ID NO: 90585 - protein, 15 aa, Artificial Sequence
  Description of Artificial Sequence: Synthetic peptide
  Seed: MCSLMQGSTLPRRSG
MFSLTQASTVPRRSG

SEQ ID NO: 90586 - protein, 15 aa, Artificial Sequence
  Description of Artificial Sequence: Synthetic peptide
  Seed: MCSLMQGSTLPRRSG
MFSLTQGSTIPRRSG

SEQ ID NO: 90587 - protein, 15 aa, Artificial Sequence
  Description of Artificial Sequence: Synthetic peptide
  Seed: MCSLMQGSTLPRRSG
MFSLTQGSTLPRRSG

SEQ ID NO: 90588 - protein, 15 aa, Artificial Sequence
  Description of Artificial Sequence: Synthetic peptide
  Seed: MCSLMQGSTLPRRSG
MFSLTQGSTVPRRSG

SEQ ID NO: 90589 - protein, 15 aa, Artificial Sequence
  Description of Artificial Sequence: Synthetic peptide
  Seed: MCSLMQGSTLPRRSG
MFSLTQPSTIPRRSG

SEQ ID NO: 90590 - protein, 15 aa, Artificial Sequence
  Description of Artificial Sequence: Synthetic peptide
  Seed: MCSLMQGSTLPRRSG
MFSLTQPSTVPRRSG

SEQ ID NO: 90591 - protein, 15 aa, Artificial Sequence
  Description of Artificial Sequence: Synthetic peptide
  Seed: MCSLMQGSTLPRRSG
MFSLTQSSTIPRRSG

SEQ ID NO: 90592 - protein, 15 aa, Artificial Sequence
  Description of Artificial Sequence: Synthetic peptide
  Seed: MCSLMQGSTLPRRSG
MFSLTQSSTLPRRSG

SEQ ID NO: 90593 - protein, 15 aa, Artificial Sequence
  Description of Artificial Sequence: Synthetic peptide
  Seed: MCSLMQGSTLPRRSG
MFSLTQSSTVPRRSG

SEQ ID NO: 90594 - protein, 15 aa, Artificial Sequence
  Description of Artificial Sequence: Synthetic peptide
  Seed: MCSLMQGSTLPRRSG
MFSLVQASTAPRRSG

SEQ ID NO: 90595 - protein, 15 aa, Artificial Sequence
  Description of Artificial Sequence: Synthetic peptide
  Seed: MCSLMQGSTLPRRSG
MFSLVQASTCPRRSG

SEQ ID NO: 90596 - protein, 15 aa, Artificial Sequence
  Description of Artificial Sequence: Synthetic peptide
  Seed: MCSLMQGSTLPRRSG
MFSLVQASTGPRRSG

SEQ ID NO: 90597 - protein, 15 aa, Artificial Sequence
  Description of Artificial Sequence: Synthetic peptide
  Seed: MCSLMQGSTLPRRSG
MFSLVQASTIPRRSG

SEQ ID NO: 90598 - protein, 15 aa, Artificial Sequence
  Description of Artificial Sequence: Synthetic peptide
  Seed: MCSLMQGSTLPRRSG
MFSLVQASTLPRRSG

SEQ ID NO: 90599 - protein, 15 aa, Artificial Sequence
  Description of Artificial Sequence: Synthetic peptide
  Seed: MCSLMQGSTLPRRSG
MFSLVQASTMPRRSG

SEQ ID NO: 90600 - protein, 15 aa, Artificial Sequence
  Description of Artificial Sequence: Synthetic peptide
  Seed: MCSLMQGSTLPRRSG
MFSLVQASTNPRRSG

SEQ ID NO: 90601 - protein, 15 aa, Artificial Sequence
  Description of Artificial Sequence: Synthetic peptide
  Seed: MCSLMQGSTLPRRSG
MFSLVQASTSPRRSG

SEQ ID NO: 90602 - protein, 15 aa, Artificial Sequence
  Description of Artificial Sequence: Synthetic peptide
  Seed: MCSLMQGSTLPRRSG
MFSLVQASTTPRRSG

SEQ ID NO: 90603 - protein, 15 aa, Artificial Sequence
  Description of Artificial Sequence: Synthetic peptide
  Seed: MCSLMQGSTLPRRSG
MFSLVQASTVPRRSG

SEQ ID NO: 90604 - protein, 15 aa, Artificial Sequence
  Description of Artificial Sequence: Synthetic peptide
  Seed: MCSLMQGSTLPRRSG
MFSLVQGSTAPRRSG

SEQ ID NO: 90605 - protein, 15 aa, Artificial Sequence
  Description of Artificial Sequence: Synthetic peptide
  Seed: MCSLMQGSTLPRRSG
MFSLVQGSTGPRRSG

SEQ ID NO: 90606 - protein, 15 aa, Artificial Sequence
  Description of Artificial Sequence: Synthetic peptide
  Seed: MCSLMQGSTLPRRSG
MFSLVQGSTIPRRSG

SEQ ID NO: 90607 - protein, 15 aa, Artificial Sequence
  Description of Artificial Sequence: Synthetic peptide
  Seed: MCSLMQGSTLPRRSG
MFSLVQGSTLPRRSG

SEQ ID NO: 90608 - protein, 15 aa, Artificial Sequence
  Description of Artificial Sequence: Synthetic peptide
  Seed: MCSLMQGSTLPRRSG
MFSLVQGSTMPRRSG

SEQ ID NO: 90609 - protein, 15 aa, Artificial Sequence
  Description of Artificial Sequence: Synthetic peptide
  Seed: MCSLMQGSTLPRRSG
MFSLVQGSTSPRRSG

SEQ ID NO: 90610 - protein, 15 aa, Artificial Sequence
  Description of Artificial Sequence: Synthetic peptide
  Seed: MCSLMQGSTLPRRSG
MFSLVQGSTTPRRSG

SEQ ID NO: 90611 - protein, 15 aa, Artificial Sequence
  Description of Artificial Sequence: Synthetic peptide
  Seed: MCSLMQGSTLPRRSG
MFSLVQGSTVPRRSG

SEQ ID NO: 90612 - protein, 15 aa, Artificial Sequence
  Description of Artificial Sequence: Synthetic peptide
  Seed: MCSLMQGSTLPRRSG
MFSLVQNSTAPRRSG

SEQ ID NO: 90613 - protein, 15 aa, Artificial Sequence
  Description of Artificial Sequence: Synthetic peptide
  Seed: MCSLMQGSTLPRRSG
MFSLVQNSTIPRRSG

SEQ ID NO: 90614 - protein, 15 aa, Artificial Sequence
  Description of Artificial Sequence: Synthetic peptide
  Seed: MCSLMQGSTLPRRSG
MFSLVQNSTLPRRSG

SEQ ID NO: 90615 - protein, 15 aa, Artificial Sequence
  Description of Artificial Sequence: Synthetic peptide
  Seed: MCSLMQGSTLPRRSG
MFSLVQNSTVPRRSG

SEQ ID NO: 90616 - protein, 15 aa, Artificial Sequence
  Description of Artificial Sequence: Synthetic peptide
  Seed: MCSLMQGSTLPRRSG
MFSLVQPSTAPRRSG

SEQ ID NO: 90617 - protein, 15 aa, Artificial Sequence
  Description of Artificial Sequence: Synthetic peptide
  Seed: MCSLMQGSTLPRRSG
MFSLVQPSTIPRRSG

SEQ ID NO: 90618 - protein, 15 aa, Artificial Sequence
  Description of Artificial Sequence: Synthetic peptide
  Seed: MCSLMQGSTLPRRSG
MFSLVQPSTLPRRSG

SEQ ID NO: 90619 - protein, 15 aa, Artificial Sequence
  Description of Artificial Sequence: Synthetic peptide
  Seed: MCSLMQGSTLPRRSG
MFSLVQPSTMPRRSG

SEQ ID NO: 90620 - protein, 15 aa, Artificial Sequence
  Description of Artificial Sequence: Synthetic peptide
  Seed: MCSLMQGSTLPRRSG
MFSLVQPSTSPRRSG

SEQ ID NO: 90621 - protein, 15 aa, Artificial Sequence
  Description of Artificial Sequence: Synthetic peptide
  Seed: MCSLMQGSTLPRRSG
MFSLVQPSTTPRRSG

SEQ ID NO: 90622 - protein, 15 aa, Artificial Sequence
  Description of Artificial Sequence: Synthetic peptide
  Seed: MCSLMQGSTLPRRSG
MFSLVQPSTVPRRSG

SEQ ID NO: 90623 - protein, 15 aa, Artificial Sequence
  Description of Artificial Sequence: Synthetic peptide
  Seed: MCSLMQGSTLPRRSG
MFSLVQSSTAPRRSG

SEQ ID NO: 90624 - protein, 15 aa, Artificial Sequence
  Description of Artificial Sequence: Synthetic peptide
  Seed: MCSLMQGSTLPRRSG
MFSLVQSSTIPRRSG

SEQ ID NO: 90625 - protein, 15 aa, Artificial Sequence
  Description of Artificial Sequence: Synthetic peptide
  Seed: MCSLMQGSTLPRRSG
MFSLVQSSTLPRRSG

SEQ ID NO: 90626 - protein, 15 aa, Artificial Sequence
  Description of Artificial Sequence: Synthetic peptide
  Seed: MCSLMQGSTLPRRSG
MFSLVQSSTMPRRSG

SEQ ID NO: 90627 - protein, 15 aa, Artificial Sequence
  Description of Artificial Sequence: Synthetic peptide
  Seed: MCSLMQGSTLPRRSG
MFSLVQSSTSPRRSG

SEQ ID NO: 90628 - protein, 15 aa, Artificial Sequence
  Description of Artificial Sequence: Synthetic peptide
  Seed: MCSLMQGSTLPRRSG
MFSLVQSSTTPRRSG

SEQ ID NO: 90629 - protein, 15 aa, Artificial Sequence
  Description of Artificial Sequence: Synthetic peptide
  Seed: MCSLMQGSTLPRRSG
MFSLVQSSTVPRRSG

SEQ ID NO: 90630 - protein, 15 aa, Artificial Sequence
  Description of Artificial Sequence: Synthetic peptide
  Seed: MCSLMQGSTLPRRSG
MFSLVQTSTAPRRSG

SEQ ID NO: 90631 - protein, 15 aa, Artificial Sequence
  Description of Artificial Sequence: Synthetic peptide
  Seed: MCSLMQGSTLPRRSG
MFSLWQASTVPRRSG

SEQ ID NO: 90632 - protein, 15 aa, Artificial Sequence
  Description of Artificial Sequence: Synthetic peptide
  Seed: MCSLMQGSTLPRRSG
MISLAQASTAPRRSG

SEQ ID NO: 90633 - protein, 15 aa, Artificial Sequence
  Description of Artificial Sequence: Synthetic peptide
  Seed: MCSLMQGSTLPRRSG
MISLAQASTIPRRSG

SEQ ID NO: 90634 - protein, 15 aa, Artificial Sequence
  Description of Artificial Sequence: Synthetic peptide
  Seed: MCSLMQGSTLPRRSG
MISLAQASTLPRRSG

SEQ ID NO: 90635 - protein, 15 aa, Artificial Sequence
  Description of Artificial Sequence: Synthetic peptide
  Seed: MCSLMQGSTLPRRSG
MISLAQASTVPRRSG

SEQ ID NO: 90636 - protein, 15 aa, Artificial Sequence
  Description of Artificial Sequence: Synthetic peptide
  Seed: MCSLMQGSTLPRRSG
MISLAQGSTIPRRSG

SEQ ID NO: 90637 - protein, 15 aa, Artificial Sequence
  Description of Artificial Sequence: Synthetic peptide
  Seed: MCSLMQGSTLPRRSG
MISLAQGSTLPRRSG

SEQ ID NO: 90638 - protein, 15 aa, Artificial Sequence
  Description of Artificial Sequence: Synthetic peptide
  Seed: MCSLMQGSTLPRRSG
MISLAQGSTVPRRSG

SEQ ID NO: 90639 - protein, 15 aa, Artificial Sequence
  Description of Artificial Sequence: Synthetic peptide
  Seed: MCSLMQGSTLPRRSG
MISLIQASTAPRRSG

SEQ ID NO: 90640 - protein, 15 aa, Artificial Sequence
  Description of Artificial Sequence: Synthetic peptide
  Seed: MCSLMQGSTLPRRSG
MISLIQASTIPRRSG

SEQ ID NO: 90641 - protein, 15 aa, Artificial Sequence
  Description of Artificial Sequence: Synthetic peptide
  Seed: MCSLMQGSTLPRRSG
MISLIQASTLPRRSG

SEQ ID NO: 90642 - protein, 15 aa, Artificial Sequence
  Description of Artificial Sequence: Synthetic peptide
  Seed: MCSLMQGSTLPRRSG
MISLIQASTMPRRSG

SEQ ID NO: 90643 - protein, 15 aa, Artificial Sequence
  Description of Artificial Sequence: Synthetic peptide
  Seed: MCSLMQGSTLPRRSG
MISLIQASTTPRRSG

SEQ ID NO: 90644 - protein, 15 aa, Artificial Sequence
  Description of Artificial Sequence: Synthetic peptide
  Seed: MCSLMQGSTLPRRSG
MISLIQASTVPRRSG

SEQ ID NO: 90645 - protein, 15 aa, Artificial Sequence
  Description of Artificial Sequence: Synthetic peptide
  Seed: MCSLMQGSTLPRRSG
MISLIQGSTAPRRSG

SEQ ID NO: 90646 - protein, 15 aa, Artificial Sequence
  Description of Artificial Sequence: Synthetic peptide
  Seed: MCSLMQGSTLPRRSG
MISLIQGSTIPRRSG

SEQ ID NO: 90647 - protein, 15 aa, Artificial Sequence
  Description of Artificial Sequence: Synthetic peptide
  Seed: MCSLMQGSTLPRRSG
MISLIQGSTLPRRSG

SEQ ID NO: 90648 - protein, 15 aa, Artificial Sequence
  Description of Artificial Sequence: Synthetic peptide
  Seed: MCSLMQGSTLPRRSG
MISLIQGSTMPRRSG

SEQ ID NO: 90649 - protein, 15 aa, Artificial Sequence
  Description of Artificial Sequence: Synthetic peptide
  Seed: MCSLMQGSTLPRRSG
MISLIQGSTTPRRSG

SEQ ID NO: 90650 - protein, 15 aa, Artificial Sequence
  Description of Artificial Sequence: Synthetic peptide
  Seed: MCSLMQGSTLPRRSG
MISLIQGSTVPRRSG

SEQ ID NO: 90651 - protein, 15 aa, Artificial Sequence
  Description of Artificial Sequence: Synthetic peptide
  Seed: MCSLMQGSTLPRRSG
MISLIQPSTAPRRSG

SEQ ID NO: 90652 - protein, 15 aa, Artificial Sequence
  Description of Artificial Sequence: Synthetic peptide
  Seed: MCSLMQGSTLPRRSG
MISLIQPSTIPRRSG

SEQ ID NO: 90653 - protein, 15 aa, Artificial Sequence
  Description of Artificial Sequence: Synthetic peptide
  Seed: MCSLMQGSTLPRRSG
MISLIQPSTLPRRSG

SEQ ID NO: 90654 - protein, 15 aa, Artificial Sequence
  Description of Artificial Sequence: Synthetic peptide
  Seed: MCSLMQGSTLPRRSG
MISLIQPSTVPRRSG

SEQ ID NO: 90655 - protein, 15 aa, Artificial Sequence
  Description of Artificial Sequence: Synthetic peptide
  Seed: MCSLMQGSTLPRRSG
MISLIQSSTIPRRSG

SEQ ID NO: 90656 - protein, 15 aa, Artificial Sequence
  Description of Artificial Sequence: Synthetic peptide
  Seed: MCSLMQGSTLPRRSG
MISLIQSSTLPRRSG

SEQ ID NO: 90657 - protein, 15 aa, Artificial Sequence
  Description of Artificial Sequence: Synthetic peptide
  Seed: MCSLMQGSTLPRRSG
MISLIQSSTVPRRSG

SEQ ID NO: 90658 - protein, 15 aa, Artificial Sequence
  Description of Artificial Sequence: Synthetic peptide
  Seed: MCSLMQGSTLPRRSG
MISLLQASTAPRRSG

SEQ ID NO: 90659 - protein, 15 aa, Artificial Sequence
  Description of Artificial Sequence: Synthetic peptide
  Seed: MCSLMQGSTLPRRSG
MISLLQASTCPRRSG

SEQ ID NO: 90660 - protein, 15 aa, Artificial Sequence
  Description of Artificial Sequence: Synthetic peptide
  Seed: MCSLMQGSTLPRRSG
MISLLQASTGPRRSG

SEQ ID NO: 90661 - protein, 15 aa, Artificial Sequence
  Description of Artificial Sequence: Synthetic peptide
  Seed: MCSLMQGSTLPRRSG
MISLLQASTIPRRSG

SEQ ID NO: 90662 - protein, 15 aa, Artificial Sequence
  Description of Artificial Sequence: Synthetic peptide
  Seed: MCSLMQGSTLPRRSG
MISLLQASTLPRRSG

SEQ ID NO: 90663 - protein, 15 aa, Artificial Sequence
  Description of Artificial Sequence: Synthetic peptide
  Seed: MCSLMQGSTLPRRSG
MISLLQASTMPRRSG

SEQ ID NO: 90664 - protein, 15 aa, Artificial Sequence
  Description of Artificial Sequence: Synthetic peptide
  Seed: MCSLMQGSTLPRRSG
MISLLQASTSPRRSG

SEQ ID NO: 90665 - protein, 15 aa, Artificial Sequence
  Description of Artificial Sequence: Synthetic peptide
  Seed: MCSLMQGSTLPRRSG
MISLLQASTTPRRSG

SEQ ID NO: 90666 - protein, 15 aa, Artificial Sequence
  Description of Artificial Sequence: Synthetic peptide
  Seed: MCSLMQGSTLPRRSG
MISLLQASTVPRRSG

SEQ ID NO: 90667 - protein, 15 aa, Artificial Sequence
  Description of Artificial Sequence: Synthetic peptide
  Seed: MCSLMQGSTLPRRSG
MISLLQGSTAPRRSG

SEQ ID NO: 90668 - protein, 15 aa, Artificial Sequence
  Description of Artificial Sequence: Synthetic peptide
  Seed: MCSLMQGSTLPRRSG
MISLLQGSTGPRRSG

SEQ ID NO: 90669 - protein, 15 aa, Artificial Sequence
  Description of Artificial Sequence: Synthetic peptide
  Seed: MCSLMQGSTLPRRSG
MISLLQGSTIPRRSG

SEQ ID NO: 90670 - protein, 15 aa, Artificial Sequence
  Description of Artificial Sequence: Synthetic peptide
  Seed: MCSLMQGSTLPRRSG
MISLLQGSTLPRRSG

SEQ ID NO: 90671 - protein, 15 aa, Artificial Sequence
  Description of Artificial Sequence: Synthetic peptide
  Seed: MCSLMQGSTLPRRSG
MISLLQGSTMPRRSG

SEQ ID NO: 90672 - protein, 15 aa, Artificial Sequence
  Description of Artificial Sequence: Synthetic peptide
  Seed: MCSLMQGSTLPRRSG
MISLLQGSTSPRRSG

SEQ ID NO: 90673 - protein, 15 aa, Artificial Sequence
  Description of Artificial Sequence: Synthetic peptide
  Seed: MCSLMQGSTLPRRSG
MISLLQGSTTPRRSG

SEQ ID NO: 90674 - protein, 15 aa, Artificial Sequence
  Description of Artificial Sequence: Synthetic peptide
  Seed: MCSLMQGSTLPRRSG
MISLLQGSTVPRRSG

SEQ ID NO: 90675 - protein, 15 aa, Artificial Sequence
  Description of Artificial Sequence: Synthetic peptide
  Seed: MCSLMQGSTLPRRSG
MISLLQNSTAPRRSG

SEQ ID NO: 90676 - protein, 15 aa, Artificial Sequence
  Description of Artificial Sequence: Synthetic peptide
  Seed: MCSLMQGSTLPRRSG
MISLLQNSTIPRRSG

SEQ ID NO: 90677 - protein, 15 aa, Artificial Sequence
  Description of Artificial Sequence: Synthetic peptide
  Seed: MCSLMQGSTLPRRSG
MISLLQNSTLPRRSG

SEQ ID NO: 90678 - protein, 15 aa, Artificial Sequence
  Description of Artificial Sequence: Synthetic peptide
  Seed: MCSLMQGSTLPRRSG
MISLLQNSTVPRRSG

SEQ ID NO: 90679 - protein, 15 aa, Artificial Sequence
  Description of Artificial Sequence: Synthetic peptide
  Seed: MCSLMQGSTLPRRSG
MISLLQPSTAPRRSG

SEQ ID NO: 90680 - protein, 15 aa, Artificial Sequence
  Description of Artificial Sequence: Synthetic peptide
  Seed: MCSLMQGSTLPRRSG
MISLLQPSTIPRRSG

SEQ ID NO: 90681 - protein, 15 aa, Artificial Sequence
  Description of Artificial Sequence: Synthetic peptide
  Seed: MCSLMQGSTLPRRSG
MISLLQPSTLPRRSG

SEQ ID NO: 90682 - protein, 15 aa, Artificial Sequence
  Description of Artificial Sequence: Synthetic peptide
  Seed: MCSLMQGSTLPRRSG
MISLLQPSTMPRRSG

SEQ ID NO: 90683 - protein, 15 aa, Artificial Sequence
  Description of Artificial Sequence: Synthetic peptide
  Seed: MCSLMQGSTLPRRSG
MISLLQPSTSPRRSG

SEQ ID NO: 90684 - protein, 15 aa, Artificial Sequence
  Description of Artificial Sequence: Synthetic peptide
  Seed: MCSLMQGSTLPRRSG
MISLLQPSTTPRRSG

SEQ ID NO: 90685 - protein, 15 aa, Artificial Sequence
  Description of Artificial Sequence: Synthetic peptide
  Seed: MCSLMQGSTLPRRSG
MISLLQPSTVPRRSG

SEQ ID NO: 90686 - protein, 15 aa, Artificial Sequence
  Description of Artificial Sequence: Synthetic peptide
  Seed: MCSLMQGSTLPRRSG
MISLLQSSTAPRRSG

SEQ ID NO: 90687 - protein, 15 aa, Artificial Sequence
  Description of Artificial Sequence: Synthetic peptide
  Seed: MCSLMQGSTLPRRSG
MISLLQSSTIPRRSG

SEQ ID NO: 90688 - protein, 15 aa, Artificial Sequence
  Description of Artificial Sequence: Synthetic peptide
  Seed: MCSLMQGSTLPRRSG
MISLLQSSTLPRRSG

SEQ ID NO: 90689 - protein, 15 aa, Artificial Sequence
  Description of Artificial Sequence: Synthetic peptide
  Seed: MCSLMQGSTLPRRSG
MISLLQSSTMPRRSG

SEQ ID NO: 90690 - protein, 15 aa, Artificial Sequence
  Description of Artificial Sequence: Synthetic peptide
  Seed: MCSLMQGSTLPRRSG
MISLLQSSTSPRRSG

SEQ ID NO: 90691 - protein, 15 aa, Artificial Sequence
  Description of Artificial Sequence: Synthetic peptide
  Seed: MCSLMQGSTLPRRSG
MISLLQSSTTPRRSG

SEQ ID NO: 90692 - protein, 15 aa, Artificial Sequence
  Description of Artificial Sequence: Synthetic peptide
  Seed: MCSLMQGSTLPRRSG
MISLLQSSTVPRRSG

SEQ ID NO: 90693 - protein, 15 aa, Artificial Sequence
  Description of Artificial Sequence: Synthetic peptide
  Seed: MCSLMQGSTLPRRSG
MISLLQTSTAPRRSG

SEQ ID NO: 90694 - protein, 15 aa, Artificial Sequence
  Description of Artificial Sequence: Synthetic peptide
  Seed: MCSLMQGSTLPRRSG
MISLLQTSTIPRRSG

SEQ ID NO: 90695 - protein, 15 aa, Artificial Sequence
  Description of Artificial Sequence: Synthetic peptide
  Seed: MCSLMQGSTLPRRSG
MISLLQTSTLPRRSG

SEQ ID NO: 90696 - protein, 15 aa, Artificial Sequence
  Description of Artificial Sequence: Synthetic peptide
  Seed: MCSLMQGSTLPRRSG
MISLLQTSTVPRRSG

SEQ ID NO: 90697 - protein, 15 aa, Artificial Sequence
  Description of Artificial Sequence: Synthetic peptide
  Seed: MCSLMQGSTLPRRSG
MISLMQASTAPRRSG

SEQ ID NO: 90698 - protein, 15 aa, Artificial Sequence
  Description of Artificial Sequence: Synthetic peptide
  Seed: MCSLMQGSTLPRRSG
MISLMQASTGPRRSG

SEQ ID NO: 90699 - protein, 15 aa, Artificial Sequence
  Description of Artificial Sequence: Synthetic peptide
  Seed: MCSLMQGSTLPRRSG
MISLMQASTIPRRSG

SEQ ID NO: 90700 - protein, 15 aa, Artificial Sequence
  Description of Artificial Sequence: Synthetic peptide
  Seed: MCSLMQGSTLPRRSG
MISLMQASTLPRRSG

SEQ ID NO: 90701 - protein, 15 aa, Artificial Sequence
  Description of Artificial Sequence: Synthetic peptide
  Seed: MCSLMQGSTLPRRSG
MISLMQASTMPRRSG

SEQ ID NO: 90702 - protein, 15 aa, Artificial Sequence
  Description of Artificial Sequence: Synthetic peptide
  Seed: MCSLMQGSTLPRRSG
MISLMQASTSPRRSG

SEQ ID NO: 90703 - protein, 15 aa, Artificial Sequence
  Description of Artificial Sequence: Synthetic peptide
  Seed: MCSLMQGSTLPRRSG
MISLMQASTTPRRSG

SEQ ID NO: 90704 - protein, 15 aa, Artificial Sequence
  Description of Artificial Sequence: Synthetic peptide
  Seed: MCSLMQGSTLPRRSG
MISLMQASTVPRRSG

SEQ ID NO: 90705 - protein, 15 aa, Artificial Sequence
  Description of Artificial Sequence: Synthetic peptide
  Seed: MCSLMQGSTLPRRSG
MISLMQGSTAPRRSG

SEQ ID NO: 90706 - protein, 15 aa, Artificial Sequence
  Description of Artificial Sequence: Synthetic peptide
  Seed: MCSLMQGSTLPRRSG
MISLMQGSTGPRRSG

SEQ ID NO: 90707 - protein, 15 aa, Artificial Sequence
  Description of Artificial Sequence: Synthetic peptide
  Seed: MCSLMQGSTLPRRSG
MISLMQGSTIPRRSG

SEQ ID NO: 90708 - protein, 15 aa, Artificial Sequence
  Description of Artificial Sequence: Synthetic peptide
  Seed: MCSLMQGSTLPRRSG
MISLMQGSTLPRRSG

SEQ ID NO: 90709 - protein, 15 aa, Artificial Sequence
  Description of Artificial Sequence: Synthetic peptide
  Seed: MCSLMQGSTLPRRSG
MISLMQGSTMPRRSG

SEQ ID NO: 90710 - protein, 15 aa, Artificial Sequence
  Description of Artificial Sequence: Synthetic peptide
  Seed: MCSLMQGSTLPRRSG
MISLMQGSTSPRRSG

SEQ ID NO: 90711 - protein, 15 aa, Artificial Sequence
  Description of Artificial Sequence: Synthetic peptide
  Seed: MCSLMQGSTLPRRSG
MISLMQGSTTPRRSG

SEQ ID NO: 90712 - protein, 15 aa, Artificial Sequence
  Description of Artificial Sequence: Synthetic peptide
  Seed: MCSLMQGSTLPRRSG
MISLMQGSTVPRRSG

SEQ ID NO: 90713 - protein, 15 aa, Artificial Sequence
  Description of Artificial Sequence: Synthetic peptide
  Seed: MCSLMQGSTLPRRSG
MISLMQNSTAPRRSG

SEQ ID NO: 90714 - protein, 15 aa, Artificial Sequence
  Description of Artificial Sequence: Synthetic peptide
  Seed: MCSLMQGSTLPRRSG
MISLMQNSTIPRRSG

SEQ ID NO: 90715 - protein, 15 aa, Artificial Sequence
  Description of Artificial Sequence: Synthetic peptide
  Seed: MCSLMQGSTLPRRSG
MISLMQNSTLPRRSG

SEQ ID NO: 90716 - protein, 15 aa, Artificial Sequence
  Description of Artificial Sequence: Synthetic peptide
  Seed: MCSLMQGSTLPRRSG
MISLMQNSTVPRRSG

SEQ ID NO: 90717 - protein, 15 aa, Artificial Sequence
  Description of Artificial Sequence: Synthetic peptide
  Seed: MCSLMQGSTLPRRSG
MISLMQPSTAPRRSG

SEQ ID NO: 90718 - protein, 15 aa, Artificial Sequence
  Description of Artificial Sequence: Synthetic peptide
  Seed: MCSLMQGSTLPRRSG
MISLMQPSTIPRRSG

SEQ ID NO: 90719 - protein, 15 aa, Artificial Sequence
  Description of Artificial Sequence: Synthetic peptide
  Seed: MCSLMQGSTLPRRSG
MISLMQPSTLPRRSG

SEQ ID NO: 90720 - protein, 15 aa, Artificial Sequence
  Description of Artificial Sequence: Synthetic peptide
  Seed: MCSLMQGSTLPRRSG
MISLMQPSTMPRRSG

SEQ ID NO: 90721 - protein, 15 aa, Artificial Sequence
  Description of Artificial Sequence: Synthetic peptide
  Seed: MCSLMQGSTLPRRSG
MISLMQPSTSPRRSG

SEQ ID NO: 90722 - protein, 15 aa, Artificial Sequence
  Description of Artificial Sequence: Synthetic peptide
  Seed: MCSLMQGSTLPRRSG
MISLMQPSTTPRRSG

SEQ ID NO: 90723 - protein, 15 aa, Artificial Sequence
  Description of Artificial Sequence: Synthetic peptide
  Seed: MCSLMQGSTLPRRSG
MISLMQPSTVPRRSG

SEQ ID NO: 90724 - protein, 15 aa, Artificial Sequence
  Description of Artificial Sequence: Synthetic peptide
  Seed: MCSLMQGSTLPRRSG
MISLMQSSTAPRRSG

SEQ ID NO: 90725 - protein, 15 aa, Artificial Sequence
  Description of Artificial Sequence: Synthetic peptide
  Seed: MCSLMQGSTLPRRSG
MISLMQSSTIPRRSG

SEQ ID NO: 90726 - protein, 15 aa, Artificial Sequence
  Description of Artificial Sequence: Synthetic peptide
  Seed: MCSLMQGSTLPRRSG
MISLMQSSTLPRRSG

SEQ ID NO: 90727 - protein, 15 aa, Artificial Sequence
  Description of Artificial Sequence: Synthetic peptide
  Seed: MCSLMQGSTLPRRSG
MISLMQSSTMPRRSG

SEQ ID NO: 90728 - protein, 15 aa, Artificial Sequence
  Description of Artificial Sequence: Synthetic peptide
  Seed: MCSLMQGSTLPRRSG
MISLMQSSTSPRRSG

SEQ ID NO: 90729 - protein, 15 aa, Artificial Sequence
  Description of Artificial Sequence: Synthetic peptide
  Seed: MCSLMQGSTLPRRSG
MISLMQSSTTPRRSG

SEQ ID NO: 90730 - protein, 15 aa, Artificial Sequence
  Description of Artificial Sequence: Synthetic peptide
  Seed: MCSLMQGSTLPRRSG
MISLMQSSTVPRRSG

SEQ ID NO: 90731 - protein, 15 aa, Artificial Sequence
  Description of Artificial Sequence: Synthetic peptide
  Seed: MCSLMQGSTLPRRSG
MISLMQTSTAPRRSG

SEQ ID NO: 90732 - protein, 15 aa, Artificial Sequence
  Description of Artificial Sequence: Synthetic peptide
  Seed: MCSLMQGSTLPRRSG
MISLMQTSTIPRRSG

SEQ ID NO: 90733 - protein, 15 aa, Artificial Sequence
  Description of Artificial Sequence: Synthetic peptide
  Seed: MCSLMQGSTLPRRSG
MISLMQTSTLPRRSG

SEQ ID NO: 90734 - protein, 15 aa, Artificial Sequence
  Description of Artificial Sequence: Synthetic peptide
  Seed: MCSLMQGSTLPRRSG
MISLMQTSTVPRRSG

SEQ ID NO: 90735 - protein, 15 aa, Artificial Sequence
  Description of Artificial Sequence: Synthetic peptide
  Seed: MCSLMQGSTLPRRSG
MISLMQVSTAPRRSG

SEQ ID NO: 90736 - protein, 15 aa, Artificial Sequence
  Description of Artificial Sequence: Synthetic peptide
  Seed: MCSLMQGSTLPRRSG
MISLQQASTAPRRSG

SEQ ID NO: 90737 - protein, 15 aa, Artificial Sequence
  Description of Artificial Sequence: Synthetic peptide
  Seed: MCSLMQGSTLPRRSG
MISLQQASTIPRRSG

SEQ ID NO: 90738 - protein, 15 aa, Artificial Sequence
  Description of Artificial Sequence: Synthetic peptide
  Seed: MCSLMQGSTLPRRSG
MISLQQASTLPRRSG

SEQ ID NO: 90739 - protein, 15 aa, Artificial Sequence
  Description of Artificial Sequence: Synthetic peptide
  Seed: MCSLMQGSTLPRRSG
MISLQQASTVPRRSG

SEQ ID NO: 90740 - protein, 15 aa, Artificial Sequence
  Description of Artificial Sequence: Synthetic peptide
  Seed: MCSLMQGSTLPRRSG
MISLQQGSTIPRRSG

SEQ ID NO: 90741 - protein, 15 aa, Artificial Sequence
  Description of Artificial Sequence: Synthetic peptide
  Seed: MCSLMQGSTLPRRSG
MISLQQGSTLPRRSG

SEQ ID NO: 90742 - protein, 15 aa, Artificial Sequence
  Description of Artificial Sequence: Synthetic peptide
  Seed: MCSLMQGSTLPRRSG
MISLQQGSTVPRRSG

SEQ ID NO: 90743 - protein, 15 aa, Artificial Sequence
  Description of Artificial Sequence: Synthetic peptide
  Seed: MCSLMQGSTLPRRSG
MISLVQGSTAPRRSG

SEQ ID NO: 90744 - protein, 15 aa, Artificial Sequence
  Description of Artificial Sequence: Synthetic peptide
  Seed: MCSLMQGSTLPRRSG
MISLVQGSTIPRRSG

SEQ ID NO: 90745 - protein, 15 aa, Artificial Sequence
  Description of Artificial Sequence: Synthetic peptide
  Seed: MCSLMQGSTLPRRSG
MISLVQGSTLPRRSG

SEQ ID NO: 90746 - protein, 15 aa, Artificial Sequence
  Description of Artificial Sequence: Synthetic peptide
  Seed: MCSLMQGSTLPRRSG
MISLVQGSTVPRRSG

SEQ ID NO: 90747 - protein, 15 aa, Artificial Sequence
  Description of Artificial Sequence: Synthetic peptide
  Seed: MCSLMQGSTLPRRSG
MLSLAQASTIPRRSG

SEQ ID NO: 90748 - protein, 15 aa, Artificial Sequence
  Description of Artificial Sequence: Synthetic peptide
  Seed: MCSLMQGSTLPRRSG
MLSLAQASTLPRRSG

SEQ ID NO: 90749 - protein, 15 aa, Artificial Sequence
  Description of Artificial Sequence: Synthetic peptide
  Seed: MCSLMQGSTLPRRSG
MLSLAQASTVPRRSG

SEQ ID NO: 90750 - protein, 15 aa, Artificial Sequence
  Description of Artificial Sequence: Synthetic peptide
  Seed: MCSLMQGSTLPRRSG
MLSLIQASTIPRRSG

SEQ ID NO: 90751 - protein, 15 aa, Artificial Sequence
  Description of Artificial Sequence: Synthetic peptide
  Seed: MCSLMQGSTLPRRSG
MLSLIQASTLPRRSG

SEQ ID NO: 90752 - protein, 15 aa, Artificial Sequence
  Description of Artificial Sequence: Synthetic peptide
  Seed: MCSLMQGSTLPRRSG
MLSLIQASTVPRRSG

SEQ ID NO: 90753 - protein, 15 aa, Artificial Sequence
  Description of Artificial Sequence: Synthetic peptide
  Seed: MCSLMQGSTLPRRSG
MLSLIQGSTAPRRSG

SEQ ID NO: 90754 - protein, 15 aa, Artificial Sequence
  Description of Artificial Sequence: Synthetic peptide
  Seed: MCSLMQGSTLPRRSG
MLSLIQGSTIPRRSG

SEQ ID NO: 90755 - protein, 15 aa, Artificial Sequence
  Description of Artificial Sequence: Synthetic peptide
  Seed: MCSLMQGSTLPRRSG
MLSLIQGSTLPRRSG

SEQ ID NO: 90756 - protein, 15 aa, Artificial Sequence
  Description of Artificial Sequence: Synthetic peptide
  Seed: MCSLMQGSTLPRRSG
MLSLIQGSTVPRRSG

SEQ ID NO: 90757 - protein, 15 aa, Artificial Sequence
  Description of Artificial Sequence: Synthetic peptide
  Seed: MCSLMQGSTLPRRSG
MLSLIQSSTVPRRSG

SEQ ID NO: 90758 - protein, 15 aa, Artificial Sequence
  Description of Artificial Sequence: Synthetic peptide
  Seed: MCSLMQGSTLPRRSG
MLSLLQASTAPRRSG

SEQ ID NO: 90759 - protein, 15 aa, Artificial Sequence
  Description of Artificial Sequence: Synthetic peptide
  Seed: MCSLMQGSTLPRRSG
MLSLLQASTGPRRSG

SEQ ID NO: 90760 - protein, 15 aa, Artificial Sequence
  Description of Artificial Sequence: Synthetic peptide
  Seed: MCSLMQGSTLPRRSG
MLSLLQASTIPRRSG

SEQ ID NO: 90761 - protein, 15 aa, Artificial Sequence
  Description of Artificial Sequence: Synthetic peptide
  Seed: MCSLMQGSTLPRRSG
MLSLLQASTLPRRSG

SEQ ID NO: 90762 - protein, 15 aa, Artificial Sequence
  Description of Artificial Sequence: Synthetic peptide
  Seed: MCSLMQGSTLPRRSG
MLSLLQASTMPRRSG

SEQ ID NO: 90763 - protein, 15 aa, Artificial Sequence
  Description of Artificial Sequence: Synthetic peptide
  Seed: MCSLMQGSTLPRRSG
MLSLLQASTSPRRSG

SEQ ID NO: 90764 - protein, 15 aa, Artificial Sequence
  Description of Artificial Sequence: Synthetic peptide
  Seed: MCSLMQGSTLPRRSG
MLSLLQASTTPRRSG

SEQ ID NO: 90765 - protein, 15 aa, Artificial Sequence
  Description of Artificial Sequence: Synthetic peptide
  Seed: MCSLMQGSTLPRRSG
MLSLLQASTVPRRSG

SEQ ID NO: 90766 - protein, 15 aa, Artificial Sequence
  Description of Artificial Sequence: Synthetic peptide
  Seed: MCSLMQGSTLPRRSG
MLSLLQGSTAPRRSG

SEQ ID NO: 90767 - protein, 15 aa, Artificial Sequence
  Description of Artificial Sequence: Synthetic peptide
  Seed: MCSLMQGSTLPRRSG
MLSLLQGSTGPRRSG

SEQ ID NO: 90768 - protein, 15 aa, Artificial Sequence
  Description of Artificial Sequence: Synthetic peptide
  Seed: MCSLMQGSTLPRRSG
MLSLLQGSTIPRRSG

SEQ ID NO: 90769 - protein, 15 aa, Artificial Sequence
  Description of Artificial Sequence: Synthetic peptide
  Seed: MCSLMQGSTLPRRSG
MLSLLQGSTLPRRSG

SEQ ID NO: 90770 - protein, 15 aa, Artificial Sequence
  Description of Artificial Sequence: Synthetic peptide
  Seed: MCSLMQGSTLPRRSG
MLSLLQGSTMPRRSG

SEQ ID NO: 90771 - protein, 15 aa, Artificial Sequence
  Description of Artificial Sequence: Synthetic peptide
  Seed: MCSLMQGSTLPRRSG
MLSLLQGSTSPRRSG

SEQ ID NO: 90772 - protein, 15 aa, Artificial Sequence
  Description of Artificial Sequence: Synthetic peptide
  Seed: MCSLMQGSTLPRRSG
MLSLLQGSTTPRRSG

SEQ ID NO: 90773 - protein, 15 aa, Artificial Sequence
  Description of Artificial Sequence: Synthetic peptide
  Seed: MCSLMQGSTLPRRSG
MLSLLQGSTVPRRSG

SEQ ID NO: 90774 - protein, 15 aa, Artificial Sequence
  Description of Artificial Sequence: Synthetic peptide
  Seed: MCSLMQGSTLPRRSG
MLSLLQNSTAPRRSG

SEQ ID NO: 90775 - protein, 15 aa, Artificial Sequence
  Description of Artificial Sequence: Synthetic peptide
  Seed: MCSLMQGSTLPRRSG
MLSLLQNSTIPRRSG

SEQ ID NO: 90776 - protein, 15 aa, Artificial Sequence
  Description of Artificial Sequence: Synthetic peptide
  Seed: MCSLMQGSTLPRRSG
MLSLLQNSTLPRRSG

SEQ ID NO: 90777 - protein, 15 aa, Artificial Sequence
  Description of Artificial Sequence: Synthetic peptide
  Seed: MCSLMQGSTLPRRSG
MLSLLQNSTVPRRSG

SEQ ID NO: 90778 - protein, 15 aa, Artificial Sequence
  Description of Artificial Sequence: Synthetic peptide
  Seed: MCSLMQGSTLPRRSG
MLSLLQPSTAPRRSG

SEQ ID NO: 90779 - protein, 15 aa, Artificial Sequence
  Description of Artificial Sequence: Synthetic peptide
  Seed: MCSLMQGSTLPRRSG
MLSLLQPSTIPRRSG

SEQ ID NO: 90780 - protein, 15 aa, Artificial Sequence
  Description of Artificial Sequence: Synthetic peptide
  Seed: MCSLMQGSTLPRRSG
MLSLLQPSTLPRRSG

SEQ ID NO: 90781 - protein, 15 aa, Artificial Sequence
  Description of Artificial Sequence: Synthetic peptide
  Seed: MCSLMQGSTLPRRSG
MLSLLQPSTMPRRSG

SEQ ID NO: 90782 - protein, 15 aa, Artificial Sequence
  Description of Artificial Sequence: Synthetic peptide
  Seed: MCSLMQGSTLPRRSG
MLSLLQPSTTPRRSG

SEQ ID NO: 90783 - protein, 15 aa, Artificial Sequence
  Description of Artificial Sequence: Synthetic peptide
  Seed: MCSLMQGSTLPRRSG
MLSLLQPSTVPRRSG

SEQ ID NO: 90784 - protein, 15 aa, Artificial Sequence
  Description of Artificial Sequence: Synthetic peptide
  Seed: MCSLMQGSTLPRRSG
MLSLLQSSTAPRRSG

SEQ ID NO: 90785 - protein, 15 aa, Artificial Sequence
  Description of Artificial Sequence: Synthetic peptide
  Seed: MCSLMQGSTLPRRSG
MLSLLQSSTIPRRSG

SEQ ID NO: 90786 - protein, 15 aa, Artificial Sequence
  Description of Artificial Sequence: Synthetic peptide
  Seed: MCSLMQGSTLPRRSG
MLSLLQSSTLPRRSG

SEQ ID NO: 90787 - protein, 15 aa, Artificial Sequence
  Description of Artificial Sequence: Synthetic peptide
  Seed: MCSLMQGSTLPRRSG
MLSLLQSSTMPRRSG

SEQ ID NO: 90788 - protein, 15 aa, Artificial Sequence
  Description of Artificial Sequence: Synthetic peptide
  Seed: MCSLMQGSTLPRRSG
MLSLLQSSTSPRRSG

SEQ ID NO: 90789 - protein, 15 aa, Artificial Sequence
  Description of Artificial Sequence: Synthetic peptide
  Seed: MCSLMQGSTLPRRSG
MLSLLQSSTTPRRSG

SEQ ID NO: 90790 - protein, 15 aa, Artificial Sequence
  Description of Artificial Sequence: Synthetic peptide
  Seed: MCSLMQGSTLPRRSG
MLSLLQSSTVPRRSG

SEQ ID NO: 90791 - protein, 15 aa, Artificial Sequence
  Description of Artificial Sequence: Synthetic peptide
  Seed: MCSLMQGSTLPRRSG
MLSLLQTSTAPRRSG

SEQ ID NO: 90792 - protein, 15 aa, Artificial Sequence
  Description of Artificial Sequence: Synthetic peptide
  Seed: MCSLMQGSTLPRRSG
MLSLLQTSTIPRRSG

SEQ ID NO: 90793 - protein, 15 aa, Artificial Sequence
  Description of Artificial Sequence: Synthetic peptide
  Seed: MCSLMQGSTLPRRSG
MLSLLQTSTLPRRSG

SEQ ID NO: 90794 - protein, 15 aa, Artificial Sequence
  Description of Artificial Sequence: Synthetic peptide
  Seed: MCSLMQGSTLPRRSG
MLSLLQTSTVPRRSG

SEQ ID NO: 90795 - protein, 15 aa, Artificial Sequence
  Description of Artificial Sequence: Synthetic peptide
  Seed: MCSLMQGSTLPRRSG
MLSLMQASTAPRRSG

SEQ ID NO: 90796 - protein, 15 aa, Artificial Sequence
  Description of Artificial Sequence: Synthetic peptide
  Seed: MCSLMQGSTLPRRSG
MLSLMQASTGPRRSG

SEQ ID NO: 90797 - protein, 15 aa, Artificial Sequence
  Description of Artificial Sequence: Synthetic peptide
  Seed: MCSLMQGSTLPRRSG
MLSLMQASTIPRRSG

SEQ ID NO: 90798 - protein, 15 aa, Artificial Sequence
  Description of Artificial Sequence: Synthetic peptide
  Seed: MCSLMQGSTLPRRSG
MLSLMQASTLPRRSG

SEQ ID NO: 90799 - protein, 15 aa, Artificial Sequence
  Description of Artificial Sequence: Synthetic peptide
  Seed: MCSLMQGSTLPRRSG
MLSLMQASTMPRRSG

SEQ ID NO: 90800 - protein, 15 aa, Artificial Sequence
  Description of Artificial Sequence: Synthetic peptide
  Seed: MCSLMQGSTLPRRSG
MLSLMQASTSPRRSG

SEQ ID NO: 90801 - protein, 15 aa, Artificial Sequence
  Description of Artificial Sequence: Synthetic peptide
  Seed: MCSLMQGSTLPRRSG
MLSLMQASTTPRRSG

SEQ ID NO: 90802 - protein, 15 aa, Artificial Sequence
  Description of Artificial Sequence: Synthetic peptide
  Seed: MCSLMQGSTLPRRSG
MLSLMQASTVPRRSG

SEQ ID NO: 90803 - protein, 15 aa, Artificial Sequence
  Description of Artificial Sequence: Synthetic peptide
  Seed: MCSLMQGSTLPRRSG
MLSLMQGSTAPRRSG

SEQ ID NO: 90804 - protein, 15 aa, Artificial Sequence
  Description of Artificial Sequence: Synthetic peptide
  Seed: MCSLMQGSTLPRRSG
MLSLMQGSTIPRRSG

SEQ ID NO: 90805 - protein, 15 aa, Artificial Sequence
  Description of Artificial Sequence: Synthetic peptide
  Seed: MCSLMQGSTLPRRSG
MLSLMQGSTLPRRSG

SEQ ID NO: 90806 - protein, 15 aa, Artificial Sequence
  Description of Artificial Sequence: Synthetic peptide
  Seed: MCSLMQGSTLPRRSG
MLSLMQGSTMPRRSG

SEQ ID NO: 90807 - protein, 15 aa, Artificial Sequence
  Description of Artificial Sequence: Synthetic peptide
  Seed: MCSLMQGSTLPRRSG
MLSLMQGSTSPRRSG

SEQ ID NO: 90808 - protein, 15 aa, Artificial Sequence
  Description of Artificial Sequence: Synthetic peptide
  Seed: MCSLMQGSTLPRRSG
MLSLMQGSTTPRRSG

SEQ ID NO: 90809 - protein, 15 aa, Artificial Sequence
  Description of Artificial Sequence: Synthetic peptide
  Seed: MCSLMQGSTLPRRSG
MLSLMQGSTVPRRSG

SEQ ID NO: 90810 - protein, 15 aa, Artificial Sequence
  Description of Artificial Sequence: Synthetic peptide
  Seed: MCSLMQGSTLPRRSG
MLSLMQNSTIPRRSG

SEQ ID NO: 90811 - protein, 15 aa, Artificial Sequence
  Description of Artificial Sequence: Synthetic peptide
  Seed: MCSLMQGSTLPRRSG
MLSLMQNSTLPRRSG

SEQ ID NO: 90812 - protein, 15 aa, Artificial Sequence
  Description of Artificial Sequence: Synthetic peptide
  Seed: MCSLMQGSTLPRRSG
MLSLMQNSTVPRRSG

SEQ ID NO: 90813 - protein, 15 aa, Artificial Sequence
  Description of Artificial Sequence: Synthetic peptide
  Seed: MCSLMQGSTLPRRSG
MLSLMQPSTAPRRSG

SEQ ID NO: 90814 - protein, 15 aa, Artificial Sequence
  Description of Artificial Sequence: Synthetic peptide
  Seed: MCSLMQGSTLPRRSG
MLSLMQPSTIPRRSG

SEQ ID NO: 90815 - protein, 15 aa, Artificial Sequence
  Description of Artificial Sequence: Synthetic peptide
  Seed: MCSLMQGSTLPRRSG
MLSLMQPSTLPRRSG

SEQ ID NO: 90816 - protein, 15 aa, Artificial Sequence
  Description of Artificial Sequence: Synthetic peptide
  Seed: MCSLMQGSTLPRRSG
MLSLMQPSTMPRRSG

SEQ ID NO: 90817 - protein, 15 aa, Artificial Sequence
  Description of Artificial Sequence: Synthetic peptide
  Seed: MCSLMQGSTLPRRSG
MLSLMQPSTVPRRSG

SEQ ID NO: 90818 - protein, 15 aa, Artificial Sequence
  Description of Artificial Sequence: Synthetic peptide
  Seed: MCSLMQGSTLPRRSG
MLSLMQSSTAPRRSG

SEQ ID NO: 90819 - protein, 15 aa, Artificial Sequence
  Description of Artificial Sequence: Synthetic peptide
  Seed: MCSLMQGSTLPRRSG
MLSLMQSSTIPRRSG

SEQ ID NO: 90820 - protein, 15 aa, Artificial Sequence
  Description of Artificial Sequence: Synthetic peptide
  Seed: MCSLMQGSTLPRRSG
MLSLMQSSTLPRRSG

SEQ ID NO: 90821 - protein, 15 aa, Artificial Sequence
  Description of Artificial Sequence: Synthetic peptide
  Seed: MCSLMQGSTLPRRSG
MLSLMQSSTMPRRSG

SEQ ID NO: 90822 - protein, 15 aa, Artificial Sequence
  Description of Artificial Sequence: Synthetic peptide
  Seed: MCSLMQGSTLPRRSG
MLSLMQSSTSPRRSG

SEQ ID NO: 90823 - protein, 15 aa, Artificial Sequence
  Description of Artificial Sequence: Synthetic peptide
  Seed: MCSLMQGSTLPRRSG
MLSLMQSSTTPRRSG

SEQ ID NO: 90824 - protein, 15 aa, Artificial Sequence
  Description of Artificial Sequence: Synthetic peptide
  Seed: MCSLMQGSTLPRRSG
MLSLMQSSTVPRRSG

SEQ ID NO: 90825 - protein, 15 aa, Artificial Sequence
  Description of Artificial Sequence: Synthetic peptide
  Seed: MCSLMQGSTLPRRSG
MLSLMQTSTAPRRSG

SEQ ID NO: 90826 - protein, 15 aa, Artificial Sequence
  Description of Artificial Sequence: Synthetic peptide
  Seed: MCSLMQGSTLPRRSG
MLSLMQTSTLPRRSG

SEQ ID NO: 90827 - protein, 15 aa, Artificial Sequence
  Description of Artificial Sequence: Synthetic peptide
  Seed: MCSLMQGSTLPRRSG
MLSLMQTSTVPRRSG

SEQ ID NO: 90828 - protein, 15 aa, Artificial Sequence
  Description of Artificial Sequence: Synthetic peptide
  Seed: MCSLMQGSTLPRRSG
MLSLQQASTIPRRSG

SEQ ID NO: 90829 - protein, 15 aa, Artificial Sequence
  Description of Artificial Sequence: Synthetic peptide
  Seed: MCSLMQGSTLPRRSG
MLSLQQASTLPRRSG

SEQ ID NO: 90830 - protein, 15 aa, Artificial Sequence
  Description of Artificial Sequence: Synthetic peptide
  Seed: MCSLMQGSTLPRRSG
MLSLQQASTVPRRSG

SEQ ID NO: 90831 - protein, 15 aa, Artificial Sequence
  Description of Artificial Sequence: Synthetic peptide
  Seed: MCSLMQGSTLPRRSG
MMSLLQASTAPRRSG

SEQ ID NO: 90832 - protein, 15 aa, Artificial Sequence
  Description of Artificial Sequence: Synthetic peptide
  Seed: MCSLMQGSTLPRRSG
MMSLLQASTIPRRSG

SEQ ID NO: 90833 - protein, 15 aa, Artificial Sequence
  Description of Artificial Sequence: Synthetic peptide
  Seed: MCSLMQGSTLPRRSG
MMSLLQASTLPRRSG

SEQ ID NO: 90834 - protein, 15 aa, Artificial Sequence
  Description of Artificial Sequence: Synthetic peptide
  Seed: MCSLMQGSTLPRRSG
MMSLLQASTMPRRSG

SEQ ID NO: 90835 - protein, 15 aa, Artificial Sequence
  Description of Artificial Sequence: Synthetic peptide
  Seed: MCSLMQGSTLPRRSG
MMSLLQASTSPRRSG

SEQ ID NO: 90836 - protein, 15 aa, Artificial Sequence
  Description of Artificial Sequence: Synthetic peptide
  Seed: MCSLMQGSTLPRRSG
MMSLLQASTTPRRSG

SEQ ID NO: 90837 - protein, 15 aa, Artificial Sequence
  Description of Artificial Sequence: Synthetic peptide
  Seed: MCSLMQGSTLPRRSG
MMSLLQASTVPRRSG

SEQ ID NO: 90838 - protein, 15 aa, Artificial Sequence
  Description of Artificial Sequence: Synthetic peptide
  Seed: MCSLMQGSTLPRRSG
MMSLLQGSTAPRRSG

SEQ ID NO: 90839 - protein, 15 aa, Artificial Sequence
  Description of Artificial Sequence: Synthetic peptide
  Seed: MCSLMQGSTLPRRSG
MMSLLQGSTIPRRSG

SEQ ID NO: 90840 - protein, 15 aa, Artificial Sequence
  Description of Artificial Sequence: Synthetic peptide
  Seed: MCSLMQGSTLPRRSG
MMSLLQGSTLPRRSG

SEQ ID NO: 90841 - protein, 15 aa, Artificial Sequence
  Description of Artificial Sequence: Synthetic peptide
  Seed: MCSLMQGSTLPRRSG
MMSLLQGSTMPRRSG

SEQ ID NO: 90842 - protein, 15 aa, Artificial Sequence
  Description of Artificial Sequence: Synthetic peptide
  Seed: MCSLMQGSTLPRRSG
MMSLLQGSTTPRRSG

SEQ ID NO: 90843 - protein, 15 aa, Artificial Sequence
  Description of Artificial Sequence: Synthetic peptide
  Seed: MCSLMQGSTLPRRSG
MMSLLQGSTVPRRSG

SEQ ID NO: 90844 - protein, 15 aa, Artificial Sequence
  Description of Artificial Sequence: Synthetic peptide
  Seed: MCSLMQGSTLPRRSG
MMSLLQPSTAPRRSG

SEQ ID NO: 90845 - protein, 15 aa, Artificial Sequence
  Description of Artificial Sequence: Synthetic peptide
  Seed: MCSLMQGSTLPRRSG
MMSLLQPSTIPRRSG

SEQ ID NO: 90846 - protein, 15 aa, Artificial Sequence
  Description of Artificial Sequence: Synthetic peptide
  Seed: MCSLMQGSTLPRRSG
MMSLLQPSTLPRRSG

SEQ ID NO: 90847 - protein, 15 aa, Artificial Sequence
  Description of Artificial Sequence: Synthetic peptide
  Seed: MCSLMQGSTLPRRSG
MMSLLQPSTVPRRSG

SEQ ID NO: 90848 - protein, 15 aa, Artificial Sequence
  Description of Artificial Sequence: Synthetic peptide
  Seed: MCSLMQGSTLPRRSG
MMSLLQSSTAPRRSG

SEQ ID NO: 90849 - protein, 15 aa, Artificial Sequence
  Description of Artificial Sequence: Synthetic peptide
  Seed: MCSLMQGSTLPRRSG
MMSLLQSSTIPRRSG

SEQ ID NO: 90850 - protein, 15 aa, Artificial Sequence
  Description of Artificial Sequence: Synthetic peptide
  Seed: MCSLMQGSTLPRRSG
MMSLLQSSTLPRRSG

SEQ ID NO: 90851 - protein, 15 aa, Artificial Sequence
  Description of Artificial Sequence: Synthetic peptide
  Seed: MCSLMQGSTLPRRSG
MMSLLQSSTVPRRSG

SEQ ID NO: 90852 - protein, 15 aa, Artificial Sequence
  Description of Artificial Sequence: Synthetic peptide
  Seed: MCSLMQGSTLPRRSG
MMSLMQASTAPRRSG

SEQ ID NO: 90853 - protein, 15 aa, Artificial Sequence
  Description of Artificial Sequence: Synthetic peptide
  Seed: MCSLMQGSTLPRRSG
MMSLMQASTIPRRSG

SEQ ID NO: 90854 - protein, 15 aa, Artificial Sequence
  Description of Artificial Sequence: Synthetic peptide
  Seed: MCSLMQGSTLPRRSG
MMSLMQASTLPRRSG

SEQ ID NO: 90855 - protein, 15 aa, Artificial Sequence
  Description of Artificial Sequence: Synthetic peptide
  Seed: MCSLMQGSTLPRRSG
MMSLMQASTMPRRSG

SEQ ID NO: 90856 - protein, 15 aa, Artificial Sequence
  Description of Artificial Sequence: Synthetic peptide
  Seed: MCSLMQGSTLPRRSG
MMSLMQASTSPRRSG

SEQ ID NO: 90857 - protein, 15 aa, Artificial Sequence
  Description of Artificial Sequence: Synthetic peptide
  Seed: MCSLMQGSTLPRRSG
MMSLMQASTTPRRSG

SEQ ID NO: 90858 - protein, 15 aa, Artificial Sequence
  Description of Artificial Sequence: Synthetic peptide
  Seed: MCSLMQGSTLPRRSG
MMSLMQASTVPRRSG

SEQ ID NO: 90859 - protein, 15 aa, Artificial Sequence
  Description of Artificial Sequence: Synthetic peptide
  Seed: MCSLMQGSTLPRRSG
MMSLMQGSTAPRRSG

SEQ ID NO: 90860 - protein, 15 aa, Artificial Sequence
  Description of Artificial Sequence: Synthetic peptide
  Seed: MCSLMQGSTLPRRSG
MMSLMQGSTIPRRSG

SEQ ID NO: 90861 - protein, 15 aa, Artificial Sequence
  Description of Artificial Sequence: Synthetic peptide
  Seed: MCSLMQGSTLPRRSG
MMSLMQGSTLPRRSG

SEQ ID NO: 90862 - protein, 15 aa, Artificial Sequence
  Description of Artificial Sequence: Synthetic peptide
  Seed: MCSLMQGSTLPRRSG
MMSLMQGSTMPRRSG

SEQ ID NO: 90863 - protein, 15 aa, Artificial Sequence
  Description of Artificial Sequence: Synthetic peptide
  Seed: MCSLMQGSTLPRRSG
MMSLMQGSTTPRRSG

SEQ ID NO: 90864 - protein, 15 aa, Artificial Sequence
  Description of Artificial Sequence: Synthetic peptide
  Seed: MCSLMQGSTLPRRSG
MMSLMQGSTVPRRSG

SEQ ID NO: 90865 - protein, 15 aa, Artificial Sequence
  Description of Artificial Sequence: Synthetic peptide
  Seed: MCSLMQGSTLPRRSG
MMSLMQPSTIPRRSG

SEQ ID NO: 90866 - protein, 15 aa, Artificial Sequence
  Description of Artificial Sequence: Synthetic peptide
  Seed: MCSLMQGSTLPRRSG
MMSLMQPSTLPRRSG

SEQ ID NO: 90867 - protein, 15 aa, Artificial Sequence
  Description of Artificial Sequence: Synthetic peptide
  Seed: MCSLMQGSTLPRRSG
MMSLMQPSTVPRRSG

SEQ ID NO: 90868 - protein, 15 aa, Artificial Sequence
  Description of Artificial Sequence: Synthetic peptide
  Seed: MCSLMQGSTLPRRSG
MMSLMQSSTAPRRSG

SEQ ID NO: 90869 - protein, 15 aa, Artificial Sequence
  Description of Artificial Sequence: Synthetic peptide
  Seed: MCSLMQGSTLPRRSG
MMSLMQSSTIPRRSG

SEQ ID NO: 90870 - protein, 15 aa, Artificial Sequence
  Description of Artificial Sequence: Synthetic peptide
  Seed: MCSLMQGSTLPRRSG
MMSLMQSSTLPRRSG

SEQ ID NO: 90871 - protein, 15 aa, Artificial Sequence
  Description of Artificial Sequence: Synthetic peptide
  Seed: MCSLMQGSTLPRRSG
MMSLMQSSTVPRRSG

SEQ ID NO: 90872 - protein, 15 aa, Artificial Sequence
  Description of Artificial Sequence: Synthetic peptide
  Seed: MCSLMQGSTLPRRSG
MVSLIQGSTVPRRSG

SEQ ID NO: 90873 - protein, 15 aa, Artificial Sequence
  Description of Artificial Sequence: Synthetic peptide
  Seed: MCSLMQGSTLPRRSG
MVSLLQASTAPRRSG

SEQ ID NO: 90874 - protein, 15 aa, Artificial Sequence
  Description of Artificial Sequence: Synthetic peptide
  Seed: MCSLMQGSTLPRRSG
MVSLLQASTIPRRSG

SEQ ID NO: 90875 - protein, 15 aa, Artificial Sequence
  Description of Artificial Sequence: Synthetic peptide
  Seed: MCSLMQGSTLPRRSG
MVSLLQASTLPRRSG

SEQ ID NO: 90876 - protein, 15 aa, Artificial Sequence
  Description of Artificial Sequence: Synthetic peptide
  Seed: MCSLMQGSTLPRRSG
MVSLLQASTMPRRSG

SEQ ID NO: 90877 - protein, 15 aa, Artificial Sequence
  Description of Artificial Sequence: Synthetic peptide
  Seed: MCSLMQGSTLPRRSG
MVSLLQASTSPRRSG

SEQ ID NO: 90878 - protein, 15 aa, Artificial Sequence
  Description of Artificial Sequence: Synthetic peptide
  Seed: MCSLMQGSTLPRRSG
MVSLLQASTTPRRSG

SEQ ID NO: 90879 - protein, 15 aa, Artificial Sequence
  Description of Artificial Sequence: Synthetic peptide
  Seed: MCSLMQGSTLPRRSG
MVSLLQASTVPRRSG

SEQ ID NO: 90880 - protein, 15 aa, Artificial Sequence
  Description of Artificial Sequence: Synthetic peptide
  Seed: MCSLMQGSTLPRRSG
MVSLLQGSTAPRRSG

SEQ ID NO: 90881 - protein, 15 aa, Artificial Sequence
  Description of Artificial Sequence: Synthetic peptide
  Seed: MCSLMQGSTLPRRSG
MVSLLQGSTIPRRSG

SEQ ID NO: 90882 - protein, 15 aa, Artificial Sequence
  Description of Artificial Sequence: Synthetic peptide
  Seed: MCSLMQGSTLPRRSG
MVSLLQGSTLPRRSG

SEQ ID NO: 90883 - protein, 15 aa, Artificial Sequence
  Description of Artificial Sequence: Synthetic peptide
  Seed: MCSLMQGSTLPRRSG
MVSLLQGSTMPRRSG

SEQ ID NO: 90884 - protein, 15 aa, Artificial Sequence
  Description of Artificial Sequence: Synthetic peptide
  Seed: MCSLMQGSTLPRRSG
MVSLLQGSTTPRRSG

SEQ ID NO: 90885 - protein, 15 aa, Artificial Sequence
  Description of Artificial Sequence: Synthetic peptide
  Seed: MCSLMQGSTLPRRSG
MVSLLQGSTVPRRSG

SEQ ID NO: 90886 - protein, 15 aa, Artificial Sequence
  Description of Artificial Sequence: Synthetic peptide
  Seed: MCSLMQGSTLPRRSG
MVSLLQPSTAPRRSG

SEQ ID NO: 90887 - protein, 15 aa, Artificial Sequence
  Description of Artificial Sequence: Synthetic peptide
  Seed: MCSLMQGSTLPRRSG
MVSLLQPSTIPRRSG

SEQ ID NO: 90888 - protein, 15 aa, Artificial Sequence
  Description of Artificial Sequence: Synthetic peptide
  Seed: MCSLMQGSTLPRRSG
MVSLLQPSTLPRRSG

SEQ ID NO: 90889 - protein, 15 aa, Artificial Sequence
  Description of Artificial Sequence: Synthetic peptide
  Seed: MCSLMQGSTLPRRSG
MVSLLQPSTVPRRSG

SEQ ID NO: 90890 - protein, 15 aa, Artificial Sequence
  Description of Artificial Sequence: Synthetic peptide
  Seed: MCSLMQGSTLPRRSG
MVSLLQSSTAPRRSG

SEQ ID NO: 90891 - protein, 15 aa, Artificial Sequence
  Description of Artificial Sequence: Synthetic peptide
  Seed: MCSLMQGSTLPRRSG
MVSLLQSSTIPRRSG

SEQ ID NO: 90892 - protein, 15 aa, Artificial Sequence
  Description of Artificial Sequence: Synthetic peptide
  Seed: MCSLMQGSTLPRRSG
MVSLLQSSTLPRRSG

SEQ ID NO: 90893 - protein, 15 aa, Artificial Sequence
  Description of Artificial Sequence: Synthetic peptide
  Seed: MCSLMQGSTLPRRSG
MVSLLQSSTVPRRSG

SEQ ID NO: 90894 - protein, 15 aa, Artificial Sequence
  Description of Artificial Sequence: Synthetic peptide
  Seed: MCSLMQGSTLPRRSG
MVSLMQASTAPRRSG

SEQ ID NO: 90895 - protein, 15 aa, Artificial Sequence
  Description of Artificial Sequence: Synthetic peptide
  Seed: MCSLMQGSTLPRRSG
MVSLMQASTIPRRSG

SEQ ID NO: 90896 - protein, 15 aa, Artificial Sequence
  Description of Artificial Sequence: Synthetic peptide
  Seed: MCSLMQGSTLPRRSG
MVSLMQASTLPRRSG

SEQ ID NO: 90897 - protein, 15 aa, Artificial Sequence
  Description of Artificial Sequence: Synthetic peptide
  Seed: MCSLMQGSTLPRRSG
MVSLMQASTMPRRSG

SEQ ID NO: 90898 - protein, 15 aa, Artificial Sequence
  Description of Artificial Sequence: Synthetic peptide
  Seed: MCSLMQGSTLPRRSG
MVSLMQASTSPRRSG

SEQ ID NO: 90899 - protein, 15 aa, Artificial Sequence
  Description of Artificial Sequence: Synthetic peptide
  Seed: MCSLMQGSTLPRRSG
MVSLMQASTTPRRSG

SEQ ID NO: 90900 - protein, 15 aa, Artificial Sequence
  Description of Artificial Sequence: Synthetic peptide
  Seed: MCSLMQGSTLPRRSG
MVSLMQASTVPRRSG

SEQ ID NO: 90901 - protein, 15 aa, Artificial Sequence
  Description of Artificial Sequence: Synthetic peptide
  Seed: MCSLMQGSTLPRRSG
MVSLMQGSTAPRRSG

SEQ ID NO: 90902 - protein, 15 aa, Artificial Sequence
  Description of Artificial Sequence: Synthetic peptide
  Seed: MCSLMQGSTLPRRSG
MVSLMQGSTIPRRSG

SEQ ID NO: 90903 - protein, 15 aa, Artificial Sequence
  Description of Artificial Sequence: Synthetic peptide
  Seed: MCSLMQGSTLPRRSG
MVSLMQGSTLPRRSG

SEQ ID NO: 90904 - protein, 15 aa, Artificial Sequence
  Description of Artificial Sequence: Synthetic peptide
  Seed: MCSLMQGSTLPRRSG
MVSLMQGSTMPRRSG

SEQ ID NO: 90905 - protein, 15 aa, Artificial Sequence
  Description of Artificial Sequence: Synthetic peptide
  Seed: MCSLMQGSTLPRRSG
MVSLMQGSTTPRRSG

SEQ ID NO: 90906 - protein, 15 aa, Artificial Sequence
  Description of Artificial Sequence: Synthetic peptide
  Seed: MCSLMQGSTLPRRSG
MVSLMQGSTVPRRSG

SEQ ID NO: 90907 - protein, 15 aa, Artificial Sequence
  Description of Artificial Sequence: Synthetic peptide
  Seed: MCSLMQGSTLPRRSG
MVSLMQPSTIPRRSG

SEQ ID NO: 90908 - protein, 15 aa, Artificial Sequence
  Description of Artificial Sequence: Synthetic peptide
  Seed: MCSLMQGSTLPRRSG
MVSLMQPSTLPRRSG

SEQ ID NO: 90909 - protein, 15 aa, Artificial Sequence
  Description of Artificial Sequence: Synthetic peptide
  Seed: MCSLMQGSTLPRRSG
MVSLMQPSTVPRRSG

SEQ ID NO: 90910 - protein, 15 aa, Artificial Sequence
  Description of Artificial Sequence: Synthetic peptide
  Seed: MCSLMQGSTLPRRSG
MVSLMQSSTAPRRSG

SEQ ID NO: 90911 - protein, 15 aa, Artificial Sequence
  Description of Artificial Sequence: Synthetic peptide
  Seed: MCSLMQGSTLPRRSG
MVSLMQSSTIPRRSG

SEQ ID NO: 90912 - protein, 15 aa, Artificial Sequence
  Description of Artificial Sequence: Synthetic peptide
  Seed: MCSLMQGSTLPRRSG
MVSLMQSSTLPRRSG

SEQ ID NO: 90913 - protein, 15 aa, Artificial Sequence
  Description of Artificial Sequence: Synthetic peptide
  Seed: MCSLMQGSTLPRRSG
MVSLMQSSTVPRRSG

SEQ ID NO: 90914 - protein, 15 aa, Artificial Sequence
  Description of Artificial Sequence: Synthetic peptide
  Seed: MCSLMQGSTLPRRSG
MWSLAQASTAPRRSG

SEQ ID NO: 90915 - protein, 15 aa, Artificial Sequence
  Description of Artificial Sequence: Synthetic peptide
  Seed: MCSLMQGSTLPRRSG
MWSLAQASTIPRRSG

SEQ ID NO: 90916 - protein, 15 aa, Artificial Sequence
  Description of Artificial Sequence: Synthetic peptide
  Seed: MCSLMQGSTLPRRSG
MWSLAQASTLPRRSG

SEQ ID NO: 90917 - protein, 15 aa, Artificial Sequence
  Description of Artificial Sequence: Synthetic peptide
  Seed: MCSLMQGSTLPRRSG
MWSLAQASTMPRRSG

SEQ ID NO: 90918 - protein, 15 aa, Artificial Sequence
  Description of Artificial Sequence: Synthetic peptide
  Seed: MCSLMQGSTLPRRSG
MWSLAQASTVPRRSG

SEQ ID NO: 90919 - protein, 15 aa, Artificial Sequence
  Description of Artificial Sequence: Synthetic peptide
  Seed: MCSLMQGSTLPRRSG
MWSLAQGSTAPRRSG

SEQ ID NO: 90920 - protein, 15 aa, Artificial Sequence
  Description of Artificial Sequence: Synthetic peptide
  Seed: MCSLMQGSTLPRRSG
MWSLAQGSTIPRRSG

SEQ ID NO: 90921 - protein, 15 aa, Artificial Sequence
  Description of Artificial Sequence: Synthetic peptide
  Seed: MCSLMQGSTLPRRSG
MWSLAQGSTLPRRSG

SEQ ID NO: 90922 - protein, 15 aa, Artificial Sequence
  Description of Artificial Sequence: Synthetic peptide
  Seed: MCSLMQGSTLPRRSG
MWSLAQGSTVPRRSG

SEQ ID NO: 90923 - protein, 15 aa, Artificial Sequence
  Description of Artificial Sequence: Synthetic peptide
  Seed: MCSLMQGSTLPRRSG
MWSLAQSSTIPRRSG

SEQ ID NO: 90924 - protein, 15 aa, Artificial Sequence
  Description of Artificial Sequence: Synthetic peptide
  Seed: MCSLMQGSTLPRRSG
MWSLAQSSTLPRRSG

SEQ ID NO: 90925 - protein, 15 aa, Artificial Sequence
  Description of Artificial Sequence: Synthetic peptide
  Seed: MCSLMQGSTLPRRSG
MWSLAQSSTVPRRSG

SEQ ID NO: 90926 - protein, 15 aa, Artificial Sequence
  Description of Artificial Sequence: Synthetic peptide
  Seed: MCSLMQGSTLPRRSG
MWSLFQASTIPRRSG

SEQ ID NO: 90927 - protein, 15 aa, Artificial Sequence
  Description of Artificial Sequence: Synthetic peptide
  Seed: MCSLMQGSTLPRRSG
MWSLFQASTVPRRSG

SEQ ID NO: 90928 - protein, 15 aa, Artificial Sequence
  Description of Artificial Sequence: Synthetic peptide
  Seed: MCSLMQGSTLPRRSG
MWSLIQASTAPRRSG

SEQ ID NO: 90929 - protein, 15 aa, Artificial Sequence
  Description of Artificial Sequence: Synthetic peptide
  Seed: MCSLMQGSTLPRRSG
MWSLIQASTIPRRSG

SEQ ID NO: 90930 - protein, 15 aa, Artificial Sequence
  Description of Artificial Sequence: Synthetic peptide
  Seed: MCSLMQGSTLPRRSG
MWSLIQASTLPRRSG

SEQ ID NO: 90931 - protein, 15 aa, Artificial Sequence
  Description of Artificial Sequence: Synthetic peptide
  Seed: MCSLMQGSTLPRRSG
MWSLIQASTMPRRSG

SEQ ID NO: 90932 - protein, 15 aa, Artificial Sequence
  Description of Artificial Sequence: Synthetic peptide
  Seed: MCSLMQGSTLPRRSG
MWSLIQASTSPRRSG

SEQ ID NO: 90933 - protein, 15 aa, Artificial Sequence
  Description of Artificial Sequence: Synthetic peptide
  Seed: MCSLMQGSTLPRRSG
MWSLIQASTTPRRSG

SEQ ID NO: 90934 - protein, 15 aa, Artificial Sequence
  Description of Artificial Sequence: Synthetic peptide
  Seed: MCSLMQGSTLPRRSG
MWSLIQASTVPRRSG

SEQ ID NO: 90935 - protein, 15 aa, Artificial Sequence
  Description of Artificial Sequence: Synthetic peptide
  Seed: MCSLMQGSTLPRRSG
MWSLIQGSTAPRRSG

SEQ ID NO: 90936 - protein, 15 aa, Artificial Sequence
  Description of Artificial Sequence: Synthetic peptide
  Seed: MCSLMQGSTLPRRSG
MWSLIQGSTIPRRSG

SEQ ID NO: 90937 - protein, 15 aa, Artificial Sequence
  Description of Artificial Sequence: Synthetic peptide
  Seed: MCSLMQGSTLPRRSG
MWSLIQGSTLPRRSG

SEQ ID NO: 90938 - protein, 15 aa, Artificial Sequence
  Description of Artificial Sequence: Synthetic peptide
  Seed: MCSLMQGSTLPRRSG
MWSLIQGSTMPRRSG

SEQ ID NO: 90939 - protein, 15 aa, Artificial Sequence
  Description of Artificial Sequence: Synthetic peptide
  Seed: MCSLMQGSTLPRRSG
MWSLIQGSTSPRRSG

SEQ ID NO: 90940 - protein, 15 aa, Artificial Sequence
  Description of Artificial Sequence: Synthetic peptide
  Seed: MCSLMQGSTLPRRSG
MWSLIQGSTTPRRSG

SEQ ID NO: 90941 - protein, 15 aa, Artificial Sequence
  Description of Artificial Sequence: Synthetic peptide
  Seed: MCSLMQGSTLPRRSG
MWSLIQGSTVPRRSG

SEQ ID NO: 90942 - protein, 15 aa, Artificial Sequence
  Description of Artificial Sequence: Synthetic peptide
  Seed: MCSLMQGSTLPRRSG
MWSLIQPSTAPRRSG

SEQ ID NO: 90943 - protein, 15 aa, Artificial Sequence
  Description of Artificial Sequence: Synthetic peptide
  Seed: MCSLMQGSTLPRRSG
MWSLIQPSTIPRRSG

SEQ ID NO: 90944 - protein, 15 aa, Artificial Sequence
  Description of Artificial Sequence: Synthetic peptide
  Seed: MCSLMQGSTLPRRSG
MWSLIQPSTLPRRSG

SEQ ID NO: 90945 - protein, 15 aa, Artificial Sequence
  Description of Artificial Sequence: Synthetic peptide
  Seed: MCSLMQGSTLPRRSG
MWSLIQPSTVPRRSG

SEQ ID NO: 90946 - protein, 15 aa, Artificial Sequence
  Description of Artificial Sequence: Synthetic peptide
  Seed: MCSLMQGSTLPRRSG
MWSLIQSSTAPRRSG

SEQ ID NO: 90947 - protein, 15 aa, Artificial Sequence
  Description of Artificial Sequence: Synthetic peptide
  Seed: MCSLMQGSTLPRRSG
MWSLIQSSTIPRRSG

SEQ ID NO: 90948 - protein, 15 aa, Artificial Sequence
  Description of Artificial Sequence: Synthetic peptide
  Seed: MCSLMQGSTLPRRSG
MWSLIQSSTLPRRSG

SEQ ID NO: 90949 - protein, 15 aa, Artificial Sequence
  Description of Artificial Sequence: Synthetic peptide
  Seed: MCSLMQGSTLPRRSG
MWSLIQSSTMPRRSG

SEQ ID NO: 90950 - protein, 15 aa, Artificial Sequence
  Description of Artificial Sequence: Synthetic peptide
  Seed: MCSLMQGSTLPRRSG
MWSLIQSSTTPRRSG

SEQ ID NO: 90951 - protein, 15 aa, Artificial Sequence
  Description of Artificial Sequence: Synthetic peptide
  Seed: MCSLMQGSTLPRRSG
MWSLIQSSTVPRRSG

SEQ ID NO: 90952 - protein, 15 aa, Artificial Sequence
  Description of Artificial Sequence: Synthetic peptide
  Seed: MCSLMQGSTLPRRSG
MWSLIQTSTVPRRSG

SEQ ID NO: 90953 - protein, 15 aa, Artificial Sequence
  Description of Artificial Sequence: Synthetic peptide
  Seed: MCSLMQGSTLPRRSG
MWSLLQASTAPRRSG

SEQ ID NO: 90954 - protein, 15 aa, Artificial Sequence
  Description of Artificial Sequence: Synthetic peptide
  Seed: MCSLMQGSTLPRRSG
MWSLLQASTGPRRSG

SEQ ID NO: 90955 - protein, 15 aa, Artificial Sequence
  Description of Artificial Sequence: Synthetic peptide
  Seed: MCSLMQGSTLPRRSG
MWSLLQASTIPRRSG

SEQ ID NO: 90956 - protein, 15 aa, Artificial Sequence
  Description of Artificial Sequence: Synthetic peptide
  Seed: MCSLMQGSTLPRRSG
MWSLLQASTLPRRSG

SEQ ID NO: 90957 - protein, 15 aa, Artificial Sequence
  Description of Artificial Sequence: Synthetic peptide
  Seed: MCSLMQGSTLPRRSG
MWSLLQASTMPRRSG

SEQ ID NO: 90958 - protein, 15 aa, Artificial Sequence
  Description of Artificial Sequence: Synthetic peptide
  Seed: MCSLMQGSTLPRRSG
MWSLLQASTNPRRSG

SEQ ID NO: 90959 - protein, 15 aa, Artificial Sequence
  Description of Artificial Sequence: Synthetic peptide
  Seed: MCSLMQGSTLPRRSG
MWSLLQASTSPRRSG

SEQ ID NO: 90960 - protein, 15 aa, Artificial Sequence
  Description of Artificial Sequence: Synthetic peptide
  Seed: MCSLMQGSTLPRRSG
MWSLLQASTTPRRSG

SEQ ID NO: 90961 - protein, 15 aa, Artificial Sequence
  Description of Artificial Sequence: Synthetic peptide
  Seed: MCSLMQGSTLPRRSG
MWSLLQASTVPRRSG

SEQ ID NO: 90962 - protein, 15 aa, Artificial Sequence
  Description of Artificial Sequence: Synthetic peptide
  Seed: MCSLMQGSTLPRRSG
MWSLLQGSTAPRRSG

SEQ ID NO: 90963 - protein, 15 aa, Artificial Sequence
  Description of Artificial Sequence: Synthetic peptide
  Seed: MCSLMQGSTLPRRSG
MWSLLQGSTGPRRSG

SEQ ID NO: 90964 - protein, 15 aa, Artificial Sequence
  Description of Artificial Sequence: Synthetic peptide
  Seed: MCSLMQGSTLPRRSG
MWSLLQGSTIPRRSG

SEQ ID NO: 90965 - protein, 15 aa, Artificial Sequence
  Description of Artificial Sequence: Synthetic peptide
  Seed: MCSLMQGSTLPRRSG
MWSLLQGSTLPRRSG

SEQ ID NO: 90966 - protein, 15 aa, Artificial Sequence
  Description of Artificial Sequence: Synthetic peptide
  Seed: MCSLMQGSTLPRRSG
MWSLLQGSTMPRRSG

SEQ ID NO: 90967 - protein, 15 aa, Artificial Sequence
  Description of Artificial Sequence: Synthetic peptide
  Seed: MCSLMQGSTLPRRSG
MWSLLQGSTSPRRSG

SEQ ID NO: 90968 - protein, 15 aa, Artificial Sequence
  Description of Artificial Sequence: Synthetic peptide
  Seed: MCSLMQGSTLPRRSG
MWSLLQGSTTPRRSG

SEQ ID NO: 90969 - protein, 15 aa, Artificial Sequence
  Description of Artificial Sequence: Synthetic peptide
  Seed: MCSLMQGSTLPRRSG
MWSLLQGSTVPRRSG

SEQ ID NO: 90970 - protein, 15 aa, Artificial Sequence
  Description of Artificial Sequence: Synthetic peptide
  Seed: MCSLMQGSTLPRRSG
MWSLLQNSTAPRRSG

SEQ ID NO: 90971 - protein, 15 aa, Artificial Sequence
  Description of Artificial Sequence: Synthetic peptide
  Seed: MCSLMQGSTLPRRSG
MWSLLQNSTIPRRSG

SEQ ID NO: 90972 - protein, 15 aa, Artificial Sequence
  Description of Artificial Sequence: Synthetic peptide
  Seed: MCSLMQGSTLPRRSG
MWSLLQNSTLPRRSG

SEQ ID NO: 90973 - protein, 15 aa, Artificial Sequence
  Description of Artificial Sequence: Synthetic peptide
  Seed: MCSLMQGSTLPRRSG
MWSLLQNSTMPRRSG

SEQ ID NO: 90974 - protein, 15 aa, Artificial Sequence
  Description of Artificial Sequence: Synthetic peptide
  Seed: MCSLMQGSTLPRRSG
MWSLLQNSTTPRRSG

SEQ ID NO: 90975 - protein, 15 aa, Artificial Sequence
  Description of Artificial Sequence: Synthetic peptide
  Seed: MCSLMQGSTLPRRSG
MWSLLQNSTVPRRSG

SEQ ID NO: 90976 - protein, 15 aa, Artificial Sequence
  Description of Artificial Sequence: Synthetic peptide
  Seed: MCSLMQGSTLPRRSG
MWSLLQPSTAPRRSG

SEQ ID NO: 90977 - protein, 15 aa, Artificial Sequence
  Description of Artificial Sequence: Synthetic peptide
  Seed: MCSLMQGSTLPRRSG
MWSLLQPSTIPRRSG

SEQ ID NO: 90978 - protein, 15 aa, Artificial Sequence
  Description of Artificial Sequence: Synthetic peptide
  Seed: MCSLMQGSTLPRRSG
MWSLLQPSTLPRRSG

SEQ ID NO: 90979 - protein, 15 aa, Artificial Sequence
  Description of Artificial Sequence: Synthetic peptide
  Seed: MCSLMQGSTLPRRSG
MWSLLQPSTMPRRSG

SEQ ID NO: 90980 - protein, 15 aa, Artificial Sequence
  Description of Artificial Sequence: Synthetic peptide
  Seed: MCSLMQGSTLPRRSG
MWSLLQPSTSPRRSG

SEQ ID NO: 90981 - protein, 15 aa, Artificial Sequence
  Description of Artificial Sequence: Synthetic peptide
  Seed: MCSLMQGSTLPRRSG
MWSLLQPSTTPRRSG

SEQ ID NO: 90982 - protein, 15 aa, Artificial Sequence
  Description of Artificial Sequence: Synthetic peptide
  Seed: MCSLMQGSTLPRRSG
MWSLLQPSTVPRRSG

SEQ ID NO: 90983 - protein, 15 aa, Artificial Sequence
  Description of Artificial Sequence: Synthetic peptide
  Seed: MCSLMQGSTLPRRSG
MWSLLQSSTAPRRSG

SEQ ID NO: 90984 - protein, 15 aa, Artificial Sequence
  Description of Artificial Sequence: Synthetic peptide
  Seed: MCSLMQGSTLPRRSG
MWSLLQSSTGPRRSG

SEQ ID NO: 90985 - protein, 15 aa, Artificial Sequence
  Description of Artificial Sequence: Synthetic peptide
  Seed: MCSLMQGSTLPRRSG
MWSLLQSSTIPRRSG

SEQ ID NO: 90986 - protein, 15 aa, Artificial Sequence
  Description of Artificial Sequence: Synthetic peptide
  Seed: MCSLMQGSTLPRRSG
MWSLLQSSTLPRRSG

SEQ ID NO: 90987 - protein, 15 aa, Artificial Sequence
  Description of Artificial Sequence: Synthetic peptide
  Seed: MCSLMQGSTLPRRSG
MWSLLQSSTMPRRSG

SEQ ID NO: 90988 - protein, 15 aa, Artificial Sequence
  Description of Artificial Sequence: Synthetic peptide
  Seed: MCSLMQGSTLPRRSG
MWSLLQSSTSPRRSG

SEQ ID NO: 90989 - protein, 15 aa, Artificial Sequence
  Description of Artificial Sequence: Synthetic peptide
  Seed: MCSLMQGSTLPRRSG
MWSLLQSSTTPRRSG

SEQ ID NO: 90990 - protein, 15 aa, Artificial Sequence
  Description of Artificial Sequence: Synthetic peptide
  Seed: MCSLMQGSTLPRRSG
MWSLLQSSTVPRRSG

SEQ ID NO: 90991 - protein, 15 aa, Artificial Sequence
  Description of Artificial Sequence: Synthetic peptide
  Seed: MCSLMQGSTLPRRSG
MWSLLQTSTAPRRSG

SEQ ID NO: 90992 - protein, 15 aa, Artificial Sequence
  Description of Artificial Sequence: Synthetic peptide
  Seed: MCSLMQGSTLPRRSG
MWSLLQTSTIPRRSG

SEQ ID NO: 90993 - protein, 15 aa, Artificial Sequence
  Description of Artificial Sequence: Synthetic peptide
  Seed: MCSLMQGSTLPRRSG
MWSLLQTSTLPRRSG

SEQ ID NO: 90994 - protein, 15 aa, Artificial Sequence
  Description of Artificial Sequence: Synthetic peptide
  Seed: MCSLMQGSTLPRRSG
MWSLLQTSTMPRRSG

SEQ ID NO: 90995 - protein, 15 aa, Artificial Sequence
  Description of Artificial Sequence: Synthetic peptide
  Seed: MCSLMQGSTLPRRSG
MWSLLQTSTSPRRSG

SEQ ID NO: 90996 - protein, 15 aa, Artificial Sequence
  Description of Artificial Sequence: Synthetic peptide
  Seed: MCSLMQGSTLPRRSG
MWSLLQTSTTPRRSG

SEQ ID NO: 90997 - protein, 15 aa, Artificial Sequence
  Description of Artificial Sequence: Synthetic peptide
  Seed: MCSLMQGSTLPRRSG
MWSLLQTSTVPRRSG

SEQ ID NO: 90998 - protein, 15 aa, Artificial Sequence
  Description of Artificial Sequence: Synthetic peptide
  Seed: MCSLMQGSTLPRRSG
MWSLLQVSTAPRRSG

SEQ ID NO: 90999 - protein, 15 aa, Artificial Sequence
  Description of Artificial Sequence: Synthetic peptide
  Seed: MCSLMQGSTLPRRSG
MWSLLQVSTIPRRSG

SEQ ID NO: 91000 - protein, 15 aa, Artificial Sequence
  Description of Artificial Sequence: Synthetic peptide
  Seed: MCSLMQGSTLPRRSG
MWSLLQVSTLPRRSG

SEQ ID NO: 91001 - protein, 15 aa, Artificial Sequence
  Description of Artificial Sequence: Synthetic peptide
  Seed: MCSLMQGSTLPRRSG
MWSLLQVSTVPRRSG

SEQ ID NO: 91002 - protein, 15 aa, Artificial Sequence
  Description of Artificial Sequence: Synthetic peptide
  Seed: MCSLMQGSTLPRRSG
MWSLMQASTAPRRSG

SEQ ID NO: 91003 - protein, 15 aa, Artificial Sequence
  Description of Artificial Sequence: Synthetic peptide
  Seed: MCSLMQGSTLPRRSG
MWSLMQASTGPRRSG

SEQ ID NO: 91004 - protein, 15 aa, Artificial Sequence
  Description of Artificial Sequence: Synthetic peptide
  Seed: MCSLMQGSTLPRRSG
MWSLMQASTIPRRSG

SEQ ID NO: 91005 - protein, 15 aa, Artificial Sequence
  Description of Artificial Sequence: Synthetic peptide
  Seed: MCSLMQGSTLPRRSG
MWSLMQASTLPRRSG

SEQ ID NO: 91006 - protein, 15 aa, Artificial Sequence
  Description of Artificial Sequence: Synthetic peptide
  Seed: MCSLMQGSTLPRRSG
MWSLMQASTMPRRSG

SEQ ID NO: 91007 - protein, 15 aa, Artificial Sequence
  Description of Artificial Sequence: Synthetic peptide
  Seed: MCSLMQGSTLPRRSG
MWSLMQASTSPRRSG

SEQ ID NO: 91008 - protein, 15 aa, Artificial Sequence
  Description of Artificial Sequence: Synthetic peptide
  Seed: MCSLMQGSTLPRRSG
MWSLMQASTTPRRSG

SEQ ID NO: 91009 - protein, 15 aa, Artificial Sequence
  Description of Artificial Sequence: Synthetic peptide
  Seed: MCSLMQGSTLPRRSG
MWSLMQASTVPRRSG

SEQ ID NO: 91010 - protein, 15 aa, Artificial Sequence
  Description of Artificial Sequence: Synthetic peptide
  Seed: MCSLMQGSTLPRRSG
MWSLMQGSTAPRRSG

SEQ ID NO: 91011 - protein, 15 aa, Artificial Sequence
  Description of Artificial Sequence: Synthetic peptide
  Seed: MCSLMQGSTLPRRSG
MWSLMQGSTGPRRSG

SEQ ID NO: 91012 - protein, 15 aa, Artificial Sequence
  Description of Artificial Sequence: Synthetic peptide
  Seed: MCSLMQGSTLPRRSG
MWSLMQGSTIPRRSG

SEQ ID NO: 91013 - protein, 15 aa, Artificial Sequence
  Description of Artificial Sequence: Synthetic peptide
  Seed: MCSLMQGSTLPRRSG
MWSLMQGSTLPRRSG

SEQ ID NO: 91014 - protein, 15 aa, Artificial Sequence
  Description of Artificial Sequence: Synthetic peptide
  Seed: MCSLMQGSTLPRRSG
MWSLMQGSTMPRRSG

SEQ ID NO: 91015 - protein, 15 aa, Artificial Sequence
  Description of Artificial Sequence: Synthetic peptide
  Seed: MCSLMQGSTLPRRSG
MWSLMQGSTSPRRSG

SEQ ID NO: 91016 - protein, 15 aa, Artificial Sequence
  Description of Artificial Sequence: Synthetic peptide
  Seed: MCSLMQGSTLPRRSG
MWSLMQGSTTPRRSG

SEQ ID NO: 91017 - protein, 15 aa, Artificial Sequence
  Description of Artificial Sequence: Synthetic peptide
  Seed: MCSLMQGSTLPRRSG
MWSLMQGSTVPRRSG

SEQ ID NO: 91018 - protein, 15 aa, Artificial Sequence
  Description of Artificial Sequence: Synthetic peptide
  Seed: MCSLMQGSTLPRRSG
MWSLMQNSTAPRRSG

SEQ ID NO: 91019 - protein, 15 aa, Artificial Sequence
  Description of Artificial Sequence: Synthetic peptide
  Seed: MCSLMQGSTLPRRSG
MWSLMQNSTIPRRSG

SEQ ID NO: 91020 - protein, 15 aa, Artificial Sequence
  Description of Artificial Sequence: Synthetic peptide
  Seed: MCSLMQGSTLPRRSG
MWSLMQNSTLPRRSG

SEQ ID NO: 91021 - protein, 15 aa, Artificial Sequence
  Description of Artificial Sequence: Synthetic peptide
  Seed: MCSLMQGSTLPRRSG
MWSLMQNSTMPRRSG

SEQ ID NO: 91022 - protein, 15 aa, Artificial Sequence
  Description of Artificial Sequence: Synthetic peptide
  Seed: MCSLMQGSTLPRRSG
MWSLMQNSTVPRRSG

SEQ ID NO: 91023 - protein, 15 aa, Artificial Sequence
  Description of Artificial Sequence: Synthetic peptide
  Seed: MCSLMQGSTLPRRSG
MWSLMQPSTAPRRSG

SEQ ID NO: 91024 - protein, 15 aa, Artificial Sequence
  Description of Artificial Sequence: Synthetic peptide
  Seed: MCSLMQGSTLPRRSG
MWSLMQPSTIPRRSG

SEQ ID NO: 91025 - protein, 15 aa, Artificial Sequence
  Description of Artificial Sequence: Synthetic peptide
  Seed: MCSLMQGSTLPRRSG
MWSLMQPSTLPRRSG

SEQ ID NO: 91026 - protein, 15 aa, Artificial Sequence
  Description of Artificial Sequence: Synthetic peptide
  Seed: MCSLMQGSTLPRRSG
MWSLMQPSTMPRRSG

SEQ ID NO: 91027 - protein, 15 aa, Artificial Sequence
  Description of Artificial Sequence: Synthetic peptide
  Seed: MCSLMQGSTLPRRSG
MWSLMQPSTSPRRSG

SEQ ID NO: 91028 - protein, 15 aa, Artificial Sequence
  Description of Artificial Sequence: Synthetic peptide
  Seed: MCSLMQGSTLPRRSG
MWSLMQPSTTPRRSG

SEQ ID NO: 91029 - protein, 15 aa, Artificial Sequence
  Description of Artificial Sequence: Synthetic peptide
  Seed: MCSLMQGSTLPRRSG
MWSLMQPSTVPRRSG

SEQ ID NO: 91030 - protein, 15 aa, Artificial Sequence
  Description of Artificial Sequence: Synthetic peptide
  Seed: MCSLMQGSTLPRRSG
MWSLMQSSTAPRRSG

SEQ ID NO: 91031 - protein, 15 aa, Artificial Sequence
  Description of Artificial Sequence: Synthetic peptide
  Seed: MCSLMQGSTLPRRSG
MWSLMQSSTIPRRSG

SEQ ID NO: 91032 - protein, 15 aa, Artificial Sequence
  Description of Artificial Sequence: Synthetic peptide
  Seed: MCSLMQGSTLPRRSG
MWSLMQSSTLPRRSG

SEQ ID NO: 91033 - protein, 15 aa, Artificial Sequence
  Description of Artificial Sequence: Synthetic peptide
  Seed: MCSLMQGSTLPRRSG
MWSLMQSSTMPRRSG

SEQ ID NO: 91034 - protein, 15 aa, Artificial Sequence
  Description of Artificial Sequence: Synthetic peptide
  Seed: MCSLMQGSTLPRRSG
MWSLMQSSTSPRRSG

SEQ ID NO: 91035 - protein, 15 aa, Artificial Sequence
  Description of Artificial Sequence: Synthetic peptide
  Seed: MCSLMQGSTLPRRSG
MWSLMQSSTTPRRSG

SEQ ID NO: 91036 - protein, 15 aa, Artificial Sequence
  Description of Artificial Sequence: Synthetic peptide
  Seed: MCSLMQGSTLPRRSG
MWSLMQSSTVPRRSG

SEQ ID NO: 91037 - protein, 15 aa, Artificial Sequence
  Description of Artificial Sequence: Synthetic peptide
  Seed: MCSLMQGSTLPRRSG
MWSLMQTSTAPRRSG

SEQ ID NO: 91038 - protein, 15 aa, Artificial Sequence
  Description of Artificial Sequence: Synthetic peptide
  Seed: MCSLMQGSTLPRRSG
MWSLMQTSTIPRRSG

SEQ ID NO: 91039 - protein, 15 aa, Artificial Sequence
  Description of Artificial Sequence: Synthetic peptide
  Seed: MCSLMQGSTLPRRSG
MWSLMQTSTLPRRSG

SEQ ID NO: 91040 - protein, 15 aa, Artificial Sequence
  Description of Artificial Sequence: Synthetic peptide
  Seed: MCSLMQGSTLPRRSG
MWSLMQTSTMPRRSG

SEQ ID NO: 91041 - protein, 15 aa, Artificial Sequence
  Description of Artificial Sequence: Synthetic peptide
  Seed: MCSLMQGSTLPRRSG
MWSLMQTSTTPRRSG

SEQ ID NO: 91042 - protein, 15 aa, Artificial Sequence
  Description of Artificial Sequence: Synthetic peptide
  Seed: MCSLMQGSTLPRRSG
MWSLMQTSTVPRRSG

SEQ ID NO: 91043 - protein, 15 aa, Artificial Sequence
  Description of Artificial Sequence: Synthetic peptide
  Seed: MCSLMQGSTLPRRSG
MWSLMQVSTAPRRSG

SEQ ID NO: 91044 - protein, 15 aa, Artificial Sequence
  Description of Artificial Sequence: Synthetic peptide
  Seed: MCSLMQGSTLPRRSG
MWSLMQVSTIPRRSG

SEQ ID NO: 91045 - protein, 15 aa, Artificial Sequence
  Description of Artificial Sequence: Synthetic peptide
  Seed: MCSLMQGSTLPRRSG
MWSLMQVSTLPRRSG

SEQ ID NO: 91046 - protein, 15 aa, Artificial Sequence
  Description of Artificial Sequence: Synthetic peptide
  Seed: MCSLMQGSTLPRRSG
MWSLMQVSTVPRRSG

SEQ ID NO: 91047 - protein, 15 aa, Artificial Sequence
  Description of Artificial Sequence: Synthetic peptide
  Seed: MCSLMQGSTLPRRSG
MWSLQQASTAPRRSG

SEQ ID NO: 91048 - protein, 15 aa, Artificial Sequence
  Description of Artificial Sequence: Synthetic peptide
  Seed: MCSLMQGSTLPRRSG
MWSLQQASTIPRRSG

SEQ ID NO: 91049 - protein, 15 aa, Artificial Sequence
  Description of Artificial Sequence: Synthetic peptide
  Seed: MCSLMQGSTLPRRSG
MWSLQQASTLPRRSG

SEQ ID NO: 91050 - protein, 15 aa, Artificial Sequence
  Description of Artificial Sequence: Synthetic peptide
  Seed: MCSLMQGSTLPRRSG
MWSLQQASTVPRRSG

SEQ ID NO: 91051 - protein, 15 aa, Artificial Sequence
  Description of Artificial Sequence: Synthetic peptide
  Seed: MCSLMQGSTLPRRSG
MWSLQQGSTIPRRSG

SEQ ID NO: 91052 - protein, 15 aa, Artificial Sequence
  Description of Artificial Sequence: Synthetic peptide
  Seed: MCSLMQGSTLPRRSG
MWSLQQGSTLPRRSG

SEQ ID NO: 91053 - protein, 15 aa, Artificial Sequence
  Description of Artificial Sequence: Synthetic peptide
  Seed: MCSLMQGSTLPRRSG
MWSLQQGSTVPRRSG

SEQ ID NO: 91054 - protein, 15 aa, Artificial Sequence
  Description of Artificial Sequence: Synthetic peptide
  Seed: MCSLMQGSTLPRRSG
MWSLQQSSTIPRRSG

SEQ ID NO: 91055 - protein, 15 aa, Artificial Sequence
  Description of Artificial Sequence: Synthetic peptide
  Seed: MCSLMQGSTLPRRSG
MWSLQQSSTLPRRSG

SEQ ID NO: 91056 - protein, 15 aa, Artificial Sequence
  Description of Artificial Sequence: Synthetic peptide
  Seed: MCSLMQGSTLPRRSG
MWSLQQSSTVPRRSG

SEQ ID NO: 91057 - protein, 15 aa, Artificial Sequence
  Description of Artificial Sequence: Synthetic peptide
  Seed: MCSLMQGSTLPRRSG
MWSLSQASTLPRRSG

SEQ ID NO: 91058 - protein, 15 aa, Artificial Sequence
  Description of Artificial Sequence: Synthetic peptide
  Seed: MCSLMQGSTLPRRSG
MWSLSQASTVPRRSG

SEQ ID NO: 91059 - protein, 15 aa, Artificial Sequence
  Description of Artificial Sequence: Synthetic peptide
  Seed: MCSLMQGSTLPRRSG
MWSLVQASTAPRRSG

SEQ ID NO: 91060 - protein, 15 aa, Artificial Sequence
  Description of Artificial Sequence: Synthetic peptide
  Seed: MCSLMQGSTLPRRSG
MWSLVQASTIPRRSG

SEQ ID NO: 91061 - protein, 15 aa, Artificial Sequence
  Description of Artificial Sequence: Synthetic peptide
  Seed: MCSLMQGSTLPRRSG
MWSLVQASTLPRRSG

SEQ ID NO: 91062 - protein, 15 aa, Artificial Sequence
  Description of Artificial Sequence: Synthetic peptide
  Seed: MCSLMQGSTLPRRSG
MWSLVQASTMPRRSG

SEQ ID NO: 91063 - protein, 15 aa, Artificial Sequence
  Description of Artificial Sequence: Synthetic peptide
  Seed: MCSLMQGSTLPRRSG
MWSLVQASTVPRRSG

SEQ ID NO: 91064 - protein, 15 aa, Artificial Sequence
  Description of Artificial Sequence: Synthetic peptide
  Seed: MCSLMQGSTLPRRSG
MWSLVQGSTAPRRSG

SEQ ID NO: 91065 - protein, 15 aa, Artificial Sequence
  Description of Artificial Sequence: Synthetic peptide
  Seed: MCSLMQGSTLPRRSG
MWSLVQGSTIPRRSG

SEQ ID NO: 91066 - protein, 15 aa, Artificial Sequence
  Description of Artificial Sequence: Synthetic peptide
  Seed: MCSLMQGSTLPRRSG
MWSLVQGSTLPRRSG

SEQ ID NO: 91067 - protein, 15 aa, Artificial Sequence
  Description of Artificial Sequence: Synthetic peptide
  Seed: MCSLMQGSTLPRRSG
MWSLVQGSTVPRRSG

SEQ ID NO: 91068 - protein, 15 aa, Artificial Sequence
  Description of Artificial Sequence: Synthetic peptide
  Seed: MCSLMQGSTLPRRSG
MWSLVQSSTAPRRSG

SEQ ID NO: 91069 - protein, 15 aa, Artificial Sequence
  Description of Artificial Sequence: Synthetic peptide
  Seed: MCSLMQGSTLPRRSG
MWSLVQSSTIPRRSG

SEQ ID NO: 91070 - protein, 15 aa, Artificial Sequence
  Description of Artificial Sequence: Synthetic peptide
  Seed: MCSLMQGSTLPRRSG
MWSLVQSSTLPRRSG

SEQ ID NO: 91071 - protein, 15 aa, Artificial Sequence
  Description of Artificial Sequence: Synthetic peptide
  Seed: MCSLMQGSTLPRRSG
MWSLVQSSTVPRRSG

SEQ ID NO: 91072 - protein, 15 aa, Artificial Sequence
  Description of Artificial Sequence: Synthetic peptide
  Seed: MCSLMQGSTLPRRSG
MYSLAQASTAPRRSG

SEQ ID NO: 91073 - protein, 15 aa, Artificial Sequence
  Description of Artificial Sequence: Synthetic peptide
  Seed: MCSLMQGSTLPRRSG
MYSLAQASTFPRRSG

SEQ ID NO: 91074 - protein, 15 aa, Artificial Sequence
  Description of Artificial Sequence: Synthetic peptide
  Seed: MCSLMQGSTLPRRSG
MYSLAQASTGPRRSG

SEQ ID NO: 91075 - protein, 15 aa, Artificial Sequence
  Description of Artificial Sequence: Synthetic peptide
  Seed: MCSLMQGSTLPRRSG
MYSLAQASTIPRRSG

SEQ ID NO: 91076 - protein, 15 aa, Artificial Sequence
  Description of Artificial Sequence: Synthetic peptide
  Seed: MCSLMQGSTLPRRSG
MYSLAQASTLPRRSG

SEQ ID NO: 91077 - protein, 15 aa, Artificial Sequence
  Description of Artificial Sequence: Synthetic peptide
  Seed: MCSLMQGSTLPRRSG
MYSLAQASTMPRRSG

SEQ ID NO: 91078 - protein, 15 aa, Artificial Sequence
  Description of Artificial Sequence: Synthetic peptide
  Seed: MCSLMQGSTLPRRSG
MYSLAQASTSPRRSG

SEQ ID NO: 91079 - protein, 15 aa, Artificial Sequence
  Description of Artificial Sequence: Synthetic peptide
  Seed: MCSLMQGSTLPRRSG
MYSLAQASTTPRRSG

SEQ ID NO: 91080 - protein, 15 aa, Artificial Sequence
  Description of Artificial Sequence: Synthetic peptide
  Seed: MCSLMQGSTLPRRSG
MYSLAQASTVPRRSG

SEQ ID NO: 91081 - protein, 15 aa, Artificial Sequence
  Description of Artificial Sequence: Synthetic peptide
  Seed: MCSLMQGSTLPRRSG
MYSLAQGSTAPRRSG

SEQ ID NO: 91082 - protein, 15 aa, Artificial Sequence
  Description of Artificial Sequence: Synthetic peptide
  Seed: MCSLMQGSTLPRRSG
MYSLAQGSTIPRRSG

SEQ ID NO: 91083 - protein, 15 aa, Artificial Sequence
  Description of Artificial Sequence: Synthetic peptide
  Seed: MCSLMQGSTLPRRSG
MYSLAQGSTLPRRSG

SEQ ID NO: 91084 - protein, 15 aa, Artificial Sequence
  Description of Artificial Sequence: Synthetic peptide
  Seed: MCSLMQGSTLPRRSG
MYSLAQGSTMPRRSG

SEQ ID NO: 91085 - protein, 15 aa, Artificial Sequence
  Description of Artificial Sequence: Synthetic peptide
  Seed: MCSLMQGSTLPRRSG
MYSLAQGSTSPRRSG

SEQ ID NO: 91086 - protein, 15 aa, Artificial Sequence
  Description of Artificial Sequence: Synthetic peptide
  Seed: MCSLMQGSTLPRRSG
MYSLAQGSTTPRRSG

SEQ ID NO: 91087 - protein, 15 aa, Artificial Sequence
  Description of Artificial Sequence: Synthetic peptide
  Seed: MCSLMQGSTLPRRSG
MYSLAQGSTVPRRSG

SEQ ID NO: 91088 - protein, 15 aa, Artificial Sequence
  Description of Artificial Sequence: Synthetic peptide
  Seed: MCSLMQGSTLPRRSG
MYSLAQNSTAPRRSG

SEQ ID NO: 91089 - protein, 15 aa, Artificial Sequence
  Description of Artificial Sequence: Synthetic peptide
  Seed: MCSLMQGSTLPRRSG
MYSLAQNSTIPRRSG

SEQ ID NO: 91090 - protein, 15 aa, Artificial Sequence
  Description of Artificial Sequence: Synthetic peptide
  Seed: MCSLMQGSTLPRRSG
MYSLAQNSTLPRRSG

SEQ ID NO: 91091 - protein, 15 aa, Artificial Sequence
  Description of Artificial Sequence: Synthetic peptide
  Seed: MCSLMQGSTLPRRSG
MYSLAQNSTVPRRSG

SEQ ID NO: 91092 - protein, 15 aa, Artificial Sequence
  Description of Artificial Sequence: Synthetic peptide
  Seed: MCSLMQGSTLPRRSG
MYSLAQPSTAPRRSG

SEQ ID NO: 91093 - protein, 15 aa, Artificial Sequence
  Description of Artificial Sequence: Synthetic peptide
  Seed: MCSLMQGSTLPRRSG
MYSLAQPSTIPRRSG

SEQ ID NO: 91094 - protein, 15 aa, Artificial Sequence
  Description of Artificial Sequence: Synthetic peptide
  Seed: MCSLMQGSTLPRRSG
MYSLAQPSTLPRRSG

SEQ ID NO: 91095 - protein, 15 aa, Artificial Sequence
  Description of Artificial Sequence: Synthetic peptide
  Seed: MCSLMQGSTLPRRSG
MYSLAQPSTMPRRSG

SEQ ID NO: 91096 - protein, 15 aa, Artificial Sequence
  Description of Artificial Sequence: Synthetic peptide
  Seed: MCSLMQGSTLPRRSG
MYSLAQPSTVPRRSG

SEQ ID NO: 91097 - protein, 15 aa, Artificial Sequence
  Description of Artificial Sequence: Synthetic peptide
  Seed: MCSLMQGSTLPRRSG
MYSLAQSSTAPRRSG

SEQ ID NO: 91098 - protein, 15 aa, Artificial Sequence
  Description of Artificial Sequence: Synthetic peptide
  Seed: MCSLMQGSTLPRRSG
MYSLAQSSTIPRRSG

SEQ ID NO: 91099 - protein, 15 aa, Artificial Sequence
  Description of Artificial Sequence: Synthetic peptide
  Seed: MCSLMQGSTLPRRSG
MYSLAQSSTLPRRSG

SEQ ID NO: 91100 - protein, 15 aa, Artificial Sequence
  Description of Artificial Sequence: Synthetic peptide
  Seed: MCSLMQGSTLPRRSG
MYSLAQSSTMPRRSG

SEQ ID NO: 91101 - protein, 15 aa, Artificial Sequence
  Description of Artificial Sequence: Synthetic peptide
  Seed: MCSLMQGSTLPRRSG
MYSLAQSSTSPRRSG

SEQ ID NO: 91102 - protein, 15 aa, Artificial Sequence
  Description of Artificial Sequence: Synthetic peptide
  Seed: MCSLMQGSTLPRRSG
MYSLAQSSTTPRRSG

SEQ ID NO: 91103 - protein, 15 aa, Artificial Sequence
  Description of Artificial Sequence: Synthetic peptide
  Seed: MCSLMQGSTLPRRSG
MYSLAQSSTVPRRSG

SEQ ID NO: 91104 - protein, 15 aa, Artificial Sequence
  Description of Artificial Sequence: Synthetic peptide
  Seed: MCSLMQGSTLPRRSG
MYSLAQTSTAPRRSG

SEQ ID NO: 91105 - protein, 15 aa, Artificial Sequence
  Description of Artificial Sequence: Synthetic peptide
  Seed: MCSLMQGSTLPRRSG
MYSLAQTSTIPRRSG

SEQ ID NO: 91106 - protein, 15 aa, Artificial Sequence
  Description of Artificial Sequence: Synthetic peptide
  Seed: MCSLMQGSTLPRRSG
MYSLAQTSTLPRRSG

SEQ ID NO: 91107 - protein, 15 aa, Artificial Sequence
  Description of Artificial Sequence: Synthetic peptide
  Seed: MCSLMQGSTLPRRSG
MYSLAQTSTVPRRSG

SEQ ID NO: 91108 - protein, 15 aa, Artificial Sequence
  Description of Artificial Sequence: Synthetic peptide
  Seed: MCSLMQGSTLPRRSG
MYSLAQVSTIPRRSG

SEQ ID NO: 91109 - protein, 15 aa, Artificial Sequence
  Description of Artificial Sequence: Synthetic peptide
  Seed: MCSLMQGSTLPRRSG
MYSLAQVSTLPRRSG

SEQ ID NO: 91110 - protein, 15 aa, Artificial Sequence
  Description of Artificial Sequence: Synthetic peptide
  Seed: MCSLMQGSTLPRRSG
MYSLAQVSTVPRRSG

SEQ ID NO: 91111 - protein, 15 aa, Artificial Sequence
  Description of Artificial Sequence: Synthetic peptide
  Seed: MCSLMQGSTLPRRSG
MYSLEQASTAPRRSG

SEQ ID NO: 91112 - protein, 15 aa, Artificial Sequence
  Description of Artificial Sequence: Synthetic peptide
  Seed: MCSLMQGSTLPRRSG
MYSLEQASTIPRRSG

SEQ ID NO: 91113 - protein, 15 aa, Artificial Sequence
  Description of Artificial Sequence: Synthetic peptide
  Seed: MCSLMQGSTLPRRSG
MYSLEQASTLPRRSG

SEQ ID NO: 91114 - protein, 15 aa, Artificial Sequence
  Description of Artificial Sequence: Synthetic peptide
  Seed: MCSLMQGSTLPRRSG
MYSLEQASTVPRRSG

SEQ ID NO: 91115 - protein, 15 aa, Artificial Sequence
  Description of Artificial Sequence: Synthetic peptide
  Seed: MCSLMQGSTLPRRSG
MYSLEQGSTIPRRSG

SEQ ID NO: 91116 - protein, 15 aa, Artificial Sequence
  Description of Artificial Sequence: Synthetic peptide
  Seed: MCSLMQGSTLPRRSG
MYSLEQGSTLPRRSG

SEQ ID NO: 91117 - protein, 15 aa, Artificial Sequence
  Description of Artificial Sequence: Synthetic peptide
  Seed: MCSLMQGSTLPRRSG
MYSLEQGSTVPRRSG

SEQ ID NO: 91118 - protein, 15 aa, Artificial Sequence
  Description of Artificial Sequence: Synthetic peptide
  Seed: MCSLMQGSTLPRRSG
MYSLFQASTIPRRSG

SEQ ID NO: 91119 - protein, 15 aa, Artificial Sequence
  Description of Artificial Sequence: Synthetic peptide
  Seed: MCSLMQGSTLPRRSG
MYSLFQASTLPRRSG

SEQ ID NO: 91120 - protein, 15 aa, Artificial Sequence
  Description of Artificial Sequence: Synthetic peptide
  Seed: MCSLMQGSTLPRRSG
MYSLFQASTMPRRSG

SEQ ID NO: 91121 - protein, 15 aa, Artificial Sequence
  Description of Artificial Sequence: Synthetic peptide
  Seed: MCSLMQGSTLPRRSG
MYSLFQASTVPRRSG

SEQ ID NO: 91122 - protein, 15 aa, Artificial Sequence
  Description of Artificial Sequence: Synthetic peptide
  Seed: MCSLMQGSTLPRRSG
MYSLFQGSTIPRRSG

SEQ ID NO: 91123 - protein, 15 aa, Artificial Sequence
  Description of Artificial Sequence: Synthetic peptide
  Seed: MCSLMQGSTLPRRSG
MYSLFQGSTLPRRSG

SEQ ID NO: 91124 - protein, 15 aa, Artificial Sequence
  Description of Artificial Sequence: Synthetic peptide
  Seed: MCSLMQGSTLPRRSG
MYSLFQGSTVPRRSG

SEQ ID NO: 91125 - protein, 15 aa, Artificial Sequence
  Description of Artificial Sequence: Synthetic peptide
  Seed: MCSLMQGSTLPRRSG
MYSLFQPSTIPRRSG

SEQ ID NO: 91126 - protein, 15 aa, Artificial Sequence
  Description of Artificial Sequence: Synthetic peptide
  Seed: MCSLMQGSTLPRRSG
MYSLFQPSTVPRRSG

SEQ ID NO: 91127 - protein, 15 aa, Artificial Sequence
  Description of Artificial Sequence: Synthetic peptide
  Seed: MCSLMQGSTLPRRSG
MYSLFQSSTIPRRSG

SEQ ID NO: 91128 - protein, 15 aa, Artificial Sequence
  Description of Artificial Sequence: Synthetic peptide
  Seed: MCSLMQGSTLPRRSG
MYSLFQSSTLPRRSG

SEQ ID NO: 91129 - protein, 15 aa, Artificial Sequence
  Description of Artificial Sequence: Synthetic peptide
  Seed: MCSLMQGSTLPRRSG
MYSLFQSSTVPRRSG

SEQ ID NO: 91130 - protein, 15 aa, Artificial Sequence
  Description of Artificial Sequence: Synthetic peptide
  Seed: MCSLMQGSTLPRRSG
MYSLGQASTIPRRSG

SEQ ID NO: 91131 - protein, 15 aa, Artificial Sequence
  Description of Artificial Sequence: Synthetic peptide
  Seed: MCSLMQGSTLPRRSG
MYSLGQASTLPRRSG

SEQ ID NO: 91132 - protein, 15 aa, Artificial Sequence
  Description of Artificial Sequence: Synthetic peptide
  Seed: MCSLMQGSTLPRRSG
MYSLGQASTVPRRSG

SEQ ID NO: 91133 - protein, 15 aa, Artificial Sequence
  Description of Artificial Sequence: Synthetic peptide
  Seed: MCSLMQGSTLPRRSG
MYSLHQASTLPRRSG

SEQ ID NO: 91134 - protein, 15 aa, Artificial Sequence
  Description of Artificial Sequence: Synthetic peptide
  Seed: MCSLMQGSTLPRRSG
MYSLIQASTAPRRSG

SEQ ID NO: 91135 - protein, 15 aa, Artificial Sequence
  Description of Artificial Sequence: Synthetic peptide
  Seed: MCSLMQGSTLPRRSG
MYSLIQASTCPRRSG

SEQ ID NO: 91136 - protein, 15 aa, Artificial Sequence
  Description of Artificial Sequence: Synthetic peptide
  Seed: MCSLMQGSTLPRRSG
MYSLIQASTGPRRSG

SEQ ID NO: 91137 - protein, 15 aa, Artificial Sequence
  Description of Artificial Sequence: Synthetic peptide
  Seed: MCSLMQGSTLPRRSG
MYSLIQASTIPRRSG

SEQ ID NO: 91138 - protein, 15 aa, Artificial Sequence
  Description of Artificial Sequence: Synthetic peptide
  Seed: MCSLMQGSTLPRRSG
MYSLIQASTLPRRSG

SEQ ID NO: 91139 - protein, 15 aa, Artificial Sequence
  Description of Artificial Sequence: Synthetic peptide
  Seed: MCSLMQGSTLPRRSG
MYSLIQASTMPRRSG

SEQ ID NO: 91140 - protein, 15 aa, Artificial Sequence
  Description of Artificial Sequence: Synthetic peptide
  Seed: MCSLMQGSTLPRRSG
MYSLIQASTNPRRSG

SEQ ID NO: 91141 - protein, 15 aa, Artificial Sequence
  Description of Artificial Sequence: Synthetic peptide
  Seed: MCSLMQGSTLPRRSG
MYSLIQASTSPRRSG

SEQ ID NO: 91142 - protein, 15 aa, Artificial Sequence
  Description of Artificial Sequence: Synthetic peptide
  Seed: MCSLMQGSTLPRRSG
MYSLIQASTTPRRSG

SEQ ID NO: 91143 - protein, 15 aa, Artificial Sequence
  Description of Artificial Sequence: Synthetic peptide
  Seed: MCSLMQGSTLPRRSG
MYSLIQASTVPRRSG

SEQ ID NO: 91144 - protein, 15 aa, Artificial Sequence
  Description of Artificial Sequence: Synthetic peptide
  Seed: MCSLMQGSTLPRRSG
MYSLIQGSTAPRRSG

SEQ ID NO: 91145 - protein, 15 aa, Artificial Sequence
  Description of Artificial Sequence: Synthetic peptide
  Seed: MCSLMQGSTLPRRSG
MYSLIQGSTGPRRSG

SEQ ID NO: 91146 - protein, 15 aa, Artificial Sequence
  Description of Artificial Sequence: Synthetic peptide
  Seed: MCSLMQGSTLPRRSG
MYSLIQGSTIPRRSG

SEQ ID NO: 91147 - protein, 15 aa, Artificial Sequence
  Description of Artificial Sequence: Synthetic peptide
  Seed: MCSLMQGSTLPRRSG
MYSLIQGSTLPRRSG

SEQ ID NO: 91148 - protein, 15 aa, Artificial Sequence
  Description of Artificial Sequence: Synthetic peptide
  Seed: MCSLMQGSTLPRRSG
MYSLIQGSTMPRRSG

SEQ ID NO: 91149 - protein, 15 aa, Artificial Sequence
  Description of Artificial Sequence: Synthetic peptide
  Seed: MCSLMQGSTLPRRSG
MYSLIQGSTSPRRSG

SEQ ID NO: 91150 - protein, 15 aa, Artificial Sequence
  Description of Artificial Sequence: Synthetic peptide
  Seed: MCSLMQGSTLPRRSG
MYSLIQGSTTPRRSG

SEQ ID NO: 91151 - protein, 15 aa, Artificial Sequence
  Description of Artificial Sequence: Synthetic peptide
  Seed: MCSLMQGSTLPRRSG
MYSLIQGSTVPRRSG

SEQ ID NO: 91152 - protein, 15 aa, Artificial Sequence
  Description of Artificial Sequence: Synthetic peptide
  Seed: MCSLMQGSTLPRRSG
MYSLIQNSTAPRRSG

SEQ ID NO: 91153 - protein, 15 aa, Artificial Sequence
  Description of Artificial Sequence: Synthetic peptide
  Seed: MCSLMQGSTLPRRSG
MYSLIQNSTIPRRSG

SEQ ID NO: 91154 - protein, 15 aa, Artificial Sequence
  Description of Artificial Sequence: Synthetic peptide
  Seed: MCSLMQGSTLPRRSG
MYSLIQNSTLPRRSG

SEQ ID NO: 91155 - protein, 15 aa, Artificial Sequence
  Description of Artificial Sequence: Synthetic peptide
  Seed: MCSLMQGSTLPRRSG
MYSLIQNSTVPRRSG

SEQ ID NO: 91156 - protein, 15 aa, Artificial Sequence
  Description of Artificial Sequence: Synthetic peptide
  Seed: MCSLMQGSTLPRRSG
MYSLIQPSTAPRRSG

SEQ ID NO: 91157 - protein, 15 aa, Artificial Sequence
  Description of Artificial Sequence: Synthetic peptide
  Seed: MCSLMQGSTLPRRSG
MYSLIQPSTIPRRSG

SEQ ID NO: 91158 - protein, 15 aa, Artificial Sequence
  Description of Artificial Sequence: Synthetic peptide
  Seed: MCSLMQGSTLPRRSG
MYSLIQPSTLPRRSG

SEQ ID NO: 91159 - protein, 15 aa, Artificial Sequence
  Description of Artificial Sequence: Synthetic peptide
  Seed: MCSLMQGSTLPRRSG
MYSLIQPSTMPRRSG

SEQ ID NO: 91160 - protein, 15 aa, Artificial Sequence
  Description of Artificial Sequence: Synthetic peptide
  Seed: MCSLMQGSTLPRRSG
MYSLIQPSTSPRRSG

SEQ ID NO: 91161 - protein, 15 aa, Artificial Sequence
  Description of Artificial Sequence: Synthetic peptide
  Seed: MCSLMQGSTLPRRSG
MYSLIQPSTTPRRSG

SEQ ID NO: 91162 - protein, 15 aa, Artificial Sequence
  Description of Artificial Sequence: Synthetic peptide
  Seed: MCSLMQGSTLPRRSG
MYSLIQPSTVPRRSG

SEQ ID NO: 91163 - protein, 15 aa, Artificial Sequence
  Description of Artificial Sequence: Synthetic peptide
  Seed: MCSLMQGSTLPRRSG
MYSLIQSSTAPRRSG

SEQ ID NO: 91164 - protein, 15 aa, Artificial Sequence
  Description of Artificial Sequence: Synthetic peptide
  Seed: MCSLMQGSTLPRRSG
MYSLIQSSTGPRRSG

SEQ ID NO: 91165 - protein, 15 aa, Artificial Sequence
  Description of Artificial Sequence: Synthetic peptide
  Seed: MCSLMQGSTLPRRSG
MYSLIQSSTIPRRSG

SEQ ID NO: 91166 - protein, 15 aa, Artificial Sequence
  Description of Artificial Sequence: Synthetic peptide
  Seed: MCSLMQGSTLPRRSG
MYSLIQSSTLPRRSG

SEQ ID NO: 91167 - protein, 15 aa, Artificial Sequence
  Description of Artificial Sequence: Synthetic peptide
  Seed: MCSLMQGSTLPRRSG
MYSLIQSSTMPRRSG

SEQ ID NO: 91168 - protein, 15 aa, Artificial Sequence
  Description of Artificial Sequence: Synthetic peptide
  Seed: MCSLMQGSTLPRRSG
MYSLIQSSTSPRRSG

SEQ ID NO: 91169 - protein, 15 aa, Artificial Sequence
  Description of Artificial Sequence: Synthetic peptide
  Seed: MCSLMQGSTLPRRSG
MYSLIQSSTTPRRSG

SEQ ID NO: 91170 - protein, 15 aa, Artificial Sequence
  Description of Artificial Sequence: Synthetic peptide
  Seed: MCSLMQGSTLPRRSG
MYSLIQSSTVPRRSG

SEQ ID NO: 91171 - protein, 15 aa, Artificial Sequence
  Description of Artificial Sequence: Synthetic peptide
  Seed: MCSLMQGSTLPRRSG
MYSLIQTSTAPRRSG

SEQ ID NO: 91172 - protein, 15 aa, Artificial Sequence
  Description of Artificial Sequence: Synthetic peptide
  Seed: MCSLMQGSTLPRRSG
MYSLIQTSTIPRRSG

SEQ ID NO: 91173 - protein, 15 aa, Artificial Sequence
  Description of Artificial Sequence: Synthetic peptide
  Seed: MCSLMQGSTLPRRSG
MYSLIQTSTLPRRSG

SEQ ID NO: 91174 - protein, 15 aa, Artificial Sequence
  Description of Artificial Sequence: Synthetic peptide
  Seed: MCSLMQGSTLPRRSG
MYSLIQTSTMPRRSG

SEQ ID NO: 91175 - protein, 15 aa, Artificial Sequence
  Description of Artificial Sequence: Synthetic peptide
  Seed: MCSLMQGSTLPRRSG
MYSLIQTSTSPRRSG

SEQ ID NO: 91176 - protein, 15 aa, Artificial Sequence
  Description of Artificial Sequence: Synthetic peptide
  Seed: MCSLMQGSTLPRRSG
MYSLIQTSTTPRRSG

SEQ ID NO: 91177 - protein, 15 aa, Artificial Sequence
  Description of Artificial Sequence: Synthetic peptide
  Seed: MCSLMQGSTLPRRSG
MYSLIQTSTVPRRSG

SEQ ID NO: 91178 - protein, 15 aa, Artificial Sequence
  Description of Artificial Sequence: Synthetic peptide
  Seed: MCSLMQGSTLPRRSG
MYSLIQVSTLPRRSG

SEQ ID NO: 91179 - protein, 15 aa, Artificial Sequence
  Description of Artificial Sequence: Synthetic peptide
  Seed: MCSLMQGSTLPRRSG
MYSLIQVSTVPRRSG

SEQ ID NO: 91180 - protein, 15 aa, Artificial Sequence
  Description of Artificial Sequence: Synthetic peptide
  Seed: MCSLMQGSTLPRRSG
MYSLLQASTAPRRSG

SEQ ID NO: 91181 - protein, 15 aa, Artificial Sequence
  Description of Artificial Sequence: Synthetic peptide
  Seed: MCSLMQGSTLPRRSG
MYSLLQASTCPRRSG

SEQ ID NO: 91182 - protein, 15 aa, Artificial Sequence
  Description of Artificial Sequence: Synthetic peptide
  Seed: MCSLMQGSTLPRRSG
MYSLLQASTFPRRSG

SEQ ID NO: 91183 - protein, 15 aa, Artificial Sequence
  Description of Artificial Sequence: Synthetic peptide
  Seed: MCSLMQGSTLPRRSG
MYSLLQASTGPRRSG

SEQ ID NO: 91184 - protein, 15 aa, Artificial Sequence
  Description of Artificial Sequence: Synthetic peptide
  Seed: MCSLMQGSTLPRRSG
MYSLLQASTHPRRSG

SEQ ID NO: 91185 - protein, 15 aa, Artificial Sequence
  Description of Artificial Sequence: Synthetic peptide
  Seed: MCSLMQGSTLPRRSG
MYSLLQASTIPRRSG

SEQ ID NO: 91186 - protein, 15 aa, Artificial Sequence
  Description of Artificial Sequence: Synthetic peptide
  Seed: MCSLMQGSTLPRRSG
MYSLLQASTLPRRSG

SEQ ID NO: 91187 - protein, 15 aa, Artificial Sequence
  Description of Artificial Sequence: Synthetic peptide
  Seed: MCSLMQGSTLPRRSG
MYSLLQASTMPRRSG

SEQ ID NO: 91188 - protein, 15 aa, Artificial Sequence
  Description of Artificial Sequence: Synthetic peptide
  Seed: MCSLMQGSTLPRRSG
MYSLLQASTNPRRSG

SEQ ID NO: 91189 - protein, 15 aa, Artificial Sequence
  Description of Artificial Sequence: Synthetic peptide
  Seed: MCSLMQGSTLPRRSG
MYSLLQASTPPRRSG

SEQ ID NO: 91190 - protein, 15 aa, Artificial Sequence
  Description of Artificial Sequence: Synthetic peptide
  Seed: MCSLMQGSTLPRRSG
MYSLLQASTQPRRSG

SEQ ID NO: 91191 - protein, 15 aa, Artificial Sequence
  Description of Artificial Sequence: Synthetic peptide
  Seed: MCSLMQGSTLPRRSG
MYSLLQASTRPRRSG

SEQ ID NO: 91192 - protein, 15 aa, Artificial Sequence
  Description of Artificial Sequence: Synthetic peptide
  Seed: MCSLMQGSTLPRRSG
MYSLLQASTSPRRSG

SEQ ID NO: 91193 - protein, 15 aa, Artificial Sequence
  Description of Artificial Sequence: Synthetic peptide
  Seed: MCSLMQGSTLPRRSG
MYSLLQASTTPRRSG

SEQ ID NO: 91194 - protein, 15 aa, Artificial Sequence
  Description of Artificial Sequence: Synthetic peptide
  Seed: MCSLMQGSTLPRRSG
MYSLLQASTVPRRSG

SEQ ID NO: 91195 - protein, 15 aa, Artificial Sequence
  Description of Artificial Sequence: Synthetic peptide
  Seed: MCSLMQGSTLPRRSG
MYSLLQASTYPRRSG

SEQ ID NO: 91196 - protein, 15 aa, Artificial Sequence
  Description of Artificial Sequence: Synthetic peptide
  Seed: MCSLMQGSTLPRRSG
MYSLLQGSTAPRRSG

SEQ ID NO: 91197 - protein, 15 aa, Artificial Sequence
  Description of Artificial Sequence: Synthetic peptide
  Seed: MCSLMQGSTLPRRSG
MYSLLQGSTCPRRSG

SEQ ID NO: 91198 - protein, 15 aa, Artificial Sequence
  Description of Artificial Sequence: Synthetic peptide
  Seed: MCSLMQGSTLPRRSG
MYSLLQGSTFPRRSG

SEQ ID NO: 91199 - protein, 15 aa, Artificial Sequence
  Description of Artificial Sequence: Synthetic peptide
  Seed: MCSLMQGSTLPRRSG
MYSLLQGSTGPRRSG

SEQ ID NO: 91200 - protein, 15 aa, Artificial Sequence
  Description of Artificial Sequence: Synthetic peptide
  Seed: MCSLMQGSTLPRRSG
MYSLLQGSTIPRRSG

SEQ ID NO: 91201 - protein, 15 aa, Artificial Sequence
  Description of Artificial Sequence: Synthetic peptide
  Seed: MCSLMQGSTLPRRSG
MYSLLQGSTLPRRSG

SEQ ID NO: 91202 - protein, 15 aa, Artificial Sequence
  Description of Artificial Sequence: Synthetic peptide
  Seed: MCSLMQGSTLPRRSG
MYSLLQGSTMPRRSG

SEQ ID NO: 91203 - protein, 15 aa, Artificial Sequence
  Description of Artificial Sequence: Synthetic peptide
  Seed: MCSLMQGSTLPRRSG
MYSLLQGSTNPRRSG

SEQ ID NO: 91204 - protein, 15 aa, Artificial Sequence
  Description of Artificial Sequence: Synthetic peptide
  Seed: MCSLMQGSTLPRRSG
MYSLLQGSTSPRRSG

SEQ ID NO: 91205 - protein, 15 aa, Artificial Sequence
  Description of Artificial Sequence: Synthetic peptide
  Seed: MCSLMQGSTLPRRSG
MYSLLQGSTTPRRSG

SEQ ID NO: 91206 - protein, 15 aa, Artificial Sequence
  Description of Artificial Sequence: Synthetic peptide
  Seed: MCSLMQGSTLPRRSG
MYSLLQGSTVPRRSG

SEQ ID NO: 91207 - protein, 15 aa, Artificial Sequence
  Description of Artificial Sequence: Synthetic peptide
  Seed: MCSLMQGSTLPRRSG
MYSLLQHSTAPRRSG

SEQ ID NO: 91208 - protein, 15 aa, Artificial Sequence
  Description of Artificial Sequence: Synthetic peptide
  Seed: MCSLMQGSTLPRRSG
MYSLLQHSTIPRRSG

SEQ ID NO: 91209 - protein, 15 aa, Artificial Sequence
  Description of Artificial Sequence: Synthetic peptide
  Seed: MCSLMQGSTLPRRSG
MYSLLQHSTLPRRSG

SEQ ID NO: 91210 - protein, 15 aa, Artificial Sequence
  Description of Artificial Sequence: Synthetic peptide
  Seed: MCSLMQGSTLPRRSG
MYSLLQHSTVPRRSG

SEQ ID NO: 91211 - protein, 15 aa, Artificial Sequence
  Description of Artificial Sequence: Synthetic peptide
  Seed: MCSLMQGSTLPRRSG
MYSLLQISTAPRRSG

SEQ ID NO: 91212 - protein, 15 aa, Artificial Sequence
  Description of Artificial Sequence: Synthetic peptide
  Seed: MCSLMQGSTLPRRSG
MYSLLQISTLPRRSG

SEQ ID NO: 91213 - protein, 15 aa, Artificial Sequence
  Description of Artificial Sequence: Synthetic peptide
  Seed: MCSLMQGSTLPRRSG
MYSLLQISTMPRRSG

SEQ ID NO: 91214 - protein, 15 aa, Artificial Sequence
  Description of Artificial Sequence: Synthetic peptide
  Seed: MCSLMQGSTLPRRSG
MYSLLQISTSPRRSG

SEQ ID NO: 91215 - protein, 15 aa, Artificial Sequence
  Description of Artificial Sequence: Synthetic peptide
  Seed: MCSLMQGSTLPRRSG
MYSLLQISTVPRRSG

SEQ ID NO: 91216 - protein, 15 aa, Artificial Sequence
  Description of Artificial Sequence: Synthetic peptide
  Seed: MCSLMQGSTLPRRSG
MYSLLQNSTAPRRSG

SEQ ID NO: 91217 - protein, 15 aa, Artificial Sequence
  Description of Artificial Sequence: Synthetic peptide
  Seed: MCSLMQGSTLPRRSG
MYSLLQNSTGPRRSG

SEQ ID NO: 91218 - protein, 15 aa, Artificial Sequence
  Description of Artificial Sequence: Synthetic peptide
  Seed: MCSLMQGSTLPRRSG
MYSLLQNSTIPRRSG

SEQ ID NO: 91219 - protein, 15 aa, Artificial Sequence
  Description of Artificial Sequence: Synthetic peptide
  Seed: MCSLMQGSTLPRRSG
MYSLLQNSTLPRRSG

SEQ ID NO: 91220 - protein, 15 aa, Artificial Sequence
  Description of Artificial Sequence: Synthetic peptide
  Seed: MCSLMQGSTLPRRSG
MYSLLQNSTMPRRSG

SEQ ID NO: 91221 - protein, 15 aa, Artificial Sequence
  Description of Artificial Sequence: Synthetic peptide
  Seed: MCSLMQGSTLPRRSG
MYSLLQNSTSPRRSG

SEQ ID NO: 91222 - protein, 15 aa, Artificial Sequence
  Description of Artificial Sequence: Synthetic peptide
  Seed: MCSLMQGSTLPRRSG
MYSLLQNSTTPRRSG

SEQ ID NO: 91223 - protein, 15 aa, Artificial Sequence
  Description of Artificial Sequence: Synthetic peptide
  Seed: MCSLMQGSTLPRRSG
MYSLLQNSTVPRRSG

SEQ ID NO: 91224 - protein, 15 aa, Artificial Sequence
  Description of Artificial Sequence: Synthetic peptide
  Seed: MCSLMQGSTLPRRSG
MYSLLQPSTAPRRSG

SEQ ID NO: 91225 - protein, 15 aa, Artificial Sequence
  Description of Artificial Sequence: Synthetic peptide
  Seed: MCSLMQGSTLPRRSG
MYSLLQPSTCPRRSG

SEQ ID NO: 91226 - protein, 15 aa, Artificial Sequence
  Description of Artificial Sequence: Synthetic peptide
  Seed: MCSLMQGSTLPRRSG
MYSLLQPSTFPRRSG

SEQ ID NO: 91227 - protein, 15 aa, Artificial Sequence
  Description of Artificial Sequence: Synthetic peptide
  Seed: MCSLMQGSTLPRRSG
MYSLLQPSTGPRRSG

SEQ ID NO: 91228 - protein, 15 aa, Artificial Sequence
  Description of Artificial Sequence: Synthetic peptide
  Seed: MCSLMQGSTLPRRSG
MYSLLQPSTIPRRSG

SEQ ID NO: 91229 - protein, 15 aa, Artificial Sequence
  Description of Artificial Sequence: Synthetic peptide
  Seed: MCSLMQGSTLPRRSG
MYSLLQPSTLPRRSG

SEQ ID NO: 91230 - protein, 15 aa, Artificial Sequence
  Description of Artificial Sequence: Synthetic peptide
  Seed: MCSLMQGSTLPRRSG
MYSLLQPSTMPRRSG

SEQ ID NO: 91231 - protein, 15 aa, Artificial Sequence
  Description of Artificial Sequence: Synthetic peptide
  Seed: MCSLMQGSTLPRRSG
MYSLLQPSTNPRRSG

SEQ ID NO: 91232 - protein, 15 aa, Artificial Sequence
  Description of Artificial Sequence: Synthetic peptide
  Seed: MCSLMQGSTLPRRSG
MYSLLQPSTSPRRSG

SEQ ID NO: 91233 - protein, 15 aa, Artificial Sequence
  Description of Artificial Sequence: Synthetic peptide
  Seed: MCSLMQGSTLPRRSG
MYSLLQPSTTPRRSG

SEQ ID NO: 91234 - protein, 15 aa, Artificial Sequence
  Description of Artificial Sequence: Synthetic peptide
  Seed: MCSLMQGSTLPRRSG
MYSLLQPSTVPRRSG

SEQ ID NO: 91235 - protein, 15 aa, Artificial Sequence
  Description of Artificial Sequence: Synthetic peptide
  Seed: MCSLMQGSTLPRRSG
MYSLLQSSTAPRRSG

SEQ ID NO: 91236 - protein, 15 aa, Artificial Sequence
  Description of Artificial Sequence: Synthetic peptide
  Seed: MCSLMQGSTLPRRSG
MYSLLQSSTCPRRSG

SEQ ID NO: 91237 - protein, 15 aa, Artificial Sequence
  Description of Artificial Sequence: Synthetic peptide
  Seed: MCSLMQGSTLPRRSG
MYSLLQSSTFPRRSG

SEQ ID NO: 91238 - protein, 15 aa, Artificial Sequence
  Description of Artificial Sequence: Synthetic peptide
  Seed: MCSLMQGSTLPRRSG
MYSLLQSSTGPRRSG

SEQ ID NO: 91239 - protein, 15 aa, Artificial Sequence
  Description of Artificial Sequence: Synthetic peptide
  Seed: MCSLMQGSTLPRRSG
MYSLLQSSTIPRRSG

SEQ ID NO: 91240 - protein, 15 aa, Artificial Sequence
  Description of Artificial Sequence: Synthetic peptide
  Seed: MCSLMQGSTLPRRSG
MYSLLQSSTLPRRSG

SEQ ID NO: 91241 - protein, 15 aa, Artificial Sequence
  Description of Artificial Sequence: Synthetic peptide
  Seed: MCSLMQGSTLPRRSG
MYSLLQSSTMPRRSG

SEQ ID NO: 91242 - protein, 15 aa, Artificial Sequence
  Description of Artificial Sequence: Synthetic peptide
  Seed: MCSLMQGSTLPRRSG
MYSLLQSSTNPRRSG

SEQ ID NO: 91243 - protein, 15 aa, Artificial Sequence
  Description of Artificial Sequence: Synthetic peptide
  Seed: MCSLMQGSTLPRRSG
MYSLLQSSTSPRRSG

SEQ ID NO: 91244 - protein, 15 aa, Artificial Sequence
  Description of Artificial Sequence: Synthetic peptide
  Seed: MCSLMQGSTLPRRSG
MYSLLQSSTTPRRSG

SEQ ID NO: 91245 - protein, 15 aa, Artificial Sequence
  Description of Artificial Sequence: Synthetic peptide
  Seed: MCSLMQGSTLPRRSG
MYSLLQSSTVPRRSG

SEQ ID NO: 91246 - protein, 15 aa, Artificial Sequence
  Description of Artificial Sequence: Synthetic peptide
  Seed: MCSLMQGSTLPRRSG
MYSLLQTSTAPRRSG

SEQ ID NO: 91247 - protein, 15 aa, Artificial Sequence
  Description of Artificial Sequence: Synthetic peptide
  Seed: MCSLMQGSTLPRRSG
MYSLLQTSTGPRRSG

SEQ ID NO: 91248 - protein, 15 aa, Artificial Sequence
  Description of Artificial Sequence: Synthetic peptide
  Seed: MCSLMQGSTLPRRSG
MYSLLQTSTIPRRSG

SEQ ID NO: 91249 - protein, 15 aa, Artificial Sequence
  Description of Artificial Sequence: Synthetic peptide
  Seed: MCSLMQGSTLPRRSG
MYSLLQTSTLPRRSG

SEQ ID NO: 91250 - protein, 15 aa, Artificial Sequence
  Description of Artificial Sequence: Synthetic peptide
  Seed: MCSLMQGSTLPRRSG
MYSLLQTSTMPRRSG

SEQ ID NO: 91251 - protein, 15 aa, Artificial Sequence
  Description of Artificial Sequence: Synthetic peptide
  Seed: MCSLMQGSTLPRRSG
MYSLLQTSTSPRRSG

SEQ ID NO: 91252 - protein, 15 aa, Artificial Sequence
  Description of Artificial Sequence: Synthetic peptide
  Seed: MCSLMQGSTLPRRSG
MYSLLQTSTTPRRSG

SEQ ID NO: 91253 - protein, 15 aa, Artificial Sequence
  Description of Artificial Sequence: Synthetic peptide
  Seed: MCSLMQGSTLPRRSG
MYSLLQTSTVPRRSG

SEQ ID NO: 91254 - protein, 15 aa, Artificial Sequence
  Description of Artificial Sequence: Synthetic peptide
  Seed: MCSLMQGSTLPRRSG
MYSLLQVSTAPRRSG

SEQ ID NO: 91255 - protein, 15 aa, Artificial Sequence
  Description of Artificial Sequence: Synthetic peptide
  Seed: MCSLMQGSTLPRRSG
MYSLLQVSTIPRRSG

SEQ ID NO: 91256 - protein, 15 aa, Artificial Sequence
  Description of Artificial Sequence: Synthetic peptide
  Seed: MCSLMQGSTLPRRSG
MYSLLQVSTLPRRSG

SEQ ID NO: 91257 - protein, 15 aa, Artificial Sequence
  Description of Artificial Sequence: Synthetic peptide
  Seed: MCSLMQGSTLPRRSG
MYSLLQVSTMPRRSG

SEQ ID NO: 91258 - protein, 15 aa, Artificial Sequence
  Description of Artificial Sequence: Synthetic peptide
  Seed: MCSLMQGSTLPRRSG
MYSLLQVSTSPRRSG

SEQ ID NO: 91259 - protein, 15 aa, Artificial Sequence
  Description of Artificial Sequence: Synthetic peptide
  Seed: MCSLMQGSTLPRRSG
MYSLLQVSTTPRRSG

SEQ ID NO: 91260 - protein, 15 aa, Artificial Sequence
  Description of Artificial Sequence: Synthetic peptide
  Seed: MCSLMQGSTLPRRSG
MYSLLQVSTVPRRSG

SEQ ID NO: 91261 - protein, 15 aa, Artificial Sequence
  Description of Artificial Sequence: Synthetic peptide
  Seed: MCSLMQGSTLPRRSG
MYSLMQASTAPRRSG

SEQ ID NO: 91262 - protein, 15 aa, Artificial Sequence
  Description of Artificial Sequence: Synthetic peptide
  Seed: MCSLMQGSTLPRRSG
MYSLMQASTCPRRSG

SEQ ID NO: 91263 - protein, 15 aa, Artificial Sequence
  Description of Artificial Sequence: Synthetic peptide
  Seed: MCSLMQGSTLPRRSG
MYSLMQASTFPRRSG

SEQ ID NO: 91264 - protein, 15 aa, Artificial Sequence
  Description of Artificial Sequence: Synthetic peptide
  Seed: MCSLMQGSTLPRRSG
MYSLMQASTGPRRSG

SEQ ID NO: 91265 - protein, 15 aa, Artificial Sequence
  Description of Artificial Sequence: Synthetic peptide
  Seed: MCSLMQGSTLPRRSG
MYSLMQASTHPRRSG

SEQ ID NO: 91266 - protein, 15 aa, Artificial Sequence
  Description of Artificial Sequence: Synthetic peptide
  Seed: MCSLMQGSTLPRRSG
MYSLMQASTIPRRSG

SEQ ID NO: 91267 - protein, 15 aa, Artificial Sequence
  Description of Artificial Sequence: Synthetic peptide
  Seed: MCSLMQGSTLPRRSG
MYSLMQASTLPRRSG

SEQ ID NO: 91268 - protein, 15 aa, Artificial Sequence
  Description of Artificial Sequence: Synthetic peptide
  Seed: MCSLMQGSTLPRRSG
MYSLMQASTMPRRSG

SEQ ID NO: 91269 - protein, 15 aa, Artificial Sequence
  Description of Artificial Sequence: Synthetic peptide
  Seed: MCSLMQGSTLPRRSG
MYSLMQASTNPRRSG

SEQ ID NO: 91270 - protein, 15 aa, Artificial Sequence
  Description of Artificial Sequence: Synthetic peptide
  Seed: MCSLMQGSTLPRRSG
MYSLMQASTPPRRSG

SEQ ID NO: 91271 - protein, 15 aa, Artificial Sequence
  Description of Artificial Sequence: Synthetic peptide
  Seed: MCSLMQGSTLPRRSG
MYSLMQASTQPRRSG

SEQ ID NO: 91272 - protein, 15 aa, Artificial Sequence
  Description of Artificial Sequence: Synthetic peptide
  Seed: MCSLMQGSTLPRRSG
MYSLMQASTRPRRSG

SEQ ID NO: 91273 - protein, 15 aa, Artificial Sequence
  Description of Artificial Sequence: Synthetic peptide
  Seed: MCSLMQGSTLPRRSG
MYSLMQASTSPRRSG

SEQ ID NO: 91274 - protein, 15 aa, Artificial Sequence
  Description of Artificial Sequence: Synthetic peptide
  Seed: MCSLMQGSTLPRRSG
MYSLMQASTTPRRSG

SEQ ID NO: 91275 - protein, 15 aa, Artificial Sequence
  Description of Artificial Sequence: Synthetic peptide
  Seed: MCSLMQGSTLPRRSG
MYSLMQASTVPRRSG

SEQ ID NO: 91276 - protein, 15 aa, Artificial Sequence
  Description of Artificial Sequence: Synthetic peptide
  Seed: MCSLMQGSTLPRRSG
MYSLMQASTYPRRSG

SEQ ID NO: 91277 - protein, 15 aa, Artificial Sequence
  Description of Artificial Sequence: Synthetic peptide
  Seed: MCSLMQGSTLPRRSG
MYSLMQGSTAPRRSG

SEQ ID NO: 91278 - protein, 15 aa, Artificial Sequence
  Description of Artificial Sequence: Synthetic peptide
  Seed: MCSLMQGSTLPRRSG
MYSLMQGSTCPRRSG

SEQ ID NO: 91279 - protein, 15 aa, Artificial Sequence
  Description of Artificial Sequence: Synthetic peptide
  Seed: MCSLMQGSTLPRRSG
MYSLMQGSTFPRRSG

SEQ ID NO: 91280 - protein, 15 aa, Artificial Sequence
  Description of Artificial Sequence: Synthetic peptide
  Seed: MCSLMQGSTLPRRSG
MYSLMQGSTGPRRSG

SEQ ID NO: 91281 - protein, 15 aa, Artificial Sequence
  Description of Artificial Sequence: Synthetic peptide
  Seed: MCSLMQGSTLPRRSG
MYSLMQGSTIPRRSG

SEQ ID NO: 91282 - protein, 15 aa, Artificial Sequence
  Description of Artificial Sequence: Synthetic peptide
  Seed: MCSLMQGSTLPRRSG
MYSLMQGSTLPRRSG

SEQ ID NO: 91283 - protein, 15 aa, Artificial Sequence
  Description of Artificial Sequence: Synthetic peptide
  Seed: MCSLMQGSTLPRRSG
MYSLMQGSTMPRRSG

SEQ ID NO: 91284 - protein, 15 aa, Artificial Sequence
  Description of Artificial Sequence: Synthetic peptide
  Seed: MCSLMQGSTLPRRSG
MYSLMQGSTNPRRSG

SEQ ID NO: 91285 - protein, 15 aa, Artificial Sequence
  Description of Artificial Sequence: Synthetic peptide
  Seed: MCSLMQGSTLPRRSG
MYSLMQGSTSPRRSG

SEQ ID NO: 91286 - protein, 15 aa, Artificial Sequence
  Description of Artificial Sequence: Synthetic peptide
  Seed: MCSLMQGSTLPRRSG
MYSLMQGSTTPRRSG

SEQ ID NO: 91287 - protein, 15 aa, Artificial Sequence
  Description of Artificial Sequence: Synthetic peptide
  Seed: MCSLMQGSTLPRRSG
MYSLMQGSTVPRRSG

SEQ ID NO: 91288 - protein, 15 aa, Artificial Sequence
  Description of Artificial Sequence: Synthetic peptide
  Seed: MCSLMQGSTLPRRSG
MYSLMQHSTAPRRSG

SEQ ID NO: 91289 - protein, 15 aa, Artificial Sequence
  Description of Artificial Sequence: Synthetic peptide
  Seed: MCSLMQGSTLPRRSG
MYSLMQHSTIPRRSG

SEQ ID NO: 91290 - protein, 15 aa, Artificial Sequence
  Description of Artificial Sequence: Synthetic peptide
  Seed: MCSLMQGSTLPRRSG
MYSLMQHSTLPRRSG

SEQ ID NO: 91291 - protein, 15 aa, Artificial Sequence
  Description of Artificial Sequence: Synthetic peptide
  Seed: MCSLMQGSTLPRRSG
MYSLMQHSTVPRRSG

SEQ ID NO: 91292 - protein, 15 aa, Artificial Sequence
  Description of Artificial Sequence: Synthetic peptide
  Seed: MCSLMQGSTLPRRSG
MYSLMQISTAPRRSG

SEQ ID NO: 91293 - protein, 15 aa, Artificial Sequence
  Description of Artificial Sequence: Synthetic peptide
  Seed: MCSLMQGSTLPRRSG
MYSLMQISTLPRRSG

SEQ ID NO: 91294 - protein, 15 aa, Artificial Sequence
  Description of Artificial Sequence: Synthetic peptide
  Seed: MCSLMQGSTLPRRSG
MYSLMQISTMPRRSG

SEQ ID NO: 91295 - protein, 15 aa, Artificial Sequence
  Description of Artificial Sequence: Synthetic peptide
  Seed: MCSLMQGSTLPRRSG
MYSLMQISTSPRRSG

SEQ ID NO: 91296 - protein, 15 aa, Artificial Sequence
  Description of Artificial Sequence: Synthetic peptide
  Seed: MCSLMQGSTLPRRSG
MYSLMQISTTPRRSG

SEQ ID NO: 91297 - protein, 15 aa, Artificial Sequence
  Description of Artificial Sequence: Synthetic peptide
  Seed: MCSLMQGSTLPRRSG
MYSLMQISTVPRRSG

SEQ ID NO: 91298 - protein, 15 aa, Artificial Sequence
  Description of Artificial Sequence: Synthetic peptide
  Seed: MCSLMQGSTLPRRSG
MYSLMQNSTAPRRSG

SEQ ID NO: 91299 - protein, 15 aa, Artificial Sequence
  Description of Artificial Sequence: Synthetic peptide
  Seed: MCSLMQGSTLPRRSG
MYSLMQNSTIPRRSG

SEQ ID NO: 91300 - protein, 15 aa, Artificial Sequence
  Description of Artificial Sequence: Synthetic peptide
  Seed: MCSLMQGSTLPRRSG
MYSLMQNSTLPRRSG

SEQ ID NO: 91301 - protein, 15 aa, Artificial Sequence
  Description of Artificial Sequence: Synthetic peptide
  Seed: MCSLMQGSTLPRRSG
MYSLMQNSTMPRRSG

SEQ ID NO: 91302 - protein, 15 aa, Artificial Sequence
  Description of Artificial Sequence: Synthetic peptide
  Seed: MCSLMQGSTLPRRSG
MYSLMQNSTSPRRSG

SEQ ID NO: 91303 - protein, 15 aa, Artificial Sequence
  Description of Artificial Sequence: Synthetic peptide
  Seed: MCSLMQGSTLPRRSG
MYSLMQNSTTPRRSG

SEQ ID NO: 91304 - protein, 15 aa, Artificial Sequence
  Description of Artificial Sequence: Synthetic peptide
  Seed: MCSLMQGSTLPRRSG
MYSLMQNSTVPRRSG

SEQ ID NO: 91305 - protein, 15 aa, Artificial Sequence
  Description of Artificial Sequence: Synthetic peptide
  Seed: MCSLMQGSTLPRRSG
MYSLMQPSTAPRRSG

SEQ ID NO: 91306 - protein, 15 aa, Artificial Sequence
  Description of Artificial Sequence: Synthetic peptide
  Seed: MCSLMQGSTLPRRSG
MYSLMQPSTFPRRSG

SEQ ID NO: 91307 - protein, 15 aa, Artificial Sequence
  Description of Artificial Sequence: Synthetic peptide
  Seed: MCSLMQGSTLPRRSG
MYSLMQPSTGPRRSG

SEQ ID NO: 91308 - protein, 15 aa, Artificial Sequence
  Description of Artificial Sequence: Synthetic peptide
  Seed: MCSLMQGSTLPRRSG
MYSLMQPSTIPRRSG

SEQ ID NO: 91309 - protein, 15 aa, Artificial Sequence
  Description of Artificial Sequence: Synthetic peptide
  Seed: MCSLMQGSTLPRRSG
MYSLMQPSTLPRRSG

SEQ ID NO: 91310 - protein, 15 aa, Artificial Sequence
  Description of Artificial Sequence: Synthetic peptide
  Seed: MCSLMQGSTLPRRSG
MYSLMQPSTMPRRSG

SEQ ID NO: 91311 - protein, 15 aa, Artificial Sequence
  Description of Artificial Sequence: Synthetic peptide
  Seed: MCSLMQGSTLPRRSG
MYSLMQPSTSPRRSG

SEQ ID NO: 91312 - protein, 15 aa, Artificial Sequence
  Description of Artificial Sequence: Synthetic peptide
  Seed: MCSLMQGSTLPRRSG
MYSLMQPSTTPRRSG

SEQ ID NO: 91313 - protein, 15 aa, Artificial Sequence
  Description of Artificial Sequence: Synthetic peptide
  Seed: MCSLMQGSTLPRRSG
MYSLMQPSTVPRRSG

SEQ ID NO: 91314 - protein, 15 aa, Artificial Sequence
  Description of Artificial Sequence: Synthetic peptide
  Seed: MCSLMQGSTLPRRSG
MYSLMQQSTLPRRSG

SEQ ID NO: 91315 - protein, 15 aa, Artificial Sequence
  Description of Artificial Sequence: Synthetic peptide
  Seed: MCSLMQGSTLPRRSG
MYSLMQSSTAPRRSG

SEQ ID NO: 91316 - protein, 15 aa, Artificial Sequence
  Description of Artificial Sequence: Synthetic peptide
  Seed: MCSLMQGSTLPRRSG
MYSLMQSSTCPRRSG

SEQ ID NO: 91317 - protein, 15 aa, Artificial Sequence
  Description of Artificial Sequence: Synthetic peptide
  Seed: MCSLMQGSTLPRRSG
MYSLMQSSTFPRRSG

SEQ ID NO: 91318 - protein, 15 aa, Artificial Sequence
  Description of Artificial Sequence: Synthetic peptide
  Seed: MCSLMQGSTLPRRSG
MYSLMQSSTGPRRSG

SEQ ID NO: 91319 - protein, 15 aa, Artificial Sequence
  Description of Artificial Sequence: Synthetic peptide
  Seed: MCSLMQGSTLPRRSG
MYSLMQSSTIPRRSG

SEQ ID NO: 91320 - protein, 15 aa, Artificial Sequence
  Description of Artificial Sequence: Synthetic peptide
  Seed: MCSLMQGSTLPRRSG
MYSLMQSSTLPRRSG

SEQ ID NO: 91321 - protein, 15 aa, Artificial Sequence
  Description of Artificial Sequence: Synthetic peptide
  Seed: MCSLMQGSTLPRRSG
MYSLMQSSTMPRRSG

SEQ ID NO: 91322 - protein, 15 aa, Artificial Sequence
  Description of Artificial Sequence: Synthetic peptide
  Seed: MCSLMQGSTLPRRSG
MYSLMQSSTNPRRSG

SEQ ID NO: 91323 - protein, 15 aa, Artificial Sequence
  Description of Artificial Sequence: Synthetic peptide
  Seed: MCSLMQGSTLPRRSG
MYSLMQSSTSPRRSG

SEQ ID NO: 91324 - protein, 15 aa, Artificial Sequence
  Description of Artificial Sequence: Synthetic peptide
  Seed: MCSLMQGSTLPRRSG
MYSLMQSSTTPRRSG

SEQ ID NO: 91325 - protein, 15 aa, Artificial Sequence
  Description of Artificial Sequence: Synthetic peptide
  Seed: MCSLMQGSTLPRRSG
MYSLMQSSTVPRRSG

SEQ ID NO: 91326 - protein, 15 aa, Artificial Sequence
  Description of Artificial Sequence: Synthetic peptide
  Seed: MCSLMQGSTLPRRSG
MYSLMQTSTAPRRSG

SEQ ID NO: 91327 - protein, 15 aa, Artificial Sequence
  Description of Artificial Sequence: Synthetic peptide
  Seed: MCSLMQGSTLPRRSG
MYSLMQTSTIPRRSG

SEQ ID NO: 91328 - protein, 15 aa, Artificial Sequence
  Description of Artificial Sequence: Synthetic peptide
  Seed: MCSLMQGSTLPRRSG
MYSLMQTSTLPRRSG

SEQ ID NO: 91329 - protein, 15 aa, Artificial Sequence
  Description of Artificial Sequence: Synthetic peptide
  Seed: MCSLMQGSTLPRRSG
MYSLMQTSTMPRRSG

SEQ ID NO: 91330 - protein, 15 aa, Artificial Sequence
  Description of Artificial Sequence: Synthetic peptide
  Seed: MCSLMQGSTLPRRSG
MYSLMQTSTSPRRSG

SEQ ID NO: 91331 - protein, 15 aa, Artificial Sequence
  Description of Artificial Sequence: Synthetic peptide
  Seed: MCSLMQGSTLPRRSG
MYSLMQTSTTPRRSG

SEQ ID NO: 91332 - protein, 15 aa, Artificial Sequence
  Description of Artificial Sequence: Synthetic peptide
  Seed: MCSLMQGSTLPRRSG
MYSLMQTSTVPRRSG

SEQ ID NO: 91333 - protein, 15 aa, Artificial Sequence
  Description of Artificial Sequence: Synthetic peptide
  Seed: MCSLMQGSTLPRRSG
MYSLMQVSTAPRRSG

SEQ ID NO: 91334 - protein, 15 aa, Artificial Sequence
  Description of Artificial Sequence: Synthetic peptide
  Seed: MCSLMQGSTLPRRSG
MYSLMQVSTIPRRSG

SEQ ID NO: 91335 - protein, 15 aa, Artificial Sequence
  Description of Artificial Sequence: Synthetic peptide
  Seed: MCSLMQGSTLPRRSG
MYSLMQVSTLPRRSG

SEQ ID NO: 91336 - protein, 15 aa, Artificial Sequence
  Description of Artificial Sequence: Synthetic peptide
  Seed: MCSLMQGSTLPRRSG
MYSLMQVSTMPRRSG

SEQ ID NO: 91337 - protein, 15 aa, Artificial Sequence
  Description of Artificial Sequence: Synthetic peptide
  Seed: MCSLMQGSTLPRRSG
MYSLMQVSTSPRRSG

SEQ ID NO: 91338 - protein, 15 aa, Artificial Sequence
  Description of Artificial Sequence: Synthetic peptide
  Seed: MCSLMQGSTLPRRSG
MYSLMQVSTTPRRSG

SEQ ID NO: 91339 - protein, 15 aa, Artificial Sequence
  Description of Artificial Sequence: Synthetic peptide
  Seed: MCSLMQGSTLPRRSG
MYSLMQVSTVPRRSG

SEQ ID NO: 91340 - protein, 15 aa, Artificial Sequence
  Description of Artificial Sequence: Synthetic peptide
  Seed: MCSLMQGSTLPRRSG
MYSLNQASTIPRRSG

SEQ ID NO: 91341 - protein, 15 aa, Artificial Sequence
  Description of Artificial Sequence: Synthetic peptide
  Seed: MCSLMQGSTLPRRSG
MYSLNQASTLPRRSG

SEQ ID NO: 91342 - protein, 15 aa, Artificial Sequence
  Description of Artificial Sequence: Synthetic peptide
  Seed: MCSLMQGSTLPRRSG
MYSLNQASTVPRRSG

SEQ ID NO: 91343 - protein, 15 aa, Artificial Sequence
  Description of Artificial Sequence: Synthetic peptide
  Seed: MCSLMQGSTLPRRSG
MYSLQQASTAPRRSG

SEQ ID NO: 91344 - protein, 15 aa, Artificial Sequence
  Description of Artificial Sequence: Synthetic peptide
  Seed: MCSLMQGSTLPRRSG
MYSLQQASTIPRRSG

SEQ ID NO: 91345 - protein, 15 aa, Artificial Sequence
  Description of Artificial Sequence: Synthetic peptide
  Seed: MCSLMQGSTLPRRSG
MYSLQQASTLPRRSG

SEQ ID NO: 91346 - protein, 15 aa, Artificial Sequence
  Description of Artificial Sequence: Synthetic peptide
  Seed: MCSLMQGSTLPRRSG
MYSLQQASTMPRRSG

SEQ ID NO: 91347 - protein, 15 aa, Artificial Sequence
  Description of Artificial Sequence: Synthetic peptide
  Seed: MCSLMQGSTLPRRSG
MYSLQQASTSPRRSG

SEQ ID NO: 91348 - protein, 15 aa, Artificial Sequence
  Description of Artificial Sequence: Synthetic peptide
  Seed: MCSLMQGSTLPRRSG
MYSLQQASTTPRRSG

SEQ ID NO: 91349 - protein, 15 aa, Artificial Sequence
  Description of Artificial Sequence: Synthetic peptide
  Seed: MCSLMQGSTLPRRSG
MYSLQQASTVPRRSG

SEQ ID NO: 91350 - protein, 15 aa, Artificial Sequence
  Description of Artificial Sequence: Synthetic peptide
  Seed: MCSLMQGSTLPRRSG
MYSLQQGSTAPRRSG

SEQ ID NO: 91351 - protein, 15 aa, Artificial Sequence
  Description of Artificial Sequence: Synthetic peptide
  Seed: MCSLMQGSTLPRRSG
MYSLQQGSTIPRRSG

SEQ ID NO: 91352 - protein, 15 aa, Artificial Sequence
  Description of Artificial Sequence: Synthetic peptide
  Seed: MCSLMQGSTLPRRSG
MYSLQQGSTLPRRSG

SEQ ID NO: 91353 - protein, 15 aa, Artificial Sequence
  Description of Artificial Sequence: Synthetic peptide
  Seed: MCSLMQGSTLPRRSG
MYSLQQGSTMPRRSG

SEQ ID NO: 91354 - protein, 15 aa, Artificial Sequence
  Description of Artificial Sequence: Synthetic peptide
  Seed: MCSLMQGSTLPRRSG
MYSLQQGSTVPRRSG

SEQ ID NO: 91355 - protein, 15 aa, Artificial Sequence
  Description of Artificial Sequence: Synthetic peptide
  Seed: MCSLMQGSTLPRRSG
MYSLQQNSTLPRRSG

SEQ ID NO: 91356 - protein, 15 aa, Artificial Sequence
  Description of Artificial Sequence: Synthetic peptide
  Seed: MCSLMQGSTLPRRSG
MYSLQQNSTVPRRSG

SEQ ID NO: 91357 - protein, 15 aa, Artificial Sequence
  Description of Artificial Sequence: Synthetic peptide
  Seed: MCSLMQGSTLPRRSG
MYSLQQPSTIPRRSG

SEQ ID NO: 91358 - protein, 15 aa, Artificial Sequence
  Description of Artificial Sequence: Synthetic peptide
  Seed: MCSLMQGSTLPRRSG
MYSLQQPSTLPRRSG

SEQ ID NO: 91359 - protein, 15 aa, Artificial Sequence
  Description of Artificial Sequence: Synthetic peptide
  Seed: MCSLMQGSTLPRRSG
MYSLQQPSTVPRRSG

SEQ ID NO: 91360 - protein, 15 aa, Artificial Sequence
  Description of Artificial Sequence: Synthetic peptide
  Seed: MCSLMQGSTLPRRSG
MYSLQQSSTAPRRSG

SEQ ID NO: 91361 - protein, 15 aa, Artificial Sequence
  Description of Artificial Sequence: Synthetic peptide
  Seed: MCSLMQGSTLPRRSG
MYSLQQSSTIPRRSG

SEQ ID NO: 91362 - protein, 15 aa, Artificial Sequence
  Description of Artificial Sequence: Synthetic peptide
  Seed: MCSLMQGSTLPRRSG
MYSLQQSSTLPRRSG

SEQ ID NO: 91363 - protein, 15 aa, Artificial Sequence
  Description of Artificial Sequence: Synthetic peptide
  Seed: MCSLMQGSTLPRRSG
MYSLQQSSTMPRRSG

SEQ ID NO: 91364 - protein, 15 aa, Artificial Sequence
  Description of Artificial Sequence: Synthetic peptide
  Seed: MCSLMQGSTLPRRSG
MYSLQQSSTVPRRSG

SEQ ID NO: 91365 - protein, 15 aa, Artificial Sequence
  Description of Artificial Sequence: Synthetic peptide
  Seed: MCSLMQGSTLPRRSG
MYSLQQTSTLPRRSG

SEQ ID NO: 91366 - protein, 15 aa, Artificial Sequence
  Description of Artificial Sequence: Synthetic peptide
  Seed: MCSLMQGSTLPRRSG
MYSLQQTSTVPRRSG

SEQ ID NO: 91367 - protein, 15 aa, Artificial Sequence
  Description of Artificial Sequence: Synthetic peptide
  Seed: MCSLMQGSTLPRRSG
MYSLSQASTAPRRSG

SEQ ID NO: 91368 - protein, 15 aa, Artificial Sequence
  Description of Artificial Sequence: Synthetic peptide
  Seed: MCSLMQGSTLPRRSG
MYSLSQASTIPRRSG

SEQ ID NO: 91369 - protein, 15 aa, Artificial Sequence
  Description of Artificial Sequence: Synthetic peptide
  Seed: MCSLMQGSTLPRRSG
MYSLSQASTLPRRSG

SEQ ID NO: 91370 - protein, 15 aa, Artificial Sequence
  Description of Artificial Sequence: Synthetic peptide
  Seed: MCSLMQGSTLPRRSG
MYSLSQASTMPRRSG

SEQ ID NO: 91371 - protein, 15 aa, Artificial Sequence
  Description of Artificial Sequence: Synthetic peptide
  Seed: MCSLMQGSTLPRRSG
MYSLSQASTVPRRSG

SEQ ID NO: 91372 - protein, 15 aa, Artificial Sequence
  Description of Artificial Sequence: Synthetic peptide
  Seed: MCSLMQGSTLPRRSG
MYSLSQGSTIPRRSG

SEQ ID NO: 91373 - protein, 15 aa, Artificial Sequence
  Description of Artificial Sequence: Synthetic peptide
  Seed: MCSLMQGSTLPRRSG
MYSLSQGSTLPRRSG

SEQ ID NO: 91374 - protein, 15 aa, Artificial Sequence
  Description of Artificial Sequence: Synthetic peptide
  Seed: MCSLMQGSTLPRRSG
MYSLSQGSTVPRRSG

SEQ ID NO: 91375 - protein, 15 aa, Artificial Sequence
  Description of Artificial Sequence: Synthetic peptide
  Seed: MCSLMQGSTLPRRSG
MYSLSQPSTLPRRSG

SEQ ID NO: 91376 - protein, 15 aa, Artificial Sequence
  Description of Artificial Sequence: Synthetic peptide
  Seed: MCSLMQGSTLPRRSG
MYSLSQSSTIPRRSG

SEQ ID NO: 91377 - protein, 15 aa, Artificial Sequence
  Description of Artificial Sequence: Synthetic peptide
  Seed: MCSLMQGSTLPRRSG
MYSLSQSSTLPRRSG

SEQ ID NO: 91378 - protein, 15 aa, Artificial Sequence
  Description of Artificial Sequence: Synthetic peptide
  Seed: MCSLMQGSTLPRRSG
MYSLSQSSTVPRRSG

SEQ ID NO: 91379 - protein, 15 aa, Artificial Sequence
  Description of Artificial Sequence: Synthetic peptide
  Seed: MCSLMQGSTLPRRSG
MYSLTQASTAPRRSG

SEQ ID NO: 91380 - protein, 15 aa, Artificial Sequence
  Description of Artificial Sequence: Synthetic peptide
  Seed: MCSLMQGSTLPRRSG
MYSLTQASTIPRRSG

SEQ ID NO: 91381 - protein, 15 aa, Artificial Sequence
  Description of Artificial Sequence: Synthetic peptide
  Seed: MCSLMQGSTLPRRSG
MYSLTQASTLPRRSG

SEQ ID NO: 91382 - protein, 15 aa, Artificial Sequence
  Description of Artificial Sequence: Synthetic peptide
  Seed: MCSLMQGSTLPRRSG
MYSLTQASTVPRRSG

SEQ ID NO: 91383 - protein, 15 aa, Artificial Sequence
  Description of Artificial Sequence: Synthetic peptide
  Seed: MCSLMQGSTLPRRSG
MYSLTQGSTLPRRSG

SEQ ID NO: 91384 - protein, 15 aa, Artificial Sequence
  Description of Artificial Sequence: Synthetic peptide
  Seed: MCSLMQGSTLPRRSG
MYSLTQGSTVPRRSG

SEQ ID NO: 91385 - protein, 15 aa, Artificial Sequence
  Description of Artificial Sequence: Synthetic peptide
  Seed: MCSLMQGSTLPRRSG
MYSLVQASTAPRRSG

SEQ ID NO: 91386 - protein, 15 aa, Artificial Sequence
  Description of Artificial Sequence: Synthetic peptide
  Seed: MCSLMQGSTLPRRSG
MYSLVQASTGPRRSG

SEQ ID NO: 91387 - protein, 15 aa, Artificial Sequence
  Description of Artificial Sequence: Synthetic peptide
  Seed: MCSLMQGSTLPRRSG
MYSLVQASTIPRRSG

SEQ ID NO: 91388 - protein, 15 aa, Artificial Sequence
  Description of Artificial Sequence: Synthetic peptide
  Seed: MCSLMQGSTLPRRSG
MYSLVQASTLPRRSG

SEQ ID NO: 91389 - protein, 15 aa, Artificial Sequence
  Description of Artificial Sequence: Synthetic peptide
  Seed: MCSLMQGSTLPRRSG
MYSLVQASTMPRRSG

SEQ ID NO: 91390 - protein, 15 aa, Artificial Sequence
  Description of Artificial Sequence: Synthetic peptide
  Seed: MCSLMQGSTLPRRSG
MYSLVQASTSPRRSG

SEQ ID NO: 91391 - protein, 15 aa, Artificial Sequence
  Description of Artificial Sequence: Synthetic peptide
  Seed: MCSLMQGSTLPRRSG
MYSLVQASTTPRRSG

SEQ ID NO: 91392 - protein, 15 aa, Artificial Sequence
  Description of Artificial Sequence: Synthetic peptide
  Seed: MCSLMQGSTLPRRSG
MYSLVQASTVPRRSG

SEQ ID NO: 91393 - protein, 15 aa, Artificial Sequence
  Description of Artificial Sequence: Synthetic peptide
  Seed: MCSLMQGSTLPRRSG
MYSLVQGSTAPRRSG

SEQ ID NO: 91394 - protein, 15 aa, Artificial Sequence
  Description of Artificial Sequence: Synthetic peptide
  Seed: MCSLMQGSTLPRRSG
MYSLVQGSTIPRRSG

SEQ ID NO: 91395 - protein, 15 aa, Artificial Sequence
  Description of Artificial Sequence: Synthetic peptide
  Seed: MCSLMQGSTLPRRSG
MYSLVQGSTLPRRSG

SEQ ID NO: 91396 - protein, 15 aa, Artificial Sequence
  Description of Artificial Sequence: Synthetic peptide
  Seed: MCSLMQGSTLPRRSG
MYSLVQGSTMPRRSG

SEQ ID NO: 91397 - protein, 15 aa, Artificial Sequence
  Description of Artificial Sequence: Synthetic peptide
  Seed: MCSLMQGSTLPRRSG
MYSLVQGSTSPRRSG

SEQ ID NO: 91398 - protein, 15 aa, Artificial Sequence
  Description of Artificial Sequence: Synthetic peptide
  Seed: MCSLMQGSTLPRRSG
MYSLVQGSTTPRRSG

SEQ ID NO: 91399 - protein, 15 aa, Artificial Sequence
  Description of Artificial Sequence: Synthetic peptide
  Seed: MCSLMQGSTLPRRSG
MYSLVQGSTVPRRSG

SEQ ID NO: 91400 - protein, 15 aa, Artificial Sequence
  Description of Artificial Sequence: Synthetic peptide
  Seed: MCSLMQGSTLPRRSG
MYSLVQNSTIPRRSG

SEQ ID NO: 91401 - protein, 15 aa, Artificial Sequence
  Description of Artificial Sequence: Synthetic peptide
  Seed: MCSLMQGSTLPRRSG
MYSLVQNSTLPRRSG

SEQ ID NO: 91402 - protein, 15 aa, Artificial Sequence
  Description of Artificial Sequence: Synthetic peptide
  Seed: MCSLMQGSTLPRRSG
MYSLVQNSTVPRRSG

SEQ ID NO: 91403 - protein, 15 aa, Artificial Sequence
  Description of Artificial Sequence: Synthetic peptide
  Seed: MCSLMQGSTLPRRSG
MYSLVQPSTAPRRSG

SEQ ID NO: 91404 - protein, 15 aa, Artificial Sequence
  Description of Artificial Sequence: Synthetic peptide
  Seed: MCSLMQGSTLPRRSG
MYSLVQPSTIPRRSG

SEQ ID NO: 91405 - protein, 15 aa, Artificial Sequence
  Description of Artificial Sequence: Synthetic peptide
  Seed: MCSLMQGSTLPRRSG
MYSLVQPSTLPRRSG

SEQ ID NO: 91406 - protein, 15 aa, Artificial Sequence
  Description of Artificial Sequence: Synthetic peptide
  Seed: MCSLMQGSTLPRRSG
MYSLVQPSTMPRRSG

SEQ ID NO: 91407 - protein, 15 aa, Artificial Sequence
  Description of Artificial Sequence: Synthetic peptide
  Seed: MCSLMQGSTLPRRSG
MYSLVQPSTVPRRSG

SEQ ID NO: 91408 - protein, 15 aa, Artificial Sequence
  Description of Artificial Sequence: Synthetic peptide
  Seed: MCSLMQGSTLPRRSG
MYSLVQSSTAPRRSG

SEQ ID NO: 91409 - protein, 15 aa, Artificial Sequence
  Description of Artificial Sequence: Synthetic peptide
  Seed: MCSLMQGSTLPRRSG
MYSLVQSSTIPRRSG

SEQ ID NO: 91410 - protein, 15 aa, Artificial Sequence
  Description of Artificial Sequence: Synthetic peptide
  Seed: MCSLMQGSTLPRRSG
MYSLVQSSTLPRRSG

SEQ ID NO: 91411 - protein, 15 aa, Artificial Sequence
  Description of Artificial Sequence: Synthetic peptide
  Seed: MCSLMQGSTLPRRSG
MYSLVQSSTMPRRSG

SEQ ID NO: 91412 - protein, 15 aa, Artificial Sequence
  Description of Artificial Sequence: Synthetic peptide
  Seed: MCSLMQGSTLPRRSG
MYSLVQSSTSPRRSG

SEQ ID NO: 91413 - protein, 15 aa, Artificial Sequence
  Description of Artificial Sequence: Synthetic peptide
  Seed: MCSLMQGSTLPRRSG
MYSLVQSSTTPRRSG

SEQ ID NO: 91414 - protein, 15 aa, Artificial Sequence
  Description of Artificial Sequence: Synthetic peptide
  Seed: MCSLMQGSTLPRRSG
MYSLVQSSTVPRRSG

SEQ ID NO: 91415 - protein, 15 aa, Artificial Sequence
  Description of Artificial Sequence: Synthetic peptide
  Seed: MCSLMQGSTLPRRSG
MCSFMQASALPARSG

SEQ ID NO: 91416 - protein, 15 aa, Artificial Sequence
  Description of Artificial Sequence: Synthetic peptide
  Seed: MCSLMQGSTLPRRSG
MCSFMQASALPFRSG

SEQ ID NO: 91417 - protein, 15 aa, Artificial Sequence
  Description of Artificial Sequence: Synthetic peptide
  Seed: MCSLMQGSTLPRRSG
MCSFMQASALPIRSG

SEQ ID NO: 91418 - protein, 15 aa, Artificial Sequence
  Description of Artificial Sequence: Synthetic peptide
  Seed: MCSLMQGSTLPRRSG
MCSFMQASALPLRSG

SEQ ID NO: 91419 - protein, 15 aa, Artificial Sequence
  Description of Artificial Sequence: Synthetic peptide
  Seed: MCSLMQGSTLPRRSG
MCSFMQASALPMRSG

SEQ ID NO: 91420 - protein, 15 aa, Artificial Sequence
  Description of Artificial Sequence: Synthetic peptide
  Seed: MCSLMQGSTLPRRSG
MCSFMQASALPTRSG

SEQ ID NO: 91421 - protein, 15 aa, Artificial Sequence
  Description of Artificial Sequence: Synthetic peptide
  Seed: MCSLMQGSTLPRRSG
MCSFMQASALPVRSG

SEQ ID NO: 91422 - protein, 15 aa, Artificial Sequence
  Description of Artificial Sequence: Synthetic peptide
  Seed: MCSLMQGSTLPRRSG
MCSFMQASALPYRSG

SEQ ID NO: 91423 - protein, 15 aa, Artificial Sequence
  Description of Artificial Sequence: Synthetic peptide
  Seed: MCSLMQGSTLPRRSG
MCSFMQASGLPFRSG

SEQ ID NO: 91424 - protein, 15 aa, Artificial Sequence
  Description of Artificial Sequence: Synthetic peptide
  Seed: MCSLMQGSTLPRRSG
MCSFMQASGLPIRSG

SEQ ID NO: 91425 - protein, 15 aa, Artificial Sequence
  Description of Artificial Sequence: Synthetic peptide
  Seed: MCSLMQGSTLPRRSG
MCSFMQASGLPLRSG

SEQ ID NO: 91426 - protein, 15 aa, Artificial Sequence
  Description of Artificial Sequence: Synthetic peptide
  Seed: MCSLMQGSTLPRRSG
MCSFMQASGLPMRSG

SEQ ID NO: 91427 - protein, 15 aa, Artificial Sequence
  Description of Artificial Sequence: Synthetic peptide
  Seed: MCSLMQGSTLPRRSG
MCSFMQASGLPVRSG

SEQ ID NO: 91428 - protein, 15 aa, Artificial Sequence
  Description of Artificial Sequence: Synthetic peptide
  Seed: MCSLMQGSTLPRRSG
MCSFMQASILPIRSG

SEQ ID NO: 91429 - protein, 15 aa, Artificial Sequence
  Description of Artificial Sequence: Synthetic peptide
  Seed: MCSLMQGSTLPRRSG
MCSFMQASILPLRSG

SEQ ID NO: 91430 - protein, 15 aa, Artificial Sequence
  Description of Artificial Sequence: Synthetic peptide
  Seed: MCSLMQGSTLPRRSG
MCSFMQASILPVRSG

SEQ ID NO: 91431 - protein, 15 aa, Artificial Sequence
  Description of Artificial Sequence: Synthetic peptide
  Seed: MCSLMQGSTLPRRSG
MCSFMQASNLPIRSG

SEQ ID NO: 91432 - protein, 15 aa, Artificial Sequence
  Description of Artificial Sequence: Synthetic peptide
  Seed: MCSLMQGSTLPRRSG
MCSFMQASNLPLRSG

SEQ ID NO: 91433 - protein, 15 aa, Artificial Sequence
  Description of Artificial Sequence: Synthetic peptide
  Seed: MCSLMQGSTLPRRSG
MCSFMQASPLPFRSG

SEQ ID NO: 91434 - protein, 15 aa, Artificial Sequence
  Description of Artificial Sequence: Synthetic peptide
  Seed: MCSLMQGSTLPRRSG
MCSFMQASPLPIRSG

SEQ ID NO: 91435 - protein, 15 aa, Artificial Sequence
  Description of Artificial Sequence: Synthetic peptide
  Seed: MCSLMQGSTLPRRSG
MCSFMQASPLPLRSG

SEQ ID NO: 91436 - protein, 15 aa, Artificial Sequence
  Description of Artificial Sequence: Synthetic peptide
  Seed: MCSLMQGSTLPRRSG
MCSFMQASPLPMRSG

SEQ ID NO: 91437 - protein, 15 aa, Artificial Sequence
  Description of Artificial Sequence: Synthetic peptide
  Seed: MCSLMQGSTLPRRSG
MCSFMQASPLPVRSG

SEQ ID NO: 91438 - protein, 15 aa, Artificial Sequence
  Description of Artificial Sequence: Synthetic peptide
  Seed: MCSLMQGSTLPRRSG
MCSFMQASSLPARSG

SEQ ID NO: 91439 - protein, 15 aa, Artificial Sequence
  Description of Artificial Sequence: Synthetic peptide
  Seed: MCSLMQGSTLPRRSG
MCSFMQASSLPFRSG

SEQ ID NO: 91440 - protein, 15 aa, Artificial Sequence
  Description of Artificial Sequence: Synthetic peptide
  Seed: MCSLMQGSTLPRRSG
MCSFMQASSLPIRSG

SEQ ID NO: 91441 - protein, 15 aa, Artificial Sequence
  Description of Artificial Sequence: Synthetic peptide
  Seed: MCSLMQGSTLPRRSG
MCSFMQASSLPLRSG

SEQ ID NO: 91442 - protein, 15 aa, Artificial Sequence
  Description of Artificial Sequence: Synthetic peptide
  Seed: MCSLMQGSTLPRRSG
MCSFMQASSLPMRSG

SEQ ID NO: 91443 - protein, 15 aa, Artificial Sequence
  Description of Artificial Sequence: Synthetic peptide
  Seed: MCSLMQGSTLPRRSG
MCSFMQASSLPTRSG

SEQ ID NO: 91444 - protein, 15 aa, Artificial Sequence
  Description of Artificial Sequence: Synthetic peptide
  Seed: MCSLMQGSTLPRRSG
MCSFMQASSLPVRSG

SEQ ID NO: 91445 - protein, 15 aa, Artificial Sequence
  Description of Artificial Sequence: Synthetic peptide
  Seed: MCSLMQGSTLPRRSG
MCSFMQASSLPYRSG

SEQ ID NO: 91446 - protein, 15 aa, Artificial Sequence
  Description of Artificial Sequence: Synthetic peptide
  Seed: MCSLMQGSTLPRRSG
MCSFMQASTLPFRSG

SEQ ID NO: 91447 - protein, 15 aa, Artificial Sequence
  Description of Artificial Sequence: Synthetic peptide
  Seed: MCSLMQGSTLPRRSG
MCSFMQASTLPIRSG

SEQ ID NO: 91448 - protein, 15 aa, Artificial Sequence
  Description of Artificial Sequence: Synthetic peptide
  Seed: MCSLMQGSTLPRRSG
MCSFMQASTLPLRSG

SEQ ID NO: 91449 - protein, 15 aa, Artificial Sequence
  Description of Artificial Sequence: Synthetic peptide
  Seed: MCSLMQGSTLPRRSG
MCSFMQASTLPMRSG

SEQ ID NO: 91450 - protein, 15 aa, Artificial Sequence
  Description of Artificial Sequence: Synthetic peptide
  Seed: MCSLMQGSTLPRRSG
MCSFMQASTLPVRSG

SEQ ID NO: 91451 - protein, 15 aa, Artificial Sequence
  Description of Artificial Sequence: Synthetic peptide
  Seed: MCSLMQGSTLPRRSG
MCSFMQASVLPIRSG

SEQ ID NO: 91452 - protein, 15 aa, Artificial Sequence
  Description of Artificial Sequence: Synthetic peptide
  Seed: MCSLMQGSTLPRRSG
MCSFMQASVLPLRSG

SEQ ID NO: 91453 - protein, 15 aa, Artificial Sequence
  Description of Artificial Sequence: Synthetic peptide
  Seed: MCSLMQGSTLPRRSG
MCSFMQASVLPMRSG

SEQ ID NO: 91454 - protein, 15 aa, Artificial Sequence
  Description of Artificial Sequence: Synthetic peptide
  Seed: MCSLMQGSTLPRRSG
MCSFMQASVLPVRSG

SEQ ID NO: 91455 - protein, 15 aa, Artificial Sequence
  Description of Artificial Sequence: Synthetic peptide
  Seed: MCSLMQGSTLPRRSG
MCSFMQFSALPIRSG

SEQ ID NO: 91456 - protein, 15 aa, Artificial Sequence
  Description of Artificial Sequence: Synthetic peptide
  Seed: MCSLMQGSTLPRRSG
MCSFMQFSALPLRSG

SEQ ID NO: 91457 - protein, 15 aa, Artificial Sequence
  Description of Artificial Sequence: Synthetic peptide
  Seed: MCSLMQGSTLPRRSG
MCSFMQFSALPVRSG

SEQ ID NO: 91458 - protein, 15 aa, Artificial Sequence
  Description of Artificial Sequence: Synthetic peptide
  Seed: MCSLMQGSTLPRRSG
MCSFMQFSGLPIRSG

SEQ ID NO: 91459 - protein, 15 aa, Artificial Sequence
  Description of Artificial Sequence: Synthetic peptide
  Seed: MCSLMQGSTLPRRSG
MCSFMQFSGLPLRSG

SEQ ID NO: 91460 - protein, 15 aa, Artificial Sequence
  Description of Artificial Sequence: Synthetic peptide
  Seed: MCSLMQGSTLPRRSG
MCSFMQFSGLPVRSG

SEQ ID NO: 91461 - protein, 15 aa, Artificial Sequence
  Description of Artificial Sequence: Synthetic peptide
  Seed: MCSLMQGSTLPRRSG
MCSFMQFSKLPRRSG

SEQ ID NO: 91462 - protein, 15 aa, Artificial Sequence
  Description of Artificial Sequence: Synthetic peptide
  Seed: MCSLMQGSTLPRRSG
MCSFMQFSNLPIRSG

SEQ ID NO: 91463 - protein, 15 aa, Artificial Sequence
  Description of Artificial Sequence: Synthetic peptide
  Seed: MCSLMQGSTLPRRSG
MCSFMQFSNLPLRSG

SEQ ID NO: 91464 - protein, 15 aa, Artificial Sequence
  Description of Artificial Sequence: Synthetic peptide
  Seed: MCSLMQGSTLPRRSG
MCSFMQFSNLPVRSG

SEQ ID NO: 91465 - protein, 15 aa, Artificial Sequence
  Description of Artificial Sequence: Synthetic peptide
  Seed: MCSLMQGSTLPRRSG
MCSFMQFSRLPARSG

SEQ ID NO: 91466 - protein, 15 aa, Artificial Sequence
  Description of Artificial Sequence: Synthetic peptide
  Seed: MCSLMQGSTLPRRSG
MCSFMQFSRLPKRSG

SEQ ID NO: 91467 - protein, 15 aa, Artificial Sequence
  Description of Artificial Sequence: Synthetic peptide
  Seed: MCSLMQGSTLPRRSG
MCSFMQFSRLPRRSG

SEQ ID NO: 91468 - protein, 15 aa, Artificial Sequence
  Description of Artificial Sequence: Synthetic peptide
  Seed: MCSLMQGSTLPRRSG
MCSFMQFSRLPSRSG

SEQ ID NO: 91469 - protein, 15 aa, Artificial Sequence
  Description of Artificial Sequence: Synthetic peptide
  Seed: MCSLMQGSTLPRRSG
MCSFMQFSSLPARSG

SEQ ID NO: 91470 - protein, 15 aa, Artificial Sequence
  Description of Artificial Sequence: Synthetic peptide
  Seed: MCSLMQGSTLPRRSG
MCSFMQFSSLPIRSG

SEQ ID NO: 91471 - protein, 15 aa, Artificial Sequence
  Description of Artificial Sequence: Synthetic peptide
  Seed: MCSLMQGSTLPRRSG
MCSFMQFSSLPLRSG

SEQ ID NO: 91472 - protein, 15 aa, Artificial Sequence
  Description of Artificial Sequence: Synthetic peptide
  Seed: MCSLMQGSTLPRRSG
MCSFMQFSSLPMRSG

SEQ ID NO: 91473 - protein, 15 aa, Artificial Sequence
  Description of Artificial Sequence: Synthetic peptide
  Seed: MCSLMQGSTLPRRSG
MCSFMQFSSLPVRSG

SEQ ID NO: 91474 - protein, 15 aa, Artificial Sequence
  Description of Artificial Sequence: Synthetic peptide
  Seed: MCSLMQGSTLPRRSG
MCSFMQFSTLPIRSG

SEQ ID NO: 91475 - protein, 15 aa, Artificial Sequence
  Description of Artificial Sequence: Synthetic peptide
  Seed: MCSLMQGSTLPRRSG
MCSFMQFSTLPLRSG

SEQ ID NO: 91476 - protein, 15 aa, Artificial Sequence
  Description of Artificial Sequence: Synthetic peptide
  Seed: MCSLMQGSTLPRRSG
MCSFMQFSTLPVRSG

SEQ ID NO: 91477 - protein, 15 aa, Artificial Sequence
  Description of Artificial Sequence: Synthetic peptide
  Seed: MCSLMQGSTLPRRSG
MCSFMQGSALPIRSG

SEQ ID NO: 91478 - protein, 15 aa, Artificial Sequence
  Description of Artificial Sequence: Synthetic peptide
  Seed: MCSLMQGSTLPRRSG
MCSFMQGSALPLRSG

SEQ ID NO: 91479 - protein, 15 aa, Artificial Sequence
  Description of Artificial Sequence: Synthetic peptide
  Seed: MCSLMQGSTLPRRSG
MCSFMQGSALPVRSG

SEQ ID NO: 91480 - protein, 15 aa, Artificial Sequence
  Description of Artificial Sequence: Synthetic peptide
  Seed: MCSLMQGSTLPRRSG
MCSFMQGSSLPIRSG

SEQ ID NO: 91481 - protein, 15 aa, Artificial Sequence
  Description of Artificial Sequence: Synthetic peptide
  Seed: MCSLMQGSTLPRRSG
MCSFMQGSSLPLRSG

SEQ ID NO: 91482 - protein, 15 aa, Artificial Sequence
  Description of Artificial Sequence: Synthetic peptide
  Seed: MCSLMQGSTLPRRSG
MCSFMQGSSLPVRSG

SEQ ID NO: 91483 - protein, 15 aa, Artificial Sequence
  Description of Artificial Sequence: Synthetic peptide
  Seed: MCSLMQGSTLPRRSG
MCSFMQISALPARSG

SEQ ID NO: 91484 - protein, 15 aa, Artificial Sequence
  Description of Artificial Sequence: Synthetic peptide
  Seed: MCSLMQGSTLPRRSG
MCSFMQISALPIRSG

SEQ ID NO: 91485 - protein, 15 aa, Artificial Sequence
  Description of Artificial Sequence: Synthetic peptide
  Seed: MCSLMQGSTLPRRSG
MCSFMQISALPLRSG

SEQ ID NO: 91486 - protein, 15 aa, Artificial Sequence
  Description of Artificial Sequence: Synthetic peptide
  Seed: MCSLMQGSTLPRRSG
MCSFMQISALPMRSG

SEQ ID NO: 91487 - protein, 15 aa, Artificial Sequence
  Description of Artificial Sequence: Synthetic peptide
  Seed: MCSLMQGSTLPRRSG
MCSFMQISALPVRSG

SEQ ID NO: 91488 - protein, 15 aa, Artificial Sequence
  Description of Artificial Sequence: Synthetic peptide
  Seed: MCSLMQGSTLPRRSG
MCSFMQISGLPIRSG

SEQ ID NO: 91489 - protein, 15 aa, Artificial Sequence
  Description of Artificial Sequence: Synthetic peptide
  Seed: MCSLMQGSTLPRRSG
MCSFMQISGLPLRSG

SEQ ID NO: 91490 - protein, 15 aa, Artificial Sequence
  Description of Artificial Sequence: Synthetic peptide
  Seed: MCSLMQGSTLPRRSG
MCSFMQISGLPVRSG

SEQ ID NO: 91491 - protein, 15 aa, Artificial Sequence
  Description of Artificial Sequence: Synthetic peptide
  Seed: MCSLMQGSTLPRRSG
MCSFMQISKLPARSG

SEQ ID NO: 91492 - protein, 15 aa, Artificial Sequence
  Description of Artificial Sequence: Synthetic peptide
  Seed: MCSLMQGSTLPRRSG
MCSFMQISKLPGRSG

SEQ ID NO: 91493 - protein, 15 aa, Artificial Sequence
  Description of Artificial Sequence: Synthetic peptide
  Seed: MCSLMQGSTLPRRSG
MCSFMQISKLPHRSG

SEQ ID NO: 91494 - protein, 15 aa, Artificial Sequence
  Description of Artificial Sequence: Synthetic peptide
  Seed: MCSLMQGSTLPRRSG
MCSFMQISKLPMRSG

SEQ ID NO: 91495 - protein, 15 aa, Artificial Sequence
  Description of Artificial Sequence: Synthetic peptide
  Seed: MCSLMQGSTLPRRSG
MCSFMQISKLPQRSG

SEQ ID NO: 91496 - protein, 15 aa, Artificial Sequence
  Description of Artificial Sequence: Synthetic peptide
  Seed: MCSLMQGSTLPRRSG
MCSFMQISKLPRRSG

SEQ ID NO: 91497 - protein, 15 aa, Artificial Sequence
  Description of Artificial Sequence: Synthetic peptide
  Seed: MCSLMQGSTLPRRSG
MCSFMQISKLPSRSG

SEQ ID NO: 91498 - protein, 15 aa, Artificial Sequence
  Description of Artificial Sequence: Synthetic peptide
  Seed: MCSLMQGSTLPRRSG
MCSFMQISKLPTRSG

SEQ ID NO: 91499 - protein, 15 aa, Artificial Sequence
  Description of Artificial Sequence: Synthetic peptide
  Seed: MCSLMQGSTLPRRSG
MCSFMQISNLPIRSG

SEQ ID NO: 91500 - protein, 15 aa, Artificial Sequence
  Description of Artificial Sequence: Synthetic peptide
  Seed: MCSLMQGSTLPRRSG
MCSFMQISNLPLRSG

SEQ ID NO: 91501 - protein, 15 aa, Artificial Sequence
  Description of Artificial Sequence: Synthetic peptide
  Seed: MCSLMQGSTLPRRSG
MCSFMQISNLPVRSG

SEQ ID NO: 91502 - protein, 15 aa, Artificial Sequence
  Description of Artificial Sequence: Synthetic peptide
  Seed: MCSLMQGSTLPRRSG
MCSFMQISPLPIRSG

SEQ ID NO: 91503 - protein, 15 aa, Artificial Sequence
  Description of Artificial Sequence: Synthetic peptide
  Seed: MCSLMQGSTLPRRSG
MCSFMQISPLPLRSG

SEQ ID NO: 91504 - protein, 15 aa, Artificial Sequence
  Description of Artificial Sequence: Synthetic peptide
  Seed: MCSLMQGSTLPRRSG
MCSFMQISPLPVRSG

SEQ ID NO: 91505 - protein, 15 aa, Artificial Sequence
  Description of Artificial Sequence: Synthetic peptide
  Seed: MCSLMQGSTLPRRSG
MCSFMQISRLPARSG

SEQ ID NO: 91506 - protein, 15 aa, Artificial Sequence
  Description of Artificial Sequence: Synthetic peptide
  Seed: MCSLMQGSTLPRRSG
MCSFMQISRLPGRSG

SEQ ID NO: 91507 - protein, 15 aa, Artificial Sequence
  Description of Artificial Sequence: Synthetic peptide
  Seed: MCSLMQGSTLPRRSG
MCSFMQISRLPHRSG

SEQ ID NO: 91508 - protein, 15 aa, Artificial Sequence
  Description of Artificial Sequence: Synthetic peptide
  Seed: MCSLMQGSTLPRRSG
MCSFMQISRLPKRSG

SEQ ID NO: 91509 - protein, 15 aa, Artificial Sequence
  Description of Artificial Sequence: Synthetic peptide
  Seed: MCSLMQGSTLPRRSG
MCSFMQISRLPLRSG

SEQ ID NO: 91510 - protein, 15 aa, Artificial Sequence
  Description of Artificial Sequence: Synthetic peptide
  Seed: MCSLMQGSTLPRRSG
MCSFMQISRLPMRSG

SEQ ID NO: 91511 - protein, 15 aa, Artificial Sequence
  Description of Artificial Sequence: Synthetic peptide
  Seed: MCSLMQGSTLPRRSG
MCSFMQISRLPQRSG

SEQ ID NO: 91512 - protein, 15 aa, Artificial Sequence
  Description of Artificial Sequence: Synthetic peptide
  Seed: MCSLMQGSTLPRRSG
MCSFMQISRLPRRSG

SEQ ID NO: 91513 - protein, 15 aa, Artificial Sequence
  Description of Artificial Sequence: Synthetic peptide
  Seed: MCSLMQGSTLPRRSG
MCSFMQISRLPSRSG

SEQ ID NO: 91514 - protein, 15 aa, Artificial Sequence
  Description of Artificial Sequence: Synthetic peptide
  Seed: MCSLMQGSTLPRRSG
MCSFMQISRLPTRSG

SEQ ID NO: 91515 - protein, 15 aa, Artificial Sequence
  Description of Artificial Sequence: Synthetic peptide
  Seed: MCSLMQGSTLPRRSG
MCSFMQISRLPVRSG

SEQ ID NO: 91516 - protein, 15 aa, Artificial Sequence
  Description of Artificial Sequence: Synthetic peptide
  Seed: MCSLMQGSTLPRRSG
MCSFMQISRLPYRSG

SEQ ID NO: 91517 - protein, 15 aa, Artificial Sequence
  Description of Artificial Sequence: Synthetic peptide
  Seed: MCSLMQGSTLPRRSG
MCSFMQISSLPARSG

SEQ ID NO: 91518 - protein, 15 aa, Artificial Sequence
  Description of Artificial Sequence: Synthetic peptide
  Seed: MCSLMQGSTLPRRSG
MCSFMQISSLPIRSG

SEQ ID NO: 91519 - protein, 15 aa, Artificial Sequence
  Description of Artificial Sequence: Synthetic peptide
  Seed: MCSLMQGSTLPRRSG
MCSFMQISSLPLRSG

SEQ ID NO: 91520 - protein, 15 aa, Artificial Sequence
  Description of Artificial Sequence: Synthetic peptide
  Seed: MCSLMQGSTLPRRSG
MCSFMQISSLPMRSG

SEQ ID NO: 91521 - protein, 15 aa, Artificial Sequence
  Description of Artificial Sequence: Synthetic peptide
  Seed: MCSLMQGSTLPRRSG
MCSFMQISSLPTRSG

SEQ ID NO: 91522 - protein, 15 aa, Artificial Sequence
  Description of Artificial Sequence: Synthetic peptide
  Seed: MCSLMQGSTLPRRSG
MCSFMQISSLPVRSG

SEQ ID NO: 91523 - protein, 15 aa, Artificial Sequence
  Description of Artificial Sequence: Synthetic peptide
  Seed: MCSLMQGSTLPRRSG
MCSFMQISTLPIRSG

SEQ ID NO: 91524 - protein, 15 aa, Artificial Sequence
  Description of Artificial Sequence: Synthetic peptide
  Seed: MCSLMQGSTLPRRSG
MCSFMQISTLPLRSG

SEQ ID NO: 91525 - protein, 15 aa, Artificial Sequence
  Description of Artificial Sequence: Synthetic peptide
  Seed: MCSLMQGSTLPRRSG
MCSFMQISTLPVRSG

SEQ ID NO: 91526 - protein, 15 aa, Artificial Sequence
  Description of Artificial Sequence: Synthetic peptide
  Seed: MCSLMQGSTLPRRSG
MCSFMQLSALPARSG

SEQ ID NO: 91527 - protein, 15 aa, Artificial Sequence
  Description of Artificial Sequence: Synthetic peptide
  Seed: MCSLMQGSTLPRRSG
MCSFMQLSALPIRSG

SEQ ID NO: 91528 - protein, 15 aa, Artificial Sequence
  Description of Artificial Sequence: Synthetic peptide
  Seed: MCSLMQGSTLPRRSG
MCSFMQLSALPLRSG

SEQ ID NO: 91529 - protein, 15 aa, Artificial Sequence
  Description of Artificial Sequence: Synthetic peptide
  Seed: MCSLMQGSTLPRRSG
MCSFMQLSALPMRSG

SEQ ID NO: 91530 - protein, 15 aa, Artificial Sequence
  Description of Artificial Sequence: Synthetic peptide
  Seed: MCSLMQGSTLPRRSG
MCSFMQLSALPVRSG

SEQ ID NO: 91531 - protein, 15 aa, Artificial Sequence
  Description of Artificial Sequence: Synthetic peptide
  Seed: MCSLMQGSTLPRRSG
MCSFMQLSGLPARSG

SEQ ID NO: 91532 - protein, 15 aa, Artificial Sequence
  Description of Artificial Sequence: Synthetic peptide
  Seed: MCSLMQGSTLPRRSG
MCSFMQLSGLPIRSG

SEQ ID NO: 91533 - protein, 15 aa, Artificial Sequence
  Description of Artificial Sequence: Synthetic peptide
  Seed: MCSLMQGSTLPRRSG
MCSFMQLSGLPLRSG

SEQ ID NO: 91534 - protein, 15 aa, Artificial Sequence
  Description of Artificial Sequence: Synthetic peptide
  Seed: MCSLMQGSTLPRRSG
MCSFMQLSGLPVRSG

SEQ ID NO: 91535 - protein, 15 aa, Artificial Sequence
  Description of Artificial Sequence: Synthetic peptide
  Seed: MCSLMQGSTLPRRSG
MCSFMQLSKLPARSG

SEQ ID NO: 91536 - protein, 15 aa, Artificial Sequence
  Description of Artificial Sequence: Synthetic peptide
  Seed: MCSLMQGSTLPRRSG
MCSFMQLSKLPHRSG

SEQ ID NO: 91537 - protein, 15 aa, Artificial Sequence
  Description of Artificial Sequence: Synthetic peptide
  Seed: MCSLMQGSTLPRRSG
MCSFMQLSKLPKRSG

SEQ ID NO: 91538 - protein, 15 aa, Artificial Sequence
  Description of Artificial Sequence: Synthetic peptide
  Seed: MCSLMQGSTLPRRSG
MCSFMQLSKLPRRSG

SEQ ID NO: 91539 - protein, 15 aa, Artificial Sequence
  Description of Artificial Sequence: Synthetic peptide
  Seed: MCSLMQGSTLPRRSG
MCSFMQLSKLPSRSG

SEQ ID NO: 91540 - protein, 15 aa, Artificial Sequence
  Description of Artificial Sequence: Synthetic peptide
  Seed: MCSLMQGSTLPRRSG
MCSFMQLSKLPTRSG

SEQ ID NO: 91541 - protein, 15 aa, Artificial Sequence
  Description of Artificial Sequence: Synthetic peptide
  Seed: MCSLMQGSTLPRRSG
MCSFMQLSNLPIRSG

SEQ ID NO: 91542 - protein, 15 aa, Artificial Sequence
  Description of Artificial Sequence: Synthetic peptide
  Seed: MCSLMQGSTLPRRSG
MCSFMQLSNLPLRSG

SEQ ID NO: 91543 - protein, 15 aa, Artificial Sequence
  Description of Artificial Sequence: Synthetic peptide
  Seed: MCSLMQGSTLPRRSG
MCSFMQLSNLPVRSG

SEQ ID NO: 91544 - protein, 15 aa, Artificial Sequence
  Description of Artificial Sequence: Synthetic peptide
  Seed: MCSLMQGSTLPRRSG
MCSFMQLSPLPLRSG

SEQ ID NO: 91545 - protein, 15 aa, Artificial Sequence
  Description of Artificial Sequence: Synthetic peptide
  Seed: MCSLMQGSTLPRRSG
MCSFMQLSRLPARSG

SEQ ID NO: 91546 - protein, 15 aa, Artificial Sequence
  Description of Artificial Sequence: Synthetic peptide
  Seed: MCSLMQGSTLPRRSG
MCSFMQLSRLPGRSG

SEQ ID NO: 91547 - protein, 15 aa, Artificial Sequence
  Description of Artificial Sequence: Synthetic peptide
  Seed: MCSLMQGSTLPRRSG
MCSFMQLSRLPHRSG

SEQ ID NO: 91548 - protein, 15 aa, Artificial Sequence
  Description of Artificial Sequence: Synthetic peptide
  Seed: MCSLMQGSTLPRRSG
MCSFMQLSRLPKRSG

SEQ ID NO: 91549 - protein, 15 aa, Artificial Sequence
  Description of Artificial Sequence: Synthetic peptide
  Seed: MCSLMQGSTLPRRSG
MCSFMQLSRLPLRSG

SEQ ID NO: 91550 - protein, 15 aa, Artificial Sequence
  Description of Artificial Sequence: Synthetic peptide
  Seed: MCSLMQGSTLPRRSG
MCSFMQLSRLPMRSG

SEQ ID NO: 91551 - protein, 15 aa, Artificial Sequence
  Description of Artificial Sequence: Synthetic peptide
  Seed: MCSLMQGSTLPRRSG
MCSFMQLSRLPQRSG

SEQ ID NO: 91552 - protein, 15 aa, Artificial Sequence
  Description of Artificial Sequence: Synthetic peptide
  Seed: MCSLMQGSTLPRRSG
MCSFMQLSRLPRRSG

SEQ ID NO: 91553 - protein, 15 aa, Artificial Sequence
  Description of Artificial Sequence: Synthetic peptide
  Seed: MCSLMQGSTLPRRSG
MCSFMQLSRLPSRSG

SEQ ID NO: 91554 - protein, 15 aa, Artificial Sequence
  Description of Artificial Sequence: Synthetic peptide
  Seed: MCSLMQGSTLPRRSG
MCSFMQLSRLPTRSG

SEQ ID NO: 91555 - protein, 15 aa, Artificial Sequence
  Description of Artificial Sequence: Synthetic peptide
  Seed: MCSLMQGSTLPRRSG
MCSFMQLSRLPVRSG

SEQ ID NO: 91556 - protein, 15 aa, Artificial Sequence
  Description of Artificial Sequence: Synthetic peptide
  Seed: MCSLMQGSTLPRRSG
MCSFMQLSRLPYRSG

SEQ ID NO: 91557 - protein, 15 aa, Artificial Sequence
  Description of Artificial Sequence: Synthetic peptide
  Seed: MCSLMQGSTLPRRSG
MCSFMQLSSLPARSG

SEQ ID NO: 91558 - protein, 15 aa, Artificial Sequence
  Description of Artificial Sequence: Synthetic peptide
  Seed: MCSLMQGSTLPRRSG
MCSFMQLSSLPIRSG

SEQ ID NO: 91559 - protein, 15 aa, Artificial Sequence
  Description of Artificial Sequence: Synthetic peptide
  Seed: MCSLMQGSTLPRRSG
MCSFMQLSSLPLRSG

SEQ ID NO: 91560 - protein, 15 aa, Artificial Sequence
  Description of Artificial Sequence: Synthetic peptide
  Seed: MCSLMQGSTLPRRSG
MCSFMQLSSLPMRSG

SEQ ID NO: 91561 - protein, 15 aa, Artificial Sequence
  Description of Artificial Sequence: Synthetic peptide
  Seed: MCSLMQGSTLPRRSG
MCSFMQLSSLPVRSG

SEQ ID NO: 91562 - protein, 15 aa, Artificial Sequence
  Description of Artificial Sequence: Synthetic peptide
  Seed: MCSLMQGSTLPRRSG
MCSFMQLSTLPIRSG

SEQ ID NO: 91563 - protein, 15 aa, Artificial Sequence
  Description of Artificial Sequence: Synthetic peptide
  Seed: MCSLMQGSTLPRRSG
MCSFMQLSTLPLRSG

SEQ ID NO: 91564 - protein, 15 aa, Artificial Sequence
  Description of Artificial Sequence: Synthetic peptide
  Seed: MCSLMQGSTLPRRSG
MCSFMQLSTLPVRSG

SEQ ID NO: 91565 - protein, 15 aa, Artificial Sequence
  Description of Artificial Sequence: Synthetic peptide
  Seed: MCSLMQGSTLPRRSG
MCSFMQMSALPARSG

SEQ ID NO: 91566 - protein, 15 aa, Artificial Sequence
  Description of Artificial Sequence: Synthetic peptide
  Seed: MCSLMQGSTLPRRSG
MCSFMQMSALPIRSG

SEQ ID NO: 91567 - protein, 15 aa, Artificial Sequence
  Description of Artificial Sequence: Synthetic peptide
  Seed: MCSLMQGSTLPRRSG
MCSFMQMSALPLRSG

SEQ ID NO: 91568 - protein, 15 aa, Artificial Sequence
  Description of Artificial Sequence: Synthetic peptide
  Seed: MCSLMQGSTLPRRSG
MCSFMQMSALPMRSG

SEQ ID NO: 91569 - protein, 15 aa, Artificial Sequence
  Description of Artificial Sequence: Synthetic peptide
  Seed: MCSLMQGSTLPRRSG
MCSFMQMSALPVRSG

SEQ ID NO: 91570 - protein, 15 aa, Artificial Sequence
  Description of Artificial Sequence: Synthetic peptide
  Seed: MCSLMQGSTLPRRSG
MCSFMQMSGLPARSG

SEQ ID NO: 91571 - protein, 15 aa, Artificial Sequence
  Description of Artificial Sequence: Synthetic peptide
  Seed: MCSLMQGSTLPRRSG
MCSFMQMSGLPIRSG

SEQ ID NO: 91572 - protein, 15 aa, Artificial Sequence
  Description of Artificial Sequence: Synthetic peptide
  Seed: MCSLMQGSTLPRRSG
MCSFMQMSGLPLRSG

SEQ ID NO: 91573 - protein, 15 aa, Artificial Sequence
  Description of Artificial Sequence: Synthetic peptide
  Seed: MCSLMQGSTLPRRSG
MCSFMQMSGLPVRSG

SEQ ID NO: 91574 - protein, 15 aa, Artificial Sequence
  Description of Artificial Sequence: Synthetic peptide
  Seed: MCSLMQGSTLPRRSG
MCSFMQMSKLPARSG

SEQ ID NO: 91575 - protein, 15 aa, Artificial Sequence
  Description of Artificial Sequence: Synthetic peptide
  Seed: MCSLMQGSTLPRRSG
MCSFMQMSKLPHRSG

SEQ ID NO: 91576 - protein, 15 aa, Artificial Sequence
  Description of Artificial Sequence: Synthetic peptide
  Seed: MCSLMQGSTLPRRSG
MCSFMQMSKLPKRSG

SEQ ID NO: 91577 - protein, 15 aa, Artificial Sequence
  Description of Artificial Sequence: Synthetic peptide
  Seed: MCSLMQGSTLPRRSG
MCSFMQMSKLPMRSG

SEQ ID NO: 91578 - protein, 15 aa, Artificial Sequence
  Description of Artificial Sequence: Synthetic peptide
  Seed: MCSLMQGSTLPRRSG
MCSFMQMSKLPQRSG

SEQ ID NO: 91579 - protein, 15 aa, Artificial Sequence
  Description of Artificial Sequence: Synthetic peptide
  Seed: MCSLMQGSTLPRRSG
MCSFMQMSKLPRRSG

SEQ ID NO: 91580 - protein, 15 aa, Artificial Sequence
  Description of Artificial Sequence: Synthetic peptide
  Seed: MCSLMQGSTLPRRSG
MCSFMQMSKLPSRSG

SEQ ID NO: 91581 - protein, 15 aa, Artificial Sequence
  Description of Artificial Sequence: Synthetic peptide
  Seed: MCSLMQGSTLPRRSG
MCSFMQMSKLPTRSG

SEQ ID NO: 91582 - protein, 15 aa, Artificial Sequence
  Description of Artificial Sequence: Synthetic peptide
  Seed: MCSLMQGSTLPRRSG
MCSFMQMSKLPVRSG

SEQ ID NO: 91583 - protein, 15 aa, Artificial Sequence
  Description of Artificial Sequence: Synthetic peptide
  Seed: MCSLMQGSTLPRRSG
MCSFMQMSNLPIRSG

SEQ ID NO: 91584 - protein, 15 aa, Artificial Sequence
  Description of Artificial Sequence: Synthetic peptide
  Seed: MCSLMQGSTLPRRSG
MCSFMQMSNLPLRSG

SEQ ID NO: 91585 - protein, 15 aa, Artificial Sequence
  Description of Artificial Sequence: Synthetic peptide
  Seed: MCSLMQGSTLPRRSG
MCSFMQMSNLPVRSG

SEQ ID NO: 91586 - protein, 15 aa, Artificial Sequence
  Description of Artificial Sequence: Synthetic peptide
  Seed: MCSLMQGSTLPRRSG
MCSFMQMSPLPLRSG

SEQ ID NO: 91587 - protein, 15 aa, Artificial Sequence
  Description of Artificial Sequence: Synthetic peptide
  Seed: MCSLMQGSTLPRRSG
MCSFMQMSPLPVRSG

SEQ ID NO: 91588 - protein, 15 aa, Artificial Sequence
  Description of Artificial Sequence: Synthetic peptide
  Seed: MCSLMQGSTLPRRSG
MCSFMQMSRLPARSG

SEQ ID NO: 91589 - protein, 15 aa, Artificial Sequence
  Description of Artificial Sequence: Synthetic peptide
  Seed: MCSLMQGSTLPRRSG
MCSFMQMSRLPGRSG

SEQ ID NO: 91590 - protein, 15 aa, Artificial Sequence
  Description of Artificial Sequence: Synthetic peptide
  Seed: MCSLMQGSTLPRRSG
MCSFMQMSRLPHRSG

SEQ ID NO: 91591 - protein, 15 aa, Artificial Sequence
  Description of Artificial Sequence: Synthetic peptide
  Seed: MCSLMQGSTLPRRSG
MCSFMQMSRLPIRSG

SEQ ID NO: 91592 - protein, 15 aa, Artificial Sequence
  Description of Artificial Sequence: Synthetic peptide
  Seed: MCSLMQGSTLPRRSG
MCSFMQMSRLPKRSG

SEQ ID NO: 91593 - protein, 15 aa, Artificial Sequence
  Description of Artificial Sequence: Synthetic peptide
  Seed: MCSLMQGSTLPRRSG
MCSFMQMSRLPLRSG

SEQ ID NO: 91594 - protein, 15 aa, Artificial Sequence
  Description of Artificial Sequence: Synthetic peptide
  Seed: MCSLMQGSTLPRRSG
MCSFMQMSRLPMRSG

SEQ ID NO: 91595 - protein, 15 aa, Artificial Sequence
  Description of Artificial Sequence: Synthetic peptide
  Seed: MCSLMQGSTLPRRSG
MCSFMQMSRLPQRSG

SEQ ID NO: 91596 - protein, 15 aa, Artificial Sequence
  Description of Artificial Sequence: Synthetic peptide
  Seed: MCSLMQGSTLPRRSG
MCSFMQMSRLPRRSG

SEQ ID NO: 91597 - protein, 15 aa, Artificial Sequence
  Description of Artificial Sequence: Synthetic peptide
  Seed: MCSLMQGSTLPRRSG
MCSFMQMSRLPSRSG

SEQ ID NO: 91598 - protein, 15 aa, Artificial Sequence
  Description of Artificial Sequence: Synthetic peptide
  Seed: MCSLMQGSTLPRRSG
MCSFMQMSRLPTRSG

SEQ ID NO: 91599 - protein, 15 aa, Artificial Sequence
  Description of Artificial Sequence: Synthetic peptide
  Seed: MCSLMQGSTLPRRSG
MCSFMQMSRLPVRSG

SEQ ID NO: 91600 - protein, 15 aa, Artificial Sequence
  Description of Artificial Sequence: Synthetic peptide
  Seed: MCSLMQGSTLPRRSG
MCSFMQMSRLPYRSG

SEQ ID NO: 91601 - protein, 15 aa, Artificial Sequence
  Description of Artificial Sequence: Synthetic peptide
  Seed: MCSLMQGSTLPRRSG
MCSFMQMSSLPARSG

SEQ ID NO: 91602 - protein, 15 aa, Artificial Sequence
  Description of Artificial Sequence: Synthetic peptide
  Seed: MCSLMQGSTLPRRSG
MCSFMQMSSLPIRSG

SEQ ID NO: 91603 - protein, 15 aa, Artificial Sequence
  Description of Artificial Sequence: Synthetic peptide
  Seed: MCSLMQGSTLPRRSG
MCSFMQMSSLPLRSG

SEQ ID NO: 91604 - protein, 15 aa, Artificial Sequence
  Description of Artificial Sequence: Synthetic peptide
  Seed: MCSLMQGSTLPRRSG
MCSFMQMSSLPMRSG

SEQ ID NO: 91605 - protein, 15 aa, Artificial Sequence
  Description of Artificial Sequence: Synthetic peptide
  Seed: MCSLMQGSTLPRRSG
MCSFMQMSSLPVRSG

SEQ ID NO: 91606 - protein, 15 aa, Artificial Sequence
  Description of Artificial Sequence: Synthetic peptide
  Seed: MCSLMQGSTLPRRSG
MCSFMQMSTLPIRSG

SEQ ID NO: 91607 - protein, 15 aa, Artificial Sequence
  Description of Artificial Sequence: Synthetic peptide
  Seed: MCSLMQGSTLPRRSG
MCSFMQMSTLPLRSG

SEQ ID NO: 91608 - protein, 15 aa, Artificial Sequence
  Description of Artificial Sequence: Synthetic peptide
  Seed: MCSLMQGSTLPRRSG
MCSFMQMSTLPVRSG

SEQ ID NO: 91609 - protein, 15 aa, Artificial Sequence
  Description of Artificial Sequence: Synthetic peptide
  Seed: MCSLMQGSTLPRRSG
MCSFMQQSALPLRSG

SEQ ID NO: 91610 - protein, 15 aa, Artificial Sequence
  Description of Artificial Sequence: Synthetic peptide
  Seed: MCSLMQGSTLPRRSG
MCSFMQSSALPARSG

SEQ ID NO: 91611 - protein, 15 aa, Artificial Sequence
  Description of Artificial Sequence: Synthetic peptide
  Seed: MCSLMQGSTLPRRSG
MCSFMQSSALPFRSG

SEQ ID NO: 91612 - protein, 15 aa, Artificial Sequence
  Description of Artificial Sequence: Synthetic peptide
  Seed: MCSLMQGSTLPRRSG
MCSFMQSSALPIRSG

SEQ ID NO: 91613 - protein, 15 aa, Artificial Sequence
  Description of Artificial Sequence: Synthetic peptide
  Seed: MCSLMQGSTLPRRSG
MCSFMQSSALPLRSG

SEQ ID NO: 91614 - protein, 15 aa, Artificial Sequence
  Description of Artificial Sequence: Synthetic peptide
  Seed: MCSLMQGSTLPRRSG
MCSFMQSSALPMRSG

SEQ ID NO: 91615 - protein, 15 aa, Artificial Sequence
  Description of Artificial Sequence: Synthetic peptide
  Seed: MCSLMQGSTLPRRSG
MCSFMQSSALPTRSG

SEQ ID NO: 91616 - protein, 15 aa, Artificial Sequence
  Description of Artificial Sequence: Synthetic peptide
  Seed: MCSLMQGSTLPRRSG
MCSFMQSSALPVRSG

SEQ ID NO: 91617 - protein, 15 aa, Artificial Sequence
  Description of Artificial Sequence: Synthetic peptide
  Seed: MCSLMQGSTLPRRSG
MCSFMQSSALPYRSG

SEQ ID NO: 91618 - protein, 15 aa, Artificial Sequence
  Description of Artificial Sequence: Synthetic peptide
  Seed: MCSLMQGSTLPRRSG
MCSFMQSSGLPFRSG

SEQ ID NO: 91619 - protein, 15 aa, Artificial Sequence
  Description of Artificial Sequence: Synthetic peptide
  Seed: MCSLMQGSTLPRRSG
MCSFMQSSGLPIRSG

SEQ ID NO: 91620 - protein, 15 aa, Artificial Sequence
  Description of Artificial Sequence: Synthetic peptide
  Seed: MCSLMQGSTLPRRSG
MCSFMQSSGLPLRSG

SEQ ID NO: 91621 - protein, 15 aa, Artificial Sequence
  Description of Artificial Sequence: Synthetic peptide
  Seed: MCSLMQGSTLPRRSG
MCSFMQSSGLPMRSG

SEQ ID NO: 91622 - protein, 15 aa, Artificial Sequence
  Description of Artificial Sequence: Synthetic peptide
  Seed: MCSLMQGSTLPRRSG
MCSFMQSSGLPVRSG

SEQ ID NO: 91623 - protein, 15 aa, Artificial Sequence
  Description of Artificial Sequence: Synthetic peptide
  Seed: MCSLMQGSTLPRRSG
MCSFMQSSILPIRSG

SEQ ID NO: 91624 - protein, 15 aa, Artificial Sequence
  Description of Artificial Sequence: Synthetic peptide
  Seed: MCSLMQGSTLPRRSG
MCSFMQSSPLPFRSG

SEQ ID NO: 91625 - protein, 15 aa, Artificial Sequence
  Description of Artificial Sequence: Synthetic peptide
  Seed: MCSLMQGSTLPRRSG
MCSFMQSSPLPIRSG

SEQ ID NO: 91626 - protein, 15 aa, Artificial Sequence
  Description of Artificial Sequence: Synthetic peptide
  Seed: MCSLMQGSTLPRRSG
MCSFMQSSPLPLRSG

SEQ ID NO: 91627 - protein, 15 aa, Artificial Sequence
  Description of Artificial Sequence: Synthetic peptide
  Seed: MCSLMQGSTLPRRSG
MCSFMQSSPLPMRSG

SEQ ID NO: 91628 - protein, 15 aa, Artificial Sequence
  Description of Artificial Sequence: Synthetic peptide
  Seed: MCSLMQGSTLPRRSG
MCSFMQSSPLPVRSG

SEQ ID NO: 91629 - protein, 15 aa, Artificial Sequence
  Description of Artificial Sequence: Synthetic peptide
  Seed: MCSLMQGSTLPRRSG
MCSFMQSSSLPARSG

SEQ ID NO: 91630 - protein, 15 aa, Artificial Sequence
  Description of Artificial Sequence: Synthetic peptide
  Seed: MCSLMQGSTLPRRSG
MCSFMQSSSLPFRSG

SEQ ID NO: 91631 - protein, 15 aa, Artificial Sequence
  Description of Artificial Sequence: Synthetic peptide
  Seed: MCSLMQGSTLPRRSG
MCSFMQSSSLPIRSG

SEQ ID NO: 91632 - protein, 15 aa, Artificial Sequence
  Description of Artificial Sequence: Synthetic peptide
  Seed: MCSLMQGSTLPRRSG
MCSFMQSSSLPLRSG

SEQ ID NO: 91633 - protein, 15 aa, Artificial Sequence
  Description of Artificial Sequence: Synthetic peptide
  Seed: MCSLMQGSTLPRRSG
MCSFMQSSSLPMRSG

SEQ ID NO: 91634 - protein, 15 aa, Artificial Sequence
  Description of Artificial Sequence: Synthetic peptide
  Seed: MCSLMQGSTLPRRSG
MCSFMQSSSLPVRSG

SEQ ID NO: 91635 - protein, 15 aa, Artificial Sequence
  Description of Artificial Sequence: Synthetic peptide
  Seed: MCSLMQGSTLPRRSG
MCSFMQSSTLPIRSG

SEQ ID NO: 91636 - protein, 15 aa, Artificial Sequence
  Description of Artificial Sequence: Synthetic peptide
  Seed: MCSLMQGSTLPRRSG
MCSFMQSSTLPLRSG

SEQ ID NO: 91637 - protein, 15 aa, Artificial Sequence
  Description of Artificial Sequence: Synthetic peptide
  Seed: MCSLMQGSTLPRRSG
MCSFMQSSTLPMRSG

SEQ ID NO: 91638 - protein, 15 aa, Artificial Sequence
  Description of Artificial Sequence: Synthetic peptide
  Seed: MCSLMQGSTLPRRSG
MCSFMQSSTLPVRSG

SEQ ID NO: 91639 - protein, 15 aa, Artificial Sequence
  Description of Artificial Sequence: Synthetic peptide
  Seed: MCSLMQGSTLPRRSG
MCSFMQSSVLPIRSG

SEQ ID NO: 91640 - protein, 15 aa, Artificial Sequence
  Description of Artificial Sequence: Synthetic peptide
  Seed: MCSLMQGSTLPRRSG
MCSFMQSSVLPLRSG

SEQ ID NO: 91641 - protein, 15 aa, Artificial Sequence
  Description of Artificial Sequence: Synthetic peptide
  Seed: MCSLMQGSTLPRRSG
MCSFMQSSVLPMRSG

SEQ ID NO: 91642 - protein, 15 aa, Artificial Sequence
  Description of Artificial Sequence: Synthetic peptide
  Seed: MCSLMQGSTLPRRSG
MCSFMQSSVLPVRSG

SEQ ID NO: 91643 - protein, 15 aa, Artificial Sequence
  Description of Artificial Sequence: Synthetic peptide
  Seed: MCSLMQGSTLPRRSG
MCSFMQTSALPARSG

SEQ ID NO: 91644 - protein, 15 aa, Artificial Sequence
  Description of Artificial Sequence: Synthetic peptide
  Seed: MCSLMQGSTLPRRSG
MCSFMQTSALPFRSG

SEQ ID NO: 91645 - protein, 15 aa, Artificial Sequence
  Description of Artificial Sequence: Synthetic peptide
  Seed: MCSLMQGSTLPRRSG
MCSFMQTSALPIRSG

SEQ ID NO: 91646 - protein, 15 aa, Artificial Sequence
  Description of Artificial Sequence: Synthetic peptide
  Seed: MCSLMQGSTLPRRSG
MCSFMQTSALPLRSG

SEQ ID NO: 91647 - protein, 15 aa, Artificial Sequence
  Description of Artificial Sequence: Synthetic peptide
  Seed: MCSLMQGSTLPRRSG
MCSFMQTSALPMRSG

SEQ ID NO: 91648 - protein, 15 aa, Artificial Sequence
  Description of Artificial Sequence: Synthetic peptide
  Seed: MCSLMQGSTLPRRSG
MCSFMQTSALPVRSG

SEQ ID NO: 91649 - protein, 15 aa, Artificial Sequence
  Description of Artificial Sequence: Synthetic peptide
  Seed: MCSLMQGSTLPRRSG
MCSFMQTSGLPIRSG

SEQ ID NO: 91650 - protein, 15 aa, Artificial Sequence
  Description of Artificial Sequence: Synthetic peptide
  Seed: MCSLMQGSTLPRRSG
MCSFMQTSGLPLRSG

SEQ ID NO: 91651 - protein, 15 aa, Artificial Sequence
  Description of Artificial Sequence: Synthetic peptide
  Seed: MCSLMQGSTLPRRSG
MCSFMQTSGLPMRSG

SEQ ID NO: 91652 - protein, 15 aa, Artificial Sequence
  Description of Artificial Sequence: Synthetic peptide
  Seed: MCSLMQGSTLPRRSG
MCSFMQTSGLPVRSG

SEQ ID NO: 91653 - protein, 15 aa, Artificial Sequence
  Description of Artificial Sequence: Synthetic peptide
  Seed: MCSLMQGSTLPRRSG
MCSFMQTSPLPIRSG

SEQ ID NO: 91654 - protein, 15 aa, Artificial Sequence
  Description of Artificial Sequence: Synthetic peptide
  Seed: MCSLMQGSTLPRRSG
MCSFMQTSPLPLRSG

SEQ ID NO: 91655 - protein, 15 aa, Artificial Sequence
  Description of Artificial Sequence: Synthetic peptide
  Seed: MCSLMQGSTLPRRSG
MCSFMQTSPLPMRSG

SEQ ID NO: 91656 - protein, 15 aa, Artificial Sequence
  Description of Artificial Sequence: Synthetic peptide
  Seed: MCSLMQGSTLPRRSG
MCSFMQTSPLPVRSG

SEQ ID NO: 91657 - protein, 15 aa, Artificial Sequence
  Description of Artificial Sequence: Synthetic peptide
  Seed: MCSLMQGSTLPRRSG
MCSFMQTSSLPFRSG

SEQ ID NO: 91658 - protein, 15 aa, Artificial Sequence
  Description of Artificial Sequence: Synthetic peptide
  Seed: MCSLMQGSTLPRRSG
MCSFMQTSSLPIRSG

SEQ ID NO: 91659 - protein, 15 aa, Artificial Sequence
  Description of Artificial Sequence: Synthetic peptide
  Seed: MCSLMQGSTLPRRSG
MCSFMQTSSLPLRSG

SEQ ID NO: 91660 - protein, 15 aa, Artificial Sequence
  Description of Artificial Sequence: Synthetic peptide
  Seed: MCSLMQGSTLPRRSG
MCSFMQTSSLPMRSG

SEQ ID NO: 91661 - protein, 15 aa, Artificial Sequence
  Description of Artificial Sequence: Synthetic peptide
  Seed: MCSLMQGSTLPRRSG
MCSFMQTSSLPVRSG

SEQ ID NO: 91662 - protein, 15 aa, Artificial Sequence
  Description of Artificial Sequence: Synthetic peptide
  Seed: MCSLMQGSTLPRRSG
MCSFMQTSTLPIRSG

SEQ ID NO: 91663 - protein, 15 aa, Artificial Sequence
  Description of Artificial Sequence: Synthetic peptide
  Seed: MCSLMQGSTLPRRSG
MCSFMQTSTLPLRSG

SEQ ID NO: 91664 - protein, 15 aa, Artificial Sequence
  Description of Artificial Sequence: Synthetic peptide
  Seed: MCSLMQGSTLPRRSG
MCSFMQTSTLPVRSG

SEQ ID NO: 91665 - protein, 15 aa, Artificial Sequence
  Description of Artificial Sequence: Synthetic peptide
  Seed: MCSLMQGSTLPRRSG
MCSFMQTSVLPIRSG

SEQ ID NO: 91666 - protein, 15 aa, Artificial Sequence
  Description of Artificial Sequence: Synthetic peptide
  Seed: MCSLMQGSTLPRRSG
MCSFMQTSVLPLRSG

SEQ ID NO: 91667 - protein, 15 aa, Artificial Sequence
  Description of Artificial Sequence: Synthetic peptide
  Seed: MCSLMQGSTLPRRSG
MCSFMQTSVLPVRSG

SEQ ID NO: 91668 - protein, 15 aa, Artificial Sequence
  Description of Artificial Sequence: Synthetic peptide
  Seed: MCSLMQGSTLPRRSG
MCSFMQVSALPFRSG

SEQ ID NO: 91669 - protein, 15 aa, Artificial Sequence
  Description of Artificial Sequence: Synthetic peptide
  Seed: MCSLMQGSTLPRRSG
MCSFMQVSALPIRSG

SEQ ID NO: 91670 - protein, 15 aa, Artificial Sequence
  Description of Artificial Sequence: Synthetic peptide
  Seed: MCSLMQGSTLPRRSG
MCSFMQVSALPLRSG

SEQ ID NO: 91671 - protein, 15 aa, Artificial Sequence
  Description of Artificial Sequence: Synthetic peptide
  Seed: MCSLMQGSTLPRRSG
MCSFMQVSALPMRSG

SEQ ID NO: 91672 - protein, 15 aa, Artificial Sequence
  Description of Artificial Sequence: Synthetic peptide
  Seed: MCSLMQGSTLPRRSG
MCSFMQVSALPVRSG

SEQ ID NO: 91673 - protein, 15 aa, Artificial Sequence
  Description of Artificial Sequence: Synthetic peptide
  Seed: MCSLMQGSTLPRRSG
MCSFMQVSGLPIRSG

SEQ ID NO: 91674 - protein, 15 aa, Artificial Sequence
  Description of Artificial Sequence: Synthetic peptide
  Seed: MCSLMQGSTLPRRSG
MCSFMQVSGLPLRSG

SEQ ID NO: 91675 - protein, 15 aa, Artificial Sequence
  Description of Artificial Sequence: Synthetic peptide
  Seed: MCSLMQGSTLPRRSG
MCSFMQVSGLPVRSG

SEQ ID NO: 91676 - protein, 15 aa, Artificial Sequence
  Description of Artificial Sequence: Synthetic peptide
  Seed: MCSLMQGSTLPRRSG
MCSFMQVSKLPARSG

SEQ ID NO: 91677 - protein, 15 aa, Artificial Sequence
  Description of Artificial Sequence: Synthetic peptide
  Seed: MCSLMQGSTLPRRSG
MCSFMQVSKLPRRSG

SEQ ID NO: 91678 - protein, 15 aa, Artificial Sequence
  Description of Artificial Sequence: Synthetic peptide
  Seed: MCSLMQGSTLPRRSG
MCSFMQVSKLPSRSG

SEQ ID NO: 91679 - protein, 15 aa, Artificial Sequence
  Description of Artificial Sequence: Synthetic peptide
  Seed: MCSLMQGSTLPRRSG
MCSFMQVSNLPIRSG

SEQ ID NO: 91680 - protein, 15 aa, Artificial Sequence
  Description of Artificial Sequence: Synthetic peptide
  Seed: MCSLMQGSTLPRRSG
MCSFMQVSNLPLRSG

SEQ ID NO: 91681 - protein, 15 aa, Artificial Sequence
  Description of Artificial Sequence: Synthetic peptide
  Seed: MCSLMQGSTLPRRSG
MCSFMQVSNLPVRSG

SEQ ID NO: 91682 - protein, 15 aa, Artificial Sequence
  Description of Artificial Sequence: Synthetic peptide
  Seed: MCSLMQGSTLPRRSG
MCSFMQVSPLPIRSG

SEQ ID NO: 91683 - protein, 15 aa, Artificial Sequence
  Description of Artificial Sequence: Synthetic peptide
  Seed: MCSLMQGSTLPRRSG
MCSFMQVSPLPLRSG

SEQ ID NO: 91684 - protein, 15 aa, Artificial Sequence
  Description of Artificial Sequence: Synthetic peptide
  Seed: MCSLMQGSTLPRRSG
MCSFMQVSPLPMRSG

SEQ ID NO: 91685 - protein, 15 aa, Artificial Sequence
  Description of Artificial Sequence: Synthetic peptide
  Seed: MCSLMQGSTLPRRSG
MCSFMQVSPLPVRSG

SEQ ID NO: 91686 - protein, 15 aa, Artificial Sequence
  Description of Artificial Sequence: Synthetic peptide
  Seed: MCSLMQGSTLPRRSG
MCSFMQVSRLPARSG

SEQ ID NO: 91687 - protein, 15 aa, Artificial Sequence
  Description of Artificial Sequence: Synthetic peptide
  Seed: MCSLMQGSTLPRRSG
MCSFMQVSRLPGRSG

SEQ ID NO: 91688 - protein, 15 aa, Artificial Sequence
  Description of Artificial Sequence: Synthetic peptide
  Seed: MCSLMQGSTLPRRSG
MCSFMQVSRLPHRSG

SEQ ID NO: 91689 - protein, 15 aa, Artificial Sequence
  Description of Artificial Sequence: Synthetic peptide
  Seed: MCSLMQGSTLPRRSG
MCSFMQVSRLPKRSG

SEQ ID NO: 91690 - protein, 15 aa, Artificial Sequence
  Description of Artificial Sequence: Synthetic peptide
  Seed: MCSLMQGSTLPRRSG
MCSFMQVSRLPQRSG

SEQ ID NO: 91691 - protein, 15 aa, Artificial Sequence
  Description of Artificial Sequence: Synthetic peptide
  Seed: MCSLMQGSTLPRRSG
MCSFMQVSRLPRRSG

SEQ ID NO: 91692 - protein, 15 aa, Artificial Sequence
  Description of Artificial Sequence: Synthetic peptide
  Seed: MCSLMQGSTLPRRSG
MCSFMQVSRLPSRSG

SEQ ID NO: 91693 - protein, 15 aa, Artificial Sequence
  Description of Artificial Sequence: Synthetic peptide
  Seed: MCSLMQGSTLPRRSG
MCSFMQVSRLPTRSG

SEQ ID NO: 91694 - protein, 15 aa, Artificial Sequence
  Description of Artificial Sequence: Synthetic peptide
  Seed: MCSLMQGSTLPRRSG
MCSFMQVSSLPARSG

SEQ ID NO: 91695 - protein, 15 aa, Artificial Sequence
  Description of Artificial Sequence: Synthetic peptide
  Seed: MCSLMQGSTLPRRSG
MCSFMQVSSLPIRSG

SEQ ID NO: 91696 - protein, 15 aa, Artificial Sequence
  Description of Artificial Sequence: Synthetic peptide
  Seed: MCSLMQGSTLPRRSG
MCSFMQVSSLPLRSG

SEQ ID NO: 91697 - protein, 15 aa, Artificial Sequence
  Description of Artificial Sequence: Synthetic peptide
  Seed: MCSLMQGSTLPRRSG
MCSFMQVSSLPMRSG

SEQ ID NO: 91698 - protein, 15 aa, Artificial Sequence
  Description of Artificial Sequence: Synthetic peptide
  Seed: MCSLMQGSTLPRRSG
MCSFMQVSSLPVRSG

SEQ ID NO: 91699 - protein, 15 aa, Artificial Sequence
  Description of Artificial Sequence: Synthetic peptide
  Seed: MCSLMQGSTLPRRSG
MCSFMQVSTLPIRSG

SEQ ID NO: 91700 - protein, 15 aa, Artificial Sequence
  Description of Artificial Sequence: Synthetic peptide
  Seed: MCSLMQGSTLPRRSG
MCSFMQVSTLPLRSG

SEQ ID NO: 91701 - protein, 15 aa, Artificial Sequence
  Description of Artificial Sequence: Synthetic peptide
  Seed: MCSLMQGSTLPRRSG
MCSFMQVSTLPVRSG

SEQ ID NO: 91702 - protein, 15 aa, Artificial Sequence
  Description of Artificial Sequence: Synthetic peptide
  Seed: MCSLMQGSTLPRRSG
MCSFMQYSSLPLRSG

SEQ ID NO: 91703 - protein, 15 aa, Artificial Sequence
  Description of Artificial Sequence: Synthetic peptide
  Seed: MCSLMQGSTLPRRSG
MCSIMQASALPARSG

SEQ ID NO: 91704 - protein, 15 aa, Artificial Sequence
  Description of Artificial Sequence: Synthetic peptide
  Seed: MCSLMQGSTLPRRSG
MCSIMQASALPIRSG

SEQ ID NO: 91705 - protein, 15 aa, Artificial Sequence
  Description of Artificial Sequence: Synthetic peptide
  Seed: MCSLMQGSTLPRRSG
MCSIMQASALPLRSG

SEQ ID NO: 91706 - protein, 15 aa, Artificial Sequence
  Description of Artificial Sequence: Synthetic peptide
  Seed: MCSLMQGSTLPRRSG
MCSIMQASALPMRSG

SEQ ID NO: 91707 - protein, 15 aa, Artificial Sequence
  Description of Artificial Sequence: Synthetic peptide
  Seed: MCSLMQGSTLPRRSG
MCSIMQASALPVRSG

SEQ ID NO: 91708 - protein, 15 aa, Artificial Sequence
  Description of Artificial Sequence: Synthetic peptide
  Seed: MCSLMQGSTLPRRSG
MCSIMQASGLPLRSG

SEQ ID NO: 91709 - protein, 15 aa, Artificial Sequence
  Description of Artificial Sequence: Synthetic peptide
  Seed: MCSLMQGSTLPRRSG
MCSIMQASKLPARSG

SEQ ID NO: 91710 - protein, 15 aa, Artificial Sequence
  Description of Artificial Sequence: Synthetic peptide
  Seed: MCSLMQGSTLPRRSG
MCSIMQASKLPSRSG

SEQ ID NO: 91711 - protein, 15 aa, Artificial Sequence
  Description of Artificial Sequence: Synthetic peptide
  Seed: MCSLMQGSTLPRRSG
MCSIMQASNLPARSG

SEQ ID NO: 91712 - protein, 15 aa, Artificial Sequence
  Description of Artificial Sequence: Synthetic peptide
  Seed: MCSLMQGSTLPRRSG
MCSIMQASPLPLRSG

SEQ ID NO: 91713 - protein, 15 aa, Artificial Sequence
  Description of Artificial Sequence: Synthetic peptide
  Seed: MCSLMQGSTLPRRSG
MCSIMQASRLPARSG

SEQ ID NO: 91714 - protein, 15 aa, Artificial Sequence
  Description of Artificial Sequence: Synthetic peptide
  Seed: MCSLMQGSTLPRRSG
MCSIMQASRLPFRSG

SEQ ID NO: 91715 - protein, 15 aa, Artificial Sequence
  Description of Artificial Sequence: Synthetic peptide
  Seed: MCSLMQGSTLPRRSG
MCSIMQASRLPGRSG

SEQ ID NO: 91716 - protein, 15 aa, Artificial Sequence
  Description of Artificial Sequence: Synthetic peptide
  Seed: MCSLMQGSTLPRRSG
MCSIMQASRLPHRSG

SEQ ID NO: 91717 - protein, 15 aa, Artificial Sequence
  Description of Artificial Sequence: Synthetic peptide
  Seed: MCSLMQGSTLPRRSG
MCSIMQASRLPLRSG

SEQ ID NO: 91718 - protein, 15 aa, Artificial Sequence
  Description of Artificial Sequence: Synthetic peptide
  Seed: MCSLMQGSTLPRRSG
MCSIMQASRLPQRSG

SEQ ID NO: 91719 - protein, 15 aa, Artificial Sequence
  Description of Artificial Sequence: Synthetic peptide
  Seed: MCSLMQGSTLPRRSG
MCSIMQASRLPRRSG

SEQ ID NO: 91720 - protein, 15 aa, Artificial Sequence
  Description of Artificial Sequence: Synthetic peptide
  Seed: MCSLMQGSTLPRRSG
MCSIMQASRLPSRSG

SEQ ID NO: 91721 - protein, 15 aa, Artificial Sequence
  Description of Artificial Sequence: Synthetic peptide
  Seed: MCSLMQGSTLPRRSG
MCSIMQASRLPTRSG

SEQ ID NO: 91722 - protein, 15 aa, Artificial Sequence
  Description of Artificial Sequence: Synthetic peptide
  Seed: MCSLMQGSTLPRRSG
MCSIMQASRLPYRSG

SEQ ID NO: 91723 - protein, 15 aa, Artificial Sequence
  Description of Artificial Sequence: Synthetic peptide
  Seed: MCSLMQGSTLPRRSG
MCSIMQASSLPIRSG

SEQ ID NO: 91724 - protein, 15 aa, Artificial Sequence
  Description of Artificial Sequence: Synthetic peptide
  Seed: MCSLMQGSTLPRRSG
MCSIMQASSLPLRSG

SEQ ID NO: 91725 - protein, 15 aa, Artificial Sequence
  Description of Artificial Sequence: Synthetic peptide
  Seed: MCSLMQGSTLPRRSG
MCSIMQASSLPVRSG

SEQ ID NO: 91726 - protein, 15 aa, Artificial Sequence
  Description of Artificial Sequence: Synthetic peptide
  Seed: MCSLMQGSTLPRRSG
MCSIMQCSRLPARSG

SEQ ID NO: 91727 - protein, 15 aa, Artificial Sequence
  Description of Artificial Sequence: Synthetic peptide
  Seed: MCSLMQGSTLPRRSG
MCSIMQCSRLPSRSG

SEQ ID NO: 91728 - protein, 15 aa, Artificial Sequence
  Description of Artificial Sequence: Synthetic peptide
  Seed: MCSLMQGSTLPRRSG
MCSIMQFSKLPARSG

SEQ ID NO: 91729 - protein, 15 aa, Artificial Sequence
  Description of Artificial Sequence: Synthetic peptide
  Seed: MCSLMQGSTLPRRSG
MCSIMQFSKLPHRSG

SEQ ID NO: 91730 - protein, 15 aa, Artificial Sequence
  Description of Artificial Sequence: Synthetic peptide
  Seed: MCSLMQGSTLPRRSG
MCSIMQFSKLPKRSG

SEQ ID NO: 91731 - protein, 15 aa, Artificial Sequence
  Description of Artificial Sequence: Synthetic peptide
  Seed: MCSLMQGSTLPRRSG
MCSIMQFSKLPRRSG

SEQ ID NO: 91732 - protein, 15 aa, Artificial Sequence
  Description of Artificial Sequence: Synthetic peptide
  Seed: MCSLMQGSTLPRRSG
MCSIMQFSKLPSRSG

SEQ ID NO: 91733 - protein, 15 aa, Artificial Sequence
  Description of Artificial Sequence: Synthetic peptide
  Seed: MCSLMQGSTLPRRSG
MCSIMQFSRLPARSG

SEQ ID NO: 91734 - protein, 15 aa, Artificial Sequence
  Description of Artificial Sequence: Synthetic peptide
  Seed: MCSLMQGSTLPRRSG
MCSIMQFSRLPGRSG

SEQ ID NO: 91735 - protein, 15 aa, Artificial Sequence
  Description of Artificial Sequence: Synthetic peptide
  Seed: MCSLMQGSTLPRRSG
MCSIMQFSRLPHRSG

SEQ ID NO: 91736 - protein, 15 aa, Artificial Sequence
  Description of Artificial Sequence: Synthetic peptide
  Seed: MCSLMQGSTLPRRSG
MCSIMQFSRLPKRSG

SEQ ID NO: 91737 - protein, 15 aa, Artificial Sequence
  Description of Artificial Sequence: Synthetic peptide
  Seed: MCSLMQGSTLPRRSG
MCSIMQFSRLPQRSG

SEQ ID NO: 91738 - protein, 15 aa, Artificial Sequence
  Description of Artificial Sequence: Synthetic peptide
  Seed: MCSLMQGSTLPRRSG
MCSIMQFSRLPRRSG

SEQ ID NO: 91739 - protein, 15 aa, Artificial Sequence
  Description of Artificial Sequence: Synthetic peptide
  Seed: MCSLMQGSTLPRRSG
MCSIMQFSRLPSRSG

SEQ ID NO: 91740 - protein, 15 aa, Artificial Sequence
  Description of Artificial Sequence: Synthetic peptide
  Seed: MCSLMQGSTLPRRSG
MCSIMQFSRLPYRSG

SEQ ID NO: 91741 - protein, 15 aa, Artificial Sequence
  Description of Artificial Sequence: Synthetic peptide
  Seed: MCSLMQGSTLPRRSG
MCSIMQFSSLPARSG

SEQ ID NO: 91742 - protein, 15 aa, Artificial Sequence
  Description of Artificial Sequence: Synthetic peptide
  Seed: MCSLMQGSTLPRRSG
MCSIMQFSTLPARSG

SEQ ID NO: 91743 - protein, 15 aa, Artificial Sequence
  Description of Artificial Sequence: Synthetic peptide
  Seed: MCSLMQGSTLPRRSG
MCSIMQFSTLPSRSG

SEQ ID NO: 91744 - protein, 15 aa, Artificial Sequence
  Description of Artificial Sequence: Synthetic peptide
  Seed: MCSLMQGSTLPRRSG
MCSIMQISALPARSG

SEQ ID NO: 91745 - protein, 15 aa, Artificial Sequence
  Description of Artificial Sequence: Synthetic peptide
  Seed: MCSLMQGSTLPRRSG
MCSIMQISALPIRSG

SEQ ID NO: 91746 - protein, 15 aa, Artificial Sequence
  Description of Artificial Sequence: Synthetic peptide
  Seed: MCSLMQGSTLPRRSG
MCSIMQISALPLRSG

SEQ ID NO: 91747 - protein, 15 aa, Artificial Sequence
  Description of Artificial Sequence: Synthetic peptide
  Seed: MCSLMQGSTLPRRSG
MCSIMQISALPRRSG

SEQ ID NO: 91748 - protein, 15 aa, Artificial Sequence
  Description of Artificial Sequence: Synthetic peptide
  Seed: MCSLMQGSTLPRRSG
MCSIMQISALPVRSG

SEQ ID NO: 91749 - protein, 15 aa, Artificial Sequence
  Description of Artificial Sequence: Synthetic peptide
  Seed: MCSLMQGSTLPRRSG
MCSIMQISGLPARSG

SEQ ID NO: 91750 - protein, 15 aa, Artificial Sequence
  Description of Artificial Sequence: Synthetic peptide
  Seed: MCSLMQGSTLPRRSG
MCSIMQISGLPIRSG

SEQ ID NO: 91751 - protein, 15 aa, Artificial Sequence
  Description of Artificial Sequence: Synthetic peptide
  Seed: MCSLMQGSTLPRRSG
MCSIMQISGLPLRSG

SEQ ID NO: 91752 - protein, 15 aa, Artificial Sequence
  Description of Artificial Sequence: Synthetic peptide
  Seed: MCSLMQGSTLPRRSG
MCSIMQISGLPVRSG

SEQ ID NO: 91753 - protein, 15 aa, Artificial Sequence
  Description of Artificial Sequence: Synthetic peptide
  Seed: MCSLMQGSTLPRRSG
MCSIMQISKLPARSG

SEQ ID NO: 91754 - protein, 15 aa, Artificial Sequence
  Description of Artificial Sequence: Synthetic peptide
  Seed: MCSLMQGSTLPRRSG
MCSIMQISKLPGRSG

SEQ ID NO: 91755 - protein, 15 aa, Artificial Sequence
  Description of Artificial Sequence: Synthetic peptide
  Seed: MCSLMQGSTLPRRSG
MCSIMQISKLPHRSG

SEQ ID NO: 91756 - protein, 15 aa, Artificial Sequence
  Description of Artificial Sequence: Synthetic peptide
  Seed: MCSLMQGSTLPRRSG
MCSIMQISKLPIRSG

SEQ ID NO: 91757 - protein, 15 aa, Artificial Sequence
  Description of Artificial Sequence: Synthetic peptide
  Seed: MCSLMQGSTLPRRSG
MCSIMQISKLPKRSG

SEQ ID NO: 91758 - protein, 15 aa, Artificial Sequence
  Description of Artificial Sequence: Synthetic peptide
  Seed: MCSLMQGSTLPRRSG
MCSIMQISKLPLRSG

SEQ ID NO: 91759 - protein, 15 aa, Artificial Sequence
  Description of Artificial Sequence: Synthetic peptide
  Seed: MCSLMQGSTLPRRSG
MCSIMQISKLPMRSG

SEQ ID NO: 91760 - protein, 15 aa, Artificial Sequence
  Description of Artificial Sequence: Synthetic peptide
  Seed: MCSLMQGSTLPRRSG
MCSIMQISKLPNRSG

SEQ ID NO: 91761 - protein, 15 aa, Artificial Sequence
  Description of Artificial Sequence: Synthetic peptide
  Seed: MCSLMQGSTLPRRSG
MCSIMQISKLPQRSG

SEQ ID NO: 91762 - protein, 15 aa, Artificial Sequence
  Description of Artificial Sequence: Synthetic peptide
  Seed: MCSLMQGSTLPRRSG
MCSIMQISKLPRRSG

SEQ ID NO: 91763 - protein, 15 aa, Artificial Sequence
  Description of Artificial Sequence: Synthetic peptide
  Seed: MCSLMQGSTLPRRSG
MCSIMQISKLPSRSG

SEQ ID NO: 91764 - protein, 15 aa, Artificial Sequence
  Description of Artificial Sequence: Synthetic peptide
  Seed: MCSLMQGSTLPRRSG
MCSIMQISKLPTRSG

SEQ ID NO: 91765 - protein, 15 aa, Artificial Sequence
  Description of Artificial Sequence: Synthetic peptide
  Seed: MCSLMQGSTLPRRSG
MCSIMQISKLPVRSG

SEQ ID NO: 91766 - protein, 15 aa, Artificial Sequence
  Description of Artificial Sequence: Synthetic peptide
  Seed: MCSLMQGSTLPRRSG
MCSIMQISNLPARSG

SEQ ID NO: 91767 - protein, 15 aa, Artificial Sequence
  Description of Artificial Sequence: Synthetic peptide
  Seed: MCSLMQGSTLPRRSG
MCSIMQISNLPGRSG

SEQ ID NO: 91768 - protein, 15 aa, Artificial Sequence
  Description of Artificial Sequence: Synthetic peptide
  Seed: MCSLMQGSTLPRRSG
MCSIMQISNLPSRSG

SEQ ID NO: 91769 - protein, 15 aa, Artificial Sequence
  Description of Artificial Sequence: Synthetic peptide
  Seed: MCSLMQGSTLPRRSG
MCSIMQISRLPARSG

SEQ ID NO: 91770 - protein, 15 aa, Artificial Sequence
  Description of Artificial Sequence: Synthetic peptide
  Seed: MCSLMQGSTLPRRSG
MCSIMQISRLPFRSG

SEQ ID NO: 91771 - protein, 15 aa, Artificial Sequence
  Description of Artificial Sequence: Synthetic peptide
  Seed: MCSLMQGSTLPRRSG
MCSIMQISRLPGRSG

SEQ ID NO: 91772 - protein, 15 aa, Artificial Sequence
  Description of Artificial Sequence: Synthetic peptide
  Seed: MCSLMQGSTLPRRSG
MCSIMQISRLPHRSG

SEQ ID NO: 91773 - protein, 15 aa, Artificial Sequence
  Description of Artificial Sequence: Synthetic peptide
  Seed: MCSLMQGSTLPRRSG
MCSIMQISRLPIRSG

SEQ ID NO: 91774 - protein, 15 aa, Artificial Sequence
  Description of Artificial Sequence: Synthetic peptide
  Seed: MCSLMQGSTLPRRSG
MCSIMQISRLPKRSG

SEQ ID NO: 91775 - protein, 15 aa, Artificial Sequence
  Description of Artificial Sequence: Synthetic peptide
  Seed: MCSLMQGSTLPRRSG
MCSIMQISRLPLRSG

SEQ ID NO: 91776 - protein, 15 aa, Artificial Sequence
  Description of Artificial Sequence: Synthetic peptide
  Seed: MCSLMQGSTLPRRSG
MCSIMQISRLPMRSG

SEQ ID NO: 91777 - protein, 15 aa, Artificial Sequence
  Description of Artificial Sequence: Synthetic peptide
  Seed: MCSLMQGSTLPRRSG
MCSIMQISRLPNRSG

SEQ ID NO: 91778 - protein, 15 aa, Artificial Sequence
  Description of Artificial Sequence: Synthetic peptide
  Seed: MCSLMQGSTLPRRSG
MCSIMQISRLPPRSG

SEQ ID NO: 91779 - protein, 15 aa, Artificial Sequence
  Description of Artificial Sequence: Synthetic peptide
  Seed: MCSLMQGSTLPRRSG
MCSIMQISRLPQRSG

SEQ ID NO: 91780 - protein, 15 aa, Artificial Sequence
  Description of Artificial Sequence: Synthetic peptide
  Seed: MCSLMQGSTLPRRSG
MCSIMQISRLPRRSG

SEQ ID NO: 91781 - protein, 15 aa, Artificial Sequence
  Description of Artificial Sequence: Synthetic peptide
  Seed: MCSLMQGSTLPRRSG
MCSIMQISRLPSRSG

SEQ ID NO: 91782 - protein, 15 aa, Artificial Sequence
  Description of Artificial Sequence: Synthetic peptide
  Seed: MCSLMQGSTLPRRSG
MCSIMQISRLPTRSG

SEQ ID NO: 91783 - protein, 15 aa, Artificial Sequence
  Description of Artificial Sequence: Synthetic peptide
  Seed: MCSLMQGSTLPRRSG
MCSIMQISRLPVRSG

SEQ ID NO: 91784 - protein, 15 aa, Artificial Sequence
  Description of Artificial Sequence: Synthetic peptide
  Seed: MCSLMQGSTLPRRSG
MCSIMQISRLPYRSG

SEQ ID NO: 91785 - protein, 15 aa, Artificial Sequence
  Description of Artificial Sequence: Synthetic peptide
  Seed: MCSLMQGSTLPRRSG
MCSIMQISSLPARSG

SEQ ID NO: 91786 - protein, 15 aa, Artificial Sequence
  Description of Artificial Sequence: Synthetic peptide
  Seed: MCSLMQGSTLPRRSG
MCSIMQISSLPGRSG

SEQ ID NO: 91787 - protein, 15 aa, Artificial Sequence
  Description of Artificial Sequence: Synthetic peptide
  Seed: MCSLMQGSTLPRRSG
MCSIMQISSLPLRSG

SEQ ID NO: 91788 - protein, 15 aa, Artificial Sequence
  Description of Artificial Sequence: Synthetic peptide
  Seed: MCSLMQGSTLPRRSG
MCSIMQISSLPSRSG

SEQ ID NO: 91789 - protein, 15 aa, Artificial Sequence
  Description of Artificial Sequence: Synthetic peptide
  Seed: MCSLMQGSTLPRRSG
MCSIMQISTLPARSG

SEQ ID NO: 91790 - protein, 15 aa, Artificial Sequence
  Description of Artificial Sequence: Synthetic peptide
  Seed: MCSLMQGSTLPRRSG
MCSIMQISTLPGRSG

SEQ ID NO: 91791 - protein, 15 aa, Artificial Sequence
  Description of Artificial Sequence: Synthetic peptide
  Seed: MCSLMQGSTLPRRSG
MCSIMQISTLPQRSG

SEQ ID NO: 91792 - protein, 15 aa, Artificial Sequence
  Description of Artificial Sequence: Synthetic peptide
  Seed: MCSLMQGSTLPRRSG
MCSIMQISTLPSRSG

SEQ ID NO: 91793 - protein, 15 aa, Artificial Sequence
  Description of Artificial Sequence: Synthetic peptide
  Seed: MCSLMQGSTLPRRSG
MCSIMQISTLPTRSG

SEQ ID NO: 91794 - protein, 15 aa, Artificial Sequence
  Description of Artificial Sequence: Synthetic peptide
  Seed: MCSLMQGSTLPRRSG
MCSIMQISVLPRRSG

SEQ ID NO: 91795 - protein, 15 aa, Artificial Sequence
  Description of Artificial Sequence: Synthetic peptide
  Seed: MCSLMQGSTLPRRSG
MCSIMQISVLPSRSG

SEQ ID NO: 91796 - protein, 15 aa, Artificial Sequence
  Description of Artificial Sequence: Synthetic peptide
  Seed: MCSLMQGSTLPRRSG
MCSIMQLSALPARSG

SEQ ID NO: 91797 - protein, 15 aa, Artificial Sequence
  Description of Artificial Sequence: Synthetic peptide
  Seed: MCSLMQGSTLPRRSG
MCSIMQLSALPIRSG

SEQ ID NO: 91798 - protein, 15 aa, Artificial Sequence
  Description of Artificial Sequence: Synthetic peptide
  Seed: MCSLMQGSTLPRRSG
MCSIMQLSALPLRSG

SEQ ID NO: 91799 - protein, 15 aa, Artificial Sequence
  Description of Artificial Sequence: Synthetic peptide
  Seed: MCSLMQGSTLPRRSG
MCSIMQLSALPMRSG

SEQ ID NO: 91800 - protein, 15 aa, Artificial Sequence
  Description of Artificial Sequence: Synthetic peptide
  Seed: MCSLMQGSTLPRRSG
MCSIMQLSALPSRSG

SEQ ID NO: 91801 - protein, 15 aa, Artificial Sequence
  Description of Artificial Sequence: Synthetic peptide
  Seed: MCSLMQGSTLPRRSG
MCSIMQLSALPTRSG

SEQ ID NO: 91802 - protein, 15 aa, Artificial Sequence
  Description of Artificial Sequence: Synthetic peptide
  Seed: MCSLMQGSTLPRRSG
MCSIMQLSALPVRSG

SEQ ID NO: 91803 - protein, 15 aa, Artificial Sequence
  Description of Artificial Sequence: Synthetic peptide
  Seed: MCSLMQGSTLPRRSG
MCSIMQLSGLPARSG

SEQ ID NO: 91804 - protein, 15 aa, Artificial Sequence
  Description of Artificial Sequence: Synthetic peptide
  Seed: MCSLMQGSTLPRRSG
MCSIMQLSGLPIRSG

SEQ ID NO: 91805 - protein, 15 aa, Artificial Sequence
  Description of Artificial Sequence: Synthetic peptide
  Seed: MCSLMQGSTLPRRSG
MCSIMQLSGLPLRSG

SEQ ID NO: 91806 - protein, 15 aa, Artificial Sequence
  Description of Artificial Sequence: Synthetic peptide
  Seed: MCSLMQGSTLPRRSG
MCSIMQLSGLPMRSG

SEQ ID NO: 91807 - protein, 15 aa, Artificial Sequence
  Description of Artificial Sequence: Synthetic peptide
  Seed: MCSLMQGSTLPRRSG
MCSIMQLSGLPTRSG

SEQ ID NO: 91808 - protein, 15 aa, Artificial Sequence
  Description of Artificial Sequence: Synthetic peptide
  Seed: MCSLMQGSTLPRRSG
MCSIMQLSGLPVRSG

SEQ ID NO: 91809 - protein, 15 aa, Artificial Sequence
  Description of Artificial Sequence: Synthetic peptide
  Seed: MCSLMQGSTLPRRSG
MCSIMQLSHLPRRSG

SEQ ID NO: 91810 - protein, 15 aa, Artificial Sequence
  Description of Artificial Sequence: Synthetic peptide
  Seed: MCSLMQGSTLPRRSG
MCSIMQLSKLPARSG

SEQ ID NO: 91811 - protein, 15 aa, Artificial Sequence
  Description of Artificial Sequence: Synthetic peptide
  Seed: MCSLMQGSTLPRRSG
MCSIMQLSKLPGRSG

SEQ ID NO: 91812 - protein, 15 aa, Artificial Sequence
  Description of Artificial Sequence: Synthetic peptide
  Seed: MCSLMQGSTLPRRSG
MCSIMQLSKLPHRSG

SEQ ID NO: 91813 - protein, 15 aa, Artificial Sequence
  Description of Artificial Sequence: Synthetic peptide
  Seed: MCSLMQGSTLPRRSG
MCSIMQLSKLPIRSG

SEQ ID NO: 91814 - protein, 15 aa, Artificial Sequence
  Description of Artificial Sequence: Synthetic peptide
  Seed: MCSLMQGSTLPRRSG
MCSIMQLSKLPKRSG

SEQ ID NO: 91815 - protein, 15 aa, Artificial Sequence
  Description of Artificial Sequence: Synthetic peptide
  Seed: MCSLMQGSTLPRRSG
MCSIMQLSKLPLRSG

SEQ ID NO: 91816 - protein, 15 aa, Artificial Sequence
  Description of Artificial Sequence: Synthetic peptide
  Seed: MCSLMQGSTLPRRSG
MCSIMQLSKLPMRSG

SEQ ID NO: 91817 - protein, 15 aa, Artificial Sequence
  Description of Artificial Sequence: Synthetic peptide
  Seed: MCSLMQGSTLPRRSG
MCSIMQLSKLPNRSG

SEQ ID NO: 91818 - protein, 15 aa, Artificial Sequence
  Description of Artificial Sequence: Synthetic peptide
  Seed: MCSLMQGSTLPRRSG
MCSIMQLSKLPQRSG

SEQ ID NO: 91819 - protein, 15 aa, Artificial Sequence
  Description of Artificial Sequence: Synthetic peptide
  Seed: MCSLMQGSTLPRRSG
MCSIMQLSKLPRRSG

SEQ ID NO: 91820 - protein, 15 aa, Artificial Sequence
  Description of Artificial Sequence: Synthetic peptide
  Seed: MCSLMQGSTLPRRSG
MCSIMQLSKLPSRSG

SEQ ID NO: 91821 - protein, 15 aa, Artificial Sequence
  Description of Artificial Sequence: Synthetic peptide
  Seed: MCSLMQGSTLPRRSG
MCSIMQLSKLPTRSG

SEQ ID NO: 91822 - protein, 15 aa, Artificial Sequence
  Description of Artificial Sequence: Synthetic peptide
  Seed: MCSLMQGSTLPRRSG
MCSIMQLSKLPVRSG

SEQ ID NO: 91823 - protein, 15 aa, Artificial Sequence
  Description of Artificial Sequence: Synthetic peptide
  Seed: MCSLMQGSTLPRRSG
MCSIMQLSNLPARSG

SEQ ID NO: 91824 - protein, 15 aa, Artificial Sequence
  Description of Artificial Sequence: Synthetic peptide
  Seed: MCSLMQGSTLPRRSG
MCSIMQLSNLPSRSG

SEQ ID NO: 91825 - protein, 15 aa, Artificial Sequence
  Description of Artificial Sequence: Synthetic peptide
  Seed: MCSLMQGSTLPRRSG
MCSIMQLSPLPARSG

SEQ ID NO: 91826 - protein, 15 aa, Artificial Sequence
  Description of Artificial Sequence: Synthetic peptide
  Seed: MCSLMQGSTLPRRSG
MCSIMQLSPLPIRSG

SEQ ID NO: 91827 - protein, 15 aa, Artificial Sequence
  Description of Artificial Sequence: Synthetic peptide
  Seed: MCSLMQGSTLPRRSG
MCSIMQLSPLPLRSG

SEQ ID NO: 91828 - protein, 15 aa, Artificial Sequence
  Description of Artificial Sequence: Synthetic peptide
  Seed: MCSLMQGSTLPRRSG
MCSIMQLSPLPMRSG

SEQ ID NO: 91829 - protein, 15 aa, Artificial Sequence
  Description of Artificial Sequence: Synthetic peptide
  Seed: MCSLMQGSTLPRRSG
MCSIMQLSPLPVRSG

SEQ ID NO: 91830 - protein, 15 aa, Artificial Sequence
  Description of Artificial Sequence: Synthetic peptide
  Seed: MCSLMQGSTLPRRSG
MCSIMQLSRLPARSG

SEQ ID NO: 91831 - protein, 15 aa, Artificial Sequence
  Description of Artificial Sequence: Synthetic peptide
  Seed: MCSLMQGSTLPRRSG
MCSIMQLSRLPGRSG

SEQ ID NO: 91832 - protein, 15 aa, Artificial Sequence
  Description of Artificial Sequence: Synthetic peptide
  Seed: MCSLMQGSTLPRRSG
MCSIMQLSRLPHRSG

SEQ ID NO: 91833 - protein, 15 aa, Artificial Sequence
  Description of Artificial Sequence: Synthetic peptide
  Seed: MCSLMQGSTLPRRSG
MCSIMQLSRLPIRSG

SEQ ID NO: 91834 - protein, 15 aa, Artificial Sequence
  Description of Artificial Sequence: Synthetic peptide
  Seed: MCSLMQGSTLPRRSG
MCSIMQLSRLPKRSG

SEQ ID NO: 91835 - protein, 15 aa, Artificial Sequence
  Description of Artificial Sequence: Synthetic peptide
  Seed: MCSLMQGSTLPRRSG
MCSIMQLSRLPLRSG

SEQ ID NO: 91836 - protein, 15 aa, Artificial Sequence
  Description of Artificial Sequence: Synthetic peptide
  Seed: MCSLMQGSTLPRRSG
MCSIMQLSRLPMRSG

SEQ ID NO: 91837 - protein, 15 aa, Artificial Sequence
  Description of Artificial Sequence: Synthetic peptide
  Seed: MCSLMQGSTLPRRSG
MCSIMQLSRLPNRSG

SEQ ID NO: 91838 - protein, 15 aa, Artificial Sequence
  Description of Artificial Sequence: Synthetic peptide
  Seed: MCSLMQGSTLPRRSG
MCSIMQLSRLPPRSG

SEQ ID NO: 91839 - protein, 15 aa, Artificial Sequence
  Description of Artificial Sequence: Synthetic peptide
  Seed: MCSLMQGSTLPRRSG
MCSIMQLSRLPQRSG

SEQ ID NO: 91840 - protein, 15 aa, Artificial Sequence
  Description of Artificial Sequence: Synthetic peptide
  Seed: MCSLMQGSTLPRRSG
MCSIMQLSRLPRRSG

SEQ ID NO: 91841 - protein, 15 aa, Artificial Sequence
  Description of Artificial Sequence: Synthetic peptide
  Seed: MCSLMQGSTLPRRSG
MCSIMQLSRLPSRSG

SEQ ID NO: 91842 - protein, 15 aa, Artificial Sequence
  Description of Artificial Sequence: Synthetic peptide
  Seed: MCSLMQGSTLPRRSG
MCSIMQLSRLPTRSG

SEQ ID NO: 91843 - protein, 15 aa, Artificial Sequence
  Description of Artificial Sequence: Synthetic peptide
  Seed: MCSLMQGSTLPRRSG
MCSIMQLSRLPVRSG

SEQ ID NO: 91844 - protein, 15 aa, Artificial Sequence
  Description of Artificial Sequence: Synthetic peptide
  Seed: MCSLMQGSTLPRRSG
MCSIMQLSRLPYRSG

SEQ ID NO: 91845 - protein, 15 aa, Artificial Sequence
  Description of Artificial Sequence: Synthetic peptide
  Seed: MCSLMQGSTLPRRSG
MCSIMQLSSLPARSG

SEQ ID NO: 91846 - protein, 15 aa, Artificial Sequence
  Description of Artificial Sequence: Synthetic peptide
  Seed: MCSLMQGSTLPRRSG
MCSIMQLSSLPIRSG

SEQ ID NO: 91847 - protein, 15 aa, Artificial Sequence
  Description of Artificial Sequence: Synthetic peptide
  Seed: MCSLMQGSTLPRRSG
MCSIMQLSSLPLRSG

SEQ ID NO: 91848 - protein, 15 aa, Artificial Sequence
  Description of Artificial Sequence: Synthetic peptide
  Seed: MCSLMQGSTLPRRSG
MCSIMQLSSLPMRSG

SEQ ID NO: 91849 - protein, 15 aa, Artificial Sequence
  Description of Artificial Sequence: Synthetic peptide
  Seed: MCSLMQGSTLPRRSG
MCSIMQLSSLPSRSG

SEQ ID NO: 91850 - protein, 15 aa, Artificial Sequence
  Description of Artificial Sequence: Synthetic peptide
  Seed: MCSLMQGSTLPRRSG
MCSIMQLSSLPTRSG

SEQ ID NO: 91851 - protein, 15 aa, Artificial Sequence
  Description of Artificial Sequence: Synthetic peptide
  Seed: MCSLMQGSTLPRRSG
MCSIMQLSSLPVRSG

SEQ ID NO: 91852 - protein, 15 aa, Artificial Sequence
  Description of Artificial Sequence: Synthetic peptide
  Seed: MCSLMQGSTLPRRSG
MCSIMQLSTLPARSG

SEQ ID NO: 91853 - protein, 15 aa, Artificial Sequence
  Description of Artificial Sequence: Synthetic peptide
  Seed: MCSLMQGSTLPRRSG
MCSIMQLSTLPLRSG

SEQ ID NO: 91854 - protein, 15 aa, Artificial Sequence
  Description of Artificial Sequence: Synthetic peptide
  Seed: MCSLMQGSTLPRRSG
MCSIMQLSTLPSRSG

SEQ ID NO: 91855 - protein, 15 aa, Artificial Sequence
  Description of Artificial Sequence: Synthetic peptide
  Seed: MCSLMQGSTLPRRSG
MCSIMQLSTLPVRSG

SEQ ID NO: 91856 - protein, 15 aa, Artificial Sequence
  Description of Artificial Sequence: Synthetic peptide
  Seed: MCSLMQGSTLPRRSG
MCSIMQMSALPARSG

SEQ ID NO: 91857 - protein, 15 aa, Artificial Sequence
  Description of Artificial Sequence: Synthetic peptide
  Seed: MCSLMQGSTLPRRSG
MCSIMQMSALPIRSG

SEQ ID NO: 91858 - protein, 15 aa, Artificial Sequence
  Description of Artificial Sequence: Synthetic peptide
  Seed: MCSLMQGSTLPRRSG
MCSIMQMSALPLRSG

SEQ ID NO: 91859 - protein, 15 aa, Artificial Sequence
  Description of Artificial Sequence: Synthetic peptide
  Seed: MCSLMQGSTLPRRSG
MCSIMQMSALPMRSG

SEQ ID NO: 91860 - protein, 15 aa, Artificial Sequence
  Description of Artificial Sequence: Synthetic peptide
  Seed: MCSLMQGSTLPRRSG
MCSIMQMSALPSRSG

SEQ ID NO: 91861 - protein, 15 aa, Artificial Sequence
  Description of Artificial Sequence: Synthetic peptide
  Seed: MCSLMQGSTLPRRSG
MCSIMQMSALPTRSG

SEQ ID NO: 91862 - protein, 15 aa, Artificial Sequence
  Description of Artificial Sequence: Synthetic peptide
  Seed: MCSLMQGSTLPRRSG
MCSIMQMSALPVRSG

SEQ ID NO: 91863 - protein, 15 aa, Artificial Sequence
  Description of Artificial Sequence: Synthetic peptide
  Seed: MCSLMQGSTLPRRSG
MCSIMQMSGLPARSG

SEQ ID NO: 91864 - protein, 15 aa, Artificial Sequence
  Description of Artificial Sequence: Synthetic peptide
  Seed: MCSLMQGSTLPRRSG
MCSIMQMSGLPIRSG

SEQ ID NO: 91865 - protein, 15 aa, Artificial Sequence
  Description of Artificial Sequence: Synthetic peptide
  Seed: MCSLMQGSTLPRRSG
MCSIMQMSGLPLRSG

SEQ ID NO: 91866 - protein, 15 aa, Artificial Sequence
  Description of Artificial Sequence: Synthetic peptide
  Seed: MCSLMQGSTLPRRSG
MCSIMQMSGLPMRSG

SEQ ID NO: 91867 - protein, 15 aa, Artificial Sequence
  Description of Artificial Sequence: Synthetic peptide
  Seed: MCSLMQGSTLPRRSG
MCSIMQMSGLPVRSG

SEQ ID NO: 91868 - protein, 15 aa, Artificial Sequence
  Description of Artificial Sequence: Synthetic peptide
  Seed: MCSLMQGSTLPRRSG
MCSIMQMSKLPARSG

SEQ ID NO: 91869 - protein, 15 aa, Artificial Sequence
  Description of Artificial Sequence: Synthetic peptide
  Seed: MCSLMQGSTLPRRSG
MCSIMQMSKLPGRSG

SEQ ID NO: 91870 - protein, 15 aa, Artificial Sequence
  Description of Artificial Sequence: Synthetic peptide
  Seed: MCSLMQGSTLPRRSG
MCSIMQMSKLPHRSG

SEQ ID NO: 91871 - protein, 15 aa, Artificial Sequence
  Description of Artificial Sequence: Synthetic peptide
  Seed: MCSLMQGSTLPRRSG
MCSIMQMSKLPIRSG

SEQ ID NO: 91872 - protein, 15 aa, Artificial Sequence
  Description of Artificial Sequence: Synthetic peptide
  Seed: MCSLMQGSTLPRRSG
MCSIMQMSKLPKRSG

SEQ ID NO: 91873 - protein, 15 aa, Artificial Sequence
  Description of Artificial Sequence: Synthetic peptide
  Seed: MCSLMQGSTLPRRSG
MCSIMQMSKLPLRSG

SEQ ID NO: 91874 - protein, 15 aa, Artificial Sequence
  Description of Artificial Sequence: Synthetic peptide
  Seed: MCSLMQGSTLPRRSG
MCSIMQMSKLPMRSG

SEQ ID NO: 91875 - protein, 15 aa, Artificial Sequence
  Description of Artificial Sequence: Synthetic peptide
  Seed: MCSLMQGSTLPRRSG
MCSIMQMSKLPNRSG

SEQ ID NO: 91876 - protein, 15 aa, Artificial Sequence
  Description of Artificial Sequence: Synthetic peptide
  Seed: MCSLMQGSTLPRRSG
MCSIMQMSKLPPRSG

SEQ ID NO: 91877 - protein, 15 aa, Artificial Sequence
  Description of Artificial Sequence: Synthetic peptide
  Seed: MCSLMQGSTLPRRSG
MCSIMQMSKLPQRSG

SEQ ID NO: 91878 - protein, 15 aa, Artificial Sequence
  Description of Artificial Sequence: Synthetic peptide
  Seed: MCSLMQGSTLPRRSG
MCSIMQMSKLPRRSG

SEQ ID NO: 91879 - protein, 15 aa, Artificial Sequence
  Description of Artificial Sequence: Synthetic peptide
  Seed: MCSLMQGSTLPRRSG
MCSIMQMSKLPSRSG

SEQ ID NO: 91880 - protein, 15 aa, Artificial Sequence
  Description of Artificial Sequence: Synthetic peptide
  Seed: MCSLMQGSTLPRRSG
MCSIMQMSKLPTRSG

SEQ ID NO: 91881 - protein, 15 aa, Artificial Sequence
  Description of Artificial Sequence: Synthetic peptide
  Seed: MCSLMQGSTLPRRSG
MCSIMQMSKLPVRSG

SEQ ID NO: 91882 - protein, 15 aa, Artificial Sequence
  Description of Artificial Sequence: Synthetic peptide
  Seed: MCSLMQGSTLPRRSG
MCSIMQMSKLPYRSG

SEQ ID NO: 91883 - protein, 15 aa, Artificial Sequence
  Description of Artificial Sequence: Synthetic peptide
  Seed: MCSLMQGSTLPRRSG
MCSIMQMSNLPARSG

SEQ ID NO: 91884 - protein, 15 aa, Artificial Sequence
  Description of Artificial Sequence: Synthetic peptide
  Seed: MCSLMQGSTLPRRSG
MCSIMQMSNLPGRSG

SEQ ID NO: 91885 - protein, 15 aa, Artificial Sequence
  Description of Artificial Sequence: Synthetic peptide
  Seed: MCSLMQGSTLPRRSG
MCSIMQMSNLPQRSG

SEQ ID NO: 91886 - protein, 15 aa, Artificial Sequence
  Description of Artificial Sequence: Synthetic peptide
  Seed: MCSLMQGSTLPRRSG
MCSIMQMSNLPSRSG

SEQ ID NO: 91887 - protein, 15 aa, Artificial Sequence
  Description of Artificial Sequence: Synthetic peptide
  Seed: MCSLMQGSTLPRRSG
MCSIMQMSNLPTRSG

SEQ ID NO: 91888 - protein, 15 aa, Artificial Sequence
  Description of Artificial Sequence: Synthetic peptide
  Seed: MCSLMQGSTLPRRSG
MCSIMQMSPLPARSG

SEQ ID NO: 91889 - protein, 15 aa, Artificial Sequence
  Description of Artificial Sequence: Synthetic peptide
  Seed: MCSLMQGSTLPRRSG
MCSIMQMSPLPIRSG

SEQ ID NO: 91890 - protein, 15 aa, Artificial Sequence
  Description of Artificial Sequence: Synthetic peptide
  Seed: MCSLMQGSTLPRRSG
MCSIMQMSPLPLRSG

SEQ ID NO: 91891 - protein, 15 aa, Artificial Sequence
  Description of Artificial Sequence: Synthetic peptide
  Seed: MCSLMQGSTLPRRSG
MCSIMQMSPLPVRSG

SEQ ID NO: 91892 - protein, 15 aa, Artificial Sequence
  Description of Artificial Sequence: Synthetic peptide
  Seed: MCSLMQGSTLPRRSG
MCSIMQMSRLPARSG

SEQ ID NO: 91893 - protein, 15 aa, Artificial Sequence
  Description of Artificial Sequence: Synthetic peptide
  Seed: MCSLMQGSTLPRRSG
MCSIMQMSRLPFRSG

SEQ ID NO: 91894 - protein, 15 aa, Artificial Sequence
  Description of Artificial Sequence: Synthetic peptide
  Seed: MCSLMQGSTLPRRSG
MCSIMQMSRLPGRSG

SEQ ID NO: 91895 - protein, 15 aa, Artificial Sequence
  Description of Artificial Sequence: Synthetic peptide
  Seed: MCSLMQGSTLPRRSG
MCSIMQMSRLPHRSG

SEQ ID NO: 91896 - protein, 15 aa, Artificial Sequence
  Description of Artificial Sequence: Synthetic peptide
  Seed: MCSLMQGSTLPRRSG
MCSIMQMSRLPIRSG

SEQ ID NO: 91897 - protein, 15 aa, Artificial Sequence
  Description of Artificial Sequence: Synthetic peptide
  Seed: MCSLMQGSTLPRRSG
MCSIMQMSRLPKRSG

SEQ ID NO: 91898 - protein, 15 aa, Artificial Sequence
  Description of Artificial Sequence: Synthetic peptide
  Seed: MCSLMQGSTLPRRSG
MCSIMQMSRLPLRSG

SEQ ID NO: 91899 - protein, 15 aa, Artificial Sequence
  Description of Artificial Sequence: Synthetic peptide
  Seed: MCSLMQGSTLPRRSG
MCSIMQMSRLPMRSG

SEQ ID NO: 91900 - protein, 15 aa, Artificial Sequence
  Description of Artificial Sequence: Synthetic peptide
  Seed: MCSLMQGSTLPRRSG
MCSIMQMSRLPNRSG

SEQ ID NO: 91901 - protein, 15 aa, Artificial Sequence
  Description of Artificial Sequence: Synthetic peptide
  Seed: MCSLMQGSTLPRRSG
MCSIMQMSRLPPRSG

SEQ ID NO: 91902 - protein, 15 aa, Artificial Sequence
  Description of Artificial Sequence: Synthetic peptide
  Seed: MCSLMQGSTLPRRSG
MCSIMQMSRLPQRSG

SEQ ID NO: 91903 - protein, 15 aa, Artificial Sequence
  Description of Artificial Sequence: Synthetic peptide
  Seed: MCSLMQGSTLPRRSG
MCSIMQMSRLPRRSG

SEQ ID NO: 91904 - protein, 15 aa, Artificial Sequence
  Description of Artificial Sequence: Synthetic peptide
  Seed: MCSLMQGSTLPRRSG
MCSIMQMSRLPSRSG

SEQ ID NO: 91905 - protein, 15 aa, Artificial Sequence
  Description of Artificial Sequence: Synthetic peptide
  Seed: MCSLMQGSTLPRRSG
MCSIMQMSRLPTRSG

SEQ ID NO: 91906 - protein, 15 aa, Artificial Sequence
  Description of Artificial Sequence: Synthetic peptide
  Seed: MCSLMQGSTLPRRSG
MCSIMQMSRLPVRSG

SEQ ID NO: 91907 - protein, 15 aa, Artificial Sequence
  Description of Artificial Sequence: Synthetic peptide
  Seed: MCSLMQGSTLPRRSG
MCSIMQMSRLPYRSG

SEQ ID NO: 91908 - protein, 15 aa, Artificial Sequence
  Description of Artificial Sequence: Synthetic peptide
  Seed: MCSLMQGSTLPRRSG
MCSIMQMSSLPARSG

SEQ ID NO: 91909 - protein, 15 aa, Artificial Sequence
  Description of Artificial Sequence: Synthetic peptide
  Seed: MCSLMQGSTLPRRSG
MCSIMQMSSLPIRSG

SEQ ID NO: 91910 - protein, 15 aa, Artificial Sequence
  Description of Artificial Sequence: Synthetic peptide
  Seed: MCSLMQGSTLPRRSG
MCSIMQMSSLPLRSG

SEQ ID NO: 91911 - protein, 15 aa, Artificial Sequence
  Description of Artificial Sequence: Synthetic peptide
  Seed: MCSLMQGSTLPRRSG
MCSIMQMSSLPMRSG

SEQ ID NO: 91912 - protein, 15 aa, Artificial Sequence
  Description of Artificial Sequence: Synthetic peptide
  Seed: MCSLMQGSTLPRRSG
MCSIMQMSSLPQRSG

SEQ ID NO: 91913 - protein, 15 aa, Artificial Sequence
  Description of Artificial Sequence: Synthetic peptide
  Seed: MCSLMQGSTLPRRSG
MCSIMQMSSLPSRSG

SEQ ID NO: 91914 - protein, 15 aa, Artificial Sequence
  Description of Artificial Sequence: Synthetic peptide
  Seed: MCSLMQGSTLPRRSG
MCSIMQMSSLPTRSG

SEQ ID NO: 91915 - protein, 15 aa, Artificial Sequence
  Description of Artificial Sequence: Synthetic peptide
  Seed: MCSLMQGSTLPRRSG
MCSIMQMSSLPVRSG

SEQ ID NO: 91916 - protein, 15 aa, Artificial Sequence
  Description of Artificial Sequence: Synthetic peptide
  Seed: MCSLMQGSTLPRRSG
MCSIMQMSTLPARSG

SEQ ID NO: 91917 - protein, 15 aa, Artificial Sequence
  Description of Artificial Sequence: Synthetic peptide
  Seed: MCSLMQGSTLPRRSG
MCSIMQMSTLPGRSG

SEQ ID NO: 91918 - protein, 15 aa, Artificial Sequence
  Description of Artificial Sequence: Synthetic peptide
  Seed: MCSLMQGSTLPRRSG
MCSIMQMSTLPHRSG

SEQ ID NO: 91919 - protein, 15 aa, Artificial Sequence
  Description of Artificial Sequence: Synthetic peptide
  Seed: MCSLMQGSTLPRRSG
MCSIMQMSTLPLRSG

SEQ ID NO: 91920 - protein, 15 aa, Artificial Sequence
  Description of Artificial Sequence: Synthetic peptide
  Seed: MCSLMQGSTLPRRSG
MCSIMQMSTLPMRSG

SEQ ID NO: 91921 - protein, 15 aa, Artificial Sequence
  Description of Artificial Sequence: Synthetic peptide
  Seed: MCSLMQGSTLPRRSG
MCSIMQMSTLPQRSG

SEQ ID NO: 91922 - protein, 15 aa, Artificial Sequence
  Description of Artificial Sequence: Synthetic peptide
  Seed: MCSLMQGSTLPRRSG
MCSIMQMSTLPSRSG

SEQ ID NO: 91923 - protein, 15 aa, Artificial Sequence
  Description of Artificial Sequence: Synthetic peptide
  Seed: MCSLMQGSTLPRRSG
MCSIMQMSTLPTRSG

SEQ ID NO: 91924 - protein, 15 aa, Artificial Sequence
  Description of Artificial Sequence: Synthetic peptide
  Seed: MCSLMQGSTLPRRSG
MCSIMQMSTLPVRSG

SEQ ID NO: 91925 - protein, 15 aa, Artificial Sequence
  Description of Artificial Sequence: Synthetic peptide
  Seed: MCSLMQGSTLPRRSG
MCSIMQMSVLPARSG

SEQ ID NO: 91926 - protein, 15 aa, Artificial Sequence
  Description of Artificial Sequence: Synthetic peptide
  Seed: MCSLMQGSTLPRRSG
MCSIMQMSVLPSRSG

SEQ ID NO: 91927 - protein, 15 aa, Artificial Sequence
  Description of Artificial Sequence: Synthetic peptide
  Seed: MCSLMQGSTLPRRSG
MCSIMQQSALPIRSG

SEQ ID NO: 91928 - protein, 15 aa, Artificial Sequence
  Description of Artificial Sequence: Synthetic peptide
  Seed: MCSLMQGSTLPRRSG
MCSIMQQSALPLRSG

SEQ ID NO: 91929 - protein, 15 aa, Artificial Sequence
  Description of Artificial Sequence: Synthetic peptide
  Seed: MCSLMQGSTLPRRSG
MCSIMQQSALPVRSG

SEQ ID NO: 91930 - protein, 15 aa, Artificial Sequence
  Description of Artificial Sequence: Synthetic peptide
  Seed: MCSLMQGSTLPRRSG
MCSIMQRSRLPFRSG

SEQ ID NO: 91931 - protein, 15 aa, Artificial Sequence
  Description of Artificial Sequence: Synthetic peptide
  Seed: MCSLMQGSTLPRRSG
MCSIMQRSRLPIRSG

SEQ ID NO: 91932 - protein, 15 aa, Artificial Sequence
  Description of Artificial Sequence: Synthetic peptide
  Seed: MCSLMQGSTLPRRSG
MCSIMQRSRLPLRSG

SEQ ID NO: 91933 - protein, 15 aa, Artificial Sequence
  Description of Artificial Sequence: Synthetic peptide
  Seed: MCSLMQGSTLPRRSG
MCSIMQRSRLPMRSG

SEQ ID NO: 91934 - protein, 15 aa, Artificial Sequence
  Description of Artificial Sequence: Synthetic peptide
  Seed: MCSLMQGSTLPRRSG
MCSIMQRSRLPVRSG

SEQ ID NO: 91935 - protein, 15 aa, Artificial Sequence
  Description of Artificial Sequence: Synthetic peptide
  Seed: MCSLMQGSTLPRRSG
MCSIMQRSRLPYRSG

SEQ ID NO: 91936 - protein, 15 aa, Artificial Sequence
  Description of Artificial Sequence: Synthetic peptide
  Seed: MCSLMQGSTLPRRSG
MCSIMQSSALPIRSG

SEQ ID NO: 91937 - protein, 15 aa, Artificial Sequence
  Description of Artificial Sequence: Synthetic peptide
  Seed: MCSLMQGSTLPRRSG
MCSIMQSSALPLRSG

SEQ ID NO: 91938 - protein, 15 aa, Artificial Sequence
  Description of Artificial Sequence: Synthetic peptide
  Seed: MCSLMQGSTLPRRSG
MCSIMQSSALPVRSG

SEQ ID NO: 91939 - protein, 15 aa, Artificial Sequence
  Description of Artificial Sequence: Synthetic peptide
  Seed: MCSLMQGSTLPRRSG
MCSIMQSSSLPIRSG

SEQ ID NO: 91940 - protein, 15 aa, Artificial Sequence
  Description of Artificial Sequence: Synthetic peptide
  Seed: MCSLMQGSTLPRRSG
MCSIMQTSALPIRSG

SEQ ID NO: 91941 - protein, 15 aa, Artificial Sequence
  Description of Artificial Sequence: Synthetic peptide
  Seed: MCSLMQGSTLPRRSG
MCSIMQTSRLPSRSG

SEQ ID NO: 91942 - protein, 15 aa, Artificial Sequence
  Description of Artificial Sequence: Synthetic peptide
  Seed: MCSLMQGSTLPRRSG
MCSIMQVSALPLRSG

SEQ ID NO: 91943 - protein, 15 aa, Artificial Sequence
  Description of Artificial Sequence: Synthetic peptide
  Seed: MCSLMQGSTLPRRSG
MCSIMQVSALPVRSG

SEQ ID NO: 91944 - protein, 15 aa, Artificial Sequence
  Description of Artificial Sequence: Synthetic peptide
  Seed: MCSLMQGSTLPRRSG
MCSIMQVSKLPARSG

SEQ ID NO: 91945 - protein, 15 aa, Artificial Sequence
  Description of Artificial Sequence: Synthetic peptide
  Seed: MCSLMQGSTLPRRSG
MCSIMQVSKLPGRSG

SEQ ID NO: 91946 - protein, 15 aa, Artificial Sequence
  Description of Artificial Sequence: Synthetic peptide
  Seed: MCSLMQGSTLPRRSG
MCSIMQVSKLPHRSG

SEQ ID NO: 91947 - protein, 15 aa, Artificial Sequence
  Description of Artificial Sequence: Synthetic peptide
  Seed: MCSLMQGSTLPRRSG
MCSIMQVSKLPKRSG

SEQ ID NO: 91948 - protein, 15 aa, Artificial Sequence
  Description of Artificial Sequence: Synthetic peptide
  Seed: MCSLMQGSTLPRRSG
MCSIMQVSKLPQRSG

SEQ ID NO: 91949 - protein, 15 aa, Artificial Sequence
  Description of Artificial Sequence: Synthetic peptide
  Seed: MCSLMQGSTLPRRSG
MCSIMQVSKLPRRSG

SEQ ID NO: 91950 - protein, 15 aa, Artificial Sequence
  Description of Artificial Sequence: Synthetic peptide
  Seed: MCSLMQGSTLPRRSG
MCSIMQVSKLPSRSG

SEQ ID NO: 91951 - protein, 15 aa, Artificial Sequence
  Description of Artificial Sequence: Synthetic peptide
  Seed: MCSLMQGSTLPRRSG
MCSIMQVSKLPTRSG

SEQ ID NO: 91952 - protein, 15 aa, Artificial Sequence
  Description of Artificial Sequence: Synthetic peptide
  Seed: MCSLMQGSTLPRRSG
MCSIMQVSNLPARSG

SEQ ID NO: 91953 - protein, 15 aa, Artificial Sequence
  Description of Artificial Sequence: Synthetic peptide
  Seed: MCSLMQGSTLPRRSG
MCSIMQVSNLPSRSG

SEQ ID NO: 91954 - protein, 15 aa, Artificial Sequence
  Description of Artificial Sequence: Synthetic peptide
  Seed: MCSLMQGSTLPRRSG
MCSIMQVSRLPARSG

SEQ ID NO: 91955 - protein, 15 aa, Artificial Sequence
  Description of Artificial Sequence: Synthetic peptide
  Seed: MCSLMQGSTLPRRSG
MCSIMQVSRLPGRSG

SEQ ID NO: 91956 - protein, 15 aa, Artificial Sequence
  Description of Artificial Sequence: Synthetic peptide
  Seed: MCSLMQGSTLPRRSG
MCSIMQVSRLPHRSG

SEQ ID NO: 91957 - protein, 15 aa, Artificial Sequence
  Description of Artificial Sequence: Synthetic peptide
  Seed: MCSLMQGSTLPRRSG
MCSIMQVSRLPKRSG

SEQ ID NO: 91958 - protein, 15 aa, Artificial Sequence
  Description of Artificial Sequence: Synthetic peptide
  Seed: MCSLMQGSTLPRRSG
MCSIMQVSRLPLRSG

SEQ ID NO: 91959 - protein, 15 aa, Artificial Sequence
  Description of Artificial Sequence: Synthetic peptide
  Seed: MCSLMQGSTLPRRSG
MCSIMQVSRLPMRSG

SEQ ID NO: 91960 - protein, 15 aa, Artificial Sequence
  Description of Artificial Sequence: Synthetic peptide
  Seed: MCSLMQGSTLPRRSG
MCSIMQVSRLPNRSG

SEQ ID NO: 91961 - protein, 15 aa, Artificial Sequence
  Description of Artificial Sequence: Synthetic peptide
  Seed: MCSLMQGSTLPRRSG
MCSIMQVSRLPQRSG

SEQ ID NO: 91962 - protein, 15 aa, Artificial Sequence
  Description of Artificial Sequence: Synthetic peptide
  Seed: MCSLMQGSTLPRRSG
MCSIMQVSRLPRRSG

SEQ ID NO: 91963 - protein, 15 aa, Artificial Sequence
  Description of Artificial Sequence: Synthetic peptide
  Seed: MCSLMQGSTLPRRSG
MCSIMQVSRLPSRSG

SEQ ID NO: 91964 - protein, 15 aa, Artificial Sequence
  Description of Artificial Sequence: Synthetic peptide
  Seed: MCSLMQGSTLPRRSG
MCSIMQVSRLPTRSG

SEQ ID NO: 91965 - protein, 15 aa, Artificial Sequence
  Description of Artificial Sequence: Synthetic peptide
  Seed: MCSLMQGSTLPRRSG
MCSIMQVSRLPVRSG

SEQ ID NO: 91966 - protein, 15 aa, Artificial Sequence
  Description of Artificial Sequence: Synthetic peptide
  Seed: MCSLMQGSTLPRRSG
MCSIMQVSRLPYRSG

SEQ ID NO: 91967 - protein, 15 aa, Artificial Sequence
  Description of Artificial Sequence: Synthetic peptide
  Seed: MCSLMQGSTLPRRSG
MCSIMQVSSLPARSG

SEQ ID NO: 91968 - protein, 15 aa, Artificial Sequence
  Description of Artificial Sequence: Synthetic peptide
  Seed: MCSLMQGSTLPRRSG
MCSIMQVSSLPSRSG

SEQ ID NO: 91969 - protein, 15 aa, Artificial Sequence
  Description of Artificial Sequence: Synthetic peptide
  Seed: MCSLMQGSTLPRRSG
MCSIMQVSTLPARSG

SEQ ID NO: 91970 - protein, 15 aa, Artificial Sequence
  Description of Artificial Sequence: Synthetic peptide
  Seed: MCSLMQGSTLPRRSG
MCSIMQVSTLPSRSG

SEQ ID NO: 91971 - protein, 15 aa, Artificial Sequence
  Description of Artificial Sequence: Synthetic peptide
  Seed: MCSLMQGSTLPRRSG
MCSIMQWSRLPRRSG

SEQ ID NO: 91972 - protein, 15 aa, Artificial Sequence
  Description of Artificial Sequence: Synthetic peptide
  Seed: MCSLMQGSTLPRRSG
MCSLMQASALPIRSG

SEQ ID NO: 91973 - protein, 15 aa, Artificial Sequence
  Description of Artificial Sequence: Synthetic peptide
  Seed: MCSLMQGSTLPRRSG
MCSLMQASALPLRSG

SEQ ID NO: 91974 - protein, 15 aa, Artificial Sequence
  Description of Artificial Sequence: Synthetic peptide
  Seed: MCSLMQGSTLPRRSG
MCSLMQASALPVRSG

SEQ ID NO: 91975 - protein, 15 aa, Artificial Sequence
  Description of Artificial Sequence: Synthetic peptide
  Seed: MCSLMQGSTLPRRSG
MCSLMQASRLPARSG

SEQ ID NO: 91976 - protein, 15 aa, Artificial Sequence
  Description of Artificial Sequence: Synthetic peptide
  Seed: MCSLMQGSTLPRRSG
MCSLMQASRLPQRSG

SEQ ID NO: 91977 - protein, 15 aa, Artificial Sequence
  Description of Artificial Sequence: Synthetic peptide
  Seed: MCSLMQGSTLPRRSG
MCSLMQASRLPSRSG

SEQ ID NO: 91978 - protein, 15 aa, Artificial Sequence
  Description of Artificial Sequence: Synthetic peptide
  Seed: MCSLMQGSTLPRRSG
MCSLMQFSKLPRRSG

SEQ ID NO: 91979 - protein, 15 aa, Artificial Sequence
  Description of Artificial Sequence: Synthetic peptide
  Seed: MCSLMQGSTLPRRSG
MCSLMQFSRLPARSG

SEQ ID NO: 91980 - protein, 15 aa, Artificial Sequence
  Description of Artificial Sequence: Synthetic peptide
  Seed: MCSLMQGSTLPRRSG
MCSLMQFSRLPHRSG

SEQ ID NO: 91981 - protein, 15 aa, Artificial Sequence
  Description of Artificial Sequence: Synthetic peptide
  Seed: MCSLMQGSTLPRRSG
MCSLMQFSRLPKRSG

SEQ ID NO: 91982 - protein, 15 aa, Artificial Sequence
  Description of Artificial Sequence: Synthetic peptide
  Seed: MCSLMQGSTLPRRSG
MCSLMQFSRLPRRSG

SEQ ID NO: 91983 - protein, 15 aa, Artificial Sequence
  Description of Artificial Sequence: Synthetic peptide
  Seed: MCSLMQGSTLPRRSG
MCSLMQFSRLPSRSG

SEQ ID NO: 91984 - protein, 15 aa, Artificial Sequence
  Description of Artificial Sequence: Synthetic peptide
  Seed: MCSLMQGSTLPRRSG
MCSLMQISALPARSG

SEQ ID NO: 91985 - protein, 15 aa, Artificial Sequence
  Description of Artificial Sequence: Synthetic peptide
  Seed: MCSLMQGSTLPRRSG
MCSLMQISALPIRSG

SEQ ID NO: 91986 - protein, 15 aa, Artificial Sequence
  Description of Artificial Sequence: Synthetic peptide
  Seed: MCSLMQGSTLPRRSG
MCSLMQISALPLRSG

SEQ ID NO: 91987 - protein, 15 aa, Artificial Sequence
  Description of Artificial Sequence: Synthetic peptide
  Seed: MCSLMQGSTLPRRSG
MCSLMQISALPVRSG

SEQ ID NO: 91988 - protein, 15 aa, Artificial Sequence
  Description of Artificial Sequence: Synthetic peptide
  Seed: MCSLMQGSTLPRRSG
MCSLMQISKLPARSG

SEQ ID NO: 91989 - protein, 15 aa, Artificial Sequence
  Description of Artificial Sequence: Synthetic peptide
  Seed: MCSLMQGSTLPRRSG
MCSLMQISKLPGRSG

SEQ ID NO: 91990 - protein, 15 aa, Artificial Sequence
  Description of Artificial Sequence: Synthetic peptide
  Seed: MCSLMQGSTLPRRSG
MCSLMQISKLPHRSG

SEQ ID NO: 91991 - protein, 15 aa, Artificial Sequence
  Description of Artificial Sequence: Synthetic peptide
  Seed: MCSLMQGSTLPRRSG
MCSLMQISKLPKRSG

SEQ ID NO: 91992 - protein, 15 aa, Artificial Sequence
  Description of Artificial Sequence: Synthetic peptide
  Seed: MCSLMQGSTLPRRSG
MCSLMQISKLPQRSG

SEQ ID NO: 91993 - protein, 15 aa, Artificial Sequence
  Description of Artificial Sequence: Synthetic peptide
  Seed: MCSLMQGSTLPRRSG
MCSLMQISKLPRRSG

SEQ ID NO: 91994 - protein, 15 aa, Artificial Sequence
  Description of Artificial Sequence: Synthetic peptide
  Seed: MCSLMQGSTLPRRSG
MCSLMQISKLPSRSG

SEQ ID NO: 91995 - protein, 15 aa, Artificial Sequence
  Description of Artificial Sequence: Synthetic peptide
  Seed: MCSLMQGSTLPRRSG
MCSLMQISKLPTRSG

SEQ ID NO: 91996 - protein, 15 aa, Artificial Sequence
  Description of Artificial Sequence: Synthetic peptide
  Seed: MCSLMQGSTLPRRSG
MCSLMQISKLPVRSG

SEQ ID NO: 91997 - protein, 15 aa, Artificial Sequence
  Description of Artificial Sequence: Synthetic peptide
  Seed: MCSLMQGSTLPRRSG
MCSLMQISNLPARSG

SEQ ID NO: 91998 - protein, 15 aa, Artificial Sequence
  Description of Artificial Sequence: Synthetic peptide
  Seed: MCSLMQGSTLPRRSG
MCSLMQISNLPSRSG

SEQ ID NO: 91999 - protein, 15 aa, Artificial Sequence
  Description of Artificial Sequence: Synthetic peptide
  Seed: MCSLMQGSTLPRRSG
MCSLMQISRLPARSG

SEQ ID NO: 92000 - protein, 15 aa, Artificial Sequence
  Description of Artificial Sequence: Synthetic peptide
  Seed: MCSLMQGSTLPRRSG
MCSLMQISRLPGRSG

SEQ ID NO: 92001 - protein, 15 aa, Artificial Sequence
  Description of Artificial Sequence: Synthetic peptide
  Seed: MCSLMQGSTLPRRSG
MCSLMQISRLPHRSG

SEQ ID NO: 92002 - protein, 15 aa, Artificial Sequence
  Description of Artificial Sequence: Synthetic peptide
  Seed: MCSLMQGSTLPRRSG
MCSLMQISRLPIRSG

SEQ ID NO: 92003 - protein, 15 aa, Artificial Sequence
  Description of Artificial Sequence: Synthetic peptide
  Seed: MCSLMQGSTLPRRSG
MCSLMQISRLPKRSG

SEQ ID NO: 92004 - protein, 15 aa, Artificial Sequence
  Description of Artificial Sequence: Synthetic peptide
  Seed: MCSLMQGSTLPRRSG
MCSLMQISRLPLRSG

SEQ ID NO: 92005 - protein, 15 aa, Artificial Sequence
  Description of Artificial Sequence: Synthetic peptide
  Seed: MCSLMQGSTLPRRSG
MCSLMQISRLPMRSG

SEQ ID NO: 92006 - protein, 15 aa, Artificial Sequence
  Description of Artificial Sequence: Synthetic peptide
  Seed: MCSLMQGSTLPRRSG
MCSLMQISRLPNRSG

SEQ ID NO: 92007 - protein, 15 aa, Artificial Sequence
  Description of Artificial Sequence: Synthetic peptide
  Seed: MCSLMQGSTLPRRSG
MCSLMQISRLPQRSG

SEQ ID NO: 92008 - protein, 15 aa, Artificial Sequence
  Description of Artificial Sequence: Synthetic peptide
  Seed: MCSLMQGSTLPRRSG
MCSLMQISRLPRRSG

SEQ ID NO: 92009 - protein, 15 aa, Artificial Sequence
  Description of Artificial Sequence: Synthetic peptide
  Seed: MCSLMQGSTLPRRSG
MCSLMQISRLPSRSG

SEQ ID NO: 92010 - protein, 15 aa, Artificial Sequence
  Description of Artificial Sequence: Synthetic peptide
  Seed: MCSLMQGSTLPRRSG
MCSLMQISRLPTRSG

SEQ ID NO: 92011 - protein, 15 aa, Artificial Sequence
  Description of Artificial Sequence: Synthetic peptide
  Seed: MCSLMQGSTLPRRSG
MCSLMQISRLPVRSG

SEQ ID NO: 92012 - protein, 15 aa, Artificial Sequence
  Description of Artificial Sequence: Synthetic peptide
  Seed: MCSLMQGSTLPRRSG
MCSLMQISRLPYRSG

SEQ ID NO: 92013 - protein, 15 aa, Artificial Sequence
  Description of Artificial Sequence: Synthetic peptide
  Seed: MCSLMQGSTLPRRSG
MCSLMQISSLPARSG

SEQ ID NO: 92014 - protein, 15 aa, Artificial Sequence
  Description of Artificial Sequence: Synthetic peptide
  Seed: MCSLMQGSTLPRRSG
MCSLMQISSLPSRSG

SEQ ID NO: 92015 - protein, 15 aa, Artificial Sequence
  Description of Artificial Sequence: Synthetic peptide
  Seed: MCSLMQGSTLPRRSG
MCSLMQISTLPARSG

SEQ ID NO: 92016 - protein, 15 aa, Artificial Sequence
  Description of Artificial Sequence: Synthetic peptide
  Seed: MCSLMQGSTLPRRSG
MCSLMQISTLPSRSG

SEQ ID NO: 92017 - protein, 15 aa, Artificial Sequence
  Description of Artificial Sequence: Synthetic peptide
  Seed: MCSLMQGSTLPRRSG
MCSLMQLSALPARSG

SEQ ID NO: 92018 - protein, 15 aa, Artificial Sequence
  Description of Artificial Sequence: Synthetic peptide
  Seed: MCSLMQGSTLPRRSG
MCSLMQLSALPIRSG

SEQ ID NO: 92019 - protein, 15 aa, Artificial Sequence
  Description of Artificial Sequence: Synthetic peptide
  Seed: MCSLMQGSTLPRRSG
MCSLMQLSALPLRSG

SEQ ID NO: 92020 - protein, 15 aa, Artificial Sequence
  Description of Artificial Sequence: Synthetic peptide
  Seed: MCSLMQGSTLPRRSG
MCSLMQLSALPMRSG

SEQ ID NO: 92021 - protein, 15 aa, Artificial Sequence
  Description of Artificial Sequence: Synthetic peptide
  Seed: MCSLMQGSTLPRRSG
MCSLMQLSALPTRSG

SEQ ID NO: 92022 - protein, 15 aa, Artificial Sequence
  Description of Artificial Sequence: Synthetic peptide
  Seed: MCSLMQGSTLPRRSG
MCSLMQLSALPVRSG

SEQ ID NO: 92023 - protein, 15 aa, Artificial Sequence
  Description of Artificial Sequence: Synthetic peptide
  Seed: MCSLMQGSTLPRRSG
MCSLMQLSGLPARSG

SEQ ID NO: 92024 - protein, 15 aa, Artificial Sequence
  Description of Artificial Sequence: Synthetic peptide
  Seed: MCSLMQGSTLPRRSG
MCSLMQLSGLPIRSG

SEQ ID NO: 92025 - protein, 15 aa, Artificial Sequence
  Description of Artificial Sequence: Synthetic peptide
  Seed: MCSLMQGSTLPRRSG
MCSLMQLSGLPLRSG

SEQ ID NO: 92026 - protein, 15 aa, Artificial Sequence
  Description of Artificial Sequence: Synthetic peptide
  Seed: MCSLMQGSTLPRRSG
MCSLMQLSGLPVRSG

SEQ ID NO: 92027 - protein, 15 aa, Artificial Sequence
  Description of Artificial Sequence: Synthetic peptide
  Seed: MCSLMQGSTLPRRSG
MCSLMQLSKLPARSG

SEQ ID NO: 92028 - protein, 15 aa, Artificial Sequence
  Description of Artificial Sequence: Synthetic peptide
  Seed: MCSLMQGSTLPRRSG
MCSLMQLSKLPGRSG

SEQ ID NO: 92029 - protein, 15 aa, Artificial Sequence
  Description of Artificial Sequence: Synthetic peptide
  Seed: MCSLMQGSTLPRRSG
MCSLMQLSKLPHRSG

SEQ ID NO: 92030 - protein, 15 aa, Artificial Sequence
  Description of Artificial Sequence: Synthetic peptide
  Seed: MCSLMQGSTLPRRSG
MCSLMQLSKLPKRSG

SEQ ID NO: 92031 - protein, 15 aa, Artificial Sequence
  Description of Artificial Sequence: Synthetic peptide
  Seed: MCSLMQGSTLPRRSG
MCSLMQLSKLPMRSG

SEQ ID NO: 92032 - protein, 15 aa, Artificial Sequence
  Description of Artificial Sequence: Synthetic peptide
  Seed: MCSLMQGSTLPRRSG
MCSLMQLSKLPQRSG

SEQ ID NO: 92033 - protein, 15 aa, Artificial Sequence
  Description of Artificial Sequence: Synthetic peptide
  Seed: MCSLMQGSTLPRRSG
MCSLMQLSKLPRRSG

SEQ ID NO: 92034 - protein, 15 aa, Artificial Sequence
  Description of Artificial Sequence: Synthetic peptide
  Seed: MCSLMQGSTLPRRSG
MCSLMQLSKLPSRSG

SEQ ID NO: 92035 - protein, 15 aa, Artificial Sequence
  Description of Artificial Sequence: Synthetic peptide
  Seed: MCSLMQGSTLPRRSG
MCSLMQLSKLPTRSG

SEQ ID NO: 92036 - protein, 15 aa, Artificial Sequence
  Description of Artificial Sequence: Synthetic peptide
  Seed: MCSLMQGSTLPRRSG
MCSLMQLSKLPVRSG

SEQ ID NO: 92037 - protein, 15 aa, Artificial Sequence
  Description of Artificial Sequence: Synthetic peptide
  Seed: MCSLMQGSTLPRRSG
MCSLMQLSNLPARSG

SEQ ID NO: 92038 - protein, 15 aa, Artificial Sequence
  Description of Artificial Sequence: Synthetic peptide
  Seed: MCSLMQGSTLPRRSG
MCSLMQLSPLPIRSG

SEQ ID NO: 92039 - protein, 15 aa, Artificial Sequence
  Description of Artificial Sequence: Synthetic peptide
  Seed: MCSLMQGSTLPRRSG
MCSLMQLSPLPLRSG

SEQ ID NO: 92040 - protein, 15 aa, Artificial Sequence
  Description of Artificial Sequence: Synthetic peptide
  Seed: MCSLMQGSTLPRRSG
MCSLMQLSPLPVRSG

SEQ ID NO: 92041 - protein, 15 aa, Artificial Sequence
  Description of Artificial Sequence: Synthetic peptide
  Seed: MCSLMQGSTLPRRSG
MCSLMQLSRLPARSG

SEQ ID NO: 92042 - protein, 15 aa, Artificial Sequence
  Description of Artificial Sequence: Synthetic peptide
  Seed: MCSLMQGSTLPRRSG
MCSLMQLSRLPGRSG

SEQ ID NO: 92043 - protein, 15 aa, Artificial Sequence
  Description of Artificial Sequence: Synthetic peptide
  Seed: MCSLMQGSTLPRRSG
MCSLMQLSRLPHRSG

SEQ ID NO: 92044 - protein, 15 aa, Artificial Sequence
  Description of Artificial Sequence: Synthetic peptide
  Seed: MCSLMQGSTLPRRSG
MCSLMQLSRLPIRSG

SEQ ID NO: 92045 - protein, 15 aa, Artificial Sequence
  Description of Artificial Sequence: Synthetic peptide
  Seed: MCSLMQGSTLPRRSG
MCSLMQLSRLPKRSG

SEQ ID NO: 92046 - protein, 15 aa, Artificial Sequence
  Description of Artificial Sequence: Synthetic peptide
  Seed: MCSLMQGSTLPRRSG
MCSLMQLSRLPLRSG

SEQ ID NO: 92047 - protein, 15 aa, Artificial Sequence
  Description of Artificial Sequence: Synthetic peptide
  Seed: MCSLMQGSTLPRRSG
MCSLMQLSRLPMRSG

SEQ ID NO: 92048 - protein, 15 aa, Artificial Sequence
  Description of Artificial Sequence: Synthetic peptide
  Seed: MCSLMQGSTLPRRSG
MCSLMQLSRLPNRSG

SEQ ID NO: 92049 - protein, 15 aa, Artificial Sequence
  Description of Artificial Sequence: Synthetic peptide
  Seed: MCSLMQGSTLPRRSG
MCSLMQLSRLPQRSG

SEQ ID NO: 92050 - protein, 15 aa, Artificial Sequence
  Description of Artificial Sequence: Synthetic peptide
  Seed: MCSLMQGSTLPRRSG
MCSLMQLSRLPRRSG

SEQ ID NO: 92051 - protein, 15 aa, Artificial Sequence
  Description of Artificial Sequence: Synthetic peptide
  Seed: MCSLMQGSTLPRRSG
MCSLMQLSRLPSRSG

SEQ ID NO: 92052 - protein, 15 aa, Artificial Sequence
  Description of Artificial Sequence: Synthetic peptide
  Seed: MCSLMQGSTLPRRSG
MCSLMQLSRLPTRSG

SEQ ID NO: 92053 - protein, 15 aa, Artificial Sequence
  Description of Artificial Sequence: Synthetic peptide
  Seed: MCSLMQGSTLPRRSG
MCSLMQLSRLPVRSG

SEQ ID NO: 92054 - protein, 15 aa, Artificial Sequence
  Description of Artificial Sequence: Synthetic peptide
  Seed: MCSLMQGSTLPRRSG
MCSLMQLSRLPYRSG

SEQ ID NO: 92055 - protein, 15 aa, Artificial Sequence
  Description of Artificial Sequence: Synthetic peptide
  Seed: MCSLMQGSTLPRRSG
MCSLMQLSSLPARSG

SEQ ID NO: 92056 - protein, 15 aa, Artificial Sequence
  Description of Artificial Sequence: Synthetic peptide
  Seed: MCSLMQGSTLPRRSG
MCSLMQLSSLPIRSG

SEQ ID NO: 92057 - protein, 15 aa, Artificial Sequence
  Description of Artificial Sequence: Synthetic peptide
  Seed: MCSLMQGSTLPRRSG
MCSLMQLSSLPLRSG

SEQ ID NO: 92058 - protein, 15 aa, Artificial Sequence
  Description of Artificial Sequence: Synthetic peptide
  Seed: MCSLMQGSTLPRRSG
MCSLMQLSSLPVRSG

SEQ ID NO: 92059 - protein, 15 aa, Artificial Sequence
  Description of Artificial Sequence: Synthetic peptide
  Seed: MCSLMQGSTLPRRSG
MCSLMQLSTLPARSG

SEQ ID NO: 92060 - protein, 15 aa, Artificial Sequence
  Description of Artificial Sequence: Synthetic peptide
  Seed: MCSLMQGSTLPRRSG
MCSLMQLSTLPSRSG

SEQ ID NO: 92061 - protein, 15 aa, Artificial Sequence
  Description of Artificial Sequence: Synthetic peptide
  Seed: MCSLMQGSTLPRRSG
MCSLMQMSALPARSG

SEQ ID NO: 92062 - protein, 15 aa, Artificial Sequence
  Description of Artificial Sequence: Synthetic peptide
  Seed: MCSLMQGSTLPRRSG
MCSLMQMSALPIRSG

SEQ ID NO: 92063 - protein, 15 aa, Artificial Sequence
  Description of Artificial Sequence: Synthetic peptide
  Seed: MCSLMQGSTLPRRSG
MCSLMQMSALPLRSG

SEQ ID NO: 92064 - protein, 15 aa, Artificial Sequence
  Description of Artificial Sequence: Synthetic peptide
  Seed: MCSLMQGSTLPRRSG
MCSLMQMSALPMRSG

SEQ ID NO: 92065 - protein, 15 aa, Artificial Sequence
  Description of Artificial Sequence: Synthetic peptide
  Seed: MCSLMQGSTLPRRSG
MCSLMQMSALPVRSG

SEQ ID NO: 92066 - protein, 15 aa, Artificial Sequence
  Description of Artificial Sequence: Synthetic peptide
  Seed: MCSLMQGSTLPRRSG
MCSLMQMSGLPARSG

SEQ ID NO: 92067 - protein, 15 aa, Artificial Sequence
  Description of Artificial Sequence: Synthetic peptide
  Seed: MCSLMQGSTLPRRSG
MCSLMQMSGLPIRSG

SEQ ID NO: 92068 - protein, 15 aa, Artificial Sequence
  Description of Artificial Sequence: Synthetic peptide
  Seed: MCSLMQGSTLPRRSG
MCSLMQMSGLPLRSG

SEQ ID NO: 92069 - protein, 15 aa, Artificial Sequence
  Description of Artificial Sequence: Synthetic peptide
  Seed: MCSLMQGSTLPRRSG
MCSLMQMSGLPVRSG

SEQ ID NO: 92070 - protein, 15 aa, Artificial Sequence
  Description of Artificial Sequence: Synthetic peptide
  Seed: MCSLMQGSTLPRRSG
MCSLMQMSKLPARSG

SEQ ID NO: 92071 - protein, 15 aa, Artificial Sequence
  Description of Artificial Sequence: Synthetic peptide
  Seed: MCSLMQGSTLPRRSG
MCSLMQMSKLPGRSG

SEQ ID NO: 92072 - protein, 15 aa, Artificial Sequence
  Description of Artificial Sequence: Synthetic peptide
  Seed: MCSLMQGSTLPRRSG
MCSLMQMSKLPHRSG

SEQ ID NO: 92073 - protein, 15 aa, Artificial Sequence
  Description of Artificial Sequence: Synthetic peptide
  Seed: MCSLMQGSTLPRRSG
MCSLMQMSKLPIRSG

SEQ ID NO: 92074 - protein, 15 aa, Artificial Sequence
  Description of Artificial Sequence: Synthetic peptide
  Seed: MCSLMQGSTLPRRSG
MCSLMQMSKLPKRSG

SEQ ID NO: 92075 - protein, 15 aa, Artificial Sequence
  Description of Artificial Sequence: Synthetic peptide
  Seed: MCSLMQGSTLPRRSG
MCSLMQMSKLPLRSG

SEQ ID NO: 92076 - protein, 15 aa, Artificial Sequence
  Description of Artificial Sequence: Synthetic peptide
  Seed: MCSLMQGSTLPRRSG
MCSLMQMSKLPMRSG

SEQ ID NO: 92077 - protein, 15 aa, Artificial Sequence
  Description of Artificial Sequence: Synthetic peptide
  Seed: MCSLMQGSTLPRRSG
MCSLMQMSKLPQRSG

SEQ ID NO: 92078 - protein, 15 aa, Artificial Sequence
  Description of Artificial Sequence: Synthetic peptide
  Seed: MCSLMQGSTLPRRSG
MCSLMQMSKLPRRSG

SEQ ID NO: 92079 - protein, 15 aa, Artificial Sequence
  Description of Artificial Sequence: Synthetic peptide
  Seed: MCSLMQGSTLPRRSG
MCSLMQMSKLPSRSG

SEQ ID NO: 92080 - protein, 15 aa, Artificial Sequence
  Description of Artificial Sequence: Synthetic peptide
  Seed: MCSLMQGSTLPRRSG
MCSLMQMSKLPTRSG

SEQ ID NO: 92081 - protein, 15 aa, Artificial Sequence
  Description of Artificial Sequence: Synthetic peptide
  Seed: MCSLMQGSTLPRRSG
MCSLMQMSKLPVRSG

SEQ ID NO: 92082 - protein, 15 aa, Artificial Sequence
  Description of Artificial Sequence: Synthetic peptide
  Seed: MCSLMQGSTLPRRSG
MCSLMQMSNLPARSG

SEQ ID NO: 92083 - protein, 15 aa, Artificial Sequence
  Description of Artificial Sequence: Synthetic peptide
  Seed: MCSLMQGSTLPRRSG
MCSLMQMSNLPSRSG

SEQ ID NO: 92084 - protein, 15 aa, Artificial Sequence
  Description of Artificial Sequence: Synthetic peptide
  Seed: MCSLMQGSTLPRRSG
MCSLMQMSPLPLRSG

SEQ ID NO: 92085 - protein, 15 aa, Artificial Sequence
  Description of Artificial Sequence: Synthetic peptide
  Seed: MCSLMQGSTLPRRSG
MCSLMQMSPLPVRSG

SEQ ID NO: 92086 - protein, 15 aa, Artificial Sequence
  Description of Artificial Sequence: Synthetic peptide
  Seed: MCSLMQGSTLPRRSG
MCSLMQMSRLPARSG

SEQ ID NO: 92087 - protein, 15 aa, Artificial Sequence
  Description of Artificial Sequence: Synthetic peptide
  Seed: MCSLMQGSTLPRRSG
MCSLMQMSRLPGRSG

SEQ ID NO: 92088 - protein, 15 aa, Artificial Sequence
  Description of Artificial Sequence: Synthetic peptide
  Seed: MCSLMQGSTLPRRSG
MCSLMQMSRLPHRSG

SEQ ID NO: 92089 - protein, 15 aa, Artificial Sequence
  Description of Artificial Sequence: Synthetic peptide
  Seed: MCSLMQGSTLPRRSG
MCSLMQMSRLPIRSG

SEQ ID NO: 92090 - protein, 15 aa, Artificial Sequence
  Description of Artificial Sequence: Synthetic peptide
  Seed: MCSLMQGSTLPRRSG
MCSLMQMSRLPKRSG

SEQ ID NO: 92091 - protein, 15 aa, Artificial Sequence
  Description of Artificial Sequence: Synthetic peptide
  Seed: MCSLMQGSTLPRRSG
MCSLMQMSRLPLRSG

SEQ ID NO: 92092 - protein, 15 aa, Artificial Sequence
  Description of Artificial Sequence: Synthetic peptide
  Seed: MCSLMQGSTLPRRSG
MCSLMQMSRLPMRSG

SEQ ID NO: 92093 - protein, 15 aa, Artificial Sequence
  Description of Artificial Sequence: Synthetic peptide
  Seed: MCSLMQGSTLPRRSG
MCSLMQMSRLPNRSG

SEQ ID NO: 92094 - protein, 15 aa, Artificial Sequence
  Description of Artificial Sequence: Synthetic peptide
  Seed: MCSLMQGSTLPRRSG
MCSLMQMSRLPPRSG

SEQ ID NO: 92095 - protein, 15 aa, Artificial Sequence
  Description of Artificial Sequence: Synthetic peptide
  Seed: MCSLMQGSTLPRRSG
MCSLMQMSRLPQRSG

SEQ ID NO: 92096 - protein, 15 aa, Artificial Sequence
  Description of Artificial Sequence: Synthetic peptide
  Seed: MCSLMQGSTLPRRSG
MCSLMQMSRLPRRSG

SEQ ID NO: 92097 - protein, 15 aa, Artificial Sequence
  Description of Artificial Sequence: Synthetic peptide
  Seed: MCSLMQGSTLPRRSG
MCSLMQMSRLPSRSG

SEQ ID NO: 92098 - protein, 15 aa, Artificial Sequence
  Description of Artificial Sequence: Synthetic peptide
  Seed: MCSLMQGSTLPRRSG
MCSLMQMSRLPTRSG

SEQ ID NO: 92099 - protein, 15 aa, Artificial Sequence
  Description of Artificial Sequence: Synthetic peptide
  Seed: MCSLMQGSTLPRRSG
MCSLMQMSRLPVRSG

SEQ ID NO: 92100 - protein, 15 aa, Artificial Sequence
  Description of Artificial Sequence: Synthetic peptide
  Seed: MCSLMQGSTLPRRSG
MCSLMQMSRLPYRSG

SEQ ID NO: 92101 - protein, 15 aa, Artificial Sequence
  Description of Artificial Sequence: Synthetic peptide
  Seed: MCSLMQGSTLPRRSG
MCSLMQMSSLPARSG

SEQ ID NO: 92102 - protein, 15 aa, Artificial Sequence
  Description of Artificial Sequence: Synthetic peptide
  Seed: MCSLMQGSTLPRRSG
MCSLMQMSSLPIRSG

SEQ ID NO: 92103 - protein, 15 aa, Artificial Sequence
  Description of Artificial Sequence: Synthetic peptide
  Seed: MCSLMQGSTLPRRSG
MCSLMQMSSLPLRSG

SEQ ID NO: 92104 - protein, 15 aa, Artificial Sequence
  Description of Artificial Sequence: Synthetic peptide
  Seed: MCSLMQGSTLPRRSG
MCSLMQMSSLPSRSG

SEQ ID NO: 92105 - protein, 15 aa, Artificial Sequence
  Description of Artificial Sequence: Synthetic peptide
  Seed: MCSLMQGSTLPRRSG
MCSLMQMSSLPVRSG

SEQ ID NO: 92106 - protein, 15 aa, Artificial Sequence
  Description of Artificial Sequence: Synthetic peptide
  Seed: MCSLMQGSTLPRRSG
MCSLMQMSTLPARSG

SEQ ID NO: 92107 - protein, 15 aa, Artificial Sequence
  Description of Artificial Sequence: Synthetic peptide
  Seed: MCSLMQGSTLPRRSG
MCSLMQMSTLPSRSG

SEQ ID NO: 92108 - protein, 15 aa, Artificial Sequence
  Description of Artificial Sequence: Synthetic peptide
  Seed: MCSLMQGSTLPRRSG
MCSLMQQSALPLRSG

SEQ ID NO: 92109 - protein, 15 aa, Artificial Sequence
  Description of Artificial Sequence: Synthetic peptide
  Seed: MCSLMQGSTLPRRSG
MCSLMQSSALPIRSG

SEQ ID NO: 92110 - protein, 15 aa, Artificial Sequence
  Description of Artificial Sequence: Synthetic peptide
  Seed: MCSLMQGSTLPRRSG
MCSLMQVSKLPARSG

SEQ ID NO: 92111 - protein, 15 aa, Artificial Sequence
  Description of Artificial Sequence: Synthetic peptide
  Seed: MCSLMQGSTLPRRSG
MCSLMQVSKLPGRSG

SEQ ID NO: 92112 - protein, 15 aa, Artificial Sequence
  Description of Artificial Sequence: Synthetic peptide
  Seed: MCSLMQGSTLPRRSG
MCSLMQVSKLPQRSG

SEQ ID NO: 92113 - protein, 15 aa, Artificial Sequence
  Description of Artificial Sequence: Synthetic peptide
  Seed: MCSLMQGSTLPRRSG
MCSLMQVSKLPRRSG

SEQ ID NO: 92114 - protein, 15 aa, Artificial Sequence
  Description of Artificial Sequence: Synthetic peptide
  Seed: MCSLMQGSTLPRRSG
MCSLMQVSKLPSRSG

SEQ ID NO: 92115 - protein, 15 aa, Artificial Sequence
  Description of Artificial Sequence: Synthetic peptide
  Seed: MCSLMQGSTLPRRSG
MCSLMQVSRLPARSG

SEQ ID NO: 92116 - protein, 15 aa, Artificial Sequence
  Description of Artificial Sequence: Synthetic peptide
  Seed: MCSLMQGSTLPRRSG
MCSLMQVSRLPGRSG

SEQ ID NO: 92117 - protein, 15 aa, Artificial Sequence
  Description of Artificial Sequence: Synthetic peptide
  Seed: MCSLMQGSTLPRRSG
MCSLMQVSRLPHRSG

SEQ ID NO: 92118 - protein, 15 aa, Artificial Sequence
  Description of Artificial Sequence: Synthetic peptide
  Seed: MCSLMQGSTLPRRSG
MCSLMQVSRLPKRSG

SEQ ID NO: 92119 - protein, 15 aa, Artificial Sequence
  Description of Artificial Sequence: Synthetic peptide
  Seed: MCSLMQGSTLPRRSG
MCSLMQVSRLPQRSG

SEQ ID NO: 92120 - protein, 15 aa, Artificial Sequence
  Description of Artificial Sequence: Synthetic peptide
  Seed: MCSLMQGSTLPRRSG
MCSLMQVSRLPRRSG

SEQ ID NO: 92121 - protein, 15 aa, Artificial Sequence
  Description of Artificial Sequence: Synthetic peptide
  Seed: MCSLMQGSTLPRRSG
MCSLMQVSRLPSRSG

SEQ ID NO: 92122 - protein, 15 aa, Artificial Sequence
  Description of Artificial Sequence: Synthetic peptide
  Seed: MCSLMQGSTLPRRSG
MCSLMQVSRLPTRSG

SEQ ID NO: 92123 - protein, 15 aa, Artificial Sequence
  Description of Artificial Sequence: Synthetic peptide
  Seed: MCSLMQGSTLPRRSG
MCSMMQFSKLPRRSG

SEQ ID NO: 92124 - protein, 15 aa, Artificial Sequence
  Description of Artificial Sequence: Synthetic peptide
  Seed: MCSLMQGSTLPRRSG
MCSMMQFSRLPRRSG

SEQ ID NO: 92125 - protein, 15 aa, Artificial Sequence
  Description of Artificial Sequence: Synthetic peptide
  Seed: MCSLMQGSTLPRRSG
MCSMMQISKLPARSG

SEQ ID NO: 92126 - protein, 15 aa, Artificial Sequence
  Description of Artificial Sequence: Synthetic peptide
  Seed: MCSLMQGSTLPRRSG
MCSMMQISKLPRRSG

SEQ ID NO: 92127 - protein, 15 aa, Artificial Sequence
  Description of Artificial Sequence: Synthetic peptide
  Seed: MCSLMQGSTLPRRSG
MCSMMQISKLPSRSG

SEQ ID NO: 92128 - protein, 15 aa, Artificial Sequence
  Description of Artificial Sequence: Synthetic peptide
  Seed: MCSLMQGSTLPRRSG
MCSMMQISRLPARSG

SEQ ID NO: 92129 - protein, 15 aa, Artificial Sequence
  Description of Artificial Sequence: Synthetic peptide
  Seed: MCSLMQGSTLPRRSG
MCSMMQISRLPGRSG

SEQ ID NO: 92130 - protein, 15 aa, Artificial Sequence
  Description of Artificial Sequence: Synthetic peptide
  Seed: MCSLMQGSTLPRRSG
MCSMMQISRLPHRSG

SEQ ID NO: 92131 - protein, 15 aa, Artificial Sequence
  Description of Artificial Sequence: Synthetic peptide
  Seed: MCSLMQGSTLPRRSG
MCSMMQISRLPKRSG

SEQ ID NO: 92132 - protein, 15 aa, Artificial Sequence
  Description of Artificial Sequence: Synthetic peptide
  Seed: MCSLMQGSTLPRRSG
MCSMMQISRLPQRSG

SEQ ID NO: 92133 - protein, 15 aa, Artificial Sequence
  Description of Artificial Sequence: Synthetic peptide
  Seed: MCSLMQGSTLPRRSG
MCSMMQISRLPRRSG

SEQ ID NO: 92134 - protein, 15 aa, Artificial Sequence
  Description of Artificial Sequence: Synthetic peptide
  Seed: MCSLMQGSTLPRRSG
MCSMMQISRLPSRSG

SEQ ID NO: 92135 - protein, 15 aa, Artificial Sequence
  Description of Artificial Sequence: Synthetic peptide
  Seed: MCSLMQGSTLPRRSG
MCSMMQISRLPTRSG

SEQ ID NO: 92136 - protein, 15 aa, Artificial Sequence
  Description of Artificial Sequence: Synthetic peptide
  Seed: MCSLMQGSTLPRRSG
MCSMMQISRLPVRSG

SEQ ID NO: 92137 - protein, 15 aa, Artificial Sequence
  Description of Artificial Sequence: Synthetic peptide
  Seed: MCSLMQGSTLPRRSG
MCSMMQLSALPARSG

SEQ ID NO: 92138 - protein, 15 aa, Artificial Sequence
  Description of Artificial Sequence: Synthetic peptide
  Seed: MCSLMQGSTLPRRSG
MCSMMQLSALPIRSG

SEQ ID NO: 92139 - protein, 15 aa, Artificial Sequence
  Description of Artificial Sequence: Synthetic peptide
  Seed: MCSLMQGSTLPRRSG
MCSMMQLSALPLRSG

SEQ ID NO: 92140 - protein, 15 aa, Artificial Sequence
  Description of Artificial Sequence: Synthetic peptide
  Seed: MCSLMQGSTLPRRSG
MCSMMQLSALPVRSG

SEQ ID NO: 92141 - protein, 15 aa, Artificial Sequence
  Description of Artificial Sequence: Synthetic peptide
  Seed: MCSLMQGSTLPRRSG
MCSMMQLSGLPLRSG

SEQ ID NO: 92142 - protein, 15 aa, Artificial Sequence
  Description of Artificial Sequence: Synthetic peptide
  Seed: MCSLMQGSTLPRRSG
MCSMMQLSKLPARSG

SEQ ID NO: 92143 - protein, 15 aa, Artificial Sequence
  Description of Artificial Sequence: Synthetic peptide
  Seed: MCSLMQGSTLPRRSG
MCSMMQLSKLPRRSG

SEQ ID NO: 92144 - protein, 15 aa, Artificial Sequence
  Description of Artificial Sequence: Synthetic peptide
  Seed: MCSLMQGSTLPRRSG
MCSMMQLSKLPSRSG

SEQ ID NO: 92145 - protein, 15 aa, Artificial Sequence
  Description of Artificial Sequence: Synthetic peptide
  Seed: MCSLMQGSTLPRRSG
MCSMMQLSRLPARSG

SEQ ID NO: 92146 - protein, 15 aa, Artificial Sequence
  Description of Artificial Sequence: Synthetic peptide
  Seed: MCSLMQGSTLPRRSG
MCSMMQLSRLPGRSG

SEQ ID NO: 92147 - protein, 15 aa, Artificial Sequence
  Description of Artificial Sequence: Synthetic peptide
  Seed: MCSLMQGSTLPRRSG
MCSMMQLSRLPHRSG

SEQ ID NO: 92148 - protein, 15 aa, Artificial Sequence
  Description of Artificial Sequence: Synthetic peptide
  Seed: MCSLMQGSTLPRRSG
MCSMMQLSRLPKRSG

SEQ ID NO: 92149 - protein, 15 aa, Artificial Sequence
  Description of Artificial Sequence: Synthetic peptide
  Seed: MCSLMQGSTLPRRSG
MCSMMQLSRLPLRSG

SEQ ID NO: 92150 - protein, 15 aa, Artificial Sequence
  Description of Artificial Sequence: Synthetic peptide
  Seed: MCSLMQGSTLPRRSG
MCSMMQLSRLPMRSG

SEQ ID NO: 92151 - protein, 15 aa, Artificial Sequence
  Description of Artificial Sequence: Synthetic peptide
  Seed: MCSLMQGSTLPRRSG
MCSMMQLSRLPQRSG

SEQ ID NO: 92152 - protein, 15 aa, Artificial Sequence
  Description of Artificial Sequence: Synthetic peptide
  Seed: MCSLMQGSTLPRRSG
MCSMMQLSRLPRRSG

SEQ ID NO: 92153 - protein, 15 aa, Artificial Sequence
  Description of Artificial Sequence: Synthetic peptide
  Seed: MCSLMQGSTLPRRSG
MCSMMQLSRLPSRSG

SEQ ID NO: 92154 - protein, 15 aa, Artificial Sequence
  Description of Artificial Sequence: Synthetic peptide
  Seed: MCSLMQGSTLPRRSG
MCSMMQLSRLPTRSG

SEQ ID NO: 92155 - protein, 15 aa, Artificial Sequence
  Description of Artificial Sequence: Synthetic peptide
  Seed: MCSLMQGSTLPRRSG
MCSMMQLSRLPVRSG

SEQ ID NO: 92156 - protein, 15 aa, Artificial Sequence
  Description of Artificial Sequence: Synthetic peptide
  Seed: MCSLMQGSTLPRRSG
MCSMMQLSSLPLRSG

SEQ ID NO: 92157 - protein, 15 aa, Artificial Sequence
  Description of Artificial Sequence: Synthetic peptide
  Seed: MCSLMQGSTLPRRSG
MCSMMQMSALPIRSG

SEQ ID NO: 92158 - protein, 15 aa, Artificial Sequence
  Description of Artificial Sequence: Synthetic peptide
  Seed: MCSLMQGSTLPRRSG
MCSMMQMSALPLRSG

SEQ ID NO: 92159 - protein, 15 aa, Artificial Sequence
  Description of Artificial Sequence: Synthetic peptide
  Seed: MCSLMQGSTLPRRSG
MCSMMQMSALPVRSG

SEQ ID NO: 92160 - protein, 15 aa, Artificial Sequence
  Description of Artificial Sequence: Synthetic peptide
  Seed: MCSLMQGSTLPRRSG
MCSMMQMSGLPLRSG

SEQ ID NO: 92161 - protein, 15 aa, Artificial Sequence
  Description of Artificial Sequence: Synthetic peptide
  Seed: MCSLMQGSTLPRRSG
MCSMMQMSGLPVRSG

SEQ ID NO: 92162 - protein, 15 aa, Artificial Sequence
  Description of Artificial Sequence: Synthetic peptide
  Seed: MCSLMQGSTLPRRSG
MCSMMQMSKLPARSG

SEQ ID NO: 92163 - protein, 15 aa, Artificial Sequence
  Description of Artificial Sequence: Synthetic peptide
  Seed: MCSLMQGSTLPRRSG
MCSMMQMSKLPHRSG

SEQ ID NO: 92164 - protein, 15 aa, Artificial Sequence
  Description of Artificial Sequence: Synthetic peptide
  Seed: MCSLMQGSTLPRRSG
MCSMMQMSKLPKRSG

SEQ ID NO: 92165 - protein, 15 aa, Artificial Sequence
  Description of Artificial Sequence: Synthetic peptide
  Seed: MCSLMQGSTLPRRSG
MCSMMQMSKLPQRSG

SEQ ID NO: 92166 - protein, 15 aa, Artificial Sequence
  Description of Artificial Sequence: Synthetic peptide
  Seed: MCSLMQGSTLPRRSG
MCSMMQMSKLPRRSG

SEQ ID NO: 92167 - protein, 15 aa, Artificial Sequence
  Description of Artificial Sequence: Synthetic peptide
  Seed: MCSLMQGSTLPRRSG
MCSMMQMSKLPSRSG

SEQ ID NO: 92168 - protein, 15 aa, Artificial Sequence
  Description of Artificial Sequence: Synthetic peptide
  Seed: MCSLMQGSTLPRRSG
MCSMMQMSKLPTRSG

SEQ ID NO: 92169 - protein, 15 aa, Artificial Sequence
  Description of Artificial Sequence: Synthetic peptide
  Seed: MCSLMQGSTLPRRSG
MCSMMQMSRLPARSG

SEQ ID NO: 92170 - protein, 15 aa, Artificial Sequence
  Description of Artificial Sequence: Synthetic peptide
  Seed: MCSLMQGSTLPRRSG
MCSMMQMSRLPGRSG

SEQ ID NO: 92171 - protein, 15 aa, Artificial Sequence
  Description of Artificial Sequence: Synthetic peptide
  Seed: MCSLMQGSTLPRRSG
MCSMMQMSRLPHRSG

SEQ ID NO: 92172 - protein, 15 aa, Artificial Sequence
  Description of Artificial Sequence: Synthetic peptide
  Seed: MCSLMQGSTLPRRSG
MCSMMQMSRLPIRSG

SEQ ID NO: 92173 - protein, 15 aa, Artificial Sequence
  Description of Artificial Sequence: Synthetic peptide
  Seed: MCSLMQGSTLPRRSG
MCSMMQMSRLPKRSG

SEQ ID NO: 92174 - protein, 15 aa, Artificial Sequence
  Description of Artificial Sequence: Synthetic peptide
  Seed: MCSLMQGSTLPRRSG
MCSMMQMSRLPLRSG

SEQ ID NO: 92175 - protein, 15 aa, Artificial Sequence
  Description of Artificial Sequence: Synthetic peptide
  Seed: MCSLMQGSTLPRRSG
MCSMMQMSRLPMRSG

SEQ ID NO: 92176 - protein, 15 aa, Artificial Sequence
  Description of Artificial Sequence: Synthetic peptide
  Seed: MCSLMQGSTLPRRSG
MCSMMQMSRLPQRSG

SEQ ID NO: 92177 - protein, 15 aa, Artificial Sequence
  Description of Artificial Sequence: Synthetic peptide
  Seed: MCSLMQGSTLPRRSG
MCSMMQMSRLPRRSG

SEQ ID NO: 92178 - protein, 15 aa, Artificial Sequence
  Description of Artificial Sequence: Synthetic peptide
  Seed: MCSLMQGSTLPRRSG
MCSMMQMSRLPSRSG

SEQ ID NO: 92179 - protein, 15 aa, Artificial Sequence
  Description of Artificial Sequence: Synthetic peptide
  Seed: MCSLMQGSTLPRRSG
MCSMMQMSRLPTRSG

SEQ ID NO: 92180 - protein, 15 aa, Artificial Sequence
  Description of Artificial Sequence: Synthetic peptide
  Seed: MCSLMQGSTLPRRSG
MCSMMQMSRLPVRSG

SEQ ID NO: 92181 - protein, 15 aa, Artificial Sequence
  Description of Artificial Sequence: Synthetic peptide
  Seed: MCSLMQGSTLPRRSG
MCSMMQMSRLPYRSG

SEQ ID NO: 92182 - protein, 15 aa, Artificial Sequence
  Description of Artificial Sequence: Synthetic peptide
  Seed: MCSLMQGSTLPRRSG
MCSMMQMSSLPLRSG

SEQ ID NO: 92183 - protein, 15 aa, Artificial Sequence
  Description of Artificial Sequence: Synthetic peptide
  Seed: MCSLMQGSTLPRRSG
MCSMMQVSKLPARSG

SEQ ID NO: 92184 - protein, 15 aa, Artificial Sequence
  Description of Artificial Sequence: Synthetic peptide
  Seed: MCSLMQGSTLPRRSG
MCSMMQVSKLPSRSG

SEQ ID NO: 92185 - protein, 15 aa, Artificial Sequence
  Description of Artificial Sequence: Synthetic peptide
  Seed: MCSLMQGSTLPRRSG
MCSMMQVSRLPARSG

SEQ ID NO: 92186 - protein, 15 aa, Artificial Sequence
  Description of Artificial Sequence: Synthetic peptide
  Seed: MCSLMQGSTLPRRSG
MCSMMQVSRLPRRSG

SEQ ID NO: 92187 - protein, 15 aa, Artificial Sequence
  Description of Artificial Sequence: Synthetic peptide
  Seed: MCSLMQGSTLPRRSG
MCSMMQVSRLPSRSG

SEQ ID NO: 92188 - protein, 15 aa, Artificial Sequence
  Description of Artificial Sequence: Synthetic peptide
  Seed: MCSLMQGSTLPRRSG
MCSVMQASALPLRSG

SEQ ID NO: 92189 - protein, 15 aa, Artificial Sequence
  Description of Artificial Sequence: Synthetic peptide
  Seed: MCSLMQGSTLPRRSG
MCSVMQFSKLPRRSG

SEQ ID NO: 92190 - protein, 15 aa, Artificial Sequence
  Description of Artificial Sequence: Synthetic peptide
  Seed: MCSLMQGSTLPRRSG
MCSVMQFSRLPRRSG

SEQ ID NO: 92191 - protein, 15 aa, Artificial Sequence
  Description of Artificial Sequence: Synthetic peptide
  Seed: MCSLMQGSTLPRRSG
MCSVMQISALPLRSG

SEQ ID NO: 92192 - protein, 15 aa, Artificial Sequence
  Description of Artificial Sequence: Synthetic peptide
  Seed: MCSLMQGSTLPRRSG
MCSVMQISKLPARSG

SEQ ID NO: 92193 - protein, 15 aa, Artificial Sequence
  Description of Artificial Sequence: Synthetic peptide
  Seed: MCSLMQGSTLPRRSG
MCSVMQISKLPRRSG

SEQ ID NO: 92194 - protein, 15 aa, Artificial Sequence
  Description of Artificial Sequence: Synthetic peptide
  Seed: MCSLMQGSTLPRRSG
MCSVMQISKLPSRSG

SEQ ID NO: 92195 - protein, 15 aa, Artificial Sequence
  Description of Artificial Sequence: Synthetic peptide
  Seed: MCSLMQGSTLPRRSG
MCSVMQISKLPTRSG

SEQ ID NO: 92196 - protein, 15 aa, Artificial Sequence
  Description of Artificial Sequence: Synthetic peptide
  Seed: MCSLMQGSTLPRRSG
MCSVMQISRLPARSG

SEQ ID NO: 92197 - protein, 15 aa, Artificial Sequence
  Description of Artificial Sequence: Synthetic peptide
  Seed: MCSLMQGSTLPRRSG
MCSVMQISRLPGRSG

SEQ ID NO: 92198 - protein, 15 aa, Artificial Sequence
  Description of Artificial Sequence: Synthetic peptide
  Seed: MCSLMQGSTLPRRSG
MCSVMQISRLPHRSG

SEQ ID NO: 92199 - protein, 15 aa, Artificial Sequence
  Description of Artificial Sequence: Synthetic peptide
  Seed: MCSLMQGSTLPRRSG
MCSVMQISRLPKRSG

SEQ ID NO: 92200 - protein, 15 aa, Artificial Sequence
  Description of Artificial Sequence: Synthetic peptide
  Seed: MCSLMQGSTLPRRSG
MCSVMQISRLPMRSG

SEQ ID NO: 92201 - protein, 15 aa, Artificial Sequence
  Description of Artificial Sequence: Synthetic peptide
  Seed: MCSLMQGSTLPRRSG
MCSVMQISRLPQRSG

SEQ ID NO: 92202 - protein, 15 aa, Artificial Sequence
  Description of Artificial Sequence: Synthetic peptide
  Seed: MCSLMQGSTLPRRSG
MCSVMQISRLPRRSG

SEQ ID NO: 92203 - protein, 15 aa, Artificial Sequence
  Description of Artificial Sequence: Synthetic peptide
  Seed: MCSLMQGSTLPRRSG
MCSVMQISRLPSRSG

SEQ ID NO: 92204 - protein, 15 aa, Artificial Sequence
  Description of Artificial Sequence: Synthetic peptide
  Seed: MCSLMQGSTLPRRSG
MCSVMQISRLPTRSG

SEQ ID NO: 92205 - protein, 15 aa, Artificial Sequence
  Description of Artificial Sequence: Synthetic peptide
  Seed: MCSLMQGSTLPRRSG
MCSVMQISTLPARSG

SEQ ID NO: 92206 - protein, 15 aa, Artificial Sequence
  Description of Artificial Sequence: Synthetic peptide
  Seed: MCSLMQGSTLPRRSG
MCSVMQISTLPSRSG

SEQ ID NO: 92207 - protein, 15 aa, Artificial Sequence
  Description of Artificial Sequence: Synthetic peptide
  Seed: MCSLMQGSTLPRRSG
MCSVMQLSALPARSG

SEQ ID NO: 92208 - protein, 15 aa, Artificial Sequence
  Description of Artificial Sequence: Synthetic peptide
  Seed: MCSLMQGSTLPRRSG
MCSVMQLSALPIRSG

SEQ ID NO: 92209 - protein, 15 aa, Artificial Sequence
  Description of Artificial Sequence: Synthetic peptide
  Seed: MCSLMQGSTLPRRSG
MCSVMQLSALPLRSG

SEQ ID NO: 92210 - protein, 15 aa, Artificial Sequence
  Description of Artificial Sequence: Synthetic peptide
  Seed: MCSLMQGSTLPRRSG
MCSVMQLSALPVRSG

SEQ ID NO: 92211 - protein, 15 aa, Artificial Sequence
  Description of Artificial Sequence: Synthetic peptide
  Seed: MCSLMQGSTLPRRSG
MCSVMQLSGLPARSG

SEQ ID NO: 92212 - protein, 15 aa, Artificial Sequence
  Description of Artificial Sequence: Synthetic peptide
  Seed: MCSLMQGSTLPRRSG
MCSVMQLSGLPIRSG

SEQ ID NO: 92213 - protein, 15 aa, Artificial Sequence
  Description of Artificial Sequence: Synthetic peptide
  Seed: MCSLMQGSTLPRRSG
MCSVMQLSGLPLRSG

SEQ ID NO: 92214 - protein, 15 aa, Artificial Sequence
  Description of Artificial Sequence: Synthetic peptide
  Seed: MCSLMQGSTLPRRSG
MCSVMQLSGLPVRSG

SEQ ID NO: 92215 - protein, 15 aa, Artificial Sequence
  Description of Artificial Sequence: Synthetic peptide
  Seed: MCSLMQGSTLPRRSG
MCSVMQLSKLPARSG

SEQ ID NO: 92216 - protein, 15 aa, Artificial Sequence
  Description of Artificial Sequence: Synthetic peptide
  Seed: MCSLMQGSTLPRRSG
MCSVMQLSKLPHRSG

SEQ ID NO: 92217 - protein, 15 aa, Artificial Sequence
  Description of Artificial Sequence: Synthetic peptide
  Seed: MCSLMQGSTLPRRSG
MCSVMQLSKLPKRSG

SEQ ID NO: 92218 - protein, 15 aa, Artificial Sequence
  Description of Artificial Sequence: Synthetic peptide
  Seed: MCSLMQGSTLPRRSG
MCSVMQLSKLPRRSG

SEQ ID NO: 92219 - protein, 15 aa, Artificial Sequence
  Description of Artificial Sequence: Synthetic peptide
  Seed: MCSLMQGSTLPRRSG
MCSVMQLSKLPSRSG

SEQ ID NO: 92220 - protein, 15 aa, Artificial Sequence
  Description of Artificial Sequence: Synthetic peptide
  Seed: MCSLMQGSTLPRRSG
MCSVMQLSKLPTRSG

SEQ ID NO: 92221 - protein, 15 aa, Artificial Sequence
  Description of Artificial Sequence: Synthetic peptide
  Seed: MCSLMQGSTLPRRSG
MCSVMQLSRLPARSG

SEQ ID NO: 92222 - protein, 15 aa, Artificial Sequence
  Description of Artificial Sequence: Synthetic peptide
  Seed: MCSLMQGSTLPRRSG
MCSVMQLSRLPGRSG

SEQ ID NO: 92223 - protein, 15 aa, Artificial Sequence
  Description of Artificial Sequence: Synthetic peptide
  Seed: MCSLMQGSTLPRRSG
MCSVMQLSRLPHRSG

SEQ ID NO: 92224 - protein, 15 aa, Artificial Sequence
  Description of Artificial Sequence: Synthetic peptide
  Seed: MCSLMQGSTLPRRSG
MCSVMQLSRLPKRSG

SEQ ID NO: 92225 - protein, 15 aa, Artificial Sequence
  Description of Artificial Sequence: Synthetic peptide
  Seed: MCSLMQGSTLPRRSG
MCSVMQLSRLPLRSG

SEQ ID NO: 92226 - protein, 15 aa, Artificial Sequence
  Description of Artificial Sequence: Synthetic peptide
  Seed: MCSLMQGSTLPRRSG
MCSVMQLSRLPMRSG

SEQ ID NO: 92227 - protein, 15 aa, Artificial Sequence
  Description of Artificial Sequence: Synthetic peptide
  Seed: MCSLMQGSTLPRRSG
MCSVMQLSRLPQRSG

SEQ ID NO: 92228 - protein, 15 aa, Artificial Sequence
  Description of Artificial Sequence: Synthetic peptide
  Seed: MCSLMQGSTLPRRSG
MCSVMQLSRLPRRSG

SEQ ID NO: 92229 - protein, 15 aa, Artificial Sequence
  Description of Artificial Sequence: Synthetic peptide
  Seed: MCSLMQGSTLPRRSG
MCSVMQLSRLPSRSG

SEQ ID NO: 92230 - protein, 15 aa, Artificial Sequence
  Description of Artificial Sequence: Synthetic peptide
  Seed: MCSLMQGSTLPRRSG
MCSVMQLSRLPTRSG

SEQ ID NO: 92231 - protein, 15 aa, Artificial Sequence
  Description of Artificial Sequence: Synthetic peptide
  Seed: MCSLMQGSTLPRRSG
MCSVMQLSRLPVRSG

SEQ ID NO: 92232 - protein, 15 aa, Artificial Sequence
  Description of Artificial Sequence: Synthetic peptide
  Seed: MCSLMQGSTLPRRSG
MCSVMQLSSLPARSG

SEQ ID NO: 92233 - protein, 15 aa, Artificial Sequence
  Description of Artificial Sequence: Synthetic peptide
  Seed: MCSLMQGSTLPRRSG
MCSVMQLSSLPIRSG

SEQ ID NO: 92234 - protein, 15 aa, Artificial Sequence
  Description of Artificial Sequence: Synthetic peptide
  Seed: MCSLMQGSTLPRRSG
MCSVMQLSSLPLRSG

SEQ ID NO: 92235 - protein, 15 aa, Artificial Sequence
  Description of Artificial Sequence: Synthetic peptide
  Seed: MCSLMQGSTLPRRSG
MCSVMQLSSLPVRSG

SEQ ID NO: 92236 - protein, 15 aa, Artificial Sequence
  Description of Artificial Sequence: Synthetic peptide
  Seed: MCSLMQGSTLPRRSG
MCSVMQMSALPARSG

SEQ ID NO: 92237 - protein, 15 aa, Artificial Sequence
  Description of Artificial Sequence: Synthetic peptide
  Seed: MCSLMQGSTLPRRSG
MCSVMQMSALPIRSG

SEQ ID NO: 92238 - protein, 15 aa, Artificial Sequence
  Description of Artificial Sequence: Synthetic peptide
  Seed: MCSLMQGSTLPRRSG
MCSVMQMSALPLRSG

SEQ ID NO: 92239 - protein, 15 aa, Artificial Sequence
  Description of Artificial Sequence: Synthetic peptide
  Seed: MCSLMQGSTLPRRSG
MCSVMQMSALPVRSG

SEQ ID NO: 92240 - protein, 15 aa, Artificial Sequence
  Description of Artificial Sequence: Synthetic peptide
  Seed: MCSLMQGSTLPRRSG
MCSVMQMSGLPIRSG

SEQ ID NO: 92241 - protein, 15 aa, Artificial Sequence
  Description of Artificial Sequence: Synthetic peptide
  Seed: MCSLMQGSTLPRRSG
MCSVMQMSGLPLRSG

SEQ ID NO: 92242 - protein, 15 aa, Artificial Sequence
  Description of Artificial Sequence: Synthetic peptide
  Seed: MCSLMQGSTLPRRSG
MCSVMQMSGLPVRSG

SEQ ID NO: 92243 - protein, 15 aa, Artificial Sequence
  Description of Artificial Sequence: Synthetic peptide
  Seed: MCSLMQGSTLPRRSG
MCSVMQMSKLPARSG

SEQ ID NO: 92244 - protein, 15 aa, Artificial Sequence
  Description of Artificial Sequence: Synthetic peptide
  Seed: MCSLMQGSTLPRRSG
MCSVMQMSKLPHRSG

SEQ ID NO: 92245 - protein, 15 aa, Artificial Sequence
  Description of Artificial Sequence: Synthetic peptide
  Seed: MCSLMQGSTLPRRSG
MCSVMQMSKLPKRSG

SEQ ID NO: 92246 - protein, 15 aa, Artificial Sequence
  Description of Artificial Sequence: Synthetic peptide
  Seed: MCSLMQGSTLPRRSG
MCSVMQMSKLPMRSG

SEQ ID NO: 92247 - protein, 15 aa, Artificial Sequence
  Description of Artificial Sequence: Synthetic peptide
  Seed: MCSLMQGSTLPRRSG
MCSVMQMSKLPQRSG

SEQ ID NO: 92248 - protein, 15 aa, Artificial Sequence
  Description of Artificial Sequence: Synthetic peptide
  Seed: MCSLMQGSTLPRRSG
MCSVMQMSKLPRRSG

SEQ ID NO: 92249 - protein, 15 aa, Artificial Sequence
  Description of Artificial Sequence: Synthetic peptide
  Seed: MCSLMQGSTLPRRSG
MCSVMQMSKLPSRSG

SEQ ID NO: 92250 - protein, 15 aa, Artificial Sequence
  Description of Artificial Sequence: Synthetic peptide
  Seed: MCSLMQGSTLPRRSG
MCSVMQMSKLPTRSG

SEQ ID NO: 92251 - protein, 15 aa, Artificial Sequence
  Description of Artificial Sequence: Synthetic peptide
  Seed: MCSLMQGSTLPRRSG
MCSVMQMSNLPARSG

SEQ ID NO: 92252 - protein, 15 aa, Artificial Sequence
  Description of Artificial Sequence: Synthetic peptide
  Seed: MCSLMQGSTLPRRSG
MCSVMQMSNLPSRSG

SEQ ID NO: 92253 - protein, 15 aa, Artificial Sequence
  Description of Artificial Sequence: Synthetic peptide
  Seed: MCSLMQGSTLPRRSG
MCSVMQMSRLPARSG

SEQ ID NO: 92254 - protein, 15 aa, Artificial Sequence
  Description of Artificial Sequence: Synthetic peptide
  Seed: MCSLMQGSTLPRRSG
MCSVMQMSRLPGRSG

SEQ ID NO: 92255 - protein, 15 aa, Artificial Sequence
  Description of Artificial Sequence: Synthetic peptide
  Seed: MCSLMQGSTLPRRSG
MCSVMQMSRLPHRSG

SEQ ID NO: 92256 - protein, 15 aa, Artificial Sequence
  Description of Artificial Sequence: Synthetic peptide
  Seed: MCSLMQGSTLPRRSG
MCSVMQMSRLPIRSG

SEQ ID NO: 92257 - protein, 15 aa, Artificial Sequence
  Description of Artificial Sequence: Synthetic peptide
  Seed: MCSLMQGSTLPRRSG
MCSVMQMSRLPKRSG

SEQ ID NO: 92258 - protein, 15 aa, Artificial Sequence
  Description of Artificial Sequence: Synthetic peptide
  Seed: MCSLMQGSTLPRRSG
MCSVMQMSRLPLRSG

SEQ ID NO: 92259 - protein, 15 aa, Artificial Sequence
  Description of Artificial Sequence: Synthetic peptide
  Seed: MCSLMQGSTLPRRSG
MCSVMQMSRLPMRSG

SEQ ID NO: 92260 - protein, 15 aa, Artificial Sequence
  Description of Artificial Sequence: Synthetic peptide
  Seed: MCSLMQGSTLPRRSG
MCSVMQMSRLPQRSG

SEQ ID NO: 92261 - protein, 15 aa, Artificial Sequence
  Description of Artificial Sequence: Synthetic peptide
  Seed: MCSLMQGSTLPRRSG
MCSVMQMSRLPRRSG

SEQ ID NO: 92262 - protein, 15 aa, Artificial Sequence
  Description of Artificial Sequence: Synthetic peptide
  Seed: MCSLMQGSTLPRRSG
MCSVMQMSRLPSRSG

SEQ ID NO: 92263 - protein, 15 aa, Artificial Sequence
  Description of Artificial Sequence: Synthetic peptide
  Seed: MCSLMQGSTLPRRSG
MCSVMQMSRLPTRSG

SEQ ID NO: 92264 - protein, 15 aa, Artificial Sequence
  Description of Artificial Sequence: Synthetic peptide
  Seed: MCSLMQGSTLPRRSG
MCSVMQMSRLPVRSG

SEQ ID NO: 92265 - protein, 15 aa, Artificial Sequence
  Description of Artificial Sequence: Synthetic peptide
  Seed: MCSLMQGSTLPRRSG
MCSVMQMSSLPIRSG

SEQ ID NO: 92266 - protein, 15 aa, Artificial Sequence
  Description of Artificial Sequence: Synthetic peptide
  Seed: MCSLMQGSTLPRRSG
MCSVMQMSSLPLRSG

SEQ ID NO: 92267 - protein, 15 aa, Artificial Sequence
  Description of Artificial Sequence: Synthetic peptide
  Seed: MCSLMQGSTLPRRSG
MCSVMQMSSLPVRSG

SEQ ID NO: 92268 - protein, 15 aa, Artificial Sequence
  Description of Artificial Sequence: Synthetic peptide
  Seed: MCSLMQGSTLPRRSG
MCSVMQMSTLPARSG

SEQ ID NO: 92269 - protein, 15 aa, Artificial Sequence
  Description of Artificial Sequence: Synthetic peptide
  Seed: MCSLMQGSTLPRRSG
MCSVMQMSTLPSRSG

SEQ ID NO: 92270 - protein, 15 aa, Artificial Sequence
  Description of Artificial Sequence: Synthetic peptide
  Seed: MCSLMQGSTLPRRSG
MCSVMQVSKLPARSG

SEQ ID NO: 92271 - protein, 15 aa, Artificial Sequence
  Description of Artificial Sequence: Synthetic peptide
  Seed: MCSLMQGSTLPRRSG
MCSVMQVSKLPSRSG

SEQ ID NO: 92272 - protein, 15 aa, Artificial Sequence
  Description of Artificial Sequence: Synthetic peptide
  Seed: MCSLMQGSTLPRRSG
MCSVMQVSRLPARSG

SEQ ID NO: 92273 - protein, 15 aa, Artificial Sequence
  Description of Artificial Sequence: Synthetic peptide
  Seed: MCSLMQGSTLPRRSG
MCSVMQVSRLPRRSG

SEQ ID NO: 92274 - protein, 15 aa, Artificial Sequence
  Description of Artificial Sequence: Synthetic peptide
  Seed: MCSLMQGSTLPRRSG
MCSVMQVSRLPSRSG

SEQ ID NO: 92275 - protein, 15 aa, Artificial Sequence
  Description of Artificial Sequence: Synthetic peptide
  Seed: MCSLMQGSTLPRRSG
MCSWMQASALPFRSG

SEQ ID NO: 92276 - protein, 15 aa, Artificial Sequence
  Description of Artificial Sequence: Synthetic peptide
  Seed: MCSLMQGSTLPRRSG
MCSWMQASALPIRSG

SEQ ID NO: 92277 - protein, 15 aa, Artificial Sequence
  Description of Artificial Sequence: Synthetic peptide
  Seed: MCSLMQGSTLPRRSG
MCSWMQASALPLRSG

SEQ ID NO: 92278 - protein, 15 aa, Artificial Sequence
  Description of Artificial Sequence: Synthetic peptide
  Seed: MCSLMQGSTLPRRSG
MCSWMQASALPMRSG

SEQ ID NO: 92279 - protein, 15 aa, Artificial Sequence
  Description of Artificial Sequence: Synthetic peptide
  Seed: MCSLMQGSTLPRRSG
MCSWMQASALPVRSG

SEQ ID NO: 92280 - protein, 15 aa, Artificial Sequence
  Description of Artificial Sequence: Synthetic peptide
  Seed: MCSLMQGSTLPRRSG
MCSWMQASGLPIRSG

SEQ ID NO: 92281 - protein, 15 aa, Artificial Sequence
  Description of Artificial Sequence: Synthetic peptide
  Seed: MCSLMQGSTLPRRSG
MCSWMQASGLPLRSG

SEQ ID NO: 92282 - protein, 15 aa, Artificial Sequence
  Description of Artificial Sequence: Synthetic peptide
  Seed: MCSLMQGSTLPRRSG
MCSWMQASPLPIRSG

SEQ ID NO: 92283 - protein, 15 aa, Artificial Sequence
  Description of Artificial Sequence: Synthetic peptide
  Seed: MCSLMQGSTLPRRSG
MCSWMQASPLPLRSG

SEQ ID NO: 92284 - protein, 15 aa, Artificial Sequence
  Description of Artificial Sequence: Synthetic peptide
  Seed: MCSLMQGSTLPRRSG
MCSWMQASSLPIRSG

SEQ ID NO: 92285 - protein, 15 aa, Artificial Sequence
  Description of Artificial Sequence: Synthetic peptide
  Seed: MCSLMQGSTLPRRSG
MCSWMQASSLPLRSG

SEQ ID NO: 92286 - protein, 15 aa, Artificial Sequence
  Description of Artificial Sequence: Synthetic peptide
  Seed: MCSLMQGSTLPRRSG
MCSWMQASSLPMRSG

SEQ ID NO: 92287 - protein, 15 aa, Artificial Sequence
  Description of Artificial Sequence: Synthetic peptide
  Seed: MCSLMQGSTLPRRSG
MCSWMQASSLPVRSG

SEQ ID NO: 92288 - protein, 15 aa, Artificial Sequence
  Description of Artificial Sequence: Synthetic peptide
  Seed: MCSLMQGSTLPRRSG
MCSWMQASTLPIRSG

SEQ ID NO: 92289 - protein, 15 aa, Artificial Sequence
  Description of Artificial Sequence: Synthetic peptide
  Seed: MCSLMQGSTLPRRSG
MCSWMQLSRLPRRSG

SEQ ID NO: 92290 - protein, 15 aa, Artificial Sequence
  Description of Artificial Sequence: Synthetic peptide
  Seed: MCSLMQGSTLPRRSG
MCSWMQMSRLPRRSG

SEQ ID NO: 92291 - protein, 15 aa, Artificial Sequence
  Description of Artificial Sequence: Synthetic peptide
  Seed: MCSLMQGSTLPRRSG
MCSWMQSSALPFRSG

SEQ ID NO: 92292 - protein, 15 aa, Artificial Sequence
  Description of Artificial Sequence: Synthetic peptide
  Seed: MCSLMQGSTLPRRSG
MCSWMQSSALPIRSG

SEQ ID NO: 92293 - protein, 15 aa, Artificial Sequence
  Description of Artificial Sequence: Synthetic peptide
  Seed: MCSLMQGSTLPRRSG
MCSWMQSSALPLRSG

SEQ ID NO: 92294 - protein, 15 aa, Artificial Sequence
  Description of Artificial Sequence: Synthetic peptide
  Seed: MCSLMQGSTLPRRSG
MCSWMQSSALPMRSG

SEQ ID NO: 92295 - protein, 15 aa, Artificial Sequence
  Description of Artificial Sequence: Synthetic peptide
  Seed: MCSLMQGSTLPRRSG
MCSWMQSSALPVRSG

SEQ ID NO: 92296 - protein, 15 aa, Artificial Sequence
  Description of Artificial Sequence: Synthetic peptide
  Seed: MCSLMQGSTLPRRSG
MCSWMQSSSLPIRSG

SEQ ID NO: 92297 - protein, 15 aa, Artificial Sequence
  Description of Artificial Sequence: Synthetic peptide
  Seed: MCSLMQGSTLPRRSG
MCSWMQSSSLPLRSG

SEQ ID NO: 92298 - protein, 15 aa, Artificial Sequence
  Description of Artificial Sequence: Synthetic peptide
  Seed: MCSLMQGSTLPRRSG
MCSWMQSSSLPMRSG

SEQ ID NO: 92299 - protein, 15 aa, Artificial Sequence
  Description of Artificial Sequence: Synthetic peptide
  Seed: MCSLMQGSTLPRRSG
MCSWMQSSSLPVRSG

SEQ ID NO: 92300 - protein, 15 aa, Artificial Sequence
  Description of Artificial Sequence: Synthetic peptide
  Seed: MCSLMQGSTLPRRSG
MCSWMQTSALPIRSG

SEQ ID NO: 92301 - protein, 15 aa, Artificial Sequence
  Description of Artificial Sequence: Synthetic peptide
  Seed: MCSLMQGSTLPRRSG
MCSWMQTSALPLRSG

SEQ ID NO: 92302 - protein, 15 aa, Artificial Sequence
  Description of Artificial Sequence: Synthetic peptide
  Seed: MCSLMQGSTLPRRSG
MCSWMQTSALPVRSG

SEQ ID NO: 92303 - protein, 15 aa, Artificial Sequence
  Description of Artificial Sequence: Synthetic peptide
  Seed: MCSLMQGSTLPRRSG
MCSWMQTSSLPIRSG

SEQ ID NO: 92304 - protein, 15 aa, Artificial Sequence
  Description of Artificial Sequence: Synthetic peptide
  Seed: MCSLMQGSTLPRRSG
MCSWMQTSSLPLRSG

SEQ ID NO: 92305 - protein, 15 aa, Artificial Sequence
  Description of Artificial Sequence: Synthetic peptide
  Seed: MCSLMQGSTLPRRSG
MCSWMQTSSLPVRSG

SEQ ID NO: 92306 - protein, 15 aa, Artificial Sequence
  Description of Artificial Sequence: Synthetic peptide
  Seed: MCSLMQGSTLPRRSG
MCSWMQVSALPIRSG

SEQ ID NO: 92307 - protein, 15 aa, Artificial Sequence
  Description of Artificial Sequence: Synthetic peptide
  Seed: MCSLMQGSTLPRRSG
MCSYMQASALPFRSG

SEQ ID NO: 92308 - protein, 15 aa, Artificial Sequence
  Description of Artificial Sequence: Synthetic peptide
  Seed: MCSLMQGSTLPRRSG
MCSYMQASALPIRSG

SEQ ID NO: 92309 - protein, 15 aa, Artificial Sequence
  Description of Artificial Sequence: Synthetic peptide
  Seed: MCSLMQGSTLPRRSG
MCSYMQASALPLRSG

SEQ ID NO: 92310 - protein, 15 aa, Artificial Sequence
  Description of Artificial Sequence: Synthetic peptide
  Seed: MCSLMQGSTLPRRSG
MCSYMQASALPMRSG

SEQ ID NO: 92311 - protein, 15 aa, Artificial Sequence
  Description of Artificial Sequence: Synthetic peptide
  Seed: MCSLMQGSTLPRRSG
MCSYMQASALPVRSG

SEQ ID NO: 92312 - protein, 15 aa, Artificial Sequence
  Description of Artificial Sequence: Synthetic peptide
  Seed: MCSLMQGSTLPRRSG
MCSYMQASGLPIRSG

SEQ ID NO: 92313 - protein, 15 aa, Artificial Sequence
  Description of Artificial Sequence: Synthetic peptide
  Seed: MCSLMQGSTLPRRSG
MCSYMQASGLPLRSG

SEQ ID NO: 92314 - protein, 15 aa, Artificial Sequence
  Description of Artificial Sequence: Synthetic peptide
  Seed: MCSLMQGSTLPRRSG
MCSYMQASGLPMRSG

SEQ ID NO: 92315 - protein, 15 aa, Artificial Sequence
  Description of Artificial Sequence: Synthetic peptide
  Seed: MCSLMQGSTLPRRSG
MCSYMQASGLPVRSG

SEQ ID NO: 92316 - protein, 15 aa, Artificial Sequence
  Description of Artificial Sequence: Synthetic peptide
  Seed: MCSLMQGSTLPRRSG
MCSYMQASPLPIRSG

SEQ ID NO: 92317 - protein, 15 aa, Artificial Sequence
  Description of Artificial Sequence: Synthetic peptide
  Seed: MCSLMQGSTLPRRSG
MCSYMQASPLPLRSG

SEQ ID NO: 92318 - protein, 15 aa, Artificial Sequence
  Description of Artificial Sequence: Synthetic peptide
  Seed: MCSLMQGSTLPRRSG
MCSYMQASPLPMRSG

SEQ ID NO: 92319 - protein, 15 aa, Artificial Sequence
  Description of Artificial Sequence: Synthetic peptide
  Seed: MCSLMQGSTLPRRSG
MCSYMQASPLPVRSG

SEQ ID NO: 92320 - protein, 15 aa, Artificial Sequence
  Description of Artificial Sequence: Synthetic peptide
  Seed: MCSLMQGSTLPRRSG
MCSYMQASSLPFRSG

SEQ ID NO: 92321 - protein, 15 aa, Artificial Sequence
  Description of Artificial Sequence: Synthetic peptide
  Seed: MCSLMQGSTLPRRSG
MCSYMQASSLPIRSG

SEQ ID NO: 92322 - protein, 15 aa, Artificial Sequence
  Description of Artificial Sequence: Synthetic peptide
  Seed: MCSLMQGSTLPRRSG
MCSYMQASSLPLRSG

SEQ ID NO: 92323 - protein, 15 aa, Artificial Sequence
  Description of Artificial Sequence: Synthetic peptide
  Seed: MCSLMQGSTLPRRSG
MCSYMQASSLPMRSG

SEQ ID NO: 92324 - protein, 15 aa, Artificial Sequence
  Description of Artificial Sequence: Synthetic peptide
  Seed: MCSLMQGSTLPRRSG
MCSYMQASSLPVRSG

SEQ ID NO: 92325 - protein, 15 aa, Artificial Sequence
  Description of Artificial Sequence: Synthetic peptide
  Seed: MCSLMQGSTLPRRSG
MCSYMQASTLPIRSG

SEQ ID NO: 92326 - protein, 15 aa, Artificial Sequence
  Description of Artificial Sequence: Synthetic peptide
  Seed: MCSLMQGSTLPRRSG
MCSYMQASTLPLRSG

SEQ ID NO: 92327 - protein, 15 aa, Artificial Sequence
  Description of Artificial Sequence: Synthetic peptide
  Seed: MCSLMQGSTLPRRSG
MCSYMQASTLPMRSG

SEQ ID NO: 92328 - protein, 15 aa, Artificial Sequence
  Description of Artificial Sequence: Synthetic peptide
  Seed: MCSLMQGSTLPRRSG
MCSYMQASTLPVRSG

SEQ ID NO: 92329 - protein, 15 aa, Artificial Sequence
  Description of Artificial Sequence: Synthetic peptide
  Seed: MCSLMQGSTLPRRSG
MCSYMQASVLPIRSG

SEQ ID NO: 92330 - protein, 15 aa, Artificial Sequence
  Description of Artificial Sequence: Synthetic peptide
  Seed: MCSLMQGSTLPRRSG
MCSYMQASVLPLRSG

SEQ ID NO: 92331 - protein, 15 aa, Artificial Sequence
  Description of Artificial Sequence: Synthetic peptide
  Seed: MCSLMQGSTLPRRSG
MCSYMQASVLPVRSG

SEQ ID NO: 92332 - protein, 15 aa, Artificial Sequence
  Description of Artificial Sequence: Synthetic peptide
  Seed: MCSLMQGSTLPRRSG
MCSYMQFSALPIRSG

SEQ ID NO: 92333 - protein, 15 aa, Artificial Sequence
  Description of Artificial Sequence: Synthetic peptide
  Seed: MCSLMQGSTLPRRSG
MCSYMQFSALPLRSG

SEQ ID NO: 92334 - protein, 15 aa, Artificial Sequence
  Description of Artificial Sequence: Synthetic peptide
  Seed: MCSLMQGSTLPRRSG
MCSYMQFSALPVRSG

SEQ ID NO: 92335 - protein, 15 aa, Artificial Sequence
  Description of Artificial Sequence: Synthetic peptide
  Seed: MCSLMQGSTLPRRSG
MCSYMQFSKLPRRSG

SEQ ID NO: 92336 - protein, 15 aa, Artificial Sequence
  Description of Artificial Sequence: Synthetic peptide
  Seed: MCSLMQGSTLPRRSG
MCSYMQFSNLPLRSG

SEQ ID NO: 92337 - protein, 15 aa, Artificial Sequence
  Description of Artificial Sequence: Synthetic peptide
  Seed: MCSLMQGSTLPRRSG
MCSYMQFSRLPRRSG

SEQ ID NO: 92338 - protein, 15 aa, Artificial Sequence
  Description of Artificial Sequence: Synthetic peptide
  Seed: MCSLMQGSTLPRRSG
MCSYMQFSSLPARSG

SEQ ID NO: 92339 - protein, 15 aa, Artificial Sequence
  Description of Artificial Sequence: Synthetic peptide
  Seed: MCSLMQGSTLPRRSG
MCSYMQFSSLPIRSG

SEQ ID NO: 92340 - protein, 15 aa, Artificial Sequence
  Description of Artificial Sequence: Synthetic peptide
  Seed: MCSLMQGSTLPRRSG
MCSYMQFSSLPLRSG

SEQ ID NO: 92341 - protein, 15 aa, Artificial Sequence
  Description of Artificial Sequence: Synthetic peptide
  Seed: MCSLMQGSTLPRRSG
MCSYMQFSSLPMRSG

SEQ ID NO: 92342 - protein, 15 aa, Artificial Sequence
  Description of Artificial Sequence: Synthetic peptide
  Seed: MCSLMQGSTLPRRSG
MCSYMQFSSLPVRSG

SEQ ID NO: 92343 - protein, 15 aa, Artificial Sequence
  Description of Artificial Sequence: Synthetic peptide
  Seed: MCSLMQGSTLPRRSG
MCSYMQFSTLPLRSG

SEQ ID NO: 92344 - protein, 15 aa, Artificial Sequence
  Description of Artificial Sequence: Synthetic peptide
  Seed: MCSLMQGSTLPRRSG
MCSYMQGSALPIRSG

SEQ ID NO: 92345 - protein, 15 aa, Artificial Sequence
  Description of Artificial Sequence: Synthetic peptide
  Seed: MCSLMQGSTLPRRSG
MCSYMQISALPIRSG

SEQ ID NO: 92346 - protein, 15 aa, Artificial Sequence
  Description of Artificial Sequence: Synthetic peptide
  Seed: MCSLMQGSTLPRRSG
MCSYMQISALPLRSG

SEQ ID NO: 92347 - protein, 15 aa, Artificial Sequence
  Description of Artificial Sequence: Synthetic peptide
  Seed: MCSLMQGSTLPRRSG
MCSYMQISALPVRSG

SEQ ID NO: 92348 - protein, 15 aa, Artificial Sequence
  Description of Artificial Sequence: Synthetic peptide
  Seed: MCSLMQGSTLPRRSG
MCSYMQISGLPIRSG

SEQ ID NO: 92349 - protein, 15 aa, Artificial Sequence
  Description of Artificial Sequence: Synthetic peptide
  Seed: MCSLMQGSTLPRRSG
MCSYMQISGLPLRSG

SEQ ID NO: 92350 - protein, 15 aa, Artificial Sequence
  Description of Artificial Sequence: Synthetic peptide
  Seed: MCSLMQGSTLPRRSG
MCSYMQISGLPVRSG

SEQ ID NO: 92351 - protein, 15 aa, Artificial Sequence
  Description of Artificial Sequence: Synthetic peptide
  Seed: MCSLMQGSTLPRRSG
MCSYMQISNLPIRSG

SEQ ID NO: 92352 - protein, 15 aa, Artificial Sequence
  Description of Artificial Sequence: Synthetic peptide
  Seed: MCSLMQGSTLPRRSG
MCSYMQISNLPLRSG

SEQ ID NO: 92353 - protein, 15 aa, Artificial Sequence
  Description of Artificial Sequence: Synthetic peptide
  Seed: MCSLMQGSTLPRRSG
MCSYMQISNLPVRSG

SEQ ID NO: 92354 - protein, 15 aa, Artificial Sequence
  Description of Artificial Sequence: Synthetic peptide
  Seed: MCSLMQGSTLPRRSG
MCSYMQISPLPIRSG

SEQ ID NO: 92355 - protein, 15 aa, Artificial Sequence
  Description of Artificial Sequence: Synthetic peptide
  Seed: MCSLMQGSTLPRRSG
MCSYMQISRLPSRSG

SEQ ID NO: 92356 - protein, 15 aa, Artificial Sequence
  Description of Artificial Sequence: Synthetic peptide
  Seed: MCSLMQGSTLPRRSG
MCSYMQISSLPARSG

SEQ ID NO: 92357 - protein, 15 aa, Artificial Sequence
  Description of Artificial Sequence: Synthetic peptide
  Seed: MCSLMQGSTLPRRSG
MCSYMQISSLPIRSG

SEQ ID NO: 92358 - protein, 15 aa, Artificial Sequence
  Description of Artificial Sequence: Synthetic peptide
  Seed: MCSLMQGSTLPRRSG
MCSYMQISSLPLRSG

SEQ ID NO: 92359 - protein, 15 aa, Artificial Sequence
  Description of Artificial Sequence: Synthetic peptide
  Seed: MCSLMQGSTLPRRSG
MCSYMQISSLPMRSG

SEQ ID NO: 92360 - protein, 15 aa, Artificial Sequence
  Description of Artificial Sequence: Synthetic peptide
  Seed: MCSLMQGSTLPRRSG
MCSYMQISSLPVRSG

SEQ ID NO: 92361 - protein, 15 aa, Artificial Sequence
  Description of Artificial Sequence: Synthetic peptide
  Seed: MCSLMQGSTLPRRSG
MCSYMQISTLPLRSG

SEQ ID NO: 92362 - protein, 15 aa, Artificial Sequence
  Description of Artificial Sequence: Synthetic peptide
  Seed: MCSLMQGSTLPRRSG
MCSYMQLSALPIRSG

SEQ ID NO: 92363 - protein, 15 aa, Artificial Sequence
  Description of Artificial Sequence: Synthetic peptide
  Seed: MCSLMQGSTLPRRSG
MCSYMQLSALPLRSG

SEQ ID NO: 92364 - protein, 15 aa, Artificial Sequence
  Description of Artificial Sequence: Synthetic peptide
  Seed: MCSLMQGSTLPRRSG
MCSYMQLSALPVRSG

SEQ ID NO: 92365 - protein, 15 aa, Artificial Sequence
  Description of Artificial Sequence: Synthetic peptide
  Seed: MCSLMQGSTLPRRSG
MCSYMQLSGLPIRSG

SEQ ID NO: 92366 - protein, 15 aa, Artificial Sequence
  Description of Artificial Sequence: Synthetic peptide
  Seed: MCSLMQGSTLPRRSG
MCSYMQLSGLPLRSG

SEQ ID NO: 92367 - protein, 15 aa, Artificial Sequence
  Description of Artificial Sequence: Synthetic peptide
  Seed: MCSLMQGSTLPRRSG
MCSYMQLSGLPVRSG

SEQ ID NO: 92368 - protein, 15 aa, Artificial Sequence
  Description of Artificial Sequence: Synthetic peptide
  Seed: MCSLMQGSTLPRRSG
MCSYMQLSKLPRRSG

SEQ ID NO: 92369 - protein, 15 aa, Artificial Sequence
  Description of Artificial Sequence: Synthetic peptide
  Seed: MCSLMQGSTLPRRSG
MCSYMQLSNLPLRSG

SEQ ID NO: 92370 - protein, 15 aa, Artificial Sequence
  Description of Artificial Sequence: Synthetic peptide
  Seed: MCSLMQGSTLPRRSG
MCSYMQLSNLPVRSG

SEQ ID NO: 92371 - protein, 15 aa, Artificial Sequence
  Description of Artificial Sequence: Synthetic peptide
  Seed: MCSLMQGSTLPRRSG
MCSYMQLSRLPKRSG

SEQ ID NO: 92372 - protein, 15 aa, Artificial Sequence
  Description of Artificial Sequence: Synthetic peptide
  Seed: MCSLMQGSTLPRRSG
MCSYMQLSRLPRRSG

SEQ ID NO: 92373 - protein, 15 aa, Artificial Sequence
  Description of Artificial Sequence: Synthetic peptide
  Seed: MCSLMQGSTLPRRSG
MCSYMQLSSLPIRSG

SEQ ID NO: 92374 - protein, 15 aa, Artificial Sequence
  Description of Artificial Sequence: Synthetic peptide
  Seed: MCSLMQGSTLPRRSG
MCSYMQLSSLPLRSG

SEQ ID NO: 92375 - protein, 15 aa, Artificial Sequence
  Description of Artificial Sequence: Synthetic peptide
  Seed: MCSLMQGSTLPRRSG
MCSYMQLSSLPVRSG

SEQ ID NO: 92376 - protein, 15 aa, Artificial Sequence
  Description of Artificial Sequence: Synthetic peptide
  Seed: MCSLMQGSTLPRRSG
MCSYMQMSALPIRSG

SEQ ID NO: 92377 - protein, 15 aa, Artificial Sequence
  Description of Artificial Sequence: Synthetic peptide
  Seed: MCSLMQGSTLPRRSG
MCSYMQMSALPLRSG

SEQ ID NO: 92378 - protein, 15 aa, Artificial Sequence
  Description of Artificial Sequence: Synthetic peptide
  Seed: MCSLMQGSTLPRRSG
MCSYMQMSALPVRSG

SEQ ID NO: 92379 - protein, 15 aa, Artificial Sequence
  Description of Artificial Sequence: Synthetic peptide
  Seed: MCSLMQGSTLPRRSG
MCSYMQMSGLPIRSG

SEQ ID NO: 92380 - protein, 15 aa, Artificial Sequence
  Description of Artificial Sequence: Synthetic peptide
  Seed: MCSLMQGSTLPRRSG
MCSYMQMSGLPLRSG

SEQ ID NO: 92381 - protein, 15 aa, Artificial Sequence
  Description of Artificial Sequence: Synthetic peptide
  Seed: MCSLMQGSTLPRRSG
MCSYMQMSKLPRRSG

SEQ ID NO: 92382 - protein, 15 aa, Artificial Sequence
  Description of Artificial Sequence: Synthetic peptide
  Seed: MCSLMQGSTLPRRSG
MCSYMQMSNLPLRSG

SEQ ID NO: 92383 - protein, 15 aa, Artificial Sequence
  Description of Artificial Sequence: Synthetic peptide
  Seed: MCSLMQGSTLPRRSG
MCSYMQMSRLPRRSG

SEQ ID NO: 92384 - protein, 15 aa, Artificial Sequence
  Description of Artificial Sequence: Synthetic peptide
  Seed: MCSLMQGSTLPRRSG
MCSYMQMSSLPIRSG

SEQ ID NO: 92385 - protein, 15 aa, Artificial Sequence
  Description of Artificial Sequence: Synthetic peptide
  Seed: MCSLMQGSTLPRRSG
MCSYMQMSSLPLRSG

SEQ ID NO: 92386 - protein, 15 aa, Artificial Sequence
  Description of Artificial Sequence: Synthetic peptide
  Seed: MCSLMQGSTLPRRSG
MCSYMQMSSLPVRSG

SEQ ID NO: 92387 - protein, 15 aa, Artificial Sequence
  Description of Artificial Sequence: Synthetic peptide
  Seed: MCSLMQGSTLPRRSG
MCSYMQSSALPFRSG

SEQ ID NO: 92388 - protein, 15 aa, Artificial Sequence
  Description of Artificial Sequence: Synthetic peptide
  Seed: MCSLMQGSTLPRRSG
MCSYMQSSALPIRSG

SEQ ID NO: 92389 - protein, 15 aa, Artificial Sequence
  Description of Artificial Sequence: Synthetic peptide
  Seed: MCSLMQGSTLPRRSG
MCSYMQSSALPLRSG

SEQ ID NO: 92390 - protein, 15 aa, Artificial Sequence
  Description of Artificial Sequence: Synthetic peptide
  Seed: MCSLMQGSTLPRRSG
MCSYMQSSALPMRSG

SEQ ID NO: 92391 - protein, 15 aa, Artificial Sequence
  Description of Artificial Sequence: Synthetic peptide
  Seed: MCSLMQGSTLPRRSG
MCSYMQSSALPVRSG

SEQ ID NO: 92392 - protein, 15 aa, Artificial Sequence
  Description of Artificial Sequence: Synthetic peptide
  Seed: MCSLMQGSTLPRRSG
MCSYMQSSGLPIRSG

SEQ ID NO: 92393 - protein, 15 aa, Artificial Sequence
  Description of Artificial Sequence: Synthetic peptide
  Seed: MCSLMQGSTLPRRSG
MCSYMQSSGLPLRSG

SEQ ID NO: 92394 - protein, 15 aa, Artificial Sequence
  Description of Artificial Sequence: Synthetic peptide
  Seed: MCSLMQGSTLPRRSG
MCSYMQSSGLPMRSG

SEQ ID NO: 92395 - protein, 15 aa, Artificial Sequence
  Description of Artificial Sequence: Synthetic peptide
  Seed: MCSLMQGSTLPRRSG
MCSYMQSSGLPVRSG

SEQ ID NO: 92396 - protein, 15 aa, Artificial Sequence
  Description of Artificial Sequence: Synthetic peptide
  Seed: MCSLMQGSTLPRRSG
MCSYMQSSPLPIRSG

SEQ ID NO: 92397 - protein, 15 aa, Artificial Sequence
  Description of Artificial Sequence: Synthetic peptide
  Seed: MCSLMQGSTLPRRSG
MCSYMQSSPLPLRSG

SEQ ID NO: 92398 - protein, 15 aa, Artificial Sequence
  Description of Artificial Sequence: Synthetic peptide
  Seed: MCSLMQGSTLPRRSG
MCSYMQSSPLPVRSG

SEQ ID NO: 92399 - protein, 15 aa, Artificial Sequence
  Description of Artificial Sequence: Synthetic peptide
  Seed: MCSLMQGSTLPRRSG
MCSYMQSSSLPFRSG

SEQ ID NO: 92400 - protein, 15 aa, Artificial Sequence
  Description of Artificial Sequence: Synthetic peptide
  Seed: MCSLMQGSTLPRRSG
MCSYMQSSSLPIRSG

SEQ ID NO: 92401 - protein, 15 aa, Artificial Sequence
  Description of Artificial Sequence: Synthetic peptide
  Seed: MCSLMQGSTLPRRSG
MCSYMQSSSLPLRSG

SEQ ID NO: 92402 - protein, 15 aa, Artificial Sequence
  Description of Artificial Sequence: Synthetic peptide
  Seed: MCSLMQGSTLPRRSG
MCSYMQSSSLPMRSG

SEQ ID NO: 92403 - protein, 15 aa, Artificial Sequence
  Description of Artificial Sequence: Synthetic peptide
  Seed: MCSLMQGSTLPRRSG
MCSYMQSSSLPVRSG

SEQ ID NO: 92404 - protein, 15 aa, Artificial Sequence
  Description of Artificial Sequence: Synthetic peptide
  Seed: MCSLMQGSTLPRRSG
MCSYMQSSTLPIRSG

SEQ ID NO: 92405 - protein, 15 aa, Artificial Sequence
  Description of Artificial Sequence: Synthetic peptide
  Seed: MCSLMQGSTLPRRSG
MCSYMQSSTLPLRSG

SEQ ID NO: 92406 - protein, 15 aa, Artificial Sequence
  Description of Artificial Sequence: Synthetic peptide
  Seed: MCSLMQGSTLPRRSG
MCSYMQSSTLPVRSG

SEQ ID NO: 92407 - protein, 15 aa, Artificial Sequence
  Description of Artificial Sequence: Synthetic peptide
  Seed: MCSLMQGSTLPRRSG
MCSYMQSSVLPIRSG

SEQ ID NO: 92408 - protein, 15 aa, Artificial Sequence
  Description of Artificial Sequence: Synthetic peptide
  Seed: MCSLMQGSTLPRRSG
MCSYMQSSVLPLRSG

SEQ ID NO: 92409 - protein, 15 aa, Artificial Sequence
  Description of Artificial Sequence: Synthetic peptide
  Seed: MCSLMQGSTLPRRSG
MCSYMQTSALPFRSG

SEQ ID NO: 92410 - protein, 15 aa, Artificial Sequence
  Description of Artificial Sequence: Synthetic peptide
  Seed: MCSLMQGSTLPRRSG
MCSYMQTSALPIRSG

SEQ ID NO: 92411 - protein, 15 aa, Artificial Sequence
  Description of Artificial Sequence: Synthetic peptide
  Seed: MCSLMQGSTLPRRSG
MCSYMQTSALPLRSG

SEQ ID NO: 92412 - protein, 15 aa, Artificial Sequence
  Description of Artificial Sequence: Synthetic peptide
  Seed: MCSLMQGSTLPRRSG
MCSYMQTSALPMRSG

SEQ ID NO: 92413 - protein, 15 aa, Artificial Sequence
  Description of Artificial Sequence: Synthetic peptide
  Seed: MCSLMQGSTLPRRSG
MCSYMQTSALPVRSG

SEQ ID NO: 92414 - protein, 15 aa, Artificial Sequence
  Description of Artificial Sequence: Synthetic peptide
  Seed: MCSLMQGSTLPRRSG
MCSYMQTSGLPIRSG

SEQ ID NO: 92415 - protein, 15 aa, Artificial Sequence
  Description of Artificial Sequence: Synthetic peptide
  Seed: MCSLMQGSTLPRRSG
MCSYMQTSPLPIRSG

SEQ ID NO: 92416 - protein, 15 aa, Artificial Sequence
  Description of Artificial Sequence: Synthetic peptide
  Seed: MCSLMQGSTLPRRSG
MCSYMQTSSLPIRSG

SEQ ID NO: 92417 - protein, 15 aa, Artificial Sequence
  Description of Artificial Sequence: Synthetic peptide
  Seed: MCSLMQGSTLPRRSG
MCSYMQTSSLPLRSG

SEQ ID NO: 92418 - protein, 15 aa, Artificial Sequence
  Description of Artificial Sequence: Synthetic peptide
  Seed: MCSLMQGSTLPRRSG
MCSYMQTSSLPMRSG

SEQ ID NO: 92419 - protein, 15 aa, Artificial Sequence
  Description of Artificial Sequence: Synthetic peptide
  Seed: MCSLMQGSTLPRRSG
MCSYMQTSSLPVRSG

SEQ ID NO: 92420 - protein, 15 aa, Artificial Sequence
  Description of Artificial Sequence: Synthetic peptide
  Seed: MCSLMQGSTLPRRSG
MCSYMQVSALPIRSG

SEQ ID NO: 92421 - protein, 15 aa, Artificial Sequence
  Description of Artificial Sequence: Synthetic peptide
  Seed: MCSLMQGSTLPRRSG
MCSYMQVSALPLRSG

SEQ ID NO: 92422 - protein, 15 aa, Artificial Sequence
  Description of Artificial Sequence: Synthetic peptide
  Seed: MCSLMQGSTLPRRSG
MCSYMQVSALPMRSG

SEQ ID NO: 92423 - protein, 15 aa, Artificial Sequence
  Description of Artificial Sequence: Synthetic peptide
  Seed: MCSLMQGSTLPRRSG
MCSYMQVSALPVRSG

SEQ ID NO: 92424 - protein, 15 aa, Artificial Sequence
  Description of Artificial Sequence: Synthetic peptide
  Seed: MCSLMQGSTLPRRSG
MCSYMQVSGLPIRSG

SEQ ID NO: 92425 - protein, 15 aa, Artificial Sequence
  Description of Artificial Sequence: Synthetic peptide
  Seed: MCSLMQGSTLPRRSG
MCSYMQVSGLPLRSG

SEQ ID NO: 92426 - protein, 15 aa, Artificial Sequence
  Description of Artificial Sequence: Synthetic peptide
  Seed: MCSLMQGSTLPRRSG
MCSYMQVSPLPIRSG

SEQ ID NO: 92427 - protein, 15 aa, Artificial Sequence
  Description of Artificial Sequence: Synthetic peptide
  Seed: MCSLMQGSTLPRRSG
MCSYMQVSPLPVRSG

SEQ ID NO: 92428 - protein, 15 aa, Artificial Sequence
  Description of Artificial Sequence: Synthetic peptide
  Seed: MCSLMQGSTLPRRSG
MCSYMQVSRLPRRSG

SEQ ID NO: 92429 - protein, 15 aa, Artificial Sequence
  Description of Artificial Sequence: Synthetic peptide
  Seed: MCSLMQGSTLPRRSG
MCSYMQVSSLPIRSG

SEQ ID NO: 92430 - protein, 15 aa, Artificial Sequence
  Description of Artificial Sequence: Synthetic peptide
  Seed: MCSLMQGSTLPRRSG
MCSYMQVSSLPLRSG

SEQ ID NO: 92431 - protein, 15 aa, Artificial Sequence
  Description of Artificial Sequence: Synthetic peptide
  Seed: MCSLMQGSTLPRRSG
MCSYMQVSSLPVRSG

SEQ ID NO: 92432 - protein, 15 aa, Artificial Sequence
  Description of Artificial Sequence: Synthetic peptide
  Seed: MCSLMQGSTLPRRSG
MCSLMAGSALARRAG

SEQ ID NO: 92433 - protein, 15 aa, Artificial Sequence
  Description of Artificial Sequence: Synthetic peptide
  Seed: MCSLMQGSTLPRRSG
MCSLMAGSALARRIG

SEQ ID NO: 92434 - protein, 15 aa, Artificial Sequence
  Description of Artificial Sequence: Synthetic peptide
  Seed: MCSLMQGSTLPRRSG
MCSLMAGSALARRSG

SEQ ID NO: 92435 - protein, 15 aa, Artificial Sequence
  Description of Artificial Sequence: Synthetic peptide
  Seed: MCSLMQGSTLPRRSG
MCSLMAGSALARRTG

SEQ ID NO: 92436 - protein, 15 aa, Artificial Sequence
  Description of Artificial Sequence: Synthetic peptide
  Seed: MCSLMQGSTLPRRSG
MCSLMAGSALARRVG

SEQ ID NO: 92437 - protein, 15 aa, Artificial Sequence
  Description of Artificial Sequence: Synthetic peptide
  Seed: MCSLMQGSTLPRRSG
MCSLMAGSGLARRAG

SEQ ID NO: 92438 - protein, 15 aa, Artificial Sequence
  Description of Artificial Sequence: Synthetic peptide
  Seed: MCSLMQGSTLPRRSG
MCSLMAGSGLARRIG

SEQ ID NO: 92439 - protein, 15 aa, Artificial Sequence
  Description of Artificial Sequence: Synthetic peptide
  Seed: MCSLMQGSTLPRRSG
MCSLMAGSGLARRVG

SEQ ID NO: 92440 - protein, 15 aa, Artificial Sequence
  Description of Artificial Sequence: Synthetic peptide
  Seed: MCSLMQGSTLPRRSG
MCSLMFGSALARRAG

SEQ ID NO: 92441 - protein, 15 aa, Artificial Sequence
  Description of Artificial Sequence: Synthetic peptide
  Seed: MCSLMQGSTLPRRSG
MCSLMFGSALARRIG

SEQ ID NO: 92442 - protein, 15 aa, Artificial Sequence
  Description of Artificial Sequence: Synthetic peptide
  Seed: MCSLMQGSTLPRRSG
MCSLMFGSALARRLG

SEQ ID NO: 92443 - protein, 15 aa, Artificial Sequence
  Description of Artificial Sequence: Synthetic peptide
  Seed: MCSLMQGSTLPRRSG
MCSLMFGSALARRMG

SEQ ID NO: 92444 - protein, 15 aa, Artificial Sequence
  Description of Artificial Sequence: Synthetic peptide
  Seed: MCSLMQGSTLPRRSG
MCSLMFGSALARRNG

SEQ ID NO: 92445 - protein, 15 aa, Artificial Sequence
  Description of Artificial Sequence: Synthetic peptide
  Seed: MCSLMQGSTLPRRSG
MCSLMFGSALARRSG

SEQ ID NO: 92446 - protein, 15 aa, Artificial Sequence
  Description of Artificial Sequence: Synthetic peptide
  Seed: MCSLMQGSTLPRRSG
MCSLMFGSALARRTG

SEQ ID NO: 92447 - protein, 15 aa, Artificial Sequence
  Description of Artificial Sequence: Synthetic peptide
  Seed: MCSLMQGSTLPRRSG
MCSLMFGSALARRVG

SEQ ID NO: 92448 - protein, 15 aa, Artificial Sequence
  Description of Artificial Sequence: Synthetic peptide
  Seed: MCSLMQGSTLPRRSG
MCSLMFGSALPRRAG

SEQ ID NO: 92449 - protein, 15 aa, Artificial Sequence
  Description of Artificial Sequence: Synthetic peptide
  Seed: MCSLMQGSTLPRRSG
MCSLMFGSALPRRIG

SEQ ID NO: 92450 - protein, 15 aa, Artificial Sequence
  Description of Artificial Sequence: Synthetic peptide
  Seed: MCSLMQGSTLPRRSG
MCSLMFGSALPRRLG

SEQ ID NO: 92451 - protein, 15 aa, Artificial Sequence
  Description of Artificial Sequence: Synthetic peptide
  Seed: MCSLMQGSTLPRRSG
MCSLMFGSALPRRNG

SEQ ID NO: 92452 - protein, 15 aa, Artificial Sequence
  Description of Artificial Sequence: Synthetic peptide
  Seed: MCSLMQGSTLPRRSG
MCSLMFGSALPRRVG

SEQ ID NO: 92453 - protein, 15 aa, Artificial Sequence
  Description of Artificial Sequence: Synthetic peptide
  Seed: MCSLMQGSTLPRRSG
MCSLMFGSALSRRAG

SEQ ID NO: 92454 - protein, 15 aa, Artificial Sequence
  Description of Artificial Sequence: Synthetic peptide
  Seed: MCSLMQGSTLPRRSG
MCSLMFGSALSRRIG

SEQ ID NO: 92455 - protein, 15 aa, Artificial Sequence
  Description of Artificial Sequence: Synthetic peptide
  Seed: MCSLMQGSTLPRRSG
MCSLMFGSALSRRLG

SEQ ID NO: 92456 - protein, 15 aa, Artificial Sequence
  Description of Artificial Sequence: Synthetic peptide
  Seed: MCSLMQGSTLPRRSG
MCSLMFGSALSRRMG

SEQ ID NO: 92457 - protein, 15 aa, Artificial Sequence
  Description of Artificial Sequence: Synthetic peptide
  Seed: MCSLMQGSTLPRRSG
MCSLMFGSALSRRNG

SEQ ID NO: 92458 - protein, 15 aa, Artificial Sequence
  Description of Artificial Sequence: Synthetic peptide
  Seed: MCSLMQGSTLPRRSG
MCSLMFGSALSRRSG

SEQ ID NO: 92459 - protein, 15 aa, Artificial Sequence
  Description of Artificial Sequence: Synthetic peptide
  Seed: MCSLMQGSTLPRRSG
MCSLMFGSALSRRTG

SEQ ID NO: 92460 - protein, 15 aa, Artificial Sequence
  Description of Artificial Sequence: Synthetic peptide
  Seed: MCSLMQGSTLPRRSG
MCSLMFGSALSRRVG

SEQ ID NO: 92461 - protein, 15 aa, Artificial Sequence
  Description of Artificial Sequence: Synthetic peptide
  Seed: MCSLMQGSTLPRRSG
MCSLMFGSALTRRAG

SEQ ID NO: 92462 - protein, 15 aa, Artificial Sequence
  Description of Artificial Sequence: Synthetic peptide
  Seed: MCSLMQGSTLPRRSG
MCSLMFGSALTRRIG

SEQ ID NO: 92463 - protein, 15 aa, Artificial Sequence
  Description of Artificial Sequence: Synthetic peptide
  Seed: MCSLMQGSTLPRRSG
MCSLMFGSALTRRLG

SEQ ID NO: 92464 - protein, 15 aa, Artificial Sequence
  Description of Artificial Sequence: Synthetic peptide
  Seed: MCSLMQGSTLPRRSG
MCSLMFGSALTRRNG

SEQ ID NO: 92465 - protein, 15 aa, Artificial Sequence
  Description of Artificial Sequence: Synthetic peptide
  Seed: MCSLMQGSTLPRRSG
MCSLMFGSALTRRSG

SEQ ID NO: 92466 - protein, 15 aa, Artificial Sequence
  Description of Artificial Sequence: Synthetic peptide
  Seed: MCSLMQGSTLPRRSG
MCSLMFGSALTRRVG

SEQ ID NO: 92467 - protein, 15 aa, Artificial Sequence
  Description of Artificial Sequence: Synthetic peptide
  Seed: MCSLMQGSTLPRRSG
MCSLMFGSALVRRAG

SEQ ID NO: 92468 - protein, 15 aa, Artificial Sequence
  Description of Artificial Sequence: Synthetic peptide
  Seed: MCSLMQGSTLPRRSG
MCSLMFGSALVRRNG

SEQ ID NO: 92469 - protein, 15 aa, Artificial Sequence
  Description of Artificial Sequence: Synthetic peptide
  Seed: MCSLMQGSTLPRRSG
MCSLMFGSALVRRSG

SEQ ID NO: 92470 - protein, 15 aa, Artificial Sequence
  Description of Artificial Sequence: Synthetic peptide
  Seed: MCSLMQGSTLPRRSG
MCSLMFGSALVRRTG

SEQ ID NO: 92471 - protein, 15 aa, Artificial Sequence
  Description of Artificial Sequence: Synthetic peptide
  Seed: MCSLMQGSTLPRRSG
MCSLMFGSALVRRVG

SEQ ID NO: 92472 - protein, 15 aa, Artificial Sequence
  Description of Artificial Sequence: Synthetic peptide
  Seed: MCSLMQGSTLPRRSG
MCSLMFGSFLARRAG

SEQ ID NO: 92473 - protein, 15 aa, Artificial Sequence
  Description of Artificial Sequence: Synthetic peptide
  Seed: MCSLMQGSTLPRRSG
MCSLMFGSGLARRAG

SEQ ID NO: 92474 - protein, 15 aa, Artificial Sequence
  Description of Artificial Sequence: Synthetic peptide
  Seed: MCSLMQGSTLPRRSG
MCSLMFGSGLARRIG

SEQ ID NO: 92475 - protein, 15 aa, Artificial Sequence
  Description of Artificial Sequence: Synthetic peptide
  Seed: MCSLMQGSTLPRRSG
MCSLMFGSGLARRSG

SEQ ID NO: 92476 - protein, 15 aa, Artificial Sequence
  Description of Artificial Sequence: Synthetic peptide
  Seed: MCSLMQGSTLPRRSG
MCSLMFGSGLARRTG

SEQ ID NO: 92477 - protein, 15 aa, Artificial Sequence
  Description of Artificial Sequence: Synthetic peptide
  Seed: MCSLMQGSTLPRRSG
MCSLMFGSGLARRVG

SEQ ID NO: 92478 - protein, 15 aa, Artificial Sequence
  Description of Artificial Sequence: Synthetic peptide
  Seed: MCSLMQGSTLPRRSG
MCSLMFGSGLVRRAG

SEQ ID NO: 92479 - protein, 15 aa, Artificial Sequence
  Description of Artificial Sequence: Synthetic peptide
  Seed: MCSLMQGSTLPRRSG
MCSLMFGSGLVRRIG

SEQ ID NO: 92480 - protein, 15 aa, Artificial Sequence
  Description of Artificial Sequence: Synthetic peptide
  Seed: MCSLMQGSTLPRRSG
MCSLMFGSGLVRRSG

SEQ ID NO: 92481 - protein, 15 aa, Artificial Sequence
  Description of Artificial Sequence: Synthetic peptide
  Seed: MCSLMQGSTLPRRSG
MCSLMFGSGLVRRTG

SEQ ID NO: 92482 - protein, 15 aa, Artificial Sequence
  Description of Artificial Sequence: Synthetic peptide
  Seed: MCSLMQGSTLPRRSG
MCSLMFGSGLVRRVG

SEQ ID NO: 92483 - protein, 15 aa, Artificial Sequence
  Description of Artificial Sequence: Synthetic peptide
  Seed: MCSLMQGSTLPRRSG
MCSLMFGSILARRAG

SEQ ID NO: 92484 - protein, 15 aa, Artificial Sequence
  Description of Artificial Sequence: Synthetic peptide
  Seed: MCSLMQGSTLPRRSG
MCSLMFGSILARRGG

SEQ ID NO: 92485 - protein, 15 aa, Artificial Sequence
  Description of Artificial Sequence: Synthetic peptide
  Seed: MCSLMQGSTLPRRSG
MCSLMFGSILARRIG

SEQ ID NO: 92486 - protein, 15 aa, Artificial Sequence
  Description of Artificial Sequence: Synthetic peptide
  Seed: MCSLMQGSTLPRRSG
MCSLMFGSILARRLG

SEQ ID NO: 92487 - protein, 15 aa, Artificial Sequence
  Description of Artificial Sequence: Synthetic peptide
  Seed: MCSLMQGSTLPRRSG
MCSLMFGSILARRMG

SEQ ID NO: 92488 - protein, 15 aa, Artificial Sequence
  Description of Artificial Sequence: Synthetic peptide
  Seed: MCSLMQGSTLPRRSG
MCSLMFGSILARRNG

SEQ ID NO: 92489 - protein, 15 aa, Artificial Sequence
  Description of Artificial Sequence: Synthetic peptide
  Seed: MCSLMQGSTLPRRSG
MCSLMFGSILARRSG

SEQ ID NO: 92490 - protein, 15 aa, Artificial Sequence
  Description of Artificial Sequence: Synthetic peptide
  Seed: MCSLMQGSTLPRRSG
MCSLMFGSILARRTG

SEQ ID NO: 92491 - protein, 15 aa, Artificial Sequence
  Description of Artificial Sequence: Synthetic peptide
  Seed: MCSLMQGSTLPRRSG
MCSLMFGSILARRVG

SEQ ID NO: 92492 - protein, 15 aa, Artificial Sequence
  Description of Artificial Sequence: Synthetic peptide
  Seed: MCSLMQGSTLPRRSG
MCSLMFGSILGRRAG

SEQ ID NO: 92493 - protein, 15 aa, Artificial Sequence
  Description of Artificial Sequence: Synthetic peptide
  Seed: MCSLMQGSTLPRRSG
MCSLMFGSILGRRIG

SEQ ID NO: 92494 - protein, 15 aa, Artificial Sequence
  Description of Artificial Sequence: Synthetic peptide
  Seed: MCSLMQGSTLPRRSG
MCSLMFGSILGRRLG

SEQ ID NO: 92495 - protein, 15 aa, Artificial Sequence
  Description of Artificial Sequence: Synthetic peptide
  Seed: MCSLMQGSTLPRRSG
MCSLMFGSILGRRNG

SEQ ID NO: 92496 - protein, 15 aa, Artificial Sequence
  Description of Artificial Sequence: Synthetic peptide
  Seed: MCSLMQGSTLPRRSG
MCSLMFGSILGRRSG

SEQ ID NO: 92497 - protein, 15 aa, Artificial Sequence
  Description of Artificial Sequence: Synthetic peptide
  Seed: MCSLMQGSTLPRRSG
MCSLMFGSILGRRVG

SEQ ID NO: 92498 - protein, 15 aa, Artificial Sequence
  Description of Artificial Sequence: Synthetic peptide
  Seed: MCSLMQGSTLPRRSG
MCSLMFGSILIRRAG

SEQ ID NO: 92499 - protein, 15 aa, Artificial Sequence
  Description of Artificial Sequence: Synthetic peptide
  Seed: MCSLMQGSTLPRRSG
MCSLMFGSILIRRNG

SEQ ID NO: 92500 - protein, 15 aa, Artificial Sequence
  Description of Artificial Sequence: Synthetic peptide
  Seed: MCSLMQGSTLPRRSG
MCSLMFGSILNRRAG

SEQ ID NO: 92501 - protein, 15 aa, Artificial Sequence
  Description of Artificial Sequence: Synthetic peptide
  Seed: MCSLMQGSTLPRRSG
MCSLMFGSILNRRNG

SEQ ID NO: 92502 - protein, 15 aa, Artificial Sequence
  Description of Artificial Sequence: Synthetic peptide
  Seed: MCSLMQGSTLPRRSG
MCSLMFGSILPRRAG

SEQ ID NO: 92503 - protein, 15 aa, Artificial Sequence
  Description of Artificial Sequence: Synthetic peptide
  Seed: MCSLMQGSTLPRRSG
MCSLMFGSILPRRIG

SEQ ID NO: 92504 - protein, 15 aa, Artificial Sequence
  Description of Artificial Sequence: Synthetic peptide
  Seed: MCSLMQGSTLPRRSG
MCSLMFGSILPRRLG

SEQ ID NO: 92505 - protein, 15 aa, Artificial Sequence
  Description of Artificial Sequence: Synthetic peptide
  Seed: MCSLMQGSTLPRRSG
MCSLMFGSILPRRMG

SEQ ID NO: 92506 - protein, 15 aa, Artificial Sequence
  Description of Artificial Sequence: Synthetic peptide
  Seed: MCSLMQGSTLPRRSG
MCSLMFGSILPRRNG

SEQ ID NO: 92507 - protein, 15 aa, Artificial Sequence
  Description of Artificial Sequence: Synthetic peptide
  Seed: MCSLMQGSTLPRRSG
MCSLMFGSILPRRSG

SEQ ID NO: 92508 - protein, 15 aa, Artificial Sequence
  Description of Artificial Sequence: Synthetic peptide
  Seed: MCSLMQGSTLPRRSG
MCSLMFGSILPRRTG

SEQ ID NO: 92509 - protein, 15 aa, Artificial Sequence
  Description of Artificial Sequence: Synthetic peptide
  Seed: MCSLMQGSTLPRRSG
MCSLMFGSILPRRVG

SEQ ID NO: 92510 - protein, 15 aa, Artificial Sequence
  Description of Artificial Sequence: Synthetic peptide
  Seed: MCSLMQGSTLPRRSG
MCSLMFGSILSRRAG

SEQ ID NO: 92511 - protein, 15 aa, Artificial Sequence
  Description of Artificial Sequence: Synthetic peptide
  Seed: MCSLMQGSTLPRRSG
MCSLMFGSILSRRGG

SEQ ID NO: 92512 - protein, 15 aa, Artificial Sequence
  Description of Artificial Sequence: Synthetic peptide
  Seed: MCSLMQGSTLPRRSG
MCSLMFGSILSRRIG

SEQ ID NO: 92513 - protein, 15 aa, Artificial Sequence
  Description of Artificial Sequence: Synthetic peptide
  Seed: MCSLMQGSTLPRRSG
MCSLMFGSILSRRLG

SEQ ID NO: 92514 - protein, 15 aa, Artificial Sequence
  Description of Artificial Sequence: Synthetic peptide
  Seed: MCSLMQGSTLPRRSG
MCSLMFGSILSRRMG

SEQ ID NO: 92515 - protein, 15 aa, Artificial Sequence
  Description of Artificial Sequence: Synthetic peptide
  Seed: MCSLMQGSTLPRRSG
MCSLMFGSILSRRNG

SEQ ID NO: 92516 - protein, 15 aa, Artificial Sequence
  Description of Artificial Sequence: Synthetic peptide
  Seed: MCSLMQGSTLPRRSG
MCSLMFGSILSRRSG

SEQ ID NO: 92517 - protein, 15 aa, Artificial Sequence
  Description of Artificial Sequence: Synthetic peptide
  Seed: MCSLMQGSTLPRRSG
MCSLMFGSILSRRTG

SEQ ID NO: 92518 - protein, 15 aa, Artificial Sequence
  Description of Artificial Sequence: Synthetic peptide
  Seed: MCSLMQGSTLPRRSG
MCSLMFGSILSRRVG

SEQ ID NO: 92519 - protein, 15 aa, Artificial Sequence
  Description of Artificial Sequence: Synthetic peptide
  Seed: MCSLMQGSTLPRRSG
MCSLMFGSILTRRAG

SEQ ID NO: 92520 - protein, 15 aa, Artificial Sequence
  Description of Artificial Sequence: Synthetic peptide
  Seed: MCSLMQGSTLPRRSG
MCSLMFGSILTRRGG

SEQ ID NO: 92521 - protein, 15 aa, Artificial Sequence
  Description of Artificial Sequence: Synthetic peptide
  Seed: MCSLMQGSTLPRRSG
MCSLMFGSILTRRIG

SEQ ID NO: 92522 - protein, 15 aa, Artificial Sequence
  Description of Artificial Sequence: Synthetic peptide
  Seed: MCSLMQGSTLPRRSG
MCSLMFGSILTRRLG

SEQ ID NO: 92523 - protein, 15 aa, Artificial Sequence
  Description of Artificial Sequence: Synthetic peptide
  Seed: MCSLMQGSTLPRRSG
MCSLMFGSILTRRMG

SEQ ID NO: 92524 - protein, 15 aa, Artificial Sequence
  Description of Artificial Sequence: Synthetic peptide
  Seed: MCSLMQGSTLPRRSG
MCSLMFGSILTRRNG

SEQ ID NO: 92525 - protein, 15 aa, Artificial Sequence
  Description of Artificial Sequence: Synthetic peptide
  Seed: MCSLMQGSTLPRRSG
MCSLMFGSILTRRSG

SEQ ID NO: 92526 - protein, 15 aa, Artificial Sequence
  Description of Artificial Sequence: Synthetic peptide
  Seed: MCSLMQGSTLPRRSG
MCSLMFGSILTRRTG

SEQ ID NO: 92527 - protein, 15 aa, Artificial Sequence
  Description of Artificial Sequence: Synthetic peptide
  Seed: MCSLMQGSTLPRRSG
MCSLMFGSILTRRVG

SEQ ID NO: 92528 - protein, 15 aa, Artificial Sequence
  Description of Artificial Sequence: Synthetic peptide
  Seed: MCSLMQGSTLPRRSG
MCSLMFGSILVRRAG

SEQ ID NO: 92529 - protein, 15 aa, Artificial Sequence
  Description of Artificial Sequence: Synthetic peptide
  Seed: MCSLMQGSTLPRRSG
MCSLMFGSILVRRIG

SEQ ID NO: 92530 - protein, 15 aa, Artificial Sequence
  Description of Artificial Sequence: Synthetic peptide
  Seed: MCSLMQGSTLPRRSG
MCSLMFGSILVRRNG

SEQ ID NO: 92531 - protein, 15 aa, Artificial Sequence
  Description of Artificial Sequence: Synthetic peptide
  Seed: MCSLMQGSTLPRRSG
MCSLMFGSILVRRSG

SEQ ID NO: 92532 - protein, 15 aa, Artificial Sequence
  Description of Artificial Sequence: Synthetic peptide
  Seed: MCSLMQGSTLPRRSG
MCSLMFGSILVRRTG

SEQ ID NO: 92533 - protein, 15 aa, Artificial Sequence
  Description of Artificial Sequence: Synthetic peptide
  Seed: MCSLMQGSTLPRRSG
MCSLMFGSILVRRVG

SEQ ID NO: 92534 - protein, 15 aa, Artificial Sequence
  Description of Artificial Sequence: Synthetic peptide
  Seed: MCSLMQGSTLPRRSG
MCSLMFGSLLARRAG

SEQ ID NO: 92535 - protein, 15 aa, Artificial Sequence
  Description of Artificial Sequence: Synthetic peptide
  Seed: MCSLMQGSTLPRRSG
MCSLMFGSLLARRDG

SEQ ID NO: 92536 - protein, 15 aa, Artificial Sequence
  Description of Artificial Sequence: Synthetic peptide
  Seed: MCSLMQGSTLPRRSG
MCSLMFGSLLARRFG

SEQ ID NO: 92537 - protein, 15 aa, Artificial Sequence
  Description of Artificial Sequence: Synthetic peptide
  Seed: MCSLMQGSTLPRRSG
MCSLMFGSLLARRGG

SEQ ID NO: 92538 - protein, 15 aa, Artificial Sequence
  Description of Artificial Sequence: Synthetic peptide
  Seed: MCSLMQGSTLPRRSG
MCSLMFGSLLARRHG

SEQ ID NO: 92539 - protein, 15 aa, Artificial Sequence
  Description of Artificial Sequence: Synthetic peptide
  Seed: MCSLMQGSTLPRRSG
MCSLMFGSLLARRIG

SEQ ID NO: 92540 - protein, 15 aa, Artificial Sequence
  Description of Artificial Sequence: Synthetic peptide
  Seed: MCSLMQGSTLPRRSG
MCSLMFGSLLARRLG

SEQ ID NO: 92541 - protein, 15 aa, Artificial Sequence
  Description of Artificial Sequence: Synthetic peptide
  Seed: MCSLMQGSTLPRRSG
MCSLMFGSLLARRMG

SEQ ID NO: 92542 - protein, 15 aa, Artificial Sequence
  Description of Artificial Sequence: Synthetic peptide
  Seed: MCSLMQGSTLPRRSG
MCSLMFGSLLARRNG

SEQ ID NO: 92543 - protein, 15 aa, Artificial Sequence
  Description of Artificial Sequence: Synthetic peptide
  Seed: MCSLMQGSTLPRRSG
MCSLMFGSLLARRPG

SEQ ID NO: 92544 - protein, 15 aa, Artificial Sequence
  Description of Artificial Sequence: Synthetic peptide
  Seed: MCSLMQGSTLPRRSG
MCSLMFGSLLARRQG

SEQ ID NO: 92545 - protein, 15 aa, Artificial Sequence
  Description of Artificial Sequence: Synthetic peptide
  Seed: MCSLMQGSTLPRRSG
MCSLMFGSLLARRSG

SEQ ID NO: 92546 - protein, 15 aa, Artificial Sequence
  Description of Artificial Sequence: Synthetic peptide
  Seed: MCSLMQGSTLPRRSG
MCSLMFGSLLARRTG

SEQ ID NO: 92547 - protein, 15 aa, Artificial Sequence
  Description of Artificial Sequence: Synthetic peptide
  Seed: MCSLMQGSTLPRRSG
MCSLMFGSLLARRVG

SEQ ID NO: 92548 - protein, 15 aa, Artificial Sequence
  Description of Artificial Sequence: Synthetic peptide
  Seed: MCSLMQGSTLPRRSG
MCSLMFGSLLGRRAG

SEQ ID NO: 92549 - protein, 15 aa, Artificial Sequence
  Description of Artificial Sequence: Synthetic peptide
  Seed: MCSLMQGSTLPRRSG
MCSLMFGSLLGRRIG

SEQ ID NO: 92550 - protein, 15 aa, Artificial Sequence
  Description of Artificial Sequence: Synthetic peptide
  Seed: MCSLMQGSTLPRRSG
MCSLMFGSLLGRRLG

SEQ ID NO: 92551 - protein, 15 aa, Artificial Sequence
  Description of Artificial Sequence: Synthetic peptide
  Seed: MCSLMQGSTLPRRSG
MCSLMFGSLLGRRMG

SEQ ID NO: 92552 - protein, 15 aa, Artificial Sequence
  Description of Artificial Sequence: Synthetic peptide
  Seed: MCSLMQGSTLPRRSG
MCSLMFGSLLGRRNG

SEQ ID NO: 92553 - protein, 15 aa, Artificial Sequence
  Description of Artificial Sequence: Synthetic peptide
  Seed: MCSLMQGSTLPRRSG
MCSLMFGSLLGRRSG

SEQ ID NO: 92554 - protein, 15 aa, Artificial Sequence
  Description of Artificial Sequence: Synthetic peptide
  Seed: MCSLMQGSTLPRRSG
MCSLMFGSLLGRRTG

SEQ ID NO: 92555 - protein, 15 aa, Artificial Sequence
  Description of Artificial Sequence: Synthetic peptide
  Seed: MCSLMQGSTLPRRSG
MCSLMFGSLLGRRVG

SEQ ID NO: 92556 - protein, 15 aa, Artificial Sequence
  Description of Artificial Sequence: Synthetic peptide
  Seed: MCSLMQGSTLPRRSG
MCSLMFGSLLIRRAG

SEQ ID NO: 92557 - protein, 15 aa, Artificial Sequence
  Description of Artificial Sequence: Synthetic peptide
  Seed: MCSLMQGSTLPRRSG
MCSLMFGSLLIRRIG

SEQ ID NO: 92558 - protein, 15 aa, Artificial Sequence
  Description of Artificial Sequence: Synthetic peptide
  Seed: MCSLMQGSTLPRRSG
MCSLMFGSLLIRRNG

SEQ ID NO: 92559 - protein, 15 aa, Artificial Sequence
  Description of Artificial Sequence: Synthetic peptide
  Seed: MCSLMQGSTLPRRSG
MCSLMFGSLLIRRSG

SEQ ID NO: 92560 - protein, 15 aa, Artificial Sequence
  Description of Artificial Sequence: Synthetic peptide
  Seed: MCSLMQGSTLPRRSG
MCSLMFGSLLIRRTG

SEQ ID NO: 92561 - protein, 15 aa, Artificial Sequence
  Description of Artificial Sequence: Synthetic peptide
  Seed: MCSLMQGSTLPRRSG
MCSLMFGSLLIRRVG

SEQ ID NO: 92562 - protein, 15 aa, Artificial Sequence
  Description of Artificial Sequence: Synthetic peptide
  Seed: MCSLMQGSTLPRRSG
MCSLMFGSLLNRRAG

SEQ ID NO: 92563 - protein, 15 aa, Artificial Sequence
  Description of Artificial Sequence: Synthetic peptide
  Seed: MCSLMQGSTLPRRSG
MCSLMFGSLLNRRIG

SEQ ID NO: 92564 - protein, 15 aa, Artificial Sequence
  Description of Artificial Sequence: Synthetic peptide
  Seed: MCSLMQGSTLPRRSG
MCSLMFGSLLNRRLG

SEQ ID NO: 92565 - protein, 15 aa, Artificial Sequence
  Description of Artificial Sequence: Synthetic peptide
  Seed: MCSLMQGSTLPRRSG
MCSLMFGSLLNRRNG

SEQ ID NO: 92566 - protein, 15 aa, Artificial Sequence
  Description of Artificial Sequence: Synthetic peptide
  Seed: MCSLMQGSTLPRRSG
MCSLMFGSLLNRRSG

SEQ ID NO: 92567 - protein, 15 aa, Artificial Sequence
  Description of Artificial Sequence: Synthetic peptide
  Seed: MCSLMQGSTLPRRSG
MCSLMFGSLLNRRVG

SEQ ID NO: 92568 - protein, 15 aa, Artificial Sequence
  Description of Artificial Sequence: Synthetic peptide
  Seed: MCSLMQGSTLPRRSG
MCSLMFGSLLPRRAG

SEQ ID NO: 92569 - protein, 15 aa, Artificial Sequence
  Description of Artificial Sequence: Synthetic peptide
  Seed: MCSLMQGSTLPRRSG
MCSLMFGSLLPRRGG

SEQ ID NO: 92570 - protein, 15 aa, Artificial Sequence
  Description of Artificial Sequence: Synthetic peptide
  Seed: MCSLMQGSTLPRRSG
MCSLMFGSLLPRRIG

SEQ ID NO: 92571 - protein, 15 aa, Artificial Sequence
  Description of Artificial Sequence: Synthetic peptide
  Seed: MCSLMQGSTLPRRSG
MCSLMFGSLLPRRLG

SEQ ID NO: 92572 - protein, 15 aa, Artificial Sequence
  Description of Artificial Sequence: Synthetic peptide
  Seed: MCSLMQGSTLPRRSG
MCSLMFGSLLPRRMG

SEQ ID NO: 92573 - protein, 15 aa, Artificial Sequence
  Description of Artificial Sequence: Synthetic peptide
  Seed: MCSLMQGSTLPRRSG
MCSLMFGSLLPRRNG

SEQ ID NO: 92574 - protein, 15 aa, Artificial Sequence
  Description of Artificial Sequence: Synthetic peptide
  Seed: MCSLMQGSTLPRRSG
MCSLMFGSLLPRRSG

SEQ ID NO: 92575 - protein, 15 aa, Artificial Sequence
  Description of Artificial Sequence: Synthetic peptide
  Seed: MCSLMQGSTLPRRSG
MCSLMFGSLLPRRTG

SEQ ID NO: 92576 - protein, 15 aa, Artificial Sequence
  Description of Artificial Sequence: Synthetic peptide
  Seed: MCSLMQGSTLPRRSG
MCSLMFGSLLPRRVG

SEQ ID NO: 92577 - protein, 15 aa, Artificial Sequence
  Description of Artificial Sequence: Synthetic peptide
  Seed: MCSLMQGSTLPRRSG
MCSLMFGSLLSRRAG

SEQ ID NO: 92578 - protein, 15 aa, Artificial Sequence
  Description of Artificial Sequence: Synthetic peptide
  Seed: MCSLMQGSTLPRRSG
MCSLMFGSLLSRRGG

SEQ ID NO: 92579 - protein, 15 aa, Artificial Sequence
  Description of Artificial Sequence: Synthetic peptide
  Seed: MCSLMQGSTLPRRSG
MCSLMFGSLLSRRIG

SEQ ID NO: 92580 - protein, 15 aa, Artificial Sequence
  Description of Artificial Sequence: Synthetic peptide
  Seed: MCSLMQGSTLPRRSG
MCSLMFGSLLSRRLG

SEQ ID NO: 92581 - protein, 15 aa, Artificial Sequence
  Description of Artificial Sequence: Synthetic peptide
  Seed: MCSLMQGSTLPRRSG
MCSLMFGSLLSRRMG

SEQ ID NO: 92582 - protein, 15 aa, Artificial Sequence
  Description of Artificial Sequence: Synthetic peptide
  Seed: MCSLMQGSTLPRRSG
MCSLMFGSLLSRRNG

SEQ ID NO: 92583 - protein, 15 aa, Artificial Sequence
  Description of Artificial Sequence: Synthetic peptide
  Seed: MCSLMQGSTLPRRSG
MCSLMFGSLLSRRSG

SEQ ID NO: 92584 - protein, 15 aa, Artificial Sequence
  Description of Artificial Sequence: Synthetic peptide
  Seed: MCSLMQGSTLPRRSG
MCSLMFGSLLSRRTG

SEQ ID NO: 92585 - protein, 15 aa, Artificial Sequence
  Description of Artificial Sequence: Synthetic peptide
  Seed: MCSLMQGSTLPRRSG
MCSLMFGSLLSRRVG

SEQ ID NO: 92586 - protein, 15 aa, Artificial Sequence
  Description of Artificial Sequence: Synthetic peptide
  Seed: MCSLMQGSTLPRRSG
MCSLMFGSLLTRRAG

SEQ ID NO: 92587 - protein, 15 aa, Artificial Sequence
  Description of Artificial Sequence: Synthetic peptide
  Seed: MCSLMQGSTLPRRSG
MCSLMFGSLLTRRGG

SEQ ID NO: 92588 - protein, 15 aa, Artificial Sequence
  Description of Artificial Sequence: Synthetic peptide
  Seed: MCSLMQGSTLPRRSG
MCSLMFGSLLTRRIG

SEQ ID NO: 92589 - protein, 15 aa, Artificial Sequence
  Description of Artificial Sequence: Synthetic peptide
  Seed: MCSLMQGSTLPRRSG
MCSLMFGSLLTRRLG

SEQ ID NO: 92590 - protein, 15 aa, Artificial Sequence
  Description of Artificial Sequence: Synthetic peptide
  Seed: MCSLMQGSTLPRRSG
MCSLMFGSLLTRRMG

SEQ ID NO: 92591 - protein, 15 aa, Artificial Sequence
  Description of Artificial Sequence: Synthetic peptide
  Seed: MCSLMQGSTLPRRSG
MCSLMFGSLLTRRNG

SEQ ID NO: 92592 - protein, 15 aa, Artificial Sequence
  Description of Artificial Sequence: Synthetic peptide
  Seed: MCSLMQGSTLPRRSG
MCSLMFGSLLTRRSG

SEQ ID NO: 92593 - protein, 15 aa, Artificial Sequence
  Description of Artificial Sequence: Synthetic peptide
  Seed: MCSLMQGSTLPRRSG
MCSLMFGSLLTRRTG

SEQ ID NO: 92594 - protein, 15 aa, Artificial Sequence
  Description of Artificial Sequence: Synthetic peptide
  Seed: MCSLMQGSTLPRRSG
MCSLMFGSLLTRRVG

SEQ ID NO: 92595 - protein, 15 aa, Artificial Sequence
  Description of Artificial Sequence: Synthetic peptide
  Seed: MCSLMQGSTLPRRSG
MCSLMFGSLLVRRAG

SEQ ID NO: 92596 - protein, 15 aa, Artificial Sequence
  Description of Artificial Sequence: Synthetic peptide
  Seed: MCSLMQGSTLPRRSG
MCSLMFGSLLVRRGG

SEQ ID NO: 92597 - protein, 15 aa, Artificial Sequence
  Description of Artificial Sequence: Synthetic peptide
  Seed: MCSLMQGSTLPRRSG
MCSLMFGSLLVRRIG

SEQ ID NO: 92598 - protein, 15 aa, Artificial Sequence
  Description of Artificial Sequence: Synthetic peptide
  Seed: MCSLMQGSTLPRRSG
MCSLMFGSLLVRRLG

SEQ ID NO: 92599 - protein, 15 aa, Artificial Sequence
  Description of Artificial Sequence: Synthetic peptide
  Seed: MCSLMQGSTLPRRSG
MCSLMFGSLLVRRMG

SEQ ID NO: 92600 - protein, 15 aa, Artificial Sequence
  Description of Artificial Sequence: Synthetic peptide
  Seed: MCSLMQGSTLPRRSG
MCSLMFGSLLVRRNG

SEQ ID NO: 92601 - protein, 15 aa, Artificial Sequence
  Description of Artificial Sequence: Synthetic peptide
  Seed: MCSLMQGSTLPRRSG
MCSLMFGSLLVRRSG

SEQ ID NO: 92602 - protein, 15 aa, Artificial Sequence
  Description of Artificial Sequence: Synthetic peptide
  Seed: MCSLMQGSTLPRRSG
MCSLMFGSLLVRRTG

SEQ ID NO: 92603 - protein, 15 aa, Artificial Sequence
  Description of Artificial Sequence: Synthetic peptide
  Seed: MCSLMQGSTLPRRSG
MCSLMFGSLLVRRVG

SEQ ID NO: 92604 - protein, 15 aa, Artificial Sequence
  Description of Artificial Sequence: Synthetic peptide
  Seed: MCSLMQGSTLPRRSG
MCSLMFGSMLARRAG

SEQ ID NO: 92605 - protein, 15 aa, Artificial Sequence
  Description of Artificial Sequence: Synthetic peptide
  Seed: MCSLMQGSTLPRRSG
MCSLMFGSMLARRDG

SEQ ID NO: 92606 - protein, 15 aa, Artificial Sequence
  Description of Artificial Sequence: Synthetic peptide
  Seed: MCSLMQGSTLPRRSG
MCSLMFGSMLARREG

SEQ ID NO: 92607 - protein, 15 aa, Artificial Sequence
  Description of Artificial Sequence: Synthetic peptide
  Seed: MCSLMQGSTLPRRSG
MCSLMFGSMLARRFG

SEQ ID NO: 92608 - protein, 15 aa, Artificial Sequence
  Description of Artificial Sequence: Synthetic peptide
  Seed: MCSLMQGSTLPRRSG
MCSLMFGSMLARRGG

SEQ ID NO: 92609 - protein, 15 aa, Artificial Sequence
  Description of Artificial Sequence: Synthetic peptide
  Seed: MCSLMQGSTLPRRSG
MCSLMFGSMLARRHG

SEQ ID NO: 92610 - protein, 15 aa, Artificial Sequence
  Description of Artificial Sequence: Synthetic peptide
  Seed: MCSLMQGSTLPRRSG
MCSLMFGSMLARRIG

SEQ ID NO: 92611 - protein, 15 aa, Artificial Sequence
  Description of Artificial Sequence: Synthetic peptide
  Seed: MCSLMQGSTLPRRSG
MCSLMFGSMLARRLG

SEQ ID NO: 92612 - protein, 15 aa, Artificial Sequence
  Description of Artificial Sequence: Synthetic peptide
  Seed: MCSLMQGSTLPRRSG
MCSLMFGSMLARRMG

SEQ ID NO: 92613 - protein, 15 aa, Artificial Sequence
  Description of Artificial Sequence: Synthetic peptide
  Seed: MCSLMQGSTLPRRSG
MCSLMFGSMLARRNG

SEQ ID NO: 92614 - protein, 15 aa, Artificial Sequence
  Description of Artificial Sequence: Synthetic peptide
  Seed: MCSLMQGSTLPRRSG
MCSLMFGSMLARRPG

SEQ ID NO: 92615 - protein, 15 aa, Artificial Sequence
  Description of Artificial Sequence: Synthetic peptide
  Seed: MCSLMQGSTLPRRSG
MCSLMFGSMLARRQG

SEQ ID NO: 92616 - protein, 15 aa, Artificial Sequence
  Description of Artificial Sequence: Synthetic peptide
  Seed: MCSLMQGSTLPRRSG
MCSLMFGSMLARRSG

SEQ ID NO: 92617 - protein, 15 aa, Artificial Sequence
  Description of Artificial Sequence: Synthetic peptide
  Seed: MCSLMQGSTLPRRSG
MCSLMFGSMLARRTG

SEQ ID NO: 92618 - protein, 15 aa, Artificial Sequence
  Description of Artificial Sequence: Synthetic peptide
  Seed: MCSLMQGSTLPRRSG
MCSLMFGSMLARRVG

SEQ ID NO: 92619 - protein, 15 aa, Artificial Sequence
  Description of Artificial Sequence: Synthetic peptide
  Seed: MCSLMQGSTLPRRSG
MCSLMFGSMLGRRAG

SEQ ID NO: 92620 - protein, 15 aa, Artificial Sequence
  Description of Artificial Sequence: Synthetic peptide
  Seed: MCSLMQGSTLPRRSG
MCSLMFGSMLGRRIG

SEQ ID NO: 92621 - protein, 15 aa, Artificial Sequence
  Description of Artificial Sequence: Synthetic peptide
  Seed: MCSLMQGSTLPRRSG
MCSLMFGSMLGRRLG

SEQ ID NO: 92622 - protein, 15 aa, Artificial Sequence
  Description of Artificial Sequence: Synthetic peptide
  Seed: MCSLMQGSTLPRRSG
MCSLMFGSMLGRRMG

SEQ ID NO: 92623 - protein, 15 aa, Artificial Sequence
  Description of Artificial Sequence: Synthetic peptide
  Seed: MCSLMQGSTLPRRSG
MCSLMFGSMLGRRNG

SEQ ID NO: 92624 - protein, 15 aa, Artificial Sequence
  Description of Artificial Sequence: Synthetic peptide
  Seed: MCSLMQGSTLPRRSG
MCSLMFGSMLGRRSG

SEQ ID NO: 92625 - protein, 15 aa, Artificial Sequence
  Description of Artificial Sequence: Synthetic peptide
  Seed: MCSLMQGSTLPRRSG
MCSLMFGSMLGRRTG

SEQ ID NO: 92626 - protein, 15 aa, Artificial Sequence
  Description of Artificial Sequence: Synthetic peptide
  Seed: MCSLMQGSTLPRRSG
MCSLMFGSMLGRRVG

SEQ ID NO: 92627 - protein, 15 aa, Artificial Sequence
  Description of Artificial Sequence: Synthetic peptide
  Seed: MCSLMQGSTLPRRSG
MCSLMFGSMLIRRAG

SEQ ID NO: 92628 - protein, 15 aa, Artificial Sequence
  Description of Artificial Sequence: Synthetic peptide
  Seed: MCSLMQGSTLPRRSG
MCSLMFGSMLIRRIG

SEQ ID NO: 92629 - protein, 15 aa, Artificial Sequence
  Description of Artificial Sequence: Synthetic peptide
  Seed: MCSLMQGSTLPRRSG
MCSLMFGSMLIRRLG

SEQ ID NO: 92630 - protein, 15 aa, Artificial Sequence
  Description of Artificial Sequence: Synthetic peptide
  Seed: MCSLMQGSTLPRRSG
MCSLMFGSMLIRRMG

SEQ ID NO: 92631 - protein, 15 aa, Artificial Sequence
  Description of Artificial Sequence: Synthetic peptide
  Seed: MCSLMQGSTLPRRSG
MCSLMFGSMLIRRNG

SEQ ID NO: 92632 - protein, 15 aa, Artificial Sequence
  Description of Artificial Sequence: Synthetic peptide
  Seed: MCSLMQGSTLPRRSG
MCSLMFGSMLIRRSG

SEQ ID NO: 92633 - protein, 15 aa, Artificial Sequence
  Description of Artificial Sequence: Synthetic peptide
  Seed: MCSLMQGSTLPRRSG
MCSLMFGSMLIRRTG

SEQ ID NO: 92634 - protein, 15 aa, Artificial Sequence
  Description of Artificial Sequence: Synthetic peptide
  Seed: MCSLMQGSTLPRRSG
MCSLMFGSMLIRRVG

SEQ ID NO: 92635 - protein, 15 aa, Artificial Sequence
  Description of Artificial Sequence: Synthetic peptide
  Seed: MCSLMQGSTLPRRSG
MCSLMFGSMLNRRAG

SEQ ID NO: 92636 - protein, 15 aa, Artificial Sequence
  Description of Artificial Sequence: Synthetic peptide
  Seed: MCSLMQGSTLPRRSG
MCSLMFGSMLNRRIG

SEQ ID NO: 92637 - protein, 15 aa, Artificial Sequence
  Description of Artificial Sequence: Synthetic peptide
  Seed: MCSLMQGSTLPRRSG
MCSLMFGSMLNRRLG

SEQ ID NO: 92638 - protein, 15 aa, Artificial Sequence
  Description of Artificial Sequence: Synthetic peptide
  Seed: MCSLMQGSTLPRRSG
MCSLMFGSMLNRRMG

SEQ ID NO: 92639 - protein, 15 aa, Artificial Sequence
  Description of Artificial Sequence: Synthetic peptide
  Seed: MCSLMQGSTLPRRSG
MCSLMFGSMLNRRNG

SEQ ID NO: 92640 - protein, 15 aa, Artificial Sequence
  Description of Artificial Sequence: Synthetic peptide
  Seed: MCSLMQGSTLPRRSG
MCSLMFGSMLNRRSG

SEQ ID NO: 92641 - protein, 15 aa, Artificial Sequence
  Description of Artificial Sequence: Synthetic peptide
  Seed: MCSLMQGSTLPRRSG
MCSLMFGSMLNRRTG

SEQ ID NO: 92642 - protein, 15 aa, Artificial Sequence
  Description of Artificial Sequence: Synthetic peptide
  Seed: MCSLMQGSTLPRRSG
MCSLMFGSMLNRRVG

SEQ ID NO: 92643 - protein, 15 aa, Artificial Sequence
  Description of Artificial Sequence: Synthetic peptide
  Seed: MCSLMQGSTLPRRSG
MCSLMFGSMLPRRAG

SEQ ID NO: 92644 - protein, 15 aa, Artificial Sequence
  Description of Artificial Sequence: Synthetic peptide
  Seed: MCSLMQGSTLPRRSG
MCSLMFGSMLPRRGG

SEQ ID NO: 92645 - protein, 15 aa, Artificial Sequence
  Description of Artificial Sequence: Synthetic peptide
  Seed: MCSLMQGSTLPRRSG
MCSLMFGSMLPRRIG

SEQ ID NO: 92646 - protein, 15 aa, Artificial Sequence
  Description of Artificial Sequence: Synthetic peptide
  Seed: MCSLMQGSTLPRRSG
MCSLMFGSMLPRRLG

SEQ ID NO: 92647 - protein, 15 aa, Artificial Sequence
  Description of Artificial Sequence: Synthetic peptide
  Seed: MCSLMQGSTLPRRSG
MCSLMFGSMLPRRMG

SEQ ID NO: 92648 - protein, 15 aa, Artificial Sequence
  Description of Artificial Sequence: Synthetic peptide
  Seed: MCSLMQGSTLPRRSG
MCSLMFGSMLPRRNG

SEQ ID NO: 92649 - protein, 15 aa, Artificial Sequence
  Description of Artificial Sequence: Synthetic peptide
  Seed: MCSLMQGSTLPRRSG
MCSLMFGSMLPRRQG

SEQ ID NO: 92650 - protein, 15 aa, Artificial Sequence
  Description of Artificial Sequence: Synthetic peptide
  Seed: MCSLMQGSTLPRRSG
MCSLMFGSMLPRRSG

SEQ ID NO: 92651 - protein, 15 aa, Artificial Sequence
  Description of Artificial Sequence: Synthetic peptide
  Seed: MCSLMQGSTLPRRSG
MCSLMFGSMLPRRTG

SEQ ID NO: 92652 - protein, 15 aa, Artificial Sequence
  Description of Artificial Sequence: Synthetic peptide
  Seed: MCSLMQGSTLPRRSG
MCSLMFGSMLPRRVG

SEQ ID NO: 92653 - protein, 15 aa, Artificial Sequence
  Description of Artificial Sequence: Synthetic peptide
  Seed: MCSLMQGSTLPRRSG
MCSLMFGSMLSRRAG

SEQ ID NO: 92654 - protein, 15 aa, Artificial Sequence
  Description of Artificial Sequence: Synthetic peptide
  Seed: MCSLMQGSTLPRRSG
MCSLMFGSMLSRRDG

SEQ ID NO: 92655 - protein, 15 aa, Artificial Sequence
  Description of Artificial Sequence: Synthetic peptide
  Seed: MCSLMQGSTLPRRSG
MCSLMFGSMLSRRGG

SEQ ID NO: 92656 - protein, 15 aa, Artificial Sequence
  Description of Artificial Sequence: Synthetic peptide
  Seed: MCSLMQGSTLPRRSG
MCSLMFGSMLSRRHG

SEQ ID NO: 92657 - protein, 15 aa, Artificial Sequence
  Description of Artificial Sequence: Synthetic peptide
  Seed: MCSLMQGSTLPRRSG
MCSLMFGSMLSRRIG

SEQ ID NO: 92658 - protein, 15 aa, Artificial Sequence
  Description of Artificial Sequence: Synthetic peptide
  Seed: MCSLMQGSTLPRRSG
MCSLMFGSMLSRRLG

SEQ ID NO: 92659 - protein, 15 aa, Artificial Sequence
  Description of Artificial Sequence: Synthetic peptide
  Seed: MCSLMQGSTLPRRSG
MCSLMFGSMLSRRMG

SEQ ID NO: 92660 - protein, 15 aa, Artificial Sequence
  Description of Artificial Sequence: Synthetic peptide
  Seed: MCSLMQGSTLPRRSG
MCSLMFGSMLSRRNG

SEQ ID NO: 92661 - protein, 15 aa, Artificial Sequence
  Description of Artificial Sequence: Synthetic peptide
  Seed: MCSLMQGSTLPRRSG
MCSLMFGSMLSRRQG

SEQ ID NO: 92662 - protein, 15 aa, Artificial Sequence
  Description of Artificial Sequence: Synthetic peptide
  Seed: MCSLMQGSTLPRRSG
MCSLMFGSMLSRRSG

SEQ ID NO: 92663 - protein, 15 aa, Artificial Sequence
  Description of Artificial Sequence: Synthetic peptide
  Seed: MCSLMQGSTLPRRSG
MCSLMFGSMLSRRTG

SEQ ID NO: 92664 - protein, 15 aa, Artificial Sequence
  Description of Artificial Sequence: Synthetic peptide
  Seed: MCSLMQGSTLPRRSG
MCSLMFGSMLSRRVG

SEQ ID NO: 92665 - protein, 15 aa, Artificial Sequence
  Description of Artificial Sequence: Synthetic peptide
  Seed: MCSLMQGSTLPRRSG
MCSLMFGSMLTRRAG

SEQ ID NO: 92666 - protein, 15 aa, Artificial Sequence
  Description of Artificial Sequence: Synthetic peptide
  Seed: MCSLMQGSTLPRRSG
MCSLMFGSMLTRRGG

SEQ ID NO: 92667 - protein, 15 aa, Artificial Sequence
  Description of Artificial Sequence: Synthetic peptide
  Seed: MCSLMQGSTLPRRSG
MCSLMFGSMLTRRHG

SEQ ID NO: 92668 - protein, 15 aa, Artificial Sequence
  Description of Artificial Sequence: Synthetic peptide
  Seed: MCSLMQGSTLPRRSG
MCSLMFGSMLTRRIG

SEQ ID NO: 92669 - protein, 15 aa, Artificial Sequence
  Description of Artificial Sequence: Synthetic peptide
  Seed: MCSLMQGSTLPRRSG
MCSLMFGSMLTRRLG

SEQ ID NO: 92670 - protein, 15 aa, Artificial Sequence
  Description of Artificial Sequence: Synthetic peptide
  Seed: MCSLMQGSTLPRRSG
MCSLMFGSMLTRRMG

SEQ ID NO: 92671 - protein, 15 aa, Artificial Sequence
  Description of Artificial Sequence: Synthetic peptide
  Seed: MCSLMQGSTLPRRSG
MCSLMFGSMLTRRNG

SEQ ID NO: 92672 - protein, 15 aa, Artificial Sequence
  Description of Artificial Sequence: Synthetic peptide
  Seed: MCSLMQGSTLPRRSG
MCSLMFGSMLTRRSG

SEQ ID NO: 92673 - protein, 15 aa, Artificial Sequence
  Description of Artificial Sequence: Synthetic peptide
  Seed: MCSLMQGSTLPRRSG
MCSLMFGSMLTRRTG

SEQ ID NO: 92674 - protein, 15 aa, Artificial Sequence
  Description of Artificial Sequence: Synthetic peptide
  Seed: MCSLMQGSTLPRRSG
MCSLMFGSMLTRRVG

SEQ ID NO: 92675 - protein, 15 aa, Artificial Sequence
  Description of Artificial Sequence: Synthetic peptide
  Seed: MCSLMQGSTLPRRSG
MCSLMFGSMLVRRAG

SEQ ID NO: 92676 - protein, 15 aa, Artificial Sequence
  Description of Artificial Sequence: Synthetic peptide
  Seed: MCSLMQGSTLPRRSG
MCSLMFGSMLVRRGG

SEQ ID NO: 92677 - protein, 15 aa, Artificial Sequence
  Description of Artificial Sequence: Synthetic peptide
  Seed: MCSLMQGSTLPRRSG
MCSLMFGSMLVRRHG

SEQ ID NO: 92678 - protein, 15 aa, Artificial Sequence
  Description of Artificial Sequence: Synthetic peptide
  Seed: MCSLMQGSTLPRRSG
MCSLMFGSMLVRRIG

SEQ ID NO: 92679 - protein, 15 aa, Artificial Sequence
  Description of Artificial Sequence: Synthetic peptide
  Seed: MCSLMQGSTLPRRSG
MCSLMFGSMLVRRLG

SEQ ID NO: 92680 - protein, 15 aa, Artificial Sequence
  Description of Artificial Sequence: Synthetic peptide
  Seed: MCSLMQGSTLPRRSG
MCSLMFGSMLVRRMG

SEQ ID NO: 92681 - protein, 15 aa, Artificial Sequence
  Description of Artificial Sequence: Synthetic peptide
  Seed: MCSLMQGSTLPRRSG
MCSLMFGSMLVRRNG

SEQ ID NO: 92682 - protein, 15 aa, Artificial Sequence
  Description of Artificial Sequence: Synthetic peptide
  Seed: MCSLMQGSTLPRRSG
MCSLMFGSMLVRRSG

SEQ ID NO: 92683 - protein, 15 aa, Artificial Sequence
  Description of Artificial Sequence: Synthetic peptide
  Seed: MCSLMQGSTLPRRSG
MCSLMFGSMLVRRTG

SEQ ID NO: 92684 - protein, 15 aa, Artificial Sequence
  Description of Artificial Sequence: Synthetic peptide
  Seed: MCSLMQGSTLPRRSG
MCSLMFGSMLVRRVG

SEQ ID NO: 92685 - protein, 15 aa, Artificial Sequence
  Description of Artificial Sequence: Synthetic peptide
  Seed: MCSLMQGSTLPRRSG
MCSLMFGSQLARRAG

SEQ ID NO: 92686 - protein, 15 aa, Artificial Sequence
  Description of Artificial Sequence: Synthetic peptide
  Seed: MCSLMQGSTLPRRSG
MCSLMFGSQLARRIG

SEQ ID NO: 92687 - protein, 15 aa, Artificial Sequence
  Description of Artificial Sequence: Synthetic peptide
  Seed: MCSLMQGSTLPRRSG
MCSLMFGSQLARRSG

SEQ ID NO: 92688 - protein, 15 aa, Artificial Sequence
  Description of Artificial Sequence: Synthetic peptide
  Seed: MCSLMQGSTLPRRSG
MCSLMFGSQLARRVG

SEQ ID NO: 92689 - protein, 15 aa, Artificial Sequence
  Description of Artificial Sequence: Synthetic peptide
  Seed: MCSLMQGSTLPRRSG
MCSLMFGSSLARRAG

SEQ ID NO: 92690 - protein, 15 aa, Artificial Sequence
  Description of Artificial Sequence: Synthetic peptide
  Seed: MCSLMQGSTLPRRSG
MCSLMFGSVLARRAG

SEQ ID NO: 92691 - protein, 15 aa, Artificial Sequence
  Description of Artificial Sequence: Synthetic peptide
  Seed: MCSLMQGSTLPRRSG
MCSLMFGSVLARRIG

SEQ ID NO: 92692 - protein, 15 aa, Artificial Sequence
  Description of Artificial Sequence: Synthetic peptide
  Seed: MCSLMQGSTLPRRSG
MCSLMFGSVLARRLG

SEQ ID NO: 92693 - protein, 15 aa, Artificial Sequence
  Description of Artificial Sequence: Synthetic peptide
  Seed: MCSLMQGSTLPRRSG
MCSLMFGSVLARRMG

SEQ ID NO: 92694 - protein, 15 aa, Artificial Sequence
  Description of Artificial Sequence: Synthetic peptide
  Seed: MCSLMQGSTLPRRSG
MCSLMFGSVLARRNG

SEQ ID NO: 92695 - protein, 15 aa, Artificial Sequence
  Description of Artificial Sequence: Synthetic peptide
  Seed: MCSLMQGSTLPRRSG
MCSLMFGSVLARRSG

SEQ ID NO: 92696 - protein, 15 aa, Artificial Sequence
  Description of Artificial Sequence: Synthetic peptide
  Seed: MCSLMQGSTLPRRSG
MCSLMFGSVLARRTG

SEQ ID NO: 92697 - protein, 15 aa, Artificial Sequence
  Description of Artificial Sequence: Synthetic peptide
  Seed: MCSLMQGSTLPRRSG
MCSLMFGSVLARRVG

SEQ ID NO: 92698 - protein, 15 aa, Artificial Sequence
  Description of Artificial Sequence: Synthetic peptide
  Seed: MCSLMQGSTLPRRSG
MCSLMFGSVLGRRAG

SEQ ID NO: 92699 - protein, 15 aa, Artificial Sequence
  Description of Artificial Sequence: Synthetic peptide
  Seed: MCSLMQGSTLPRRSG
MCSLMFGSVLPRRAG

SEQ ID NO: 92700 - protein, 15 aa, Artificial Sequence
  Description of Artificial Sequence: Synthetic peptide
  Seed: MCSLMQGSTLPRRSG
MCSLMFGSVLPRRIG

SEQ ID NO: 92701 - protein, 15 aa, Artificial Sequence
  Description of Artificial Sequence: Synthetic peptide
  Seed: MCSLMQGSTLPRRSG
MCSLMFGSVLPRRNG

SEQ ID NO: 92702 - protein, 15 aa, Artificial Sequence
  Description of Artificial Sequence: Synthetic peptide
  Seed: MCSLMQGSTLPRRSG
MCSLMFGSVLPRRSG

SEQ ID NO: 92703 - protein, 15 aa, Artificial Sequence
  Description of Artificial Sequence: Synthetic peptide
  Seed: MCSLMQGSTLPRRSG
MCSLMFGSVLPRRVG

SEQ ID NO: 92704 - protein, 15 aa, Artificial Sequence
  Description of Artificial Sequence: Synthetic peptide
  Seed: MCSLMQGSTLPRRSG
MCSLMFGSVLSRRAG

SEQ ID NO: 92705 - protein, 15 aa, Artificial Sequence
  Description of Artificial Sequence: Synthetic peptide
  Seed: MCSLMQGSTLPRRSG
MCSLMFGSVLSRRIG

SEQ ID NO: 92706 - protein, 15 aa, Artificial Sequence
  Description of Artificial Sequence: Synthetic peptide
  Seed: MCSLMQGSTLPRRSG
MCSLMFGSVLSRRNG

SEQ ID NO: 92707 - protein, 15 aa, Artificial Sequence
  Description of Artificial Sequence: Synthetic peptide
  Seed: MCSLMQGSTLPRRSG
MCSLMFGSVLSRRSG

SEQ ID NO: 92708 - protein, 15 aa, Artificial Sequence
  Description of Artificial Sequence: Synthetic peptide
  Seed: MCSLMQGSTLPRRSG
MCSLMFGSVLSRRVG

SEQ ID NO: 92709 - protein, 15 aa, Artificial Sequence
  Description of Artificial Sequence: Synthetic peptide
  Seed: MCSLMQGSTLPRRSG
MCSLMFGSVLTRRAG

SEQ ID NO: 92710 - protein, 15 aa, Artificial Sequence
  Description of Artificial Sequence: Synthetic peptide
  Seed: MCSLMQGSTLPRRSG
MCSLMFGSVLTRRNG

SEQ ID NO: 92711 - protein, 15 aa, Artificial Sequence
  Description of Artificial Sequence: Synthetic peptide
  Seed: MCSLMQGSTLPRRSG
MCSLMFGSVLTRRSG

SEQ ID NO: 92712 - protein, 15 aa, Artificial Sequence
  Description of Artificial Sequence: Synthetic peptide
  Seed: MCSLMQGSTLPRRSG
MCSLMFGSVLTRRVG

SEQ ID NO: 92713 - protein, 15 aa, Artificial Sequence
  Description of Artificial Sequence: Synthetic peptide
  Seed: MCSLMQGSTLPRRSG
MCSLMFGSVLVRRAG

SEQ ID NO: 92714 - protein, 15 aa, Artificial Sequence
  Description of Artificial Sequence: Synthetic peptide
  Seed: MCSLMQGSTLPRRSG
MCSLMIGSALARRAG

SEQ ID NO: 92715 - protein, 15 aa, Artificial Sequence
  Description of Artificial Sequence: Synthetic peptide
  Seed: MCSLMQGSTLPRRSG
MCSLMIGSALARRGG

SEQ ID NO: 92716 - protein, 15 aa, Artificial Sequence
  Description of Artificial Sequence: Synthetic peptide
  Seed: MCSLMQGSTLPRRSG
MCSLMIGSALARRIG

SEQ ID NO: 92717 - protein, 15 aa, Artificial Sequence
  Description of Artificial Sequence: Synthetic peptide
  Seed: MCSLMQGSTLPRRSG
MCSLMIGSALARRLG

SEQ ID NO: 92718 - protein, 15 aa, Artificial Sequence
  Description of Artificial Sequence: Synthetic peptide
  Seed: MCSLMQGSTLPRRSG
MCSLMIGSALARRMG

SEQ ID NO: 92719 - protein, 15 aa, Artificial Sequence
  Description of Artificial Sequence: Synthetic peptide
  Seed: MCSLMQGSTLPRRSG
MCSLMIGSALARRNG

SEQ ID NO: 92720 - protein, 15 aa, Artificial Sequence
  Description of Artificial Sequence: Synthetic peptide
  Seed: MCSLMQGSTLPRRSG
MCSLMIGSALARRSG

SEQ ID NO: 92721 - protein, 15 aa, Artificial Sequence
  Description of Artificial Sequence: Synthetic peptide
  Seed: MCSLMQGSTLPRRSG
MCSLMIGSALARRTG

SEQ ID NO: 92722 - protein, 15 aa, Artificial Sequence
  Description of Artificial Sequence: Synthetic peptide
  Seed: MCSLMQGSTLPRRSG
MCSLMIGSALARRVG

SEQ ID NO: 92723 - protein, 15 aa, Artificial Sequence
  Description of Artificial Sequence: Synthetic peptide
  Seed: MCSLMQGSTLPRRSG
MCSLMIGSALIRRAG

SEQ ID NO: 92724 - protein, 15 aa, Artificial Sequence
  Description of Artificial Sequence: Synthetic peptide
  Seed: MCSLMQGSTLPRRSG
MCSLMIGSALPRRAG

SEQ ID NO: 92725 - protein, 15 aa, Artificial Sequence
  Description of Artificial Sequence: Synthetic peptide
  Seed: MCSLMQGSTLPRRSG
MCSLMIGSALPRRIG

SEQ ID NO: 92726 - protein, 15 aa, Artificial Sequence
  Description of Artificial Sequence: Synthetic peptide
  Seed: MCSLMQGSTLPRRSG
MCSLMIGSALPRRSG

SEQ ID NO: 92727 - protein, 15 aa, Artificial Sequence
  Description of Artificial Sequence: Synthetic peptide
  Seed: MCSLMQGSTLPRRSG
MCSLMIGSALPRRTG

SEQ ID NO: 92728 - protein, 15 aa, Artificial Sequence
  Description of Artificial Sequence: Synthetic peptide
  Seed: MCSLMQGSTLPRRSG
MCSLMIGSALPRRVG

SEQ ID NO: 92729 - protein, 15 aa, Artificial Sequence
  Description of Artificial Sequence: Synthetic peptide
  Seed: MCSLMQGSTLPRRSG
MCSLMIGSALVRRAG

SEQ ID NO: 92730 - protein, 15 aa, Artificial Sequence
  Description of Artificial Sequence: Synthetic peptide
  Seed: MCSLMQGSTLPRRSG
MCSLMIGSALVRRIG

SEQ ID NO: 92731 - protein, 15 aa, Artificial Sequence
  Description of Artificial Sequence: Synthetic peptide
  Seed: MCSLMQGSTLPRRSG
MCSLMIGSALVRRSG

SEQ ID NO: 92732 - protein, 15 aa, Artificial Sequence
  Description of Artificial Sequence: Synthetic peptide
  Seed: MCSLMQGSTLPRRSG
MCSLMIGSALVRRTG

SEQ ID NO: 92733 - protein, 15 aa, Artificial Sequence
  Description of Artificial Sequence: Synthetic peptide
  Seed: MCSLMQGSTLPRRSG
MCSLMIGSALVRRVG

SEQ ID NO: 92734 - protein, 15 aa, Artificial Sequence
  Description of Artificial Sequence: Synthetic peptide
  Seed: MCSLMQGSTLPRRSG
MCSLMIGSGLARRAG

SEQ ID NO: 92735 - protein, 15 aa, Artificial Sequence
  Description of Artificial Sequence: Synthetic peptide
  Seed: MCSLMQGSTLPRRSG
MCSLMIGSGLARRGG

SEQ ID NO: 92736 - protein, 15 aa, Artificial Sequence
  Description of Artificial Sequence: Synthetic peptide
  Seed: MCSLMQGSTLPRRSG
MCSLMIGSGLARRIG

SEQ ID NO: 92737 - protein, 15 aa, Artificial Sequence
  Description of Artificial Sequence: Synthetic peptide
  Seed: MCSLMQGSTLPRRSG
MCSLMIGSGLARRLG

SEQ ID NO: 92738 - protein, 15 aa, Artificial Sequence
  Description of Artificial Sequence: Synthetic peptide
  Seed: MCSLMQGSTLPRRSG
MCSLMIGSGLARRMG

SEQ ID NO: 92739 - protein, 15 aa, Artificial Sequence
  Description of Artificial Sequence: Synthetic peptide
  Seed: MCSLMQGSTLPRRSG
MCSLMIGSGLARRSG

SEQ ID NO: 92740 - protein, 15 aa, Artificial Sequence
  Description of Artificial Sequence: Synthetic peptide
  Seed: MCSLMQGSTLPRRSG
MCSLMIGSGLARRTG

SEQ ID NO: 92741 - protein, 15 aa, Artificial Sequence
  Description of Artificial Sequence: Synthetic peptide
  Seed: MCSLMQGSTLPRRSG
MCSLMIGSGLARRVG

SEQ ID NO: 92742 - protein, 15 aa, Artificial Sequence
  Description of Artificial Sequence: Synthetic peptide
  Seed: MCSLMQGSTLPRRSG
MCSLMIGSGLIRRAG

SEQ ID NO: 92743 - protein, 15 aa, Artificial Sequence
  Description of Artificial Sequence: Synthetic peptide
  Seed: MCSLMQGSTLPRRSG
MCSLMIGSGLPRRAG

SEQ ID NO: 92744 - protein, 15 aa, Artificial Sequence
  Description of Artificial Sequence: Synthetic peptide
  Seed: MCSLMQGSTLPRRSG
MCSLMIGSGLPRRIG

SEQ ID NO: 92745 - protein, 15 aa, Artificial Sequence
  Description of Artificial Sequence: Synthetic peptide
  Seed: MCSLMQGSTLPRRSG
MCSLMIGSGLPRRVG

SEQ ID NO: 92746 - protein, 15 aa, Artificial Sequence
  Description of Artificial Sequence: Synthetic peptide
  Seed: MCSLMQGSTLPRRSG
MCSLMIGSGLVRRAG

SEQ ID NO: 92747 - protein, 15 aa, Artificial Sequence
  Description of Artificial Sequence: Synthetic peptide
  Seed: MCSLMQGSTLPRRSG
MCSLMIGSGLVRRIG

SEQ ID NO: 92748 - protein, 15 aa, Artificial Sequence
  Description of Artificial Sequence: Synthetic peptide
  Seed: MCSLMQGSTLPRRSG
MCSLMIGSGLVRRSG

SEQ ID NO: 92749 - protein, 15 aa, Artificial Sequence
  Description of Artificial Sequence: Synthetic peptide
  Seed: MCSLMQGSTLPRRSG
MCSLMIGSGLVRRTG

SEQ ID NO: 92750 - protein, 15 aa, Artificial Sequence
  Description of Artificial Sequence: Synthetic peptide
  Seed: MCSLMQGSTLPRRSG
MCSLMIGSGLVRRVG

SEQ ID NO: 92751 - protein, 15 aa, Artificial Sequence
  Description of Artificial Sequence: Synthetic peptide
  Seed: MCSLMQGSTLPRRSG
MCSLMIGSLLARRAG

SEQ ID NO: 92752 - protein, 15 aa, Artificial Sequence
  Description of Artificial Sequence: Synthetic peptide
  Seed: MCSLMQGSTLPRRSG
MCSLMIGSLLARRSG

SEQ ID NO: 92753 - protein, 15 aa, Artificial Sequence
  Description of Artificial Sequence: Synthetic peptide
  Seed: MCSLMQGSTLPRRSG
MCSLMIGSMLARRAG

SEQ ID NO: 92754 - protein, 15 aa, Artificial Sequence
  Description of Artificial Sequence: Synthetic peptide
  Seed: MCSLMQGSTLPRRSG
MCSLMIGSMLARRSG

SEQ ID NO: 92755 - protein, 15 aa, Artificial Sequence
  Description of Artificial Sequence: Synthetic peptide
  Seed: MCSLMQGSTLPRRSG
MCSLMIGSMLARRVG

SEQ ID NO: 92756 - protein, 15 aa, Artificial Sequence
  Description of Artificial Sequence: Synthetic peptide
  Seed: MCSLMQGSTLPRRSG
MCSLMIGSSLARRAG

SEQ ID NO: 92757 - protein, 15 aa, Artificial Sequence
  Description of Artificial Sequence: Synthetic peptide
  Seed: MCSLMQGSTLPRRSG
MCSLMIGSSLARRSG

SEQ ID NO: 92758 - protein, 15 aa, Artificial Sequence
  Description of Artificial Sequence: Synthetic peptide
  Seed: MCSLMQGSTLPRRSG
MCSLMIGSSLARRVG

SEQ ID NO: 92759 - protein, 15 aa, Artificial Sequence
  Description of Artificial Sequence: Synthetic peptide
  Seed: MCSLMQGSTLPRRSG
MCSLMLGSALARRAG

SEQ ID NO: 92760 - protein, 15 aa, Artificial Sequence
  Description of Artificial Sequence: Synthetic peptide
  Seed: MCSLMQGSTLPRRSG
MCSLMLGSALARRSG

SEQ ID NO: 92761 - protein, 15 aa, Artificial Sequence
  Description of Artificial Sequence: Synthetic peptide
  Seed: MCSLMQGSTLPRRSG
MCSLMLGSALARRTG

SEQ ID NO: 92762 - protein, 15 aa, Artificial Sequence
  Description of Artificial Sequence: Synthetic peptide
  Seed: MCSLMQGSTLPRRSG
MCSLMLGSALARRVG

SEQ ID NO: 92763 - protein, 15 aa, Artificial Sequence
  Description of Artificial Sequence: Synthetic peptide
  Seed: MCSLMQGSTLPRRSG
MCSLMLGSGLARRAG

SEQ ID NO: 92764 - protein, 15 aa, Artificial Sequence
  Description of Artificial Sequence: Synthetic peptide
  Seed: MCSLMQGSTLPRRSG
MCSLMLGSGLARRVG

SEQ ID NO: 92765 - protein, 15 aa, Artificial Sequence
  Description of Artificial Sequence: Synthetic peptide
  Seed: MCSLMQGSTLPRRSG
MCSLMLGSLLARRAG

SEQ ID NO: 92766 - protein, 15 aa, Artificial Sequence
  Description of Artificial Sequence: Synthetic peptide
  Seed: MCSLMQGSTLPRRSG
MCSLMLGSMLARRAG

SEQ ID NO: 92767 - protein, 15 aa, Artificial Sequence
  Description of Artificial Sequence: Synthetic peptide
  Seed: MCSLMQGSTLPRRSG
MCSLMLGSMLARRSG

SEQ ID NO: 92768 - protein, 15 aa, Artificial Sequence
  Description of Artificial Sequence: Synthetic peptide
  Seed: MCSLMQGSTLPRRSG
MCSLMMGSALARRAG

SEQ ID NO: 92769 - protein, 15 aa, Artificial Sequence
  Description of Artificial Sequence: Synthetic peptide
  Seed: MCSLMQGSTLPRRSG
MCSLMMGSALARRIG

SEQ ID NO: 92770 - protein, 15 aa, Artificial Sequence
  Description of Artificial Sequence: Synthetic peptide
  Seed: MCSLMQGSTLPRRSG
MCSLMMGSALARRSG

SEQ ID NO: 92771 - protein, 15 aa, Artificial Sequence
  Description of Artificial Sequence: Synthetic peptide
  Seed: MCSLMQGSTLPRRSG
MCSLMMGSALARRTG

SEQ ID NO: 92772 - protein, 15 aa, Artificial Sequence
  Description of Artificial Sequence: Synthetic peptide
  Seed: MCSLMQGSTLPRRSG
MCSLMMGSALARRVG

SEQ ID NO: 92773 - protein, 15 aa, Artificial Sequence
  Description of Artificial Sequence: Synthetic peptide
  Seed: MCSLMQGSTLPRRSG
MCSLMMGSALVRRAG

SEQ ID NO: 92774 - protein, 15 aa, Artificial Sequence
  Description of Artificial Sequence: Synthetic peptide
  Seed: MCSLMQGSTLPRRSG
MCSLMMGSGLARRAG

SEQ ID NO: 92775 - protein, 15 aa, Artificial Sequence
  Description of Artificial Sequence: Synthetic peptide
  Seed: MCSLMQGSTLPRRSG
MCSLMMGSGLARRIG

SEQ ID NO: 92776 - protein, 15 aa, Artificial Sequence
  Description of Artificial Sequence: Synthetic peptide
  Seed: MCSLMQGSTLPRRSG
MCSLMMGSGLARRVG

SEQ ID NO: 92777 - protein, 15 aa, Artificial Sequence
  Description of Artificial Sequence: Synthetic peptide
  Seed: MCSLMQGSTLPRRSG
MCSLMPGSALARRAG

SEQ ID NO: 92778 - protein, 15 aa, Artificial Sequence
  Description of Artificial Sequence: Synthetic peptide
  Seed: MCSLMQGSTLPRRSG
MCSLMPGSALARRIG

SEQ ID NO: 92779 - protein, 15 aa, Artificial Sequence
  Description of Artificial Sequence: Synthetic peptide
  Seed: MCSLMQGSTLPRRSG
MCSLMPGSALARRSG

SEQ ID NO: 92780 - protein, 15 aa, Artificial Sequence
  Description of Artificial Sequence: Synthetic peptide
  Seed: MCSLMQGSTLPRRSG
MCSLMPGSALARRTG

SEQ ID NO: 92781 - protein, 15 aa, Artificial Sequence
  Description of Artificial Sequence: Synthetic peptide
  Seed: MCSLMQGSTLPRRSG
MCSLMPGSALARRVG

SEQ ID NO: 92782 - protein, 15 aa, Artificial Sequence
  Description of Artificial Sequence: Synthetic peptide
  Seed: MCSLMQGSTLPRRSG
MCSLMPGSALVRRAG

SEQ ID NO: 92783 - protein, 15 aa, Artificial Sequence
  Description of Artificial Sequence: Synthetic peptide
  Seed: MCSLMQGSTLPRRSG
MCSLMPGSALVRRSG

SEQ ID NO: 92784 - protein, 15 aa, Artificial Sequence
  Description of Artificial Sequence: Synthetic peptide
  Seed: MCSLMQGSTLPRRSG
MCSLMPGSALVRRTG

SEQ ID NO: 92785 - protein, 15 aa, Artificial Sequence
  Description of Artificial Sequence: Synthetic peptide
  Seed: MCSLMQGSTLPRRSG
MCSLMPGSALVRRVG

SEQ ID NO: 92786 - protein, 15 aa, Artificial Sequence
  Description of Artificial Sequence: Synthetic peptide
  Seed: MCSLMQGSTLPRRSG
MCSLMPGSGLARRAG

SEQ ID NO: 92787 - protein, 15 aa, Artificial Sequence
  Description of Artificial Sequence: Synthetic peptide
  Seed: MCSLMQGSTLPRRSG
MCSLMPGSGLARRIG

SEQ ID NO: 92788 - protein, 15 aa, Artificial Sequence
  Description of Artificial Sequence: Synthetic peptide
  Seed: MCSLMQGSTLPRRSG
MCSLMPGSGLARRSG

SEQ ID NO: 92789 - protein, 15 aa, Artificial Sequence
  Description of Artificial Sequence: Synthetic peptide
  Seed: MCSLMQGSTLPRRSG
MCSLMPGSGLARRVG

SEQ ID NO: 92790 - protein, 15 aa, Artificial Sequence
  Description of Artificial Sequence: Synthetic peptide
  Seed: MCSLMQGSTLPRRSG
MCSLMPGSGLVRRAG

SEQ ID NO: 92791 - protein, 15 aa, Artificial Sequence
  Description of Artificial Sequence: Synthetic peptide
  Seed: MCSLMQGSTLPRRSG
MCSLMPGSGLVRRIG

SEQ ID NO: 92792 - protein, 15 aa, Artificial Sequence
  Description of Artificial Sequence: Synthetic peptide
  Seed: MCSLMQGSTLPRRSG
MCSLMPGSGLVRRSG

SEQ ID NO: 92793 - protein, 15 aa, Artificial Sequence
  Description of Artificial Sequence: Synthetic peptide
  Seed: MCSLMQGSTLPRRSG
MCSLMPGSGLVRRVG

SEQ ID NO: 92794 - protein, 15 aa, Artificial Sequence
  Description of Artificial Sequence: Synthetic peptide
  Seed: MCSLMQGSTLPRRSG
MCSLMTGSALARRAG

SEQ ID NO: 92795 - protein, 15 aa, Artificial Sequence
  Description of Artificial Sequence: Synthetic peptide
  Seed: MCSLMQGSTLPRRSG
MCSLMTGSALARRIG

SEQ ID NO: 92796 - protein, 15 aa, Artificial Sequence
  Description of Artificial Sequence: Synthetic peptide
  Seed: MCSLMQGSTLPRRSG
MCSLMTGSALARRVG

SEQ ID NO: 92797 - protein, 15 aa, Artificial Sequence
  Description of Artificial Sequence: Synthetic peptide
  Seed: MCSLMQGSTLPRRSG
MCSLMTGSGLARRVG

SEQ ID NO: 92798 - protein, 15 aa, Artificial Sequence
  Description of Artificial Sequence: Synthetic peptide
  Seed: MCSLMQGSTLPRRSG
MCSLMVGSALARRAG

SEQ ID NO: 92799 - protein, 15 aa, Artificial Sequence
  Description of Artificial Sequence: Synthetic peptide
  Seed: MCSLMQGSTLPRRSG
MCSLMVGSALARRIG

SEQ ID NO: 92800 - protein, 15 aa, Artificial Sequence
  Description of Artificial Sequence: Synthetic peptide
  Seed: MCSLMQGSTLPRRSG
MCSLMVGSALARRSG

SEQ ID NO: 92801 - protein, 15 aa, Artificial Sequence
  Description of Artificial Sequence: Synthetic peptide
  Seed: MCSLMQGSTLPRRSG
MCSLMVGSALARRTG

SEQ ID NO: 92802 - protein, 15 aa, Artificial Sequence
  Description of Artificial Sequence: Synthetic peptide
  Seed: MCSLMQGSTLPRRSG
MCSLMVGSALARRVG

SEQ ID NO: 92803 - protein, 15 aa, Artificial Sequence
  Description of Artificial Sequence: Synthetic peptide
  Seed: MCSLMQGSTLPRRSG
MCSLMVGSALPRRAG

SEQ ID NO: 92804 - protein, 15 aa, Artificial Sequence
  Description of Artificial Sequence: Synthetic peptide
  Seed: MCSLMQGSTLPRRSG
MCSLMVGSALPRRVG

SEQ ID NO: 92805 - protein, 15 aa, Artificial Sequence
  Description of Artificial Sequence: Synthetic peptide
  Seed: MCSLMQGSTLPRRSG
MCSLMVGSALVRRAG

SEQ ID NO: 92806 - protein, 15 aa, Artificial Sequence
  Description of Artificial Sequence: Synthetic peptide
  Seed: MCSLMQGSTLPRRSG
MCSLMVGSALVRRSG

SEQ ID NO: 92807 - protein, 15 aa, Artificial Sequence
  Description of Artificial Sequence: Synthetic peptide
  Seed: MCSLMQGSTLPRRSG
MCSLMVGSALVRRTG

SEQ ID NO: 92808 - protein, 15 aa, Artificial Sequence
  Description of Artificial Sequence: Synthetic peptide
  Seed: MCSLMQGSTLPRRSG
MCSLMVGSALVRRVG

SEQ ID NO: 92809 - protein, 15 aa, Artificial Sequence
  Description of Artificial Sequence: Synthetic peptide
  Seed: MCSLMQGSTLPRRSG
MCSLMVGSGLARRAG

SEQ ID NO: 92810 - protein, 15 aa, Artificial Sequence
  Description of Artificial Sequence: Synthetic peptide
  Seed: MCSLMQGSTLPRRSG
MCSLMVGSGLARRIG

SEQ ID NO: 92811 - protein, 15 aa, Artificial Sequence
  Description of Artificial Sequence: Synthetic peptide
  Seed: MCSLMQGSTLPRRSG
MCSLMVGSGLARRMG

SEQ ID NO: 92812 - protein, 15 aa, Artificial Sequence
  Description of Artificial Sequence: Synthetic peptide
  Seed: MCSLMQGSTLPRRSG
MCSLMVGSGLARRSG

SEQ ID NO: 92813 - protein, 15 aa, Artificial Sequence
  Description of Artificial Sequence: Synthetic peptide
  Seed: MCSLMQGSTLPRRSG
MCSLMVGSGLARRTG

SEQ ID NO: 92814 - protein, 15 aa, Artificial Sequence
  Description of Artificial Sequence: Synthetic peptide
  Seed: MCSLMQGSTLPRRSG
MCSLMVGSGLARRVG

SEQ ID NO: 92815 - protein, 15 aa, Artificial Sequence
  Description of Artificial Sequence: Synthetic peptide
  Seed: MCSLMQGSTLPRRSG
MCSLMVGSGLPRRVG

SEQ ID NO: 92816 - protein, 15 aa, Artificial Sequence
  Description of Artificial Sequence: Synthetic peptide
  Seed: MCSLMQGSTLPRRSG
MCSLMVGSGLVRRAG

SEQ ID NO: 92817 - protein, 15 aa, Artificial Sequence
  Description of Artificial Sequence: Synthetic peptide
  Seed: MCSLMQGSTLPRRSG
MCSLMVGSGLVRRIG

SEQ ID NO: 92818 - protein, 15 aa, Artificial Sequence
  Description of Artificial Sequence: Synthetic peptide
  Seed: MCSLMQGSTLPRRSG
MCSLMVGSGLVRRSG

SEQ ID NO: 92819 - protein, 15 aa, Artificial Sequence
  Description of Artificial Sequence: Synthetic peptide
  Seed: MCSLMQGSTLPRRSG
MCSLMVGSGLVRRTG

SEQ ID NO: 92820 - protein, 15 aa, Artificial Sequence
  Description of Artificial Sequence: Synthetic peptide
  Seed: MCSLMQGSTLPRRSG
MCSLMVGSGLVRRVG

SEQ ID NO: 92821 - protein, 15 aa, Artificial Sequence
  Description of Artificial Sequence: Synthetic peptide
  Seed: MCSLMQGSTLPRRSG
MCSLMVGSSLARRAG

SEQ ID NO: 92822 - protein, 15 aa, Artificial Sequence
  Description of Artificial Sequence: Synthetic peptide
  Seed: MCSLMQGSTLPRRSG
MCSLMVGSSLARRVG

SEQ ID NO: 92823 - protein, 15 aa, Artificial Sequence
  Description of Artificial Sequence: Synthetic peptide
  Seed: MCSLMQGSTLPRRSG
MCSLMWGSALARRAG

SEQ ID NO: 92824 - protein, 15 aa, Artificial Sequence
  Description of Artificial Sequence: Synthetic peptide
  Seed: MCSLMQGSTLPRRSG
MCSLMWGSALARRVG

SEQ ID NO: 92825 - protein, 15 aa, Artificial Sequence
  Description of Artificial Sequence: Synthetic peptide
  Seed: MCSLMQGSTLPRRSG
MCSLMWGSGLARRAG

SEQ ID NO: 92826 - protein, 15 aa, Artificial Sequence
  Description of Artificial Sequence: Synthetic peptide
  Seed: MCSLMQGSTLPRRSG
MCSLMWGSGLARRVG

SEQ ID NO: 92827 - protein, 15 aa, Artificial Sequence
  Description of Artificial Sequence: Synthetic peptide
  Seed: MCSLMQGSTLPRRSG
MCSLMWGSLLARRAG

SEQ ID NO: 92828 - protein, 15 aa, Artificial Sequence
  Description of Artificial Sequence: Synthetic peptide
  Seed: MCSLMQGSTLPRRSG
MCSLMWGSLLSRRAG

SEQ ID NO: 92829 - protein, 15 aa, Artificial Sequence
  Description of Artificial Sequence: Synthetic peptide
  Seed: MCSLMQGSTLPRRSG
MCSLMWGSMLARRAG

SEQ ID NO: 92830 - protein, 15 aa, Artificial Sequence
  Description of Artificial Sequence: Synthetic peptide
  Seed: MCSLMQGSTLPRRSG
MCSLMWGSMLARRIG

SEQ ID NO: 92831 - protein, 15 aa, Artificial Sequence
  Description of Artificial Sequence: Synthetic peptide
  Seed: MCSLMQGSTLPRRSG
MCSLMWGSMLARRLG

SEQ ID NO: 92832 - protein, 15 aa, Artificial Sequence
  Description of Artificial Sequence: Synthetic peptide
  Seed: MCSLMQGSTLPRRSG
MCSLMWGSMLARRSG

SEQ ID NO: 92833 - protein, 15 aa, Artificial Sequence
  Description of Artificial Sequence: Synthetic peptide
  Seed: MCSLMQGSTLPRRSG
MCSLMWGSMLARRVG

SEQ ID NO: 92834 - protein, 15 aa, Artificial Sequence
  Description of Artificial Sequence: Synthetic peptide
  Seed: MCSLMQGSTLPRRSG
MCSLMYGSALARRAG

SEQ ID NO: 92835 - protein, 15 aa, Artificial Sequence
  Description of Artificial Sequence: Synthetic peptide
  Seed: MCSLMQGSTLPRRSG
MCSLMYGSALARRIG

SEQ ID NO: 92836 - protein, 15 aa, Artificial Sequence
  Description of Artificial Sequence: Synthetic peptide
  Seed: MCSLMQGSTLPRRSG
MCSLMYGSALARRLG

SEQ ID NO: 92837 - protein, 15 aa, Artificial Sequence
  Description of Artificial Sequence: Synthetic peptide
  Seed: MCSLMQGSTLPRRSG
MCSLMYGSALARRMG

SEQ ID NO: 92838 - protein, 15 aa, Artificial Sequence
  Description of Artificial Sequence: Synthetic peptide
  Seed: MCSLMQGSTLPRRSG
MCSLMYGSALARRNG

SEQ ID NO: 92839 - protein, 15 aa, Artificial Sequence
  Description of Artificial Sequence: Synthetic peptide
  Seed: MCSLMQGSTLPRRSG
MCSLMYGSALARRSG

SEQ ID NO: 92840 - protein, 15 aa, Artificial Sequence
  Description of Artificial Sequence: Synthetic peptide
  Seed: MCSLMQGSTLPRRSG
MCSLMYGSALARRVG

SEQ ID NO: 92841 - protein, 15 aa, Artificial Sequence
  Description of Artificial Sequence: Synthetic peptide
  Seed: MCSLMQGSTLPRRSG
MCSLMYGSALSRRAG

SEQ ID NO: 92842 - protein, 15 aa, Artificial Sequence
  Description of Artificial Sequence: Synthetic peptide
  Seed: MCSLMQGSTLPRRSG
MCSLMYGSALSRRIG

SEQ ID NO: 92843 - protein, 15 aa, Artificial Sequence
  Description of Artificial Sequence: Synthetic peptide
  Seed: MCSLMQGSTLPRRSG
MCSLMYGSALSRRLG

SEQ ID NO: 92844 - protein, 15 aa, Artificial Sequence
  Description of Artificial Sequence: Synthetic peptide
  Seed: MCSLMQGSTLPRRSG
MCSLMYGSALSRRVG

SEQ ID NO: 92845 - protein, 15 aa, Artificial Sequence
  Description of Artificial Sequence: Synthetic peptide
  Seed: MCSLMQGSTLPRRSG
MCSLMYGSALTRRVG

SEQ ID NO: 92846 - protein, 15 aa, Artificial Sequence
  Description of Artificial Sequence: Synthetic peptide
  Seed: MCSLMQGSTLPRRSG
MCSLMYGSGLARRVG

SEQ ID NO: 92847 - protein, 15 aa, Artificial Sequence
  Description of Artificial Sequence: Synthetic peptide
  Seed: MCSLMQGSTLPRRSG
MCSLMYGSILARRAG

SEQ ID NO: 92848 - protein, 15 aa, Artificial Sequence
  Description of Artificial Sequence: Synthetic peptide
  Seed: MCSLMQGSTLPRRSG
MCSLMYGSILARRGG

SEQ ID NO: 92849 - protein, 15 aa, Artificial Sequence
  Description of Artificial Sequence: Synthetic peptide
  Seed: MCSLMQGSTLPRRSG
MCSLMYGSILARRIG

SEQ ID NO: 92850 - protein, 15 aa, Artificial Sequence
  Description of Artificial Sequence: Synthetic peptide
  Seed: MCSLMQGSTLPRRSG
MCSLMYGSILARRLG

SEQ ID NO: 92851 - protein, 15 aa, Artificial Sequence
  Description of Artificial Sequence: Synthetic peptide
  Seed: MCSLMQGSTLPRRSG
MCSLMYGSILARRMG

SEQ ID NO: 92852 - protein, 15 aa, Artificial Sequence
  Description of Artificial Sequence: Synthetic peptide
  Seed: MCSLMQGSTLPRRSG
MCSLMYGSILARRNG

SEQ ID NO: 92853 - protein, 15 aa, Artificial Sequence
  Description of Artificial Sequence: Synthetic peptide
  Seed: MCSLMQGSTLPRRSG
MCSLMYGSILARRSG

SEQ ID NO: 92854 - protein, 15 aa, Artificial Sequence
  Description of Artificial Sequence: Synthetic peptide
  Seed: MCSLMQGSTLPRRSG
MCSLMYGSILARRTG

SEQ ID NO: 92855 - protein, 15 aa, Artificial Sequence
  Description of Artificial Sequence: Synthetic peptide
  Seed: MCSLMQGSTLPRRSG
MCSLMYGSILARRVG

SEQ ID NO: 92856 - protein, 15 aa, Artificial Sequence
  Description of Artificial Sequence: Synthetic peptide
  Seed: MCSLMQGSTLPRRSG
MCSLMYGSILGRRAG

SEQ ID NO: 92857 - protein, 15 aa, Artificial Sequence
  Description of Artificial Sequence: Synthetic peptide
  Seed: MCSLMQGSTLPRRSG
MCSLMYGSILGRRVG

SEQ ID NO: 92858 - protein, 15 aa, Artificial Sequence
  Description of Artificial Sequence: Synthetic peptide
  Seed: MCSLMQGSTLPRRSG
MCSLMYGSILPRRAG

SEQ ID NO: 92859 - protein, 15 aa, Artificial Sequence
  Description of Artificial Sequence: Synthetic peptide
  Seed: MCSLMQGSTLPRRSG
MCSLMYGSILPRRIG

SEQ ID NO: 92860 - protein, 15 aa, Artificial Sequence
  Description of Artificial Sequence: Synthetic peptide
  Seed: MCSLMQGSTLPRRSG
MCSLMYGSILPRRLG

SEQ ID NO: 92861 - protein, 15 aa, Artificial Sequence
  Description of Artificial Sequence: Synthetic peptide
  Seed: MCSLMQGSTLPRRSG
MCSLMYGSILPRRNG

SEQ ID NO: 92862 - protein, 15 aa, Artificial Sequence
  Description of Artificial Sequence: Synthetic peptide
  Seed: MCSLMQGSTLPRRSG
MCSLMYGSILPRRSG

SEQ ID NO: 92863 - protein, 15 aa, Artificial Sequence
  Description of Artificial Sequence: Synthetic peptide
  Seed: MCSLMQGSTLPRRSG
MCSLMYGSILPRRVG

SEQ ID NO: 92864 - protein, 15 aa, Artificial Sequence
  Description of Artificial Sequence: Synthetic peptide
  Seed: MCSLMQGSTLPRRSG
MCSLMYGSILSRRAG

SEQ ID NO: 92865 - protein, 15 aa, Artificial Sequence
  Description of Artificial Sequence: Synthetic peptide
  Seed: MCSLMQGSTLPRRSG
MCSLMYGSILSRRIG

SEQ ID NO: 92866 - protein, 15 aa, Artificial Sequence
  Description of Artificial Sequence: Synthetic peptide
  Seed: MCSLMQGSTLPRRSG
MCSLMYGSILSRRLG

SEQ ID NO: 92867 - protein, 15 aa, Artificial Sequence
  Description of Artificial Sequence: Synthetic peptide
  Seed: MCSLMQGSTLPRRSG
MCSLMYGSILSRRMG

SEQ ID NO: 92868 - protein, 15 aa, Artificial Sequence
  Description of Artificial Sequence: Synthetic peptide
  Seed: MCSLMQGSTLPRRSG
MCSLMYGSILSRRNG

SEQ ID NO: 92869 - protein, 15 aa, Artificial Sequence
  Description of Artificial Sequence: Synthetic peptide
  Seed: MCSLMQGSTLPRRSG
MCSLMYGSILSRRSG

SEQ ID NO: 92870 - protein, 15 aa, Artificial Sequence
  Description of Artificial Sequence: Synthetic peptide
  Seed: MCSLMQGSTLPRRSG
MCSLMYGSILSRRTG

SEQ ID NO: 92871 - protein, 15 aa, Artificial Sequence
  Description of Artificial Sequence: Synthetic peptide
  Seed: MCSLMQGSTLPRRSG
MCSLMYGSILSRRVG

SEQ ID NO: 92872 - protein, 15 aa, Artificial Sequence
  Description of Artificial Sequence: Synthetic peptide
  Seed: MCSLMQGSTLPRRSG
MCSLMYGSILTRRAG

SEQ ID NO: 92873 - protein, 15 aa, Artificial Sequence
  Description of Artificial Sequence: Synthetic peptide
  Seed: MCSLMQGSTLPRRSG
MCSLMYGSILTRRIG

SEQ ID NO: 92874 - protein, 15 aa, Artificial Sequence
  Description of Artificial Sequence: Synthetic peptide
  Seed: MCSLMQGSTLPRRSG
MCSLMYGSILTRRLG

SEQ ID NO: 92875 - protein, 15 aa, Artificial Sequence
  Description of Artificial Sequence: Synthetic peptide
  Seed: MCSLMQGSTLPRRSG
MCSLMYGSILTRRMG

SEQ ID NO: 92876 - protein, 15 aa, Artificial Sequence
  Description of Artificial Sequence: Synthetic peptide
  Seed: MCSLMQGSTLPRRSG
MCSLMYGSILTRRNG

SEQ ID NO: 92877 - protein, 15 aa, Artificial Sequence
  Description of Artificial Sequence: Synthetic peptide
  Seed: MCSLMQGSTLPRRSG
MCSLMYGSILTRRSG

SEQ ID NO: 92878 - protein, 15 aa, Artificial Sequence
  Description of Artificial Sequence: Synthetic peptide
  Seed: MCSLMQGSTLPRRSG
MCSLMYGSILTRRTG

SEQ ID NO: 92879 - protein, 15 aa, Artificial Sequence
  Description of Artificial Sequence: Synthetic peptide
  Seed: MCSLMQGSTLPRRSG
MCSLMYGSILTRRVG

SEQ ID NO: 92880 - protein, 15 aa, Artificial Sequence
  Description of Artificial Sequence: Synthetic peptide
  Seed: MCSLMQGSTLPRRSG
MCSLMYGSILVRRAG

SEQ ID NO: 92881 - protein, 15 aa, Artificial Sequence
  Description of Artificial Sequence: Synthetic peptide
  Seed: MCSLMQGSTLPRRSG
MCSLMYGSILVRRIG

SEQ ID NO: 92882 - protein, 15 aa, Artificial Sequence
  Description of Artificial Sequence: Synthetic peptide
  Seed: MCSLMQGSTLPRRSG
MCSLMYGSILVRRLG

SEQ ID NO: 92883 - protein, 15 aa, Artificial Sequence
  Description of Artificial Sequence: Synthetic peptide
  Seed: MCSLMQGSTLPRRSG
MCSLMYGSILVRRNG

SEQ ID NO: 92884 - protein, 15 aa, Artificial Sequence
  Description of Artificial Sequence: Synthetic peptide
  Seed: MCSLMQGSTLPRRSG
MCSLMYGSILVRRSG

SEQ ID NO: 92885 - protein, 15 aa, Artificial Sequence
  Description of Artificial Sequence: Synthetic peptide
  Seed: MCSLMQGSTLPRRSG
MCSLMYGSILVRRTG

SEQ ID NO: 92886 - protein, 15 aa, Artificial Sequence
  Description of Artificial Sequence: Synthetic peptide
  Seed: MCSLMQGSTLPRRSG
MCSLMYGSILVRRVG

SEQ ID NO: 92887 - protein, 15 aa, Artificial Sequence
  Description of Artificial Sequence: Synthetic peptide
  Seed: MCSLMQGSTLPRRSG
MCSLMYGSLLARRAG

SEQ ID NO: 92888 - protein, 15 aa, Artificial Sequence
  Description of Artificial Sequence: Synthetic peptide
  Seed: MCSLMQGSTLPRRSG
MCSLMYGSLLARRGG

SEQ ID NO: 92889 - protein, 15 aa, Artificial Sequence
  Description of Artificial Sequence: Synthetic peptide
  Seed: MCSLMQGSTLPRRSG
MCSLMYGSLLARRIG

SEQ ID NO: 92890 - protein, 15 aa, Artificial Sequence
  Description of Artificial Sequence: Synthetic peptide
  Seed: MCSLMQGSTLPRRSG
MCSLMYGSLLARRLG

SEQ ID NO: 92891 - protein, 15 aa, Artificial Sequence
  Description of Artificial Sequence: Synthetic peptide
  Seed: MCSLMQGSTLPRRSG
MCSLMYGSLLARRMG

SEQ ID NO: 92892 - protein, 15 aa, Artificial Sequence
  Description of Artificial Sequence: Synthetic peptide
  Seed: MCSLMQGSTLPRRSG
MCSLMYGSLLARRNG

SEQ ID NO: 92893 - protein, 15 aa, Artificial Sequence
  Description of Artificial Sequence: Synthetic peptide
  Seed: MCSLMQGSTLPRRSG
MCSLMYGSLLARRSG

SEQ ID NO: 92894 - protein, 15 aa, Artificial Sequence
  Description of Artificial Sequence: Synthetic peptide
  Seed: MCSLMQGSTLPRRSG
MCSLMYGSLLARRTG

SEQ ID NO: 92895 - protein, 15 aa, Artificial Sequence
  Description of Artificial Sequence: Synthetic peptide
  Seed: MCSLMQGSTLPRRSG
MCSLMYGSLLARRVG

SEQ ID NO: 92896 - protein, 15 aa, Artificial Sequence
  Description of Artificial Sequence: Synthetic peptide
  Seed: MCSLMQGSTLPRRSG
MCSLMYGSLLGRRAG

SEQ ID NO: 92897 - protein, 15 aa, Artificial Sequence
  Description of Artificial Sequence: Synthetic peptide
  Seed: MCSLMQGSTLPRRSG
MCSLMYGSLLGRRIG

SEQ ID NO: 92898 - protein, 15 aa, Artificial Sequence
  Description of Artificial Sequence: Synthetic peptide
  Seed: MCSLMQGSTLPRRSG
MCSLMYGSLLGRRLG

SEQ ID NO: 92899 - protein, 15 aa, Artificial Sequence
  Description of Artificial Sequence: Synthetic peptide
  Seed: MCSLMQGSTLPRRSG
MCSLMYGSLLGRRSG

SEQ ID NO: 92900 - protein, 15 aa, Artificial Sequence
  Description of Artificial Sequence: Synthetic peptide
  Seed: MCSLMQGSTLPRRSG
MCSLMYGSLLGRRVG

SEQ ID NO: 92901 - protein, 15 aa, Artificial Sequence
  Description of Artificial Sequence: Synthetic peptide
  Seed: MCSLMQGSTLPRRSG
MCSLMYGSLLIRRAG

SEQ ID NO: 92902 - protein, 15 aa, Artificial Sequence
  Description of Artificial Sequence: Synthetic peptide
  Seed: MCSLMQGSTLPRRSG
MCSLMYGSLLIRRNG

SEQ ID NO: 92903 - protein, 15 aa, Artificial Sequence
  Description of Artificial Sequence: Synthetic peptide
  Seed: MCSLMQGSTLPRRSG
MCSLMYGSLLIRRSG

SEQ ID NO: 92904 - protein, 15 aa, Artificial Sequence
  Description of Artificial Sequence: Synthetic peptide
  Seed: MCSLMQGSTLPRRSG
MCSLMYGSLLIRRVG

SEQ ID NO: 92905 - protein, 15 aa, Artificial Sequence
  Description of Artificial Sequence: Synthetic peptide
  Seed: MCSLMQGSTLPRRSG
MCSLMYGSLLNRRAG

SEQ ID NO: 92906 - protein, 15 aa, Artificial Sequence
  Description of Artificial Sequence: Synthetic peptide
  Seed: MCSLMQGSTLPRRSG
MCSLMYGSLLNRRVG

SEQ ID NO: 92907 - protein, 15 aa, Artificial Sequence
  Description of Artificial Sequence: Synthetic peptide
  Seed: MCSLMQGSTLPRRSG
MCSLMYGSLLPRRAG

SEQ ID NO: 92908 - protein, 15 aa, Artificial Sequence
  Description of Artificial Sequence: Synthetic peptide
  Seed: MCSLMQGSTLPRRSG
MCSLMYGSLLPRRIG

SEQ ID NO: 92909 - protein, 15 aa, Artificial Sequence
  Description of Artificial Sequence: Synthetic peptide
  Seed: MCSLMQGSTLPRRSG
MCSLMYGSLLPRRLG

SEQ ID NO: 92910 - protein, 15 aa, Artificial Sequence
  Description of Artificial Sequence: Synthetic peptide
  Seed: MCSLMQGSTLPRRSG
MCSLMYGSLLPRRMG

SEQ ID NO: 92911 - protein, 15 aa, Artificial Sequence
  Description of Artificial Sequence: Synthetic peptide
  Seed: MCSLMQGSTLPRRSG
MCSLMYGSLLPRRNG

SEQ ID NO: 92912 - protein, 15 aa, Artificial Sequence
  Description of Artificial Sequence: Synthetic peptide
  Seed: MCSLMQGSTLPRRSG
MCSLMYGSLLPRRSG

SEQ ID NO: 92913 - protein, 15 aa, Artificial Sequence
  Description of Artificial Sequence: Synthetic peptide
  Seed: MCSLMQGSTLPRRSG
MCSLMYGSLLPRRTG

SEQ ID NO: 92914 - protein, 15 aa, Artificial Sequence
  Description of Artificial Sequence: Synthetic peptide
  Seed: MCSLMQGSTLPRRSG
MCSLMYGSLLPRRVG

SEQ ID NO: 92915 - protein, 15 aa, Artificial Sequence
  Description of Artificial Sequence: Synthetic peptide
  Seed: MCSLMQGSTLPRRSG
MCSLMYGSLLSRRAG

SEQ ID NO: 92916 - protein, 15 aa, Artificial Sequence
  Description of Artificial Sequence: Synthetic peptide
  Seed: MCSLMQGSTLPRRSG
MCSLMYGSLLSRRIG

SEQ ID NO: 92917 - protein, 15 aa, Artificial Sequence
  Description of Artificial Sequence: Synthetic peptide
  Seed: MCSLMQGSTLPRRSG
MCSLMYGSLLSRRLG

SEQ ID NO: 92918 - protein, 15 aa, Artificial Sequence
  Description of Artificial Sequence: Synthetic peptide
  Seed: MCSLMQGSTLPRRSG
MCSLMYGSLLSRRMG

SEQ ID NO: 92919 - protein, 15 aa, Artificial Sequence
  Description of Artificial Sequence: Synthetic peptide
  Seed: MCSLMQGSTLPRRSG
MCSLMYGSLLSRRNG

SEQ ID NO: 92920 - protein, 15 aa, Artificial Sequence
  Description of Artificial Sequence: Synthetic peptide
  Seed: MCSLMQGSTLPRRSG
MCSLMYGSLLSRRSG

SEQ ID NO: 92921 - protein, 15 aa, Artificial Sequence
  Description of Artificial Sequence: Synthetic peptide
  Seed: MCSLMQGSTLPRRSG
MCSLMYGSLLSRRTG

SEQ ID NO: 92922 - protein, 15 aa, Artificial Sequence
  Description of Artificial Sequence: Synthetic peptide
  Seed: MCSLMQGSTLPRRSG
MCSLMYGSLLSRRVG

SEQ ID NO: 92923 - protein, 15 aa, Artificial Sequence
  Description of Artificial Sequence: Synthetic peptide
  Seed: MCSLMQGSTLPRRSG
MCSLMYGSLLTRRAG

SEQ ID NO: 92924 - protein, 15 aa, Artificial Sequence
  Description of Artificial Sequence: Synthetic peptide
  Seed: MCSLMQGSTLPRRSG
MCSLMYGSLLTRRIG

SEQ ID NO: 92925 - protein, 15 aa, Artificial Sequence
  Description of Artificial Sequence: Synthetic peptide
  Seed: MCSLMQGSTLPRRSG
MCSLMYGSLLTRRLG

SEQ ID NO: 92926 - protein, 15 aa, Artificial Sequence
  Description of Artificial Sequence: Synthetic peptide
  Seed: MCSLMQGSTLPRRSG
MCSLMYGSLLTRRMG

SEQ ID NO: 92927 - protein, 15 aa, Artificial Sequence
  Description of Artificial Sequence: Synthetic peptide
  Seed: MCSLMQGSTLPRRSG
MCSLMYGSLLTRRNG

SEQ ID NO: 92928 - protein, 15 aa, Artificial Sequence
  Description of Artificial Sequence: Synthetic peptide
  Seed: MCSLMQGSTLPRRSG
MCSLMYGSLLTRRSG

SEQ ID NO: 92929 - protein, 15 aa, Artificial Sequence
  Description of Artificial Sequence: Synthetic peptide
  Seed: MCSLMQGSTLPRRSG
MCSLMYGSLLTRRTG

SEQ ID NO: 92930 - protein, 15 aa, Artificial Sequence
  Description of Artificial Sequence: Synthetic peptide
  Seed: MCSLMQGSTLPRRSG
MCSLMYGSLLTRRVG

SEQ ID NO: 92931 - protein, 15 aa, Artificial Sequence
  Description of Artificial Sequence: Synthetic peptide
  Seed: MCSLMQGSTLPRRSG
MCSLMYGSLLVRRAG

SEQ ID NO: 92932 - protein, 15 aa, Artificial Sequence
  Description of Artificial Sequence: Synthetic peptide
  Seed: MCSLMQGSTLPRRSG
MCSLMYGSLLVRRIG

SEQ ID NO: 92933 - protein, 15 aa, Artificial Sequence
  Description of Artificial Sequence: Synthetic peptide
  Seed: MCSLMQGSTLPRRSG
MCSLMYGSLLVRRLG

SEQ ID NO: 92934 - protein, 15 aa, Artificial Sequence
  Description of Artificial Sequence: Synthetic peptide
  Seed: MCSLMQGSTLPRRSG
MCSLMYGSLLVRRMG

SEQ ID NO: 92935 - protein, 15 aa, Artificial Sequence
  Description of Artificial Sequence: Synthetic peptide
  Seed: MCSLMQGSTLPRRSG
MCSLMYGSLLVRRNG

SEQ ID NO: 92936 - protein, 15 aa, Artificial Sequence
  Description of Artificial Sequence: Synthetic peptide
  Seed: MCSLMQGSTLPRRSG
MCSLMYGSLLVRRSG

SEQ ID NO: 92937 - protein, 15 aa, Artificial Sequence
  Description of Artificial Sequence: Synthetic peptide
  Seed: MCSLMQGSTLPRRSG
MCSLMYGSLLVRRTG

SEQ ID NO: 92938 - protein, 15 aa, Artificial Sequence
  Description of Artificial Sequence: Synthetic peptide
  Seed: MCSLMQGSTLPRRSG
MCSLMYGSLLVRRVG

SEQ ID NO: 92939 - protein, 15 aa, Artificial Sequence
  Description of Artificial Sequence: Synthetic peptide
  Seed: MCSLMQGSTLPRRSG
MCSLMYGSMLARRAG

SEQ ID NO: 92940 - protein, 15 aa, Artificial Sequence
  Description of Artificial Sequence: Synthetic peptide
  Seed: MCSLMQGSTLPRRSG
MCSLMYGSMLARRGG

SEQ ID NO: 92941 - protein, 15 aa, Artificial Sequence
  Description of Artificial Sequence: Synthetic peptide
  Seed: MCSLMQGSTLPRRSG
MCSLMYGSMLARRHG

SEQ ID NO: 92942 - protein, 15 aa, Artificial Sequence
  Description of Artificial Sequence: Synthetic peptide
  Seed: MCSLMQGSTLPRRSG
MCSLMYGSMLARRIG

SEQ ID NO: 92943 - protein, 15 aa, Artificial Sequence
  Description of Artificial Sequence: Synthetic peptide
  Seed: MCSLMQGSTLPRRSG
MCSLMYGSMLARRLG

SEQ ID NO: 92944 - protein, 15 aa, Artificial Sequence
  Description of Artificial Sequence: Synthetic peptide
  Seed: MCSLMQGSTLPRRSG
MCSLMYGSMLARRMG

SEQ ID NO: 92945 - protein, 15 aa, Artificial Sequence
  Description of Artificial Sequence: Synthetic peptide
  Seed: MCSLMQGSTLPRRSG
MCSLMYGSMLARRNG

SEQ ID NO: 92946 - protein, 15 aa, Artificial Sequence
  Description of Artificial Sequence: Synthetic peptide
  Seed: MCSLMQGSTLPRRSG
MCSLMYGSMLARRPG

SEQ ID NO: 92947 - protein, 15 aa, Artificial Sequence
  Description of Artificial Sequence: Synthetic peptide
  Seed: MCSLMQGSTLPRRSG
MCSLMYGSMLARRQG

SEQ ID NO: 92948 - protein, 15 aa, Artificial Sequence
  Description of Artificial Sequence: Synthetic peptide
  Seed: MCSLMQGSTLPRRSG
MCSLMYGSMLARRSG

SEQ ID NO: 92949 - protein, 15 aa, Artificial Sequence
  Description of Artificial Sequence: Synthetic peptide
  Seed: MCSLMQGSTLPRRSG
MCSLMYGSMLARRTG

SEQ ID NO: 92950 - protein, 15 aa, Artificial Sequence
  Description of Artificial Sequence: Synthetic peptide
  Seed: MCSLMQGSTLPRRSG
MCSLMYGSMLARRVG

SEQ ID NO: 92951 - protein, 15 aa, Artificial Sequence
  Description of Artificial Sequence: Synthetic peptide
  Seed: MCSLMQGSTLPRRSG
MCSLMYGSMLGRRAG

SEQ ID NO: 92952 - protein, 15 aa, Artificial Sequence
  Description of Artificial Sequence: Synthetic peptide
  Seed: MCSLMQGSTLPRRSG
MCSLMYGSMLGRRIG

SEQ ID NO: 92953 - protein, 15 aa, Artificial Sequence
  Description of Artificial Sequence: Synthetic peptide
  Seed: MCSLMQGSTLPRRSG
MCSLMYGSMLGRRLG

SEQ ID NO: 92954 - protein, 15 aa, Artificial Sequence
  Description of Artificial Sequence: Synthetic peptide
  Seed: MCSLMQGSTLPRRSG
MCSLMYGSMLGRRMG

SEQ ID NO: 92955 - protein, 15 aa, Artificial Sequence
  Description of Artificial Sequence: Synthetic peptide
  Seed: MCSLMQGSTLPRRSG
MCSLMYGSMLGRRNG

SEQ ID NO: 92956 - protein, 15 aa, Artificial Sequence
  Description of Artificial Sequence: Synthetic peptide
  Seed: MCSLMQGSTLPRRSG
MCSLMYGSMLGRRSG

SEQ ID NO: 92957 - protein, 15 aa, Artificial Sequence
  Description of Artificial Sequence: Synthetic peptide
  Seed: MCSLMQGSTLPRRSG
MCSLMYGSMLGRRVG

SEQ ID NO: 92958 - protein, 15 aa, Artificial Sequence
  Description of Artificial Sequence: Synthetic peptide
  Seed: MCSLMQGSTLPRRSG
MCSLMYGSMLIRRAG

SEQ ID NO: 92959 - protein, 15 aa, Artificial Sequence
  Description of Artificial Sequence: Synthetic peptide
  Seed: MCSLMQGSTLPRRSG
MCSLMYGSMLIRRIG

SEQ ID NO: 92960 - protein, 15 aa, Artificial Sequence
  Description of Artificial Sequence: Synthetic peptide
  Seed: MCSLMQGSTLPRRSG
MCSLMYGSMLIRRLG

SEQ ID NO: 92961 - protein, 15 aa, Artificial Sequence
  Description of Artificial Sequence: Synthetic peptide
  Seed: MCSLMQGSTLPRRSG
MCSLMYGSMLIRRNG

SEQ ID NO: 92962 - protein, 15 aa, Artificial Sequence
  Description of Artificial Sequence: Synthetic peptide
  Seed: MCSLMQGSTLPRRSG
MCSLMYGSMLIRRSG

SEQ ID NO: 92963 - protein, 15 aa, Artificial Sequence
  Description of Artificial Sequence: Synthetic peptide
  Seed: MCSLMQGSTLPRRSG
MCSLMYGSMLIRRTG

SEQ ID NO: 92964 - protein, 15 aa, Artificial Sequence
  Description of Artificial Sequence: Synthetic peptide
  Seed: MCSLMQGSTLPRRSG
MCSLMYGSMLIRRVG

SEQ ID NO: 92965 - protein, 15 aa, Artificial Sequence
  Description of Artificial Sequence: Synthetic peptide
  Seed: MCSLMQGSTLPRRSG
MCSLMYGSMLNRRAG

SEQ ID NO: 92966 - protein, 15 aa, Artificial Sequence
  Description of Artificial Sequence: Synthetic peptide
  Seed: MCSLMQGSTLPRRSG
MCSLMYGSMLNRRIG

SEQ ID NO: 92967 - protein, 15 aa, Artificial Sequence
  Description of Artificial Sequence: Synthetic peptide
  Seed: MCSLMQGSTLPRRSG
MCSLMYGSMLNRRLG

SEQ ID NO: 92968 - protein, 15 aa, Artificial Sequence
  Description of Artificial Sequence: Synthetic peptide
  Seed: MCSLMQGSTLPRRSG
MCSLMYGSMLNRRNG

SEQ ID NO: 92969 - protein, 15 aa, Artificial Sequence
  Description of Artificial Sequence: Synthetic peptide
  Seed: MCSLMQGSTLPRRSG
MCSLMYGSMLNRRVG

SEQ ID NO: 92970 - protein, 15 aa, Artificial Sequence
  Description of Artificial Sequence: Synthetic peptide
  Seed: MCSLMQGSTLPRRSG
MCSLMYGSMLPRRAG

SEQ ID NO: 92971 - protein, 15 aa, Artificial Sequence
  Description of Artificial Sequence: Synthetic peptide
  Seed: MCSLMQGSTLPRRSG
MCSLMYGSMLPRRIG

SEQ ID NO: 92972 - protein, 15 aa, Artificial Sequence
  Description of Artificial Sequence: Synthetic peptide
  Seed: MCSLMQGSTLPRRSG
MCSLMYGSMLPRRLG

SEQ ID NO: 92973 - protein, 15 aa, Artificial Sequence
  Description of Artificial Sequence: Synthetic peptide
  Seed: MCSLMQGSTLPRRSG
MCSLMYGSMLPRRMG

SEQ ID NO: 92974 - protein, 15 aa, Artificial Sequence
  Description of Artificial Sequence: Synthetic peptide
  Seed: MCSLMQGSTLPRRSG
MCSLMYGSMLPRRNG

SEQ ID NO: 92975 - protein, 15 aa, Artificial Sequence
  Description of Artificial Sequence: Synthetic peptide
  Seed: MCSLMQGSTLPRRSG
MCSLMYGSMLPRRSG

SEQ ID NO: 92976 - protein, 15 aa, Artificial Sequence
  Description of Artificial Sequence: Synthetic peptide
  Seed: MCSLMQGSTLPRRSG
MCSLMYGSMLPRRTG

SEQ ID NO: 92977 - protein, 15 aa, Artificial Sequence
  Description of Artificial Sequence: Synthetic peptide
  Seed: MCSLMQGSTLPRRSG
MCSLMYGSMLPRRVG

SEQ ID NO: 92978 - protein, 15 aa, Artificial Sequence
  Description of Artificial Sequence: Synthetic peptide
  Seed: MCSLMQGSTLPRRSG
MCSLMYGSMLSRRAG

SEQ ID NO: 92979 - protein, 15 aa, Artificial Sequence
  Description of Artificial Sequence: Synthetic peptide
  Seed: MCSLMQGSTLPRRSG
MCSLMYGSMLSRRIG

SEQ ID NO: 92980 - protein, 15 aa, Artificial Sequence
  Description of Artificial Sequence: Synthetic peptide
  Seed: MCSLMQGSTLPRRSG
MCSLMYGSMLSRRLG

SEQ ID NO: 92981 - protein, 15 aa, Artificial Sequence
  Description of Artificial Sequence: Synthetic peptide
  Seed: MCSLMQGSTLPRRSG
MCSLMYGSMLSRRMG

SEQ ID NO: 92982 - protein, 15 aa, Artificial Sequence
  Description of Artificial Sequence: Synthetic peptide
  Seed: MCSLMQGSTLPRRSG
MCSLMYGSMLSRRNG

SEQ ID NO: 92983 - protein, 15 aa, Artificial Sequence
  Description of Artificial Sequence: Synthetic peptide
  Seed: MCSLMQGSTLPRRSG
MCSLMYGSMLSRRSG

SEQ ID NO: 92984 - protein, 15 aa, Artificial Sequence
  Description of Artificial Sequence: Synthetic peptide
  Seed: MCSLMQGSTLPRRSG
MCSLMYGSMLSRRTG

SEQ ID NO: 92985 - protein, 15 aa, Artificial Sequence
  Description of Artificial Sequence: Synthetic peptide
  Seed: MCSLMQGSTLPRRSG
MCSLMYGSMLSRRVG

SEQ ID NO: 92986 - protein, 15 aa, Artificial Sequence
  Description of Artificial Sequence: Synthetic peptide
  Seed: MCSLMQGSTLPRRSG
MCSLMYGSMLTRRAG

SEQ ID NO: 92987 - protein, 15 aa, Artificial Sequence
  Description of Artificial Sequence: Synthetic peptide
  Seed: MCSLMQGSTLPRRSG
MCSLMYGSMLTRRIG

SEQ ID NO: 92988 - protein, 15 aa, Artificial Sequence
  Description of Artificial Sequence: Synthetic peptide
  Seed: MCSLMQGSTLPRRSG
MCSLMYGSMLTRRLG

SEQ ID NO: 92989 - protein, 15 aa, Artificial Sequence
  Description of Artificial Sequence: Synthetic peptide
  Seed: MCSLMQGSTLPRRSG
MCSLMYGSMLTRRMG

SEQ ID NO: 92990 - protein, 15 aa, Artificial Sequence
  Description of Artificial Sequence: Synthetic peptide
  Seed: MCSLMQGSTLPRRSG
MCSLMYGSMLTRRNG

SEQ ID NO: 92991 - protein, 15 aa, Artificial Sequence
  Description of Artificial Sequence: Synthetic peptide
  Seed: MCSLMQGSTLPRRSG
MCSLMYGSMLTRRSG

SEQ ID NO: 92992 - protein, 15 aa, Artificial Sequence
  Description of Artificial Sequence: Synthetic peptide
  Seed: MCSLMQGSTLPRRSG
MCSLMYGSMLTRRTG

SEQ ID NO: 92993 - protein, 15 aa, Artificial Sequence
  Description of Artificial Sequence: Synthetic peptide
  Seed: MCSLMQGSTLPRRSG
MCSLMYGSMLTRRVG

SEQ ID NO: 92994 - protein, 15 aa, Artificial Sequence
  Description of Artificial Sequence: Synthetic peptide
  Seed: MCSLMQGSTLPRRSG
MCSLMYGSMLVRRAG

SEQ ID NO: 92995 - protein, 15 aa, Artificial Sequence
  Description of Artificial Sequence: Synthetic peptide
  Seed: MCSLMQGSTLPRRSG
MCSLMYGSMLVRRIG

SEQ ID NO: 92996 - protein, 15 aa, Artificial Sequence
  Description of Artificial Sequence: Synthetic peptide
  Seed: MCSLMQGSTLPRRSG
MCSLMYGSMLVRRLG

SEQ ID NO: 92997 - protein, 15 aa, Artificial Sequence
  Description of Artificial Sequence: Synthetic peptide
  Seed: MCSLMQGSTLPRRSG
MCSLMYGSMLVRRMG

SEQ ID NO: 92998 - protein, 15 aa, Artificial Sequence
  Description of Artificial Sequence: Synthetic peptide
  Seed: MCSLMQGSTLPRRSG
MCSLMYGSMLVRRNG

SEQ ID NO: 92999 - protein, 15 aa, Artificial Sequence
  Description of Artificial Sequence: Synthetic peptide
  Seed: MCSLMQGSTLPRRSG
MCSLMYGSMLVRRSG

SEQ ID NO: 93000 - protein, 15 aa, Artificial Sequence
  Description of Artificial Sequence: Synthetic peptide
  Seed: MCSLMQGSTLPRRSG
MCSLMYGSMLVRRTG

SEQ ID NO: 93001 - protein, 15 aa, Artificial Sequence
  Description of Artificial Sequence: Synthetic peptide
  Seed: MCSLMQGSTLPRRSG
MCSLMYGSMLVRRVG

SEQ ID NO: 93002 - protein, 15 aa, Artificial Sequence
  Description of Artificial Sequence: Synthetic peptide
  Seed: MCSLMQGSTLPRRSG
MCSLMYGSVLARRAG

SEQ ID NO: 93003 - protein, 15 aa, Artificial Sequence
  Description of Artificial Sequence: Synthetic peptide
  Seed: MCSLMQGSTLPRRSG
MCSLMYGSVLARRIG

SEQ ID NO: 93004 - protein, 15 aa, Artificial Sequence
  Description of Artificial Sequence: Synthetic peptide
  Seed: MCSLMQGSTLPRRSG
MCSLMYGSVLARRLG

SEQ ID NO: 93005 - protein, 15 aa, Artificial Sequence
  Description of Artificial Sequence: Synthetic peptide
  Seed: MCSLMQGSTLPRRSG
MCSLMYGSVLARRNG

SEQ ID NO: 93006 - protein, 15 aa, Artificial Sequence
  Description of Artificial Sequence: Synthetic peptide
  Seed: MCSLMQGSTLPRRSG
MCSLMYGSVLARRSG

SEQ ID NO: 93007 - protein, 15 aa, Artificial Sequence
  Description of Artificial Sequence: Synthetic peptide
  Seed: MCSLMQGSTLPRRSG
MCSLMYGSVLARRVG

SEQ ID NO: 93008 - protein, 15 aa, Artificial Sequence
  Description of Artificial Sequence: Synthetic peptide
  Seed: MCSLMQGSTLPRRSG
MCSLMYGSVLSRRAG

SEQ ID NO: 93009 - protein, 15 aa, Artificial Sequence
  Description of Artificial Sequence: Synthetic peptide
  Seed: MCSLMQGSTLPRRSG
MCSLMYGSVLSRRVG

SEQ ID NO: 93010 - protein, 16 aa, Artificial Sequence
  Description of Artificial Sequence: Synthetic peptide
  Seed: MCSLMQGSTLPRRSGA
MFSLAQASTAPRRSGA

SEQ ID NO: 93011 - protein, 16 aa, Artificial Sequence
  Description of Artificial Sequence: Synthetic peptide
  Seed: MCSLMQGSTLPRRSGA
MFSLAQASTIPRRSGA

SEQ ID NO: 93012 - protein, 16 aa, Artificial Sequence
  Description of Artificial Sequence: Synthetic peptide
  Seed: MCSLMQGSTLPRRSGA
MFSLAQASTLPRRSGA

SEQ ID NO: 93013 - protein, 16 aa, Artificial Sequence
  Description of Artificial Sequence: Synthetic peptide
  Seed: MCSLMQGSTLPRRSGA
MFSLAQASTVPRRSGA

SEQ ID NO: 93014 - protein, 16 aa, Artificial Sequence
  Description of Artificial Sequence: Synthetic peptide
  Seed: MCSLMQGSTLPRRSGA
MFSLAQGSTIPRRSGA

SEQ ID NO: 93015 - protein, 16 aa, Artificial Sequence
  Description of Artificial Sequence: Synthetic peptide
  Seed: MCSLMQGSTLPRRSGA
MFSLAQGSTLPRRSGA

SEQ ID NO: 93016 - protein, 16 aa, Artificial Sequence
  Description of Artificial Sequence: Synthetic peptide
  Seed: MCSLMQGSTLPRRSGA
MFSLAQGSTVPRRSGA

SEQ ID NO: 93017 - protein, 16 aa, Artificial Sequence
  Description of Artificial Sequence: Synthetic peptide
  Seed: MCSLMQGSTLPRRSGA
MFSLAQSSTIPRRSGA

SEQ ID NO: 93018 - protein, 16 aa, Artificial Sequence
  Description of Artificial Sequence: Synthetic peptide
  Seed: MCSLMQGSTLPRRSGA
MFSLAQSSTLPRRSGA

SEQ ID NO: 93019 - protein, 16 aa, Artificial Sequence
  Description of Artificial Sequence: Synthetic peptide
  Seed: MCSLMQGSTLPRRSGA
MFSLAQSSTVPRRSGA

SEQ ID NO: 93020 - protein, 16 aa, Artificial Sequence
  Description of Artificial Sequence: Synthetic peptide
  Seed: MCSLMQGSTLPRRSGA
MFSLIQASTAPRRSGA

SEQ ID NO: 93021 - protein, 16 aa, Artificial Sequence
  Description of Artificial Sequence: Synthetic peptide
  Seed: MCSLMQGSTLPRRSGA
MFSLIQASTIPRRSGA

SEQ ID NO: 93022 - protein, 16 aa, Artificial Sequence
  Description of Artificial Sequence: Synthetic peptide
  Seed: MCSLMQGSTLPRRSGA
MFSLIQASTLPRRSGA

SEQ ID NO: 93023 - protein, 16 aa, Artificial Sequence
  Description of Artificial Sequence: Synthetic peptide
  Seed: MCSLMQGSTLPRRSGA
MFSLIQASTMPRRSGA

SEQ ID NO: 93024 - protein, 16 aa, Artificial Sequence
  Description of Artificial Sequence: Synthetic peptide
  Seed: MCSLMQGSTLPRRSGA
MFSLIQASTSPRRSGA

SEQ ID NO: 93025 - protein, 16 aa, Artificial Sequence
  Description of Artificial Sequence: Synthetic peptide
  Seed: MCSLMQGSTLPRRSGA
MFSLIQASTTPRRSGA

SEQ ID NO: 93026 - protein, 16 aa, Artificial Sequence
  Description of Artificial Sequence: Synthetic peptide
  Seed: MCSLMQGSTLPRRSGA
MFSLIQASTVPRRSGA

SEQ ID NO: 93027 - protein, 16 aa, Artificial Sequence
  Description of Artificial Sequence: Synthetic peptide
  Seed: MCSLMQGSTLPRRSGA
MFSLIQGSTAPRRSGA

SEQ ID NO: 93028 - protein, 16 aa, Artificial Sequence
  Description of Artificial Sequence: Synthetic peptide
  Seed: MCSLMQGSTLPRRSGA
MFSLIQGSTIPRRSGA

SEQ ID NO: 93029 - protein, 16 aa, Artificial Sequence
  Description of Artificial Sequence: Synthetic peptide
  Seed: MCSLMQGSTLPRRSGA
MFSLIQGSTLPRRSGA

SEQ ID NO: 93030 - protein, 16 aa, Artificial Sequence
  Description of Artificial Sequence: Synthetic peptide
  Seed: MCSLMQGSTLPRRSGA
MFSLIQGSTMPRRSGA

SEQ ID NO: 93031 - protein, 16 aa, Artificial Sequence
  Description of Artificial Sequence: Synthetic peptide
  Seed: MCSLMQGSTLPRRSGA
MFSLIQGSTTPRRSGA

SEQ ID NO: 93032 - protein, 16 aa, Artificial Sequence
  Description of Artificial Sequence: Synthetic peptide
  Seed: MCSLMQGSTLPRRSGA
MFSLIQGSTVPRRSGA

SEQ ID NO: 93033 - protein, 16 aa, Artificial Sequence
  Description of Artificial Sequence: Synthetic peptide
  Seed: MCSLMQGSTLPRRSGA
MFSLIQPSTAPRRSGA

SEQ ID NO: 93034 - protein, 16 aa, Artificial Sequence
  Description of Artificial Sequence: Synthetic peptide
  Seed: MCSLMQGSTLPRRSGA
MFSLIQPSTIPRRSGA

SEQ ID NO: 93035 - protein, 16 aa, Artificial Sequence
  Description of Artificial Sequence: Synthetic peptide
  Seed: MCSLMQGSTLPRRSGA
MFSLIQPSTLPRRSGA

SEQ ID NO: 93036 - protein, 16 aa, Artificial Sequence
  Description of Artificial Sequence: Synthetic peptide
  Seed: MCSLMQGSTLPRRSGA
MFSLIQPSTVPRRSGA

SEQ ID NO: 93037 - protein, 16 aa, Artificial Sequence
  Description of Artificial Sequence: Synthetic peptide
  Seed: MCSLMQGSTLPRRSGA
MFSLIQSSTIPRRSGA

SEQ ID NO: 93038 - protein, 16 aa, Artificial Sequence
  Description of Artificial Sequence: Synthetic peptide
  Seed: MCSLMQGSTLPRRSGA
MFSLIQSSTLPRRSGA

SEQ ID NO: 93039 - protein, 16 aa, Artificial Sequence
  Description of Artificial Sequence: Synthetic peptide
  Seed: MCSLMQGSTLPRRSGA
MFSLIQSSTVPRRSGA

SEQ ID NO: 93040 - protein, 16 aa, Artificial Sequence
  Description of Artificial Sequence: Synthetic peptide
  Seed: MCSLMQGSTLPRRSGA
MFSLLQASTAPRRSGA

SEQ ID NO: 93041 - protein, 16 aa, Artificial Sequence
  Description of Artificial Sequence: Synthetic peptide
  Seed: MCSLMQGSTLPRRSGA
MFSLLQASTGPRRSGA

SEQ ID NO: 93042 - protein, 16 aa, Artificial Sequence
  Description of Artificial Sequence: Synthetic peptide
  Seed: MCSLMQGSTLPRRSGA
MFSLLQASTIPRRSGA

SEQ ID NO: 93043 - protein, 16 aa, Artificial Sequence
  Description of Artificial Sequence: Synthetic peptide
  Seed: MCSLMQGSTLPRRSGA
MFSLLQASTLPRRSGA

SEQ ID NO: 93044 - protein, 16 aa, Artificial Sequence
  Description of Artificial Sequence: Synthetic peptide
  Seed: MCSLMQGSTLPRRSGA
MFSLLQASTMPRRSGA

SEQ ID NO: 93045 - protein, 16 aa, Artificial Sequence
  Description of Artificial Sequence: Synthetic peptide
  Seed: MCSLMQGSTLPRRSGA
MFSLLQASTSPRRSGA

SEQ ID NO: 93046 - protein, 16 aa, Artificial Sequence
  Description of Artificial Sequence: Synthetic peptide
  Seed: MCSLMQGSTLPRRSGA
MFSLLQASTTPRRSGA

SEQ ID NO: 93047 - protein, 16 aa, Artificial Sequence
  Description of Artificial Sequence: Synthetic peptide
  Seed: MCSLMQGSTLPRRSGA
MFSLLQASTVPRRSGA

SEQ ID NO: 93048 - protein, 16 aa, Artificial Sequence
  Description of Artificial Sequence: Synthetic peptide
  Seed: MCSLMQGSTLPRRSGA
MFSLLQGSTAPRRSGA

SEQ ID NO: 93049 - protein, 16 aa, Artificial Sequence
  Description of Artificial Sequence: Synthetic peptide
  Seed: MCSLMQGSTLPRRSGA
MFSLLQGSTGPRRSGA

SEQ ID NO: 93050 - protein, 16 aa, Artificial Sequence
  Description of Artificial Sequence: Synthetic peptide
  Seed: MCSLMQGSTLPRRSGA
MFSLLQGSTIPRRSGA

SEQ ID NO: 93051 - protein, 16 aa, Artificial Sequence
  Description of Artificial Sequence: Synthetic peptide
  Seed: MCSLMQGSTLPRRSGA
MFSLLQGSTLPRRSGA

SEQ ID NO: 93052 - protein, 16 aa, Artificial Sequence
  Description of Artificial Sequence: Synthetic peptide
  Seed: MCSLMQGSTLPRRSGA
MFSLLQGSTMPRRSGA

SEQ ID NO: 93053 - protein, 16 aa, Artificial Sequence
  Description of Artificial Sequence: Synthetic peptide
  Seed: MCSLMQGSTLPRRSGA
MFSLLQGSTSPRRSGA

SEQ ID NO: 93054 - protein, 16 aa, Artificial Sequence
  Description of Artificial Sequence: Synthetic peptide
  Seed: MCSLMQGSTLPRRSGA
MFSLLQGSTTPRRSGA

SEQ ID NO: 93055 - protein, 16 aa, Artificial Sequence
  Description of Artificial Sequence: Synthetic peptide
  Seed: MCSLMQGSTLPRRSGA
MFSLLQGSTVPRRSGA

SEQ ID NO: 93056 - protein, 16 aa, Artificial Sequence
  Description of Artificial Sequence: Synthetic peptide
  Seed: MCSLMQGSTLPRRSGA
MFSLLQNSTAPRRSGA

SEQ ID NO: 93057 - protein, 16 aa, Artificial Sequence
  Description of Artificial Sequence: Synthetic peptide
  Seed: MCSLMQGSTLPRRSGA
MFSLLQNSTIPRRSGA

SEQ ID NO: 93058 - protein, 16 aa, Artificial Sequence
  Description of Artificial Sequence: Synthetic peptide
  Seed: MCSLMQGSTLPRRSGA
MFSLLQNSTLPRRSGA

SEQ ID NO: 93059 - protein, 16 aa, Artificial Sequence
  Description of Artificial Sequence: Synthetic peptide
  Seed: MCSLMQGSTLPRRSGA
MFSLLQNSTVPRRSGA

SEQ ID NO: 93060 - protein, 16 aa, Artificial Sequence
  Description of Artificial Sequence: Synthetic peptide
  Seed: MCSLMQGSTLPRRSGA
MFSLLQPSTAPRRSGA

SEQ ID NO: 93061 - protein, 16 aa, Artificial Sequence
  Description of Artificial Sequence: Synthetic peptide
  Seed: MCSLMQGSTLPRRSGA
MFSLLQPSTIPRRSGA

SEQ ID NO: 93062 - protein, 16 aa, Artificial Sequence
  Description of Artificial Sequence: Synthetic peptide
  Seed: MCSLMQGSTLPRRSGA
MFSLLQPSTLPRRSGA

SEQ ID NO: 93063 - protein, 16 aa, Artificial Sequence
  Description of Artificial Sequence: Synthetic peptide
  Seed: MCSLMQGSTLPRRSGA
MFSLLQPSTMPRRSGA

SEQ ID NO: 93064 - protein, 16 aa, Artificial Sequence
  Description of Artificial Sequence: Synthetic peptide
  Seed: MCSLMQGSTLPRRSGA
MFSLLQPSTSPRRSGA

SEQ ID NO: 93065 - protein, 16 aa, Artificial Sequence
  Description of Artificial Sequence: Synthetic peptide
  Seed: MCSLMQGSTLPRRSGA
MFSLLQPSTTPRRSGA

SEQ ID NO: 93066 - protein, 16 aa, Artificial Sequence
  Description of Artificial Sequence: Synthetic peptide
  Seed: MCSLMQGSTLPRRSGA
MFSLLQPSTVPRRSGA

SEQ ID NO: 93067 - protein, 16 aa, Artificial Sequence
  Description of Artificial Sequence: Synthetic peptide
  Seed: MCSLMQGSTLPRRSGA
MFSLLQSSTAPRRSGA

SEQ ID NO: 93068 - protein, 16 aa, Artificial Sequence
  Description of Artificial Sequence: Synthetic peptide
  Seed: MCSLMQGSTLPRRSGA
MFSLLQSSTIPRRSGA

SEQ ID NO: 93069 - protein, 16 aa, Artificial Sequence
  Description of Artificial Sequence: Synthetic peptide
  Seed: MCSLMQGSTLPRRSGA
MFSLLQSSTLPRRSGA

SEQ ID NO: 93070 - protein, 16 aa, Artificial Sequence
  Description of Artificial Sequence: Synthetic peptide
  Seed: MCSLMQGSTLPRRSGA
MFSLLQSSTMPRRSGA

SEQ ID NO: 93071 - protein, 16 aa, Artificial Sequence
  Description of Artificial Sequence: Synthetic peptide
  Seed: MCSLMQGSTLPRRSGA
MFSLLQSSTSPRRSGA

SEQ ID NO: 93072 - protein, 16 aa, Artificial Sequence
  Description of Artificial Sequence: Synthetic peptide
  Seed: MCSLMQGSTLPRRSGA
MFSLLQSSTTPRRSGA

SEQ ID NO: 93073 - protein, 16 aa, Artificial Sequence
  Description of Artificial Sequence: Synthetic peptide
  Seed: MCSLMQGSTLPRRSGA
MFSLLQSSTVPRRSGA

SEQ ID NO: 93074 - protein, 16 aa, Artificial Sequence
  Description of Artificial Sequence: Synthetic peptide
  Seed: MCSLMQGSTLPRRSGA
MFSLLQTSTAPRRSGA

SEQ ID NO: 93075 - protein, 16 aa, Artificial Sequence
  Description of Artificial Sequence: Synthetic peptide
  Seed: MCSLMQGSTLPRRSGA
MFSLLQTSTIPRRSGA

SEQ ID NO: 93076 - protein, 16 aa, Artificial Sequence
  Description of Artificial Sequence: Synthetic peptide
  Seed: MCSLMQGSTLPRRSGA
MFSLLQTSTLPRRSGA

SEQ ID NO: 93077 - protein, 16 aa, Artificial Sequence
  Description of Artificial Sequence: Synthetic peptide
  Seed: MCSLMQGSTLPRRSGA
MFSLLQTSTVPRRSGA

SEQ ID NO: 93078 - protein, 16 aa, Artificial Sequence
  Description of Artificial Sequence: Synthetic peptide
  Seed: MCSLMQGSTLPRRSGA
MFSLLQVSTAPRRSGA

SEQ ID NO: 93079 - protein, 16 aa, Artificial Sequence
  Description of Artificial Sequence: Synthetic peptide
  Seed: MCSLMQGSTLPRRSGA
MFSLLQVSTVPRRSGA

SEQ ID NO: 93080 - protein, 16 aa, Artificial Sequence
  Description of Artificial Sequence: Synthetic peptide
  Seed: MCSLMQGSTLPRRSGA
MFSLMQASTAPRRSGA

SEQ ID NO: 93081 - protein, 16 aa, Artificial Sequence
  Description of Artificial Sequence: Synthetic peptide
  Seed: MCSLMQGSTLPRRSGA
MFSLMQASTGPRRSGA

SEQ ID NO: 93082 - protein, 16 aa, Artificial Sequence
  Description of Artificial Sequence: Synthetic peptide
  Seed: MCSLMQGSTLPRRSGA
MFSLMQASTIPRRSGA

SEQ ID NO: 93083 - protein, 16 aa, Artificial Sequence
  Description of Artificial Sequence: Synthetic peptide
  Seed: MCSLMQGSTLPRRSGA
MFSLMQASTLPRRSGA

SEQ ID NO: 93084 - protein, 16 aa, Artificial Sequence
  Description of Artificial Sequence: Synthetic peptide
  Seed: MCSLMQGSTLPRRSGA
MFSLMQASTMPRRSGA

SEQ ID NO: 93085 - protein, 16 aa, Artificial Sequence
  Description of Artificial Sequence: Synthetic peptide
  Seed: MCSLMQGSTLPRRSGA
MFSLMQASTSPRRSGA

SEQ ID NO: 93086 - protein, 16 aa, Artificial Sequence
  Description of Artificial Sequence: Synthetic peptide
  Seed: MCSLMQGSTLPRRSGA
MFSLMQASTTPRRSGA

SEQ ID NO: 93087 - protein, 16 aa, Artificial Sequence
  Description of Artificial Sequence: Synthetic peptide
  Seed: MCSLMQGSTLPRRSGA
MFSLMQASTVPRRSGA

SEQ ID NO: 93088 - protein, 16 aa, Artificial Sequence
  Description of Artificial Sequence: Synthetic peptide
  Seed: MCSLMQGSTLPRRSGA
MFSLMQGSTAPRRSGA

SEQ ID NO: 93089 - protein, 16 aa, Artificial Sequence
  Description of Artificial Sequence: Synthetic peptide
  Seed: MCSLMQGSTLPRRSGA
MFSLMQGSTIPRRSGA

SEQ ID NO: 93090 - protein, 16 aa, Artificial Sequence
  Description of Artificial Sequence: Synthetic peptide
  Seed: MCSLMQGSTLPRRSGA
MFSLMQGSTLPRRSGA

SEQ ID NO: 93091 - protein, 16 aa, Artificial Sequence
  Description of Artificial Sequence: Synthetic peptide
  Seed: MCSLMQGSTLPRRSGA
MFSLMQGSTMPRRSGA

SEQ ID NO: 93092 - protein, 16 aa, Artificial Sequence
  Description of Artificial Sequence: Synthetic peptide
  Seed: MCSLMQGSTLPRRSGA
MFSLMQGSTSPRRSGA

SEQ ID NO: 93093 - protein, 16 aa, Artificial Sequence
  Description of Artificial Sequence: Synthetic peptide
  Seed: MCSLMQGSTLPRRSGA
MFSLMQGSTTPRRSGA

SEQ ID NO: 93094 - protein, 16 aa, Artificial Sequence
  Description of Artificial Sequence: Synthetic peptide
  Seed: MCSLMQGSTLPRRSGA
MFSLMQGSTVPRRSGA

SEQ ID NO: 93095 - protein, 16 aa, Artificial Sequence
  Description of Artificial Sequence: Synthetic peptide
  Seed: MCSLMQGSTLPRRSGA
MFSLMQNSTAPRRSGA

SEQ ID NO: 93096 - protein, 16 aa, Artificial Sequence
  Description of Artificial Sequence: Synthetic peptide
  Seed: MCSLMQGSTLPRRSGA
MFSLMQNSTIPRRSGA

SEQ ID NO: 93097 - protein, 16 aa, Artificial Sequence
  Description of Artificial Sequence: Synthetic peptide
  Seed: MCSLMQGSTLPRRSGA
MFSLMQNSTLPRRSGA

SEQ ID NO: 93098 - protein, 16 aa, Artificial Sequence
  Description of Artificial Sequence: Synthetic peptide
  Seed: MCSLMQGSTLPRRSGA
MFSLMQNSTVPRRSGA

SEQ ID NO: 93099 - protein, 16 aa, Artificial Sequence
  Description of Artificial Sequence: Synthetic peptide
  Seed: MCSLMQGSTLPRRSGA
MFSLMQPSTAPRRSGA

SEQ ID NO: 93100 - protein, 16 aa, Artificial Sequence
  Description of Artificial Sequence: Synthetic peptide
  Seed: MCSLMQGSTLPRRSGA
MFSLMQPSTIPRRSGA

SEQ ID NO: 93101 - protein, 16 aa, Artificial Sequence
  Description of Artificial Sequence: Synthetic peptide
  Seed: MCSLMQGSTLPRRSGA
MFSLMQPSTLPRRSGA

SEQ ID NO: 93102 - protein, 16 aa, Artificial Sequence
  Description of Artificial Sequence: Synthetic peptide
  Seed: MCSLMQGSTLPRRSGA
MFSLMQPSTMPRRSGA

SEQ ID NO: 93103 - protein, 16 aa, Artificial Sequence
  Description of Artificial Sequence: Synthetic peptide
  Seed: MCSLMQGSTLPRRSGA
MFSLMQPSTTPRRSGA

SEQ ID NO: 93104 - protein, 16 aa, Artificial Sequence
  Description of Artificial Sequence: Synthetic peptide
  Seed: MCSLMQGSTLPRRSGA
MFSLMQPSTVPRRSGA

SEQ ID NO: 93105 - protein, 16 aa, Artificial Sequence
  Description of Artificial Sequence: Synthetic peptide
  Seed: MCSLMQGSTLPRRSGA
MFSLMQSSTAPRRSGA

SEQ ID NO: 93106 - protein, 16 aa, Artificial Sequence
  Description of Artificial Sequence: Synthetic peptide
  Seed: MCSLMQGSTLPRRSGA
MFSLMQSSTIPRRSGA

SEQ ID NO: 93107 - protein, 16 aa, Artificial Sequence
  Description of Artificial Sequence: Synthetic peptide
  Seed: MCSLMQGSTLPRRSGA
MFSLMQSSTLPRRSGA

SEQ ID NO: 93108 - protein, 16 aa, Artificial Sequence
  Description of Artificial Sequence: Synthetic peptide
  Seed: MCSLMQGSTLPRRSGA
MFSLMQSSTMPRRSGA

SEQ ID NO: 93109 - protein, 16 aa, Artificial Sequence
  Description of Artificial Sequence: Synthetic peptide
  Seed: MCSLMQGSTLPRRSGA
MFSLMQSSTSPRRSGA

SEQ ID NO: 93110 - protein, 16 aa, Artificial Sequence
  Description of Artificial Sequence: Synthetic peptide
  Seed: MCSLMQGSTLPRRSGA
MFSLMQSSTTPRRSGA

SEQ ID NO: 93111 - protein, 16 aa, Artificial Sequence
  Description of Artificial Sequence: Synthetic peptide
  Seed: MCSLMQGSTLPRRSGA
MFSLMQSSTVPRRSGA

SEQ ID NO: 93112 - protein, 16 aa, Artificial Sequence
  Description of Artificial Sequence: Synthetic peptide
  Seed: MCSLMQGSTLPRRSGA
MFSLMQTSTAPRRSGA

SEQ ID NO: 93113 - protein, 16 aa, Artificial Sequence
  Description of Artificial Sequence: Synthetic peptide
  Seed: MCSLMQGSTLPRRSGA
MFSLMQTSTIPRRSGA

SEQ ID NO: 93114 - protein, 16 aa, Artificial Sequence
  Description of Artificial Sequence: Synthetic peptide
  Seed: MCSLMQGSTLPRRSGA
MFSLMQTSTLPRRSGA

SEQ ID NO: 93115 - protein, 16 aa, Artificial Sequence
  Description of Artificial Sequence: Synthetic peptide
  Seed: MCSLMQGSTLPRRSGA
MFSLMQTSTVPRRSGA

SEQ ID NO: 93116 - protein, 16 aa, Artificial Sequence
  Description of Artificial Sequence: Synthetic peptide
  Seed: MCSLMQGSTLPRRSGA
MFSLMQVSTAPRRSGA

SEQ ID NO: 93117 - protein, 16 aa, Artificial Sequence
  Description of Artificial Sequence: Synthetic peptide
  Seed: MCSLMQGSTLPRRSGA
MFSLMQVSTVPRRSGA

SEQ ID NO: 93118 - protein, 16 aa, Artificial Sequence
  Description of Artificial Sequence: Synthetic peptide
  Seed: MCSLMQGSTLPRRSGA
MFSLQQASTAPRRSGA

SEQ ID NO: 93119 - protein, 16 aa, Artificial Sequence
  Description of Artificial Sequence: Synthetic peptide
  Seed: MCSLMQGSTLPRRSGA
MFSLQQASTIPRRSGA

SEQ ID NO: 93120 - protein, 16 aa, Artificial Sequence
  Description of Artificial Sequence: Synthetic peptide
  Seed: MCSLMQGSTLPRRSGA
MFSLQQASTLPRRSGA

SEQ ID NO: 93121 - protein, 16 aa, Artificial Sequence
  Description of Artificial Sequence: Synthetic peptide
  Seed: MCSLMQGSTLPRRSGA
MFSLQQASTVPRRSGA

SEQ ID NO: 93122 - protein, 16 aa, Artificial Sequence
  Description of Artificial Sequence: Synthetic peptide
  Seed: MCSLMQGSTLPRRSGA
MFSLQQGSTIPRRSGA

SEQ ID NO: 93123 - protein, 16 aa, Artificial Sequence
  Description of Artificial Sequence: Synthetic peptide
  Seed: MCSLMQGSTLPRRSGA
MFSLQQGSTLPRRSGA

SEQ ID NO: 93124 - protein, 16 aa, Artificial Sequence
  Description of Artificial Sequence: Synthetic peptide
  Seed: MCSLMQGSTLPRRSGA
MFSLQQGSTVPRRSGA

SEQ ID NO: 93125 - protein, 16 aa, Artificial Sequence
  Description of Artificial Sequence: Synthetic peptide
  Seed: MCSLMQGSTLPRRSGA
MFSLQQSSTLPRRSGA

SEQ ID NO: 93126 - protein, 16 aa, Artificial Sequence
  Description of Artificial Sequence: Synthetic peptide
  Seed: MCSLMQGSTLPRRSGA
MFSLQQSSTVPRRSGA

SEQ ID NO: 93127 - protein, 16 aa, Artificial Sequence
  Description of Artificial Sequence: Synthetic peptide
  Seed: MCSLMQGSTLPRRSGA
MFSLVQASTAPRRSGA

SEQ ID NO: 93128 - protein, 16 aa, Artificial Sequence
  Description of Artificial Sequence: Synthetic peptide
  Seed: MCSLMQGSTLPRRSGA
MFSLVQASTIPRRSGA

SEQ ID NO: 93129 - protein, 16 aa, Artificial Sequence
  Description of Artificial Sequence: Synthetic peptide
  Seed: MCSLMQGSTLPRRSGA
MFSLVQASTLPRRSGA

SEQ ID NO: 93130 - protein, 16 aa, Artificial Sequence
  Description of Artificial Sequence: Synthetic peptide
  Seed: MCSLMQGSTLPRRSGA
MFSLVQASTVPRRSGA

SEQ ID NO: 93131 - protein, 16 aa, Artificial Sequence
  Description of Artificial Sequence: Synthetic peptide
  Seed: MCSLMQGSTLPRRSGA
MFSLVQGSTIPRRSGA

SEQ ID NO: 93132 - protein, 16 aa, Artificial Sequence
  Description of Artificial Sequence: Synthetic peptide
  Seed: MCSLMQGSTLPRRSGA
MFSLVQGSTLPRRSGA

SEQ ID NO: 93133 - protein, 16 aa, Artificial Sequence
  Description of Artificial Sequence: Synthetic peptide
  Seed: MCSLMQGSTLPRRSGA
MFSLVQGSTVPRRSGA

SEQ ID NO: 93134 - protein, 16 aa, Artificial Sequence
  Description of Artificial Sequence: Synthetic peptide
  Seed: MCSLMQGSTLPRRSGA
MFSLVQSSTVPRRSGA

SEQ ID NO: 93135 - protein, 16 aa, Artificial Sequence
  Description of Artificial Sequence: Synthetic peptide
  Seed: MCSLMQGSTLPRRSGA
MISLLQASTAPRRSGA

SEQ ID NO: 93136 - protein, 16 aa, Artificial Sequence
  Description of Artificial Sequence: Synthetic peptide
  Seed: MCSLMQGSTLPRRSGA
MISLLQASTIPRRSGA

SEQ ID NO: 93137 - protein, 16 aa, Artificial Sequence
  Description of Artificial Sequence: Synthetic peptide
  Seed: MCSLMQGSTLPRRSGA
MISLLQASTLPRRSGA

SEQ ID NO: 93138 - protein, 16 aa, Artificial Sequence
  Description of Artificial Sequence: Synthetic peptide
  Seed: MCSLMQGSTLPRRSGA
MISLLQASTVPRRSGA

SEQ ID NO: 93139 - protein, 16 aa, Artificial Sequence
  Description of Artificial Sequence: Synthetic peptide
  Seed: MCSLMQGSTLPRRSGA
MISLLQGSTAPRRSGA

SEQ ID NO: 93140 - protein, 16 aa, Artificial Sequence
  Description of Artificial Sequence: Synthetic peptide
  Seed: MCSLMQGSTLPRRSGA
MISLLQGSTIPRRSGA

SEQ ID NO: 93141 - protein, 16 aa, Artificial Sequence
  Description of Artificial Sequence: Synthetic peptide
  Seed: MCSLMQGSTLPRRSGA
MISLLQGSTLPRRSGA

SEQ ID NO: 93142 - protein, 16 aa, Artificial Sequence
  Description of Artificial Sequence: Synthetic peptide
  Seed: MCSLMQGSTLPRRSGA
MISLLQGSTVPRRSGA

SEQ ID NO: 93143 - protein, 16 aa, Artificial Sequence
  Description of Artificial Sequence: Synthetic peptide
  Seed: MCSLMQGSTLPRRSGA
MISLLQSSTIPRRSGA

SEQ ID NO: 93144 - protein, 16 aa, Artificial Sequence
  Description of Artificial Sequence: Synthetic peptide
  Seed: MCSLMQGSTLPRRSGA
MISLLQSSTLPRRSGA

SEQ ID NO: 93145 - protein, 16 aa, Artificial Sequence
  Description of Artificial Sequence: Synthetic peptide
  Seed: MCSLMQGSTLPRRSGA
MISLLQSSTVPRRSGA

SEQ ID NO: 93146 - protein, 16 aa, Artificial Sequence
  Description of Artificial Sequence: Synthetic peptide
  Seed: MCSLMQGSTLPRRSGA
MISLMQASTAPRRSGA

SEQ ID NO: 93147 - protein, 16 aa, Artificial Sequence
  Description of Artificial Sequence: Synthetic peptide
  Seed: MCSLMQGSTLPRRSGA
MISLMQASTIPRRSGA

SEQ ID NO: 93148 - protein, 16 aa, Artificial Sequence
  Description of Artificial Sequence: Synthetic peptide
  Seed: MCSLMQGSTLPRRSGA
MISLMQASTLPRRSGA

SEQ ID NO: 93149 - protein, 16 aa, Artificial Sequence
  Description of Artificial Sequence: Synthetic peptide
  Seed: MCSLMQGSTLPRRSGA
MISLMQASTVPRRSGA

SEQ ID NO: 93150 - protein, 16 aa, Artificial Sequence
  Description of Artificial Sequence: Synthetic peptide
  Seed: MCSLMQGSTLPRRSGA
MISLMQGSTAPRRSGA

SEQ ID NO: 93151 - protein, 16 aa, Artificial Sequence
  Description of Artificial Sequence: Synthetic peptide
  Seed: MCSLMQGSTLPRRSGA
MISLMQGSTIPRRSGA

SEQ ID NO: 93152 - protein, 16 aa, Artificial Sequence
  Description of Artificial Sequence: Synthetic peptide
  Seed: MCSLMQGSTLPRRSGA
MISLMQGSTLPRRSGA

SEQ ID NO: 93153 - protein, 16 aa, Artificial Sequence
  Description of Artificial Sequence: Synthetic peptide
  Seed: MCSLMQGSTLPRRSGA
MISLMQGSTVPRRSGA

SEQ ID NO: 93154 - protein, 16 aa, Artificial Sequence
  Description of Artificial Sequence: Synthetic peptide
  Seed: MCSLMQGSTLPRRSGA
MISLMQSSTLPRRSGA

SEQ ID NO: 93155 - protein, 16 aa, Artificial Sequence
  Description of Artificial Sequence: Synthetic peptide
  Seed: MCSLMQGSTLPRRSGA
MISLMQSSTVPRRSGA

SEQ ID NO: 93156 - protein, 16 aa, Artificial Sequence
  Description of Artificial Sequence: Synthetic peptide
  Seed: MCSLMQGSTLPRRSGA
MLSLLQASTAPRRSGA

SEQ ID NO: 93157 - protein, 16 aa, Artificial Sequence
  Description of Artificial Sequence: Synthetic peptide
  Seed: MCSLMQGSTLPRRSGA
MLSLLQASTIPRRSGA

SEQ ID NO: 93158 - protein, 16 aa, Artificial Sequence
  Description of Artificial Sequence: Synthetic peptide
  Seed: MCSLMQGSTLPRRSGA
MLSLLQASTLPRRSGA

SEQ ID NO: 93159 - protein, 16 aa, Artificial Sequence
  Description of Artificial Sequence: Synthetic peptide
  Seed: MCSLMQGSTLPRRSGA
MLSLLQASTVPRRSGA

SEQ ID NO: 93160 - protein, 16 aa, Artificial Sequence
  Description of Artificial Sequence: Synthetic peptide
  Seed: MCSLMQGSTLPRRSGA
MLSLLQGSTAPRRSGA

SEQ ID NO: 93161 - protein, 16 aa, Artificial Sequence
  Description of Artificial Sequence: Synthetic peptide
  Seed: MCSLMQGSTLPRRSGA
MLSLLQGSTIPRRSGA

SEQ ID NO: 93162 - protein, 16 aa, Artificial Sequence
  Description of Artificial Sequence: Synthetic peptide
  Seed: MCSLMQGSTLPRRSGA
MLSLLQGSTLPRRSGA

SEQ ID NO: 93163 - protein, 16 aa, Artificial Sequence
  Description of Artificial Sequence: Synthetic peptide
  Seed: MCSLMQGSTLPRRSGA
MLSLLQGSTVPRRSGA

SEQ ID NO: 93164 - protein, 16 aa, Artificial Sequence
  Description of Artificial Sequence: Synthetic peptide
  Seed: MCSLMQGSTLPRRSGA
MLSLMQASTAPRRSGA

SEQ ID NO: 93165 - protein, 16 aa, Artificial Sequence
  Description of Artificial Sequence: Synthetic peptide
  Seed: MCSLMQGSTLPRRSGA
MLSLMQASTIPRRSGA

SEQ ID NO: 93166 - protein, 16 aa, Artificial Sequence
  Description of Artificial Sequence: Synthetic peptide
  Seed: MCSLMQGSTLPRRSGA
MLSLMQASTLPRRSGA

SEQ ID NO: 93167 - protein, 16 aa, Artificial Sequence
  Description of Artificial Sequence: Synthetic peptide
  Seed: MCSLMQGSTLPRRSGA
MLSLMQASTVPRRSGA

SEQ ID NO: 93168 - protein, 16 aa, Artificial Sequence
  Description of Artificial Sequence: Synthetic peptide
  Seed: MCSLMQGSTLPRRSGA
MLSLMQGSTIPRRSGA

SEQ ID NO: 93169 - protein, 16 aa, Artificial Sequence
  Description of Artificial Sequence: Synthetic peptide
  Seed: MCSLMQGSTLPRRSGA
MLSLMQGSTLPRRSGA

SEQ ID NO: 93170 - protein, 16 aa, Artificial Sequence
  Description of Artificial Sequence: Synthetic peptide
  Seed: MCSLMQGSTLPRRSGA
MLSLMQGSTVPRRSGA

SEQ ID NO: 93171 - protein, 16 aa, Artificial Sequence
  Description of Artificial Sequence: Synthetic peptide
  Seed: MCSLMQGSTLPRRSGA
MWSLLQASTAPRRSGA

SEQ ID NO: 93172 - protein, 16 aa, Artificial Sequence
  Description of Artificial Sequence: Synthetic peptide
  Seed: MCSLMQGSTLPRRSGA
MWSLLQASTIPRRSGA

SEQ ID NO: 93173 - protein, 16 aa, Artificial Sequence
  Description of Artificial Sequence: Synthetic peptide
  Seed: MCSLMQGSTLPRRSGA
MWSLLQASTLPRRSGA

SEQ ID NO: 93174 - protein, 16 aa, Artificial Sequence
  Description of Artificial Sequence: Synthetic peptide
  Seed: MCSLMQGSTLPRRSGA
MWSLLQASTVPRRSGA

SEQ ID NO: 93175 - protein, 16 aa, Artificial Sequence
  Description of Artificial Sequence: Synthetic peptide
  Seed: MCSLMQGSTLPRRSGA
MWSLLQGSTAPRRSGA

SEQ ID NO: 93176 - protein, 16 aa, Artificial Sequence
  Description of Artificial Sequence: Synthetic peptide
  Seed: MCSLMQGSTLPRRSGA
MWSLLQGSTIPRRSGA

SEQ ID NO: 93177 - protein, 16 aa, Artificial Sequence
  Description of Artificial Sequence: Synthetic peptide
  Seed: MCSLMQGSTLPRRSGA
MWSLLQGSTLPRRSGA

SEQ ID NO: 93178 - protein, 16 aa, Artificial Sequence
  Description of Artificial Sequence: Synthetic peptide
  Seed: MCSLMQGSTLPRRSGA
MWSLLQGSTVPRRSGA

SEQ ID NO: 93179 - protein, 16 aa, Artificial Sequence
  Description of Artificial Sequence: Synthetic peptide
  Seed: MCSLMQGSTLPRRSGA
MWSLLQSSTAPRRSGA

SEQ ID NO: 93180 - protein, 16 aa, Artificial Sequence
  Description of Artificial Sequence: Synthetic peptide
  Seed: MCSLMQGSTLPRRSGA
MWSLLQSSTIPRRSGA

SEQ ID NO: 93181 - protein, 16 aa, Artificial Sequence
  Description of Artificial Sequence: Synthetic peptide
  Seed: MCSLMQGSTLPRRSGA
MWSLLQSSTLPRRSGA

SEQ ID NO: 93182 - protein, 16 aa, Artificial Sequence
  Description of Artificial Sequence: Synthetic peptide
  Seed: MCSLMQGSTLPRRSGA
MWSLLQSSTVPRRSGA

SEQ ID NO: 93183 - protein, 16 aa, Artificial Sequence
  Description of Artificial Sequence: Synthetic peptide
  Seed: MCSLMQGSTLPRRSGA
MWSLMQASTAPRRSGA

SEQ ID NO: 93184 - protein, 16 aa, Artificial Sequence
  Description of Artificial Sequence: Synthetic peptide
  Seed: MCSLMQGSTLPRRSGA
MWSLMQASTIPRRSGA

SEQ ID NO: 93185 - protein, 16 aa, Artificial Sequence
  Description of Artificial Sequence: Synthetic peptide
  Seed: MCSLMQGSTLPRRSGA
MWSLMQASTLPRRSGA

SEQ ID NO: 93186 - protein, 16 aa, Artificial Sequence
  Description of Artificial Sequence: Synthetic peptide
  Seed: MCSLMQGSTLPRRSGA
MWSLMQASTVPRRSGA

SEQ ID NO: 93187 - protein, 16 aa, Artificial Sequence
  Description of Artificial Sequence: Synthetic peptide
  Seed: MCSLMQGSTLPRRSGA
MWSLMQGSTAPRRSGA

SEQ ID NO: 93188 - protein, 16 aa, Artificial Sequence
  Description of Artificial Sequence: Synthetic peptide
  Seed: MCSLMQGSTLPRRSGA
MWSLMQGSTIPRRSGA

SEQ ID NO: 93189 - protein, 16 aa, Artificial Sequence
  Description of Artificial Sequence: Synthetic peptide
  Seed: MCSLMQGSTLPRRSGA
MWSLMQGSTLPRRSGA

SEQ ID NO: 93190 - protein, 16 aa, Artificial Sequence
  Description of Artificial Sequence: Synthetic peptide
  Seed: MCSLMQGSTLPRRSGA
MWSLMQGSTVPRRSGA

SEQ ID NO: 93191 - protein, 16 aa, Artificial Sequence
  Description of Artificial Sequence: Synthetic peptide
  Seed: MCSLMQGSTLPRRSGA
MWSLMQSSTAPRRSGA

SEQ ID NO: 93192 - protein, 16 aa, Artificial Sequence
  Description of Artificial Sequence: Synthetic peptide
  Seed: MCSLMQGSTLPRRSGA
MWSLMQSSTIPRRSGA

SEQ ID NO: 93193 - protein, 16 aa, Artificial Sequence
  Description of Artificial Sequence: Synthetic peptide
  Seed: MCSLMQGSTLPRRSGA
MWSLMQSSTLPRRSGA

SEQ ID NO: 93194 - protein, 16 aa, Artificial Sequence
  Description of Artificial Sequence: Synthetic peptide
  Seed: MCSLMQGSTLPRRSGA
MWSLMQSSTVPRRSGA

SEQ ID NO: 93195 - protein, 16 aa, Artificial Sequence
  Description of Artificial Sequence: Synthetic peptide
  Seed: MCSLMQGSTLPRRSGA
MYSLAQASTAPRRSGA

SEQ ID NO: 93196 - protein, 16 aa, Artificial Sequence
  Description of Artificial Sequence: Synthetic peptide
  Seed: MCSLMQGSTLPRRSGA
MYSLAQASTIPRRSGA

SEQ ID NO: 93197 - protein, 16 aa, Artificial Sequence
  Description of Artificial Sequence: Synthetic peptide
  Seed: MCSLMQGSTLPRRSGA
MYSLAQASTLPRRSGA

SEQ ID NO: 93198 - protein, 16 aa, Artificial Sequence
  Description of Artificial Sequence: Synthetic peptide
  Seed: MCSLMQGSTLPRRSGA
MYSLAQASTVPRRSGA

SEQ ID NO: 93199 - protein, 16 aa, Artificial Sequence
  Description of Artificial Sequence: Synthetic peptide
  Seed: MCSLMQGSTLPRRSGA
MYSLAQGSTLPRRSGA

SEQ ID NO: 93200 - protein, 16 aa, Artificial Sequence
  Description of Artificial Sequence: Synthetic peptide
  Seed: MCSLMQGSTLPRRSGA
MYSLAQGSTVPRRSGA

SEQ ID NO: 93201 - protein, 16 aa, Artificial Sequence
  Description of Artificial Sequence: Synthetic peptide
  Seed: MCSLMQGSTLPRRSGA
MYSLIQASTAPRRSGA

SEQ ID NO: 93202 - protein, 16 aa, Artificial Sequence
  Description of Artificial Sequence: Synthetic peptide
  Seed: MCSLMQGSTLPRRSGA
MYSLIQASTIPRRSGA

SEQ ID NO: 93203 - protein, 16 aa, Artificial Sequence
  Description of Artificial Sequence: Synthetic peptide
  Seed: MCSLMQGSTLPRRSGA
MYSLIQASTLPRRSGA

SEQ ID NO: 93204 - protein, 16 aa, Artificial Sequence
  Description of Artificial Sequence: Synthetic peptide
  Seed: MCSLMQGSTLPRRSGA
MYSLIQASTVPRRSGA

SEQ ID NO: 93205 - protein, 16 aa, Artificial Sequence
  Description of Artificial Sequence: Synthetic peptide
  Seed: MCSLMQGSTLPRRSGA
MYSLIQGSTAPRRSGA

SEQ ID NO: 93206 - protein, 16 aa, Artificial Sequence
  Description of Artificial Sequence: Synthetic peptide
  Seed: MCSLMQGSTLPRRSGA
MYSLIQGSTIPRRSGA

SEQ ID NO: 93207 - protein, 16 aa, Artificial Sequence
  Description of Artificial Sequence: Synthetic peptide
  Seed: MCSLMQGSTLPRRSGA
MYSLIQGSTLPRRSGA

SEQ ID NO: 93208 - protein, 16 aa, Artificial Sequence
  Description of Artificial Sequence: Synthetic peptide
  Seed: MCSLMQGSTLPRRSGA
MYSLIQGSTVPRRSGA

SEQ ID NO: 93209 - protein, 16 aa, Artificial Sequence
  Description of Artificial Sequence: Synthetic peptide
  Seed: MCSLMQGSTLPRRSGA
MYSLIQPSTIPRRSGA

SEQ ID NO: 93210 - protein, 16 aa, Artificial Sequence
  Description of Artificial Sequence: Synthetic peptide
  Seed: MCSLMQGSTLPRRSGA
MYSLIQPSTVPRRSGA

SEQ ID NO: 93211 - protein, 16 aa, Artificial Sequence
  Description of Artificial Sequence: Synthetic peptide
  Seed: MCSLMQGSTLPRRSGA
MYSLIQSSTAPRRSGA

SEQ ID NO: 93212 - protein, 16 aa, Artificial Sequence
  Description of Artificial Sequence: Synthetic peptide
  Seed: MCSLMQGSTLPRRSGA
MYSLIQSSTIPRRSGA

SEQ ID NO: 93213 - protein, 16 aa, Artificial Sequence
  Description of Artificial Sequence: Synthetic peptide
  Seed: MCSLMQGSTLPRRSGA
MYSLIQSSTLPRRSGA

SEQ ID NO: 93214 - protein, 16 aa, Artificial Sequence
  Description of Artificial Sequence: Synthetic peptide
  Seed: MCSLMQGSTLPRRSGA
MYSLIQSSTVPRRSGA

SEQ ID NO: 93215 - protein, 16 aa, Artificial Sequence
  Description of Artificial Sequence: Synthetic peptide
  Seed: MCSLMQGSTLPRRSGA
MYSLLQASTAPRRSGA

SEQ ID NO: 93216 - protein, 16 aa, Artificial Sequence
  Description of Artificial Sequence: Synthetic peptide
  Seed: MCSLMQGSTLPRRSGA
MYSLLQASTIPRRSGA

SEQ ID NO: 93217 - protein, 16 aa, Artificial Sequence
  Description of Artificial Sequence: Synthetic peptide
  Seed: MCSLMQGSTLPRRSGA
MYSLLQASTLPRRSGA

SEQ ID NO: 93218 - protein, 16 aa, Artificial Sequence
  Description of Artificial Sequence: Synthetic peptide
  Seed: MCSLMQGSTLPRRSGA
MYSLLQASTMPRRSGA

SEQ ID NO: 93219 - protein, 16 aa, Artificial Sequence
  Description of Artificial Sequence: Synthetic peptide
  Seed: MCSLMQGSTLPRRSGA
MYSLLQASTSPRRSGA

SEQ ID NO: 93220 - protein, 16 aa, Artificial Sequence
  Description of Artificial Sequence: Synthetic peptide
  Seed: MCSLMQGSTLPRRSGA
MYSLLQASTTPRRSGA

SEQ ID NO: 93221 - protein, 16 aa, Artificial Sequence
  Description of Artificial Sequence: Synthetic peptide
  Seed: MCSLMQGSTLPRRSGA
MYSLLQASTVPRRSGA

SEQ ID NO: 93222 - protein, 16 aa, Artificial Sequence
  Description of Artificial Sequence: Synthetic peptide
  Seed: MCSLMQGSTLPRRSGA
MYSLLQGSTAPRRSGA

SEQ ID NO: 93223 - protein, 16 aa, Artificial Sequence
  Description of Artificial Sequence: Synthetic peptide
  Seed: MCSLMQGSTLPRRSGA
MYSLLQGSTIPRRSGA

SEQ ID NO: 93224 - protein, 16 aa, Artificial Sequence
  Description of Artificial Sequence: Synthetic peptide
  Seed: MCSLMQGSTLPRRSGA
MYSLLQGSTLPRRSGA

SEQ ID NO: 93225 - protein, 16 aa, Artificial Sequence
  Description of Artificial Sequence: Synthetic peptide
  Seed: MCSLMQGSTLPRRSGA
MYSLLQGSTMPRRSGA

SEQ ID NO: 93226 - protein, 16 aa, Artificial Sequence
  Description of Artificial Sequence: Synthetic peptide
  Seed: MCSLMQGSTLPRRSGA
MYSLLQGSTSPRRSGA

SEQ ID NO: 93227 - protein, 16 aa, Artificial Sequence
  Description of Artificial Sequence: Synthetic peptide
  Seed: MCSLMQGSTLPRRSGA
MYSLLQGSTTPRRSGA

SEQ ID NO: 93228 - protein, 16 aa, Artificial Sequence
  Description of Artificial Sequence: Synthetic peptide
  Seed: MCSLMQGSTLPRRSGA
MYSLLQGSTVPRRSGA

SEQ ID NO: 93229 - protein, 16 aa, Artificial Sequence
  Description of Artificial Sequence: Synthetic peptide
  Seed: MCSLMQGSTLPRRSGA
MYSLLQNSTIPRRSGA

SEQ ID NO: 93230 - protein, 16 aa, Artificial Sequence
  Description of Artificial Sequence: Synthetic peptide
  Seed: MCSLMQGSTLPRRSGA
MYSLLQNSTLPRRSGA

SEQ ID NO: 93231 - protein, 16 aa, Artificial Sequence
  Description of Artificial Sequence: Synthetic peptide
  Seed: MCSLMQGSTLPRRSGA
MYSLLQNSTVPRRSGA

SEQ ID NO: 93232 - protein, 16 aa, Artificial Sequence
  Description of Artificial Sequence: Synthetic peptide
  Seed: MCSLMQGSTLPRRSGA
MYSLLQPSTAPRRSGA

SEQ ID NO: 93233 - protein, 16 aa, Artificial Sequence
  Description of Artificial Sequence: Synthetic peptide
  Seed: MCSLMQGSTLPRRSGA
MYSLLQPSTIPRRSGA

SEQ ID NO: 93234 - protein, 16 aa, Artificial Sequence
  Description of Artificial Sequence: Synthetic peptide
  Seed: MCSLMQGSTLPRRSGA
MYSLLQPSTLPRRSGA

SEQ ID NO: 93235 - protein, 16 aa, Artificial Sequence
  Description of Artificial Sequence: Synthetic peptide
  Seed: MCSLMQGSTLPRRSGA
MYSLLQPSTVPRRSGA

SEQ ID NO: 93236 - protein, 16 aa, Artificial Sequence
  Description of Artificial Sequence: Synthetic peptide
  Seed: MCSLMQGSTLPRRSGA
MYSLLQSSTAPRRSGA

SEQ ID NO: 93237 - protein, 16 aa, Artificial Sequence
  Description of Artificial Sequence: Synthetic peptide
  Seed: MCSLMQGSTLPRRSGA
MYSLLQSSTIPRRSGA

SEQ ID NO: 93238 - protein, 16 aa, Artificial Sequence
  Description of Artificial Sequence: Synthetic peptide
  Seed: MCSLMQGSTLPRRSGA
MYSLLQSSTLPRRSGA

SEQ ID NO: 93239 - protein, 16 aa, Artificial Sequence
  Description of Artificial Sequence: Synthetic peptide
  Seed: MCSLMQGSTLPRRSGA
MYSLLQSSTMPRRSGA

SEQ ID NO: 93240 - protein, 16 aa, Artificial Sequence
  Description of Artificial Sequence: Synthetic peptide
  Seed: MCSLMQGSTLPRRSGA
MYSLLQSSTSPRRSGA

SEQ ID NO: 93241 - protein, 16 aa, Artificial Sequence
  Description of Artificial Sequence: Synthetic peptide
  Seed: MCSLMQGSTLPRRSGA
MYSLLQSSTTPRRSGA

SEQ ID NO: 93242 - protein, 16 aa, Artificial Sequence
  Description of Artificial Sequence: Synthetic peptide
  Seed: MCSLMQGSTLPRRSGA
MYSLLQSSTVPRRSGA

SEQ ID NO: 93243 - protein, 16 aa, Artificial Sequence
  Description of Artificial Sequence: Synthetic peptide
  Seed: MCSLMQGSTLPRRSGA
MYSLLQTSTAPRRSGA

SEQ ID NO: 93244 - protein, 16 aa, Artificial Sequence
  Description of Artificial Sequence: Synthetic peptide
  Seed: MCSLMQGSTLPRRSGA
MYSLLQTSTIPRRSGA

SEQ ID NO: 93245 - protein, 16 aa, Artificial Sequence
  Description of Artificial Sequence: Synthetic peptide
  Seed: MCSLMQGSTLPRRSGA
MYSLLQTSTLPRRSGA

SEQ ID NO: 93246 - protein, 16 aa, Artificial Sequence
  Description of Artificial Sequence: Synthetic peptide
  Seed: MCSLMQGSTLPRRSGA
MYSLLQTSTVPRRSGA

SEQ ID NO: 93247 - protein, 16 aa, Artificial Sequence
  Description of Artificial Sequence: Synthetic peptide
  Seed: MCSLMQGSTLPRRSGA
MYSLMQASTAPRRSGA

SEQ ID NO: 93248 - protein, 16 aa, Artificial Sequence
  Description of Artificial Sequence: Synthetic peptide
  Seed: MCSLMQGSTLPRRSGA
MYSLMQASTIPRRSGA

SEQ ID NO: 93249 - protein, 16 aa, Artificial Sequence
  Description of Artificial Sequence: Synthetic peptide
  Seed: MCSLMQGSTLPRRSGA
MYSLMQASTLPRRSGA

SEQ ID NO: 93250 - protein, 16 aa, Artificial Sequence
  Description of Artificial Sequence: Synthetic peptide
  Seed: MCSLMQGSTLPRRSGA
MYSLMQASTMPRRSGA

SEQ ID NO: 93251 - protein, 16 aa, Artificial Sequence
  Description of Artificial Sequence: Synthetic peptide
  Seed: MCSLMQGSTLPRRSGA
MYSLMQASTSPRRSGA

SEQ ID NO: 93252 - protein, 16 aa, Artificial Sequence
  Description of Artificial Sequence: Synthetic peptide
  Seed: MCSLMQGSTLPRRSGA
MYSLMQASTTPRRSGA

SEQ ID NO: 93253 - protein, 16 aa, Artificial Sequence
  Description of Artificial Sequence: Synthetic peptide
  Seed: MCSLMQGSTLPRRSGA
MYSLMQASTVPRRSGA

SEQ ID NO: 93254 - protein, 16 aa, Artificial Sequence
  Description of Artificial Sequence: Synthetic peptide
  Seed: MCSLMQGSTLPRRSGA
MYSLMQGSTAPRRSGA

SEQ ID NO: 93255 - protein, 16 aa, Artificial Sequence
  Description of Artificial Sequence: Synthetic peptide
  Seed: MCSLMQGSTLPRRSGA
MYSLMQGSTIPRRSGA

SEQ ID NO: 93256 - protein, 16 aa, Artificial Sequence
  Description of Artificial Sequence: Synthetic peptide
  Seed: MCSLMQGSTLPRRSGA
MYSLMQGSTLPRRSGA

SEQ ID NO: 93257 - protein, 16 aa, Artificial Sequence
  Description of Artificial Sequence: Synthetic peptide
  Seed: MCSLMQGSTLPRRSGA
MYSLMQGSTMPRRSGA

SEQ ID NO: 93258 - protein, 16 aa, Artificial Sequence
  Description of Artificial Sequence: Synthetic peptide
  Seed: MCSLMQGSTLPRRSGA
MYSLMQGSTSPRRSGA

SEQ ID NO: 93259 - protein, 16 aa, Artificial Sequence
  Description of Artificial Sequence: Synthetic peptide
  Seed: MCSLMQGSTLPRRSGA
MYSLMQGSTTPRRSGA

SEQ ID NO: 93260 - protein, 16 aa, Artificial Sequence
  Description of Artificial Sequence: Synthetic peptide
  Seed: MCSLMQGSTLPRRSGA
MYSLMQGSTVPRRSGA

SEQ ID NO: 93261 - protein, 16 aa, Artificial Sequence
  Description of Artificial Sequence: Synthetic peptide
  Seed: MCSLMQGSTLPRRSGA
MYSLMQNSTIPRRSGA

SEQ ID NO: 93262 - protein, 16 aa, Artificial Sequence
  Description of Artificial Sequence: Synthetic peptide
  Seed: MCSLMQGSTLPRRSGA
MYSLMQNSTLPRRSGA

SEQ ID NO: 93263 - protein, 16 aa, Artificial Sequence
  Description of Artificial Sequence: Synthetic peptide
  Seed: MCSLMQGSTLPRRSGA
MYSLMQNSTVPRRSGA

SEQ ID NO: 93264 - protein, 16 aa, Artificial Sequence
  Description of Artificial Sequence: Synthetic peptide
  Seed: MCSLMQGSTLPRRSGA
MYSLMQPSTAPRRSGA

SEQ ID NO: 93265 - protein, 16 aa, Artificial Sequence
  Description of Artificial Sequence: Synthetic peptide
  Seed: MCSLMQGSTLPRRSGA
MYSLMQPSTIPRRSGA

SEQ ID NO: 93266 - protein, 16 aa, Artificial Sequence
  Description of Artificial Sequence: Synthetic peptide
  Seed: MCSLMQGSTLPRRSGA
MYSLMQPSTLPRRSGA

SEQ ID NO: 93267 - protein, 16 aa, Artificial Sequence
  Description of Artificial Sequence: Synthetic peptide
  Seed: MCSLMQGSTLPRRSGA
MYSLMQPSTVPRRSGA

SEQ ID NO: 93268 - protein, 16 aa, Artificial Sequence
  Description of Artificial Sequence: Synthetic peptide
  Seed: MCSLMQGSTLPRRSGA
MYSLMQSSTAPRRSGA

SEQ ID NO: 93269 - protein, 16 aa, Artificial Sequence
  Description of Artificial Sequence: Synthetic peptide
  Seed: MCSLMQGSTLPRRSGA
MYSLMQSSTIPRRSGA

SEQ ID NO: 93270 - protein, 16 aa, Artificial Sequence
  Description of Artificial Sequence: Synthetic peptide
  Seed: MCSLMQGSTLPRRSGA
MYSLMQSSTLPRRSGA

SEQ ID NO: 93271 - protein, 16 aa, Artificial Sequence
  Description of Artificial Sequence: Synthetic peptide
  Seed: MCSLMQGSTLPRRSGA
MYSLMQSSTMPRRSGA

SEQ ID NO: 93272 - protein, 16 aa, Artificial Sequence
  Description of Artificial Sequence: Synthetic peptide
  Seed: MCSLMQGSTLPRRSGA
MYSLMQSSTTPRRSGA

SEQ ID NO: 93273 - protein, 16 aa, Artificial Sequence
  Description of Artificial Sequence: Synthetic peptide
  Seed: MCSLMQGSTLPRRSGA
MYSLMQSSTVPRRSGA

SEQ ID NO: 93274 - protein, 16 aa, Artificial Sequence
  Description of Artificial Sequence: Synthetic peptide
  Seed: MCSLMQGSTLPRRSGA
MYSLMQTSTIPRRSGA

SEQ ID NO: 93275 - protein, 16 aa, Artificial Sequence
  Description of Artificial Sequence: Synthetic peptide
  Seed: MCSLMQGSTLPRRSGA
MYSLMQTSTLPRRSGA

SEQ ID NO: 93276 - protein, 16 aa, Artificial Sequence
  Description of Artificial Sequence: Synthetic peptide
  Seed: MCSLMQGSTLPRRSGA
MYSLMQTSTVPRRSGA

SEQ ID NO: 93277 - protein, 16 aa, Artificial Sequence
  Description of Artificial Sequence: Synthetic peptide
  Seed: MCSLMQGSTLPRRSGA
MYSLQQASTIPRRSGA

SEQ ID NO: 93278 - protein, 16 aa, Artificial Sequence
  Description of Artificial Sequence: Synthetic peptide
  Seed: MCSLMQGSTLPRRSGA
MYSLQQASTLPRRSGA

SEQ ID NO: 93279 - protein, 16 aa, Artificial Sequence
  Description of Artificial Sequence: Synthetic peptide
  Seed: MCSLMQGSTLPRRSGA
MYSLQQASTVPRRSGA

SEQ ID NO: 93280 - protein, 16 aa, Artificial Sequence
  Description of Artificial Sequence: Synthetic peptide
  Seed: MCSLMQGSTLPRRSGA
MYSLVQASTIPRRSGA

SEQ ID NO: 93281 - protein, 16 aa, Artificial Sequence
  Description of Artificial Sequence: Synthetic peptide
  Seed: MCSLMQGSTLPRRSGA
MYSLVQASTLPRRSGA

SEQ ID NO: 93282 - protein, 16 aa, Artificial Sequence
  Description of Artificial Sequence: Synthetic peptide
  Seed: MCSLMQGSTLPRRSGA
MYSLVQASTVPRRSGA

SEQ ID NO: 93283 - protein, 16 aa, Artificial Sequence
  Description of Artificial Sequence: Synthetic peptide
  Seed: MCSLMQGSTLPRRSGA
MCSLMAGSALARRAGA

SEQ ID NO: 93284 - protein, 16 aa, Artificial Sequence
  Description of Artificial Sequence: Synthetic peptide
  Seed: MCSLMQGSTLPRRSGA
MCSLMAGSALARRIGA

SEQ ID NO: 93285 - protein, 16 aa, Artificial Sequence
  Description of Artificial Sequence: Synthetic peptide
  Seed: MCSLMQGSTLPRRSGA
MCSLMAGSALARRTGA

SEQ ID NO: 93286 - protein, 16 aa, Artificial Sequence
  Description of Artificial Sequence: Synthetic peptide
  Seed: MCSLMQGSTLPRRSGA
MCSLMAGSALARRVGA

SEQ ID NO: 93287 - protein, 16 aa, Artificial Sequence
  Description of Artificial Sequence: Synthetic peptide
  Seed: MCSLMQGSTLPRRSGA
MCSLMAGSGLARRVGA

SEQ ID NO: 93288 - protein, 16 aa, Artificial Sequence
  Description of Artificial Sequence: Synthetic peptide
  Seed: MCSLMQGSTLPRRSGA
MCSLMFGSALARRAGA

SEQ ID NO: 93289 - protein, 16 aa, Artificial Sequence
  Description of Artificial Sequence: Synthetic peptide
  Seed: MCSLMQGSTLPRRSGA
MCSLMFGSALARRIGA

SEQ ID NO: 93290 - protein, 16 aa, Artificial Sequence
  Description of Artificial Sequence: Synthetic peptide
  Seed: MCSLMQGSTLPRRSGA
MCSLMFGSALARRNGA

SEQ ID NO: 93291 - protein, 16 aa, Artificial Sequence
  Description of Artificial Sequence: Synthetic peptide
  Seed: MCSLMQGSTLPRRSGA
MCSLMFGSALARRSGA

SEQ ID NO: 93292 - protein, 16 aa, Artificial Sequence
  Description of Artificial Sequence: Synthetic peptide
  Seed: MCSLMQGSTLPRRSGA
MCSLMFGSALARRTGA

SEQ ID NO: 93293 - protein, 16 aa, Artificial Sequence
  Description of Artificial Sequence: Synthetic peptide
  Seed: MCSLMQGSTLPRRSGA
MCSLMFGSALARRVGA

SEQ ID NO: 93294 - protein, 16 aa, Artificial Sequence
  Description of Artificial Sequence: Synthetic peptide
  Seed: MCSLMQGSTLPRRSGA
MCSLMFGSALSRRAGA

SEQ ID NO: 93295 - protein, 16 aa, Artificial Sequence
  Description of Artificial Sequence: Synthetic peptide
  Seed: MCSLMQGSTLPRRSGA
MCSLMFGSALSRRSGA

SEQ ID NO: 93296 - protein, 16 aa, Artificial Sequence
  Description of Artificial Sequence: Synthetic peptide
  Seed: MCSLMQGSTLPRRSGA
MCSLMFGSALSRRVGA

SEQ ID NO: 93297 - protein, 16 aa, Artificial Sequence
  Description of Artificial Sequence: Synthetic peptide
  Seed: MCSLMQGSTLPRRSGA
MCSLMFGSALTRRAGA

SEQ ID NO: 93298 - protein, 16 aa, Artificial Sequence
  Description of Artificial Sequence: Synthetic peptide
  Seed: MCSLMQGSTLPRRSGA
MCSLMFGSALVRRAGA

SEQ ID NO: 93299 - protein, 16 aa, Artificial Sequence
  Description of Artificial Sequence: Synthetic peptide
  Seed: MCSLMQGSTLPRRSGA
MCSLMFGSALVRRSGA

SEQ ID NO: 93300 - protein, 16 aa, Artificial Sequence
  Description of Artificial Sequence: Synthetic peptide
  Seed: MCSLMQGSTLPRRSGA
MCSLMFGSALVRRTGA

SEQ ID NO: 93301 - protein, 16 aa, Artificial Sequence
  Description of Artificial Sequence: Synthetic peptide
  Seed: MCSLMQGSTLPRRSGA
MCSLMFGSALVRRVGA

SEQ ID NO: 93302 - protein, 16 aa, Artificial Sequence
  Description of Artificial Sequence: Synthetic peptide
  Seed: MCSLMQGSTLPRRSGA
MCSLMFGSGLARRAGA

SEQ ID NO: 93303 - protein, 16 aa, Artificial Sequence
  Description of Artificial Sequence: Synthetic peptide
  Seed: MCSLMQGSTLPRRSGA
MCSLMFGSGLARRIGA

SEQ ID NO: 93304 - protein, 16 aa, Artificial Sequence
  Description of Artificial Sequence: Synthetic peptide
  Seed: MCSLMQGSTLPRRSGA
MCSLMFGSGLARRSGA

SEQ ID NO: 93305 - protein, 16 aa, Artificial Sequence
  Description of Artificial Sequence: Synthetic peptide
  Seed: MCSLMQGSTLPRRSGA
MCSLMFGSGLARRTGA

SEQ ID NO: 93306 - protein, 16 aa, Artificial Sequence
  Description of Artificial Sequence: Synthetic peptide
  Seed: MCSLMQGSTLPRRSGA
MCSLMFGSGLARRVGA

SEQ ID NO: 93307 - protein, 16 aa, Artificial Sequence
  Description of Artificial Sequence: Synthetic peptide
  Seed: MCSLMQGSTLPRRSGA
MCSLMFGSGLVRRAGA

SEQ ID NO: 93308 - protein, 16 aa, Artificial Sequence
  Description of Artificial Sequence: Synthetic peptide
  Seed: MCSLMQGSTLPRRSGA
MCSLMFGSGLVRRIGA

SEQ ID NO: 93309 - protein, 16 aa, Artificial Sequence
  Description of Artificial Sequence: Synthetic peptide
  Seed: MCSLMQGSTLPRRSGA
MCSLMFGSGLVRRSGA

SEQ ID NO: 93310 - protein, 16 aa, Artificial Sequence
  Description of Artificial Sequence: Synthetic peptide
  Seed: MCSLMQGSTLPRRSGA
MCSLMFGSGLVRRTGA

SEQ ID NO: 93311 - protein, 16 aa, Artificial Sequence
  Description of Artificial Sequence: Synthetic peptide
  Seed: MCSLMQGSTLPRRSGA
MCSLMFGSGLVRRVGA

SEQ ID NO: 93312 - protein, 16 aa, Artificial Sequence
  Description of Artificial Sequence: Synthetic peptide
  Seed: MCSLMQGSTLPRRSGA
MCSLMFGSILARRAGA

SEQ ID NO: 93313 - protein, 16 aa, Artificial Sequence
  Description of Artificial Sequence: Synthetic peptide
  Seed: MCSLMQGSTLPRRSGA
MCSLMFGSILARRIGA

SEQ ID NO: 93314 - protein, 16 aa, Artificial Sequence
  Description of Artificial Sequence: Synthetic peptide
  Seed: MCSLMQGSTLPRRSGA
MCSLMFGSILARRLGA

SEQ ID NO: 93315 - protein, 16 aa, Artificial Sequence
  Description of Artificial Sequence: Synthetic peptide
  Seed: MCSLMQGSTLPRRSGA
MCSLMFGSILARRMGA

SEQ ID NO: 93316 - protein, 16 aa, Artificial Sequence
  Description of Artificial Sequence: Synthetic peptide
  Seed: MCSLMQGSTLPRRSGA
MCSLMFGSILARRNGA

SEQ ID NO: 93317 - protein, 16 aa, Artificial Sequence
  Description of Artificial Sequence: Synthetic peptide
  Seed: MCSLMQGSTLPRRSGA
MCSLMFGSILARRSGA

SEQ ID NO: 93318 - protein, 16 aa, Artificial Sequence
  Description of Artificial Sequence: Synthetic peptide
  Seed: MCSLMQGSTLPRRSGA
MCSLMFGSILARRTGA

SEQ ID NO: 93319 - protein, 16 aa, Artificial Sequence
  Description of Artificial Sequence: Synthetic peptide
  Seed: MCSLMQGSTLPRRSGA
MCSLMFGSILARRVGA

SEQ ID NO: 93320 - protein, 16 aa, Artificial Sequence
  Description of Artificial Sequence: Synthetic peptide
  Seed: MCSLMQGSTLPRRSGA
MCSLMFGSILGRRAGA

SEQ ID NO: 93321 - protein, 16 aa, Artificial Sequence
  Description of Artificial Sequence: Synthetic peptide
  Seed: MCSLMQGSTLPRRSGA
MCSLMFGSILPRRAGA

SEQ ID NO: 93322 - protein, 16 aa, Artificial Sequence
  Description of Artificial Sequence: Synthetic peptide
  Seed: MCSLMQGSTLPRRSGA
MCSLMFGSILPRRIGA

SEQ ID NO: 93323 - protein, 16 aa, Artificial Sequence
  Description of Artificial Sequence: Synthetic peptide
  Seed: MCSLMQGSTLPRRSGA
MCSLMFGSILPRRNGA

SEQ ID NO: 93324 - protein, 16 aa, Artificial Sequence
  Description of Artificial Sequence: Synthetic peptide
  Seed: MCSLMQGSTLPRRSGA
MCSLMFGSILPRRSGA

SEQ ID NO: 93325 - protein, 16 aa, Artificial Sequence
  Description of Artificial Sequence: Synthetic peptide
  Seed: MCSLMQGSTLPRRSGA
MCSLMFGSILPRRVGA

SEQ ID NO: 93326 - protein, 16 aa, Artificial Sequence
  Description of Artificial Sequence: Synthetic peptide
  Seed: MCSLMQGSTLPRRSGA
MCSLMFGSILSRRAGA

SEQ ID NO: 93327 - protein, 16 aa, Artificial Sequence
  Description of Artificial Sequence: Synthetic peptide
  Seed: MCSLMQGSTLPRRSGA
MCSLMFGSILSRRIGA

SEQ ID NO: 93328 - protein, 16 aa, Artificial Sequence
  Description of Artificial Sequence: Synthetic peptide
  Seed: MCSLMQGSTLPRRSGA
MCSLMFGSILSRRNGA

SEQ ID NO: 93329 - protein, 16 aa, Artificial Sequence
  Description of Artificial Sequence: Synthetic peptide
  Seed: MCSLMQGSTLPRRSGA
MCSLMFGSILSRRSGA

SEQ ID NO: 93330 - protein, 16 aa, Artificial Sequence
  Description of Artificial Sequence: Synthetic peptide
  Seed: MCSLMQGSTLPRRSGA
MCSLMFGSILSRRTGA

SEQ ID NO: 93331 - protein, 16 aa, Artificial Sequence
  Description of Artificial Sequence: Synthetic peptide
  Seed: MCSLMQGSTLPRRSGA
MCSLMFGSILSRRVGA

SEQ ID NO: 93332 - protein, 16 aa, Artificial Sequence
  Description of Artificial Sequence: Synthetic peptide
  Seed: MCSLMQGSTLPRRSGA
MCSLMFGSILTRRAGA

SEQ ID NO: 93333 - protein, 16 aa, Artificial Sequence
  Description of Artificial Sequence: Synthetic peptide
  Seed: MCSLMQGSTLPRRSGA
MCSLMFGSILTRRIGA

SEQ ID NO: 93334 - protein, 16 aa, Artificial Sequence
  Description of Artificial Sequence: Synthetic peptide
  Seed: MCSLMQGSTLPRRSGA
MCSLMFGSILTRRNGA

SEQ ID NO: 93335 - protein, 16 aa, Artificial Sequence
  Description of Artificial Sequence: Synthetic peptide
  Seed: MCSLMQGSTLPRRSGA
MCSLMFGSILTRRSGA

SEQ ID NO: 93336 - protein, 16 aa, Artificial Sequence
  Description of Artificial Sequence: Synthetic peptide
  Seed: MCSLMQGSTLPRRSGA
MCSLMFGSILTRRTGA

SEQ ID NO: 93337 - protein, 16 aa, Artificial Sequence
  Description of Artificial Sequence: Synthetic peptide
  Seed: MCSLMQGSTLPRRSGA
MCSLMFGSILTRRVGA

SEQ ID NO: 93338 - protein, 16 aa, Artificial Sequence
  Description of Artificial Sequence: Synthetic peptide
  Seed: MCSLMQGSTLPRRSGA
MCSLMFGSILVRRAGA

SEQ ID NO: 93339 - protein, 16 aa, Artificial Sequence
  Description of Artificial Sequence: Synthetic peptide
  Seed: MCSLMQGSTLPRRSGA
MCSLMFGSILVRRNGA

SEQ ID NO: 93340 - protein, 16 aa, Artificial Sequence
  Description of Artificial Sequence: Synthetic peptide
  Seed: MCSLMQGSTLPRRSGA
MCSLMFGSILVRRSGA

SEQ ID NO: 93341 - protein, 16 aa, Artificial Sequence
  Description of Artificial Sequence: Synthetic peptide
  Seed: MCSLMQGSTLPRRSGA
MCSLMFGSLLARRAGA

SEQ ID NO: 93342 - protein, 16 aa, Artificial Sequence
  Description of Artificial Sequence: Synthetic peptide
  Seed: MCSLMQGSTLPRRSGA
MCSLMFGSLLARRIGA

SEQ ID NO: 93343 - protein, 16 aa, Artificial Sequence
  Description of Artificial Sequence: Synthetic peptide
  Seed: MCSLMQGSTLPRRSGA
MCSLMFGSLLARRLGA

SEQ ID NO: 93344 - protein, 16 aa, Artificial Sequence
  Description of Artificial Sequence: Synthetic peptide
  Seed: MCSLMQGSTLPRRSGA
MCSLMFGSLLARRMGA

SEQ ID NO: 93345 - protein, 16 aa, Artificial Sequence
  Description of Artificial Sequence: Synthetic peptide
  Seed: MCSLMQGSTLPRRSGA
MCSLMFGSLLARRNGA

SEQ ID NO: 93346 - protein, 16 aa, Artificial Sequence
  Description of Artificial Sequence: Synthetic peptide
  Seed: MCSLMQGSTLPRRSGA
MCSLMFGSLLARRSGA

SEQ ID NO: 93347 - protein, 16 aa, Artificial Sequence
  Description of Artificial Sequence: Synthetic peptide
  Seed: MCSLMQGSTLPRRSGA
MCSLMFGSLLARRTGA

SEQ ID NO: 93348 - protein, 16 aa, Artificial Sequence
  Description of Artificial Sequence: Synthetic peptide
  Seed: MCSLMQGSTLPRRSGA
MCSLMFGSLLARRVGA

SEQ ID NO: 93349 - protein, 16 aa, Artificial Sequence
  Description of Artificial Sequence: Synthetic peptide
  Seed: MCSLMQGSTLPRRSGA
MCSLMFGSLLGRRAGA

SEQ ID NO: 93350 - protein, 16 aa, Artificial Sequence
  Description of Artificial Sequence: Synthetic peptide
  Seed: MCSLMQGSTLPRRSGA
MCSLMFGSLLGRRVGA

SEQ ID NO: 93351 - protein, 16 aa, Artificial Sequence
  Description of Artificial Sequence: Synthetic peptide
  Seed: MCSLMQGSTLPRRSGA
MCSLMFGSLLIRRAGA

SEQ ID NO: 93352 - protein, 16 aa, Artificial Sequence
  Description of Artificial Sequence: Synthetic peptide
  Seed: MCSLMQGSTLPRRSGA
MCSLMFGSLLPRRAGA

SEQ ID NO: 93353 - protein, 16 aa, Artificial Sequence
  Description of Artificial Sequence: Synthetic peptide
  Seed: MCSLMQGSTLPRRSGA
MCSLMFGSLLPRRIGA

SEQ ID NO: 93354 - protein, 16 aa, Artificial Sequence
  Description of Artificial Sequence: Synthetic peptide
  Seed: MCSLMQGSTLPRRSGA
MCSLMFGSLLPRRLGA

SEQ ID NO: 93355 - protein, 16 aa, Artificial Sequence
  Description of Artificial Sequence: Synthetic peptide
  Seed: MCSLMQGSTLPRRSGA
MCSLMFGSLLPRRMGA

SEQ ID NO: 93356 - protein, 16 aa, Artificial Sequence
  Description of Artificial Sequence: Synthetic peptide
  Seed: MCSLMQGSTLPRRSGA
MCSLMFGSLLPRRNGA

SEQ ID NO: 93357 - protein, 16 aa, Artificial Sequence
  Description of Artificial Sequence: Synthetic peptide
  Seed: MCSLMQGSTLPRRSGA
MCSLMFGSLLPRRSGA

SEQ ID NO: 93358 - protein, 16 aa, Artificial Sequence
  Description of Artificial Sequence: Synthetic peptide
  Seed: MCSLMQGSTLPRRSGA
MCSLMFGSLLPRRTGA

SEQ ID NO: 93359 - protein, 16 aa, Artificial Sequence
  Description of Artificial Sequence: Synthetic peptide
  Seed: MCSLMQGSTLPRRSGA
MCSLMFGSLLPRRVGA

SEQ ID NO: 93360 - protein, 16 aa, Artificial Sequence
  Description of Artificial Sequence: Synthetic peptide
  Seed: MCSLMQGSTLPRRSGA
MCSLMFGSLLSRRAGA

SEQ ID NO: 93361 - protein, 16 aa, Artificial Sequence
  Description of Artificial Sequence: Synthetic peptide
  Seed: MCSLMQGSTLPRRSGA
MCSLMFGSLLSRRIGA

SEQ ID NO: 93362 - protein, 16 aa, Artificial Sequence
  Description of Artificial Sequence: Synthetic peptide
  Seed: MCSLMQGSTLPRRSGA
MCSLMFGSLLSRRLGA

SEQ ID NO: 93363 - protein, 16 aa, Artificial Sequence
  Description of Artificial Sequence: Synthetic peptide
  Seed: MCSLMQGSTLPRRSGA
MCSLMFGSLLSRRMGA

SEQ ID NO: 93364 - protein, 16 aa, Artificial Sequence
  Description of Artificial Sequence: Synthetic peptide
  Seed: MCSLMQGSTLPRRSGA
MCSLMFGSLLSRRNGA

SEQ ID NO: 93365 - protein, 16 aa, Artificial Sequence
  Description of Artificial Sequence: Synthetic peptide
  Seed: MCSLMQGSTLPRRSGA
MCSLMFGSLLSRRSGA

SEQ ID NO: 93366 - protein, 16 aa, Artificial Sequence
  Description of Artificial Sequence: Synthetic peptide
  Seed: MCSLMQGSTLPRRSGA
MCSLMFGSLLSRRTGA

SEQ ID NO: 93367 - protein, 16 aa, Artificial Sequence
  Description of Artificial Sequence: Synthetic peptide
  Seed: MCSLMQGSTLPRRSGA
MCSLMFGSLLSRRVGA

SEQ ID NO: 93368 - protein, 16 aa, Artificial Sequence
  Description of Artificial Sequence: Synthetic peptide
  Seed: MCSLMQGSTLPRRSGA
MCSLMFGSLLTRRAGA

SEQ ID NO: 93369 - protein, 16 aa, Artificial Sequence
  Description of Artificial Sequence: Synthetic peptide
  Seed: MCSLMQGSTLPRRSGA
MCSLMFGSLLTRRIGA

SEQ ID NO: 93370 - protein, 16 aa, Artificial Sequence
  Description of Artificial Sequence: Synthetic peptide
  Seed: MCSLMQGSTLPRRSGA
MCSLMFGSLLTRRLGA

SEQ ID NO: 93371 - protein, 16 aa, Artificial Sequence
  Description of Artificial Sequence: Synthetic peptide
  Seed: MCSLMQGSTLPRRSGA
MCSLMFGSLLTRRMGA

SEQ ID NO: 93372 - protein, 16 aa, Artificial Sequence
  Description of Artificial Sequence: Synthetic peptide
  Seed: MCSLMQGSTLPRRSGA
MCSLMFGSLLTRRNGA

SEQ ID NO: 93373 - protein, 16 aa, Artificial Sequence
  Description of Artificial Sequence: Synthetic peptide
  Seed: MCSLMQGSTLPRRSGA
MCSLMFGSLLTRRSGA

SEQ ID NO: 93374 - protein, 16 aa, Artificial Sequence
  Description of Artificial Sequence: Synthetic peptide
  Seed: MCSLMQGSTLPRRSGA
MCSLMFGSLLTRRTGA

SEQ ID NO: 93375 - protein, 16 aa, Artificial Sequence
  Description of Artificial Sequence: Synthetic peptide
  Seed: MCSLMQGSTLPRRSGA
MCSLMFGSLLTRRVGA

SEQ ID NO: 93376 - protein, 16 aa, Artificial Sequence
  Description of Artificial Sequence: Synthetic peptide
  Seed: MCSLMQGSTLPRRSGA
MCSLMFGSLLVRRAGA

SEQ ID NO: 93377 - protein, 16 aa, Artificial Sequence
  Description of Artificial Sequence: Synthetic peptide
  Seed: MCSLMQGSTLPRRSGA
MCSLMFGSLLVRRIGA

SEQ ID NO: 93378 - protein, 16 aa, Artificial Sequence
  Description of Artificial Sequence: Synthetic peptide
  Seed: MCSLMQGSTLPRRSGA
MCSLMFGSLLVRRNGA

SEQ ID NO: 93379 - protein, 16 aa, Artificial Sequence
  Description of Artificial Sequence: Synthetic peptide
  Seed: MCSLMQGSTLPRRSGA
MCSLMFGSLLVRRSGA

SEQ ID NO: 93380 - protein, 16 aa, Artificial Sequence
  Description of Artificial Sequence: Synthetic peptide
  Seed: MCSLMQGSTLPRRSGA
MCSLMFGSLLVRRTGA

SEQ ID NO: 93381 - protein, 16 aa, Artificial Sequence
  Description of Artificial Sequence: Synthetic peptide
  Seed: MCSLMQGSTLPRRSGA
MCSLMFGSLLVRRVGA

SEQ ID NO: 93382 - protein, 16 aa, Artificial Sequence
  Description of Artificial Sequence: Synthetic peptide
  Seed: MCSLMQGSTLPRRSGA
MCSLMFGSMLARRAGA

SEQ ID NO: 93383 - protein, 16 aa, Artificial Sequence
  Description of Artificial Sequence: Synthetic peptide
  Seed: MCSLMQGSTLPRRSGA
MCSLMFGSMLARRGGA

SEQ ID NO: 93384 - protein, 16 aa, Artificial Sequence
  Description of Artificial Sequence: Synthetic peptide
  Seed: MCSLMQGSTLPRRSGA
MCSLMFGSMLARRHGA

SEQ ID NO: 93385 - protein, 16 aa, Artificial Sequence
  Description of Artificial Sequence: Synthetic peptide
  Seed: MCSLMQGSTLPRRSGA
MCSLMFGSMLARRIGA

SEQ ID NO: 93386 - protein, 16 aa, Artificial Sequence
  Description of Artificial Sequence: Synthetic peptide
  Seed: MCSLMQGSTLPRRSGA
MCSLMFGSMLARRLGA

SEQ ID NO: 93387 - protein, 16 aa, Artificial Sequence
  Description of Artificial Sequence: Synthetic peptide
  Seed: MCSLMQGSTLPRRSGA
MCSLMFGSMLARRMGA

SEQ ID NO: 93388 - protein, 16 aa, Artificial Sequence
  Description of Artificial Sequence: Synthetic peptide
  Seed: MCSLMQGSTLPRRSGA
MCSLMFGSMLARRNGA

SEQ ID NO: 93389 - protein, 16 aa, Artificial Sequence
  Description of Artificial Sequence: Synthetic peptide
  Seed: MCSLMQGSTLPRRSGA
MCSLMFGSMLARRSGA

SEQ ID NO: 93390 - protein, 16 aa, Artificial Sequence
  Description of Artificial Sequence: Synthetic peptide
  Seed: MCSLMQGSTLPRRSGA
MCSLMFGSMLARRTGA

SEQ ID NO: 93391 - protein, 16 aa, Artificial Sequence
  Description of Artificial Sequence: Synthetic peptide
  Seed: MCSLMQGSTLPRRSGA
MCSLMFGSMLARRVGA

SEQ ID NO: 93392 - protein, 16 aa, Artificial Sequence
  Description of Artificial Sequence: Synthetic peptide
  Seed: MCSLMQGSTLPRRSGA
MCSLMFGSMLGRRAGA

SEQ ID NO: 93393 - protein, 16 aa, Artificial Sequence
  Description of Artificial Sequence: Synthetic peptide
  Seed: MCSLMQGSTLPRRSGA
MCSLMFGSMLGRRIGA

SEQ ID NO: 93394 - protein, 16 aa, Artificial Sequence
  Description of Artificial Sequence: Synthetic peptide
  Seed: MCSLMQGSTLPRRSGA
MCSLMFGSMLGRRLGA

SEQ ID NO: 93395 - protein, 16 aa, Artificial Sequence
  Description of Artificial Sequence: Synthetic peptide
  Seed: MCSLMQGSTLPRRSGA
MCSLMFGSMLGRRNGA

SEQ ID NO: 93396 - protein, 16 aa, Artificial Sequence
  Description of Artificial Sequence: Synthetic peptide
  Seed: MCSLMQGSTLPRRSGA
MCSLMFGSMLGRRSGA

SEQ ID NO: 93397 - protein, 16 aa, Artificial Sequence
  Description of Artificial Sequence: Synthetic peptide
  Seed: MCSLMQGSTLPRRSGA
MCSLMFGSMLGRRVGA

SEQ ID NO: 93398 - protein, 16 aa, Artificial Sequence
  Description of Artificial Sequence: Synthetic peptide
  Seed: MCSLMQGSTLPRRSGA
MCSLMFGSMLIRRAGA

SEQ ID NO: 93399 - protein, 16 aa, Artificial Sequence
  Description of Artificial Sequence: Synthetic peptide
  Seed: MCSLMQGSTLPRRSGA
MCSLMFGSMLIRRNGA

SEQ ID NO: 93400 - protein, 16 aa, Artificial Sequence
  Description of Artificial Sequence: Synthetic peptide
  Seed: MCSLMQGSTLPRRSGA
MCSLMFGSMLIRRSGA

SEQ ID NO: 93401 - protein, 16 aa, Artificial Sequence
  Description of Artificial Sequence: Synthetic peptide
  Seed: MCSLMQGSTLPRRSGA
MCSLMFGSMLIRRVGA

SEQ ID NO: 93402 - protein, 16 aa, Artificial Sequence
  Description of Artificial Sequence: Synthetic peptide
  Seed: MCSLMQGSTLPRRSGA
MCSLMFGSMLNRRAGA

SEQ ID NO: 93403 - protein, 16 aa, Artificial Sequence
  Description of Artificial Sequence: Synthetic peptide
  Seed: MCSLMQGSTLPRRSGA
MCSLMFGSMLNRRNGA

SEQ ID NO: 93404 - protein, 16 aa, Artificial Sequence
  Description of Artificial Sequence: Synthetic peptide
  Seed: MCSLMQGSTLPRRSGA
MCSLMFGSMLPRRAGA

SEQ ID NO: 93405 - protein, 16 aa, Artificial Sequence
  Description of Artificial Sequence: Synthetic peptide
  Seed: MCSLMQGSTLPRRSGA
MCSLMFGSMLPRRIGA

SEQ ID NO: 93406 - protein, 16 aa, Artificial Sequence
  Description of Artificial Sequence: Synthetic peptide
  Seed: MCSLMQGSTLPRRSGA
MCSLMFGSMLPRRLGA

SEQ ID NO: 93407 - protein, 16 aa, Artificial Sequence
  Description of Artificial Sequence: Synthetic peptide
  Seed: MCSLMQGSTLPRRSGA
MCSLMFGSMLPRRMGA

SEQ ID NO: 93408 - protein, 16 aa, Artificial Sequence
  Description of Artificial Sequence: Synthetic peptide
  Seed: MCSLMQGSTLPRRSGA
MCSLMFGSMLPRRNGA

SEQ ID NO: 93409 - protein, 16 aa, Artificial Sequence
  Description of Artificial Sequence: Synthetic peptide
  Seed: MCSLMQGSTLPRRSGA
MCSLMFGSMLPRRSGA

SEQ ID NO: 93410 - protein, 16 aa, Artificial Sequence
  Description of Artificial Sequence: Synthetic peptide
  Seed: MCSLMQGSTLPRRSGA
MCSLMFGSMLPRRTGA

SEQ ID NO: 93411 - protein, 16 aa, Artificial Sequence
  Description of Artificial Sequence: Synthetic peptide
  Seed: MCSLMQGSTLPRRSGA
MCSLMFGSMLPRRVGA

SEQ ID NO: 93412 - protein, 16 aa, Artificial Sequence
  Description of Artificial Sequence: Synthetic peptide
  Seed: MCSLMQGSTLPRRSGA
MCSLMFGSMLSRRAGA

SEQ ID NO: 93413 - protein, 16 aa, Artificial Sequence
  Description of Artificial Sequence: Synthetic peptide
  Seed: MCSLMQGSTLPRRSGA
MCSLMFGSMLSRRIGA

SEQ ID NO: 93414 - protein, 16 aa, Artificial Sequence
  Description of Artificial Sequence: Synthetic peptide
  Seed: MCSLMQGSTLPRRSGA
MCSLMFGSMLSRRLGA

SEQ ID NO: 93415 - protein, 16 aa, Artificial Sequence
  Description of Artificial Sequence: Synthetic peptide
  Seed: MCSLMQGSTLPRRSGA
MCSLMFGSMLSRRMGA

SEQ ID NO: 93416 - protein, 16 aa, Artificial Sequence
  Description of Artificial Sequence: Synthetic peptide
  Seed: MCSLMQGSTLPRRSGA
MCSLMFGSMLSRRNGA

SEQ ID NO: 93417 - protein, 16 aa, Artificial Sequence
  Description of Artificial Sequence: Synthetic peptide
  Seed: MCSLMQGSTLPRRSGA
MCSLMFGSMLSRRSGA

SEQ ID NO: 93418 - protein, 16 aa, Artificial Sequence
  Description of Artificial Sequence: Synthetic peptide
  Seed: MCSLMQGSTLPRRSGA
MCSLMFGSMLSRRTGA

SEQ ID NO: 93419 - protein, 16 aa, Artificial Sequence
  Description of Artificial Sequence: Synthetic peptide
  Seed: MCSLMQGSTLPRRSGA
MCSLMFGSMLSRRVGA

SEQ ID NO: 93420 - protein, 16 aa, Artificial Sequence
  Description of Artificial Sequence: Synthetic peptide
  Seed: MCSLMQGSTLPRRSGA
MCSLMFGSMLTRRAGA

SEQ ID NO: 93421 - protein, 16 aa, Artificial Sequence
  Description of Artificial Sequence: Synthetic peptide
  Seed: MCSLMQGSTLPRRSGA
MCSLMFGSMLTRRIGA

SEQ ID NO: 93422 - protein, 16 aa, Artificial Sequence
  Description of Artificial Sequence: Synthetic peptide
  Seed: MCSLMQGSTLPRRSGA
MCSLMFGSMLTRRLGA

SEQ ID NO: 93423 - protein, 16 aa, Artificial Sequence
  Description of Artificial Sequence: Synthetic peptide
  Seed: MCSLMQGSTLPRRSGA
MCSLMFGSMLTRRMGA

SEQ ID NO: 93424 - protein, 16 aa, Artificial Sequence
  Description of Artificial Sequence: Synthetic peptide
  Seed: MCSLMQGSTLPRRSGA
MCSLMFGSMLTRRNGA

SEQ ID NO: 93425 - protein, 16 aa, Artificial Sequence
  Description of Artificial Sequence: Synthetic peptide
  Seed: MCSLMQGSTLPRRSGA
MCSLMFGSMLTRRSGA

SEQ ID NO: 93426 - protein, 16 aa, Artificial Sequence
  Description of Artificial Sequence: Synthetic peptide
  Seed: MCSLMQGSTLPRRSGA
MCSLMFGSMLTRRTGA

SEQ ID NO: 93427 - protein, 16 aa, Artificial Sequence
  Description of Artificial Sequence: Synthetic peptide
  Seed: MCSLMQGSTLPRRSGA
MCSLMFGSMLTRRVGA

SEQ ID NO: 93428 - protein, 16 aa, Artificial Sequence
  Description of Artificial Sequence: Synthetic peptide
  Seed: MCSLMQGSTLPRRSGA
MCSLMFGSMLVRRAGA

SEQ ID NO: 93429 - protein, 16 aa, Artificial Sequence
  Description of Artificial Sequence: Synthetic peptide
  Seed: MCSLMQGSTLPRRSGA
MCSLMFGSMLVRRIGA

SEQ ID NO: 93430 - protein, 16 aa, Artificial Sequence
  Description of Artificial Sequence: Synthetic peptide
  Seed: MCSLMQGSTLPRRSGA
MCSLMFGSMLVRRLGA

SEQ ID NO: 93431 - protein, 16 aa, Artificial Sequence
  Description of Artificial Sequence: Synthetic peptide
  Seed: MCSLMQGSTLPRRSGA
MCSLMFGSMLVRRMGA

SEQ ID NO: 93432 - protein, 16 aa, Artificial Sequence
  Description of Artificial Sequence: Synthetic peptide
  Seed: MCSLMQGSTLPRRSGA
MCSLMFGSMLVRRNGA

SEQ ID NO: 93433 - protein, 16 aa, Artificial Sequence
  Description of Artificial Sequence: Synthetic peptide
  Seed: MCSLMQGSTLPRRSGA
MCSLMFGSMLVRRSGA

SEQ ID NO: 93434 - protein, 16 aa, Artificial Sequence
  Description of Artificial Sequence: Synthetic peptide
  Seed: MCSLMQGSTLPRRSGA
MCSLMFGSMLVRRTGA

SEQ ID NO: 93435 - protein, 16 aa, Artificial Sequence
  Description of Artificial Sequence: Synthetic peptide
  Seed: MCSLMQGSTLPRRSGA
MCSLMFGSMLVRRVGA

SEQ ID NO: 93436 - protein, 16 aa, Artificial Sequence
  Description of Artificial Sequence: Synthetic peptide
  Seed: MCSLMQGSTLPRRSGA
MCSLMFGSVLARRAGA

SEQ ID NO: 93437 - protein, 16 aa, Artificial Sequence
  Description of Artificial Sequence: Synthetic peptide
  Seed: MCSLMQGSTLPRRSGA
MCSLMFGSVLARRSGA

SEQ ID NO: 93438 - protein, 16 aa, Artificial Sequence
  Description of Artificial Sequence: Synthetic peptide
  Seed: MCSLMQGSTLPRRSGA
MCSLMFGSVLSRRAGA

SEQ ID NO: 93439 - protein, 16 aa, Artificial Sequence
  Description of Artificial Sequence: Synthetic peptide
  Seed: MCSLMQGSTLPRRSGA
MCSLMIGSALARRAGA

SEQ ID NO: 93440 - protein, 16 aa, Artificial Sequence
  Description of Artificial Sequence: Synthetic peptide
  Seed: MCSLMQGSTLPRRSGA
MCSLMIGSALARRIGA

SEQ ID NO: 93441 - protein, 16 aa, Artificial Sequence
  Description of Artificial Sequence: Synthetic peptide
  Seed: MCSLMQGSTLPRRSGA
MCSLMIGSALARRLGA

SEQ ID NO: 93442 - protein, 16 aa, Artificial Sequence
  Description of Artificial Sequence: Synthetic peptide
  Seed: MCSLMQGSTLPRRSGA
MCSLMIGSALARRMGA

SEQ ID NO: 93443 - protein, 16 aa, Artificial Sequence
  Description of Artificial Sequence: Synthetic peptide
  Seed: MCSLMQGSTLPRRSGA
MCSLMIGSALARRSGA

SEQ ID NO: 93444 - protein, 16 aa, Artificial Sequence
  Description of Artificial Sequence: Synthetic peptide
  Seed: MCSLMQGSTLPRRSGA
MCSLMIGSALARRTGA

SEQ ID NO: 93445 - protein, 16 aa, Artificial Sequence
  Description of Artificial Sequence: Synthetic peptide
  Seed: MCSLMQGSTLPRRSGA
MCSLMIGSALARRVGA

SEQ ID NO: 93446 - protein, 16 aa, Artificial Sequence
  Description of Artificial Sequence: Synthetic peptide
  Seed: MCSLMQGSTLPRRSGA
MCSLMIGSALIRRAGA

SEQ ID NO: 93447 - protein, 16 aa, Artificial Sequence
  Description of Artificial Sequence: Synthetic peptide
  Seed: MCSLMQGSTLPRRSGA
MCSLMIGSALPRRAGA

SEQ ID NO: 93448 - protein, 16 aa, Artificial Sequence
  Description of Artificial Sequence: Synthetic peptide
  Seed: MCSLMQGSTLPRRSGA
MCSLMIGSALPRRVGA

SEQ ID NO: 93449 - protein, 16 aa, Artificial Sequence
  Description of Artificial Sequence: Synthetic peptide
  Seed: MCSLMQGSTLPRRSGA
MCSLMIGSALVRRAGA

SEQ ID NO: 93450 - protein, 16 aa, Artificial Sequence
  Description of Artificial Sequence: Synthetic peptide
  Seed: MCSLMQGSTLPRRSGA
MCSLMIGSALVRRIGA

SEQ ID NO: 93451 - protein, 16 aa, Artificial Sequence
  Description of Artificial Sequence: Synthetic peptide
  Seed: MCSLMQGSTLPRRSGA
MCSLMIGSALVRRSGA

SEQ ID NO: 93452 - protein, 16 aa, Artificial Sequence
  Description of Artificial Sequence: Synthetic peptide
  Seed: MCSLMQGSTLPRRSGA
MCSLMIGSALVRRTGA

SEQ ID NO: 93453 - protein, 16 aa, Artificial Sequence
  Description of Artificial Sequence: Synthetic peptide
  Seed: MCSLMQGSTLPRRSGA
MCSLMIGSALVRRVGA

SEQ ID NO: 93454 - protein, 16 aa, Artificial Sequence
  Description of Artificial Sequence: Synthetic peptide
  Seed: MCSLMQGSTLPRRSGA
MCSLMIGSGLARRAGA

SEQ ID NO: 93455 - protein, 16 aa, Artificial Sequence
  Description of Artificial Sequence: Synthetic peptide
  Seed: MCSLMQGSTLPRRSGA
MCSLMIGSGLARRIGA

SEQ ID NO: 93456 - protein, 16 aa, Artificial Sequence
  Description of Artificial Sequence: Synthetic peptide
  Seed: MCSLMQGSTLPRRSGA
MCSLMIGSGLARRLGA

SEQ ID NO: 93457 - protein, 16 aa, Artificial Sequence
  Description of Artificial Sequence: Synthetic peptide
  Seed: MCSLMQGSTLPRRSGA
MCSLMIGSGLARRMGA

SEQ ID NO: 93458 - protein, 16 aa, Artificial Sequence
  Description of Artificial Sequence: Synthetic peptide
  Seed: MCSLMQGSTLPRRSGA
MCSLMIGSGLARRSGA

SEQ ID NO: 93459 - protein, 16 aa, Artificial Sequence
  Description of Artificial Sequence: Synthetic peptide
  Seed: MCSLMQGSTLPRRSGA
MCSLMIGSGLARRTGA

SEQ ID NO: 93460 - protein, 16 aa, Artificial Sequence
  Description of Artificial Sequence: Synthetic peptide
  Seed: MCSLMQGSTLPRRSGA
MCSLMIGSGLARRVGA

SEQ ID NO: 93461 - protein, 16 aa, Artificial Sequence
  Description of Artificial Sequence: Synthetic peptide
  Seed: MCSLMQGSTLPRRSGA
MCSLMIGSGLIRRAGA

SEQ ID NO: 93462 - protein, 16 aa, Artificial Sequence
  Description of Artificial Sequence: Synthetic peptide
  Seed: MCSLMQGSTLPRRSGA
MCSLMIGSGLIRRVGA

SEQ ID NO: 93463 - protein, 16 aa, Artificial Sequence
  Description of Artificial Sequence: Synthetic peptide
  Seed: MCSLMQGSTLPRRSGA
MCSLMIGSGLPRRAGA

SEQ ID NO: 93464 - protein, 16 aa, Artificial Sequence
  Description of Artificial Sequence: Synthetic peptide
  Seed: MCSLMQGSTLPRRSGA
MCSLMIGSGLPRRVGA

SEQ ID NO: 93465 - protein, 16 aa, Artificial Sequence
  Description of Artificial Sequence: Synthetic peptide
  Seed: MCSLMQGSTLPRRSGA
MCSLMIGSGLVRRAGA

SEQ ID NO: 93466 - protein, 16 aa, Artificial Sequence
  Description of Artificial Sequence: Synthetic peptide
  Seed: MCSLMQGSTLPRRSGA
MCSLMIGSGLVRRIGA

SEQ ID NO: 93467 - protein, 16 aa, Artificial Sequence
  Description of Artificial Sequence: Synthetic peptide
  Seed: MCSLMQGSTLPRRSGA
MCSLMIGSGLVRRSGA

SEQ ID NO: 93468 - protein, 16 aa, Artificial Sequence
  Description of Artificial Sequence: Synthetic peptide
  Seed: MCSLMQGSTLPRRSGA
MCSLMIGSGLVRRTGA

SEQ ID NO: 93469 - protein, 16 aa, Artificial Sequence
  Description of Artificial Sequence: Synthetic peptide
  Seed: MCSLMQGSTLPRRSGA
MCSLMIGSGLVRRVGA

SEQ ID NO: 93470 - protein, 16 aa, Artificial Sequence
  Description of Artificial Sequence: Synthetic peptide
  Seed: MCSLMQGSTLPRRSGA
MCSLMIGSSLARRAGA

SEQ ID NO: 93471 - protein, 16 aa, Artificial Sequence
  Description of Artificial Sequence: Synthetic peptide
  Seed: MCSLMQGSTLPRRSGA
MCSLMIGSSLARRVGA

SEQ ID NO: 93472 - protein, 16 aa, Artificial Sequence
  Description of Artificial Sequence: Synthetic peptide
  Seed: MCSLMQGSTLPRRSGA
MCSLMLGSALARRAGA

SEQ ID NO: 93473 - protein, 16 aa, Artificial Sequence
  Description of Artificial Sequence: Synthetic peptide
  Seed: MCSLMQGSTLPRRSGA
MCSLMLGSALARRSGA

SEQ ID NO: 93474 - protein, 16 aa, Artificial Sequence
  Description of Artificial Sequence: Synthetic peptide
  Seed: MCSLMQGSTLPRRSGA
MCSLMLGSALARRTGA

SEQ ID NO: 93475 - protein, 16 aa, Artificial Sequence
  Description of Artificial Sequence: Synthetic peptide
  Seed: MCSLMQGSTLPRRSGA
MCSLMLGSALARRVGA

SEQ ID NO: 93476 - protein, 16 aa, Artificial Sequence
  Description of Artificial Sequence: Synthetic peptide
  Seed: MCSLMQGSTLPRRSGA
MCSLMLGSGLARRAGA

SEQ ID NO: 93477 - protein, 16 aa, Artificial Sequence
  Description of Artificial Sequence: Synthetic peptide
  Seed: MCSLMQGSTLPRRSGA
MCSLMLGSGLARRVGA

SEQ ID NO: 93478 - protein, 16 aa, Artificial Sequence
  Description of Artificial Sequence: Synthetic peptide
  Seed: MCSLMQGSTLPRRSGA
MCSLMMGSALARRAGA

SEQ ID NO: 93479 - protein, 16 aa, Artificial Sequence
  Description of Artificial Sequence: Synthetic peptide
  Seed: MCSLMQGSTLPRRSGA
MCSLMMGSALARRIGA

SEQ ID NO: 93480 - protein, 16 aa, Artificial Sequence
  Description of Artificial Sequence: Synthetic peptide
  Seed: MCSLMQGSTLPRRSGA
MCSLMMGSALARRSGA

SEQ ID NO: 93481 - protein, 16 aa, Artificial Sequence
  Description of Artificial Sequence: Synthetic peptide
  Seed: MCSLMQGSTLPRRSGA
MCSLMMGSALARRTGA

SEQ ID NO: 93482 - protein, 16 aa, Artificial Sequence
  Description of Artificial Sequence: Synthetic peptide
  Seed: MCSLMQGSTLPRRSGA
MCSLMMGSALARRVGA

SEQ ID NO: 93483 - protein, 16 aa, Artificial Sequence
  Description of Artificial Sequence: Synthetic peptide
  Seed: MCSLMQGSTLPRRSGA
MCSLMMGSALVRRAGA

SEQ ID NO: 93484 - protein, 16 aa, Artificial Sequence
  Description of Artificial Sequence: Synthetic peptide
  Seed: MCSLMQGSTLPRRSGA
MCSLMMGSALVRRVGA

SEQ ID NO: 93485 - protein, 16 aa, Artificial Sequence
  Description of Artificial Sequence: Synthetic peptide
  Seed: MCSLMQGSTLPRRSGA
MCSLMMGSGLARRAGA

SEQ ID NO: 93486 - protein, 16 aa, Artificial Sequence
  Description of Artificial Sequence: Synthetic peptide
  Seed: MCSLMQGSTLPRRSGA
MCSLMMGSGLARRIGA

SEQ ID NO: 93487 - protein, 16 aa, Artificial Sequence
  Description of Artificial Sequence: Synthetic peptide
  Seed: MCSLMQGSTLPRRSGA
MCSLMMGSGLARRVGA

SEQ ID NO: 93488 - protein, 16 aa, Artificial Sequence
  Description of Artificial Sequence: Synthetic peptide
  Seed: MCSLMQGSTLPRRSGA
MCSLMMGSGLVRRAGA

SEQ ID NO: 93489 - protein, 16 aa, Artificial Sequence
  Description of Artificial Sequence: Synthetic peptide
  Seed: MCSLMQGSTLPRRSGA
MCSLMMGSGLVRRVGA

SEQ ID NO: 93490 - protein, 16 aa, Artificial Sequence
  Description of Artificial Sequence: Synthetic peptide
  Seed: MCSLMQGSTLPRRSGA
MCSLMPGSALARRAGA

SEQ ID NO: 93491 - protein, 16 aa, Artificial Sequence
  Description of Artificial Sequence: Synthetic peptide
  Seed: MCSLMQGSTLPRRSGA
MCSLMPGSALARRIGA

SEQ ID NO: 93492 - protein, 16 aa, Artificial Sequence
  Description of Artificial Sequence: Synthetic peptide
  Seed: MCSLMQGSTLPRRSGA
MCSLMPGSALARRSGA

SEQ ID NO: 93493 - protein, 16 aa, Artificial Sequence
  Description of Artificial Sequence: Synthetic peptide
  Seed: MCSLMQGSTLPRRSGA
MCSLMPGSALARRTGA

SEQ ID NO: 93494 - protein, 16 aa, Artificial Sequence
  Description of Artificial Sequence: Synthetic peptide
  Seed: MCSLMQGSTLPRRSGA
MCSLMPGSALARRVGA

SEQ ID NO: 93495 - protein, 16 aa, Artificial Sequence
  Description of Artificial Sequence: Synthetic peptide
  Seed: MCSLMQGSTLPRRSGA
MCSLMPGSALVRRAGA

SEQ ID NO: 93496 - protein, 16 aa, Artificial Sequence
  Description of Artificial Sequence: Synthetic peptide
  Seed: MCSLMQGSTLPRRSGA
MCSLMPGSALVRRSGA

SEQ ID NO: 93497 - protein, 16 aa, Artificial Sequence
  Description of Artificial Sequence: Synthetic peptide
  Seed: MCSLMQGSTLPRRSGA
MCSLMPGSALVRRVGA

SEQ ID NO: 93498 - protein, 16 aa, Artificial Sequence
  Description of Artificial Sequence: Synthetic peptide
  Seed: MCSLMQGSTLPRRSGA
MCSLMPGSGLARRAGA

SEQ ID NO: 93499 - protein, 16 aa, Artificial Sequence
  Description of Artificial Sequence: Synthetic peptide
  Seed: MCSLMQGSTLPRRSGA
MCSLMPGSGLARRIGA

SEQ ID NO: 93500 - protein, 16 aa, Artificial Sequence
  Description of Artificial Sequence: Synthetic peptide
  Seed: MCSLMQGSTLPRRSGA
MCSLMPGSGLARRVGA

SEQ ID NO: 93501 - protein, 16 aa, Artificial Sequence
  Description of Artificial Sequence: Synthetic peptide
  Seed: MCSLMQGSTLPRRSGA
MCSLMPGSGLVRRAGA

SEQ ID NO: 93502 - protein, 16 aa, Artificial Sequence
  Description of Artificial Sequence: Synthetic peptide
  Seed: MCSLMQGSTLPRRSGA
MCSLMPGSGLVRRVGA

SEQ ID NO: 93503 - protein, 16 aa, Artificial Sequence
  Description of Artificial Sequence: Synthetic peptide
  Seed: MCSLMQGSTLPRRSGA
MCSLMTGSALARRVGA

SEQ ID NO: 93504 - protein, 16 aa, Artificial Sequence
  Description of Artificial Sequence: Synthetic peptide
  Seed: MCSLMQGSTLPRRSGA
MCSLMVGSALARRAGA

SEQ ID NO: 93505 - protein, 16 aa, Artificial Sequence
  Description of Artificial Sequence: Synthetic peptide
  Seed: MCSLMQGSTLPRRSGA
MCSLMVGSALARRIGA

SEQ ID NO: 93506 - protein, 16 aa, Artificial Sequence
  Description of Artificial Sequence: Synthetic peptide
  Seed: MCSLMQGSTLPRRSGA
MCSLMVGSALARRSGA

SEQ ID NO: 93507 - protein, 16 aa, Artificial Sequence
  Description of Artificial Sequence: Synthetic peptide
  Seed: MCSLMQGSTLPRRSGA
MCSLMVGSALARRTGA

SEQ ID NO: 93508 - protein, 16 aa, Artificial Sequence
  Description of Artificial Sequence: Synthetic peptide
  Seed: MCSLMQGSTLPRRSGA
MCSLMVGSALARRVGA

SEQ ID NO: 93509 - protein, 16 aa, Artificial Sequence
  Description of Artificial Sequence: Synthetic peptide
  Seed: MCSLMQGSTLPRRSGA
MCSLMVGSALVRRAGA

SEQ ID NO: 93510 - protein, 16 aa, Artificial Sequence
  Description of Artificial Sequence: Synthetic peptide
  Seed: MCSLMQGSTLPRRSGA
MCSLMVGSALVRRVGA

SEQ ID NO: 93511 - protein, 16 aa, Artificial Sequence
  Description of Artificial Sequence: Synthetic peptide
  Seed: MCSLMQGSTLPRRSGA
MCSLMVGSGLARRAGA

SEQ ID NO: 93512 - protein, 16 aa, Artificial Sequence
  Description of Artificial Sequence: Synthetic peptide
  Seed: MCSLMQGSTLPRRSGA
MCSLMVGSGLARRIGA

SEQ ID NO: 93513 - protein, 16 aa, Artificial Sequence
  Description of Artificial Sequence: Synthetic peptide
  Seed: MCSLMQGSTLPRRSGA
MCSLMVGSGLARRSGA

SEQ ID NO: 93514 - protein, 16 aa, Artificial Sequence
  Description of Artificial Sequence: Synthetic peptide
  Seed: MCSLMQGSTLPRRSGA
MCSLMVGSGLARRTGA

SEQ ID NO: 93515 - protein, 16 aa, Artificial Sequence
  Description of Artificial Sequence: Synthetic peptide
  Seed: MCSLMQGSTLPRRSGA
MCSLMVGSGLARRVGA

SEQ ID NO: 93516 - protein, 16 aa, Artificial Sequence
  Description of Artificial Sequence: Synthetic peptide
  Seed: MCSLMQGSTLPRRSGA
MCSLMVGSGLVRRAGA

SEQ ID NO: 93517 - protein, 16 aa, Artificial Sequence
  Description of Artificial Sequence: Synthetic peptide
  Seed: MCSLMQGSTLPRRSGA
MCSLMVGSGLVRRIGA

SEQ ID NO: 93518 - protein, 16 aa, Artificial Sequence
  Description of Artificial Sequence: Synthetic peptide
  Seed: MCSLMQGSTLPRRSGA
MCSLMVGSGLVRRSGA

SEQ ID NO: 93519 - protein, 16 aa, Artificial Sequence
  Description of Artificial Sequence: Synthetic peptide
  Seed: MCSLMQGSTLPRRSGA
MCSLMVGSGLVRRTGA

SEQ ID NO: 93520 - protein, 16 aa, Artificial Sequence
  Description of Artificial Sequence: Synthetic peptide
  Seed: MCSLMQGSTLPRRSGA
MCSLMVGSGLVRRVGA

SEQ ID NO: 93521 - protein, 16 aa, Artificial Sequence
  Description of Artificial Sequence: Synthetic peptide
  Seed: MCSLMQGSTLPRRSGA
MCSLMVGSSLARRAGA

SEQ ID NO: 93522 - protein, 16 aa, Artificial Sequence
  Description of Artificial Sequence: Synthetic peptide
  Seed: MCSLMQGSTLPRRSGA
MCSLMWGSALARRAGA

SEQ ID NO: 93523 - protein, 16 aa, Artificial Sequence
  Description of Artificial Sequence: Synthetic peptide
  Seed: MCSLMQGSTLPRRSGA
MCSLMWGSALARRVGA

SEQ ID NO: 93524 - protein, 16 aa, Artificial Sequence
  Description of Artificial Sequence: Synthetic peptide
  Seed: MCSLMQGSTLPRRSGA
MCSLMWGSGLARRAGA

SEQ ID NO: 93525 - protein, 16 aa, Artificial Sequence
  Description of Artificial Sequence: Synthetic peptide
  Seed: MCSLMQGSTLPRRSGA
MCSLMWGSGLARRVGA

SEQ ID NO: 93526 - protein, 16 aa, Artificial Sequence
  Description of Artificial Sequence: Synthetic peptide
  Seed: MCSLMQGSTLPRRSGA
MCSLMWGSGLVRRAGA

SEQ ID NO: 93527 - protein, 16 aa, Artificial Sequence
  Description of Artificial Sequence: Synthetic peptide
  Seed: MCSLMQGSTLPRRSGA
MCSLMYGSALARRAGA

SEQ ID NO: 93528 - protein, 16 aa, Artificial Sequence
  Description of Artificial Sequence: Synthetic peptide
  Seed: MCSLMQGSTLPRRSGA
MCSLMYGSALARRVGA

SEQ ID NO: 93529 - protein, 16 aa, Artificial Sequence
  Description of Artificial Sequence: Synthetic peptide
  Seed: MCSLMQGSTLPRRSGA
MCSLMYGSGLARRVGA

SEQ ID NO: 93530 - protein, 16 aa, Artificial Sequence
  Description of Artificial Sequence: Synthetic peptide
  Seed: MCSLMQGSTLPRRSGA
MCSLMYGSILARRAGA

SEQ ID NO: 93531 - protein, 16 aa, Artificial Sequence
  Description of Artificial Sequence: Synthetic peptide
  Seed: MCSLMQGSTLPRRSGA
MCSLMYGSILARRIGA

SEQ ID NO: 93532 - protein, 16 aa, Artificial Sequence
  Description of Artificial Sequence: Synthetic peptide
  Seed: MCSLMQGSTLPRRSGA
MCSLMYGSILARRLGA

SEQ ID NO: 93533 - protein, 16 aa, Artificial Sequence
  Description of Artificial Sequence: Synthetic peptide
  Seed: MCSLMQGSTLPRRSGA
MCSLMYGSILARRNGA

SEQ ID NO: 93534 - protein, 16 aa, Artificial Sequence
  Description of Artificial Sequence: Synthetic peptide
  Seed: MCSLMQGSTLPRRSGA
MCSLMYGSILARRSGA

SEQ ID NO: 93535 - protein, 16 aa, Artificial Sequence
  Description of Artificial Sequence: Synthetic peptide
  Seed: MCSLMQGSTLPRRSGA
MCSLMYGSILARRVGA

SEQ ID NO: 93536 - protein, 16 aa, Artificial Sequence
  Description of Artificial Sequence: Synthetic peptide
  Seed: MCSLMQGSTLPRRSGA
MCSLMYGSILPRRAGA

SEQ ID NO: 93537 - protein, 16 aa, Artificial Sequence
  Description of Artificial Sequence: Synthetic peptide
  Seed: MCSLMQGSTLPRRSGA
MCSLMYGSILSRRAGA

SEQ ID NO: 93538 - protein, 16 aa, Artificial Sequence
  Description of Artificial Sequence: Synthetic peptide
  Seed: MCSLMQGSTLPRRSGA
MCSLMYGSILSRRVGA

SEQ ID NO: 93539 - protein, 16 aa, Artificial Sequence
  Description of Artificial Sequence: Synthetic peptide
  Seed: MCSLMQGSTLPRRSGA
MCSLMYGSILTRRAGA

SEQ ID NO: 93540 - protein, 16 aa, Artificial Sequence
  Description of Artificial Sequence: Synthetic peptide
  Seed: MCSLMQGSTLPRRSGA
MCSLMYGSILTRRVGA

SEQ ID NO: 93541 - protein, 16 aa, Artificial Sequence
  Description of Artificial Sequence: Synthetic peptide
  Seed: MCSLMQGSTLPRRSGA
MCSLMYGSILVRRAGA

SEQ ID NO: 93542 - protein, 16 aa, Artificial Sequence
  Description of Artificial Sequence: Synthetic peptide
  Seed: MCSLMQGSTLPRRSGA
MCSLMYGSLLARRAGA

SEQ ID NO: 93543 - protein, 16 aa, Artificial Sequence
  Description of Artificial Sequence: Synthetic peptide
  Seed: MCSLMQGSTLPRRSGA
MCSLMYGSLLARRIGA

SEQ ID NO: 93544 - protein, 16 aa, Artificial Sequence
  Description of Artificial Sequence: Synthetic peptide
  Seed: MCSLMQGSTLPRRSGA
MCSLMYGSLLARRLGA

SEQ ID NO: 93545 - protein, 16 aa, Artificial Sequence
  Description of Artificial Sequence: Synthetic peptide
  Seed: MCSLMQGSTLPRRSGA
MCSLMYGSLLARRMGA

SEQ ID NO: 93546 - protein, 16 aa, Artificial Sequence
  Description of Artificial Sequence: Synthetic peptide
  Seed: MCSLMQGSTLPRRSGA
MCSLMYGSLLARRNGA

SEQ ID NO: 93547 - protein, 16 aa, Artificial Sequence
  Description of Artificial Sequence: Synthetic peptide
  Seed: MCSLMQGSTLPRRSGA
MCSLMYGSLLARRSGA

SEQ ID NO: 93548 - protein, 16 aa, Artificial Sequence
  Description of Artificial Sequence: Synthetic peptide
  Seed: MCSLMQGSTLPRRSGA
MCSLMYGSLLARRTGA

SEQ ID NO: 93549 - protein, 16 aa, Artificial Sequence
  Description of Artificial Sequence: Synthetic peptide
  Seed: MCSLMQGSTLPRRSGA
MCSLMYGSLLARRVGA

SEQ ID NO: 93550 - protein, 16 aa, Artificial Sequence
  Description of Artificial Sequence: Synthetic peptide
  Seed: MCSLMQGSTLPRRSGA
MCSLMYGSLLPRRAGA

SEQ ID NO: 93551 - protein, 16 aa, Artificial Sequence
  Description of Artificial Sequence: Synthetic peptide
  Seed: MCSLMQGSTLPRRSGA
MCSLMYGSLLPRRIGA

SEQ ID NO: 93552 - protein, 16 aa, Artificial Sequence
  Description of Artificial Sequence: Synthetic peptide
  Seed: MCSLMQGSTLPRRSGA
MCSLMYGSLLPRRVGA

SEQ ID NO: 93553 - protein, 16 aa, Artificial Sequence
  Description of Artificial Sequence: Synthetic peptide
  Seed: MCSLMQGSTLPRRSGA
MCSLMYGSLLSRRAGA

SEQ ID NO: 93554 - protein, 16 aa, Artificial Sequence
  Description of Artificial Sequence: Synthetic peptide
  Seed: MCSLMQGSTLPRRSGA
MCSLMYGSLLSRRIGA

SEQ ID NO: 93555 - protein, 16 aa, Artificial Sequence
  Description of Artificial Sequence: Synthetic peptide
  Seed: MCSLMQGSTLPRRSGA
MCSLMYGSLLSRRLGA

SEQ ID NO: 93556 - protein, 16 aa, Artificial Sequence
  Description of Artificial Sequence: Synthetic peptide
  Seed: MCSLMQGSTLPRRSGA
MCSLMYGSLLSRRNGA

SEQ ID NO: 93557 - protein, 16 aa, Artificial Sequence
  Description of Artificial Sequence: Synthetic peptide
  Seed: MCSLMQGSTLPRRSGA
MCSLMYGSLLSRRSGA

SEQ ID NO: 93558 - protein, 16 aa, Artificial Sequence
  Description of Artificial Sequence: Synthetic peptide
  Seed: MCSLMQGSTLPRRSGA
MCSLMYGSLLSRRTGA

SEQ ID NO: 93559 - protein, 16 aa, Artificial Sequence
  Description of Artificial Sequence: Synthetic peptide
  Seed: MCSLMQGSTLPRRSGA
MCSLMYGSLLSRRVGA

SEQ ID NO: 93560 - protein, 16 aa, Artificial Sequence
  Description of Artificial Sequence: Synthetic peptide
  Seed: MCSLMQGSTLPRRSGA
MCSLMYGSLLTRRAGA

SEQ ID NO: 93561 - protein, 16 aa, Artificial Sequence
  Description of Artificial Sequence: Synthetic peptide
  Seed: MCSLMQGSTLPRRSGA
MCSLMYGSLLTRRIGA

SEQ ID NO: 93562 - protein, 16 aa, Artificial Sequence
  Description of Artificial Sequence: Synthetic peptide
  Seed: MCSLMQGSTLPRRSGA
MCSLMYGSLLTRRLGA

SEQ ID NO: 93563 - protein, 16 aa, Artificial Sequence
  Description of Artificial Sequence: Synthetic peptide
  Seed: MCSLMQGSTLPRRSGA
MCSLMYGSLLTRRVGA

SEQ ID NO: 93564 - protein, 16 aa, Artificial Sequence
  Description of Artificial Sequence: Synthetic peptide
  Seed: MCSLMQGSTLPRRSGA
MCSLMYGSLLVRRAGA

SEQ ID NO: 93565 - protein, 16 aa, Artificial Sequence
  Description of Artificial Sequence: Synthetic peptide
  Seed: MCSLMQGSTLPRRSGA
MCSLMYGSLLVRRVGA

SEQ ID NO: 93566 - protein, 16 aa, Artificial Sequence
  Description of Artificial Sequence: Synthetic peptide
  Seed: MCSLMQGSTLPRRSGA
MCSLMYGSMLARRAGA

SEQ ID NO: 93567 - protein, 16 aa, Artificial Sequence
  Description of Artificial Sequence: Synthetic peptide
  Seed: MCSLMQGSTLPRRSGA
MCSLMYGSMLARRIGA

SEQ ID NO: 93568 - protein, 16 aa, Artificial Sequence
  Description of Artificial Sequence: Synthetic peptide
  Seed: MCSLMQGSTLPRRSGA
MCSLMYGSMLARRLGA

SEQ ID NO: 93569 - protein, 16 aa, Artificial Sequence
  Description of Artificial Sequence: Synthetic peptide
  Seed: MCSLMQGSTLPRRSGA
MCSLMYGSMLARRMGA

SEQ ID NO: 93570 - protein, 16 aa, Artificial Sequence
  Description of Artificial Sequence: Synthetic peptide
  Seed: MCSLMQGSTLPRRSGA
MCSLMYGSMLARRNGA

SEQ ID NO: 93571 - protein, 16 aa, Artificial Sequence
  Description of Artificial Sequence: Synthetic peptide
  Seed: MCSLMQGSTLPRRSGA
MCSLMYGSMLARRSGA

SEQ ID NO: 93572 - protein, 16 aa, Artificial Sequence
  Description of Artificial Sequence: Synthetic peptide
  Seed: MCSLMQGSTLPRRSGA
MCSLMYGSMLARRTGA

SEQ ID NO: 93573 - protein, 16 aa, Artificial Sequence
  Description of Artificial Sequence: Synthetic peptide
  Seed: MCSLMQGSTLPRRSGA
MCSLMYGSMLARRVGA

SEQ ID NO: 93574 - protein, 16 aa, Artificial Sequence
  Description of Artificial Sequence: Synthetic peptide
  Seed: MCSLMQGSTLPRRSGA
MCSLMYGSMLPRRAGA

SEQ ID NO: 93575 - protein, 16 aa, Artificial Sequence
  Description of Artificial Sequence: Synthetic peptide
  Seed: MCSLMQGSTLPRRSGA
MCSLMYGSMLPRRIGA

SEQ ID NO: 93576 - protein, 16 aa, Artificial Sequence
  Description of Artificial Sequence: Synthetic peptide
  Seed: MCSLMQGSTLPRRSGA
MCSLMYGSMLPRRLGA

SEQ ID NO: 93577 - protein, 16 aa, Artificial Sequence
  Description of Artificial Sequence: Synthetic peptide
  Seed: MCSLMQGSTLPRRSGA
MCSLMYGSMLPRRVGA

SEQ ID NO: 93578 - protein, 16 aa, Artificial Sequence
  Description of Artificial Sequence: Synthetic peptide
  Seed: MCSLMQGSTLPRRSGA
MCSLMYGSMLSRRAGA

SEQ ID NO: 93579 - protein, 16 aa, Artificial Sequence
  Description of Artificial Sequence: Synthetic peptide
  Seed: MCSLMQGSTLPRRSGA
MCSLMYGSMLSRRIGA

SEQ ID NO: 93580 - protein, 16 aa, Artificial Sequence
  Description of Artificial Sequence: Synthetic peptide
  Seed: MCSLMQGSTLPRRSGA
MCSLMYGSMLSRRLGA

SEQ ID NO: 93581 - protein, 16 aa, Artificial Sequence
  Description of Artificial Sequence: Synthetic peptide
  Seed: MCSLMQGSTLPRRSGA
MCSLMYGSMLSRRMGA

SEQ ID NO: 93582 - protein, 16 aa, Artificial Sequence
  Description of Artificial Sequence: Synthetic peptide
  Seed: MCSLMQGSTLPRRSGA
MCSLMYGSMLSRRNGA

SEQ ID NO: 93583 - protein, 16 aa, Artificial Sequence
  Description of Artificial Sequence: Synthetic peptide
  Seed: MCSLMQGSTLPRRSGA
MCSLMYGSMLSRRSGA

SEQ ID NO: 93584 - protein, 16 aa, Artificial Sequence
  Description of Artificial Sequence: Synthetic peptide
  Seed: MCSLMQGSTLPRRSGA
MCSLMYGSMLSRRTGA

SEQ ID NO: 93585 - protein, 16 aa, Artificial Sequence
  Description of Artificial Sequence: Synthetic peptide
  Seed: MCSLMQGSTLPRRSGA
MCSLMYGSMLSRRVGA

SEQ ID NO: 93586 - protein, 16 aa, Artificial Sequence
  Description of Artificial Sequence: Synthetic peptide
  Seed: MCSLMQGSTLPRRSGA
MCSLMYGSMLTRRAGA

SEQ ID NO: 93587 - protein, 16 aa, Artificial Sequence
  Description of Artificial Sequence: Synthetic peptide
  Seed: MCSLMQGSTLPRRSGA
MCSLMYGSMLTRRIGA

SEQ ID NO: 93588 - protein, 16 aa, Artificial Sequence
  Description of Artificial Sequence: Synthetic peptide
  Seed: MCSLMQGSTLPRRSGA
MCSLMYGSMLTRRLGA

SEQ ID NO: 93589 - protein, 16 aa, Artificial Sequence
  Description of Artificial Sequence: Synthetic peptide
  Seed: MCSLMQGSTLPRRSGA
MCSLMYGSMLTRRNGA

SEQ ID NO: 93590 - protein, 16 aa, Artificial Sequence
  Description of Artificial Sequence: Synthetic peptide
  Seed: MCSLMQGSTLPRRSGA
MCSLMYGSMLTRRVGA

SEQ ID NO: 93591 - protein, 16 aa, Artificial Sequence
  Description of Artificial Sequence: Synthetic peptide
  Seed: MCSLMQGSTLPRRSGA
MCSLMYGSMLVRRAGA

SEQ ID NO: 93592 - protein, 16 aa, Artificial Sequence
  Description of Artificial Sequence: Synthetic peptide
  Seed: MCSLMQGSTLPRRSGA
MCSLMYGSMLVRRIGA

SEQ ID NO: 93593 - protein, 16 aa, Artificial Sequence
  Description of Artificial Sequence: Synthetic peptide
  Seed: MCSLMQGSTLPRRSGA
MCSLMYGSMLVRRLGA

SEQ ID NO: 93594 - protein, 16 aa, Artificial Sequence
  Description of Artificial Sequence: Synthetic peptide
  Seed: MCSLMQGSTLPRRSGA
MCSLMYGSMLVRRNGA

SEQ ID NO: 93595 - protein, 16 aa, Artificial Sequence
  Description of Artificial Sequence: Synthetic peptide
  Seed: MCSLMQGSTLPRRSGA
MCSLMYGSMLVRRSGA

SEQ ID NO: 93596 - protein, 16 aa, Artificial Sequence
  Description of Artificial Sequence: Synthetic peptide
  Seed: MCSLMQGSTLPRRSGA
MCSLMYGSMLVRRVGA

SEQ ID NO: 93597 - protein, 17 aa, Artificial Sequence
  Description of Artificial Sequence: Synthetic peptide
  Seed: MCSLMQGSTLPRRSGAA
MCSLMQISTIPRRSGAA

SEQ ID NO: 93598 - protein, 17 aa, Artificial Sequence
  Description of Artificial Sequence: Synthetic peptide
  Seed: MCSLMQGSTLPRRSGAA
MCSLMQISTLPRRSGAA

SEQ ID NO: 93599 - protein, 17 aa, Artificial Sequence
  Description of Artificial Sequence: Synthetic peptide
  Seed: MCSLMQGSTLPRRSGAA
MCSLMQISTMPRRSGAA

SEQ ID NO: 93600 - protein, 17 aa, Artificial Sequence
  Description of Artificial Sequence: Synthetic peptide
  Seed: MCSLMQGSTLPRRSGAA
MCSLMQLSTIPRRSGAA

SEQ ID NO: 93601 - protein, 17 aa, Artificial Sequence
  Description of Artificial Sequence: Synthetic peptide
  Seed: MCSLMQGSTLPRRSGAA
MCSLMQLSTLPRRSGAA

SEQ ID NO: 93602 - protein, 17 aa, Artificial Sequence
  Description of Artificial Sequence: Synthetic peptide
  Seed: MCSLMQGSTLPRRSGAA
MCSLMQLSTMPRRSGAA

SEQ ID NO: 93603 - protein, 17 aa, Artificial Sequence
  Description of Artificial Sequence: Synthetic peptide
  Seed: MCSLMQGSTLPRRSGAA
MFSLAQASTAPRRSGAA

SEQ ID NO: 93604 - protein, 17 aa, Artificial Sequence
  Description of Artificial Sequence: Synthetic peptide
  Seed: MCSLMQGSTLPRRSGAA
MFSLAQASTIPRRSGAA

SEQ ID NO: 93605 - protein, 17 aa, Artificial Sequence
  Description of Artificial Sequence: Synthetic peptide
  Seed: MCSLMQGSTLPRRSGAA
MFSLAQASTLPRRSGAA

SEQ ID NO: 93606 - protein, 17 aa, Artificial Sequence
  Description of Artificial Sequence: Synthetic peptide
  Seed: MCSLMQGSTLPRRSGAA
MFSLAQASTVPRRSGAA

SEQ ID NO: 93607 - protein, 17 aa, Artificial Sequence
  Description of Artificial Sequence: Synthetic peptide
  Seed: MCSLMQGSTLPRRSGAA
MFSLAQGSTIPRRSGAA

SEQ ID NO: 93608 - protein, 17 aa, Artificial Sequence
  Description of Artificial Sequence: Synthetic peptide
  Seed: MCSLMQGSTLPRRSGAA
MFSLAQGSTLPRRSGAA

SEQ ID NO: 93609 - protein, 17 aa, Artificial Sequence
  Description of Artificial Sequence: Synthetic peptide
  Seed: MCSLMQGSTLPRRSGAA
MFSLAQGSTVPRRSGAA

SEQ ID NO: 93610 - protein, 17 aa, Artificial Sequence
  Description of Artificial Sequence: Synthetic peptide
  Seed: MCSLMQGSTLPRRSGAA
MFSLAQSSTIPRRSGAA

SEQ ID NO: 93611 - protein, 17 aa, Artificial Sequence
  Description of Artificial Sequence: Synthetic peptide
  Seed: MCSLMQGSTLPRRSGAA
MFSLAQSSTLPRRSGAA

SEQ ID NO: 93612 - protein, 17 aa, Artificial Sequence
  Description of Artificial Sequence: Synthetic peptide
  Seed: MCSLMQGSTLPRRSGAA
MFSLAQSSTVPRRSGAA

SEQ ID NO: 93613 - protein, 17 aa, Artificial Sequence
  Description of Artificial Sequence: Synthetic peptide
  Seed: MCSLMQGSTLPRRSGAA
MFSLIQASTAPRRSGAA

SEQ ID NO: 93614 - protein, 17 aa, Artificial Sequence
  Description of Artificial Sequence: Synthetic peptide
  Seed: MCSLMQGSTLPRRSGAA
MFSLIQASTIPRRSGAA

SEQ ID NO: 93615 - protein, 17 aa, Artificial Sequence
  Description of Artificial Sequence: Synthetic peptide
  Seed: MCSLMQGSTLPRRSGAA
MFSLIQASTLPRRSGAA

SEQ ID NO: 93616 - protein, 17 aa, Artificial Sequence
  Description of Artificial Sequence: Synthetic peptide
  Seed: MCSLMQGSTLPRRSGAA
MFSLIQASTMPRRSGAA

SEQ ID NO: 93617 - protein, 17 aa, Artificial Sequence
  Description of Artificial Sequence: Synthetic peptide
  Seed: MCSLMQGSTLPRRSGAA
MFSLIQASTSPRRSGAA

SEQ ID NO: 93618 - protein, 17 aa, Artificial Sequence
  Description of Artificial Sequence: Synthetic peptide
  Seed: MCSLMQGSTLPRRSGAA
MFSLIQASTTPRRSGAA

SEQ ID NO: 93619 - protein, 17 aa, Artificial Sequence
  Description of Artificial Sequence: Synthetic peptide
  Seed: MCSLMQGSTLPRRSGAA
MFSLIQASTVPRRSGAA

SEQ ID NO: 93620 - protein, 17 aa, Artificial Sequence
  Description of Artificial Sequence: Synthetic peptide
  Seed: MCSLMQGSTLPRRSGAA
MFSLIQGSTAPRRSGAA

SEQ ID NO: 93621 - protein, 17 aa, Artificial Sequence
  Description of Artificial Sequence: Synthetic peptide
  Seed: MCSLMQGSTLPRRSGAA
MFSLIQGSTIPRRSGAA

SEQ ID NO: 93622 - protein, 17 aa, Artificial Sequence
  Description of Artificial Sequence: Synthetic peptide
  Seed: MCSLMQGSTLPRRSGAA
MFSLIQGSTLPRRSGAA

SEQ ID NO: 93623 - protein, 17 aa, Artificial Sequence
  Description of Artificial Sequence: Synthetic peptide
  Seed: MCSLMQGSTLPRRSGAA
MFSLIQGSTMPRRSGAA

SEQ ID NO: 93624 - protein, 17 aa, Artificial Sequence
  Description of Artificial Sequence: Synthetic peptide
  Seed: MCSLMQGSTLPRRSGAA
MFSLIQGSTVPRRSGAA

SEQ ID NO: 93625 - protein, 17 aa, Artificial Sequence
  Description of Artificial Sequence: Synthetic peptide
  Seed: MCSLMQGSTLPRRSGAA
MFSLIQPSTAPRRSGAA

SEQ ID NO: 93626 - protein, 17 aa, Artificial Sequence
  Description of Artificial Sequence: Synthetic peptide
  Seed: MCSLMQGSTLPRRSGAA
MFSLIQPSTIPRRSGAA

SEQ ID NO: 93627 - protein, 17 aa, Artificial Sequence
  Description of Artificial Sequence: Synthetic peptide
  Seed: MCSLMQGSTLPRRSGAA
MFSLIQPSTLPRRSGAA

SEQ ID NO: 93628 - protein, 17 aa, Artificial Sequence
  Description of Artificial Sequence: Synthetic peptide
  Seed: MCSLMQGSTLPRRSGAA
MFSLIQPSTVPRRSGAA

SEQ ID NO: 93629 - protein, 17 aa, Artificial Sequence
  Description of Artificial Sequence: Synthetic peptide
  Seed: MCSLMQGSTLPRRSGAA
MFSLIQSSTIPRRSGAA

SEQ ID NO: 93630 - protein, 17 aa, Artificial Sequence
  Description of Artificial Sequence: Synthetic peptide
  Seed: MCSLMQGSTLPRRSGAA
MFSLIQSSTLPRRSGAA

SEQ ID NO: 93631 - protein, 17 aa, Artificial Sequence
  Description of Artificial Sequence: Synthetic peptide
  Seed: MCSLMQGSTLPRRSGAA
MFSLIQSSTVPRRSGAA

SEQ ID NO: 93632 - protein, 17 aa, Artificial Sequence
  Description of Artificial Sequence: Synthetic peptide
  Seed: MCSLMQGSTLPRRSGAA
MFSLLQASTAPRRSGAA

SEQ ID NO: 93633 - protein, 17 aa, Artificial Sequence
  Description of Artificial Sequence: Synthetic peptide
  Seed: MCSLMQGSTLPRRSGAA
MFSLLQASTGPRRSGAA

SEQ ID NO: 93634 - protein, 17 aa, Artificial Sequence
  Description of Artificial Sequence: Synthetic peptide
  Seed: MCSLMQGSTLPRRSGAA
MFSLLQASTIPRRSGAA

SEQ ID NO: 93635 - protein, 17 aa, Artificial Sequence
  Description of Artificial Sequence: Synthetic peptide
  Seed: MCSLMQGSTLPRRSGAA
MFSLLQASTLPRRSGAA

SEQ ID NO: 93636 - protein, 17 aa, Artificial Sequence
  Description of Artificial Sequence: Synthetic peptide
  Seed: MCSLMQGSTLPRRSGAA
MFSLLQASTMPRRSGAA

SEQ ID NO: 93637 - protein, 17 aa, Artificial Sequence
  Description of Artificial Sequence: Synthetic peptide
  Seed: MCSLMQGSTLPRRSGAA
MFSLLQASTSPRRSGAA

SEQ ID NO: 93638 - protein, 17 aa, Artificial Sequence
  Description of Artificial Sequence: Synthetic peptide
  Seed: MCSLMQGSTLPRRSGAA
MFSLLQASTTPRRSGAA

SEQ ID NO: 93639 - protein, 17 aa, Artificial Sequence
  Description of Artificial Sequence: Synthetic peptide
  Seed: MCSLMQGSTLPRRSGAA
MFSLLQASTVPRRSGAA

SEQ ID NO: 93640 - protein, 17 aa, Artificial Sequence
  Description of Artificial Sequence: Synthetic peptide
  Seed: MCSLMQGSTLPRRSGAA
MFSLLQGSTAPRRSGAA

SEQ ID NO: 93641 - protein, 17 aa, Artificial Sequence
  Description of Artificial Sequence: Synthetic peptide
  Seed: MCSLMQGSTLPRRSGAA
MFSLLQGSTGPRRSGAA

SEQ ID NO: 93642 - protein, 17 aa, Artificial Sequence
  Description of Artificial Sequence: Synthetic peptide
  Seed: MCSLMQGSTLPRRSGAA
MFSLLQGSTIPRRSGAA

SEQ ID NO: 93643 - protein, 17 aa, Artificial Sequence
  Description of Artificial Sequence: Synthetic peptide
  Seed: MCSLMQGSTLPRRSGAA
MFSLLQGSTLPRRSGAA

SEQ ID NO: 93644 - protein, 17 aa, Artificial Sequence
  Description of Artificial Sequence: Synthetic peptide
  Seed: MCSLMQGSTLPRRSGAA
MFSLLQGSTMPRRSGAA

SEQ ID NO: 93645 - protein, 17 aa, Artificial Sequence
  Description of Artificial Sequence: Synthetic peptide
  Seed: MCSLMQGSTLPRRSGAA
MFSLLQGSTSPRRSGAA

SEQ ID NO: 93646 - protein, 17 aa, Artificial Sequence
  Description of Artificial Sequence: Synthetic peptide
  Seed: MCSLMQGSTLPRRSGAA
MFSLLQGSTTPRRSGAA

SEQ ID NO: 93647 - protein, 17 aa, Artificial Sequence
  Description of Artificial Sequence: Synthetic peptide
  Seed: MCSLMQGSTLPRRSGAA
MFSLLQGSTVPRRSGAA

SEQ ID NO: 93648 - protein, 17 aa, Artificial Sequence
  Description of Artificial Sequence: Synthetic peptide
  Seed: MCSLMQGSTLPRRSGAA
MFSLLQNSTAPRRSGAA

SEQ ID NO: 93649 - protein, 17 aa, Artificial Sequence
  Description of Artificial Sequence: Synthetic peptide
  Seed: MCSLMQGSTLPRRSGAA
MFSLLQNSTIPRRSGAA

SEQ ID NO: 93650 - protein, 17 aa, Artificial Sequence
  Description of Artificial Sequence: Synthetic peptide
  Seed: MCSLMQGSTLPRRSGAA
MFSLLQNSTLPRRSGAA

SEQ ID NO: 93651 - protein, 17 aa, Artificial Sequence
  Description of Artificial Sequence: Synthetic peptide
  Seed: MCSLMQGSTLPRRSGAA
MFSLLQNSTVPRRSGAA

SEQ ID NO: 93652 - protein, 17 aa, Artificial Sequence
  Description of Artificial Sequence: Synthetic peptide
  Seed: MCSLMQGSTLPRRSGAA
MFSLLQPSTAPRRSGAA

SEQ ID NO: 93653 - protein, 17 aa, Artificial Sequence
  Description of Artificial Sequence: Synthetic peptide
  Seed: MCSLMQGSTLPRRSGAA
MFSLLQPSTIPRRSGAA

SEQ ID NO: 93654 - protein, 17 aa, Artificial Sequence
  Description of Artificial Sequence: Synthetic peptide
  Seed: MCSLMQGSTLPRRSGAA
MFSLLQPSTLPRRSGAA

SEQ ID NO: 93655 - protein, 17 aa, Artificial Sequence
  Description of Artificial Sequence: Synthetic peptide
  Seed: MCSLMQGSTLPRRSGAA
MFSLLQPSTMPRRSGAA

SEQ ID NO: 93656 - protein, 17 aa, Artificial Sequence
  Description of Artificial Sequence: Synthetic peptide
  Seed: MCSLMQGSTLPRRSGAA
MFSLLQPSTSPRRSGAA

SEQ ID NO: 93657 - protein, 17 aa, Artificial Sequence
  Description of Artificial Sequence: Synthetic peptide
  Seed: MCSLMQGSTLPRRSGAA
MFSLLQPSTTPRRSGAA

SEQ ID NO: 93658 - protein, 17 aa, Artificial Sequence
  Description of Artificial Sequence: Synthetic peptide
  Seed: MCSLMQGSTLPRRSGAA
MFSLLQPSTVPRRSGAA

SEQ ID NO: 93659 - protein, 17 aa, Artificial Sequence
  Description of Artificial Sequence: Synthetic peptide
  Seed: MCSLMQGSTLPRRSGAA
MFSLLQSSTAPRRSGAA

SEQ ID NO: 93660 - protein, 17 aa, Artificial Sequence
  Description of Artificial Sequence: Synthetic peptide
  Seed: MCSLMQGSTLPRRSGAA
MFSLLQSSTIPRRSGAA

SEQ ID NO: 93661 - protein, 17 aa, Artificial Sequence
  Description of Artificial Sequence: Synthetic peptide
  Seed: MCSLMQGSTLPRRSGAA
MFSLLQSSTLPRRSGAA

SEQ ID NO: 93662 - protein, 17 aa, Artificial Sequence
  Description of Artificial Sequence: Synthetic peptide
  Seed: MCSLMQGSTLPRRSGAA
MFSLLQSSTMPRRSGAA

SEQ ID NO: 93663 - protein, 17 aa, Artificial Sequence
  Description of Artificial Sequence: Synthetic peptide
  Seed: MCSLMQGSTLPRRSGAA
MFSLLQSSTSPRRSGAA

SEQ ID NO: 93664 - protein, 17 aa, Artificial Sequence
  Description of Artificial Sequence: Synthetic peptide
  Seed: MCSLMQGSTLPRRSGAA
MFSLLQSSTTPRRSGAA

SEQ ID NO: 93665 - protein, 17 aa, Artificial Sequence
  Description of Artificial Sequence: Synthetic peptide
  Seed: MCSLMQGSTLPRRSGAA
MFSLLQSSTVPRRSGAA

SEQ ID NO: 93666 - protein, 17 aa, Artificial Sequence
  Description of Artificial Sequence: Synthetic peptide
  Seed: MCSLMQGSTLPRRSGAA
MFSLLQTSTAPRRSGAA

SEQ ID NO: 93667 - protein, 17 aa, Artificial Sequence
  Description of Artificial Sequence: Synthetic peptide
  Seed: MCSLMQGSTLPRRSGAA
MFSLLQTSTIPRRSGAA

SEQ ID NO: 93668 - protein, 17 aa, Artificial Sequence
  Description of Artificial Sequence: Synthetic peptide
  Seed: MCSLMQGSTLPRRSGAA
MFSLLQTSTLPRRSGAA

SEQ ID NO: 93669 - protein, 17 aa, Artificial Sequence
  Description of Artificial Sequence: Synthetic peptide
  Seed: MCSLMQGSTLPRRSGAA
MFSLLQTSTVPRRSGAA

SEQ ID NO: 93670 - protein, 17 aa, Artificial Sequence
  Description of Artificial Sequence: Synthetic peptide
  Seed: MCSLMQGSTLPRRSGAA
MFSLLQVSTAPRRSGAA

SEQ ID NO: 93671 - protein, 17 aa, Artificial Sequence
  Description of Artificial Sequence: Synthetic peptide
  Seed: MCSLMQGSTLPRRSGAA
MFSLLQVSTVPRRSGAA

SEQ ID NO: 93672 - protein, 17 aa, Artificial Sequence
  Description of Artificial Sequence: Synthetic peptide
  Seed: MCSLMQGSTLPRRSGAA
MFSLMQASTAPRRSGAA

SEQ ID NO: 93673 - protein, 17 aa, Artificial Sequence
  Description of Artificial Sequence: Synthetic peptide
  Seed: MCSLMQGSTLPRRSGAA
MFSLMQASTGPRRSGAA

SEQ ID NO: 93674 - protein, 17 aa, Artificial Sequence
  Description of Artificial Sequence: Synthetic peptide
  Seed: MCSLMQGSTLPRRSGAA
MFSLMQASTIPRRSGAA

SEQ ID NO: 93675 - protein, 17 aa, Artificial Sequence
  Description of Artificial Sequence: Synthetic peptide
  Seed: MCSLMQGSTLPRRSGAA
MFSLMQASTLPRRSGAA

SEQ ID NO: 93676 - protein, 17 aa, Artificial Sequence
  Description of Artificial Sequence: Synthetic peptide
  Seed: MCSLMQGSTLPRRSGAA
MFSLMQASTMPRRSGAA

SEQ ID NO: 93677 - protein, 17 aa, Artificial Sequence
  Description of Artificial Sequence: Synthetic peptide
  Seed: MCSLMQGSTLPRRSGAA
MFSLMQASTSPRRSGAA

SEQ ID NO: 93678 - protein, 17 aa, Artificial Sequence
  Description of Artificial Sequence: Synthetic peptide
  Seed: MCSLMQGSTLPRRSGAA
MFSLMQASTTPRRSGAA

SEQ ID NO: 93679 - protein, 17 aa, Artificial Sequence
  Description of Artificial Sequence: Synthetic peptide
  Seed: MCSLMQGSTLPRRSGAA
MFSLMQASTVPRRSGAA

SEQ ID NO: 93680 - protein, 17 aa, Artificial Sequence
  Description of Artificial Sequence: Synthetic peptide
  Seed: MCSLMQGSTLPRRSGAA
MFSLMQGSTAPRRSGAA

SEQ ID NO: 93681 - protein, 17 aa, Artificial Sequence
  Description of Artificial Sequence: Synthetic peptide
  Seed: MCSLMQGSTLPRRSGAA
MFSLMQGSTIPRRSGAA

SEQ ID NO: 93682 - protein, 17 aa, Artificial Sequence
  Description of Artificial Sequence: Synthetic peptide
  Seed: MCSLMQGSTLPRRSGAA
MFSLMQGSTLPRRSGAA

SEQ ID NO: 93683 - protein, 17 aa, Artificial Sequence
  Description of Artificial Sequence: Synthetic peptide
  Seed: MCSLMQGSTLPRRSGAA
MFSLMQGSTMPRRSGAA

SEQ ID NO: 93684 - protein, 17 aa, Artificial Sequence
  Description of Artificial Sequence: Synthetic peptide
  Seed: MCSLMQGSTLPRRSGAA
MFSLMQGSTSPRRSGAA

SEQ ID NO: 93685 - protein, 17 aa, Artificial Sequence
  Description of Artificial Sequence: Synthetic peptide
  Seed: MCSLMQGSTLPRRSGAA
MFSLMQGSTTPRRSGAA

SEQ ID NO: 93686 - protein, 17 aa, Artificial Sequence
  Description of Artificial Sequence: Synthetic peptide
  Seed: MCSLMQGSTLPRRSGAA
MFSLMQGSTVPRRSGAA

SEQ ID NO: 93687 - protein, 17 aa, Artificial Sequence
  Description of Artificial Sequence: Synthetic peptide
  Seed: MCSLMQGSTLPRRSGAA
MFSLMQNSTAPRRSGAA

SEQ ID NO: 93688 - protein, 17 aa, Artificial Sequence
  Description of Artificial Sequence: Synthetic peptide
  Seed: MCSLMQGSTLPRRSGAA
MFSLMQNSTIPRRSGAA

SEQ ID NO: 93689 - protein, 17 aa, Artificial Sequence
  Description of Artificial Sequence: Synthetic peptide
  Seed: MCSLMQGSTLPRRSGAA
MFSLMQNSTLPRRSGAA

SEQ ID NO: 93690 - protein, 17 aa, Artificial Sequence
  Description of Artificial Sequence: Synthetic peptide
  Seed: MCSLMQGSTLPRRSGAA
MFSLMQNSTVPRRSGAA

SEQ ID NO: 93691 - protein, 17 aa, Artificial Sequence
  Description of Artificial Sequence: Synthetic peptide
  Seed: MCSLMQGSTLPRRSGAA
MFSLMQPSTAPRRSGAA

SEQ ID NO: 93692 - protein, 17 aa, Artificial Sequence
  Description of Artificial Sequence: Synthetic peptide
  Seed: MCSLMQGSTLPRRSGAA
MFSLMQPSTIPRRSGAA

SEQ ID NO: 93693 - protein, 17 aa, Artificial Sequence
  Description of Artificial Sequence: Synthetic peptide
  Seed: MCSLMQGSTLPRRSGAA
MFSLMQPSTLPRRSGAA

SEQ ID NO: 93694 - protein, 17 aa, Artificial Sequence
  Description of Artificial Sequence: Synthetic peptide
  Seed: MCSLMQGSTLPRRSGAA
MFSLMQPSTMPRRSGAA

SEQ ID NO: 93695 - protein, 17 aa, Artificial Sequence
  Description of Artificial Sequence: Synthetic peptide
  Seed: MCSLMQGSTLPRRSGAA
MFSLMQPSTSPRRSGAA

SEQ ID NO: 93696 - protein, 17 aa, Artificial Sequence
  Description of Artificial Sequence: Synthetic peptide
  Seed: MCSLMQGSTLPRRSGAA
MFSLMQPSTTPRRSGAA

SEQ ID NO: 93697 - protein, 17 aa, Artificial Sequence
  Description of Artificial Sequence: Synthetic peptide
  Seed: MCSLMQGSTLPRRSGAA
MFSLMQPSTVPRRSGAA

SEQ ID NO: 93698 - protein, 17 aa, Artificial Sequence
  Description of Artificial Sequence: Synthetic peptide
  Seed: MCSLMQGSTLPRRSGAA
MFSLMQSSTAPRRSGAA

SEQ ID NO: 93699 - protein, 17 aa, Artificial Sequence
  Description of Artificial Sequence: Synthetic peptide
  Seed: MCSLMQGSTLPRRSGAA
MFSLMQSSTIPRRSGAA

SEQ ID NO: 93700 - protein, 17 aa, Artificial Sequence
  Description of Artificial Sequence: Synthetic peptide
  Seed: MCSLMQGSTLPRRSGAA
MFSLMQSSTLPRRSGAA

SEQ ID NO: 93701 - protein, 17 aa, Artificial Sequence
  Description of Artificial Sequence: Synthetic peptide
  Seed: MCSLMQGSTLPRRSGAA
MFSLMQSSTMPRRSGAA

SEQ ID NO: 93702 - protein, 17 aa, Artificial Sequence
  Description of Artificial Sequence: Synthetic peptide
  Seed: MCSLMQGSTLPRRSGAA
MFSLMQSSTSPRRSGAA

SEQ ID NO: 93703 - protein, 17 aa, Artificial Sequence
  Description of Artificial Sequence: Synthetic peptide
  Seed: MCSLMQGSTLPRRSGAA
MFSLMQSSTTPRRSGAA

SEQ ID NO: 93704 - protein, 17 aa, Artificial Sequence
  Description of Artificial Sequence: Synthetic peptide
  Seed: MCSLMQGSTLPRRSGAA
MFSLMQSSTVPRRSGAA

SEQ ID NO: 93705 - protein, 17 aa, Artificial Sequence
  Description of Artificial Sequence: Synthetic peptide
  Seed: MCSLMQGSTLPRRSGAA
MFSLMQTSTAPRRSGAA

SEQ ID NO: 93706 - protein, 17 aa, Artificial Sequence
  Description of Artificial Sequence: Synthetic peptide
  Seed: MCSLMQGSTLPRRSGAA
MFSLMQTSTIPRRSGAA

SEQ ID NO: 93707 - protein, 17 aa, Artificial Sequence
  Description of Artificial Sequence: Synthetic peptide
  Seed: MCSLMQGSTLPRRSGAA
MFSLMQTSTLPRRSGAA

SEQ ID NO: 93708 - protein, 17 aa, Artificial Sequence
  Description of Artificial Sequence: Synthetic peptide
  Seed: MCSLMQGSTLPRRSGAA
MFSLMQTSTVPRRSGAA

SEQ ID NO: 93709 - protein, 17 aa, Artificial Sequence
  Description of Artificial Sequence: Synthetic peptide
  Seed: MCSLMQGSTLPRRSGAA
MFSLMQVSTAPRRSGAA

SEQ ID NO: 93710 - protein, 17 aa, Artificial Sequence
  Description of Artificial Sequence: Synthetic peptide
  Seed: MCSLMQGSTLPRRSGAA
MFSLMQVSTVPRRSGAA

SEQ ID NO: 93711 - protein, 17 aa, Artificial Sequence
  Description of Artificial Sequence: Synthetic peptide
  Seed: MCSLMQGSTLPRRSGAA
MFSLQQASTAPRRSGAA

SEQ ID NO: 93712 - protein, 17 aa, Artificial Sequence
  Description of Artificial Sequence: Synthetic peptide
  Seed: MCSLMQGSTLPRRSGAA
MFSLQQASTIPRRSGAA

SEQ ID NO: 93713 - protein, 17 aa, Artificial Sequence
  Description of Artificial Sequence: Synthetic peptide
  Seed: MCSLMQGSTLPRRSGAA
MFSLQQASTLPRRSGAA

SEQ ID NO: 93714 - protein, 17 aa, Artificial Sequence
  Description of Artificial Sequence: Synthetic peptide
  Seed: MCSLMQGSTLPRRSGAA
MFSLQQASTVPRRSGAA

SEQ ID NO: 93715 - protein, 17 aa, Artificial Sequence
  Description of Artificial Sequence: Synthetic peptide
  Seed: MCSLMQGSTLPRRSGAA
MFSLQQGSTIPRRSGAA

SEQ ID NO: 93716 - protein, 17 aa, Artificial Sequence
  Description of Artificial Sequence: Synthetic peptide
  Seed: MCSLMQGSTLPRRSGAA
MFSLQQGSTLPRRSGAA

SEQ ID NO: 93717 - protein, 17 aa, Artificial Sequence
  Description of Artificial Sequence: Synthetic peptide
  Seed: MCSLMQGSTLPRRSGAA
MFSLQQGSTVPRRSGAA

SEQ ID NO: 93718 - protein, 17 aa, Artificial Sequence
  Description of Artificial Sequence: Synthetic peptide
  Seed: MCSLMQGSTLPRRSGAA
MFSLVQASTAPRRSGAA

SEQ ID NO: 93719 - protein, 17 aa, Artificial Sequence
  Description of Artificial Sequence: Synthetic peptide
  Seed: MCSLMQGSTLPRRSGAA
MFSLVQASTIPRRSGAA

SEQ ID NO: 93720 - protein, 17 aa, Artificial Sequence
  Description of Artificial Sequence: Synthetic peptide
  Seed: MCSLMQGSTLPRRSGAA
MFSLVQASTLPRRSGAA

SEQ ID NO: 93721 - protein, 17 aa, Artificial Sequence
  Description of Artificial Sequence: Synthetic peptide
  Seed: MCSLMQGSTLPRRSGAA
MFSLVQASTVPRRSGAA

SEQ ID NO: 93722 - protein, 17 aa, Artificial Sequence
  Description of Artificial Sequence: Synthetic peptide
  Seed: MCSLMQGSTLPRRSGAA
MFSLVQGSTIPRRSGAA

SEQ ID NO: 93723 - protein, 17 aa, Artificial Sequence
  Description of Artificial Sequence: Synthetic peptide
  Seed: MCSLMQGSTLPRRSGAA
MFSLVQGSTLPRRSGAA

SEQ ID NO: 93724 - protein, 17 aa, Artificial Sequence
  Description of Artificial Sequence: Synthetic peptide
  Seed: MCSLMQGSTLPRRSGAA
MFSLVQGSTVPRRSGAA

SEQ ID NO: 93725 - protein, 17 aa, Artificial Sequence
  Description of Artificial Sequence: Synthetic peptide
  Seed: MCSLMQGSTLPRRSGAA
MFSLVQSSTVPRRSGAA

SEQ ID NO: 93726 - protein, 17 aa, Artificial Sequence
  Description of Artificial Sequence: Synthetic peptide
  Seed: MCSLMQGSTLPRRSGAA
MISLLQASTAPRRSGAA

SEQ ID NO: 93727 - protein, 17 aa, Artificial Sequence
  Description of Artificial Sequence: Synthetic peptide
  Seed: MCSLMQGSTLPRRSGAA
MISLLQASTIPRRSGAA

SEQ ID NO: 93728 - protein, 17 aa, Artificial Sequence
  Description of Artificial Sequence: Synthetic peptide
  Seed: MCSLMQGSTLPRRSGAA
MISLLQASTLPRRSGAA

SEQ ID NO: 93729 - protein, 17 aa, Artificial Sequence
  Description of Artificial Sequence: Synthetic peptide
  Seed: MCSLMQGSTLPRRSGAA
MISLLQASTVPRRSGAA

SEQ ID NO: 93730 - protein, 17 aa, Artificial Sequence
  Description of Artificial Sequence: Synthetic peptide
  Seed: MCSLMQGSTLPRRSGAA
MISLLQGSTAPRRSGAA

SEQ ID NO: 93731 - protein, 17 aa, Artificial Sequence
  Description of Artificial Sequence: Synthetic peptide
  Seed: MCSLMQGSTLPRRSGAA
MISLLQGSTIPRRSGAA

SEQ ID NO: 93732 - protein, 17 aa, Artificial Sequence
  Description of Artificial Sequence: Synthetic peptide
  Seed: MCSLMQGSTLPRRSGAA
MISLLQGSTLPRRSGAA

SEQ ID NO: 93733 - protein, 17 aa, Artificial Sequence
  Description of Artificial Sequence: Synthetic peptide
  Seed: MCSLMQGSTLPRRSGAA
MISLLQGSTVPRRSGAA

SEQ ID NO: 93734 - protein, 17 aa, Artificial Sequence
  Description of Artificial Sequence: Synthetic peptide
  Seed: MCSLMQGSTLPRRSGAA
MISLLQPSTVPRRSGAA

SEQ ID NO: 93735 - protein, 17 aa, Artificial Sequence
  Description of Artificial Sequence: Synthetic peptide
  Seed: MCSLMQGSTLPRRSGAA
MISLLQSSTAPRRSGAA

SEQ ID NO: 93736 - protein, 17 aa, Artificial Sequence
  Description of Artificial Sequence: Synthetic peptide
  Seed: MCSLMQGSTLPRRSGAA
MISLLQSSTIPRRSGAA

SEQ ID NO: 93737 - protein, 17 aa, Artificial Sequence
  Description of Artificial Sequence: Synthetic peptide
  Seed: MCSLMQGSTLPRRSGAA
MISLLQSSTLPRRSGAA

SEQ ID NO: 93738 - protein, 17 aa, Artificial Sequence
  Description of Artificial Sequence: Synthetic peptide
  Seed: MCSLMQGSTLPRRSGAA
MISLLQSSTVPRRSGAA

SEQ ID NO: 93739 - protein, 17 aa, Artificial Sequence
  Description of Artificial Sequence: Synthetic peptide
  Seed: MCSLMQGSTLPRRSGAA
MISLMQASTAPRRSGAA

SEQ ID NO: 93740 - protein, 17 aa, Artificial Sequence
  Description of Artificial Sequence: Synthetic peptide
  Seed: MCSLMQGSTLPRRSGAA
MISLMQASTIPRRSGAA

SEQ ID NO: 93741 - protein, 17 aa, Artificial Sequence
  Description of Artificial Sequence: Synthetic peptide
  Seed: MCSLMQGSTLPRRSGAA
MISLMQASTLPRRSGAA

SEQ ID NO: 93742 - protein, 17 aa, Artificial Sequence
  Description of Artificial Sequence: Synthetic peptide
  Seed: MCSLMQGSTLPRRSGAA
MISLMQASTVPRRSGAA

SEQ ID NO: 93743 - protein, 17 aa, Artificial Sequence
  Description of Artificial Sequence: Synthetic peptide
  Seed: MCSLMQGSTLPRRSGAA
MISLMQGSTAPRRSGAA

SEQ ID NO: 93744 - protein, 17 aa, Artificial Sequence
  Description of Artificial Sequence: Synthetic peptide
  Seed: MCSLMQGSTLPRRSGAA
MISLMQGSTIPRRSGAA

SEQ ID NO: 93745 - protein, 17 aa, Artificial Sequence
  Description of Artificial Sequence: Synthetic peptide
  Seed: MCSLMQGSTLPRRSGAA
MISLMQGSTLPRRSGAA

SEQ ID NO: 93746 - protein, 17 aa, Artificial Sequence
  Description of Artificial Sequence: Synthetic peptide
  Seed: MCSLMQGSTLPRRSGAA
MISLMQGSTVPRRSGAA

SEQ ID NO: 93747 - protein, 17 aa, Artificial Sequence
  Description of Artificial Sequence: Synthetic peptide
  Seed: MCSLMQGSTLPRRSGAA
MISLMQSSTLPRRSGAA

SEQ ID NO: 93748 - protein, 17 aa, Artificial Sequence
  Description of Artificial Sequence: Synthetic peptide
  Seed: MCSLMQGSTLPRRSGAA
MISLMQSSTVPRRSGAA

SEQ ID NO: 93749 - protein, 17 aa, Artificial Sequence
  Description of Artificial Sequence: Synthetic peptide
  Seed: MCSLMQGSTLPRRSGAA
MLSLLQASTAPRRSGAA

SEQ ID NO: 93750 - protein, 17 aa, Artificial Sequence
  Description of Artificial Sequence: Synthetic peptide
  Seed: MCSLMQGSTLPRRSGAA
MLSLLQASTIPRRSGAA

SEQ ID NO: 93751 - protein, 17 aa, Artificial Sequence
  Description of Artificial Sequence: Synthetic peptide
  Seed: MCSLMQGSTLPRRSGAA
MLSLLQASTLPRRSGAA

SEQ ID NO: 93752 - protein, 17 aa, Artificial Sequence
  Description of Artificial Sequence: Synthetic peptide
  Seed: MCSLMQGSTLPRRSGAA
MLSLLQASTVPRRSGAA

SEQ ID NO: 93753 - protein, 17 aa, Artificial Sequence
  Description of Artificial Sequence: Synthetic peptide
  Seed: MCSLMQGSTLPRRSGAA
MLSLLQGSTAPRRSGAA

SEQ ID NO: 93754 - protein, 17 aa, Artificial Sequence
  Description of Artificial Sequence: Synthetic peptide
  Seed: MCSLMQGSTLPRRSGAA
MLSLLQGSTIPRRSGAA

SEQ ID NO: 93755 - protein, 17 aa, Artificial Sequence
  Description of Artificial Sequence: Synthetic peptide
  Seed: MCSLMQGSTLPRRSGAA
MLSLLQGSTLPRRSGAA

SEQ ID NO: 93756 - protein, 17 aa, Artificial Sequence
  Description of Artificial Sequence: Synthetic peptide
  Seed: MCSLMQGSTLPRRSGAA
MLSLLQGSTVPRRSGAA

SEQ ID NO: 93757 - protein, 17 aa, Artificial Sequence
  Description of Artificial Sequence: Synthetic peptide
  Seed: MCSLMQGSTLPRRSGAA
MLSLMQASTAPRRSGAA

SEQ ID NO: 93758 - protein, 17 aa, Artificial Sequence
  Description of Artificial Sequence: Synthetic peptide
  Seed: MCSLMQGSTLPRRSGAA
MLSLMQASTIPRRSGAA

SEQ ID NO: 93759 - protein, 17 aa, Artificial Sequence
  Description of Artificial Sequence: Synthetic peptide
  Seed: MCSLMQGSTLPRRSGAA
MLSLMQASTLPRRSGAA

SEQ ID NO: 93760 - protein, 17 aa, Artificial Sequence
  Description of Artificial Sequence: Synthetic peptide
  Seed: MCSLMQGSTLPRRSGAA
MLSLMQASTVPRRSGAA

SEQ ID NO: 93761 - protein, 17 aa, Artificial Sequence
  Description of Artificial Sequence: Synthetic peptide
  Seed: MCSLMQGSTLPRRSGAA
MLSLMQGSTAPRRSGAA

SEQ ID NO: 93762 - protein, 17 aa, Artificial Sequence
  Description of Artificial Sequence: Synthetic peptide
  Seed: MCSLMQGSTLPRRSGAA
MLSLMQGSTIPRRSGAA

SEQ ID NO: 93763 - protein, 17 aa, Artificial Sequence
  Description of Artificial Sequence: Synthetic peptide
  Seed: MCSLMQGSTLPRRSGAA
MLSLMQGSTLPRRSGAA

SEQ ID NO: 93764 - protein, 17 aa, Artificial Sequence
  Description of Artificial Sequence: Synthetic peptide
  Seed: MCSLMQGSTLPRRSGAA
MLSLMQGSTVPRRSGAA

SEQ ID NO: 93765 - protein, 17 aa, Artificial Sequence
  Description of Artificial Sequence: Synthetic peptide
  Seed: MCSLMQGSTLPRRSGAA
MWSLIQASTVPRRSGAA

SEQ ID NO: 93766 - protein, 17 aa, Artificial Sequence
  Description of Artificial Sequence: Synthetic peptide
  Seed: MCSLMQGSTLPRRSGAA
MWSLLQASTAPRRSGAA

SEQ ID NO: 93767 - protein, 17 aa, Artificial Sequence
  Description of Artificial Sequence: Synthetic peptide
  Seed: MCSLMQGSTLPRRSGAA
MWSLLQASTIPRRSGAA

SEQ ID NO: 93768 - protein, 17 aa, Artificial Sequence
  Description of Artificial Sequence: Synthetic peptide
  Seed: MCSLMQGSTLPRRSGAA
MWSLLQASTLPRRSGAA

SEQ ID NO: 93769 - protein, 17 aa, Artificial Sequence
  Description of Artificial Sequence: Synthetic peptide
  Seed: MCSLMQGSTLPRRSGAA
MWSLLQASTVPRRSGAA

SEQ ID NO: 93770 - protein, 17 aa, Artificial Sequence
  Description of Artificial Sequence: Synthetic peptide
  Seed: MCSLMQGSTLPRRSGAA
MWSLLQGSTAPRRSGAA

SEQ ID NO: 93771 - protein, 17 aa, Artificial Sequence
  Description of Artificial Sequence: Synthetic peptide
  Seed: MCSLMQGSTLPRRSGAA
MWSLLQGSTIPRRSGAA

SEQ ID NO: 93772 - protein, 17 aa, Artificial Sequence
  Description of Artificial Sequence: Synthetic peptide
  Seed: MCSLMQGSTLPRRSGAA
MWSLLQGSTLPRRSGAA

SEQ ID NO: 93773 - protein, 17 aa, Artificial Sequence
  Description of Artificial Sequence: Synthetic peptide
  Seed: MCSLMQGSTLPRRSGAA
MWSLLQGSTVPRRSGAA

SEQ ID NO: 93774 - protein, 17 aa, Artificial Sequence
  Description of Artificial Sequence: Synthetic peptide
  Seed: MCSLMQGSTLPRRSGAA
MWSLLQPSTVPRRSGAA

SEQ ID NO: 93775 - protein, 17 aa, Artificial Sequence
  Description of Artificial Sequence: Synthetic peptide
  Seed: MCSLMQGSTLPRRSGAA
MWSLLQSSTAPRRSGAA

SEQ ID NO: 93776 - protein, 17 aa, Artificial Sequence
  Description of Artificial Sequence: Synthetic peptide
  Seed: MCSLMQGSTLPRRSGAA
MWSLLQSSTIPRRSGAA

SEQ ID NO: 93777 - protein, 17 aa, Artificial Sequence
  Description of Artificial Sequence: Synthetic peptide
  Seed: MCSLMQGSTLPRRSGAA
MWSLLQSSTLPRRSGAA

SEQ ID NO: 93778 - protein, 17 aa, Artificial Sequence
  Description of Artificial Sequence: Synthetic peptide
  Seed: MCSLMQGSTLPRRSGAA
MWSLLQSSTVPRRSGAA

SEQ ID NO: 93779 - protein, 17 aa, Artificial Sequence
  Description of Artificial Sequence: Synthetic peptide
  Seed: MCSLMQGSTLPRRSGAA
MWSLMQASTAPRRSGAA

SEQ ID NO: 93780 - protein, 17 aa, Artificial Sequence
  Description of Artificial Sequence: Synthetic peptide
  Seed: MCSLMQGSTLPRRSGAA
MWSLMQASTIPRRSGAA

SEQ ID NO: 93781 - protein, 17 aa, Artificial Sequence
  Description of Artificial Sequence: Synthetic peptide
  Seed: MCSLMQGSTLPRRSGAA
MWSLMQASTLPRRSGAA

SEQ ID NO: 93782 - protein, 17 aa, Artificial Sequence
  Description of Artificial Sequence: Synthetic peptide
  Seed: MCSLMQGSTLPRRSGAA
MWSLMQASTVPRRSGAA

SEQ ID NO: 93783 - protein, 17 aa, Artificial Sequence
  Description of Artificial Sequence: Synthetic peptide
  Seed: MCSLMQGSTLPRRSGAA
MWSLMQGSTAPRRSGAA

SEQ ID NO: 93784 - protein, 17 aa, Artificial Sequence
  Description of Artificial Sequence: Synthetic peptide
  Seed: MCSLMQGSTLPRRSGAA
MWSLMQGSTIPRRSGAA

SEQ ID NO: 93785 - protein, 17 aa, Artificial Sequence
  Description of Artificial Sequence: Synthetic peptide
  Seed: MCSLMQGSTLPRRSGAA
MWSLMQGSTLPRRSGAA

SEQ ID NO: 93786 - protein, 17 aa, Artificial Sequence
  Description of Artificial Sequence: Synthetic peptide
  Seed: MCSLMQGSTLPRRSGAA
MWSLMQGSTVPRRSGAA

SEQ ID NO: 93787 - protein, 17 aa, Artificial Sequence
  Description of Artificial Sequence: Synthetic peptide
  Seed: MCSLMQGSTLPRRSGAA
MWSLMQPSTVPRRSGAA

SEQ ID NO: 93788 - protein, 17 aa, Artificial Sequence
  Description of Artificial Sequence: Synthetic peptide
  Seed: MCSLMQGSTLPRRSGAA
MWSLMQSSTAPRRSGAA

SEQ ID NO: 93789 - protein, 17 aa, Artificial Sequence
  Description of Artificial Sequence: Synthetic peptide
  Seed: MCSLMQGSTLPRRSGAA
MWSLMQSSTIPRRSGAA

SEQ ID NO: 93790 - protein, 17 aa, Artificial Sequence
  Description of Artificial Sequence: Synthetic peptide
  Seed: MCSLMQGSTLPRRSGAA
MWSLMQSSTLPRRSGAA

SEQ ID NO: 93791 - protein, 17 aa, Artificial Sequence
  Description of Artificial Sequence: Synthetic peptide
  Seed: MCSLMQGSTLPRRSGAA
MWSLMQSSTVPRRSGAA

SEQ ID NO: 93792 - protein, 17 aa, Artificial Sequence
  Description of Artificial Sequence: Synthetic peptide
  Seed: MCSLMQGSTLPRRSGAA
MYSLAQASTAPRRSGAA

SEQ ID NO: 93793 - protein, 17 aa, Artificial Sequence
  Description of Artificial Sequence: Synthetic peptide
  Seed: MCSLMQGSTLPRRSGAA
MYSLAQASTIPRRSGAA

SEQ ID NO: 93794 - protein, 17 aa, Artificial Sequence
  Description of Artificial Sequence: Synthetic peptide
  Seed: MCSLMQGSTLPRRSGAA
MYSLAQASTLPRRSGAA

SEQ ID NO: 93795 - protein, 17 aa, Artificial Sequence
  Description of Artificial Sequence: Synthetic peptide
  Seed: MCSLMQGSTLPRRSGAA
MYSLAQASTVPRRSGAA

SEQ ID NO: 93796 - protein, 17 aa, Artificial Sequence
  Description of Artificial Sequence: Synthetic peptide
  Seed: MCSLMQGSTLPRRSGAA
MYSLIQASTAPRRSGAA

SEQ ID NO: 93797 - protein, 17 aa, Artificial Sequence
  Description of Artificial Sequence: Synthetic peptide
  Seed: MCSLMQGSTLPRRSGAA
MYSLIQASTIPRRSGAA

SEQ ID NO: 93798 - protein, 17 aa, Artificial Sequence
  Description of Artificial Sequence: Synthetic peptide
  Seed: MCSLMQGSTLPRRSGAA
MYSLIQASTLPRRSGAA

SEQ ID NO: 93799 - protein, 17 aa, Artificial Sequence
  Description of Artificial Sequence: Synthetic peptide
  Seed: MCSLMQGSTLPRRSGAA
MYSLIQASTMPRRSGAA

SEQ ID NO: 93800 - protein, 17 aa, Artificial Sequence
  Description of Artificial Sequence: Synthetic peptide
  Seed: MCSLMQGSTLPRRSGAA
MYSLIQASTTPRRSGAA

SEQ ID NO: 93801 - protein, 17 aa, Artificial Sequence
  Description of Artificial Sequence: Synthetic peptide
  Seed: MCSLMQGSTLPRRSGAA
MYSLIQASTVPRRSGAA

SEQ ID NO: 93802 - protein, 17 aa, Artificial Sequence
  Description of Artificial Sequence: Synthetic peptide
  Seed: MCSLMQGSTLPRRSGAA
MYSLIQGSTAPRRSGAA

SEQ ID NO: 93803 - protein, 17 aa, Artificial Sequence
  Description of Artificial Sequence: Synthetic peptide
  Seed: MCSLMQGSTLPRRSGAA
MYSLIQGSTIPRRSGAA

SEQ ID NO: 93804 - protein, 17 aa, Artificial Sequence
  Description of Artificial Sequence: Synthetic peptide
  Seed: MCSLMQGSTLPRRSGAA
MYSLIQGSTLPRRSGAA

SEQ ID NO: 93805 - protein, 17 aa, Artificial Sequence
  Description of Artificial Sequence: Synthetic peptide
  Seed: MCSLMQGSTLPRRSGAA
MYSLIQGSTVPRRSGAA

SEQ ID NO: 93806 - protein, 17 aa, Artificial Sequence
  Description of Artificial Sequence: Synthetic peptide
  Seed: MCSLMQGSTLPRRSGAA
MYSLIQPSTIPRRSGAA

SEQ ID NO: 93807 - protein, 17 aa, Artificial Sequence
  Description of Artificial Sequence: Synthetic peptide
  Seed: MCSLMQGSTLPRRSGAA
MYSLIQPSTVPRRSGAA

SEQ ID NO: 93808 - protein, 17 aa, Artificial Sequence
  Description of Artificial Sequence: Synthetic peptide
  Seed: MCSLMQGSTLPRRSGAA
MYSLIQSSTIPRRSGAA

SEQ ID NO: 93809 - protein, 17 aa, Artificial Sequence
  Description of Artificial Sequence: Synthetic peptide
  Seed: MCSLMQGSTLPRRSGAA
MYSLIQSSTLPRRSGAA

SEQ ID NO: 93810 - protein, 17 aa, Artificial Sequence
  Description of Artificial Sequence: Synthetic peptide
  Seed: MCSLMQGSTLPRRSGAA
MYSLIQSSTVPRRSGAA

SEQ ID NO: 93811 - protein, 17 aa, Artificial Sequence
  Description of Artificial Sequence: Synthetic peptide
  Seed: MCSLMQGSTLPRRSGAA
MYSLLQASTAPRRSGAA

SEQ ID NO: 93812 - protein, 17 aa, Artificial Sequence
  Description of Artificial Sequence: Synthetic peptide
  Seed: MCSLMQGSTLPRRSGAA
MYSLLQASTIPRRSGAA

SEQ ID NO: 93813 - protein, 17 aa, Artificial Sequence
  Description of Artificial Sequence: Synthetic peptide
  Seed: MCSLMQGSTLPRRSGAA
MYSLLQASTLPRRSGAA

SEQ ID NO: 93814 - protein, 17 aa, Artificial Sequence
  Description of Artificial Sequence: Synthetic peptide
  Seed: MCSLMQGSTLPRRSGAA
MYSLLQASTMPRRSGAA

SEQ ID NO: 93815 - protein, 17 aa, Artificial Sequence
  Description of Artificial Sequence: Synthetic peptide
  Seed: MCSLMQGSTLPRRSGAA
MYSLLQASTSPRRSGAA

SEQ ID NO: 93816 - protein, 17 aa, Artificial Sequence
  Description of Artificial Sequence: Synthetic peptide
  Seed: MCSLMQGSTLPRRSGAA
MYSLLQASTTPRRSGAA

SEQ ID NO: 93817 - protein, 17 aa, Artificial Sequence
  Description of Artificial Sequence: Synthetic peptide
  Seed: MCSLMQGSTLPRRSGAA
MYSLLQASTVPRRSGAA

SEQ ID NO: 93818 - protein, 17 aa, Artificial Sequence
  Description of Artificial Sequence: Synthetic peptide
  Seed: MCSLMQGSTLPRRSGAA
MYSLLQGSTAPRRSGAA

SEQ ID NO: 93819 - protein, 17 aa, Artificial Sequence
  Description of Artificial Sequence: Synthetic peptide
  Seed: MCSLMQGSTLPRRSGAA
MYSLLQGSTIPRRSGAA

SEQ ID NO: 93820 - protein, 17 aa, Artificial Sequence
  Description of Artificial Sequence: Synthetic peptide
  Seed: MCSLMQGSTLPRRSGAA
MYSLLQGSTLPRRSGAA

SEQ ID NO: 93821 - protein, 17 aa, Artificial Sequence
  Description of Artificial Sequence: Synthetic peptide
  Seed: MCSLMQGSTLPRRSGAA
MYSLLQGSTMPRRSGAA

SEQ ID NO: 93822 - protein, 17 aa, Artificial Sequence
  Description of Artificial Sequence: Synthetic peptide
  Seed: MCSLMQGSTLPRRSGAA
MYSLLQGSTSPRRSGAA

SEQ ID NO: 93823 - protein, 17 aa, Artificial Sequence
  Description of Artificial Sequence: Synthetic peptide
  Seed: MCSLMQGSTLPRRSGAA
MYSLLQGSTTPRRSGAA

SEQ ID NO: 93824 - protein, 17 aa, Artificial Sequence
  Description of Artificial Sequence: Synthetic peptide
  Seed: MCSLMQGSTLPRRSGAA
MYSLLQGSTVPRRSGAA

SEQ ID NO: 93825 - protein, 17 aa, Artificial Sequence
  Description of Artificial Sequence: Synthetic peptide
  Seed: MCSLMQGSTLPRRSGAA
MYSLLQNSTIPRRSGAA

SEQ ID NO: 93826 - protein, 17 aa, Artificial Sequence
  Description of Artificial Sequence: Synthetic peptide
  Seed: MCSLMQGSTLPRRSGAA
MYSLLQNSTLPRRSGAA

SEQ ID NO: 93827 - protein, 17 aa, Artificial Sequence
  Description of Artificial Sequence: Synthetic peptide
  Seed: MCSLMQGSTLPRRSGAA
MYSLLQNSTVPRRSGAA

SEQ ID NO: 93828 - protein, 17 aa, Artificial Sequence
  Description of Artificial Sequence: Synthetic peptide
  Seed: MCSLMQGSTLPRRSGAA
MYSLLQPSTAPRRSGAA

SEQ ID NO: 93829 - protein, 17 aa, Artificial Sequence
  Description of Artificial Sequence: Synthetic peptide
  Seed: MCSLMQGSTLPRRSGAA
MYSLLQPSTIPRRSGAA

SEQ ID NO: 93830 - protein, 17 aa, Artificial Sequence
  Description of Artificial Sequence: Synthetic peptide
  Seed: MCSLMQGSTLPRRSGAA
MYSLLQPSTLPRRSGAA

SEQ ID NO: 93831 - protein, 17 aa, Artificial Sequence
  Description of Artificial Sequence: Synthetic peptide
  Seed: MCSLMQGSTLPRRSGAA
MYSLLQPSTMPRRSGAA

SEQ ID NO: 93832 - protein, 17 aa, Artificial Sequence
  Description of Artificial Sequence: Synthetic peptide
  Seed: MCSLMQGSTLPRRSGAA
MYSLLQPSTVPRRSGAA

SEQ ID NO: 93833 - protein, 17 aa, Artificial Sequence
  Description of Artificial Sequence: Synthetic peptide
  Seed: MCSLMQGSTLPRRSGAA
MYSLLQSSTAPRRSGAA

SEQ ID NO: 93834 - protein, 17 aa, Artificial Sequence
  Description of Artificial Sequence: Synthetic peptide
  Seed: MCSLMQGSTLPRRSGAA
MYSLLQSSTIPRRSGAA

SEQ ID NO: 93835 - protein, 17 aa, Artificial Sequence
  Description of Artificial Sequence: Synthetic peptide
  Seed: MCSLMQGSTLPRRSGAA
MYSLLQSSTLPRRSGAA

SEQ ID NO: 93836 - protein, 17 aa, Artificial Sequence
  Description of Artificial Sequence: Synthetic peptide
  Seed: MCSLMQGSTLPRRSGAA
MYSLLQSSTMPRRSGAA

SEQ ID NO: 93837 - protein, 17 aa, Artificial Sequence
  Description of Artificial Sequence: Synthetic peptide
  Seed: MCSLMQGSTLPRRSGAA
MYSLLQSSTTPRRSGAA

SEQ ID NO: 93838 - protein, 17 aa, Artificial Sequence
  Description of Artificial Sequence: Synthetic peptide
  Seed: MCSLMQGSTLPRRSGAA
MYSLLQSSTVPRRSGAA

SEQ ID NO: 93839 - protein, 17 aa, Artificial Sequence
  Description of Artificial Sequence: Synthetic peptide
  Seed: MCSLMQGSTLPRRSGAA
MYSLLQTSTAPRRSGAA

SEQ ID NO: 93840 - protein, 17 aa, Artificial Sequence
  Description of Artificial Sequence: Synthetic peptide
  Seed: MCSLMQGSTLPRRSGAA
MYSLLQTSTIPRRSGAA

SEQ ID NO: 93841 - protein, 17 aa, Artificial Sequence
  Description of Artificial Sequence: Synthetic peptide
  Seed: MCSLMQGSTLPRRSGAA
MYSLLQTSTLPRRSGAA

SEQ ID NO: 93842 - protein, 17 aa, Artificial Sequence
  Description of Artificial Sequence: Synthetic peptide
  Seed: MCSLMQGSTLPRRSGAA
MYSLLQTSTVPRRSGAA

SEQ ID NO: 93843 - protein, 17 aa, Artificial Sequence
  Description of Artificial Sequence: Synthetic peptide
  Seed: MCSLMQGSTLPRRSGAA
MYSLMQASTAPRRSGAA

SEQ ID NO: 93844 - protein, 17 aa, Artificial Sequence
  Description of Artificial Sequence: Synthetic peptide
  Seed: MCSLMQGSTLPRRSGAA
MYSLMQASTIPRRSGAA

SEQ ID NO: 93845 - protein, 17 aa, Artificial Sequence
  Description of Artificial Sequence: Synthetic peptide
  Seed: MCSLMQGSTLPRRSGAA
MYSLMQASTLPRRSGAA

SEQ ID NO: 93846 - protein, 17 aa, Artificial Sequence
  Description of Artificial Sequence: Synthetic peptide
  Seed: MCSLMQGSTLPRRSGAA
MYSLMQASTMPRRSGAA

SEQ ID NO: 93847 - protein, 17 aa, Artificial Sequence
  Description of Artificial Sequence: Synthetic peptide
  Seed: MCSLMQGSTLPRRSGAA
MYSLMQASTSPRRSGAA

SEQ ID NO: 93848 - protein, 17 aa, Artificial Sequence
  Description of Artificial Sequence: Synthetic peptide
  Seed: MCSLMQGSTLPRRSGAA
MYSLMQASTTPRRSGAA

SEQ ID NO: 93849 - protein, 17 aa, Artificial Sequence
  Description of Artificial Sequence: Synthetic peptide
  Seed: MCSLMQGSTLPRRSGAA
MYSLMQASTVPRRSGAA

SEQ ID NO: 93850 - protein, 17 aa, Artificial Sequence
  Description of Artificial Sequence: Synthetic peptide
  Seed: MCSLMQGSTLPRRSGAA
MYSLMQGSTAPRRSGAA

SEQ ID NO: 93851 - protein, 17 aa, Artificial Sequence
  Description of Artificial Sequence: Synthetic peptide
  Seed: MCSLMQGSTLPRRSGAA
MYSLMQGSTIPRRSGAA

SEQ ID NO: 93852 - protein, 17 aa, Artificial Sequence
  Description of Artificial Sequence: Synthetic peptide
  Seed: MCSLMQGSTLPRRSGAA
MYSLMQGSTLPRRSGAA

SEQ ID NO: 93853 - protein, 17 aa, Artificial Sequence
  Description of Artificial Sequence: Synthetic peptide
  Seed: MCSLMQGSTLPRRSGAA
MYSLMQGSTMPRRSGAA

SEQ ID NO: 93854 - protein, 17 aa, Artificial Sequence
  Description of Artificial Sequence: Synthetic peptide
  Seed: MCSLMQGSTLPRRSGAA
MYSLMQGSTSPRRSGAA

SEQ ID NO: 93855 - protein, 17 aa, Artificial Sequence
  Description of Artificial Sequence: Synthetic peptide
  Seed: MCSLMQGSTLPRRSGAA
MYSLMQGSTTPRRSGAA

SEQ ID NO: 93856 - protein, 17 aa, Artificial Sequence
  Description of Artificial Sequence: Synthetic peptide
  Seed: MCSLMQGSTLPRRSGAA
MYSLMQGSTVPRRSGAA

SEQ ID NO: 93857 - protein, 17 aa, Artificial Sequence
  Description of Artificial Sequence: Synthetic peptide
  Seed: MCSLMQGSTLPRRSGAA
MYSLMQNSTIPRRSGAA

SEQ ID NO: 93858 - protein, 17 aa, Artificial Sequence
  Description of Artificial Sequence: Synthetic peptide
  Seed: MCSLMQGSTLPRRSGAA
MYSLMQNSTLPRRSGAA

SEQ ID NO: 93859 - protein, 17 aa, Artificial Sequence
  Description of Artificial Sequence: Synthetic peptide
  Seed: MCSLMQGSTLPRRSGAA
MYSLMQNSTVPRRSGAA

SEQ ID NO: 93860 - protein, 17 aa, Artificial Sequence
  Description of Artificial Sequence: Synthetic peptide
  Seed: MCSLMQGSTLPRRSGAA
MYSLMQPSTAPRRSGAA

SEQ ID NO: 93861 - protein, 17 aa, Artificial Sequence
  Description of Artificial Sequence: Synthetic peptide
  Seed: MCSLMQGSTLPRRSGAA
MYSLMQPSTIPRRSGAA

SEQ ID NO: 93862 - protein, 17 aa, Artificial Sequence
  Description of Artificial Sequence: Synthetic peptide
  Seed: MCSLMQGSTLPRRSGAA
MYSLMQPSTLPRRSGAA

SEQ ID NO: 93863 - protein, 17 aa, Artificial Sequence
  Description of Artificial Sequence: Synthetic peptide
  Seed: MCSLMQGSTLPRRSGAA
MYSLMQPSTVPRRSGAA

SEQ ID NO: 93864 - protein, 17 aa, Artificial Sequence
  Description of Artificial Sequence: Synthetic peptide
  Seed: MCSLMQGSTLPRRSGAA
MYSLMQSSTAPRRSGAA

SEQ ID NO: 93865 - protein, 17 aa, Artificial Sequence
  Description of Artificial Sequence: Synthetic peptide
  Seed: MCSLMQGSTLPRRSGAA
MYSLMQSSTIPRRSGAA

SEQ ID NO: 93866 - protein, 17 aa, Artificial Sequence
  Description of Artificial Sequence: Synthetic peptide
  Seed: MCSLMQGSTLPRRSGAA
MYSLMQSSTLPRRSGAA

SEQ ID NO: 93867 - protein, 17 aa, Artificial Sequence
  Description of Artificial Sequence: Synthetic peptide
  Seed: MCSLMQGSTLPRRSGAA
MYSLMQSSTMPRRSGAA

SEQ ID NO: 93868 - protein, 17 aa, Artificial Sequence
  Description of Artificial Sequence: Synthetic peptide
  Seed: MCSLMQGSTLPRRSGAA
MYSLMQSSTTPRRSGAA

SEQ ID NO: 93869 - protein, 17 aa, Artificial Sequence
  Description of Artificial Sequence: Synthetic peptide
  Seed: MCSLMQGSTLPRRSGAA
MYSLMQSSTVPRRSGAA

SEQ ID NO: 93870 - protein, 17 aa, Artificial Sequence
  Description of Artificial Sequence: Synthetic peptide
  Seed: MCSLMQGSTLPRRSGAA
MYSLMQTSTIPRRSGAA

SEQ ID NO: 93871 - protein, 17 aa, Artificial Sequence
  Description of Artificial Sequence: Synthetic peptide
  Seed: MCSLMQGSTLPRRSGAA
MYSLMQTSTLPRRSGAA

SEQ ID NO: 93872 - protein, 17 aa, Artificial Sequence
  Description of Artificial Sequence: Synthetic peptide
  Seed: MCSLMQGSTLPRRSGAA
MYSLMQTSTVPRRSGAA

SEQ ID NO: 93873 - protein, 17 aa, Artificial Sequence
  Description of Artificial Sequence: Synthetic peptide
  Seed: MCSLMQGSTLPRRSGAA
MYSLQQASTIPRRSGAA

SEQ ID NO: 93874 - protein, 17 aa, Artificial Sequence
  Description of Artificial Sequence: Synthetic peptide
  Seed: MCSLMQGSTLPRRSGAA
MYSLQQASTLPRRSGAA

SEQ ID NO: 93875 - protein, 17 aa, Artificial Sequence
  Description of Artificial Sequence: Synthetic peptide
  Seed: MCSLMQGSTLPRRSGAA
MYSLQQASTVPRRSGAA

SEQ ID NO: 93876 - protein, 17 aa, Artificial Sequence
  Description of Artificial Sequence: Synthetic peptide
  Seed: MCSLMQGSTLPRRSGAA
MYSLVQASTIPRRSGAA

SEQ ID NO: 93877 - protein, 17 aa, Artificial Sequence
  Description of Artificial Sequence: Synthetic peptide
  Seed: MCSLMQGSTLPRRSGAA
MYSLVQASTLPRRSGAA

SEQ ID NO: 93878 - protein, 17 aa, Artificial Sequence
  Description of Artificial Sequence: Synthetic peptide
  Seed: MCSLMQGSTLPRRSGAA
MYSLVQASTVPRRSGAA

SEQ ID NO: 93879 - protein, 17 aa, Artificial Sequence
  Description of Artificial Sequence: Synthetic peptide
  Seed: MCSLMQGSTLPRRSGAA
MCSLMQFSTIPRRSAAA

SEQ ID NO: 93880 - protein, 17 aa, Artificial Sequence
  Description of Artificial Sequence: Synthetic peptide
  Seed: MCSLMQGSTLPRRSGAA
MCSLMQFSTIPRRSSAA

SEQ ID NO: 93881 - protein, 17 aa, Artificial Sequence
  Description of Artificial Sequence: Synthetic peptide
  Seed: MCSLMQGSTLPRRSGAA
MCSLMQFSTLPRRSAAA

SEQ ID NO: 93882 - protein, 17 aa, Artificial Sequence
  Description of Artificial Sequence: Synthetic peptide
  Seed: MCSLMQGSTLPRRSGAA
MCSLMQFSTLPRRSSAA

SEQ ID NO: 93883 - protein, 17 aa, Artificial Sequence
  Description of Artificial Sequence: Synthetic peptide
  Seed: MCSLMQGSTLPRRSGAA
MCSLMQFSTMPRRSAAA

SEQ ID NO: 93884 - protein, 17 aa, Artificial Sequence
  Description of Artificial Sequence: Synthetic peptide
  Seed: MCSLMQGSTLPRRSGAA
MCSLMQFSTMPRRSSAA

SEQ ID NO: 93885 - protein, 17 aa, Artificial Sequence
  Description of Artificial Sequence: Synthetic peptide
  Seed: MCSLMQGSTLPRRSGAA
MCSLMQISTAPRRSAAA

SEQ ID NO: 93886 - protein, 17 aa, Artificial Sequence
  Description of Artificial Sequence: Synthetic peptide
  Seed: MCSLMQGSTLPRRSGAA
MCSLMQISTFPRRSAAA

SEQ ID NO: 93887 - protein, 17 aa, Artificial Sequence
  Description of Artificial Sequence: Synthetic peptide
  Seed: MCSLMQGSTLPRRSGAA
MCSLMQISTFPRRSSAA

SEQ ID NO: 93888 - protein, 17 aa, Artificial Sequence
  Description of Artificial Sequence: Synthetic peptide
  Seed: MCSLMQGSTLPRRSGAA
MCSLMQISTIPKRSAAA

SEQ ID NO: 93889 - protein, 17 aa, Artificial Sequence
  Description of Artificial Sequence: Synthetic peptide
  Seed: MCSLMQGSTLPRRSGAA
MCSLMQISTIPKRSSAA

SEQ ID NO: 93890 - protein, 17 aa, Artificial Sequence
  Description of Artificial Sequence: Synthetic peptide
  Seed: MCSLMQGSTLPRRSGAA
MCSLMQISTIPRRSAAA

SEQ ID NO: 93891 - protein, 17 aa, Artificial Sequence
  Description of Artificial Sequence: Synthetic peptide
  Seed: MCSLMQGSTLPRRSGAA
MCSLMQISTIPRRSHAA

SEQ ID NO: 93892 - protein, 17 aa, Artificial Sequence
  Description of Artificial Sequence: Synthetic peptide
  Seed: MCSLMQGSTLPRRSGAA
MCSLMQISTIPRRSQAA

SEQ ID NO: 93893 - protein, 17 aa, Artificial Sequence
  Description of Artificial Sequence: Synthetic peptide
  Seed: MCSLMQGSTLPRRSGAA
MCSLMQISTIPRRSSAA

SEQ ID NO: 93894 - protein, 17 aa, Artificial Sequence
  Description of Artificial Sequence: Synthetic peptide
  Seed: MCSLMQGSTLPRRSGAA
MCSLMQISTIPRRSTAA

SEQ ID NO: 93895 - protein, 17 aa, Artificial Sequence
  Description of Artificial Sequence: Synthetic peptide
  Seed: MCSLMQGSTLPRRSGAA
MCSLMQISTIPRRSVAA

SEQ ID NO: 93896 - protein, 17 aa, Artificial Sequence
  Description of Artificial Sequence: Synthetic peptide
  Seed: MCSLMQGSTLPRRSGAA
MCSLMQISTLPKRSAAA

SEQ ID NO: 93897 - protein, 17 aa, Artificial Sequence
  Description of Artificial Sequence: Synthetic peptide
  Seed: MCSLMQGSTLPRRSGAA
MCSLMQISTLPKRSGAA

SEQ ID NO: 93898 - protein, 17 aa, Artificial Sequence
  Description of Artificial Sequence: Synthetic peptide
  Seed: MCSLMQGSTLPRRSGAA
MCSLMQISTLPKRSSAA

SEQ ID NO: 93899 - protein, 17 aa, Artificial Sequence
  Description of Artificial Sequence: Synthetic peptide
  Seed: MCSLMQGSTLPRRSGAA
MCSLMQISTLPRRSAAA

SEQ ID NO: 93900 - protein, 17 aa, Artificial Sequence
  Description of Artificial Sequence: Synthetic peptide
  Seed: MCSLMQGSTLPRRSGAA
MCSLMQISTLPRRSHAA

SEQ ID NO: 93901 - protein, 17 aa, Artificial Sequence
  Description of Artificial Sequence: Synthetic peptide
  Seed: MCSLMQGSTLPRRSGAA
MCSLMQISTLPRRSIAA

SEQ ID NO: 93902 - protein, 17 aa, Artificial Sequence
  Description of Artificial Sequence: Synthetic peptide
  Seed: MCSLMQGSTLPRRSGAA
MCSLMQISTLPRRSKAA

SEQ ID NO: 93903 - protein, 17 aa, Artificial Sequence
  Description of Artificial Sequence: Synthetic peptide
  Seed: MCSLMQGSTLPRRSGAA
MCSLMQISTLPRRSLAA

SEQ ID NO: 93904 - protein, 17 aa, Artificial Sequence
  Description of Artificial Sequence: Synthetic peptide
  Seed: MCSLMQGSTLPRRSGAA
MCSLMQISTLPRRSMAA

SEQ ID NO: 93905 - protein, 17 aa, Artificial Sequence
  Description of Artificial Sequence: Synthetic peptide
  Seed: MCSLMQGSTLPRRSGAA
MCSLMQISTLPRRSQAA

SEQ ID NO: 93906 - protein, 17 aa, Artificial Sequence
  Description of Artificial Sequence: Synthetic peptide
  Seed: MCSLMQGSTLPRRSGAA
MCSLMQISTLPRRSRAA

SEQ ID NO: 93907 - protein, 17 aa, Artificial Sequence
  Description of Artificial Sequence: Synthetic peptide
  Seed: MCSLMQGSTLPRRSGAA
MCSLMQISTLPRRSSAA

SEQ ID NO: 93908 - protein, 17 aa, Artificial Sequence
  Description of Artificial Sequence: Synthetic peptide
  Seed: MCSLMQGSTLPRRSGAA
MCSLMQISTLPRRSTAA

SEQ ID NO: 93909 - protein, 17 aa, Artificial Sequence
  Description of Artificial Sequence: Synthetic peptide
  Seed: MCSLMQGSTLPRRSGAA
MCSLMQISTLPRRSVAA

SEQ ID NO: 93910 - protein, 17 aa, Artificial Sequence
  Description of Artificial Sequence: Synthetic peptide
  Seed: MCSLMQGSTLPRRSGAA
MCSLMQISTMPKRSAAA

SEQ ID NO: 93911 - protein, 17 aa, Artificial Sequence
  Description of Artificial Sequence: Synthetic peptide
  Seed: MCSLMQGSTLPRRSGAA
MCSLMQISTMPKRSQAA

SEQ ID NO: 93912 - protein, 17 aa, Artificial Sequence
  Description of Artificial Sequence: Synthetic peptide
  Seed: MCSLMQGSTLPRRSGAA
MCSLMQISTMPKRSSAA

SEQ ID NO: 93913 - protein, 17 aa, Artificial Sequence
  Description of Artificial Sequence: Synthetic peptide
  Seed: MCSLMQGSTLPRRSGAA
MCSLMQISTMPKRSTAA

SEQ ID NO: 93914 - protein, 17 aa, Artificial Sequence
  Description of Artificial Sequence: Synthetic peptide
  Seed: MCSLMQGSTLPRRSGAA
MCSLMQISTMPKRSVAA

SEQ ID NO: 93915 - protein, 17 aa, Artificial Sequence
  Description of Artificial Sequence: Synthetic peptide
  Seed: MCSLMQGSTLPRRSGAA
MCSLMQISTMPRRSAAA

SEQ ID NO: 93916 - protein, 17 aa, Artificial Sequence
  Description of Artificial Sequence: Synthetic peptide
  Seed: MCSLMQGSTLPRRSGAA
MCSLMQISTMPRRSHAA

SEQ ID NO: 93917 - protein, 17 aa, Artificial Sequence
  Description of Artificial Sequence: Synthetic peptide
  Seed: MCSLMQGSTLPRRSGAA
MCSLMQISTMPRRSIAA

SEQ ID NO: 93918 - protein, 17 aa, Artificial Sequence
  Description of Artificial Sequence: Synthetic peptide
  Seed: MCSLMQGSTLPRRSGAA
MCSLMQISTMPRRSKAA

SEQ ID NO: 93919 - protein, 17 aa, Artificial Sequence
  Description of Artificial Sequence: Synthetic peptide
  Seed: MCSLMQGSTLPRRSGAA
MCSLMQISTMPRRSLAA

SEQ ID NO: 93920 - protein, 17 aa, Artificial Sequence
  Description of Artificial Sequence: Synthetic peptide
  Seed: MCSLMQGSTLPRRSGAA
MCSLMQISTMPRRSMAA

SEQ ID NO: 93921 - protein, 17 aa, Artificial Sequence
  Description of Artificial Sequence: Synthetic peptide
  Seed: MCSLMQGSTLPRRSGAA
MCSLMQISTMPRRSQAA

SEQ ID NO: 93922 - protein, 17 aa, Artificial Sequence
  Description of Artificial Sequence: Synthetic peptide
  Seed: MCSLMQGSTLPRRSGAA
MCSLMQISTMPRRSRAA

SEQ ID NO: 93923 - protein, 17 aa, Artificial Sequence
  Description of Artificial Sequence: Synthetic peptide
  Seed: MCSLMQGSTLPRRSGAA
MCSLMQISTMPRRSSAA

SEQ ID NO: 93924 - protein, 17 aa, Artificial Sequence
  Description of Artificial Sequence: Synthetic peptide
  Seed: MCSLMQGSTLPRRSGAA
MCSLMQISTMPRRSTAA

SEQ ID NO: 93925 - protein, 17 aa, Artificial Sequence
  Description of Artificial Sequence: Synthetic peptide
  Seed: MCSLMQGSTLPRRSGAA
MCSLMQISTMPRRSVAA

SEQ ID NO: 93926 - protein, 17 aa, Artificial Sequence
  Description of Artificial Sequence: Synthetic peptide
  Seed: MCSLMQGSTLPRRSGAA
MCSLMQISTMPRRSYAA

SEQ ID NO: 93927 - protein, 17 aa, Artificial Sequence
  Description of Artificial Sequence: Synthetic peptide
  Seed: MCSLMQGSTLPRRSGAA
MCSLMQISTRPRRSAAA

SEQ ID NO: 93928 - protein, 17 aa, Artificial Sequence
  Description of Artificial Sequence: Synthetic peptide
  Seed: MCSLMQGSTLPRRSGAA
MCSLMQISTVPKRSAAA

SEQ ID NO: 93929 - protein, 17 aa, Artificial Sequence
  Description of Artificial Sequence: Synthetic peptide
  Seed: MCSLMQGSTLPRRSGAA
MCSLMQISTVPRRSAAA

SEQ ID NO: 93930 - protein, 17 aa, Artificial Sequence
  Description of Artificial Sequence: Synthetic peptide
  Seed: MCSLMQGSTLPRRSGAA
MCSLMQISTVPRRSSAA

SEQ ID NO: 93931 - protein, 17 aa, Artificial Sequence
  Description of Artificial Sequence: Synthetic peptide
  Seed: MCSLMQGSTLPRRSGAA
MCSLMQLSTIPKRSAAA

SEQ ID NO: 93932 - protein, 17 aa, Artificial Sequence
  Description of Artificial Sequence: Synthetic peptide
  Seed: MCSLMQGSTLPRRSGAA
MCSLMQLSTIPKRSSAA

SEQ ID NO: 93933 - protein, 17 aa, Artificial Sequence
  Description of Artificial Sequence: Synthetic peptide
  Seed: MCSLMQGSTLPRRSGAA
MCSLMQLSTIPRRSAAA

SEQ ID NO: 93934 - protein, 17 aa, Artificial Sequence
  Description of Artificial Sequence: Synthetic peptide
  Seed: MCSLMQGSTLPRRSGAA
MCSLMQLSTIPRRSQAA

SEQ ID NO: 93935 - protein, 17 aa, Artificial Sequence
  Description of Artificial Sequence: Synthetic peptide
  Seed: MCSLMQGSTLPRRSGAA
MCSLMQLSTIPRRSSAA

SEQ ID NO: 93936 - protein, 17 aa, Artificial Sequence
  Description of Artificial Sequence: Synthetic peptide
  Seed: MCSLMQGSTLPRRSGAA
MCSLMQLSTLPKRSAAA

SEQ ID NO: 93937 - protein, 17 aa, Artificial Sequence
  Description of Artificial Sequence: Synthetic peptide
  Seed: MCSLMQGSTLPRRSGAA
MCSLMQLSTLPKRSSAA

SEQ ID NO: 93938 - protein, 17 aa, Artificial Sequence
  Description of Artificial Sequence: Synthetic peptide
  Seed: MCSLMQGSTLPRRSGAA
MCSLMQLSTLPRRSAAA

SEQ ID NO: 93939 - protein, 17 aa, Artificial Sequence
  Description of Artificial Sequence: Synthetic peptide
  Seed: MCSLMQGSTLPRRSGAA
MCSLMQLSTLPRRSQAA

SEQ ID NO: 93940 - protein, 17 aa, Artificial Sequence
  Description of Artificial Sequence: Synthetic peptide
  Seed: MCSLMQGSTLPRRSGAA
MCSLMQLSTLPRRSSAA

SEQ ID NO: 93941 - protein, 17 aa, Artificial Sequence
  Description of Artificial Sequence: Synthetic peptide
  Seed: MCSLMQGSTLPRRSGAA
MCSLMQLSTLPRRSTAA

SEQ ID NO: 93942 - protein, 17 aa, Artificial Sequence
  Description of Artificial Sequence: Synthetic peptide
  Seed: MCSLMQGSTLPRRSGAA
MCSLMQLSTMPKRSAAA

SEQ ID NO: 93943 - protein, 17 aa, Artificial Sequence
  Description of Artificial Sequence: Synthetic peptide
  Seed: MCSLMQGSTLPRRSGAA
MCSLMQLSTMPKRSSAA

SEQ ID NO: 93944 - protein, 17 aa, Artificial Sequence
  Description of Artificial Sequence: Synthetic peptide
  Seed: MCSLMQGSTLPRRSGAA
MCSLMQLSTMPRRSAAA

SEQ ID NO: 93945 - protein, 17 aa, Artificial Sequence
  Description of Artificial Sequence: Synthetic peptide
  Seed: MCSLMQGSTLPRRSGAA
MCSLMQLSTMPRRSHAA

SEQ ID NO: 93946 - protein, 17 aa, Artificial Sequence
  Description of Artificial Sequence: Synthetic peptide
  Seed: MCSLMQGSTLPRRSGAA
MCSLMQLSTMPRRSMAA

SEQ ID NO: 93947 - protein, 17 aa, Artificial Sequence
  Description of Artificial Sequence: Synthetic peptide
  Seed: MCSLMQGSTLPRRSGAA
MCSLMQLSTMPRRSQAA

SEQ ID NO: 93948 - protein, 17 aa, Artificial Sequence
  Description of Artificial Sequence: Synthetic peptide
  Seed: MCSLMQGSTLPRRSGAA
MCSLMQLSTMPRRSSAA

SEQ ID NO: 93949 - protein, 17 aa, Artificial Sequence
  Description of Artificial Sequence: Synthetic peptide
  Seed: MCSLMQGSTLPRRSGAA
MCSLMQLSTMPRRSTAA

SEQ ID NO: 93950 - protein, 17 aa, Artificial Sequence
  Description of Artificial Sequence: Synthetic peptide
  Seed: MCSLMQGSTLPRRSGAA
MCSLMQLSTMPRRSVAA

SEQ ID NO: 93951 - protein, 17 aa, Artificial Sequence
  Description of Artificial Sequence: Synthetic peptide
  Seed: MCSLMQGSTLPRRSGAA
MCSLMQLSTVPRRSAAA

SEQ ID NO: 93952 - protein, 17 aa, Artificial Sequence
  Description of Artificial Sequence: Synthetic peptide
  Seed: MCSLMQGSTLPRRSGAA
MCSLMQLSTVPRRSSAA

SEQ ID NO: 93953 - protein, 17 aa, Artificial Sequence
  Description of Artificial Sequence: Synthetic peptide
  Seed: MCSLMQGSTLPRRSGAA
MCSLMQMSTIPRRSAAA

SEQ ID NO: 93954 - protein, 17 aa, Artificial Sequence
  Description of Artificial Sequence: Synthetic peptide
  Seed: MCSLMQGSTLPRRSGAA
MCSLMQMSTLPRRSAAA

SEQ ID NO: 93955 - protein, 17 aa, Artificial Sequence
  Description of Artificial Sequence: Synthetic peptide
  Seed: MCSLMQGSTLPRRSGAA
MCSLMQMSTLPRRSSAA

SEQ ID NO: 93956 - protein, 17 aa, Artificial Sequence
  Description of Artificial Sequence: Synthetic peptide
  Seed: MCSLMQGSTLPRRSGAA
MCSLMQMSTMPRRSAAA

SEQ ID NO: 93957 - protein, 17 aa, Artificial Sequence
  Description of Artificial Sequence: Synthetic peptide
  Seed: MCSLMQGSTLPRRSGAA
MCSLMQMSTMPRRSSAA

SEQ ID NO: 93958 - protein, 17 aa, Artificial Sequence
  Description of Artificial Sequence: Synthetic peptide
  Seed: MCSLMQGSTLPRRSGAA
MCSLMQVSTIPRRSAAA

SEQ ID NO: 93959 - protein, 17 aa, Artificial Sequence
  Description of Artificial Sequence: Synthetic peptide
  Seed: MCSLMQGSTLPRRSGAA
MCSLMQVSTLPRRSAAA

SEQ ID NO: 93960 - protein, 17 aa, Artificial Sequence
  Description of Artificial Sequence: Synthetic peptide
  Seed: MCSLMQGSTLPRRSGAA
MCSLMQVSTLPRRSSAA

SEQ ID NO: 93961 - protein, 17 aa, Artificial Sequence
  Description of Artificial Sequence: Synthetic peptide
  Seed: MCSLMQGSTLPRRSGAA
MCSLMQVSTMPRRSAAA

SEQ ID NO: 93962 - protein, 17 aa, Artificial Sequence
  Description of Artificial Sequence: Synthetic peptide
  Seed: MCSLMQGSTLPRRSGAA
MCSLMQVSTMPRRSSAA

SEQ ID NO: 93963 - protein, 17 aa, Artificial Sequence
  Description of Artificial Sequence: Synthetic peptide
  Seed: MCSLMQGSTLPRRSGAA
MCSLMFGSALARRAGAA

SEQ ID NO: 93964 - protein, 17 aa, Artificial Sequence
  Description of Artificial Sequence: Synthetic peptide
  Seed: MCSLMQGSTLPRRSGAA
MCSLMFGSALARRGGAA

SEQ ID NO: 93965 - protein, 17 aa, Artificial Sequence
  Description of Artificial Sequence: Synthetic peptide
  Seed: MCSLMQGSTLPRRSGAA
MCSLMFGSALARRIGAA

SEQ ID NO: 93966 - protein, 17 aa, Artificial Sequence
  Description of Artificial Sequence: Synthetic peptide
  Seed: MCSLMQGSTLPRRSGAA
MCSLMFGSALARRLGAA

SEQ ID NO: 93967 - protein, 17 aa, Artificial Sequence
  Description of Artificial Sequence: Synthetic peptide
  Seed: MCSLMQGSTLPRRSGAA
MCSLMFGSALARRMGAA

SEQ ID NO: 93968 - protein, 17 aa, Artificial Sequence
  Description of Artificial Sequence: Synthetic peptide
  Seed: MCSLMQGSTLPRRSGAA
MCSLMFGSALARRNGAA

SEQ ID NO: 93969 - protein, 17 aa, Artificial Sequence
  Description of Artificial Sequence: Synthetic peptide
  Seed: MCSLMQGSTLPRRSGAA
MCSLMFGSALARRSGAA

SEQ ID NO: 93970 - protein, 17 aa, Artificial Sequence
  Description of Artificial Sequence: Synthetic peptide
  Seed: MCSLMQGSTLPRRSGAA
MCSLMFGSALARRTGAA

SEQ ID NO: 93971 - protein, 17 aa, Artificial Sequence
  Description of Artificial Sequence: Synthetic peptide
  Seed: MCSLMQGSTLPRRSGAA
MCSLMFGSALARRVGAA

SEQ ID NO: 93972 - protein, 17 aa, Artificial Sequence
  Description of Artificial Sequence: Synthetic peptide
  Seed: MCSLMQGSTLPRRSGAA
MCSLMFGSALGRRAGAA

SEQ ID NO: 93973 - protein, 17 aa, Artificial Sequence
  Description of Artificial Sequence: Synthetic peptide
  Seed: MCSLMQGSTLPRRSGAA
MCSLMFGSALIRRAGAA

SEQ ID NO: 93974 - protein, 17 aa, Artificial Sequence
  Description of Artificial Sequence: Synthetic peptide
  Seed: MCSLMQGSTLPRRSGAA
MCSLMFGSALNRRAGAA

SEQ ID NO: 93975 - protein, 17 aa, Artificial Sequence
  Description of Artificial Sequence: Synthetic peptide
  Seed: MCSLMQGSTLPRRSGAA
MCSLMFGSALPRRAGAA

SEQ ID NO: 93976 - protein, 17 aa, Artificial Sequence
  Description of Artificial Sequence: Synthetic peptide
  Seed: MCSLMQGSTLPRRSGAA
MCSLMFGSALPRRIGAA

SEQ ID NO: 93977 - protein, 17 aa, Artificial Sequence
  Description of Artificial Sequence: Synthetic peptide
  Seed: MCSLMQGSTLPRRSGAA
MCSLMFGSALPRRNGAA

SEQ ID NO: 93978 - protein, 17 aa, Artificial Sequence
  Description of Artificial Sequence: Synthetic peptide
  Seed: MCSLMQGSTLPRRSGAA
MCSLMFGSALPRRSGAA

SEQ ID NO: 93979 - protein, 17 aa, Artificial Sequence
  Description of Artificial Sequence: Synthetic peptide
  Seed: MCSLMQGSTLPRRSGAA
MCSLMFGSALPRRVGAA

SEQ ID NO: 93980 - protein, 17 aa, Artificial Sequence
  Description of Artificial Sequence: Synthetic peptide
  Seed: MCSLMQGSTLPRRSGAA
MCSLMFGSALSRRAGAA

SEQ ID NO: 93981 - protein, 17 aa, Artificial Sequence
  Description of Artificial Sequence: Synthetic peptide
  Seed: MCSLMQGSTLPRRSGAA
MCSLMFGSALSRRIGAA

SEQ ID NO: 93982 - protein, 17 aa, Artificial Sequence
  Description of Artificial Sequence: Synthetic peptide
  Seed: MCSLMQGSTLPRRSGAA
MCSLMFGSALSRRLGAA

SEQ ID NO: 93983 - protein, 17 aa, Artificial Sequence
  Description of Artificial Sequence: Synthetic peptide
  Seed: MCSLMQGSTLPRRSGAA
MCSLMFGSALSRRMGAA

SEQ ID NO: 93984 - protein, 17 aa, Artificial Sequence
  Description of Artificial Sequence: Synthetic peptide
  Seed: MCSLMQGSTLPRRSGAA
MCSLMFGSALSRRNGAA

SEQ ID NO: 93985 - protein, 17 aa, Artificial Sequence
  Description of Artificial Sequence: Synthetic peptide
  Seed: MCSLMQGSTLPRRSGAA
MCSLMFGSALSRRSGAA

SEQ ID NO: 93986 - protein, 17 aa, Artificial Sequence
  Description of Artificial Sequence: Synthetic peptide
  Seed: MCSLMQGSTLPRRSGAA
MCSLMFGSALSRRTGAA

SEQ ID NO: 93987 - protein, 17 aa, Artificial Sequence
  Description of Artificial Sequence: Synthetic peptide
  Seed: MCSLMQGSTLPRRSGAA
MCSLMFGSALSRRVGAA

SEQ ID NO: 93988 - protein, 17 aa, Artificial Sequence
  Description of Artificial Sequence: Synthetic peptide
  Seed: MCSLMQGSTLPRRSGAA
MCSLMFGSALTRRAGAA

SEQ ID NO: 93989 - protein, 17 aa, Artificial Sequence
  Description of Artificial Sequence: Synthetic peptide
  Seed: MCSLMQGSTLPRRSGAA
MCSLMFGSALTRRIGAA

SEQ ID NO: 93990 - protein, 17 aa, Artificial Sequence
  Description of Artificial Sequence: Synthetic peptide
  Seed: MCSLMQGSTLPRRSGAA
MCSLMFGSALTRRLGAA

SEQ ID NO: 93991 - protein, 17 aa, Artificial Sequence
  Description of Artificial Sequence: Synthetic peptide
  Seed: MCSLMQGSTLPRRSGAA
MCSLMFGSALTRRMGAA

SEQ ID NO: 93992 - protein, 17 aa, Artificial Sequence
  Description of Artificial Sequence: Synthetic peptide
  Seed: MCSLMQGSTLPRRSGAA
MCSLMFGSALTRRNGAA

SEQ ID NO: 93993 - protein, 17 aa, Artificial Sequence
  Description of Artificial Sequence: Synthetic peptide
  Seed: MCSLMQGSTLPRRSGAA
MCSLMFGSALTRRSGAA

SEQ ID NO: 93994 - protein, 17 aa, Artificial Sequence
  Description of Artificial Sequence: Synthetic peptide
  Seed: MCSLMQGSTLPRRSGAA
MCSLMFGSALTRRTGAA

SEQ ID NO: 93995 - protein, 17 aa, Artificial Sequence
  Description of Artificial Sequence: Synthetic peptide
  Seed: MCSLMQGSTLPRRSGAA
MCSLMFGSALTRRVGAA

SEQ ID NO: 93996 - protein, 17 aa, Artificial Sequence
  Description of Artificial Sequence: Synthetic peptide
  Seed: MCSLMQGSTLPRRSGAA
MCSLMFGSALVRRAGAA

SEQ ID NO: 93997 - protein, 17 aa, Artificial Sequence
  Description of Artificial Sequence: Synthetic peptide
  Seed: MCSLMQGSTLPRRSGAA
MCSLMFGSALVRRIGAA

SEQ ID NO: 93998 - protein, 17 aa, Artificial Sequence
  Description of Artificial Sequence: Synthetic peptide
  Seed: MCSLMQGSTLPRRSGAA
MCSLMFGSALVRRNGAA

SEQ ID NO: 93999 - protein, 17 aa, Artificial Sequence
  Description of Artificial Sequence: Synthetic peptide
  Seed: MCSLMQGSTLPRRSGAA
MCSLMFGSALVRRSGAA

SEQ ID NO: 94000 - protein, 17 aa, Artificial Sequence
  Description of Artificial Sequence: Synthetic peptide
  Seed: MCSLMQGSTLPRRSGAA
MCSLMFGSALVRRVGAA

SEQ ID NO: 94001 - protein, 17 aa, Artificial Sequence
  Description of Artificial Sequence: Synthetic peptide
  Seed: MCSLMQGSTLPRRSGAA
MCSLMFGSFLARRAGAA

SEQ ID NO: 94002 - protein, 17 aa, Artificial Sequence
  Description of Artificial Sequence: Synthetic peptide
  Seed: MCSLMQGSTLPRRSGAA
MCSLMFGSILARRAGAA

SEQ ID NO: 94003 - protein, 17 aa, Artificial Sequence
  Description of Artificial Sequence: Synthetic peptide
  Seed: MCSLMQGSTLPRRSGAA
MCSLMFGSILARRGGAA

SEQ ID NO: 94004 - protein, 17 aa, Artificial Sequence
  Description of Artificial Sequence: Synthetic peptide
  Seed: MCSLMQGSTLPRRSGAA
MCSLMFGSILARRIGAA

SEQ ID NO: 94005 - protein, 17 aa, Artificial Sequence
  Description of Artificial Sequence: Synthetic peptide
  Seed: MCSLMQGSTLPRRSGAA
MCSLMFGSILARRLGAA

SEQ ID NO: 94006 - protein, 17 aa, Artificial Sequence
  Description of Artificial Sequence: Synthetic peptide
  Seed: MCSLMQGSTLPRRSGAA
MCSLMFGSILARRMGAA

SEQ ID NO: 94007 - protein, 17 aa, Artificial Sequence
  Description of Artificial Sequence: Synthetic peptide
  Seed: MCSLMQGSTLPRRSGAA
MCSLMFGSILARRNGAA

SEQ ID NO: 94008 - protein, 17 aa, Artificial Sequence
  Description of Artificial Sequence: Synthetic peptide
  Seed: MCSLMQGSTLPRRSGAA
MCSLMFGSILARRPGAA

SEQ ID NO: 94009 - protein, 17 aa, Artificial Sequence
  Description of Artificial Sequence: Synthetic peptide
  Seed: MCSLMQGSTLPRRSGAA
MCSLMFGSILARRSGAA

SEQ ID NO: 94010 - protein, 17 aa, Artificial Sequence
  Description of Artificial Sequence: Synthetic peptide
  Seed: MCSLMQGSTLPRRSGAA
MCSLMFGSILARRTGAA

SEQ ID NO: 94011 - protein, 17 aa, Artificial Sequence
  Description of Artificial Sequence: Synthetic peptide
  Seed: MCSLMQGSTLPRRSGAA
MCSLMFGSILARRVGAA

SEQ ID NO: 94012 - protein, 17 aa, Artificial Sequence
  Description of Artificial Sequence: Synthetic peptide
  Seed: MCSLMQGSTLPRRSGAA
MCSLMFGSILGRRAGAA

SEQ ID NO: 94013 - protein, 17 aa, Artificial Sequence
  Description of Artificial Sequence: Synthetic peptide
  Seed: MCSLMQGSTLPRRSGAA
MCSLMFGSILGRRIGAA

SEQ ID NO: 94014 - protein, 17 aa, Artificial Sequence
  Description of Artificial Sequence: Synthetic peptide
  Seed: MCSLMQGSTLPRRSGAA
MCSLMFGSILGRRLGAA

SEQ ID NO: 94015 - protein, 17 aa, Artificial Sequence
  Description of Artificial Sequence: Synthetic peptide
  Seed: MCSLMQGSTLPRRSGAA
MCSLMFGSILGRRNGAA

SEQ ID NO: 94016 - protein, 17 aa, Artificial Sequence
  Description of Artificial Sequence: Synthetic peptide
  Seed: MCSLMQGSTLPRRSGAA
MCSLMFGSILGRRSGAA

SEQ ID NO: 94017 - protein, 17 aa, Artificial Sequence
  Description of Artificial Sequence: Synthetic peptide
  Seed: MCSLMQGSTLPRRSGAA
MCSLMFGSILGRRTGAA

SEQ ID NO: 94018 - protein, 17 aa, Artificial Sequence
  Description of Artificial Sequence: Synthetic peptide
  Seed: MCSLMQGSTLPRRSGAA
MCSLMFGSILGRRVGAA

SEQ ID NO: 94019 - protein, 17 aa, Artificial Sequence
  Description of Artificial Sequence: Synthetic peptide
  Seed: MCSLMQGSTLPRRSGAA
MCSLMFGSILIRRAGAA

SEQ ID NO: 94020 - protein, 17 aa, Artificial Sequence
  Description of Artificial Sequence: Synthetic peptide
  Seed: MCSLMQGSTLPRRSGAA
MCSLMFGSILIRRNGAA

SEQ ID NO: 94021 - protein, 17 aa, Artificial Sequence
  Description of Artificial Sequence: Synthetic peptide
  Seed: MCSLMQGSTLPRRSGAA
MCSLMFGSILIRRSGAA

SEQ ID NO: 94022 - protein, 17 aa, Artificial Sequence
  Description of Artificial Sequence: Synthetic peptide
  Seed: MCSLMQGSTLPRRSGAA
MCSLMFGSILNRRAGAA

SEQ ID NO: 94023 - protein, 17 aa, Artificial Sequence
  Description of Artificial Sequence: Synthetic peptide
  Seed: MCSLMQGSTLPRRSGAA
MCSLMFGSILNRRNGAA

SEQ ID NO: 94024 - protein, 17 aa, Artificial Sequence
  Description of Artificial Sequence: Synthetic peptide
  Seed: MCSLMQGSTLPRRSGAA
MCSLMFGSILPRRAGAA

SEQ ID NO: 94025 - protein, 17 aa, Artificial Sequence
  Description of Artificial Sequence: Synthetic peptide
  Seed: MCSLMQGSTLPRRSGAA
MCSLMFGSILPRRIGAA

SEQ ID NO: 94026 - protein, 17 aa, Artificial Sequence
  Description of Artificial Sequence: Synthetic peptide
  Seed: MCSLMQGSTLPRRSGAA
MCSLMFGSILPRRLGAA

SEQ ID NO: 94027 - protein, 17 aa, Artificial Sequence
  Description of Artificial Sequence: Synthetic peptide
  Seed: MCSLMQGSTLPRRSGAA
MCSLMFGSILPRRMGAA

SEQ ID NO: 94028 - protein, 17 aa, Artificial Sequence
  Description of Artificial Sequence: Synthetic peptide
  Seed: MCSLMQGSTLPRRSGAA
MCSLMFGSILPRRNGAA

SEQ ID NO: 94029 - protein, 17 aa, Artificial Sequence
  Description of Artificial Sequence: Synthetic peptide
  Seed: MCSLMQGSTLPRRSGAA
MCSLMFGSILPRRSGAA

SEQ ID NO: 94030 - protein, 17 aa, Artificial Sequence
  Description of Artificial Sequence: Synthetic peptide
  Seed: MCSLMQGSTLPRRSGAA
MCSLMFGSILPRRTGAA

SEQ ID NO: 94031 - protein, 17 aa, Artificial Sequence
  Description of Artificial Sequence: Synthetic peptide
  Seed: MCSLMQGSTLPRRSGAA
MCSLMFGSILPRRVGAA

SEQ ID NO: 94032 - protein, 17 aa, Artificial Sequence
  Description of Artificial Sequence: Synthetic peptide
  Seed: MCSLMQGSTLPRRSGAA
MCSLMFGSILSRRAGAA

SEQ ID NO: 94033 - protein, 17 aa, Artificial Sequence
  Description of Artificial Sequence: Synthetic peptide
  Seed: MCSLMQGSTLPRRSGAA
MCSLMFGSILSRRGGAA

SEQ ID NO: 94034 - protein, 17 aa, Artificial Sequence
  Description of Artificial Sequence: Synthetic peptide
  Seed: MCSLMQGSTLPRRSGAA
MCSLMFGSILSRRIGAA

SEQ ID NO: 94035 - protein, 17 aa, Artificial Sequence
  Description of Artificial Sequence: Synthetic peptide
  Seed: MCSLMQGSTLPRRSGAA
MCSLMFGSILSRRLGAA

SEQ ID NO: 94036 - protein, 17 aa, Artificial Sequence
  Description of Artificial Sequence: Synthetic peptide
  Seed: MCSLMQGSTLPRRSGAA
MCSLMFGSILSRRMGAA

SEQ ID NO: 94037 - protein, 17 aa, Artificial Sequence
  Description of Artificial Sequence: Synthetic peptide
  Seed: MCSLMQGSTLPRRSGAA
MCSLMFGSILSRRNGAA

SEQ ID NO: 94038 - protein, 17 aa, Artificial Sequence
  Description of Artificial Sequence: Synthetic peptide
  Seed: MCSLMQGSTLPRRSGAA
MCSLMFGSILSRRSGAA

SEQ ID NO: 94039 - protein, 17 aa, Artificial Sequence
  Description of Artificial Sequence: Synthetic peptide
  Seed: MCSLMQGSTLPRRSGAA
MCSLMFGSILSRRTGAA

SEQ ID NO: 94040 - protein, 17 aa, Artificial Sequence
  Description of Artificial Sequence: Synthetic peptide
  Seed: MCSLMQGSTLPRRSGAA
MCSLMFGSILSRRVGAA

SEQ ID NO: 94041 - protein, 17 aa, Artificial Sequence
  Description of Artificial Sequence: Synthetic peptide
  Seed: MCSLMQGSTLPRRSGAA
MCSLMFGSILTRRAGAA

SEQ ID NO: 94042 - protein, 17 aa, Artificial Sequence
  Description of Artificial Sequence: Synthetic peptide
  Seed: MCSLMQGSTLPRRSGAA
MCSLMFGSILTRRIGAA

SEQ ID NO: 94043 - protein, 17 aa, Artificial Sequence
  Description of Artificial Sequence: Synthetic peptide
  Seed: MCSLMQGSTLPRRSGAA
MCSLMFGSILTRRLGAA

SEQ ID NO: 94044 - protein, 17 aa, Artificial Sequence
  Description of Artificial Sequence: Synthetic peptide
  Seed: MCSLMQGSTLPRRSGAA
MCSLMFGSILTRRMGAA

SEQ ID NO: 94045 - protein, 17 aa, Artificial Sequence
  Description of Artificial Sequence: Synthetic peptide
  Seed: MCSLMQGSTLPRRSGAA
MCSLMFGSILTRRNGAA

SEQ ID NO: 94046 - protein, 17 aa, Artificial Sequence
  Description of Artificial Sequence: Synthetic peptide
  Seed: MCSLMQGSTLPRRSGAA
MCSLMFGSILTRRSGAA

SEQ ID NO: 94047 - protein, 17 aa, Artificial Sequence
  Description of Artificial Sequence: Synthetic peptide
  Seed: MCSLMQGSTLPRRSGAA
MCSLMFGSILTRRTGAA

SEQ ID NO: 94048 - protein, 17 aa, Artificial Sequence
  Description of Artificial Sequence: Synthetic peptide
  Seed: MCSLMQGSTLPRRSGAA
MCSLMFGSILTRRVGAA

SEQ ID NO: 94049 - protein, 17 aa, Artificial Sequence
  Description of Artificial Sequence: Synthetic peptide
  Seed: MCSLMQGSTLPRRSGAA
MCSLMFGSILVRRAGAA

SEQ ID NO: 94050 - protein, 17 aa, Artificial Sequence
  Description of Artificial Sequence: Synthetic peptide
  Seed: MCSLMQGSTLPRRSGAA
MCSLMFGSILVRRIGAA

SEQ ID NO: 94051 - protein, 17 aa, Artificial Sequence
  Description of Artificial Sequence: Synthetic peptide
  Seed: MCSLMQGSTLPRRSGAA
MCSLMFGSILVRRLGAA

SEQ ID NO: 94052 - protein, 17 aa, Artificial Sequence
  Description of Artificial Sequence: Synthetic peptide
  Seed: MCSLMQGSTLPRRSGAA
MCSLMFGSILVRRMGAA

SEQ ID NO: 94053 - protein, 17 aa, Artificial Sequence
  Description of Artificial Sequence: Synthetic peptide
  Seed: MCSLMQGSTLPRRSGAA
MCSLMFGSILVRRNGAA

SEQ ID NO: 94054 - protein, 17 aa, Artificial Sequence
  Description of Artificial Sequence: Synthetic peptide
  Seed: MCSLMQGSTLPRRSGAA
MCSLMFGSILVRRSGAA

SEQ ID NO: 94055 - protein, 17 aa, Artificial Sequence
  Description of Artificial Sequence: Synthetic peptide
  Seed: MCSLMQGSTLPRRSGAA
MCSLMFGSILVRRTGAA

SEQ ID NO: 94056 - protein, 17 aa, Artificial Sequence
  Description of Artificial Sequence: Synthetic peptide
  Seed: MCSLMQGSTLPRRSGAA
MCSLMFGSILVRRVGAA

SEQ ID NO: 94057 - protein, 17 aa, Artificial Sequence
  Description of Artificial Sequence: Synthetic peptide
  Seed: MCSLMQGSTLPRRSGAA
MCSLMFGSLLARRAGAA

SEQ ID NO: 94058 - protein, 17 aa, Artificial Sequence
  Description of Artificial Sequence: Synthetic peptide
  Seed: MCSLMQGSTLPRRSGAA
MCSLMFGSLLARRDGAA

SEQ ID NO: 94059 - protein, 17 aa, Artificial Sequence
  Description of Artificial Sequence: Synthetic peptide
  Seed: MCSLMQGSTLPRRSGAA
MCSLMFGSLLARRGGAA

SEQ ID NO: 94060 - protein, 17 aa, Artificial Sequence
  Description of Artificial Sequence: Synthetic peptide
  Seed: MCSLMQGSTLPRRSGAA
MCSLMFGSLLARRHGAA

SEQ ID NO: 94061 - protein, 17 aa, Artificial Sequence
  Description of Artificial Sequence: Synthetic peptide
  Seed: MCSLMQGSTLPRRSGAA
MCSLMFGSLLARRIGAA

SEQ ID NO: 94062 - protein, 17 aa, Artificial Sequence
  Description of Artificial Sequence: Synthetic peptide
  Seed: MCSLMQGSTLPRRSGAA
MCSLMFGSLLARRLGAA

SEQ ID NO: 94063 - protein, 17 aa, Artificial Sequence
  Description of Artificial Sequence: Synthetic peptide
  Seed: MCSLMQGSTLPRRSGAA
MCSLMFGSLLARRMGAA

SEQ ID NO: 94064 - protein, 17 aa, Artificial Sequence
  Description of Artificial Sequence: Synthetic peptide
  Seed: MCSLMQGSTLPRRSGAA
MCSLMFGSLLARRNGAA

SEQ ID NO: 94065 - protein, 17 aa, Artificial Sequence
  Description of Artificial Sequence: Synthetic peptide
  Seed: MCSLMQGSTLPRRSGAA
MCSLMFGSLLARRPGAA

SEQ ID NO: 94066 - protein, 17 aa, Artificial Sequence
  Description of Artificial Sequence: Synthetic peptide
  Seed: MCSLMQGSTLPRRSGAA
MCSLMFGSLLARRQGAA

SEQ ID NO: 94067 - protein, 17 aa, Artificial Sequence
  Description of Artificial Sequence: Synthetic peptide
  Seed: MCSLMQGSTLPRRSGAA
MCSLMFGSLLARRSGAA

SEQ ID NO: 94068 - protein, 17 aa, Artificial Sequence
  Description of Artificial Sequence: Synthetic peptide
  Seed: MCSLMQGSTLPRRSGAA
MCSLMFGSLLARRTGAA

SEQ ID NO: 94069 - protein, 17 aa, Artificial Sequence
  Description of Artificial Sequence: Synthetic peptide
  Seed: MCSLMQGSTLPRRSGAA
MCSLMFGSLLARRVGAA

SEQ ID NO: 94070 - protein, 17 aa, Artificial Sequence
  Description of Artificial Sequence: Synthetic peptide
  Seed: MCSLMQGSTLPRRSGAA
MCSLMFGSLLGRRAGAA

SEQ ID NO: 94071 - protein, 17 aa, Artificial Sequence
  Description of Artificial Sequence: Synthetic peptide
  Seed: MCSLMQGSTLPRRSGAA
MCSLMFGSLLGRRIGAA

SEQ ID NO: 94072 - protein, 17 aa, Artificial Sequence
  Description of Artificial Sequence: Synthetic peptide
  Seed: MCSLMQGSTLPRRSGAA
MCSLMFGSLLGRRLGAA

SEQ ID NO: 94073 - protein, 17 aa, Artificial Sequence
  Description of Artificial Sequence: Synthetic peptide
  Seed: MCSLMQGSTLPRRSGAA
MCSLMFGSLLGRRMGAA

SEQ ID NO: 94074 - protein, 17 aa, Artificial Sequence
  Description of Artificial Sequence: Synthetic peptide
  Seed: MCSLMQGSTLPRRSGAA
MCSLMFGSLLGRRNGAA

SEQ ID NO: 94075 - protein, 17 aa, Artificial Sequence
  Description of Artificial Sequence: Synthetic peptide
  Seed: MCSLMQGSTLPRRSGAA
MCSLMFGSLLGRRSGAA

SEQ ID NO: 94076 - protein, 17 aa, Artificial Sequence
  Description of Artificial Sequence: Synthetic peptide
  Seed: MCSLMQGSTLPRRSGAA
MCSLMFGSLLGRRTGAA

SEQ ID NO: 94077 - protein, 17 aa, Artificial Sequence
  Description of Artificial Sequence: Synthetic peptide
  Seed: MCSLMQGSTLPRRSGAA
MCSLMFGSLLGRRVGAA

SEQ ID NO: 94078 - protein, 17 aa, Artificial Sequence
  Description of Artificial Sequence: Synthetic peptide
  Seed: MCSLMQGSTLPRRSGAA
MCSLMFGSLLIRRAGAA

SEQ ID NO: 94079 - protein, 17 aa, Artificial Sequence
  Description of Artificial Sequence: Synthetic peptide
  Seed: MCSLMQGSTLPRRSGAA
MCSLMFGSLLIRRIGAA

SEQ ID NO: 94080 - protein, 17 aa, Artificial Sequence
  Description of Artificial Sequence: Synthetic peptide
  Seed: MCSLMQGSTLPRRSGAA
MCSLMFGSLLIRRNGAA

SEQ ID NO: 94081 - protein, 17 aa, Artificial Sequence
  Description of Artificial Sequence: Synthetic peptide
  Seed: MCSLMQGSTLPRRSGAA
MCSLMFGSLLIRRSGAA

SEQ ID NO: 94082 - protein, 17 aa, Artificial Sequence
  Description of Artificial Sequence: Synthetic peptide
  Seed: MCSLMQGSTLPRRSGAA
MCSLMFGSLLIRRTGAA

SEQ ID NO: 94083 - protein, 17 aa, Artificial Sequence
  Description of Artificial Sequence: Synthetic peptide
  Seed: MCSLMQGSTLPRRSGAA
MCSLMFGSLLIRRVGAA

SEQ ID NO: 94084 - protein, 17 aa, Artificial Sequence
  Description of Artificial Sequence: Synthetic peptide
  Seed: MCSLMQGSTLPRRSGAA
MCSLMFGSLLNRRAGAA

SEQ ID NO: 94085 - protein, 17 aa, Artificial Sequence
  Description of Artificial Sequence: Synthetic peptide
  Seed: MCSLMQGSTLPRRSGAA
MCSLMFGSLLNRRIGAA

SEQ ID NO: 94086 - protein, 17 aa, Artificial Sequence
  Description of Artificial Sequence: Synthetic peptide
  Seed: MCSLMQGSTLPRRSGAA
MCSLMFGSLLNRRNGAA

SEQ ID NO: 94087 - protein, 17 aa, Artificial Sequence
  Description of Artificial Sequence: Synthetic peptide
  Seed: MCSLMQGSTLPRRSGAA
MCSLMFGSLLNRRSGAA

SEQ ID NO: 94088 - protein, 17 aa, Artificial Sequence
  Description of Artificial Sequence: Synthetic peptide
  Seed: MCSLMQGSTLPRRSGAA
MCSLMFGSLLNRRVGAA

SEQ ID NO: 94089 - protein, 17 aa, Artificial Sequence
  Description of Artificial Sequence: Synthetic peptide
  Seed: MCSLMQGSTLPRRSGAA
MCSLMFGSLLPRRAGAA

SEQ ID NO: 94090 - protein, 17 aa, Artificial Sequence
  Description of Artificial Sequence: Synthetic peptide
  Seed: MCSLMQGSTLPRRSGAA
MCSLMFGSLLPRRGGAA

SEQ ID NO: 94091 - protein, 17 aa, Artificial Sequence
  Description of Artificial Sequence: Synthetic peptide
  Seed: MCSLMQGSTLPRRSGAA
MCSLMFGSLLPRRIGAA

SEQ ID NO: 94092 - protein, 17 aa, Artificial Sequence
  Description of Artificial Sequence: Synthetic peptide
  Seed: MCSLMQGSTLPRRSGAA
MCSLMFGSLLPRRLGAA

SEQ ID NO: 94093 - protein, 17 aa, Artificial Sequence
  Description of Artificial Sequence: Synthetic peptide
  Seed: MCSLMQGSTLPRRSGAA
MCSLMFGSLLPRRMGAA

SEQ ID NO: 94094 - protein, 17 aa, Artificial Sequence
  Description of Artificial Sequence: Synthetic peptide
  Seed: MCSLMQGSTLPRRSGAA
MCSLMFGSLLPRRNGAA

SEQ ID NO: 94095 - protein, 17 aa, Artificial Sequence
  Description of Artificial Sequence: Synthetic peptide
  Seed: MCSLMQGSTLPRRSGAA
MCSLMFGSLLPRRSGAA

SEQ ID NO: 94096 - protein, 17 aa, Artificial Sequence
  Description of Artificial Sequence: Synthetic peptide
  Seed: MCSLMQGSTLPRRSGAA
MCSLMFGSLLPRRTGAA

SEQ ID NO: 94097 - protein, 17 aa, Artificial Sequence
  Description of Artificial Sequence: Synthetic peptide
  Seed: MCSLMQGSTLPRRSGAA
MCSLMFGSLLPRRVGAA

SEQ ID NO: 94098 - protein, 17 aa, Artificial Sequence
  Description of Artificial Sequence: Synthetic peptide
  Seed: MCSLMQGSTLPRRSGAA
MCSLMFGSLLSRRAGAA

SEQ ID NO: 94099 - protein, 17 aa, Artificial Sequence
  Description of Artificial Sequence: Synthetic peptide
  Seed: MCSLMQGSTLPRRSGAA
MCSLMFGSLLSRRGGAA

SEQ ID NO: 94100 - protein, 17 aa, Artificial Sequence
  Description of Artificial Sequence: Synthetic peptide
  Seed: MCSLMQGSTLPRRSGAA
MCSLMFGSLLSRRIGAA

SEQ ID NO: 94101 - protein, 17 aa, Artificial Sequence
  Description of Artificial Sequence: Synthetic peptide
  Seed: MCSLMQGSTLPRRSGAA
MCSLMFGSLLSRRLGAA

SEQ ID NO: 94102 - protein, 17 aa, Artificial Sequence
  Description of Artificial Sequence: Synthetic peptide
  Seed: MCSLMQGSTLPRRSGAA
MCSLMFGSLLSRRMGAA

SEQ ID NO: 94103 - protein, 17 aa, Artificial Sequence
  Description of Artificial Sequence: Synthetic peptide
  Seed: MCSLMQGSTLPRRSGAA
MCSLMFGSLLSRRNGAA

SEQ ID NO: 94104 - protein, 17 aa, Artificial Sequence
  Description of Artificial Sequence: Synthetic peptide
  Seed: MCSLMQGSTLPRRSGAA
MCSLMFGSLLSRRSGAA

SEQ ID NO: 94105 - protein, 17 aa, Artificial Sequence
  Description of Artificial Sequence: Synthetic peptide
  Seed: MCSLMQGSTLPRRSGAA
MCSLMFGSLLSRRTGAA

SEQ ID NO: 94106 - protein, 17 aa, Artificial Sequence
  Description of Artificial Sequence: Synthetic peptide
  Seed: MCSLMQGSTLPRRSGAA
MCSLMFGSLLSRRVGAA

SEQ ID NO: 94107 - protein, 17 aa, Artificial Sequence
  Description of Artificial Sequence: Synthetic peptide
  Seed: MCSLMQGSTLPRRSGAA
MCSLMFGSLLTRRAGAA

SEQ ID NO: 94108 - protein, 17 aa, Artificial Sequence
  Description of Artificial Sequence: Synthetic peptide
  Seed: MCSLMQGSTLPRRSGAA
MCSLMFGSLLTRRIGAA

SEQ ID NO: 94109 - protein, 17 aa, Artificial Sequence
  Description of Artificial Sequence: Synthetic peptide
  Seed: MCSLMQGSTLPRRSGAA
MCSLMFGSLLTRRLGAA

SEQ ID NO: 94110 - protein, 17 aa, Artificial Sequence
  Description of Artificial Sequence: Synthetic peptide
  Seed: MCSLMQGSTLPRRSGAA
MCSLMFGSLLTRRMGAA

SEQ ID NO: 94111 - protein, 17 aa, Artificial Sequence
  Description of Artificial Sequence: Synthetic peptide
  Seed: MCSLMQGSTLPRRSGAA
MCSLMFGSLLTRRNGAA

SEQ ID NO: 94112 - protein, 17 aa, Artificial Sequence
  Description of Artificial Sequence: Synthetic peptide
  Seed: MCSLMQGSTLPRRSGAA
MCSLMFGSLLTRRSGAA

SEQ ID NO: 94113 - protein, 17 aa, Artificial Sequence
  Description of Artificial Sequence: Synthetic peptide
  Seed: MCSLMQGSTLPRRSGAA
MCSLMFGSLLTRRTGAA

SEQ ID NO: 94114 - protein, 17 aa, Artificial Sequence
  Description of Artificial Sequence: Synthetic peptide
  Seed: MCSLMQGSTLPRRSGAA
MCSLMFGSLLTRRVGAA

SEQ ID NO: 94115 - protein, 17 aa, Artificial Sequence
  Description of Artificial Sequence: Synthetic peptide
  Seed: MCSLMQGSTLPRRSGAA
MCSLMFGSLLVRRAGAA

SEQ ID NO: 94116 - protein, 17 aa, Artificial Sequence
  Description of Artificial Sequence: Synthetic peptide
  Seed: MCSLMQGSTLPRRSGAA
MCSLMFGSLLVRRIGAA

SEQ ID NO: 94117 - protein, 17 aa, Artificial Sequence
  Description of Artificial Sequence: Synthetic peptide
  Seed: MCSLMQGSTLPRRSGAA
MCSLMFGSLLVRRLGAA

SEQ ID NO: 94118 - protein, 17 aa, Artificial Sequence
  Description of Artificial Sequence: Synthetic peptide
  Seed: MCSLMQGSTLPRRSGAA
MCSLMFGSLLVRRMGAA

SEQ ID NO: 94119 - protein, 17 aa, Artificial Sequence
  Description of Artificial Sequence: Synthetic peptide
  Seed: MCSLMQGSTLPRRSGAA
MCSLMFGSLLVRRNGAA

SEQ ID NO: 94120 - protein, 17 aa, Artificial Sequence
  Description of Artificial Sequence: Synthetic peptide
  Seed: MCSLMQGSTLPRRSGAA
MCSLMFGSLLVRRSGAA

SEQ ID NO: 94121 - protein, 17 aa, Artificial Sequence
  Description of Artificial Sequence: Synthetic peptide
  Seed: MCSLMQGSTLPRRSGAA
MCSLMFGSLLVRRTGAA

SEQ ID NO: 94122 - protein, 17 aa, Artificial Sequence
  Description of Artificial Sequence: Synthetic peptide
  Seed: MCSLMQGSTLPRRSGAA
MCSLMFGSLLVRRVGAA

SEQ ID NO: 94123 - protein, 17 aa, Artificial Sequence
  Description of Artificial Sequence: Synthetic peptide
  Seed: MCSLMQGSTLPRRSGAA
MCSLMFGSMLARRAGAA

SEQ ID NO: 94124 - protein, 17 aa, Artificial Sequence
  Description of Artificial Sequence: Synthetic peptide
  Seed: MCSLMQGSTLPRRSGAA
MCSLMFGSMLARRDGAA

SEQ ID NO: 94125 - protein, 17 aa, Artificial Sequence
  Description of Artificial Sequence: Synthetic peptide
  Seed: MCSLMQGSTLPRRSGAA
MCSLMFGSMLARREGAA

SEQ ID NO: 94126 - protein, 17 aa, Artificial Sequence
  Description of Artificial Sequence: Synthetic peptide
  Seed: MCSLMQGSTLPRRSGAA
MCSLMFGSMLARRFGAA

SEQ ID NO: 94127 - protein, 17 aa, Artificial Sequence
  Description of Artificial Sequence: Synthetic peptide
  Seed: MCSLMQGSTLPRRSGAA
MCSLMFGSMLARRGGAA

SEQ ID NO: 94128 - protein, 17 aa, Artificial Sequence
  Description of Artificial Sequence: Synthetic peptide
  Seed: MCSLMQGSTLPRRSGAA
MCSLMFGSMLARRHGAA

SEQ ID NO: 94129 - protein, 17 aa, Artificial Sequence
  Description of Artificial Sequence: Synthetic peptide
  Seed: MCSLMQGSTLPRRSGAA
MCSLMFGSMLARRIGAA

SEQ ID NO: 94130 - protein, 17 aa, Artificial Sequence
  Description of Artificial Sequence: Synthetic peptide
  Seed: MCSLMQGSTLPRRSGAA
MCSLMFGSMLARRLGAA

SEQ ID NO: 94131 - protein, 17 aa, Artificial Sequence
  Description of Artificial Sequence: Synthetic peptide
  Seed: MCSLMQGSTLPRRSGAA
MCSLMFGSMLARRMGAA

SEQ ID NO: 94132 - protein, 17 aa, Artificial Sequence
  Description of Artificial Sequence: Synthetic peptide
  Seed: MCSLMQGSTLPRRSGAA
MCSLMFGSMLARRNGAA

SEQ ID NO: 94133 - protein, 17 aa, Artificial Sequence
  Description of Artificial Sequence: Synthetic peptide
  Seed: MCSLMQGSTLPRRSGAA
MCSLMFGSMLARRPGAA

SEQ ID NO: 94134 - protein, 17 aa, Artificial Sequence
  Description of Artificial Sequence: Synthetic peptide
  Seed: MCSLMQGSTLPRRSGAA
MCSLMFGSMLARRQGAA

SEQ ID NO: 94135 - protein, 17 aa, Artificial Sequence
  Description of Artificial Sequence: Synthetic peptide
  Seed: MCSLMQGSTLPRRSGAA
MCSLMFGSMLARRSGAA

SEQ ID NO: 94136 - protein, 17 aa, Artificial Sequence
  Description of Artificial Sequence: Synthetic peptide
  Seed: MCSLMQGSTLPRRSGAA
MCSLMFGSMLARRTGAA

SEQ ID NO: 94137 - protein, 17 aa, Artificial Sequence
  Description of Artificial Sequence: Synthetic peptide
  Seed: MCSLMQGSTLPRRSGAA
MCSLMFGSMLARRVGAA

SEQ ID NO: 94138 - protein, 17 aa, Artificial Sequence
  Description of Artificial Sequence: Synthetic peptide
  Seed: MCSLMQGSTLPRRSGAA
MCSLMFGSMLGRRAGAA

SEQ ID NO: 94139 - protein, 17 aa, Artificial Sequence
  Description of Artificial Sequence: Synthetic peptide
  Seed: MCSLMQGSTLPRRSGAA
MCSLMFGSMLGRRIGAA

SEQ ID NO: 94140 - protein, 17 aa, Artificial Sequence
  Description of Artificial Sequence: Synthetic peptide
  Seed: MCSLMQGSTLPRRSGAA
MCSLMFGSMLGRRLGAA

SEQ ID NO: 94141 - protein, 17 aa, Artificial Sequence
  Description of Artificial Sequence: Synthetic peptide
  Seed: MCSLMQGSTLPRRSGAA
MCSLMFGSMLGRRMGAA

SEQ ID NO: 94142 - protein, 17 aa, Artificial Sequence
  Description of Artificial Sequence: Synthetic peptide
  Seed: MCSLMQGSTLPRRSGAA
MCSLMFGSMLGRRNGAA

SEQ ID NO: 94143 - protein, 17 aa, Artificial Sequence
  Description of Artificial Sequence: Synthetic peptide
  Seed: MCSLMQGSTLPRRSGAA
MCSLMFGSMLGRRSGAA

SEQ ID NO: 94144 - protein, 17 aa, Artificial Sequence
  Description of Artificial Sequence: Synthetic peptide
  Seed: MCSLMQGSTLPRRSGAA
MCSLMFGSMLGRRTGAA

SEQ ID NO: 94145 - protein, 17 aa, Artificial Sequence
  Description of Artificial Sequence: Synthetic peptide
  Seed: MCSLMQGSTLPRRSGAA
MCSLMFGSMLGRRVGAA

SEQ ID NO: 94146 - protein, 17 aa, Artificial Sequence
  Description of Artificial Sequence: Synthetic peptide
  Seed: MCSLMQGSTLPRRSGAA
MCSLMFGSMLIRRAGAA

SEQ ID NO: 94147 - protein, 17 aa, Artificial Sequence
  Description of Artificial Sequence: Synthetic peptide
  Seed: MCSLMQGSTLPRRSGAA
MCSLMFGSMLIRRIGAA

SEQ ID NO: 94148 - protein, 17 aa, Artificial Sequence
  Description of Artificial Sequence: Synthetic peptide
  Seed: MCSLMQGSTLPRRSGAA
MCSLMFGSMLIRRLGAA

SEQ ID NO: 94149 - protein, 17 aa, Artificial Sequence
  Description of Artificial Sequence: Synthetic peptide
  Seed: MCSLMQGSTLPRRSGAA
MCSLMFGSMLIRRMGAA

SEQ ID NO: 94150 - protein, 17 aa, Artificial Sequence
  Description of Artificial Sequence: Synthetic peptide
  Seed: MCSLMQGSTLPRRSGAA
MCSLMFGSMLIRRNGAA

SEQ ID NO: 94151 - protein, 17 aa, Artificial Sequence
  Description of Artificial Sequence: Synthetic peptide
  Seed: MCSLMQGSTLPRRSGAA
MCSLMFGSMLIRRSGAA

SEQ ID NO: 94152 - protein, 17 aa, Artificial Sequence
  Description of Artificial Sequence: Synthetic peptide
  Seed: MCSLMQGSTLPRRSGAA
MCSLMFGSMLIRRTGAA

SEQ ID NO: 94153 - protein, 17 aa, Artificial Sequence
  Description of Artificial Sequence: Synthetic peptide
  Seed: MCSLMQGSTLPRRSGAA
MCSLMFGSMLIRRVGAA

SEQ ID NO: 94154 - protein, 17 aa, Artificial Sequence
  Description of Artificial Sequence: Synthetic peptide
  Seed: MCSLMQGSTLPRRSGAA
MCSLMFGSMLLRRAGAA

SEQ ID NO: 94155 - protein, 17 aa, Artificial Sequence
  Description of Artificial Sequence: Synthetic peptide
  Seed: MCSLMQGSTLPRRSGAA
MCSLMFGSMLMRRAGAA

SEQ ID NO: 94156 - protein, 17 aa, Artificial Sequence
  Description of Artificial Sequence: Synthetic peptide
  Seed: MCSLMQGSTLPRRSGAA
MCSLMFGSMLNRRAGAA

SEQ ID NO: 94157 - protein, 17 aa, Artificial Sequence
  Description of Artificial Sequence: Synthetic peptide
  Seed: MCSLMQGSTLPRRSGAA
MCSLMFGSMLNRRIGAA

SEQ ID NO: 94158 - protein, 17 aa, Artificial Sequence
  Description of Artificial Sequence: Synthetic peptide
  Seed: MCSLMQGSTLPRRSGAA
MCSLMFGSMLNRRLGAA

SEQ ID NO: 94159 - protein, 17 aa, Artificial Sequence
  Description of Artificial Sequence: Synthetic peptide
  Seed: MCSLMQGSTLPRRSGAA
MCSLMFGSMLNRRMGAA

SEQ ID NO: 94160 - protein, 17 aa, Artificial Sequence
  Description of Artificial Sequence: Synthetic peptide
  Seed: MCSLMQGSTLPRRSGAA
MCSLMFGSMLNRRNGAA

SEQ ID NO: 94161 - protein, 17 aa, Artificial Sequence
  Description of Artificial Sequence: Synthetic peptide
  Seed: MCSLMQGSTLPRRSGAA
MCSLMFGSMLNRRSGAA

SEQ ID NO: 94162 - protein, 17 aa, Artificial Sequence
  Description of Artificial Sequence: Synthetic peptide
  Seed: MCSLMQGSTLPRRSGAA
MCSLMFGSMLNRRTGAA

SEQ ID NO: 94163 - protein, 17 aa, Artificial Sequence
  Description of Artificial Sequence: Synthetic peptide
  Seed: MCSLMQGSTLPRRSGAA
MCSLMFGSMLNRRVGAA

SEQ ID NO: 94164 - protein, 17 aa, Artificial Sequence
  Description of Artificial Sequence: Synthetic peptide
  Seed: MCSLMQGSTLPRRSGAA
MCSLMFGSMLPRRAGAA

SEQ ID NO: 94165 - protein, 17 aa, Artificial Sequence
  Description of Artificial Sequence: Synthetic peptide
  Seed: MCSLMQGSTLPRRSGAA
MCSLMFGSMLPRRGGAA

SEQ ID NO: 94166 - protein, 17 aa, Artificial Sequence
  Description of Artificial Sequence: Synthetic peptide
  Seed: MCSLMQGSTLPRRSGAA
MCSLMFGSMLPRRIGAA

SEQ ID NO: 94167 - protein, 17 aa, Artificial Sequence
  Description of Artificial Sequence: Synthetic peptide
  Seed: MCSLMQGSTLPRRSGAA
MCSLMFGSMLPRRLGAA

SEQ ID NO: 94168 - protein, 17 aa, Artificial Sequence
  Description of Artificial Sequence: Synthetic peptide
  Seed: MCSLMQGSTLPRRSGAA
MCSLMFGSMLPRRMGAA

SEQ ID NO: 94169 - protein, 17 aa, Artificial Sequence
  Description of Artificial Sequence: Synthetic peptide
  Seed: MCSLMQGSTLPRRSGAA
MCSLMFGSMLPRRNGAA

SEQ ID NO: 94170 - protein, 17 aa, Artificial Sequence
  Description of Artificial Sequence: Synthetic peptide
  Seed: MCSLMQGSTLPRRSGAA
MCSLMFGSMLPRRSGAA

SEQ ID NO: 94171 - protein, 17 aa, Artificial Sequence
  Description of Artificial Sequence: Synthetic peptide
  Seed: MCSLMQGSTLPRRSGAA
MCSLMFGSMLPRRTGAA

SEQ ID NO: 94172 - protein, 17 aa, Artificial Sequence
  Description of Artificial Sequence: Synthetic peptide
  Seed: MCSLMQGSTLPRRSGAA
MCSLMFGSMLPRRVGAA

SEQ ID NO: 94173 - protein, 17 aa, Artificial Sequence
  Description of Artificial Sequence: Synthetic peptide
  Seed: MCSLMQGSTLPRRSGAA
MCSLMFGSMLSRRAGAA

SEQ ID NO: 94174 - protein, 17 aa, Artificial Sequence
  Description of Artificial Sequence: Synthetic peptide
  Seed: MCSLMQGSTLPRRSGAA
MCSLMFGSMLSRRDGAA

SEQ ID NO: 94175 - protein, 17 aa, Artificial Sequence
  Description of Artificial Sequence: Synthetic peptide
  Seed: MCSLMQGSTLPRRSGAA
MCSLMFGSMLSRRGGAA

SEQ ID NO: 94176 - protein, 17 aa, Artificial Sequence
  Description of Artificial Sequence: Synthetic peptide
  Seed: MCSLMQGSTLPRRSGAA
MCSLMFGSMLSRRHGAA

SEQ ID NO: 94177 - protein, 17 aa, Artificial Sequence
  Description of Artificial Sequence: Synthetic peptide
  Seed: MCSLMQGSTLPRRSGAA
MCSLMFGSMLSRRIGAA

SEQ ID NO: 94178 - protein, 17 aa, Artificial Sequence
  Description of Artificial Sequence: Synthetic peptide
  Seed: MCSLMQGSTLPRRSGAA
MCSLMFGSMLSRRLGAA

SEQ ID NO: 94179 - protein, 17 aa, Artificial Sequence
  Description of Artificial Sequence: Synthetic peptide
  Seed: MCSLMQGSTLPRRSGAA
MCSLMFGSMLSRRMGAA

SEQ ID NO: 94180 - protein, 17 aa, Artificial Sequence
  Description of Artificial Sequence: Synthetic peptide
  Seed: MCSLMQGSTLPRRSGAA
MCSLMFGSMLSRRNGAA

SEQ ID NO: 94181 - protein, 17 aa, Artificial Sequence
  Description of Artificial Sequence: Synthetic peptide
  Seed: MCSLMQGSTLPRRSGAA
MCSLMFGSMLSRRPGAA

SEQ ID NO: 94182 - protein, 17 aa, Artificial Sequence
  Description of Artificial Sequence: Synthetic peptide
  Seed: MCSLMQGSTLPRRSGAA
MCSLMFGSMLSRRQGAA

SEQ ID NO: 94183 - protein, 17 aa, Artificial Sequence
  Description of Artificial Sequence: Synthetic peptide
  Seed: MCSLMQGSTLPRRSGAA
MCSLMFGSMLSRRSGAA

SEQ ID NO: 94184 - protein, 17 aa, Artificial Sequence
  Description of Artificial Sequence: Synthetic peptide
  Seed: MCSLMQGSTLPRRSGAA
MCSLMFGSMLSRRTGAA

SEQ ID NO: 94185 - protein, 17 aa, Artificial Sequence
  Description of Artificial Sequence: Synthetic peptide
  Seed: MCSLMQGSTLPRRSGAA
MCSLMFGSMLSRRVGAA

SEQ ID NO: 94186 - protein, 17 aa, Artificial Sequence
  Description of Artificial Sequence: Synthetic peptide
  Seed: MCSLMQGSTLPRRSGAA
MCSLMFGSMLTRRAGAA

SEQ ID NO: 94187 - protein, 17 aa, Artificial Sequence
  Description of Artificial Sequence: Synthetic peptide
  Seed: MCSLMQGSTLPRRSGAA
MCSLMFGSMLTRRGGAA

SEQ ID NO: 94188 - protein, 17 aa, Artificial Sequence
  Description of Artificial Sequence: Synthetic peptide
  Seed: MCSLMQGSTLPRRSGAA
MCSLMFGSMLTRRHGAA

SEQ ID NO: 94189 - protein, 17 aa, Artificial Sequence
  Description of Artificial Sequence: Synthetic peptide
  Seed: MCSLMQGSTLPRRSGAA
MCSLMFGSMLTRRIGAA

SEQ ID NO: 94190 - protein, 17 aa, Artificial Sequence
  Description of Artificial Sequence: Synthetic peptide
  Seed: MCSLMQGSTLPRRSGAA
MCSLMFGSMLTRRLGAA

SEQ ID NO: 94191 - protein, 17 aa, Artificial Sequence
  Description of Artificial Sequence: Synthetic peptide
  Seed: MCSLMQGSTLPRRSGAA
MCSLMFGSMLTRRMGAA

SEQ ID NO: 94192 - protein, 17 aa, Artificial Sequence
  Description of Artificial Sequence: Synthetic peptide
  Seed: MCSLMQGSTLPRRSGAA
MCSLMFGSMLTRRNGAA

SEQ ID NO: 94193 - protein, 17 aa, Artificial Sequence
  Description of Artificial Sequence: Synthetic peptide
  Seed: MCSLMQGSTLPRRSGAA
MCSLMFGSMLTRRSGAA

SEQ ID NO: 94194 - protein, 17 aa, Artificial Sequence
  Description of Artificial Sequence: Synthetic peptide
  Seed: MCSLMQGSTLPRRSGAA
MCSLMFGSMLTRRTGAA

SEQ ID NO: 94195 - protein, 17 aa, Artificial Sequence
  Description of Artificial Sequence: Synthetic peptide
  Seed: MCSLMQGSTLPRRSGAA
MCSLMFGSMLTRRVGAA

SEQ ID NO: 94196 - protein, 17 aa, Artificial Sequence
  Description of Artificial Sequence: Synthetic peptide
  Seed: MCSLMQGSTLPRRSGAA
MCSLMFGSMLVRRAGAA

SEQ ID NO: 94197 - protein, 17 aa, Artificial Sequence
  Description of Artificial Sequence: Synthetic peptide
  Seed: MCSLMQGSTLPRRSGAA
MCSLMFGSMLVRRGGAA

SEQ ID NO: 94198 - protein, 17 aa, Artificial Sequence
  Description of Artificial Sequence: Synthetic peptide
  Seed: MCSLMQGSTLPRRSGAA
MCSLMFGSMLVRRHGAA

SEQ ID NO: 94199 - protein, 17 aa, Artificial Sequence
  Description of Artificial Sequence: Synthetic peptide
  Seed: MCSLMQGSTLPRRSGAA
MCSLMFGSMLVRRIGAA

SEQ ID NO: 94200 - protein, 17 aa, Artificial Sequence
  Description of Artificial Sequence: Synthetic peptide
  Seed: MCSLMQGSTLPRRSGAA
MCSLMFGSMLVRRLGAA

SEQ ID NO: 94201 - protein, 17 aa, Artificial Sequence
  Description of Artificial Sequence: Synthetic peptide
  Seed: MCSLMQGSTLPRRSGAA
MCSLMFGSMLVRRMGAA

SEQ ID NO: 94202 - protein, 17 aa, Artificial Sequence
  Description of Artificial Sequence: Synthetic peptide
  Seed: MCSLMQGSTLPRRSGAA
MCSLMFGSMLVRRNGAA

SEQ ID NO: 94203 - protein, 17 aa, Artificial Sequence
  Description of Artificial Sequence: Synthetic peptide
  Seed: MCSLMQGSTLPRRSGAA
MCSLMFGSMLVRRSGAA

SEQ ID NO: 94204 - protein, 17 aa, Artificial Sequence
  Description of Artificial Sequence: Synthetic peptide
  Seed: MCSLMQGSTLPRRSGAA
MCSLMFGSMLVRRTGAA

SEQ ID NO: 94205 - protein, 17 aa, Artificial Sequence
  Description of Artificial Sequence: Synthetic peptide
  Seed: MCSLMQGSTLPRRSGAA
MCSLMFGSMLVRRVGAA

SEQ ID NO: 94206 - protein, 17 aa, Artificial Sequence
  Description of Artificial Sequence: Synthetic peptide
  Seed: MCSLMQGSTLPRRSGAA
MCSLMFGSQLARRAGAA

SEQ ID NO: 94207 - protein, 17 aa, Artificial Sequence
  Description of Artificial Sequence: Synthetic peptide
  Seed: MCSLMQGSTLPRRSGAA
MCSLMFGSQLARRSGAA

SEQ ID NO: 94208 - protein, 17 aa, Artificial Sequence
  Description of Artificial Sequence: Synthetic peptide
  Seed: MCSLMQGSTLPRRSGAA
MCSLMFGSQLARRVGAA

SEQ ID NO: 94209 - protein, 17 aa, Artificial Sequence
  Description of Artificial Sequence: Synthetic peptide
  Seed: MCSLMQGSTLPRRSGAA
MCSLMFGSQLSRRAGAA

SEQ ID NO: 94210 - protein, 17 aa, Artificial Sequence
  Description of Artificial Sequence: Synthetic peptide
  Seed: MCSLMQGSTLPRRSGAA
MCSLMFGSSLARRAGAA

SEQ ID NO: 94211 - protein, 17 aa, Artificial Sequence
  Description of Artificial Sequence: Synthetic peptide
  Seed: MCSLMQGSTLPRRSGAA
MCSLMFGSTLARRAGAA

SEQ ID NO: 94212 - protein, 17 aa, Artificial Sequence
  Description of Artificial Sequence: Synthetic peptide
  Seed: MCSLMQGSTLPRRSGAA
MCSLMFGSVLARRAGAA

SEQ ID NO: 94213 - protein, 17 aa, Artificial Sequence
  Description of Artificial Sequence: Synthetic peptide
  Seed: MCSLMQGSTLPRRSGAA
MCSLMFGSVLARRIGAA

SEQ ID NO: 94214 - protein, 17 aa, Artificial Sequence
  Description of Artificial Sequence: Synthetic peptide
  Seed: MCSLMQGSTLPRRSGAA
MCSLMFGSVLARRLGAA

SEQ ID NO: 94215 - protein, 17 aa, Artificial Sequence
  Description of Artificial Sequence: Synthetic peptide
  Seed: MCSLMQGSTLPRRSGAA
MCSLMFGSVLARRMGAA

SEQ ID NO: 94216 - protein, 17 aa, Artificial Sequence
  Description of Artificial Sequence: Synthetic peptide
  Seed: MCSLMQGSTLPRRSGAA
MCSLMFGSVLARRNGAA

SEQ ID NO: 94217 - protein, 17 aa, Artificial Sequence
  Description of Artificial Sequence: Synthetic peptide
  Seed: MCSLMQGSTLPRRSGAA
MCSLMFGSVLARRSGAA

SEQ ID NO: 94218 - protein, 17 aa, Artificial Sequence
  Description of Artificial Sequence: Synthetic peptide
  Seed: MCSLMQGSTLPRRSGAA
MCSLMFGSVLARRTGAA

SEQ ID NO: 94219 - protein, 17 aa, Artificial Sequence
  Description of Artificial Sequence: Synthetic peptide
  Seed: MCSLMQGSTLPRRSGAA
MCSLMFGSVLARRVGAA

SEQ ID NO: 94220 - protein, 17 aa, Artificial Sequence
  Description of Artificial Sequence: Synthetic peptide
  Seed: MCSLMQGSTLPRRSGAA
MCSLMFGSVLGRRAGAA

SEQ ID NO: 94221 - protein, 17 aa, Artificial Sequence
  Description of Artificial Sequence: Synthetic peptide
  Seed: MCSLMQGSTLPRRSGAA
MCSLMFGSVLPRRAGAA

SEQ ID NO: 94222 - protein, 17 aa, Artificial Sequence
  Description of Artificial Sequence: Synthetic peptide
  Seed: MCSLMQGSTLPRRSGAA
MCSLMFGSVLPRRIGAA

SEQ ID NO: 94223 - protein, 17 aa, Artificial Sequence
  Description of Artificial Sequence: Synthetic peptide
  Seed: MCSLMQGSTLPRRSGAA
MCSLMFGSVLPRRNGAA

SEQ ID NO: 94224 - protein, 17 aa, Artificial Sequence
  Description of Artificial Sequence: Synthetic peptide
  Seed: MCSLMQGSTLPRRSGAA
MCSLMFGSVLPRRSGAA

SEQ ID NO: 94225 - protein, 17 aa, Artificial Sequence
  Description of Artificial Sequence: Synthetic peptide
  Seed: MCSLMQGSTLPRRSGAA
MCSLMFGSVLPRRVGAA

SEQ ID NO: 94226 - protein, 17 aa, Artificial Sequence
  Description of Artificial Sequence: Synthetic peptide
  Seed: MCSLMQGSTLPRRSGAA
MCSLMFGSVLSRRAGAA

SEQ ID NO: 94227 - protein, 17 aa, Artificial Sequence
  Description of Artificial Sequence: Synthetic peptide
  Seed: MCSLMQGSTLPRRSGAA
MCSLMFGSVLSRRIGAA

SEQ ID NO: 94228 - protein, 17 aa, Artificial Sequence
  Description of Artificial Sequence: Synthetic peptide
  Seed: MCSLMQGSTLPRRSGAA
MCSLMFGSVLSRRNGAA

SEQ ID NO: 94229 - protein, 17 aa, Artificial Sequence
  Description of Artificial Sequence: Synthetic peptide
  Seed: MCSLMQGSTLPRRSGAA
MCSLMFGSVLSRRSGAA

SEQ ID NO: 94230 - protein, 17 aa, Artificial Sequence
  Description of Artificial Sequence: Synthetic peptide
  Seed: MCSLMQGSTLPRRSGAA
MCSLMFGSVLSRRTGAA

SEQ ID NO: 94231 - protein, 17 aa, Artificial Sequence
  Description of Artificial Sequence: Synthetic peptide
  Seed: MCSLMQGSTLPRRSGAA
MCSLMFGSVLSRRVGAA

SEQ ID NO: 94232 - protein, 17 aa, Artificial Sequence
  Description of Artificial Sequence: Synthetic peptide
  Seed: MCSLMQGSTLPRRSGAA
MCSLMFGSVLTRRAGAA

SEQ ID NO: 94233 - protein, 17 aa, Artificial Sequence
  Description of Artificial Sequence: Synthetic peptide
  Seed: MCSLMQGSTLPRRSGAA
MCSLMFGSVLTRRIGAA

SEQ ID NO: 94234 - protein, 17 aa, Artificial Sequence
  Description of Artificial Sequence: Synthetic peptide
  Seed: MCSLMQGSTLPRRSGAA
MCSLMFGSVLTRRNGAA

SEQ ID NO: 94235 - protein, 17 aa, Artificial Sequence
  Description of Artificial Sequence: Synthetic peptide
  Seed: MCSLMQGSTLPRRSGAA
MCSLMFGSVLTRRSGAA

SEQ ID NO: 94236 - protein, 17 aa, Artificial Sequence
  Description of Artificial Sequence: Synthetic peptide
  Seed: MCSLMQGSTLPRRSGAA
MCSLMFGSVLTRRTGAA

SEQ ID NO: 94237 - protein, 17 aa, Artificial Sequence
  Description of Artificial Sequence: Synthetic peptide
  Seed: MCSLMQGSTLPRRSGAA
MCSLMFGSVLTRRVGAA

SEQ ID NO: 94238 - protein, 17 aa, Artificial Sequence
  Description of Artificial Sequence: Synthetic peptide
  Seed: MCSLMQGSTLPRRSGAA
MCSLMFGSVLVRRAGAA

SEQ ID NO: 94239 - protein, 17 aa, Artificial Sequence
  Description of Artificial Sequence: Synthetic peptide
  Seed: MCSLMQGSTLPRRSGAA
MCSLMFGSVLVRRNGAA

SEQ ID NO: 94240 - protein, 17 aa, Artificial Sequence
  Description of Artificial Sequence: Synthetic peptide
  Seed: MCSLMQGSTLPRRSGAA
MCSLMFGSVLVRRSGAA

SEQ ID NO: 94241 - protein, 17 aa, Artificial Sequence
  Description of Artificial Sequence: Synthetic peptide
  Seed: MCSLMQGSTLPRRSGAA
MCSLMIGSLLARRAGAA

SEQ ID NO: 94242 - protein, 17 aa, Artificial Sequence
  Description of Artificial Sequence: Synthetic peptide
  Seed: MCSLMQGSTLPRRSGAA
MCSLMIGSMLARRAGAA

SEQ ID NO: 94243 - protein, 17 aa, Artificial Sequence
  Description of Artificial Sequence: Synthetic peptide
  Seed: MCSLMQGSTLPRRSGAA
MCSLMIGSMLARRSGAA

SEQ ID NO: 94244 - protein, 17 aa, Artificial Sequence
  Description of Artificial Sequence: Synthetic peptide
  Seed: MCSLMQGSTLPRRSGAA
MCSLMLGSLLARRAGAA

SEQ ID NO: 94245 - protein, 17 aa, Artificial Sequence
  Description of Artificial Sequence: Synthetic peptide
  Seed: MCSLMQGSTLPRRSGAA
MCSLMLGSMLARRAGAA

SEQ ID NO: 94246 - protein, 17 aa, Artificial Sequence
  Description of Artificial Sequence: Synthetic peptide
  Seed: MCSLMQGSTLPRRSGAA
MCSLMLGSMLARRSGAA

SEQ ID NO: 94247 - protein, 17 aa, Artificial Sequence
  Description of Artificial Sequence: Synthetic peptide
  Seed: MCSLMQGSTLPRRSGAA
MCSLMWGSILARRAGAA

SEQ ID NO: 94248 - protein, 17 aa, Artificial Sequence
  Description of Artificial Sequence: Synthetic peptide
  Seed: MCSLMQGSTLPRRSGAA
MCSLMWGSLLARRAGAA

SEQ ID NO: 94249 - protein, 17 aa, Artificial Sequence
  Description of Artificial Sequence: Synthetic peptide
  Seed: MCSLMQGSTLPRRSGAA
MCSLMWGSLLSRRAGAA

SEQ ID NO: 94250 - protein, 17 aa, Artificial Sequence
  Description of Artificial Sequence: Synthetic peptide
  Seed: MCSLMQGSTLPRRSGAA
MCSLMWGSMLARRAGAA

SEQ ID NO: 94251 - protein, 17 aa, Artificial Sequence
  Description of Artificial Sequence: Synthetic peptide
  Seed: MCSLMQGSTLPRRSGAA
MCSLMWGSMLARRIGAA

SEQ ID NO: 94252 - protein, 17 aa, Artificial Sequence
  Description of Artificial Sequence: Synthetic peptide
  Seed: MCSLMQGSTLPRRSGAA
MCSLMWGSMLARRSGAA

SEQ ID NO: 94253 - protein, 17 aa, Artificial Sequence
  Description of Artificial Sequence: Synthetic peptide
  Seed: MCSLMQGSTLPRRSGAA
MCSLMWGSMLARRVGAA

SEQ ID NO: 94254 - protein, 17 aa, Artificial Sequence
  Description of Artificial Sequence: Synthetic peptide
  Seed: MCSLMQGSTLPRRSGAA
MCSLMWGSMLSRRAGAA

SEQ ID NO: 94255 - protein, 17 aa, Artificial Sequence
  Description of Artificial Sequence: Synthetic peptide
  Seed: MCSLMQGSTLPRRSGAA
MCSLMWGSMLSRRVGAA

SEQ ID NO: 94256 - protein, 17 aa, Artificial Sequence
  Description of Artificial Sequence: Synthetic peptide
  Seed: MCSLMQGSTLPRRSGAA
MCSLMYGSALARRAGAA

SEQ ID NO: 94257 - protein, 17 aa, Artificial Sequence
  Description of Artificial Sequence: Synthetic peptide
  Seed: MCSLMQGSTLPRRSGAA
MCSLMYGSALARRIGAA

SEQ ID NO: 94258 - protein, 17 aa, Artificial Sequence
  Description of Artificial Sequence: Synthetic peptide
  Seed: MCSLMQGSTLPRRSGAA
MCSLMYGSALARRLGAA

SEQ ID NO: 94259 - protein, 17 aa, Artificial Sequence
  Description of Artificial Sequence: Synthetic peptide
  Seed: MCSLMQGSTLPRRSGAA
MCSLMYGSALARRMGAA

SEQ ID NO: 94260 - protein, 17 aa, Artificial Sequence
  Description of Artificial Sequence: Synthetic peptide
  Seed: MCSLMQGSTLPRRSGAA
MCSLMYGSALARRNGAA

SEQ ID NO: 94261 - protein, 17 aa, Artificial Sequence
  Description of Artificial Sequence: Synthetic peptide
  Seed: MCSLMQGSTLPRRSGAA
MCSLMYGSALARRSGAA

SEQ ID NO: 94262 - protein, 17 aa, Artificial Sequence
  Description of Artificial Sequence: Synthetic peptide
  Seed: MCSLMQGSTLPRRSGAA
MCSLMYGSALARRVGAA

SEQ ID NO: 94263 - protein, 17 aa, Artificial Sequence
  Description of Artificial Sequence: Synthetic peptide
  Seed: MCSLMQGSTLPRRSGAA
MCSLMYGSALPRRAGAA

SEQ ID NO: 94264 - protein, 17 aa, Artificial Sequence
  Description of Artificial Sequence: Synthetic peptide
  Seed: MCSLMQGSTLPRRSGAA
MCSLMYGSALSRRAGAA

SEQ ID NO: 94265 - protein, 17 aa, Artificial Sequence
  Description of Artificial Sequence: Synthetic peptide
  Seed: MCSLMQGSTLPRRSGAA
MCSLMYGSALSRRIGAA

SEQ ID NO: 94266 - protein, 17 aa, Artificial Sequence
  Description of Artificial Sequence: Synthetic peptide
  Seed: MCSLMQGSTLPRRSGAA
MCSLMYGSALSRRLGAA

SEQ ID NO: 94267 - protein, 17 aa, Artificial Sequence
  Description of Artificial Sequence: Synthetic peptide
  Seed: MCSLMQGSTLPRRSGAA
MCSLMYGSALSRRVGAA

SEQ ID NO: 94268 - protein, 17 aa, Artificial Sequence
  Description of Artificial Sequence: Synthetic peptide
  Seed: MCSLMQGSTLPRRSGAA
MCSLMYGSALTRRAGAA

SEQ ID NO: 94269 - protein, 17 aa, Artificial Sequence
  Description of Artificial Sequence: Synthetic peptide
  Seed: MCSLMQGSTLPRRSGAA
MCSLMYGSALTRRIGAA

SEQ ID NO: 94270 - protein, 17 aa, Artificial Sequence
  Description of Artificial Sequence: Synthetic peptide
  Seed: MCSLMQGSTLPRRSGAA
MCSLMYGSALTRRLGAA

SEQ ID NO: 94271 - protein, 17 aa, Artificial Sequence
  Description of Artificial Sequence: Synthetic peptide
  Seed: MCSLMQGSTLPRRSGAA
MCSLMYGSALTRRVGAA

SEQ ID NO: 94272 - protein, 17 aa, Artificial Sequence
  Description of Artificial Sequence: Synthetic peptide
  Seed: MCSLMQGSTLPRRSGAA
MCSLMYGSALVRRAGAA

SEQ ID NO: 94273 - protein, 17 aa, Artificial Sequence
  Description of Artificial Sequence: Synthetic peptide
  Seed: MCSLMQGSTLPRRSGAA
MCSLMYGSALVRRVGAA

SEQ ID NO: 94274 - protein, 17 aa, Artificial Sequence
  Description of Artificial Sequence: Synthetic peptide
  Seed: MCSLMQGSTLPRRSGAA
MCSLMYGSILARRAGAA

SEQ ID NO: 94275 - protein, 17 aa, Artificial Sequence
  Description of Artificial Sequence: Synthetic peptide
  Seed: MCSLMQGSTLPRRSGAA
MCSLMYGSILARRIGAA

SEQ ID NO: 94276 - protein, 17 aa, Artificial Sequence
  Description of Artificial Sequence: Synthetic peptide
  Seed: MCSLMQGSTLPRRSGAA
MCSLMYGSILARRLGAA

SEQ ID NO: 94277 - protein, 17 aa, Artificial Sequence
  Description of Artificial Sequence: Synthetic peptide
  Seed: MCSLMQGSTLPRRSGAA
MCSLMYGSILARRMGAA

SEQ ID NO: 94278 - protein, 17 aa, Artificial Sequence
  Description of Artificial Sequence: Synthetic peptide
  Seed: MCSLMQGSTLPRRSGAA
MCSLMYGSILARRNGAA

SEQ ID NO: 94279 - protein, 17 aa, Artificial Sequence
  Description of Artificial Sequence: Synthetic peptide
  Seed: MCSLMQGSTLPRRSGAA
MCSLMYGSILARRSGAA

SEQ ID NO: 94280 - protein, 17 aa, Artificial Sequence
  Description of Artificial Sequence: Synthetic peptide
  Seed: MCSLMQGSTLPRRSGAA
MCSLMYGSILARRTGAA

SEQ ID NO: 94281 - protein, 17 aa, Artificial Sequence
  Description of Artificial Sequence: Synthetic peptide
  Seed: MCSLMQGSTLPRRSGAA
MCSLMYGSILARRVGAA

SEQ ID NO: 94282 - protein, 17 aa, Artificial Sequence
  Description of Artificial Sequence: Synthetic peptide
  Seed: MCSLMQGSTLPRRSGAA
MCSLMYGSILGRRAGAA

SEQ ID NO: 94283 - protein, 17 aa, Artificial Sequence
  Description of Artificial Sequence: Synthetic peptide
  Seed: MCSLMQGSTLPRRSGAA
MCSLMYGSILGRRVGAA

SEQ ID NO: 94284 - protein, 17 aa, Artificial Sequence
  Description of Artificial Sequence: Synthetic peptide
  Seed: MCSLMQGSTLPRRSGAA
MCSLMYGSILIRRAGAA

SEQ ID NO: 94285 - protein, 17 aa, Artificial Sequence
  Description of Artificial Sequence: Synthetic peptide
  Seed: MCSLMQGSTLPRRSGAA
MCSLMYGSILPRRAGAA

SEQ ID NO: 94286 - protein, 17 aa, Artificial Sequence
  Description of Artificial Sequence: Synthetic peptide
  Seed: MCSLMQGSTLPRRSGAA
MCSLMYGSILPRRIGAA

SEQ ID NO: 94287 - protein, 17 aa, Artificial Sequence
  Description of Artificial Sequence: Synthetic peptide
  Seed: MCSLMQGSTLPRRSGAA
MCSLMYGSILPRRLGAA

SEQ ID NO: 94288 - protein, 17 aa, Artificial Sequence
  Description of Artificial Sequence: Synthetic peptide
  Seed: MCSLMQGSTLPRRSGAA
MCSLMYGSILPRRNGAA

SEQ ID NO: 94289 - protein, 17 aa, Artificial Sequence
  Description of Artificial Sequence: Synthetic peptide
  Seed: MCSLMQGSTLPRRSGAA
MCSLMYGSILPRRSGAA

SEQ ID NO: 94290 - protein, 17 aa, Artificial Sequence
  Description of Artificial Sequence: Synthetic peptide
  Seed: MCSLMQGSTLPRRSGAA
MCSLMYGSILPRRVGAA

SEQ ID NO: 94291 - protein, 17 aa, Artificial Sequence
  Description of Artificial Sequence: Synthetic peptide
  Seed: MCSLMQGSTLPRRSGAA
MCSLMYGSILSRRAGAA

SEQ ID NO: 94292 - protein, 17 aa, Artificial Sequence
  Description of Artificial Sequence: Synthetic peptide
  Seed: MCSLMQGSTLPRRSGAA
MCSLMYGSILSRRIGAA

SEQ ID NO: 94293 - protein, 17 aa, Artificial Sequence
  Description of Artificial Sequence: Synthetic peptide
  Seed: MCSLMQGSTLPRRSGAA
MCSLMYGSILSRRLGAA

SEQ ID NO: 94294 - protein, 17 aa, Artificial Sequence
  Description of Artificial Sequence: Synthetic peptide
  Seed: MCSLMQGSTLPRRSGAA
MCSLMYGSILSRRMGAA

SEQ ID NO: 94295 - protein, 17 aa, Artificial Sequence
  Description of Artificial Sequence: Synthetic peptide
  Seed: MCSLMQGSTLPRRSGAA
MCSLMYGSILSRRNGAA

SEQ ID NO: 94296 - protein, 17 aa, Artificial Sequence
  Description of Artificial Sequence: Synthetic peptide
  Seed: MCSLMQGSTLPRRSGAA
MCSLMYGSILSRRSGAA

SEQ ID NO: 94297 - protein, 17 aa, Artificial Sequence
  Description of Artificial Sequence: Synthetic peptide
  Seed: MCSLMQGSTLPRRSGAA
MCSLMYGSILSRRTGAA

SEQ ID NO: 94298 - protein, 17 aa, Artificial Sequence
  Description of Artificial Sequence: Synthetic peptide
  Seed: MCSLMQGSTLPRRSGAA
MCSLMYGSILSRRVGAA

SEQ ID NO: 94299 - protein, 17 aa, Artificial Sequence
  Description of Artificial Sequence: Synthetic peptide
  Seed: MCSLMQGSTLPRRSGAA
MCSLMYGSILTRRAGAA

SEQ ID NO: 94300 - protein, 17 aa, Artificial Sequence
  Description of Artificial Sequence: Synthetic peptide
  Seed: MCSLMQGSTLPRRSGAA
MCSLMYGSILTRRIGAA

SEQ ID NO: 94301 - protein, 17 aa, Artificial Sequence
  Description of Artificial Sequence: Synthetic peptide
  Seed: MCSLMQGSTLPRRSGAA
MCSLMYGSILTRRLGAA

SEQ ID NO: 94302 - protein, 17 aa, Artificial Sequence
  Description of Artificial Sequence: Synthetic peptide
  Seed: MCSLMQGSTLPRRSGAA
MCSLMYGSILTRRMGAA

SEQ ID NO: 94303 - protein, 17 aa, Artificial Sequence
  Description of Artificial Sequence: Synthetic peptide
  Seed: MCSLMQGSTLPRRSGAA
MCSLMYGSILTRRNGAA

SEQ ID NO: 94304 - protein, 17 aa, Artificial Sequence
  Description of Artificial Sequence: Synthetic peptide
  Seed: MCSLMQGSTLPRRSGAA
MCSLMYGSILTRRSGAA

SEQ ID NO: 94305 - protein, 17 aa, Artificial Sequence
  Description of Artificial Sequence: Synthetic peptide
  Seed: MCSLMQGSTLPRRSGAA
MCSLMYGSILTRRTGAA

SEQ ID NO: 94306 - protein, 17 aa, Artificial Sequence
  Description of Artificial Sequence: Synthetic peptide
  Seed: MCSLMQGSTLPRRSGAA
MCSLMYGSILTRRVGAA

SEQ ID NO: 94307 - protein, 17 aa, Artificial Sequence
  Description of Artificial Sequence: Synthetic peptide
  Seed: MCSLMQGSTLPRRSGAA
MCSLMYGSILVRRAGAA

SEQ ID NO: 94308 - protein, 17 aa, Artificial Sequence
  Description of Artificial Sequence: Synthetic peptide
  Seed: MCSLMQGSTLPRRSGAA
MCSLMYGSILVRRIGAA

SEQ ID NO: 94309 - protein, 17 aa, Artificial Sequence
  Description of Artificial Sequence: Synthetic peptide
  Seed: MCSLMQGSTLPRRSGAA
MCSLMYGSILVRRLGAA

SEQ ID NO: 94310 - protein, 17 aa, Artificial Sequence
  Description of Artificial Sequence: Synthetic peptide
  Seed: MCSLMQGSTLPRRSGAA
MCSLMYGSILVRRNGAA

SEQ ID NO: 94311 - protein, 17 aa, Artificial Sequence
  Description of Artificial Sequence: Synthetic peptide
  Seed: MCSLMQGSTLPRRSGAA
MCSLMYGSILVRRSGAA

SEQ ID NO: 94312 - protein, 17 aa, Artificial Sequence
  Description of Artificial Sequence: Synthetic peptide
  Seed: MCSLMQGSTLPRRSGAA
MCSLMYGSILVRRTGAA

SEQ ID NO: 94313 - protein, 17 aa, Artificial Sequence
  Description of Artificial Sequence: Synthetic peptide
  Seed: MCSLMQGSTLPRRSGAA
MCSLMYGSILVRRVGAA

SEQ ID NO: 94314 - protein, 17 aa, Artificial Sequence
  Description of Artificial Sequence: Synthetic peptide
  Seed: MCSLMQGSTLPRRSGAA
MCSLMYGSLLARRAGAA

SEQ ID NO: 94315 - protein, 17 aa, Artificial Sequence
  Description of Artificial Sequence: Synthetic peptide
  Seed: MCSLMQGSTLPRRSGAA
MCSLMYGSLLARRIGAA

SEQ ID NO: 94316 - protein, 17 aa, Artificial Sequence
  Description of Artificial Sequence: Synthetic peptide
  Seed: MCSLMQGSTLPRRSGAA
MCSLMYGSLLARRLGAA

SEQ ID NO: 94317 - protein, 17 aa, Artificial Sequence
  Description of Artificial Sequence: Synthetic peptide
  Seed: MCSLMQGSTLPRRSGAA
MCSLMYGSLLARRMGAA

SEQ ID NO: 94318 - protein, 17 aa, Artificial Sequence
  Description of Artificial Sequence: Synthetic peptide
  Seed: MCSLMQGSTLPRRSGAA
MCSLMYGSLLARRNGAA

SEQ ID NO: 94319 - protein, 17 aa, Artificial Sequence
  Description of Artificial Sequence: Synthetic peptide
  Seed: MCSLMQGSTLPRRSGAA
MCSLMYGSLLARRSGAA

SEQ ID NO: 94320 - protein, 17 aa, Artificial Sequence
  Description of Artificial Sequence: Synthetic peptide
  Seed: MCSLMQGSTLPRRSGAA
MCSLMYGSLLARRTGAA

SEQ ID NO: 94321 - protein, 17 aa, Artificial Sequence
  Description of Artificial Sequence: Synthetic peptide
  Seed: MCSLMQGSTLPRRSGAA
MCSLMYGSLLARRVGAA

SEQ ID NO: 94322 - protein, 17 aa, Artificial Sequence
  Description of Artificial Sequence: Synthetic peptide
  Seed: MCSLMQGSTLPRRSGAA
MCSLMYGSLLGRRAGAA

SEQ ID NO: 94323 - protein, 17 aa, Artificial Sequence
  Description of Artificial Sequence: Synthetic peptide
  Seed: MCSLMQGSTLPRRSGAA
MCSLMYGSLLGRRIGAA

SEQ ID NO: 94324 - protein, 17 aa, Artificial Sequence
  Description of Artificial Sequence: Synthetic peptide
  Seed: MCSLMQGSTLPRRSGAA
MCSLMYGSLLGRRLGAA

SEQ ID NO: 94325 - protein, 17 aa, Artificial Sequence
  Description of Artificial Sequence: Synthetic peptide
  Seed: MCSLMQGSTLPRRSGAA
MCSLMYGSLLGRRVGAA

SEQ ID NO: 94326 - protein, 17 aa, Artificial Sequence
  Description of Artificial Sequence: Synthetic peptide
  Seed: MCSLMQGSTLPRRSGAA
MCSLMYGSLLIRRAGAA

SEQ ID NO: 94327 - protein, 17 aa, Artificial Sequence
  Description of Artificial Sequence: Synthetic peptide
  Seed: MCSLMQGSTLPRRSGAA
MCSLMYGSLLIRRNGAA

SEQ ID NO: 94328 - protein, 17 aa, Artificial Sequence
  Description of Artificial Sequence: Synthetic peptide
  Seed: MCSLMQGSTLPRRSGAA
MCSLMYGSLLIRRSGAA

SEQ ID NO: 94329 - protein, 17 aa, Artificial Sequence
  Description of Artificial Sequence: Synthetic peptide
  Seed: MCSLMQGSTLPRRSGAA
MCSLMYGSLLIRRVGAA

SEQ ID NO: 94330 - protein, 17 aa, Artificial Sequence
  Description of Artificial Sequence: Synthetic peptide
  Seed: MCSLMQGSTLPRRSGAA
MCSLMYGSLLNRRAGAA

SEQ ID NO: 94331 - protein, 17 aa, Artificial Sequence
  Description of Artificial Sequence: Synthetic peptide
  Seed: MCSLMQGSTLPRRSGAA
MCSLMYGSLLNRRVGAA

SEQ ID NO: 94332 - protein, 17 aa, Artificial Sequence
  Description of Artificial Sequence: Synthetic peptide
  Seed: MCSLMQGSTLPRRSGAA
MCSLMYGSLLPRRAGAA

SEQ ID NO: 94333 - protein, 17 aa, Artificial Sequence
  Description of Artificial Sequence: Synthetic peptide
  Seed: MCSLMQGSTLPRRSGAA
MCSLMYGSLLPRRIGAA

SEQ ID NO: 94334 - protein, 17 aa, Artificial Sequence
  Description of Artificial Sequence: Synthetic peptide
  Seed: MCSLMQGSTLPRRSGAA
MCSLMYGSLLPRRLGAA

SEQ ID NO: 94335 - protein, 17 aa, Artificial Sequence
  Description of Artificial Sequence: Synthetic peptide
  Seed: MCSLMQGSTLPRRSGAA
MCSLMYGSLLPRRMGAA

SEQ ID NO: 94336 - protein, 17 aa, Artificial Sequence
  Description of Artificial Sequence: Synthetic peptide
  Seed: MCSLMQGSTLPRRSGAA
MCSLMYGSLLPRRNGAA

SEQ ID NO: 94337 - protein, 17 aa, Artificial Sequence
  Description of Artificial Sequence: Synthetic peptide
  Seed: MCSLMQGSTLPRRSGAA
MCSLMYGSLLPRRSGAA

SEQ ID NO: 94338 - protein, 17 aa, Artificial Sequence
  Description of Artificial Sequence: Synthetic peptide
  Seed: MCSLMQGSTLPRRSGAA
MCSLMYGSLLPRRTGAA

SEQ ID NO: 94339 - protein, 17 aa, Artificial Sequence
  Description of Artificial Sequence: Synthetic peptide
  Seed: MCSLMQGSTLPRRSGAA
MCSLMYGSLLPRRVGAA

SEQ ID NO: 94340 - protein, 17 aa, Artificial Sequence
  Description of Artificial Sequence: Synthetic peptide
  Seed: MCSLMQGSTLPRRSGAA
MCSLMYGSLLSRRAGAA

SEQ ID NO: 94341 - protein, 17 aa, Artificial Sequence
  Description of Artificial Sequence: Synthetic peptide
  Seed: MCSLMQGSTLPRRSGAA
MCSLMYGSLLSRRIGAA

SEQ ID NO: 94342 - protein, 17 aa, Artificial Sequence
  Description of Artificial Sequence: Synthetic peptide
  Seed: MCSLMQGSTLPRRSGAA
MCSLMYGSLLSRRLGAA

SEQ ID NO: 94343 - protein, 17 aa, Artificial Sequence
  Description of Artificial Sequence: Synthetic peptide
  Seed: MCSLMQGSTLPRRSGAA
MCSLMYGSLLSRRMGAA

SEQ ID NO: 94344 - protein, 17 aa, Artificial Sequence
  Description of Artificial Sequence: Synthetic peptide
  Seed: MCSLMQGSTLPRRSGAA
MCSLMYGSLLSRRNGAA

SEQ ID NO: 94345 - protein, 17 aa, Artificial Sequence
  Description of Artificial Sequence: Synthetic peptide
  Seed: MCSLMQGSTLPRRSGAA
MCSLMYGSLLSRRSGAA

SEQ ID NO: 94346 - protein, 17 aa, Artificial Sequence
  Description of Artificial Sequence: Synthetic peptide
  Seed: MCSLMQGSTLPRRSGAA
MCSLMYGSLLSRRTGAA

SEQ ID NO: 94347 - protein, 17 aa, Artificial Sequence
  Description of Artificial Sequence: Synthetic peptide
  Seed: MCSLMQGSTLPRRSGAA
MCSLMYGSLLSRRVGAA

SEQ ID NO: 94348 - protein, 17 aa, Artificial Sequence
  Description of Artificial Sequence: Synthetic peptide
  Seed: MCSLMQGSTLPRRSGAA
MCSLMYGSLLTRRAGAA

SEQ ID NO: 94349 - protein, 17 aa, Artificial Sequence
  Description of Artificial Sequence: Synthetic peptide
  Seed: MCSLMQGSTLPRRSGAA
MCSLMYGSLLTRRIGAA

SEQ ID NO: 94350 - protein, 17 aa, Artificial Sequence
  Description of Artificial Sequence: Synthetic peptide
  Seed: MCSLMQGSTLPRRSGAA
MCSLMYGSLLTRRLGAA

SEQ ID NO: 94351 - protein, 17 aa, Artificial Sequence
  Description of Artificial Sequence: Synthetic peptide
  Seed: MCSLMQGSTLPRRSGAA
MCSLMYGSLLTRRMGAA

SEQ ID NO: 94352 - protein, 17 aa, Artificial Sequence
  Description of Artificial Sequence: Synthetic peptide
  Seed: MCSLMQGSTLPRRSGAA
MCSLMYGSLLTRRNGAA

SEQ ID NO: 94353 - protein, 17 aa, Artificial Sequence
  Description of Artificial Sequence: Synthetic peptide
  Seed: MCSLMQGSTLPRRSGAA
MCSLMYGSLLTRRSGAA

SEQ ID NO: 94354 - protein, 17 aa, Artificial Sequence
  Description of Artificial Sequence: Synthetic peptide
  Seed: MCSLMQGSTLPRRSGAA
MCSLMYGSLLTRRTGAA

SEQ ID NO: 94355 - protein, 17 aa, Artificial Sequence
  Description of Artificial Sequence: Synthetic peptide
  Seed: MCSLMQGSTLPRRSGAA
MCSLMYGSLLTRRVGAA

SEQ ID NO: 94356 - protein, 17 aa, Artificial Sequence
  Description of Artificial Sequence: Synthetic peptide
  Seed: MCSLMQGSTLPRRSGAA
MCSLMYGSLLVRRAGAA

SEQ ID NO: 94357 - protein, 17 aa, Artificial Sequence
  Description of Artificial Sequence: Synthetic peptide
  Seed: MCSLMQGSTLPRRSGAA
MCSLMYGSLLVRRIGAA

SEQ ID NO: 94358 - protein, 17 aa, Artificial Sequence
  Description of Artificial Sequence: Synthetic peptide
  Seed: MCSLMQGSTLPRRSGAA
MCSLMYGSLLVRRLGAA

SEQ ID NO: 94359 - protein, 17 aa, Artificial Sequence
  Description of Artificial Sequence: Synthetic peptide
  Seed: MCSLMQGSTLPRRSGAA
MCSLMYGSLLVRRMGAA

SEQ ID NO: 94360 - protein, 17 aa, Artificial Sequence
  Description of Artificial Sequence: Synthetic peptide
  Seed: MCSLMQGSTLPRRSGAA
MCSLMYGSLLVRRNGAA

SEQ ID NO: 94361 - protein, 17 aa, Artificial Sequence
  Description of Artificial Sequence: Synthetic peptide
  Seed: MCSLMQGSTLPRRSGAA
MCSLMYGSLLVRRSGAA

SEQ ID NO: 94362 - protein, 17 aa, Artificial Sequence
  Description of Artificial Sequence: Synthetic peptide
  Seed: MCSLMQGSTLPRRSGAA
MCSLMYGSLLVRRTGAA

SEQ ID NO: 94363 - protein, 17 aa, Artificial Sequence
  Description of Artificial Sequence: Synthetic peptide
  Seed: MCSLMQGSTLPRRSGAA
MCSLMYGSLLVRRVGAA

SEQ ID NO: 94364 - protein, 17 aa, Artificial Sequence
  Description of Artificial Sequence: Synthetic peptide
  Seed: MCSLMQGSTLPRRSGAA
MCSLMYGSMLARRAGAA

SEQ ID NO: 94365 - protein, 17 aa, Artificial Sequence
  Description of Artificial Sequence: Synthetic peptide
  Seed: MCSLMQGSTLPRRSGAA
MCSLMYGSMLARRGGAA

SEQ ID NO: 94366 - protein, 17 aa, Artificial Sequence
  Description of Artificial Sequence: Synthetic peptide
  Seed: MCSLMQGSTLPRRSGAA
MCSLMYGSMLARRIGAA

SEQ ID NO: 94367 - protein, 17 aa, Artificial Sequence
  Description of Artificial Sequence: Synthetic peptide
  Seed: MCSLMQGSTLPRRSGAA
MCSLMYGSMLARRLGAA

SEQ ID NO: 94368 - protein, 17 aa, Artificial Sequence
  Description of Artificial Sequence: Synthetic peptide
  Seed: MCSLMQGSTLPRRSGAA
MCSLMYGSMLARRMGAA

SEQ ID NO: 94369 - protein, 17 aa, Artificial Sequence
  Description of Artificial Sequence: Synthetic peptide
  Seed: MCSLMQGSTLPRRSGAA
MCSLMYGSMLARRNGAA

SEQ ID NO: 94370 - protein, 17 aa, Artificial Sequence
  Description of Artificial Sequence: Synthetic peptide
  Seed: MCSLMQGSTLPRRSGAA
MCSLMYGSMLARRPGAA

SEQ ID NO: 94371 - protein, 17 aa, Artificial Sequence
  Description of Artificial Sequence: Synthetic peptide
  Seed: MCSLMQGSTLPRRSGAA
MCSLMYGSMLARRSGAA

SEQ ID NO: 94372 - protein, 17 aa, Artificial Sequence
  Description of Artificial Sequence: Synthetic peptide
  Seed: MCSLMQGSTLPRRSGAA
MCSLMYGSMLARRTGAA

SEQ ID NO: 94373 - protein, 17 aa, Artificial Sequence
  Description of Artificial Sequence: Synthetic peptide
  Seed: MCSLMQGSTLPRRSGAA
MCSLMYGSMLARRVGAA

SEQ ID NO: 94374 - protein, 17 aa, Artificial Sequence
  Description of Artificial Sequence: Synthetic peptide
  Seed: MCSLMQGSTLPRRSGAA
MCSLMYGSMLGRRAGAA

SEQ ID NO: 94375 - protein, 17 aa, Artificial Sequence
  Description of Artificial Sequence: Synthetic peptide
  Seed: MCSLMQGSTLPRRSGAA
MCSLMYGSMLGRRIGAA

SEQ ID NO: 94376 - protein, 17 aa, Artificial Sequence
  Description of Artificial Sequence: Synthetic peptide
  Seed: MCSLMQGSTLPRRSGAA
MCSLMYGSMLGRRLGAA

SEQ ID NO: 94377 - protein, 17 aa, Artificial Sequence
  Description of Artificial Sequence: Synthetic peptide
  Seed: MCSLMQGSTLPRRSGAA
MCSLMYGSMLGRRMGAA

SEQ ID NO: 94378 - protein, 17 aa, Artificial Sequence
  Description of Artificial Sequence: Synthetic peptide
  Seed: MCSLMQGSTLPRRSGAA
MCSLMYGSMLGRRSGAA

SEQ ID NO: 94379 - protein, 17 aa, Artificial Sequence
  Description of Artificial Sequence: Synthetic peptide
  Seed: MCSLMQGSTLPRRSGAA
MCSLMYGSMLGRRVGAA

SEQ ID NO: 94380 - protein, 17 aa, Artificial Sequence
  Description of Artificial Sequence: Synthetic peptide
  Seed: MCSLMQGSTLPRRSGAA
MCSLMYGSMLIRRAGAA

SEQ ID NO: 94381 - protein, 17 aa, Artificial Sequence
  Description of Artificial Sequence: Synthetic peptide
  Seed: MCSLMQGSTLPRRSGAA
MCSLMYGSMLIRRIGAA

SEQ ID NO: 94382 - protein, 17 aa, Artificial Sequence
  Description of Artificial Sequence: Synthetic peptide
  Seed: MCSLMQGSTLPRRSGAA
MCSLMYGSMLIRRLGAA

SEQ ID NO: 94383 - protein, 17 aa, Artificial Sequence
  Description of Artificial Sequence: Synthetic peptide
  Seed: MCSLMQGSTLPRRSGAA
MCSLMYGSMLIRRNGAA

SEQ ID NO: 94384 - protein, 17 aa, Artificial Sequence
  Description of Artificial Sequence: Synthetic peptide
  Seed: MCSLMQGSTLPRRSGAA
MCSLMYGSMLIRRSGAA

SEQ ID NO: 94385 - protein, 17 aa, Artificial Sequence
  Description of Artificial Sequence: Synthetic peptide
  Seed: MCSLMQGSTLPRRSGAA
MCSLMYGSMLIRRTGAA

SEQ ID NO: 94386 - protein, 17 aa, Artificial Sequence
  Description of Artificial Sequence: Synthetic peptide
  Seed: MCSLMQGSTLPRRSGAA
MCSLMYGSMLIRRVGAA

SEQ ID NO: 94387 - protein, 17 aa, Artificial Sequence
  Description of Artificial Sequence: Synthetic peptide
  Seed: MCSLMQGSTLPRRSGAA
MCSLMYGSMLNRRAGAA

SEQ ID NO: 94388 - protein, 17 aa, Artificial Sequence
  Description of Artificial Sequence: Synthetic peptide
  Seed: MCSLMQGSTLPRRSGAA
MCSLMYGSMLNRRVGAA

SEQ ID NO: 94389 - protein, 17 aa, Artificial Sequence
  Description of Artificial Sequence: Synthetic peptide
  Seed: MCSLMQGSTLPRRSGAA
MCSLMYGSMLPRRAGAA

SEQ ID NO: 94390 - protein, 17 aa, Artificial Sequence
  Description of Artificial Sequence: Synthetic peptide
  Seed: MCSLMQGSTLPRRSGAA
MCSLMYGSMLPRRIGAA

SEQ ID NO: 94391 - protein, 17 aa, Artificial Sequence
  Description of Artificial Sequence: Synthetic peptide
  Seed: MCSLMQGSTLPRRSGAA
MCSLMYGSMLPRRLGAA

SEQ ID NO: 94392 - protein, 17 aa, Artificial Sequence
  Description of Artificial Sequence: Synthetic peptide
  Seed: MCSLMQGSTLPRRSGAA
MCSLMYGSMLPRRMGAA

SEQ ID NO: 94393 - protein, 17 aa, Artificial Sequence
  Description of Artificial Sequence: Synthetic peptide
  Seed: MCSLMQGSTLPRRSGAA
MCSLMYGSMLPRRNGAA

SEQ ID NO: 94394 - protein, 17 aa, Artificial Sequence
  Description of Artificial Sequence: Synthetic peptide
  Seed: MCSLMQGSTLPRRSGAA
MCSLMYGSMLPRRSGAA

SEQ ID NO: 94395 - protein, 17 aa, Artificial Sequence
  Description of Artificial Sequence: Synthetic peptide
  Seed: MCSLMQGSTLPRRSGAA
MCSLMYGSMLPRRTGAA

SEQ ID NO: 94396 - protein, 17 aa, Artificial Sequence
  Description of Artificial Sequence: Synthetic peptide
  Seed: MCSLMQGSTLPRRSGAA
MCSLMYGSMLPRRVGAA

SEQ ID NO: 94397 - protein, 17 aa, Artificial Sequence
  Description of Artificial Sequence: Synthetic peptide
  Seed: MCSLMQGSTLPRRSGAA
MCSLMYGSMLSRRAGAA

SEQ ID NO: 94398 - protein, 17 aa, Artificial Sequence
  Description of Artificial Sequence: Synthetic peptide
  Seed: MCSLMQGSTLPRRSGAA
MCSLMYGSMLSRRIGAA

SEQ ID NO: 94399 - protein, 17 aa, Artificial Sequence
  Description of Artificial Sequence: Synthetic peptide
  Seed: MCSLMQGSTLPRRSGAA
MCSLMYGSMLSRRLGAA

SEQ ID NO: 94400 - protein, 17 aa, Artificial Sequence
  Description of Artificial Sequence: Synthetic peptide
  Seed: MCSLMQGSTLPRRSGAA
MCSLMYGSMLSRRMGAA

SEQ ID NO: 94401 - protein, 17 aa, Artificial Sequence
  Description of Artificial Sequence: Synthetic peptide
  Seed: MCSLMQGSTLPRRSGAA
MCSLMYGSMLSRRNGAA

SEQ ID NO: 94402 - protein, 17 aa, Artificial Sequence
  Description of Artificial Sequence: Synthetic peptide
  Seed: MCSLMQGSTLPRRSGAA
MCSLMYGSMLSRRSGAA

SEQ ID NO: 94403 - protein, 17 aa, Artificial Sequence
  Description of Artificial Sequence: Synthetic peptide
  Seed: MCSLMQGSTLPRRSGAA
MCSLMYGSMLSRRTGAA

SEQ ID NO: 94404 - protein, 17 aa, Artificial Sequence
  Description of Artificial Sequence: Synthetic peptide
  Seed: MCSLMQGSTLPRRSGAA
MCSLMYGSMLSRRVGAA

SEQ ID NO: 94405 - protein, 17 aa, Artificial Sequence
  Description of Artificial Sequence: Synthetic peptide
  Seed: MCSLMQGSTLPRRSGAA
MCSLMYGSMLTRRAGAA

SEQ ID NO: 94406 - protein, 17 aa, Artificial Sequence
  Description of Artificial Sequence: Synthetic peptide
  Seed: MCSLMQGSTLPRRSGAA
MCSLMYGSMLTRRIGAA

SEQ ID NO: 94407 - protein, 17 aa, Artificial Sequence
  Description of Artificial Sequence: Synthetic peptide
  Seed: MCSLMQGSTLPRRSGAA
MCSLMYGSMLTRRLGAA

SEQ ID NO: 94408 - protein, 17 aa, Artificial Sequence
  Description of Artificial Sequence: Synthetic peptide
  Seed: MCSLMQGSTLPRRSGAA
MCSLMYGSMLTRRMGAA

SEQ ID NO: 94409 - protein, 17 aa, Artificial Sequence
  Description of Artificial Sequence: Synthetic peptide
  Seed: MCSLMQGSTLPRRSGAA
MCSLMYGSMLTRRNGAA

SEQ ID NO: 94410 - protein, 17 aa, Artificial Sequence
  Description of Artificial Sequence: Synthetic peptide
  Seed: MCSLMQGSTLPRRSGAA
MCSLMYGSMLTRRSGAA

SEQ ID NO: 94411 - protein, 17 aa, Artificial Sequence
  Description of Artificial Sequence: Synthetic peptide
  Seed: MCSLMQGSTLPRRSGAA
MCSLMYGSMLTRRTGAA

SEQ ID NO: 94412 - protein, 17 aa, Artificial Sequence
  Description of Artificial Sequence: Synthetic peptide
  Seed: MCSLMQGSTLPRRSGAA
MCSLMYGSMLTRRVGAA

SEQ ID NO: 94413 - protein, 17 aa, Artificial Sequence
  Description of Artificial Sequence: Synthetic peptide
  Seed: MCSLMQGSTLPRRSGAA
MCSLMYGSMLVRRAGAA

SEQ ID NO: 94414 - protein, 17 aa, Artificial Sequence
  Description of Artificial Sequence: Synthetic peptide
  Seed: MCSLMQGSTLPRRSGAA
MCSLMYGSMLVRRIGAA

SEQ ID NO: 94415 - protein, 17 aa, Artificial Sequence
  Description of Artificial Sequence: Synthetic peptide
  Seed: MCSLMQGSTLPRRSGAA
MCSLMYGSMLVRRLGAA

SEQ ID NO: 94416 - protein, 17 aa, Artificial Sequence
  Description of Artificial Sequence: Synthetic peptide
  Seed: MCSLMQGSTLPRRSGAA
MCSLMYGSMLVRRMGAA

SEQ ID NO: 94417 - protein, 17 aa, Artificial Sequence
  Description of Artificial Sequence: Synthetic peptide
  Seed: MCSLMQGSTLPRRSGAA
MCSLMYGSMLVRRNGAA

SEQ ID NO: 94418 - protein, 17 aa, Artificial Sequence
  Description of Artificial Sequence: Synthetic peptide
  Seed: MCSLMQGSTLPRRSGAA
MCSLMYGSMLVRRSGAA

SEQ ID NO: 94419 - protein, 17 aa, Artificial Sequence
  Description of Artificial Sequence: Synthetic peptide
  Seed: MCSLMQGSTLPRRSGAA
MCSLMYGSMLVRRTGAA

SEQ ID NO: 94420 - protein, 17 aa, Artificial Sequence
  Description of Artificial Sequence: Synthetic peptide
  Seed: MCSLMQGSTLPRRSGAA
MCSLMYGSMLVRRVGAA

SEQ ID NO: 94421 - protein, 17 aa, Artificial Sequence
  Description of Artificial Sequence: Synthetic peptide
  Seed: MCSLMQGSTLPRRSGAA
MCSLMYGSVLARRAGAA

SEQ ID NO: 94422 - protein, 17 aa, Artificial Sequence
  Description of Artificial Sequence: Synthetic peptide
  Seed: MCSLMQGSTLPRRSGAA
MCSLMYGSVLARRIGAA

SEQ ID NO: 94423 - protein, 17 aa, Artificial Sequence
  Description of Artificial Sequence: Synthetic peptide
  Seed: MCSLMQGSTLPRRSGAA
MCSLMYGSVLARRLGAA

SEQ ID NO: 94424 - protein, 17 aa, Artificial Sequence
  Description of Artificial Sequence: Synthetic peptide
  Seed: MCSLMQGSTLPRRSGAA
MCSLMYGSVLARRNGAA

SEQ ID NO: 94425 - protein, 17 aa, Artificial Sequence
  Description of Artificial Sequence: Synthetic peptide
  Seed: MCSLMQGSTLPRRSGAA
MCSLMYGSVLARRSGAA

SEQ ID NO: 94426 - protein, 17 aa, Artificial Sequence
  Description of Artificial Sequence: Synthetic peptide
  Seed: MCSLMQGSTLPRRSGAA
MCSLMYGSVLARRVGAA

SEQ ID NO: 94427 - protein, 17 aa, Artificial Sequence
  Description of Artificial Sequence: Synthetic peptide
  Seed: MCSLMQGSTLPRRSGAA
MCSLMYGSVLPRRAGAA

SEQ ID NO: 94428 - protein, 17 aa, Artificial Sequence
  Description of Artificial Sequence: Synthetic peptide
  Seed: MCSLMQGSTLPRRSGAA
MCSLMYGSVLSRRAGAA

SEQ ID NO: 94429 - protein, 17 aa, Artificial Sequence
  Description of Artificial Sequence: Synthetic peptide
  Seed: MCSLMQGSTLPRRSGAA
MCSLMYGSVLSRRVGAA

SEQ ID NO: 94430 - protein, 17 aa, Artificial Sequence
  Description of Artificial Sequence: Synthetic peptide
  Seed: MCSLMQGSTLPRRSGAA
MCSLMYGSVLTRRAGAA

SEQ ID NO: 94431 - protein, 17 aa, Artificial Sequence
  Description of Artificial Sequence: Synthetic peptide
  Seed: MCSLMQGSTLPRRSGAA
MCSLMYGSVLVRRAGAA

SEQ ID NO: 94432 - protein, 19 aa, Artificial Sequence
  Description of Artificial Sequence: Synthetic peptide
  Seed: MCSLMQGSTLPRRSGAAGA
MFSLAQASTIPRRSGAAGA

SEQ ID NO: 94433 - protein, 19 aa, Artificial Sequence
  Description of Artificial Sequence: Synthetic peptide
  Seed: MCSLMQGSTLPRRSGAAGA
MFSLAQASTVPRRSGAAGA

SEQ ID NO: 94434 - protein, 19 aa, Artificial Sequence
  Description of Artificial Sequence: Synthetic peptide
  Seed: MCSLMQGSTLPRRSGAAGA
MFSLIQASTAPRRSGAAGA

SEQ ID NO: 94435 - protein, 19 aa, Artificial Sequence
  Description of Artificial Sequence: Synthetic peptide
  Seed: MCSLMQGSTLPRRSGAAGA
MFSLIQASTIPRRSGAAGA

SEQ ID NO: 94436 - protein, 19 aa, Artificial Sequence
  Description of Artificial Sequence: Synthetic peptide
  Seed: MCSLMQGSTLPRRSGAAGA
MFSLIQASTLPRRSGAAGA

SEQ ID NO: 94437 - protein, 19 aa, Artificial Sequence
  Description of Artificial Sequence: Synthetic peptide
  Seed: MCSLMQGSTLPRRSGAAGA
MFSLIQASTVPRRSGAAGA

SEQ ID NO: 94438 - protein, 19 aa, Artificial Sequence
  Description of Artificial Sequence: Synthetic peptide
  Seed: MCSLMQGSTLPRRSGAAGA
MFSLIQGSTVPRRSGAAGA

SEQ ID NO: 94439 - protein, 19 aa, Artificial Sequence
  Description of Artificial Sequence: Synthetic peptide
  Seed: MCSLMQGSTLPRRSGAAGA
MFSLLQASTAPRRSGAAGA

SEQ ID NO: 94440 - protein, 19 aa, Artificial Sequence
  Description of Artificial Sequence: Synthetic peptide
  Seed: MCSLMQGSTLPRRSGAAGA
MFSLLQASTIPRRSGAAGA

SEQ ID NO: 94441 - protein, 19 aa, Artificial Sequence
  Description of Artificial Sequence: Synthetic peptide
  Seed: MCSLMQGSTLPRRSGAAGA
MFSLLQASTLPRRSGAAGA

SEQ ID NO: 94442 - protein, 19 aa, Artificial Sequence
  Description of Artificial Sequence: Synthetic peptide
  Seed: MCSLMQGSTLPRRSGAAGA
MFSLLQASTMPRRSGAAGA

SEQ ID NO: 94443 - protein, 19 aa, Artificial Sequence
  Description of Artificial Sequence: Synthetic peptide
  Seed: MCSLMQGSTLPRRSGAAGA
MFSLLQASTTPRRSGAAGA

SEQ ID NO: 94444 - protein, 19 aa, Artificial Sequence
  Description of Artificial Sequence: Synthetic peptide
  Seed: MCSLMQGSTLPRRSGAAGA
MFSLLQASTVPRRSGAAGA

SEQ ID NO: 94445 - protein, 19 aa, Artificial Sequence
  Description of Artificial Sequence: Synthetic peptide
  Seed: MCSLMQGSTLPRRSGAAGA
MFSLLQGSTAPRRSGAAGA

SEQ ID NO: 94446 - protein, 19 aa, Artificial Sequence
  Description of Artificial Sequence: Synthetic peptide
  Seed: MCSLMQGSTLPRRSGAAGA
MFSLLQGSTIPRRSGAAGA

SEQ ID NO: 94447 - protein, 19 aa, Artificial Sequence
  Description of Artificial Sequence: Synthetic peptide
  Seed: MCSLMQGSTLPRRSGAAGA
MFSLLQGSTLPRRSGAAGA

SEQ ID NO: 94448 - protein, 19 aa, Artificial Sequence
  Description of Artificial Sequence: Synthetic peptide
  Seed: MCSLMQGSTLPRRSGAAGA
MFSLLQGSTTPRRSGAAGA

SEQ ID NO: 94449 - protein, 19 aa, Artificial Sequence
  Description of Artificial Sequence: Synthetic peptide
  Seed: MCSLMQGSTLPRRSGAAGA
MFSLLQGSTVPRRSGAAGA

SEQ ID NO: 94450 - protein, 19 aa, Artificial Sequence
  Description of Artificial Sequence: Synthetic peptide
  Seed: MCSLMQGSTLPRRSGAAGA
MFSLLQPSTAPRRSGAAGA

SEQ ID NO: 94451 - protein, 19 aa, Artificial Sequence
  Description of Artificial Sequence: Synthetic peptide
  Seed: MCSLMQGSTLPRRSGAAGA
MFSLLQPSTIPRRSGAAGA

SEQ ID NO: 94452 - protein, 19 aa, Artificial Sequence
  Description of Artificial Sequence: Synthetic peptide
  Seed: MCSLMQGSTLPRRSGAAGA
MFSLLQPSTLPRRSGAAGA

SEQ ID NO: 94453 - protein, 19 aa, Artificial Sequence
  Description of Artificial Sequence: Synthetic peptide
  Seed: MCSLMQGSTLPRRSGAAGA
MFSLLQPSTVPRRSGAAGA

SEQ ID NO: 94454 - protein, 19 aa, Artificial Sequence
  Description of Artificial Sequence: Synthetic peptide
  Seed: MCSLMQGSTLPRRSGAAGA
MFSLLQSSTAPRRSGAAGA

SEQ ID NO: 94455 - protein, 19 aa, Artificial Sequence
  Description of Artificial Sequence: Synthetic peptide
  Seed: MCSLMQGSTLPRRSGAAGA
MFSLLQSSTIPRRSGAAGA

SEQ ID NO: 94456 - protein, 19 aa, Artificial Sequence
  Description of Artificial Sequence: Synthetic peptide
  Seed: MCSLMQGSTLPRRSGAAGA
MFSLLQSSTLPRRSGAAGA

SEQ ID NO: 94457 - protein, 19 aa, Artificial Sequence
  Description of Artificial Sequence: Synthetic peptide
  Seed: MCSLMQGSTLPRRSGAAGA
MFSLLQSSTVPRRSGAAGA

SEQ ID NO: 94458 - protein, 19 aa, Artificial Sequence
  Description of Artificial Sequence: Synthetic peptide
  Seed: MCSLMQGSTLPRRSGAAGA
MFSLMQASTAPRRSGAAGA

SEQ ID NO: 94459 - protein, 19 aa, Artificial Sequence
  Description of Artificial Sequence: Synthetic peptide
  Seed: MCSLMQGSTLPRRSGAAGA
MFSLMQASTIPRRSGAAGA

SEQ ID NO: 94460 - protein, 19 aa, Artificial Sequence
  Description of Artificial Sequence: Synthetic peptide
  Seed: MCSLMQGSTLPRRSGAAGA
MFSLMQASTLPRRSGAAGA

SEQ ID NO: 94461 - protein, 19 aa, Artificial Sequence
  Description of Artificial Sequence: Synthetic peptide
  Seed: MCSLMQGSTLPRRSGAAGA
MFSLMQASTMPRRSGAAGA

SEQ ID NO: 94462 - protein, 19 aa, Artificial Sequence
  Description of Artificial Sequence: Synthetic peptide
  Seed: MCSLMQGSTLPRRSGAAGA
MFSLMQASTSPRRSGAAGA

SEQ ID NO: 94463 - protein, 19 aa, Artificial Sequence
  Description of Artificial Sequence: Synthetic peptide
  Seed: MCSLMQGSTLPRRSGAAGA
MFSLMQASTTPRRSGAAGA

SEQ ID NO: 94464 - protein, 19 aa, Artificial Sequence
  Description of Artificial Sequence: Synthetic peptide
  Seed: MCSLMQGSTLPRRSGAAGA
MFSLMQASTVPRRSGAAGA

SEQ ID NO: 94465 - protein, 19 aa, Artificial Sequence
  Description of Artificial Sequence: Synthetic peptide
  Seed: MCSLMQGSTLPRRSGAAGA
MFSLMQGSTAPRRSGAAGA

SEQ ID NO: 94466 - protein, 19 aa, Artificial Sequence
  Description of Artificial Sequence: Synthetic peptide
  Seed: MCSLMQGSTLPRRSGAAGA
MFSLMQGSTIPRRSGAAGA

SEQ ID NO: 94467 - protein, 19 aa, Artificial Sequence
  Description of Artificial Sequence: Synthetic peptide
  Seed: MCSLMQGSTLPRRSGAAGA
MFSLMQGSTLPRRSGAAGA

SEQ ID NO: 94468 - protein, 19 aa, Artificial Sequence
  Description of Artificial Sequence: Synthetic peptide
  Seed: MCSLMQGSTLPRRSGAAGA
MFSLMQGSTMPRRSGAAGA

SEQ ID NO: 94469 - protein, 19 aa, Artificial Sequence
  Description of Artificial Sequence: Synthetic peptide
  Seed: MCSLMQGSTLPRRSGAAGA
MFSLMQGSTVPRRSGAAGA

SEQ ID NO: 94470 - protein, 19 aa, Artificial Sequence
  Description of Artificial Sequence: Synthetic peptide
  Seed: MCSLMQGSTLPRRSGAAGA
MFSLMQPSTAPRRSGAAGA

SEQ ID NO: 94471 - protein, 19 aa, Artificial Sequence
  Description of Artificial Sequence: Synthetic peptide
  Seed: MCSLMQGSTLPRRSGAAGA
MFSLMQPSTIPRRSGAAGA

SEQ ID NO: 94472 - protein, 19 aa, Artificial Sequence
  Description of Artificial Sequence: Synthetic peptide
  Seed: MCSLMQGSTLPRRSGAAGA
MFSLMQPSTLPRRSGAAGA

SEQ ID NO: 94473 - protein, 19 aa, Artificial Sequence
  Description of Artificial Sequence: Synthetic peptide
  Seed: MCSLMQGSTLPRRSGAAGA
MFSLMQPSTVPRRSGAAGA

SEQ ID NO: 94474 - protein, 19 aa, Artificial Sequence
  Description of Artificial Sequence: Synthetic peptide
  Seed: MCSLMQGSTLPRRSGAAGA
MFSLMQSSTAPRRSGAAGA

SEQ ID NO: 94475 - protein, 19 aa, Artificial Sequence
  Description of Artificial Sequence: Synthetic peptide
  Seed: MCSLMQGSTLPRRSGAAGA
MFSLMQSSTIPRRSGAAGA

SEQ ID NO: 94476 - protein, 19 aa, Artificial Sequence
  Description of Artificial Sequence: Synthetic peptide
  Seed: MCSLMQGSTLPRRSGAAGA
MFSLMQSSTLPRRSGAAGA

SEQ ID NO: 94477 - protein, 19 aa, Artificial Sequence
  Description of Artificial Sequence: Synthetic peptide
  Seed: MCSLMQGSTLPRRSGAAGA
MFSLMQSSTVPRRSGAAGA

SEQ ID NO: 94478 - protein, 19 aa, Artificial Sequence
  Description of Artificial Sequence: Synthetic peptide
  Seed: MCSLMQGSTLPRRSGAAGA
MYSLIQASTIPRRSGAAGA

SEQ ID NO: 94479 - protein, 19 aa, Artificial Sequence
  Description of Artificial Sequence: Synthetic peptide
  Seed: MCSLMQGSTLPRRSGAAGA
MYSLIQASTLPRRSGAAGA

SEQ ID NO: 94480 - protein, 19 aa, Artificial Sequence
  Description of Artificial Sequence: Synthetic peptide
  Seed: MCSLMQGSTLPRRSGAAGA
MYSLIQASTVPRRSGAAGA

SEQ ID NO: 94481 - protein, 19 aa, Artificial Sequence
  Description of Artificial Sequence: Synthetic peptide
  Seed: MCSLMQGSTLPRRSGAAGA
MYSLLQASTAPRRSGAAGA

SEQ ID NO: 94482 - protein, 19 aa, Artificial Sequence
  Description of Artificial Sequence: Synthetic peptide
  Seed: MCSLMQGSTLPRRSGAAGA
MYSLLQASTIPRRSGAAGA

SEQ ID NO: 94483 - protein, 19 aa, Artificial Sequence
  Description of Artificial Sequence: Synthetic peptide
  Seed: MCSLMQGSTLPRRSGAAGA
MYSLLQASTLPRRSGAAGA

SEQ ID NO: 94484 - protein, 19 aa, Artificial Sequence
  Description of Artificial Sequence: Synthetic peptide
  Seed: MCSLMQGSTLPRRSGAAGA
MYSLLQASTVPRRSGAAGA

SEQ ID NO: 94485 - protein, 19 aa, Artificial Sequence
  Description of Artificial Sequence: Synthetic peptide
  Seed: MCSLMQGSTLPRRSGAAGA
MYSLLQGSTAPRRSGAAGA

SEQ ID NO: 94486 - protein, 19 aa, Artificial Sequence
  Description of Artificial Sequence: Synthetic peptide
  Seed: MCSLMQGSTLPRRSGAAGA
MYSLLQGSTIPRRSGAAGA

SEQ ID NO: 94487 - protein, 19 aa, Artificial Sequence
  Description of Artificial Sequence: Synthetic peptide
  Seed: MCSLMQGSTLPRRSGAAGA
MYSLLQGSTLPRRSGAAGA

SEQ ID NO: 94488 - protein, 19 aa, Artificial Sequence
  Description of Artificial Sequence: Synthetic peptide
  Seed: MCSLMQGSTLPRRSGAAGA
MYSLLQGSTVPRRSGAAGA

SEQ ID NO: 94489 - protein, 19 aa, Artificial Sequence
  Description of Artificial Sequence: Synthetic peptide
  Seed: MCSLMQGSTLPRRSGAAGA
MYSLLQPSTIPRRSGAAGA

SEQ ID NO: 94490 - protein, 19 aa, Artificial Sequence
  Description of Artificial Sequence: Synthetic peptide
  Seed: MCSLMQGSTLPRRSGAAGA
MYSLLQPSTVPRRSGAAGA

SEQ ID NO: 94491 - protein, 19 aa, Artificial Sequence
  Description of Artificial Sequence: Synthetic peptide
  Seed: MCSLMQGSTLPRRSGAAGA
MYSLLQSSTIPRRSGAAGA

SEQ ID NO: 94492 - protein, 19 aa, Artificial Sequence
  Description of Artificial Sequence: Synthetic peptide
  Seed: MCSLMQGSTLPRRSGAAGA
MYSLLQSSTLPRRSGAAGA

SEQ ID NO: 94493 - protein, 19 aa, Artificial Sequence
  Description of Artificial Sequence: Synthetic peptide
  Seed: MCSLMQGSTLPRRSGAAGA
MYSLLQSSTVPRRSGAAGA

SEQ ID NO: 94494 - protein, 19 aa, Artificial Sequence
  Description of Artificial Sequence: Synthetic peptide
  Seed: MCSLMQGSTLPRRSGAAGA
MYSLMQASTAPRRSGAAGA

SEQ ID NO: 94495 - protein, 19 aa, Artificial Sequence
  Description of Artificial Sequence: Synthetic peptide
  Seed: MCSLMQGSTLPRRSGAAGA
MYSLMQASTIPRRSGAAGA

SEQ ID NO: 94496 - protein, 19 aa, Artificial Sequence
  Description of Artificial Sequence: Synthetic peptide
  Seed: MCSLMQGSTLPRRSGAAGA
MYSLMQASTLPRRSGAAGA

SEQ ID NO: 94497 - protein, 19 aa, Artificial Sequence
  Description of Artificial Sequence: Synthetic peptide
  Seed: MCSLMQGSTLPRRSGAAGA
MYSLMQASTVPRRSGAAGA

SEQ ID NO: 94498 - protein, 19 aa, Artificial Sequence
  Description of Artificial Sequence: Synthetic peptide
  Seed: MCSLMQGSTLPRRSGAAGA
MYSLMQGSTAPRRSGAAGA

SEQ ID NO: 94499 - protein, 19 aa, Artificial Sequence
  Description of Artificial Sequence: Synthetic peptide
  Seed: MCSLMQGSTLPRRSGAAGA
MYSLMQGSTIPRRSGAAGA

SEQ ID NO: 94500 - protein, 19 aa, Artificial Sequence
  Description of Artificial Sequence: Synthetic peptide
  Seed: MCSLMQGSTLPRRSGAAGA
MYSLMQGSTLPRRSGAAGA

SEQ ID NO: 94501 - protein, 19 aa, Artificial Sequence
  Description of Artificial Sequence: Synthetic peptide
  Seed: MCSLMQGSTLPRRSGAAGA
MYSLMQGSTVPRRSGAAGA

SEQ ID NO: 94502 - protein, 19 aa, Artificial Sequence
  Description of Artificial Sequence: Synthetic peptide
  Seed: MCSLMQGSTLPRRSGAAGA
MYSLMQPSTIPRRSGAAGA

SEQ ID NO: 94503 - protein, 19 aa, Artificial Sequence
  Description of Artificial Sequence: Synthetic peptide
  Seed: MCSLMQGSTLPRRSGAAGA
MYSLMQPSTVPRRSGAAGA

SEQ ID NO: 94504 - protein, 19 aa, Artificial Sequence
  Description of Artificial Sequence: Synthetic peptide
  Seed: MCSLMQGSTLPRRSGAAGA
MYSLMQSSTIPRRSGAAGA

SEQ ID NO: 94505 - protein, 19 aa, Artificial Sequence
  Description of Artificial Sequence: Synthetic peptide
  Seed: MCSLMQGSTLPRRSGAAGA
MYSLMQSSTLPRRSGAAGA

SEQ ID NO: 94506 - protein, 19 aa, Artificial Sequence
  Description of Artificial Sequence: Synthetic peptide
  Seed: MCSLMQGSTLPRRSGAAGA
MYSLMQSSTVPRRSGAAGA

SEQ ID NO: 94507 - protein, 14 aa, Artificial Sequence
  Description of Artificial Sequence: Synthetic peptide
  Seed: MDPRMCSLMQGSTL
MDPRMFSLAQASTI

SEQ ID NO: 94508 - protein, 14 aa, Artificial Sequence
  Description of Artificial Sequence: Synthetic peptide
  Seed: MDPRMCSLMQGSTL
MDPRMFSLAQASTL

SEQ ID NO: 94509 - protein, 14 aa, Artificial Sequence
  Description of Artificial Sequence: Synthetic peptide
  Seed: MDPRMCSLMQGSTL
MDPRMFSLAQASTV

SEQ ID NO: 94510 - protein, 14 aa, Artificial Sequence
  Description of Artificial Sequence: Synthetic peptide
  Seed: MDPRMCSLMQGSTL
MDPRMFSLIQASTA

SEQ ID NO: 94511 - protein, 14 aa, Artificial Sequence
  Description of Artificial Sequence: Synthetic peptide
  Seed: MDPRMCSLMQGSTL
MDPRMFSLIQASTI

SEQ ID NO: 94512 - protein, 14 aa, Artificial Sequence
  Description of Artificial Sequence: Synthetic peptide
  Seed: MDPRMCSLMQGSTL
MDPRMFSLIQASTL

SEQ ID NO: 94513 - protein, 14 aa, Artificial Sequence
  Description of Artificial Sequence: Synthetic peptide
  Seed: MDPRMCSLMQGSTL
MDPRMFSLIQASTV

SEQ ID NO: 94514 - protein, 14 aa, Artificial Sequence
  Description of Artificial Sequence: Synthetic peptide
  Seed: MDPRMCSLMQGSTL
MDPRMFSLIQGSTI

SEQ ID NO: 94515 - protein, 14 aa, Artificial Sequence
  Description of Artificial Sequence: Synthetic peptide
  Seed: MDPRMCSLMQGSTL
MDPRMFSLIQGSTL

SEQ ID NO: 94516 - protein, 14 aa, Artificial Sequence
  Description of Artificial Sequence: Synthetic peptide
  Seed: MDPRMCSLMQGSTL
MDPRMFSLIQGSTV

SEQ ID NO: 94517 - protein, 14 aa, Artificial Sequence
  Description of Artificial Sequence: Synthetic peptide
  Seed: MDPRMCSLMQGSTL
MDPRMFSLIQSSTV

SEQ ID NO: 94518 - protein, 14 aa, Artificial Sequence
  Description of Artificial Sequence: Synthetic peptide
  Seed: MDPRMCSLMQGSTL
MDPRMFSLLQASTA

SEQ ID NO: 94519 - protein, 14 aa, Artificial Sequence
  Description of Artificial Sequence: Synthetic peptide
  Seed: MDPRMCSLMQGSTL
MDPRMFSLLQASTI

SEQ ID NO: 94520 - protein, 14 aa, Artificial Sequence
  Description of Artificial Sequence: Synthetic peptide
  Seed: MDPRMCSLMQGSTL
MDPRMFSLLQASTL

SEQ ID NO: 94521 - protein, 14 aa, Artificial Sequence
  Description of Artificial Sequence: Synthetic peptide
  Seed: MDPRMCSLMQGSTL
MDPRMFSLLQASTM

SEQ ID NO: 94522 - protein, 14 aa, Artificial Sequence
  Description of Artificial Sequence: Synthetic peptide
  Seed: MDPRMCSLMQGSTL
MDPRMFSLLQASTS

SEQ ID NO: 94523 - protein, 14 aa, Artificial Sequence
  Description of Artificial Sequence: Synthetic peptide
  Seed: MDPRMCSLMQGSTL
MDPRMFSLLQASTT

SEQ ID NO: 94524 - protein, 14 aa, Artificial Sequence
  Description of Artificial Sequence: Synthetic peptide
  Seed: MDPRMCSLMQGSTL
MDPRMFSLLQASTV

SEQ ID NO: 94525 - protein, 14 aa, Artificial Sequence
  Description of Artificial Sequence: Synthetic peptide
  Seed: MDPRMCSLMQGSTL
MDPRMFSLLQGSTA

SEQ ID NO: 94526 - protein, 14 aa, Artificial Sequence
  Description of Artificial Sequence: Synthetic peptide
  Seed: MDPRMCSLMQGSTL
MDPRMFSLLQGSTI

SEQ ID NO: 94527 - protein, 14 aa, Artificial Sequence
  Description of Artificial Sequence: Synthetic peptide
  Seed: MDPRMCSLMQGSTL
MDPRMFSLLQGSTL

SEQ ID NO: 94528 - protein, 14 aa, Artificial Sequence
  Description of Artificial Sequence: Synthetic peptide
  Seed: MDPRMCSLMQGSTL
MDPRMFSLLQGSTM

SEQ ID NO: 94529 - protein, 14 aa, Artificial Sequence
  Description of Artificial Sequence: Synthetic peptide
  Seed: MDPRMCSLMQGSTL
MDPRMFSLLQGSTS

SEQ ID NO: 94530 - protein, 14 aa, Artificial Sequence
  Description of Artificial Sequence: Synthetic peptide
  Seed: MDPRMCSLMQGSTL
MDPRMFSLLQGSTT

SEQ ID NO: 94531 - protein, 14 aa, Artificial Sequence
  Description of Artificial Sequence: Synthetic peptide
  Seed: MDPRMCSLMQGSTL
MDPRMFSLLQGSTV

SEQ ID NO: 94532 - protein, 14 aa, Artificial Sequence
  Description of Artificial Sequence: Synthetic peptide
  Seed: MDPRMCSLMQGSTL
MDPRMFSLLQNSTV

SEQ ID NO: 94533 - protein, 14 aa, Artificial Sequence
  Description of Artificial Sequence: Synthetic peptide
  Seed: MDPRMCSLMQGSTL
MDPRMFSLLQPSTA

SEQ ID NO: 94534 - protein, 14 aa, Artificial Sequence
  Description of Artificial Sequence: Synthetic peptide
  Seed: MDPRMCSLMQGSTL
MDPRMFSLLQPSTI

SEQ ID NO: 94535 - protein, 14 aa, Artificial Sequence
  Description of Artificial Sequence: Synthetic peptide
  Seed: MDPRMCSLMQGSTL
MDPRMFSLLQPSTL

SEQ ID NO: 94536 - protein, 14 aa, Artificial Sequence
  Description of Artificial Sequence: Synthetic peptide
  Seed: MDPRMCSLMQGSTL
MDPRMFSLLQPSTV

SEQ ID NO: 94537 - protein, 14 aa, Artificial Sequence
  Description of Artificial Sequence: Synthetic peptide
  Seed: MDPRMCSLMQGSTL
MDPRMFSLLQSSTA

SEQ ID NO: 94538 - protein, 14 aa, Artificial Sequence
  Description of Artificial Sequence: Synthetic peptide
  Seed: MDPRMCSLMQGSTL
MDPRMFSLLQSSTI

SEQ ID NO: 94539 - protein, 14 aa, Artificial Sequence
  Description of Artificial Sequence: Synthetic peptide
  Seed: MDPRMCSLMQGSTL
MDPRMFSLLQSSTL

SEQ ID NO: 94540 - protein, 14 aa, Artificial Sequence
  Description of Artificial Sequence: Synthetic peptide
  Seed: MDPRMCSLMQGSTL
MDPRMFSLLQSSTM

SEQ ID NO: 94541 - protein, 14 aa, Artificial Sequence
  Description of Artificial Sequence: Synthetic peptide
  Seed: MDPRMCSLMQGSTL
MDPRMFSLLQSSTT

SEQ ID NO: 94542 - protein, 14 aa, Artificial Sequence
  Description of Artificial Sequence: Synthetic peptide
  Seed: MDPRMCSLMQGSTL
MDPRMFSLLQSSTV

SEQ ID NO: 94543 - protein, 14 aa, Artificial Sequence
  Description of Artificial Sequence: Synthetic peptide
  Seed: MDPRMCSLMQGSTL
MDPRMFSLLQTSTV

SEQ ID NO: 94544 - protein, 14 aa, Artificial Sequence
  Description of Artificial Sequence: Synthetic peptide
  Seed: MDPRMCSLMQGSTL
MDPRMFSLMQASTA

SEQ ID NO: 94545 - protein, 14 aa, Artificial Sequence
  Description of Artificial Sequence: Synthetic peptide
  Seed: MDPRMCSLMQGSTL
MDPRMFSLMQASTI

SEQ ID NO: 94546 - protein, 14 aa, Artificial Sequence
  Description of Artificial Sequence: Synthetic peptide
  Seed: MDPRMCSLMQGSTL
MDPRMFSLMQASTL

SEQ ID NO: 94547 - protein, 14 aa, Artificial Sequence
  Description of Artificial Sequence: Synthetic peptide
  Seed: MDPRMCSLMQGSTL
MDPRMFSLMQASTM

SEQ ID NO: 94548 - protein, 14 aa, Artificial Sequence
  Description of Artificial Sequence: Synthetic peptide
  Seed: MDPRMCSLMQGSTL
MDPRMFSLMQASTS

SEQ ID NO: 94549 - protein, 14 aa, Artificial Sequence
  Description of Artificial Sequence: Synthetic peptide
  Seed: MDPRMCSLMQGSTL
MDPRMFSLMQASTT

SEQ ID NO: 94550 - protein, 14 aa, Artificial Sequence
  Description of Artificial Sequence: Synthetic peptide
  Seed: MDPRMCSLMQGSTL
MDPRMFSLMQASTV

SEQ ID NO: 94551 - protein, 14 aa, Artificial Sequence
  Description of Artificial Sequence: Synthetic peptide
  Seed: MDPRMCSLMQGSTL
MDPRMFSLMQGSTA

SEQ ID NO: 94552 - protein, 14 aa, Artificial Sequence
  Description of Artificial Sequence: Synthetic peptide
  Seed: MDPRMCSLMQGSTL
MDPRMFSLMQGSTI

SEQ ID NO: 94553 - protein, 14 aa, Artificial Sequence
  Description of Artificial Sequence: Synthetic peptide
  Seed: MDPRMCSLMQGSTL
MDPRMFSLMQGSTL

SEQ ID NO: 94554 - protein, 14 aa, Artificial Sequence
  Description of Artificial Sequence: Synthetic peptide
  Seed: MDPRMCSLMQGSTL
MDPRMFSLMQGSTM

SEQ ID NO: 94555 - protein, 14 aa, Artificial Sequence
  Description of Artificial Sequence: Synthetic peptide
  Seed: MDPRMCSLMQGSTL
MDPRMFSLMQGSTT

SEQ ID NO: 94556 - protein, 14 aa, Artificial Sequence
  Description of Artificial Sequence: Synthetic peptide
  Seed: MDPRMCSLMQGSTL
MDPRMFSLMQGSTV

SEQ ID NO: 94557 - protein, 14 aa, Artificial Sequence
  Description of Artificial Sequence: Synthetic peptide
  Seed: MDPRMCSLMQGSTL
MDPRMFSLMQPSTA

SEQ ID NO: 94558 - protein, 14 aa, Artificial Sequence
  Description of Artificial Sequence: Synthetic peptide
  Seed: MDPRMCSLMQGSTL
MDPRMFSLMQPSTI

SEQ ID NO: 94559 - protein, 14 aa, Artificial Sequence
  Description of Artificial Sequence: Synthetic peptide
  Seed: MDPRMCSLMQGSTL
MDPRMFSLMQPSTL

SEQ ID NO: 94560 - protein, 14 aa, Artificial Sequence
  Description of Artificial Sequence: Synthetic peptide
  Seed: MDPRMCSLMQGSTL
MDPRMFSLMQPSTV

SEQ ID NO: 94561 - protein, 14 aa, Artificial Sequence
  Description of Artificial Sequence: Synthetic peptide
  Seed: MDPRMCSLMQGSTL
MDPRMFSLMQSSTA

SEQ ID NO: 94562 - protein, 14 aa, Artificial Sequence
  Description of Artificial Sequence: Synthetic peptide
  Seed: MDPRMCSLMQGSTL
MDPRMFSLMQSSTI

SEQ ID NO: 94563 - protein, 14 aa, Artificial Sequence
  Description of Artificial Sequence: Synthetic peptide
  Seed: MDPRMCSLMQGSTL
MDPRMFSLMQSSTL

SEQ ID NO: 94564 - protein, 14 aa, Artificial Sequence
  Description of Artificial Sequence: Synthetic peptide
  Seed: MDPRMCSLMQGSTL
MDPRMFSLMQSSTM

SEQ ID NO: 94565 - protein, 14 aa, Artificial Sequence
  Description of Artificial Sequence: Synthetic peptide
  Seed: MDPRMCSLMQGSTL
MDPRMFSLMQSSTT

SEQ ID NO: 94566 - protein, 14 aa, Artificial Sequence
  Description of Artificial Sequence: Synthetic peptide
  Seed: MDPRMCSLMQGSTL
MDPRMFSLMQSSTV

SEQ ID NO: 94567 - protein, 14 aa, Artificial Sequence
  Description of Artificial Sequence: Synthetic peptide
  Seed: MDPRMCSLMQGSTL
MDPRMFSLQQASTL

SEQ ID NO: 94568 - protein, 14 aa, Artificial Sequence
  Description of Artificial Sequence: Synthetic peptide
  Seed: MDPRMCSLMQGSTL
MDPRMYSLIQASTI

SEQ ID NO: 94569 - protein, 14 aa, Artificial Sequence
  Description of Artificial Sequence: Synthetic peptide
  Seed: MDPRMCSLMQGSTL
MDPRMYSLIQASTL

SEQ ID NO: 94570 - protein, 14 aa, Artificial Sequence
  Description of Artificial Sequence: Synthetic peptide
  Seed: MDPRMCSLMQGSTL
MDPRMYSLIQASTV

SEQ ID NO: 94571 - protein, 14 aa, Artificial Sequence
  Description of Artificial Sequence: Synthetic peptide
  Seed: MDPRMCSLMQGSTL
MDPRMYSLLQASTA

SEQ ID NO: 94572 - protein, 14 aa, Artificial Sequence
  Description of Artificial Sequence: Synthetic peptide
  Seed: MDPRMCSLMQGSTL
MDPRMYSLLQASTI

SEQ ID NO: 94573 - protein, 14 aa, Artificial Sequence
  Description of Artificial Sequence: Synthetic peptide
  Seed: MDPRMCSLMQGSTL
MDPRMYSLLQASTL

SEQ ID NO: 94574 - protein, 14 aa, Artificial Sequence
  Description of Artificial Sequence: Synthetic peptide
  Seed: MDPRMCSLMQGSTL
MDPRMYSLLQASTM

SEQ ID NO: 94575 - protein, 14 aa, Artificial Sequence
  Description of Artificial Sequence: Synthetic peptide
  Seed: MDPRMCSLMQGSTL
MDPRMYSLLQASTT

SEQ ID NO: 94576 - protein, 14 aa, Artificial Sequence
  Description of Artificial Sequence: Synthetic peptide
  Seed: MDPRMCSLMQGSTL
MDPRMYSLLQASTV

SEQ ID NO: 94577 - protein, 14 aa, Artificial Sequence
  Description of Artificial Sequence: Synthetic peptide
  Seed: MDPRMCSLMQGSTL
MDPRMYSLLQGSTA

SEQ ID NO: 94578 - protein, 14 aa, Artificial Sequence
  Description of Artificial Sequence: Synthetic peptide
  Seed: MDPRMCSLMQGSTL
MDPRMYSLLQGSTI

SEQ ID NO: 94579 - protein, 14 aa, Artificial Sequence
  Description of Artificial Sequence: Synthetic peptide
  Seed: MDPRMCSLMQGSTL
MDPRMYSLLQGSTL

SEQ ID NO: 94580 - protein, 14 aa, Artificial Sequence
  Description of Artificial Sequence: Synthetic peptide
  Seed: MDPRMCSLMQGSTL
MDPRMYSLLQGSTV

SEQ ID NO: 94581 - protein, 14 aa, Artificial Sequence
  Description of Artificial Sequence: Synthetic peptide
  Seed: MDPRMCSLMQGSTL
MDPRMYSLLQPSTI

SEQ ID NO: 94582 - protein, 14 aa, Artificial Sequence
  Description of Artificial Sequence: Synthetic peptide
  Seed: MDPRMCSLMQGSTL
MDPRMYSLLQPSTL

SEQ ID NO: 94583 - protein, 14 aa, Artificial Sequence
  Description of Artificial Sequence: Synthetic peptide
  Seed: MDPRMCSLMQGSTL
MDPRMYSLLQPSTV

SEQ ID NO: 94584 - protein, 14 aa, Artificial Sequence
  Description of Artificial Sequence: Synthetic peptide
  Seed: MDPRMCSLMQGSTL
MDPRMYSLLQSSTA

SEQ ID NO: 94585 - protein, 14 aa, Artificial Sequence
  Description of Artificial Sequence: Synthetic peptide
  Seed: MDPRMCSLMQGSTL
MDPRMYSLLQSSTI

SEQ ID NO: 94586 - protein, 14 aa, Artificial Sequence
  Description of Artificial Sequence: Synthetic peptide
  Seed: MDPRMCSLMQGSTL
MDPRMYSLLQSSTL

SEQ ID NO: 94587 - protein, 14 aa, Artificial Sequence
  Description of Artificial Sequence: Synthetic peptide
  Seed: MDPRMCSLMQGSTL
MDPRMYSLLQSSTV

SEQ ID NO: 94588 - protein, 14 aa, Artificial Sequence
  Description of Artificial Sequence: Synthetic peptide
  Seed: MDPRMCSLMQGSTL
MDPRMYSLMQASTA

SEQ ID NO: 94589 - protein, 14 aa, Artificial Sequence
  Description of Artificial Sequence: Synthetic peptide
  Seed: MDPRMCSLMQGSTL
MDPRMYSLMQASTI

SEQ ID NO: 94590 - protein, 14 aa, Artificial Sequence
  Description of Artificial Sequence: Synthetic peptide
  Seed: MDPRMCSLMQGSTL
MDPRMYSLMQASTL

SEQ ID NO: 94591 - protein, 14 aa, Artificial Sequence
  Description of Artificial Sequence: Synthetic peptide
  Seed: MDPRMCSLMQGSTL
MDPRMYSLMQASTV

SEQ ID NO: 94592 - protein, 14 aa, Artificial Sequence
  Description of Artificial Sequence: Synthetic peptide
  Seed: MDPRMCSLMQGSTL
MDPRMYSLMQGSTA

SEQ ID NO: 94593 - protein, 14 aa, Artificial Sequence
  Description of Artificial Sequence: Synthetic peptide
  Seed: MDPRMCSLMQGSTL
MDPRMYSLMQGSTI

SEQ ID NO: 94594 - protein, 14 aa, Artificial Sequence
  Description of Artificial Sequence: Synthetic peptide
  Seed: MDPRMCSLMQGSTL
MDPRMYSLMQGSTL

SEQ ID NO: 94595 - protein, 14 aa, Artificial Sequence
  Description of Artificial Sequence: Synthetic peptide
  Seed: MDPRMCSLMQGSTL
MDPRMYSLMQGSTV

SEQ ID NO: 94596 - protein, 14 aa, Artificial Sequence
  Description of Artificial Sequence: Synthetic peptide
  Seed: MDPRMCSLMQGSTL
MDPRMYSLMQPSTL

SEQ ID NO: 94597 - protein, 14 aa, Artificial Sequence
  Description of Artificial Sequence: Synthetic peptide
  Seed: MDPRMCSLMQGSTL
MDPRMYSLMQPSTV

SEQ ID NO: 94598 - protein, 14 aa, Artificial Sequence
  Description of Artificial Sequence: Synthetic peptide
  Seed: MDPRMCSLMQGSTL
MDPRMYSLMQSSTA

SEQ ID NO: 94599 - protein, 14 aa, Artificial Sequence
  Description of Artificial Sequence: Synthetic peptide
  Seed: MDPRMCSLMQGSTL
MDPRMYSLMQSSTI

SEQ ID NO: 94600 - protein, 14 aa, Artificial Sequence
  Description of Artificial Sequence: Synthetic peptide
  Seed: MDPRMCSLMQGSTL
MDPRMYSLMQSSTL

SEQ ID NO: 94601 - protein, 14 aa, Artificial Sequence
  Description of Artificial Sequence: Synthetic peptide
  Seed: MDPRMCSLMQGSTL
MDPRMYSLMQSSTV

SEQ ID NO: 94602 - protein, 15 aa, Artificial Sequence
  Description of Artificial Sequence: Synthetic peptide
  Seed: MDPRMCSLMQGSTLP
MDPRMCSLLQASTIP

SEQ ID NO: 94603 - protein, 15 aa, Artificial Sequence
  Description of Artificial Sequence: Synthetic peptide
  Seed: MDPRMCSLMQGSTLP
MDPRMCSLLQASTLP

SEQ ID NO: 94604 - protein, 15 aa, Artificial Sequence
  Description of Artificial Sequence: Synthetic peptide
  Seed: MDPRMCSLMQGSTLP
MDPRMCSLLQASTVP

SEQ ID NO: 94605 - protein, 15 aa, Artificial Sequence
  Description of Artificial Sequence: Synthetic peptide
  Seed: MDPRMCSLMQGSTLP
MDPRMCSLMQASTIP

SEQ ID NO: 94606 - protein, 15 aa, Artificial Sequence
  Description of Artificial Sequence: Synthetic peptide
  Seed: MDPRMCSLMQGSTLP
MDPRMCSLMQASTLP

SEQ ID NO: 94607 - protein, 15 aa, Artificial Sequence
  Description of Artificial Sequence: Synthetic peptide
  Seed: MDPRMCSLMQGSTLP
MDPRMCSLMQASTVP

SEQ ID NO: 94608 - protein, 15 aa, Artificial Sequence
  Description of Artificial Sequence: Synthetic peptide
  Seed: MDPRMCSLMQGSTLP
MDPRMFSLAQASTAP

SEQ ID NO: 94609 - protein, 15 aa, Artificial Sequence
  Description of Artificial Sequence: Synthetic peptide
  Seed: MDPRMCSLMQGSTLP
MDPRMFSLAQASTCP

SEQ ID NO: 94610 - protein, 15 aa, Artificial Sequence
  Description of Artificial Sequence: Synthetic peptide
  Seed: MDPRMCSLMQGSTLP
MDPRMFSLAQASTFP

SEQ ID NO: 94611 - protein, 15 aa, Artificial Sequence
  Description of Artificial Sequence: Synthetic peptide
  Seed: MDPRMCSLMQGSTLP
MDPRMFSLAQASTGP

SEQ ID NO: 94612 - protein, 15 aa, Artificial Sequence
  Description of Artificial Sequence: Synthetic peptide
  Seed: MDPRMCSLMQGSTLP
MDPRMFSLAQASTHP

SEQ ID NO: 94613 - protein, 15 aa, Artificial Sequence
  Description of Artificial Sequence: Synthetic peptide
  Seed: MDPRMCSLMQGSTLP
MDPRMFSLAQASTIP

SEQ ID NO: 94614 - protein, 15 aa, Artificial Sequence
  Description of Artificial Sequence: Synthetic peptide
  Seed: MDPRMCSLMQGSTLP
MDPRMFSLAQASTLP

SEQ ID NO: 94615 - protein, 15 aa, Artificial Sequence
  Description of Artificial Sequence: Synthetic peptide
  Seed: MDPRMCSLMQGSTLP
MDPRMFSLAQASTMP

SEQ ID NO: 94616 - protein, 15 aa, Artificial Sequence
  Description of Artificial Sequence: Synthetic peptide
  Seed: MDPRMCSLMQGSTLP
MDPRMFSLAQASTNP

SEQ ID NO: 94617 - protein, 15 aa, Artificial Sequence
  Description of Artificial Sequence: Synthetic peptide
  Seed: MDPRMCSLMQGSTLP
MDPRMFSLAQASTQP

SEQ ID NO: 94618 - protein, 15 aa, Artificial Sequence
  Description of Artificial Sequence: Synthetic peptide
  Seed: MDPRMCSLMQGSTLP
MDPRMFSLAQASTRP

SEQ ID NO: 94619 - protein, 15 aa, Artificial Sequence
  Description of Artificial Sequence: Synthetic peptide
  Seed: MDPRMCSLMQGSTLP
MDPRMFSLAQASTSP

SEQ ID NO: 94620 - protein, 15 aa, Artificial Sequence
  Description of Artificial Sequence: Synthetic peptide
  Seed: MDPRMCSLMQGSTLP
MDPRMFSLAQASTTP

SEQ ID NO: 94621 - protein, 15 aa, Artificial Sequence
  Description of Artificial Sequence: Synthetic peptide
  Seed: MDPRMCSLMQGSTLP
MDPRMFSLAQASTVP

SEQ ID NO: 94622 - protein, 15 aa, Artificial Sequence
  Description of Artificial Sequence: Synthetic peptide
  Seed: MDPRMCSLMQGSTLP
MDPRMFSLAQASTYP

SEQ ID NO: 94623 - protein, 15 aa, Artificial Sequence
  Description of Artificial Sequence: Synthetic peptide
  Seed: MDPRMCSLMQGSTLP
MDPRMFSLAQGSTAP

SEQ ID NO: 94624 - protein, 15 aa, Artificial Sequence
  Description of Artificial Sequence: Synthetic peptide
  Seed: MDPRMCSLMQGSTLP
MDPRMFSLAQGSTFP

SEQ ID NO: 94625 - protein, 15 aa, Artificial Sequence
  Description of Artificial Sequence: Synthetic peptide
  Seed: MDPRMCSLMQGSTLP
MDPRMFSLAQGSTGP

SEQ ID NO: 94626 - protein, 15 aa, Artificial Sequence
  Description of Artificial Sequence: Synthetic peptide
  Seed: MDPRMCSLMQGSTLP
MDPRMFSLAQGSTIP

SEQ ID NO: 94627 - protein, 15 aa, Artificial Sequence
  Description of Artificial Sequence: Synthetic peptide
  Seed: MDPRMCSLMQGSTLP
MDPRMFSLAQGSTLP

SEQ ID NO: 94628 - protein, 15 aa, Artificial Sequence
  Description of Artificial Sequence: Synthetic peptide
  Seed: MDPRMCSLMQGSTLP
MDPRMFSLAQGSTMP

SEQ ID NO: 94629 - protein, 15 aa, Artificial Sequence
  Description of Artificial Sequence: Synthetic peptide
  Seed: MDPRMCSLMQGSTLP
MDPRMFSLAQGSTNP

SEQ ID NO: 94630 - protein, 15 aa, Artificial Sequence
  Description of Artificial Sequence: Synthetic peptide
  Seed: MDPRMCSLMQGSTLP
MDPRMFSLAQGSTSP

SEQ ID NO: 94631 - protein, 15 aa, Artificial Sequence
  Description of Artificial Sequence: Synthetic peptide
  Seed: MDPRMCSLMQGSTLP
MDPRMFSLAQGSTTP

SEQ ID NO: 94632 - protein, 15 aa, Artificial Sequence
  Description of Artificial Sequence: Synthetic peptide
  Seed: MDPRMCSLMQGSTLP
MDPRMFSLAQGSTVP

SEQ ID NO: 94633 - protein, 15 aa, Artificial Sequence
  Description of Artificial Sequence: Synthetic peptide
  Seed: MDPRMCSLMQGSTLP
MDPRMFSLAQISTAP

SEQ ID NO: 94634 - protein, 15 aa, Artificial Sequence
  Description of Artificial Sequence: Synthetic peptide
  Seed: MDPRMCSLMQGSTLP
MDPRMFSLAQISTIP

SEQ ID NO: 94635 - protein, 15 aa, Artificial Sequence
  Description of Artificial Sequence: Synthetic peptide
  Seed: MDPRMCSLMQGSTLP
MDPRMFSLAQISTLP

SEQ ID NO: 94636 - protein, 15 aa, Artificial Sequence
  Description of Artificial Sequence: Synthetic peptide
  Seed: MDPRMCSLMQGSTLP
MDPRMFSLAQISTMP

SEQ ID NO: 94637 - protein, 15 aa, Artificial Sequence
  Description of Artificial Sequence: Synthetic peptide
  Seed: MDPRMCSLMQGSTLP
MDPRMFSLAQISTNP

SEQ ID NO: 94638 - protein, 15 aa, Artificial Sequence
  Description of Artificial Sequence: Synthetic peptide
  Seed: MDPRMCSLMQGSTLP
MDPRMFSLAQISTSP

SEQ ID NO: 94639 - protein, 15 aa, Artificial Sequence
  Description of Artificial Sequence: Synthetic peptide
  Seed: MDPRMCSLMQGSTLP
MDPRMFSLAQISTTP

SEQ ID NO: 94640 - protein, 15 aa, Artificial Sequence
  Description of Artificial Sequence: Synthetic peptide
  Seed: MDPRMCSLMQGSTLP
MDPRMFSLAQISTVP

SEQ ID NO: 94641 - protein, 15 aa, Artificial Sequence
  Description of Artificial Sequence: Synthetic peptide
  Seed: MDPRMCSLMQGSTLP
MDPRMFSLAQLSTAP

SEQ ID NO: 94642 - protein, 15 aa, Artificial Sequence
  Description of Artificial Sequence: Synthetic peptide
  Seed: MDPRMCSLMQGSTLP
MDPRMFSLAQLSTNP

SEQ ID NO: 94643 - protein, 15 aa, Artificial Sequence
  Description of Artificial Sequence: Synthetic peptide
  Seed: MDPRMCSLMQGSTLP
MDPRMFSLAQLSTSP

SEQ ID NO: 94644 - protein, 15 aa, Artificial Sequence
  Description of Artificial Sequence: Synthetic peptide
  Seed: MDPRMCSLMQGSTLP
MDPRMFSLAQMSTAP

SEQ ID NO: 94645 - protein, 15 aa, Artificial Sequence
  Description of Artificial Sequence: Synthetic peptide
  Seed: MDPRMCSLMQGSTLP
MDPRMFSLAQNSTAP

SEQ ID NO: 94646 - protein, 15 aa, Artificial Sequence
  Description of Artificial Sequence: Synthetic peptide
  Seed: MDPRMCSLMQGSTLP
MDPRMFSLAQNSTIP

SEQ ID NO: 94647 - protein, 15 aa, Artificial Sequence
  Description of Artificial Sequence: Synthetic peptide
  Seed: MDPRMCSLMQGSTLP
MDPRMFSLAQNSTLP

SEQ ID NO: 94648 - protein, 15 aa, Artificial Sequence
  Description of Artificial Sequence: Synthetic peptide
  Seed: MDPRMCSLMQGSTLP
MDPRMFSLAQNSTMP

SEQ ID NO: 94649 - protein, 15 aa, Artificial Sequence
  Description of Artificial Sequence: Synthetic peptide
  Seed: MDPRMCSLMQGSTLP
MDPRMFSLAQNSTNP

SEQ ID NO: 94650 - protein, 15 aa, Artificial Sequence
  Description of Artificial Sequence: Synthetic peptide
  Seed: MDPRMCSLMQGSTLP
MDPRMFSLAQNSTSP

SEQ ID NO: 94651 - protein, 15 aa, Artificial Sequence
  Description of Artificial Sequence: Synthetic peptide
  Seed: MDPRMCSLMQGSTLP
MDPRMFSLAQNSTTP

SEQ ID NO: 94652 - protein, 15 aa, Artificial Sequence
  Description of Artificial Sequence: Synthetic peptide
  Seed: MDPRMCSLMQGSTLP
MDPRMFSLAQNSTVP

SEQ ID NO: 94653 - protein, 15 aa, Artificial Sequence
  Description of Artificial Sequence: Synthetic peptide
  Seed: MDPRMCSLMQGSTLP
MDPRMFSLAQPSTAP

SEQ ID NO: 94654 - protein, 15 aa, Artificial Sequence
  Description of Artificial Sequence: Synthetic peptide
  Seed: MDPRMCSLMQGSTLP
MDPRMFSLAQPSTIP

SEQ ID NO: 94655 - protein, 15 aa, Artificial Sequence
  Description of Artificial Sequence: Synthetic peptide
  Seed: MDPRMCSLMQGSTLP
MDPRMFSLAQPSTLP

SEQ ID NO: 94656 - protein, 15 aa, Artificial Sequence
  Description of Artificial Sequence: Synthetic peptide
  Seed: MDPRMCSLMQGSTLP
MDPRMFSLAQPSTMP

SEQ ID NO: 94657 - protein, 15 aa, Artificial Sequence
  Description of Artificial Sequence: Synthetic peptide
  Seed: MDPRMCSLMQGSTLP
MDPRMFSLAQPSTNP

SEQ ID NO: 94658 - protein, 15 aa, Artificial Sequence
  Description of Artificial Sequence: Synthetic peptide
  Seed: MDPRMCSLMQGSTLP
MDPRMFSLAQPSTQP

SEQ ID NO: 94659 - protein, 15 aa, Artificial Sequence
  Description of Artificial Sequence: Synthetic peptide
  Seed: MDPRMCSLMQGSTLP
MDPRMFSLAQPSTSP

SEQ ID NO: 94660 - protein, 15 aa, Artificial Sequence
  Description of Artificial Sequence: Synthetic peptide
  Seed: MDPRMCSLMQGSTLP
MDPRMFSLAQPSTTP

SEQ ID NO: 94661 - protein, 15 aa, Artificial Sequence
  Description of Artificial Sequence: Synthetic peptide
  Seed: MDPRMCSLMQGSTLP
MDPRMFSLAQPSTVP

SEQ ID NO: 94662 - protein, 15 aa, Artificial Sequence
  Description of Artificial Sequence: Synthetic peptide
  Seed: MDPRMCSLMQGSTLP
MDPRMFSLAQSSTAP

SEQ ID NO: 94663 - protein, 15 aa, Artificial Sequence
  Description of Artificial Sequence: Synthetic peptide
  Seed: MDPRMCSLMQGSTLP
MDPRMFSLAQSSTFP

SEQ ID NO: 94664 - protein, 15 aa, Artificial Sequence
  Description of Artificial Sequence: Synthetic peptide
  Seed: MDPRMCSLMQGSTLP
MDPRMFSLAQSSTGP

SEQ ID NO: 94665 - protein, 15 aa, Artificial Sequence
  Description of Artificial Sequence: Synthetic peptide
  Seed: MDPRMCSLMQGSTLP
MDPRMFSLAQSSTIP

SEQ ID NO: 94666 - protein, 15 aa, Artificial Sequence
  Description of Artificial Sequence: Synthetic peptide
  Seed: MDPRMCSLMQGSTLP
MDPRMFSLAQSSTLP

SEQ ID NO: 94667 - protein, 15 aa, Artificial Sequence
  Description of Artificial Sequence: Synthetic peptide
  Seed: MDPRMCSLMQGSTLP
MDPRMFSLAQSSTMP

SEQ ID NO: 94668 - protein, 15 aa, Artificial Sequence
  Description of Artificial Sequence: Synthetic peptide
  Seed: MDPRMCSLMQGSTLP
MDPRMFSLAQSSTNP

SEQ ID NO: 94669 - protein, 15 aa, Artificial Sequence
  Description of Artificial Sequence: Synthetic peptide
  Seed: MDPRMCSLMQGSTLP
MDPRMFSLAQSSTQP

SEQ ID NO: 94670 - protein, 15 aa, Artificial Sequence
  Description of Artificial Sequence: Synthetic peptide
  Seed: MDPRMCSLMQGSTLP
MDPRMFSLAQSSTSP

SEQ ID NO: 94671 - protein, 15 aa, Artificial Sequence
  Description of Artificial Sequence: Synthetic peptide
  Seed: MDPRMCSLMQGSTLP
MDPRMFSLAQSSTTP

SEQ ID NO: 94672 - protein, 15 aa, Artificial Sequence
  Description of Artificial Sequence: Synthetic peptide
  Seed: MDPRMCSLMQGSTLP
MDPRMFSLAQSSTVP

SEQ ID NO: 94673 - protein, 15 aa, Artificial Sequence
  Description of Artificial Sequence: Synthetic peptide
  Seed: MDPRMCSLMQGSTLP
MDPRMFSLAQTSTAP

SEQ ID NO: 94674 - protein, 15 aa, Artificial Sequence
  Description of Artificial Sequence: Synthetic peptide
  Seed: MDPRMCSLMQGSTLP
MDPRMFSLAQTSTIP

SEQ ID NO: 94675 - protein, 15 aa, Artificial Sequence
  Description of Artificial Sequence: Synthetic peptide
  Seed: MDPRMCSLMQGSTLP
MDPRMFSLAQTSTLP

SEQ ID NO: 94676 - protein, 15 aa, Artificial Sequence
  Description of Artificial Sequence: Synthetic peptide
  Seed: MDPRMCSLMQGSTLP
MDPRMFSLAQTSTMP

SEQ ID NO: 94677 - protein, 15 aa, Artificial Sequence
  Description of Artificial Sequence: Synthetic peptide
  Seed: MDPRMCSLMQGSTLP
MDPRMFSLAQTSTNP

SEQ ID NO: 94678 - protein, 15 aa, Artificial Sequence
  Description of Artificial Sequence: Synthetic peptide
  Seed: MDPRMCSLMQGSTLP
MDPRMFSLAQTSTSP

SEQ ID NO: 94679 - protein, 15 aa, Artificial Sequence
  Description of Artificial Sequence: Synthetic peptide
  Seed: MDPRMCSLMQGSTLP
MDPRMFSLAQTSTTP

SEQ ID NO: 94680 - protein, 15 aa, Artificial Sequence
  Description of Artificial Sequence: Synthetic peptide
  Seed: MDPRMCSLMQGSTLP
MDPRMFSLAQTSTVP

SEQ ID NO: 94681 - protein, 15 aa, Artificial Sequence
  Description of Artificial Sequence: Synthetic peptide
  Seed: MDPRMCSLMQGSTLP
MDPRMFSLAQVSTAP

SEQ ID NO: 94682 - protein, 15 aa, Artificial Sequence
  Description of Artificial Sequence: Synthetic peptide
  Seed: MDPRMCSLMQGSTLP
MDPRMFSLAQVSTGP

SEQ ID NO: 94683 - protein, 15 aa, Artificial Sequence
  Description of Artificial Sequence: Synthetic peptide
  Seed: MDPRMCSLMQGSTLP
MDPRMFSLAQVSTHP

SEQ ID NO: 94684 - protein, 15 aa, Artificial Sequence
  Description of Artificial Sequence: Synthetic peptide
  Seed: MDPRMCSLMQGSTLP
MDPRMFSLAQVSTIP

SEQ ID NO: 94685 - protein, 15 aa, Artificial Sequence
  Description of Artificial Sequence: Synthetic peptide
  Seed: MDPRMCSLMQGSTLP
MDPRMFSLAQVSTLP

SEQ ID NO: 94686 - protein, 15 aa, Artificial Sequence
  Description of Artificial Sequence: Synthetic peptide
  Seed: MDPRMCSLMQGSTLP
MDPRMFSLAQVSTMP

SEQ ID NO: 94687 - protein, 15 aa, Artificial Sequence
  Description of Artificial Sequence: Synthetic peptide
  Seed: MDPRMCSLMQGSTLP
MDPRMFSLAQVSTNP

SEQ ID NO: 94688 - protein, 15 aa, Artificial Sequence
  Description of Artificial Sequence: Synthetic peptide
  Seed: MDPRMCSLMQGSTLP
MDPRMFSLAQVSTQP

SEQ ID NO: 94689 - protein, 15 aa, Artificial Sequence
  Description of Artificial Sequence: Synthetic peptide
  Seed: MDPRMCSLMQGSTLP
MDPRMFSLAQVSTSP

SEQ ID NO: 94690 - protein, 15 aa, Artificial Sequence
  Description of Artificial Sequence: Synthetic peptide
  Seed: MDPRMCSLMQGSTLP
MDPRMFSLAQVSTTP

SEQ ID NO: 94691 - protein, 15 aa, Artificial Sequence
  Description of Artificial Sequence: Synthetic peptide
  Seed: MDPRMCSLMQGSTLP
MDPRMFSLAQVSTVP

SEQ ID NO: 94692 - protein, 15 aa, Artificial Sequence
  Description of Artificial Sequence: Synthetic peptide
  Seed: MDPRMCSLMQGSTLP
MDPRMFSLCQASTAP

SEQ ID NO: 94693 - protein, 15 aa, Artificial Sequence
  Description of Artificial Sequence: Synthetic peptide
  Seed: MDPRMCSLMQGSTLP
MDPRMFSLCQASTIP

SEQ ID NO: 94694 - protein, 15 aa, Artificial Sequence
  Description of Artificial Sequence: Synthetic peptide
  Seed: MDPRMCSLMQGSTLP
MDPRMFSLCQASTLP

SEQ ID NO: 94695 - protein, 15 aa, Artificial Sequence
  Description of Artificial Sequence: Synthetic peptide
  Seed: MDPRMCSLMQGSTLP
MDPRMFSLCQASTVP

SEQ ID NO: 94696 - protein, 15 aa, Artificial Sequence
  Description of Artificial Sequence: Synthetic peptide
  Seed: MDPRMCSLMQGSTLP
MDPRMFSLCQGSTLP

SEQ ID NO: 94697 - protein, 15 aa, Artificial Sequence
  Description of Artificial Sequence: Synthetic peptide
  Seed: MDPRMCSLMQGSTLP
MDPRMFSLCQSSTLP

SEQ ID NO: 94698 - protein, 15 aa, Artificial Sequence
  Description of Artificial Sequence: Synthetic peptide
  Seed: MDPRMCSLMQGSTLP
MDPRMFSLEQASTAP

SEQ ID NO: 94699 - protein, 15 aa, Artificial Sequence
  Description of Artificial Sequence: Synthetic peptide
  Seed: MDPRMCSLMQGSTLP
MDPRMFSLEQASTIP

SEQ ID NO: 94700 - protein, 15 aa, Artificial Sequence
  Description of Artificial Sequence: Synthetic peptide
  Seed: MDPRMCSLMQGSTLP
MDPRMFSLEQASTLP

SEQ ID NO: 94701 - protein, 15 aa, Artificial Sequence
  Description of Artificial Sequence: Synthetic peptide
  Seed: MDPRMCSLMQGSTLP
MDPRMFSLEQASTMP

SEQ ID NO: 94702 - protein, 15 aa, Artificial Sequence
  Description of Artificial Sequence: Synthetic peptide
  Seed: MDPRMCSLMQGSTLP
MDPRMFSLEQASTTP

SEQ ID NO: 94703 - protein, 15 aa, Artificial Sequence
  Description of Artificial Sequence: Synthetic peptide
  Seed: MDPRMCSLMQGSTLP
MDPRMFSLEQASTVP

SEQ ID NO: 94704 - protein, 15 aa, Artificial Sequence
  Description of Artificial Sequence: Synthetic peptide
  Seed: MDPRMCSLMQGSTLP
MDPRMFSLEQGSTAP

SEQ ID NO: 94705 - protein, 15 aa, Artificial Sequence
  Description of Artificial Sequence: Synthetic peptide
  Seed: MDPRMCSLMQGSTLP
MDPRMFSLEQGSTIP

SEQ ID NO: 94706 - protein, 15 aa, Artificial Sequence
  Description of Artificial Sequence: Synthetic peptide
  Seed: MDPRMCSLMQGSTLP
MDPRMFSLEQGSTLP

SEQ ID NO: 94707 - protein, 15 aa, Artificial Sequence
  Description of Artificial Sequence: Synthetic peptide
  Seed: MDPRMCSLMQGSTLP
MDPRMFSLEQGSTVP

SEQ ID NO: 94708 - protein, 15 aa, Artificial Sequence
  Description of Artificial Sequence: Synthetic peptide
  Seed: MDPRMCSLMQGSTLP
MDPRMFSLEQPSTLP

SEQ ID NO: 94709 - protein, 15 aa, Artificial Sequence
  Description of Artificial Sequence: Synthetic peptide
  Seed: MDPRMCSLMQGSTLP
MDPRMFSLEQSSTAP

SEQ ID NO: 94710 - protein, 15 aa, Artificial Sequence
  Description of Artificial Sequence: Synthetic peptide
  Seed: MDPRMCSLMQGSTLP
MDPRMFSLEQSSTIP

SEQ ID NO: 94711 - protein, 15 aa, Artificial Sequence
  Description of Artificial Sequence: Synthetic peptide
  Seed: MDPRMCSLMQGSTLP
MDPRMFSLEQSSTLP

SEQ ID NO: 94712 - protein, 15 aa, Artificial Sequence
  Description of Artificial Sequence: Synthetic peptide
  Seed: MDPRMCSLMQGSTLP
MDPRMFSLEQSSTVP

SEQ ID NO: 94713 - protein, 15 aa, Artificial Sequence
  Description of Artificial Sequence: Synthetic peptide
  Seed: MDPRMCSLMQGSTLP
MDPRMFSLFQASTAP

SEQ ID NO: 94714 - protein, 15 aa, Artificial Sequence
  Description of Artificial Sequence: Synthetic peptide
  Seed: MDPRMCSLMQGSTLP
MDPRMFSLFQASTGP

SEQ ID NO: 94715 - protein, 15 aa, Artificial Sequence
  Description of Artificial Sequence: Synthetic peptide
  Seed: MDPRMCSLMQGSTLP
MDPRMFSLFQASTHP

SEQ ID NO: 94716 - protein, 15 aa, Artificial Sequence
  Description of Artificial Sequence: Synthetic peptide
  Seed: MDPRMCSLMQGSTLP
MDPRMFSLFQASTIP

SEQ ID NO: 94717 - protein, 15 aa, Artificial Sequence
  Description of Artificial Sequence: Synthetic peptide
  Seed: MDPRMCSLMQGSTLP
MDPRMFSLFQASTLP

SEQ ID NO: 94718 - protein, 15 aa, Artificial Sequence
  Description of Artificial Sequence: Synthetic peptide
  Seed: MDPRMCSLMQGSTLP
MDPRMFSLFQASTMP

SEQ ID NO: 94719 - protein, 15 aa, Artificial Sequence
  Description of Artificial Sequence: Synthetic peptide
  Seed: MDPRMCSLMQGSTLP
MDPRMFSLFQASTNP

SEQ ID NO: 94720 - protein, 15 aa, Artificial Sequence
  Description of Artificial Sequence: Synthetic peptide
  Seed: MDPRMCSLMQGSTLP
MDPRMFSLFQASTSP

SEQ ID NO: 94721 - protein, 15 aa, Artificial Sequence
  Description of Artificial Sequence: Synthetic peptide
  Seed: MDPRMCSLMQGSTLP
MDPRMFSLFQASTTP

SEQ ID NO: 94722 - protein, 15 aa, Artificial Sequence
  Description of Artificial Sequence: Synthetic peptide
  Seed: MDPRMCSLMQGSTLP
MDPRMFSLFQASTVP

SEQ ID NO: 94723 - protein, 15 aa, Artificial Sequence
  Description of Artificial Sequence: Synthetic peptide
  Seed: MDPRMCSLMQGSTLP
MDPRMFSLFQGSTAP

SEQ ID NO: 94724 - protein, 15 aa, Artificial Sequence
  Description of Artificial Sequence: Synthetic peptide
  Seed: MDPRMCSLMQGSTLP
MDPRMFSLFQGSTIP

SEQ ID NO: 94725 - protein, 15 aa, Artificial Sequence
  Description of Artificial Sequence: Synthetic peptide
  Seed: MDPRMCSLMQGSTLP
MDPRMFSLFQGSTLP

SEQ ID NO: 94726 - protein, 15 aa, Artificial Sequence
  Description of Artificial Sequence: Synthetic peptide
  Seed: MDPRMCSLMQGSTLP
MDPRMFSLFQGSTMP

SEQ ID NO: 94727 - protein, 15 aa, Artificial Sequence
  Description of Artificial Sequence: Synthetic peptide
  Seed: MDPRMCSLMQGSTLP
MDPRMFSLFQGSTVP

SEQ ID NO: 94728 - protein, 15 aa, Artificial Sequence
  Description of Artificial Sequence: Synthetic peptide
  Seed: MDPRMCSLMQGSTLP
MDPRMFSLFQNSTLP

SEQ ID NO: 94729 - protein, 15 aa, Artificial Sequence
  Description of Artificial Sequence: Synthetic peptide
  Seed: MDPRMCSLMQGSTLP
MDPRMFSLFQPSTAP

SEQ ID NO: 94730 - protein, 15 aa, Artificial Sequence
  Description of Artificial Sequence: Synthetic peptide
  Seed: MDPRMCSLMQGSTLP
MDPRMFSLFQPSTIP

SEQ ID NO: 94731 - protein, 15 aa, Artificial Sequence
  Description of Artificial Sequence: Synthetic peptide
  Seed: MDPRMCSLMQGSTLP
MDPRMFSLFQPSTLP

SEQ ID NO: 94732 - protein, 15 aa, Artificial Sequence
  Description of Artificial Sequence: Synthetic peptide
  Seed: MDPRMCSLMQGSTLP
MDPRMFSLFQPSTNP

SEQ ID NO: 94733 - protein, 15 aa, Artificial Sequence
  Description of Artificial Sequence: Synthetic peptide
  Seed: MDPRMCSLMQGSTLP
MDPRMFSLFQPSTSP

SEQ ID NO: 94734 - protein, 15 aa, Artificial Sequence
  Description of Artificial Sequence: Synthetic peptide
  Seed: MDPRMCSLMQGSTLP
MDPRMFSLFQPSTVP

SEQ ID NO: 94735 - protein, 15 aa, Artificial Sequence
  Description of Artificial Sequence: Synthetic peptide
  Seed: MDPRMCSLMQGSTLP
MDPRMFSLFQSSTAP

SEQ ID NO: 94736 - protein, 15 aa, Artificial Sequence
  Description of Artificial Sequence: Synthetic peptide
  Seed: MDPRMCSLMQGSTLP
MDPRMFSLFQSSTIP

SEQ ID NO: 94737 - protein, 15 aa, Artificial Sequence
  Description of Artificial Sequence: Synthetic peptide
  Seed: MDPRMCSLMQGSTLP
MDPRMFSLFQSSTLP

SEQ ID NO: 94738 - protein, 15 aa, Artificial Sequence
  Description of Artificial Sequence: Synthetic peptide
  Seed: MDPRMCSLMQGSTLP
MDPRMFSLFQSSTNP

SEQ ID NO: 94739 - protein, 15 aa, Artificial Sequence
  Description of Artificial Sequence: Synthetic peptide
  Seed: MDPRMCSLMQGSTLP
MDPRMFSLFQSSTSP

SEQ ID NO: 94740 - protein, 15 aa, Artificial Sequence
  Description of Artificial Sequence: Synthetic peptide
  Seed: MDPRMCSLMQGSTLP
MDPRMFSLFQSSTVP

SEQ ID NO: 94741 - protein, 15 aa, Artificial Sequence
  Description of Artificial Sequence: Synthetic peptide
  Seed: MDPRMCSLMQGSTLP
MDPRMFSLFQTSTAP

SEQ ID NO: 94742 - protein, 15 aa, Artificial Sequence
  Description of Artificial Sequence: Synthetic peptide
  Seed: MDPRMCSLMQGSTLP
MDPRMFSLFQTSTNP

SEQ ID NO: 94743 - protein, 15 aa, Artificial Sequence
  Description of Artificial Sequence: Synthetic peptide
  Seed: MDPRMCSLMQGSTLP
MDPRMFSLFQTSTSP

SEQ ID NO: 94744 - protein, 15 aa, Artificial Sequence
  Description of Artificial Sequence: Synthetic peptide
  Seed: MDPRMCSLMQGSTLP
MDPRMFSLFQTSTVP

SEQ ID NO: 94745 - protein, 15 aa, Artificial Sequence
  Description of Artificial Sequence: Synthetic peptide
  Seed: MDPRMCSLMQGSTLP
MDPRMFSLFQVSTAP

SEQ ID NO: 94746 - protein, 15 aa, Artificial Sequence
  Description of Artificial Sequence: Synthetic peptide
  Seed: MDPRMCSLMQGSTLP
MDPRMFSLFQVSTNP

SEQ ID NO: 94747 - protein, 15 aa, Artificial Sequence
  Description of Artificial Sequence: Synthetic peptide
  Seed: MDPRMCSLMQGSTLP
MDPRMFSLFQVSTSP

SEQ ID NO: 94748 - protein, 15 aa, Artificial Sequence
  Description of Artificial Sequence: Synthetic peptide
  Seed: MDPRMCSLMQGSTLP
MDPRMFSLGQASTAP

SEQ ID NO: 94749 - protein, 15 aa, Artificial Sequence
  Description of Artificial Sequence: Synthetic peptide
  Seed: MDPRMCSLMQGSTLP
MDPRMFSLGQASTIP

SEQ ID NO: 94750 - protein, 15 aa, Artificial Sequence
  Description of Artificial Sequence: Synthetic peptide
  Seed: MDPRMCSLMQGSTLP
MDPRMFSLGQASTLP

SEQ ID NO: 94751 - protein, 15 aa, Artificial Sequence
  Description of Artificial Sequence: Synthetic peptide
  Seed: MDPRMCSLMQGSTLP
MDPRMFSLGQASTMP

SEQ ID NO: 94752 - protein, 15 aa, Artificial Sequence
  Description of Artificial Sequence: Synthetic peptide
  Seed: MDPRMCSLMQGSTLP
MDPRMFSLGQASTVP

SEQ ID NO: 94753 - protein, 15 aa, Artificial Sequence
  Description of Artificial Sequence: Synthetic peptide
  Seed: MDPRMCSLMQGSTLP
MDPRMFSLGQGSTIP

SEQ ID NO: 94754 - protein, 15 aa, Artificial Sequence
  Description of Artificial Sequence: Synthetic peptide
  Seed: MDPRMCSLMQGSTLP
MDPRMFSLGQGSTLP

SEQ ID NO: 94755 - protein, 15 aa, Artificial Sequence
  Description of Artificial Sequence: Synthetic peptide
  Seed: MDPRMCSLMQGSTLP
MDPRMFSLGQGSTVP

SEQ ID NO: 94756 - protein, 15 aa, Artificial Sequence
  Description of Artificial Sequence: Synthetic peptide
  Seed: MDPRMCSLMQGSTLP
MDPRMFSLGQPSTLP

SEQ ID NO: 94757 - protein, 15 aa, Artificial Sequence
  Description of Artificial Sequence: Synthetic peptide
  Seed: MDPRMCSLMQGSTLP
MDPRMFSLGQSSTIP

SEQ ID NO: 94758 - protein, 15 aa, Artificial Sequence
  Description of Artificial Sequence: Synthetic peptide
  Seed: MDPRMCSLMQGSTLP
MDPRMFSLGQSSTLP

SEQ ID NO: 94759 - protein, 15 aa, Artificial Sequence
  Description of Artificial Sequence: Synthetic peptide
  Seed: MDPRMCSLMQGSTLP
MDPRMFSLGQSSTVP

SEQ ID NO: 94760 - protein, 15 aa, Artificial Sequence
  Description of Artificial Sequence: Synthetic peptide
  Seed: MDPRMCSLMQGSTLP
MDPRMFSLHQASTAP

SEQ ID NO: 94761 - protein, 15 aa, Artificial Sequence
  Description of Artificial Sequence: Synthetic peptide
  Seed: MDPRMCSLMQGSTLP
MDPRMFSLHQASTIP

SEQ ID NO: 94762 - protein, 15 aa, Artificial Sequence
  Description of Artificial Sequence: Synthetic peptide
  Seed: MDPRMCSLMQGSTLP
MDPRMFSLHQASTLP

SEQ ID NO: 94763 - protein, 15 aa, Artificial Sequence
  Description of Artificial Sequence: Synthetic peptide
  Seed: MDPRMCSLMQGSTLP
MDPRMFSLHQASTVP

SEQ ID NO: 94764 - protein, 15 aa, Artificial Sequence
  Description of Artificial Sequence: Synthetic peptide
  Seed: MDPRMCSLMQGSTLP
MDPRMFSLHQGSTLP

SEQ ID NO: 94765 - protein, 15 aa, Artificial Sequence
  Description of Artificial Sequence: Synthetic peptide
  Seed: MDPRMCSLMQGSTLP
MDPRMFSLHQSSTLP

SEQ ID NO: 94766 - protein, 15 aa, Artificial Sequence
  Description of Artificial Sequence: Synthetic peptide
  Seed: MDPRMCSLMQGSTLP
MDPRMFSLIQASTAP

SEQ ID NO: 94767 - protein, 15 aa, Artificial Sequence
  Description of Artificial Sequence: Synthetic peptide
  Seed: MDPRMCSLMQGSTLP
MDPRMFSLIQASTCP

SEQ ID NO: 94768 - protein, 15 aa, Artificial Sequence
  Description of Artificial Sequence: Synthetic peptide
  Seed: MDPRMCSLMQGSTLP
MDPRMFSLIQASTDP

SEQ ID NO: 94769 - protein, 15 aa, Artificial Sequence
  Description of Artificial Sequence: Synthetic peptide
  Seed: MDPRMCSLMQGSTLP
MDPRMFSLIQASTEP

SEQ ID NO: 94770 - protein, 15 aa, Artificial Sequence
  Description of Artificial Sequence: Synthetic peptide
  Seed: MDPRMCSLMQGSTLP
MDPRMFSLIQASTFP

SEQ ID NO: 94771 - protein, 15 aa, Artificial Sequence
  Description of Artificial Sequence: Synthetic peptide
  Seed: MDPRMCSLMQGSTLP
MDPRMFSLIQASTGP

SEQ ID NO: 94772 - protein, 15 aa, Artificial Sequence
  Description of Artificial Sequence: Synthetic peptide
  Seed: MDPRMCSLMQGSTLP
MDPRMFSLIQASTHP

SEQ ID NO: 94773 - protein, 15 aa, Artificial Sequence
  Description of Artificial Sequence: Synthetic peptide
  Seed: MDPRMCSLMQGSTLP
MDPRMFSLIQASTIP

SEQ ID NO: 94774 - protein, 15 aa, Artificial Sequence
  Description of Artificial Sequence: Synthetic peptide
  Seed: MDPRMCSLMQGSTLP
MDPRMFSLIQASTKP

SEQ ID NO: 94775 - protein, 15 aa, Artificial Sequence
  Description of Artificial Sequence: Synthetic peptide
  Seed: MDPRMCSLMQGSTLP
MDPRMFSLIQASTLP

SEQ ID NO: 94776 - protein, 15 aa, Artificial Sequence
  Description of Artificial Sequence: Synthetic peptide
  Seed: MDPRMCSLMQGSTLP
MDPRMFSLIQASTMP

SEQ ID NO: 94777 - protein, 15 aa, Artificial Sequence
  Description of Artificial Sequence: Synthetic peptide
  Seed: MDPRMCSLMQGSTLP
MDPRMFSLIQASTNP

SEQ ID NO: 94778 - protein, 15 aa, Artificial Sequence
  Description of Artificial Sequence: Synthetic peptide
  Seed: MDPRMCSLMQGSTLP
MDPRMFSLIQASTPP

SEQ ID NO: 94779 - protein, 15 aa, Artificial Sequence
  Description of Artificial Sequence: Synthetic peptide
  Seed: MDPRMCSLMQGSTLP
MDPRMFSLIQASTQP

SEQ ID NO: 94780 - protein, 15 aa, Artificial Sequence
  Description of Artificial Sequence: Synthetic peptide
  Seed: MDPRMCSLMQGSTLP
MDPRMFSLIQASTRP

SEQ ID NO: 94781 - protein, 15 aa, Artificial Sequence
  Description of Artificial Sequence: Synthetic peptide
  Seed: MDPRMCSLMQGSTLP
MDPRMFSLIQASTSP

SEQ ID NO: 94782 - protein, 15 aa, Artificial Sequence
  Description of Artificial Sequence: Synthetic peptide
  Seed: MDPRMCSLMQGSTLP
MDPRMFSLIQASTTP

SEQ ID NO: 94783 - protein, 15 aa, Artificial Sequence
  Description of Artificial Sequence: Synthetic peptide
  Seed: MDPRMCSLMQGSTLP
MDPRMFSLIQASTVP

SEQ ID NO: 94784 - protein, 15 aa, Artificial Sequence
  Description of Artificial Sequence: Synthetic peptide
  Seed: MDPRMCSLMQGSTLP
MDPRMFSLIQASTWP

SEQ ID NO: 94785 - protein, 15 aa, Artificial Sequence
  Description of Artificial Sequence: Synthetic peptide
  Seed: MDPRMCSLMQGSTLP
MDPRMFSLIQASTYP

SEQ ID NO: 94786 - protein, 15 aa, Artificial Sequence
  Description of Artificial Sequence: Synthetic peptide
  Seed: MDPRMCSLMQGSTLP
MDPRMFSLIQGSTAP

SEQ ID NO: 94787 - protein, 15 aa, Artificial Sequence
  Description of Artificial Sequence: Synthetic peptide
  Seed: MDPRMCSLMQGSTLP
MDPRMFSLIQGSTCP

SEQ ID NO: 94788 - protein, 15 aa, Artificial Sequence
  Description of Artificial Sequence: Synthetic peptide
  Seed: MDPRMCSLMQGSTLP
MDPRMFSLIQGSTFP

SEQ ID NO: 94789 - protein, 15 aa, Artificial Sequence
  Description of Artificial Sequence: Synthetic peptide
  Seed: MDPRMCSLMQGSTLP
MDPRMFSLIQGSTGP

SEQ ID NO: 94790 - protein, 15 aa, Artificial Sequence
  Description of Artificial Sequence: Synthetic peptide
  Seed: MDPRMCSLMQGSTLP
MDPRMFSLIQGSTHP

SEQ ID NO: 94791 - protein, 15 aa, Artificial Sequence
  Description of Artificial Sequence: Synthetic peptide
  Seed: MDPRMCSLMQGSTLP
MDPRMFSLIQGSTIP

SEQ ID NO: 94792 - protein, 15 aa, Artificial Sequence
  Description of Artificial Sequence: Synthetic peptide
  Seed: MDPRMCSLMQGSTLP
MDPRMFSLIQGSTLP

SEQ ID NO: 94793 - protein, 15 aa, Artificial Sequence
  Description of Artificial Sequence: Synthetic peptide
  Seed: MDPRMCSLMQGSTLP
MDPRMFSLIQGSTMP

SEQ ID NO: 94794 - protein, 15 aa, Artificial Sequence
  Description of Artificial Sequence: Synthetic peptide
  Seed: MDPRMCSLMQGSTLP
MDPRMFSLIQGSTNP

SEQ ID NO: 94795 - protein, 15 aa, Artificial Sequence
  Description of Artificial Sequence: Synthetic peptide
  Seed: MDPRMCSLMQGSTLP
MDPRMFSLIQGSTQP

SEQ ID NO: 94796 - protein, 15 aa, Artificial Sequence
  Description of Artificial Sequence: Synthetic peptide
  Seed: MDPRMCSLMQGSTLP
MDPRMFSLIQGSTSP

SEQ ID NO: 94797 - protein, 15 aa, Artificial Sequence
  Description of Artificial Sequence: Synthetic peptide
  Seed: MDPRMCSLMQGSTLP
MDPRMFSLIQGSTTP

SEQ ID NO: 94798 - protein, 15 aa, Artificial Sequence
  Description of Artificial Sequence: Synthetic peptide
  Seed: MDPRMCSLMQGSTLP
MDPRMFSLIQGSTVP

SEQ ID NO: 94799 - protein, 15 aa, Artificial Sequence
  Description of Artificial Sequence: Synthetic peptide
  Seed: MDPRMCSLMQGSTLP
MDPRMFSLIQHSTIP

SEQ ID NO: 94800 - protein, 15 aa, Artificial Sequence
  Description of Artificial Sequence: Synthetic peptide
  Seed: MDPRMCSLMQGSTLP
MDPRMFSLIQHSTLP

SEQ ID NO: 94801 - protein, 15 aa, Artificial Sequence
  Description of Artificial Sequence: Synthetic peptide
  Seed: MDPRMCSLMQGSTLP
MDPRMFSLIQHSTVP

SEQ ID NO: 94802 - protein, 15 aa, Artificial Sequence
  Description of Artificial Sequence: Synthetic peptide
  Seed: MDPRMCSLMQGSTLP
MDPRMFSLIQISTAP

SEQ ID NO: 94803 - protein, 15 aa, Artificial Sequence
  Description of Artificial Sequence: Synthetic peptide
  Seed: MDPRMCSLMQGSTLP
MDPRMFSLIQISTGP

SEQ ID NO: 94804 - protein, 15 aa, Artificial Sequence
  Description of Artificial Sequence: Synthetic peptide
  Seed: MDPRMCSLMQGSTLP
MDPRMFSLIQISTHP

SEQ ID NO: 94805 - protein, 15 aa, Artificial Sequence
  Description of Artificial Sequence: Synthetic peptide
  Seed: MDPRMCSLMQGSTLP
MDPRMFSLIQISTIP

SEQ ID NO: 94806 - protein, 15 aa, Artificial Sequence
  Description of Artificial Sequence: Synthetic peptide
  Seed: MDPRMCSLMQGSTLP
MDPRMFSLIQISTLP

SEQ ID NO: 94807 - protein, 15 aa, Artificial Sequence
  Description of Artificial Sequence: Synthetic peptide
  Seed: MDPRMCSLMQGSTLP
MDPRMFSLIQISTMP

SEQ ID NO: 94808 - protein, 15 aa, Artificial Sequence
  Description of Artificial Sequence: Synthetic peptide
  Seed: MDPRMCSLMQGSTLP
MDPRMFSLIQISTNP

SEQ ID NO: 94809 - protein, 15 aa, Artificial Sequence
  Description of Artificial Sequence: Synthetic peptide
  Seed: MDPRMCSLMQGSTLP
MDPRMFSLIQISTQP

SEQ ID NO: 94810 - protein, 15 aa, Artificial Sequence
  Description of Artificial Sequence: Synthetic peptide
  Seed: MDPRMCSLMQGSTLP
MDPRMFSLIQISTSP

SEQ ID NO: 94811 - protein, 15 aa, Artificial Sequence
  Description of Artificial Sequence: Synthetic peptide
  Seed: MDPRMCSLMQGSTLP
MDPRMFSLIQISTTP

SEQ ID NO: 94812 - protein, 15 aa, Artificial Sequence
  Description of Artificial Sequence: Synthetic peptide
  Seed: MDPRMCSLMQGSTLP
MDPRMFSLIQISTVP

SEQ ID NO: 94813 - protein, 15 aa, Artificial Sequence
  Description of Artificial Sequence: Synthetic peptide
  Seed: MDPRMCSLMQGSTLP
MDPRMFSLIQLSTAP

SEQ ID NO: 94814 - protein, 15 aa, Artificial Sequence
  Description of Artificial Sequence: Synthetic peptide
  Seed: MDPRMCSLMQGSTLP
MDPRMFSLIQLSTNP

SEQ ID NO: 94815 - protein, 15 aa, Artificial Sequence
  Description of Artificial Sequence: Synthetic peptide
  Seed: MDPRMCSLMQGSTLP
MDPRMFSLIQLSTSP

SEQ ID NO: 94816 - protein, 15 aa, Artificial Sequence
  Description of Artificial Sequence: Synthetic peptide
  Seed: MDPRMCSLMQGSTLP
MDPRMFSLIQLSTTP

SEQ ID NO: 94817 - protein, 15 aa, Artificial Sequence
  Description of Artificial Sequence: Synthetic peptide
  Seed: MDPRMCSLMQGSTLP
MDPRMFSLIQLSTVP

SEQ ID NO: 94818 - protein, 15 aa, Artificial Sequence
  Description of Artificial Sequence: Synthetic peptide
  Seed: MDPRMCSLMQGSTLP
MDPRMFSLIQMSTAP

SEQ ID NO: 94819 - protein, 15 aa, Artificial Sequence
  Description of Artificial Sequence: Synthetic peptide
  Seed: MDPRMCSLMQGSTLP
MDPRMFSLIQMSTNP

SEQ ID NO: 94820 - protein, 15 aa, Artificial Sequence
  Description of Artificial Sequence: Synthetic peptide
  Seed: MDPRMCSLMQGSTLP
MDPRMFSLIQMSTSP

SEQ ID NO: 94821 - protein, 15 aa, Artificial Sequence
  Description of Artificial Sequence: Synthetic peptide
  Seed: MDPRMCSLMQGSTLP
MDPRMFSLIQMSTTP

SEQ ID NO: 94822 - protein, 15 aa, Artificial Sequence
  Description of Artificial Sequence: Synthetic peptide
  Seed: MDPRMCSLMQGSTLP
MDPRMFSLIQMSTVP

SEQ ID NO: 94823 - protein, 15 aa, Artificial Sequence
  Description of Artificial Sequence: Synthetic peptide
  Seed: MDPRMCSLMQGSTLP
MDPRMFSLIQNSTAP

SEQ ID NO: 94824 - protein, 15 aa, Artificial Sequence
  Description of Artificial Sequence: Synthetic peptide
  Seed: MDPRMCSLMQGSTLP
MDPRMFSLIQNSTGP

SEQ ID NO: 94825 - protein, 15 aa, Artificial Sequence
  Description of Artificial Sequence: Synthetic peptide
  Seed: MDPRMCSLMQGSTLP
MDPRMFSLIQNSTIP

SEQ ID NO: 94826 - protein, 15 aa, Artificial Sequence
  Description of Artificial Sequence: Synthetic peptide
  Seed: MDPRMCSLMQGSTLP
MDPRMFSLIQNSTLP

SEQ ID NO: 94827 - protein, 15 aa, Artificial Sequence
  Description of Artificial Sequence: Synthetic peptide
  Seed: MDPRMCSLMQGSTLP
MDPRMFSLIQNSTMP

SEQ ID NO: 94828 - protein, 15 aa, Artificial Sequence
  Description of Artificial Sequence: Synthetic peptide
  Seed: MDPRMCSLMQGSTLP
MDPRMFSLIQNSTNP

SEQ ID NO: 94829 - protein, 15 aa, Artificial Sequence
  Description of Artificial Sequence: Synthetic peptide
  Seed: MDPRMCSLMQGSTLP
MDPRMFSLIQNSTSP

SEQ ID NO: 94830 - protein, 15 aa, Artificial Sequence
  Description of Artificial Sequence: Synthetic peptide
  Seed: MDPRMCSLMQGSTLP
MDPRMFSLIQNSTTP

SEQ ID NO: 94831 - protein, 15 aa, Artificial Sequence
  Description of Artificial Sequence: Synthetic peptide
  Seed: MDPRMCSLMQGSTLP
MDPRMFSLIQNSTVP

SEQ ID NO: 94832 - protein, 15 aa, Artificial Sequence
  Description of Artificial Sequence: Synthetic peptide
  Seed: MDPRMCSLMQGSTLP
MDPRMFSLIQPSTAP

SEQ ID NO: 94833 - protein, 15 aa, Artificial Sequence
  Description of Artificial Sequence: Synthetic peptide
  Seed: MDPRMCSLMQGSTLP
MDPRMFSLIQPSTCP

SEQ ID NO: 94834 - protein, 15 aa, Artificial Sequence
  Description of Artificial Sequence: Synthetic peptide
  Seed: MDPRMCSLMQGSTLP
MDPRMFSLIQPSTFP

SEQ ID NO: 94835 - protein, 15 aa, Artificial Sequence
  Description of Artificial Sequence: Synthetic peptide
  Seed: MDPRMCSLMQGSTLP
MDPRMFSLIQPSTGP

SEQ ID NO: 94836 - protein, 15 aa, Artificial Sequence
  Description of Artificial Sequence: Synthetic peptide
  Seed: MDPRMCSLMQGSTLP
MDPRMFSLIQPSTHP

SEQ ID NO: 94837 - protein, 15 aa, Artificial Sequence
  Description of Artificial Sequence: Synthetic peptide
  Seed: MDPRMCSLMQGSTLP
MDPRMFSLIQPSTIP

SEQ ID NO: 94838 - protein, 15 aa, Artificial Sequence
  Description of Artificial Sequence: Synthetic peptide
  Seed: MDPRMCSLMQGSTLP
MDPRMFSLIQPSTLP

SEQ ID NO: 94839 - protein, 15 aa, Artificial Sequence
  Description of Artificial Sequence: Synthetic peptide
  Seed: MDPRMCSLMQGSTLP
MDPRMFSLIQPSTMP

SEQ ID NO: 94840 - protein, 15 aa, Artificial Sequence
  Description of Artificial Sequence: Synthetic peptide
  Seed: MDPRMCSLMQGSTLP
MDPRMFSLIQPSTNP

SEQ ID NO: 94841 - protein, 15 aa, Artificial Sequence
  Description of Artificial Sequence: Synthetic peptide
  Seed: MDPRMCSLMQGSTLP
MDPRMFSLIQPSTPP

SEQ ID NO: 94842 - protein, 15 aa, Artificial Sequence
  Description of Artificial Sequence: Synthetic peptide
  Seed: MDPRMCSLMQGSTLP
MDPRMFSLIQPSTQP

SEQ ID NO: 94843 - protein, 15 aa, Artificial Sequence
  Description of Artificial Sequence: Synthetic peptide
  Seed: MDPRMCSLMQGSTLP
MDPRMFSLIQPSTSP

SEQ ID NO: 94844 - protein, 15 aa, Artificial Sequence
  Description of Artificial Sequence: Synthetic peptide
  Seed: MDPRMCSLMQGSTLP
MDPRMFSLIQPSTTP

SEQ ID NO: 94845 - protein, 15 aa, Artificial Sequence
  Description of Artificial Sequence: Synthetic peptide
  Seed: MDPRMCSLMQGSTLP
MDPRMFSLIQPSTVP

SEQ ID NO: 94846 - protein, 15 aa, Artificial Sequence
  Description of Artificial Sequence: Synthetic peptide
  Seed: MDPRMCSLMQGSTLP
MDPRMFSLIQSSTAP

SEQ ID NO: 94847 - protein, 15 aa, Artificial Sequence
  Description of Artificial Sequence: Synthetic peptide
  Seed: MDPRMCSLMQGSTLP
MDPRMFSLIQSSTCP

SEQ ID NO: 94848 - protein, 15 aa, Artificial Sequence
  Description of Artificial Sequence: Synthetic peptide
  Seed: MDPRMCSLMQGSTLP
MDPRMFSLIQSSTFP

SEQ ID NO: 94849 - protein, 15 aa, Artificial Sequence
  Description of Artificial Sequence: Synthetic peptide
  Seed: MDPRMCSLMQGSTLP
MDPRMFSLIQSSTGP

SEQ ID NO: 94850 - protein, 15 aa, Artificial Sequence
  Description of Artificial Sequence: Synthetic peptide
  Seed: MDPRMCSLMQGSTLP
MDPRMFSLIQSSTHP

SEQ ID NO: 94851 - protein, 15 aa, Artificial Sequence
  Description of Artificial Sequence: Synthetic peptide
  Seed: MDPRMCSLMQGSTLP
MDPRMFSLIQSSTIP

SEQ ID NO: 94852 - protein, 15 aa, Artificial Sequence
  Description of Artificial Sequence: Synthetic peptide
  Seed: MDPRMCSLMQGSTLP
MDPRMFSLIQSSTLP

SEQ ID NO: 94853 - protein, 15 aa, Artificial Sequence
  Description of Artificial Sequence: Synthetic peptide
  Seed: MDPRMCSLMQGSTLP
MDPRMFSLIQSSTMP

SEQ ID NO: 94854 - protein, 15 aa, Artificial Sequence
  Description of Artificial Sequence: Synthetic peptide
  Seed: MDPRMCSLMQGSTLP
MDPRMFSLIQSSTNP

SEQ ID NO: 94855 - protein, 15 aa, Artificial Sequence
  Description of Artificial Sequence: Synthetic peptide
  Seed: MDPRMCSLMQGSTLP
MDPRMFSLIQSSTQP

SEQ ID NO: 94856 - protein, 15 aa, Artificial Sequence
  Description of Artificial Sequence: Synthetic peptide
  Seed: MDPRMCSLMQGSTLP
MDPRMFSLIQSSTSP

SEQ ID NO: 94857 - protein, 15 aa, Artificial Sequence
  Description of Artificial Sequence: Synthetic peptide
  Seed: MDPRMCSLMQGSTLP
MDPRMFSLIQSSTTP

SEQ ID NO: 94858 - protein, 15 aa, Artificial Sequence
  Description of Artificial Sequence: Synthetic peptide
  Seed: MDPRMCSLMQGSTLP
MDPRMFSLIQSSTVP

SEQ ID NO: 94859 - protein, 15 aa, Artificial Sequence
  Description of Artificial Sequence: Synthetic peptide
  Seed: MDPRMCSLMQGSTLP
MDPRMFSLIQTSTAP

SEQ ID NO: 94860 - protein, 15 aa, Artificial Sequence
  Description of Artificial Sequence: Synthetic peptide
  Seed: MDPRMCSLMQGSTLP
MDPRMFSLIQTSTGP

SEQ ID NO: 94861 - protein, 15 aa, Artificial Sequence
  Description of Artificial Sequence: Synthetic peptide
  Seed: MDPRMCSLMQGSTLP
MDPRMFSLIQTSTHP

SEQ ID NO: 94862 - protein, 15 aa, Artificial Sequence
  Description of Artificial Sequence: Synthetic peptide
  Seed: MDPRMCSLMQGSTLP
MDPRMFSLIQTSTIP

SEQ ID NO: 94863 - protein, 15 aa, Artificial Sequence
  Description of Artificial Sequence: Synthetic peptide
  Seed: MDPRMCSLMQGSTLP
MDPRMFSLIQTSTLP

SEQ ID NO: 94864 - protein, 15 aa, Artificial Sequence
  Description of Artificial Sequence: Synthetic peptide
  Seed: MDPRMCSLMQGSTLP
MDPRMFSLIQTSTMP

SEQ ID NO: 94865 - protein, 15 aa, Artificial Sequence
  Description of Artificial Sequence: Synthetic peptide
  Seed: MDPRMCSLMQGSTLP
MDPRMFSLIQTSTNP

SEQ ID NO: 94866 - protein, 15 aa, Artificial Sequence
  Description of Artificial Sequence: Synthetic peptide
  Seed: MDPRMCSLMQGSTLP
MDPRMFSLIQTSTQP

SEQ ID NO: 94867 - protein, 15 aa, Artificial Sequence
  Description of Artificial Sequence: Synthetic peptide
  Seed: MDPRMCSLMQGSTLP
MDPRMFSLIQTSTSP

SEQ ID NO: 94868 - protein, 15 aa, Artificial Sequence
  Description of Artificial Sequence: Synthetic peptide
  Seed: MDPRMCSLMQGSTLP
MDPRMFSLIQTSTTP

SEQ ID NO: 94869 - protein, 15 aa, Artificial Sequence
  Description of Artificial Sequence: Synthetic peptide
  Seed: MDPRMCSLMQGSTLP
MDPRMFSLIQTSTVP

SEQ ID NO: 94870 - protein, 15 aa, Artificial Sequence
  Description of Artificial Sequence: Synthetic peptide
  Seed: MDPRMCSLMQGSTLP
MDPRMFSLIQVSTAP

SEQ ID NO: 94871 - protein, 15 aa, Artificial Sequence
  Description of Artificial Sequence: Synthetic peptide
  Seed: MDPRMCSLMQGSTLP
MDPRMFSLIQVSTGP

SEQ ID NO: 94872 - protein, 15 aa, Artificial Sequence
  Description of Artificial Sequence: Synthetic peptide
  Seed: MDPRMCSLMQGSTLP
MDPRMFSLIQVSTHP

SEQ ID NO: 94873 - protein, 15 aa, Artificial Sequence
  Description of Artificial Sequence: Synthetic peptide
  Seed: MDPRMCSLMQGSTLP
MDPRMFSLIQVSTIP

SEQ ID NO: 94874 - protein, 15 aa, Artificial Sequence
  Description of Artificial Sequence: Synthetic peptide
  Seed: MDPRMCSLMQGSTLP
MDPRMFSLIQVSTLP

SEQ ID NO: 94875 - protein, 15 aa, Artificial Sequence
  Description of Artificial Sequence: Synthetic peptide
  Seed: MDPRMCSLMQGSTLP
MDPRMFSLIQVSTMP

SEQ ID NO: 94876 - protein, 15 aa, Artificial Sequence
  Description of Artificial Sequence: Synthetic peptide
  Seed: MDPRMCSLMQGSTLP
MDPRMFSLIQVSTNP

SEQ ID NO: 94877 - protein, 15 aa, Artificial Sequence
  Description of Artificial Sequence: Synthetic peptide
  Seed: MDPRMCSLMQGSTLP
MDPRMFSLIQVSTQP

SEQ ID NO: 94878 - protein, 15 aa, Artificial Sequence
  Description of Artificial Sequence: Synthetic peptide
  Seed: MDPRMCSLMQGSTLP
MDPRMFSLIQVSTSP

SEQ ID NO: 94879 - protein, 15 aa, Artificial Sequence
  Description of Artificial Sequence: Synthetic peptide
  Seed: MDPRMCSLMQGSTLP
MDPRMFSLIQVSTTP

SEQ ID NO: 94880 - protein, 15 aa, Artificial Sequence
  Description of Artificial Sequence: Synthetic peptide
  Seed: MDPRMCSLMQGSTLP
MDPRMFSLIQVSTVP

SEQ ID NO: 94881 - protein, 15 aa, Artificial Sequence
  Description of Artificial Sequence: Synthetic peptide
  Seed: MDPRMCSLMQGSTLP
MDPRMFSLKQASTLP

SEQ ID NO: 94882 - protein, 15 aa, Artificial Sequence
  Description of Artificial Sequence: Synthetic peptide
  Seed: MDPRMCSLMQGSTLP
MDPRMFSLLQASTAP

SEQ ID NO: 94883 - protein, 15 aa, Artificial Sequence
  Description of Artificial Sequence: Synthetic peptide
  Seed: MDPRMCSLMQGSTLP
MDPRMFSLLQASTCP

SEQ ID NO: 94884 - protein, 15 aa, Artificial Sequence
  Description of Artificial Sequence: Synthetic peptide
  Seed: MDPRMCSLMQGSTLP
MDPRMFSLLQASTDP

SEQ ID NO: 94885 - protein, 15 aa, Artificial Sequence
  Description of Artificial Sequence: Synthetic peptide
  Seed: MDPRMCSLMQGSTLP
MDPRMFSLLQASTEP

SEQ ID NO: 94886 - protein, 15 aa, Artificial Sequence
  Description of Artificial Sequence: Synthetic peptide
  Seed: MDPRMCSLMQGSTLP
MDPRMFSLLQASTFP

SEQ ID NO: 94887 - protein, 15 aa, Artificial Sequence
  Description of Artificial Sequence: Synthetic peptide
  Seed: MDPRMCSLMQGSTLP
MDPRMFSLLQASTGP

SEQ ID NO: 94888 - protein, 15 aa, Artificial Sequence
  Description of Artificial Sequence: Synthetic peptide
  Seed: MDPRMCSLMQGSTLP
MDPRMFSLLQASTHP

SEQ ID NO: 94889 - protein, 15 aa, Artificial Sequence
  Description of Artificial Sequence: Synthetic peptide
  Seed: MDPRMCSLMQGSTLP
MDPRMFSLLQASTIP

SEQ ID NO: 94890 - protein, 15 aa, Artificial Sequence
  Description of Artificial Sequence: Synthetic peptide
  Seed: MDPRMCSLMQGSTLP
MDPRMFSLLQASTKP

SEQ ID NO: 94891 - protein, 15 aa, Artificial Sequence
  Description of Artificial Sequence: Synthetic peptide
  Seed: MDPRMCSLMQGSTLP
MDPRMFSLLQASTLP

SEQ ID NO: 94892 - protein, 15 aa, Artificial Sequence
  Description of Artificial Sequence: Synthetic peptide
  Seed: MDPRMCSLMQGSTLP
MDPRMFSLLQASTMP

SEQ ID NO: 94893 - protein, 15 aa, Artificial Sequence
  Description of Artificial Sequence: Synthetic peptide
  Seed: MDPRMCSLMQGSTLP
MDPRMFSLLQASTNP

SEQ ID NO: 94894 - protein, 15 aa, Artificial Sequence
  Description of Artificial Sequence: Synthetic peptide
  Seed: MDPRMCSLMQGSTLP
MDPRMFSLLQASTPP

SEQ ID NO: 94895 - protein, 15 aa, Artificial Sequence
  Description of Artificial Sequence: Synthetic peptide
  Seed: MDPRMCSLMQGSTLP
MDPRMFSLLQASTQP

SEQ ID NO: 94896 - protein, 15 aa, Artificial Sequence
  Description of Artificial Sequence: Synthetic peptide
  Seed: MDPRMCSLMQGSTLP
MDPRMFSLLQASTRP

SEQ ID NO: 94897 - protein, 15 aa, Artificial Sequence
  Description of Artificial Sequence: Synthetic peptide
  Seed: MDPRMCSLMQGSTLP
MDPRMFSLLQASTSP

SEQ ID NO: 94898 - protein, 15 aa, Artificial Sequence
  Description of Artificial Sequence: Synthetic peptide
  Seed: MDPRMCSLMQGSTLP
MDPRMFSLLQASTTP

SEQ ID NO: 94899 - protein, 15 aa, Artificial Sequence
  Description of Artificial Sequence: Synthetic peptide
  Seed: MDPRMCSLMQGSTLP
MDPRMFSLLQASTVP

SEQ ID NO: 94900 - protein, 15 aa, Artificial Sequence
  Description of Artificial Sequence: Synthetic peptide
  Seed: MDPRMCSLMQGSTLP
MDPRMFSLLQASTWP

SEQ ID NO: 94901 - protein, 15 aa, Artificial Sequence
  Description of Artificial Sequence: Synthetic peptide
  Seed: MDPRMCSLMQGSTLP
MDPRMFSLLQASTYP

SEQ ID NO: 94902 - protein, 15 aa, Artificial Sequence
  Description of Artificial Sequence: Synthetic peptide
  Seed: MDPRMCSLMQGSTLP
MDPRMFSLLQCSTIP

SEQ ID NO: 94903 - protein, 15 aa, Artificial Sequence
  Description of Artificial Sequence: Synthetic peptide
  Seed: MDPRMCSLMQGSTLP
MDPRMFSLLQCSTLP

SEQ ID NO: 94904 - protein, 15 aa, Artificial Sequence
  Description of Artificial Sequence: Synthetic peptide
  Seed: MDPRMCSLMQGSTLP
MDPRMFSLLQCSTVP

SEQ ID NO: 94905 - protein, 15 aa, Artificial Sequence
  Description of Artificial Sequence: Synthetic peptide
  Seed: MDPRMCSLMQGSTLP
MDPRMFSLLQESTIP

SEQ ID NO: 94906 - protein, 15 aa, Artificial Sequence
  Description of Artificial Sequence: Synthetic peptide
  Seed: MDPRMCSLMQGSTLP
MDPRMFSLLQESTLP

SEQ ID NO: 94907 - protein, 15 aa, Artificial Sequence
  Description of Artificial Sequence: Synthetic peptide
  Seed: MDPRMCSLMQGSTLP
MDPRMFSLLQESTVP

SEQ ID NO: 94908 - protein, 15 aa, Artificial Sequence
  Description of Artificial Sequence: Synthetic peptide
  Seed: MDPRMCSLMQGSTLP
MDPRMFSLLQGSTAP

SEQ ID NO: 94909 - protein, 15 aa, Artificial Sequence
  Description of Artificial Sequence: Synthetic peptide
  Seed: MDPRMCSLMQGSTLP
MDPRMFSLLQGSTCP

SEQ ID NO: 94910 - protein, 15 aa, Artificial Sequence
  Description of Artificial Sequence: Synthetic peptide
  Seed: MDPRMCSLMQGSTLP
MDPRMFSLLQGSTFP

SEQ ID NO: 94911 - protein, 15 aa, Artificial Sequence
  Description of Artificial Sequence: Synthetic peptide
  Seed: MDPRMCSLMQGSTLP
MDPRMFSLLQGSTGP

SEQ ID NO: 94912 - protein, 15 aa, Artificial Sequence
  Description of Artificial Sequence: Synthetic peptide
  Seed: MDPRMCSLMQGSTLP
MDPRMFSLLQGSTHP

SEQ ID NO: 94913 - protein, 15 aa, Artificial Sequence
  Description of Artificial Sequence: Synthetic peptide
  Seed: MDPRMCSLMQGSTLP
MDPRMFSLLQGSTIP

SEQ ID NO: 94914 - protein, 15 aa, Artificial Sequence
  Description of Artificial Sequence: Synthetic peptide
  Seed: MDPRMCSLMQGSTLP
MDPRMFSLLQGSTKP

SEQ ID NO: 94915 - protein, 15 aa, Artificial Sequence
  Description of Artificial Sequence: Synthetic peptide
  Seed: MDPRMCSLMQGSTLP
MDPRMFSLLQGSTLP

SEQ ID NO: 94916 - protein, 15 aa, Artificial Sequence
  Description of Artificial Sequence: Synthetic peptide
  Seed: MDPRMCSLMQGSTLP
MDPRMFSLLQGSTMP

SEQ ID NO: 94917 - protein, 15 aa, Artificial Sequence
  Description of Artificial Sequence: Synthetic peptide
  Seed: MDPRMCSLMQGSTLP
MDPRMFSLLQGSTNP

SEQ ID NO: 94918 - protein, 15 aa, Artificial Sequence
  Description of Artificial Sequence: Synthetic peptide
  Seed: MDPRMCSLMQGSTLP
MDPRMFSLLQGSTPP

SEQ ID NO: 94919 - protein, 15 aa, Artificial Sequence
  Description of Artificial Sequence: Synthetic peptide
  Seed: MDPRMCSLMQGSTLP
MDPRMFSLLQGSTQP

SEQ ID NO: 94920 - protein, 15 aa, Artificial Sequence
  Description of Artificial Sequence: Synthetic peptide
  Seed: MDPRMCSLMQGSTLP
MDPRMFSLLQGSTRP

SEQ ID NO: 94921 - protein, 15 aa, Artificial Sequence
  Description of Artificial Sequence: Synthetic peptide
  Seed: MDPRMCSLMQGSTLP
MDPRMFSLLQGSTSP

SEQ ID NO: 94922 - protein, 15 aa, Artificial Sequence
  Description of Artificial Sequence: Synthetic peptide
  Seed: MDPRMCSLMQGSTLP
MDPRMFSLLQGSTTP

SEQ ID NO: 94923 - protein, 15 aa, Artificial Sequence
  Description of Artificial Sequence: Synthetic peptide
  Seed: MDPRMCSLMQGSTLP
MDPRMFSLLQGSTVP

SEQ ID NO: 94924 - protein, 15 aa, Artificial Sequence
  Description of Artificial Sequence: Synthetic peptide
  Seed: MDPRMCSLMQGSTLP
MDPRMFSLLQGSTWP

SEQ ID NO: 94925 - protein, 15 aa, Artificial Sequence
  Description of Artificial Sequence: Synthetic peptide
  Seed: MDPRMCSLMQGSTLP
MDPRMFSLLQGSTYP

SEQ ID NO: 94926 - protein, 15 aa, Artificial Sequence
  Description of Artificial Sequence: Synthetic peptide
  Seed: MDPRMCSLMQGSTLP
MDPRMFSLLQHSTAP

SEQ ID NO: 94927 - protein, 15 aa, Artificial Sequence
  Description of Artificial Sequence: Synthetic peptide
  Seed: MDPRMCSLMQGSTLP
MDPRMFSLLQHSTIP

SEQ ID NO: 94928 - protein, 15 aa, Artificial Sequence
  Description of Artificial Sequence: Synthetic peptide
  Seed: MDPRMCSLMQGSTLP
MDPRMFSLLQHSTLP

SEQ ID NO: 94929 - protein, 15 aa, Artificial Sequence
  Description of Artificial Sequence: Synthetic peptide
  Seed: MDPRMCSLMQGSTLP
MDPRMFSLLQHSTMP

SEQ ID NO: 94930 - protein, 15 aa, Artificial Sequence
  Description of Artificial Sequence: Synthetic peptide
  Seed: MDPRMCSLMQGSTLP
MDPRMFSLLQHSTSP

SEQ ID NO: 94931 - protein, 15 aa, Artificial Sequence
  Description of Artificial Sequence: Synthetic peptide
  Seed: MDPRMCSLMQGSTLP
MDPRMFSLLQHSTTP

SEQ ID NO: 94932 - protein, 15 aa, Artificial Sequence
  Description of Artificial Sequence: Synthetic peptide
  Seed: MDPRMCSLMQGSTLP
MDPRMFSLLQHSTVP

SEQ ID NO: 94933 - protein, 15 aa, Artificial Sequence
  Description of Artificial Sequence: Synthetic peptide
  Seed: MDPRMCSLMQGSTLP
MDPRMFSLLQISTAP

SEQ ID NO: 94934 - protein, 15 aa, Artificial Sequence
  Description of Artificial Sequence: Synthetic peptide
  Seed: MDPRMCSLMQGSTLP
MDPRMFSLLQISTDP

SEQ ID NO: 94935 - protein, 15 aa, Artificial Sequence
  Description of Artificial Sequence: Synthetic peptide
  Seed: MDPRMCSLMQGSTLP
MDPRMFSLLQISTGP

SEQ ID NO: 94936 - protein, 15 aa, Artificial Sequence
  Description of Artificial Sequence: Synthetic peptide
  Seed: MDPRMCSLMQGSTLP
MDPRMFSLLQISTHP

SEQ ID NO: 94937 - protein, 15 aa, Artificial Sequence
  Description of Artificial Sequence: Synthetic peptide
  Seed: MDPRMCSLMQGSTLP
MDPRMFSLLQISTIP

SEQ ID NO: 94938 - protein, 15 aa, Artificial Sequence
  Description of Artificial Sequence: Synthetic peptide
  Seed: MDPRMCSLMQGSTLP
MDPRMFSLLQISTLP

SEQ ID NO: 94939 - protein, 15 aa, Artificial Sequence
  Description of Artificial Sequence: Synthetic peptide
  Seed: MDPRMCSLMQGSTLP
MDPRMFSLLQISTMP

SEQ ID NO: 94940 - protein, 15 aa, Artificial Sequence
  Description of Artificial Sequence: Synthetic peptide
  Seed: MDPRMCSLMQGSTLP
MDPRMFSLLQISTNP

SEQ ID NO: 94941 - protein, 15 aa, Artificial Sequence
  Description of Artificial Sequence: Synthetic peptide
  Seed: MDPRMCSLMQGSTLP
MDPRMFSLLQISTQP

SEQ ID NO: 94942 - protein, 15 aa, Artificial Sequence
  Description of Artificial Sequence: Synthetic peptide
  Seed: MDPRMCSLMQGSTLP
MDPRMFSLLQISTSP

SEQ ID NO: 94943 - protein, 15 aa, Artificial Sequence
  Description of Artificial Sequence: Synthetic peptide
  Seed: MDPRMCSLMQGSTLP
MDPRMFSLLQISTTP

SEQ ID NO: 94944 - protein, 15 aa, Artificial Sequence
  Description of Artificial Sequence: Synthetic peptide
  Seed: MDPRMCSLMQGSTLP
MDPRMFSLLQISTVP

SEQ ID NO: 94945 - protein, 15 aa, Artificial Sequence
  Description of Artificial Sequence: Synthetic peptide
  Seed: MDPRMCSLMQGSTLP
MDPRMFSLLQLSTAP

SEQ ID NO: 94946 - protein, 15 aa, Artificial Sequence
  Description of Artificial Sequence: Synthetic peptide
  Seed: MDPRMCSLMQGSTLP
MDPRMFSLLQLSTGP

SEQ ID NO: 94947 - protein, 15 aa, Artificial Sequence
  Description of Artificial Sequence: Synthetic peptide
  Seed: MDPRMCSLMQGSTLP
MDPRMFSLLQLSTIP

SEQ ID NO: 94948 - protein, 15 aa, Artificial Sequence
  Description of Artificial Sequence: Synthetic peptide
  Seed: MDPRMCSLMQGSTLP
MDPRMFSLLQLSTLP

SEQ ID NO: 94949 - protein, 15 aa, Artificial Sequence
  Description of Artificial Sequence: Synthetic peptide
  Seed: MDPRMCSLMQGSTLP
MDPRMFSLLQLSTMP

SEQ ID NO: 94950 - protein, 15 aa, Artificial Sequence
  Description of Artificial Sequence: Synthetic peptide
  Seed: MDPRMCSLMQGSTLP
MDPRMFSLLQLSTNP

SEQ ID NO: 94951 - protein, 15 aa, Artificial Sequence
  Description of Artificial Sequence: Synthetic peptide
  Seed: MDPRMCSLMQGSTLP
MDPRMFSLLQLSTSP

SEQ ID NO: 94952 - protein, 15 aa, Artificial Sequence
  Description of Artificial Sequence: Synthetic peptide
  Seed: MDPRMCSLMQGSTLP
MDPRMFSLLQLSTTP

SEQ ID NO: 94953 - protein, 15 aa, Artificial Sequence
  Description of Artificial Sequence: Synthetic peptide
  Seed: MDPRMCSLMQGSTLP
MDPRMFSLLQLSTVP

SEQ ID NO: 94954 - protein, 15 aa, Artificial Sequence
  Description of Artificial Sequence: Synthetic peptide
  Seed: MDPRMCSLMQGSTLP
MDPRMFSLLQMSTAP

SEQ ID NO: 94955 - protein, 15 aa, Artificial Sequence
  Description of Artificial Sequence: Synthetic peptide
  Seed: MDPRMCSLMQGSTLP
MDPRMFSLLQMSTIP

SEQ ID NO: 94956 - protein, 15 aa, Artificial Sequence
  Description of Artificial Sequence: Synthetic peptide
  Seed: MDPRMCSLMQGSTLP
MDPRMFSLLQMSTLP

SEQ ID NO: 94957 - protein, 15 aa, Artificial Sequence
  Description of Artificial Sequence: Synthetic peptide
  Seed: MDPRMCSLMQGSTLP
MDPRMFSLLQMSTMP

SEQ ID NO: 94958 - protein, 15 aa, Artificial Sequence
  Description of Artificial Sequence: Synthetic peptide
  Seed: MDPRMCSLMQGSTLP
MDPRMFSLLQMSTNP

SEQ ID NO: 94959 - protein, 15 aa, Artificial Sequence
  Description of Artificial Sequence: Synthetic peptide
  Seed: MDPRMCSLMQGSTLP
MDPRMFSLLQMSTSP

SEQ ID NO: 94960 - protein, 15 aa, Artificial Sequence
  Description of Artificial Sequence: Synthetic peptide
  Seed: MDPRMCSLMQGSTLP
MDPRMFSLLQMSTTP

SEQ ID NO: 94961 - protein, 15 aa, Artificial Sequence
  Description of Artificial Sequence: Synthetic peptide
  Seed: MDPRMCSLMQGSTLP
MDPRMFSLLQMSTVP

SEQ ID NO: 94962 - protein, 15 aa, Artificial Sequence
  Description of Artificial Sequence: Synthetic peptide
  Seed: MDPRMCSLMQGSTLP
MDPRMFSLLQNSTAP

SEQ ID NO: 94963 - protein, 15 aa, Artificial Sequence
  Description of Artificial Sequence: Synthetic peptide
  Seed: MDPRMCSLMQGSTLP
MDPRMFSLLQNSTCP

SEQ ID NO: 94964 - protein, 15 aa, Artificial Sequence
  Description of Artificial Sequence: Synthetic peptide
  Seed: MDPRMCSLMQGSTLP
MDPRMFSLLQNSTFP

SEQ ID NO: 94965 - protein, 15 aa, Artificial Sequence
  Description of Artificial Sequence: Synthetic peptide
  Seed: MDPRMCSLMQGSTLP
MDPRMFSLLQNSTGP

SEQ ID NO: 94966 - protein, 15 aa, Artificial Sequence
  Description of Artificial Sequence: Synthetic peptide
  Seed: MDPRMCSLMQGSTLP
MDPRMFSLLQNSTHP

SEQ ID NO: 94967 - protein, 15 aa, Artificial Sequence
  Description of Artificial Sequence: Synthetic peptide
  Seed: MDPRMCSLMQGSTLP
MDPRMFSLLQNSTIP

SEQ ID NO: 94968 - protein, 15 aa, Artificial Sequence
  Description of Artificial Sequence: Synthetic peptide
  Seed: MDPRMCSLMQGSTLP
MDPRMFSLLQNSTLP

SEQ ID NO: 94969 - protein, 15 aa, Artificial Sequence
  Description of Artificial Sequence: Synthetic peptide
  Seed: MDPRMCSLMQGSTLP
MDPRMFSLLQNSTMP

SEQ ID NO: 94970 - protein, 15 aa, Artificial Sequence
  Description of Artificial Sequence: Synthetic peptide
  Seed: MDPRMCSLMQGSTLP
MDPRMFSLLQNSTNP

SEQ ID NO: 94971 - protein, 15 aa, Artificial Sequence
  Description of Artificial Sequence: Synthetic peptide
  Seed: MDPRMCSLMQGSTLP
MDPRMFSLLQNSTQP

SEQ ID NO: 94972 - protein, 15 aa, Artificial Sequence
  Description of Artificial Sequence: Synthetic peptide
  Seed: MDPRMCSLMQGSTLP
MDPRMFSLLQNSTSP

SEQ ID NO: 94973 - protein, 15 aa, Artificial Sequence
  Description of Artificial Sequence: Synthetic peptide
  Seed: MDPRMCSLMQGSTLP
MDPRMFSLLQNSTTP

SEQ ID NO: 94974 - protein, 15 aa, Artificial Sequence
  Description of Artificial Sequence: Synthetic peptide
  Seed: MDPRMCSLMQGSTLP
MDPRMFSLLQNSTVP

SEQ ID NO: 94975 - protein, 15 aa, Artificial Sequence
  Description of Artificial Sequence: Synthetic peptide
  Seed: MDPRMCSLMQGSTLP
MDPRMFSLLQPSTAP

SEQ ID NO: 94976 - protein, 15 aa, Artificial Sequence
  Description of Artificial Sequence: Synthetic peptide
  Seed: MDPRMCSLMQGSTLP
MDPRMFSLLQPSTCP

SEQ ID NO: 94977 - protein, 15 aa, Artificial Sequence
  Description of Artificial Sequence: Synthetic peptide
  Seed: MDPRMCSLMQGSTLP
MDPRMFSLLQPSTDP

SEQ ID NO: 94978 - protein, 15 aa, Artificial Sequence
  Description of Artificial Sequence: Synthetic peptide
  Seed: MDPRMCSLMQGSTLP
MDPRMFSLLQPSTEP

SEQ ID NO: 94979 - protein, 15 aa, Artificial Sequence
  Description of Artificial Sequence: Synthetic peptide
  Seed: MDPRMCSLMQGSTLP
MDPRMFSLLQPSTFP

SEQ ID NO: 94980 - protein, 15 aa, Artificial Sequence
  Description of Artificial Sequence: Synthetic peptide
  Seed: MDPRMCSLMQGSTLP
MDPRMFSLLQPSTGP

SEQ ID NO: 94981 - protein, 15 aa, Artificial Sequence
  Description of Artificial Sequence: Synthetic peptide
  Seed: MDPRMCSLMQGSTLP
MDPRMFSLLQPSTHP

SEQ ID NO: 94982 - protein, 15 aa, Artificial Sequence
  Description of Artificial Sequence: Synthetic peptide
  Seed: MDPRMCSLMQGSTLP
MDPRMFSLLQPSTIP

SEQ ID NO: 94983 - protein, 15 aa, Artificial Sequence
  Description of Artificial Sequence: Synthetic peptide
  Seed: MDPRMCSLMQGSTLP
MDPRMFSLLQPSTLP

SEQ ID NO: 94984 - protein, 15 aa, Artificial Sequence
  Description of Artificial Sequence: Synthetic peptide
  Seed: MDPRMCSLMQGSTLP
MDPRMFSLLQPSTMP

SEQ ID NO: 94985 - protein, 15 aa, Artificial Sequence
  Description of Artificial Sequence: Synthetic peptide
  Seed: MDPRMCSLMQGSTLP
MDPRMFSLLQPSTNP

SEQ ID NO: 94986 - protein, 15 aa, Artificial Sequence
  Description of Artificial Sequence: Synthetic peptide
  Seed: MDPRMCSLMQGSTLP
MDPRMFSLLQPSTPP

SEQ ID NO: 94987 - protein, 15 aa, Artificial Sequence
  Description of Artificial Sequence: Synthetic peptide
  Seed: MDPRMCSLMQGSTLP
MDPRMFSLLQPSTQP

SEQ ID NO: 94988 - protein, 15 aa, Artificial Sequence
  Description of Artificial Sequence: Synthetic peptide
  Seed: MDPRMCSLMQGSTLP
MDPRMFSLLQPSTSP

SEQ ID NO: 94989 - protein, 15 aa, Artificial Sequence
  Description of Artificial Sequence: Synthetic peptide
  Seed: MDPRMCSLMQGSTLP
MDPRMFSLLQPSTTP

SEQ ID NO: 94990 - protein, 15 aa, Artificial Sequence
  Description of Artificial Sequence: Synthetic peptide
  Seed: MDPRMCSLMQGSTLP
MDPRMFSLLQPSTVP

SEQ ID NO: 94991 - protein, 15 aa, Artificial Sequence
  Description of Artificial Sequence: Synthetic peptide
  Seed: MDPRMCSLMQGSTLP
MDPRMFSLLQPSTWP

SEQ ID NO: 94992 - protein, 15 aa, Artificial Sequence
  Description of Artificial Sequence: Synthetic peptide
  Seed: MDPRMCSLMQGSTLP
MDPRMFSLLQPSTYP

SEQ ID NO: 94993 - protein, 15 aa, Artificial Sequence
  Description of Artificial Sequence: Synthetic peptide
  Seed: MDPRMCSLMQGSTLP
MDPRMFSLLQQSTAP

SEQ ID NO: 94994 - protein, 15 aa, Artificial Sequence
  Description of Artificial Sequence: Synthetic peptide
  Seed: MDPRMCSLMQGSTLP
MDPRMFSLLQQSTIP

SEQ ID NO: 94995 - protein, 15 aa, Artificial Sequence
  Description of Artificial Sequence: Synthetic peptide
  Seed: MDPRMCSLMQGSTLP
MDPRMFSLLQQSTLP

SEQ ID NO: 94996 - protein, 15 aa, Artificial Sequence
  Description of Artificial Sequence: Synthetic peptide
  Seed: MDPRMCSLMQGSTLP
MDPRMFSLLQQSTVP

SEQ ID NO: 94997 - protein, 15 aa, Artificial Sequence
  Description of Artificial Sequence: Synthetic peptide
  Seed: MDPRMCSLMQGSTLP
MDPRMFSLLQSSTAP

SEQ ID NO: 94998 - protein, 15 aa, Artificial Sequence
  Description of Artificial Sequence: Synthetic peptide
  Seed: MDPRMCSLMQGSTLP
MDPRMFSLLQSSTCP

SEQ ID NO: 94999 - protein, 15 aa, Artificial Sequence
  Description of Artificial Sequence: Synthetic peptide
  Seed: MDPRMCSLMQGSTLP
MDPRMFSLLQSSTDP

SEQ ID NO: 95000 - protein, 15 aa, Artificial Sequence
  Description of Artificial Sequence: Synthetic peptide
  Seed: MDPRMCSLMQGSTLP
MDPRMFSLLQSSTEP

SEQ ID NO: 95001 - protein, 15 aa, Artificial Sequence
  Description of Artificial Sequence: Synthetic peptide
  Seed: MDPRMCSLMQGSTLP
MDPRMFSLLQSSTFP

SEQ ID NO: 95002 - protein, 15 aa, Artificial Sequence
  Description of Artificial Sequence: Synthetic peptide
  Seed: MDPRMCSLMQGSTLP
MDPRMFSLLQSSTGP

SEQ ID NO: 95003 - protein, 15 aa, Artificial Sequence
  Description of Artificial Sequence: Synthetic peptide
  Seed: MDPRMCSLMQGSTLP
MDPRMFSLLQSSTHP

SEQ ID NO: 95004 - protein, 15 aa, Artificial Sequence
  Description of Artificial Sequence: Synthetic peptide
  Seed: MDPRMCSLMQGSTLP
MDPRMFSLLQSSTIP

SEQ ID NO: 95005 - protein, 15 aa, Artificial Sequence
  Description of Artificial Sequence: Synthetic peptide
  Seed: MDPRMCSLMQGSTLP
MDPRMFSLLQSSTKP

SEQ ID NO: 95006 - protein, 15 aa, Artificial Sequence
  Description of Artificial Sequence: Synthetic peptide
  Seed: MDPRMCSLMQGSTLP
MDPRMFSLLQSSTLP

SEQ ID NO: 95007 - protein, 15 aa, Artificial Sequence
  Description of Artificial Sequence: Synthetic peptide
  Seed: MDPRMCSLMQGSTLP
MDPRMFSLLQSSTMP

SEQ ID NO: 95008 - protein, 15 aa, Artificial Sequence
  Description of Artificial Sequence: Synthetic peptide
  Seed: MDPRMCSLMQGSTLP
MDPRMFSLLQSSTNP

SEQ ID NO: 95009 - protein, 15 aa, Artificial Sequence
  Description of Artificial Sequence: Synthetic peptide
  Seed: MDPRMCSLMQGSTLP
MDPRMFSLLQSSTPP

SEQ ID NO: 95010 - protein, 15 aa, Artificial Sequence
  Description of Artificial Sequence: Synthetic peptide
  Seed: MDPRMCSLMQGSTLP
MDPRMFSLLQSSTQP

SEQ ID NO: 95011 - protein, 15 aa, Artificial Sequence
  Description of Artificial Sequence: Synthetic peptide
  Seed: MDPRMCSLMQGSTLP
MDPRMFSLLQSSTRP

SEQ ID NO: 95012 - protein, 15 aa, Artificial Sequence
  Description of Artificial Sequence: Synthetic peptide
  Seed: MDPRMCSLMQGSTLP
MDPRMFSLLQSSTSP

SEQ ID NO: 95013 - protein, 15 aa, Artificial Sequence
  Description of Artificial Sequence: Synthetic peptide
  Seed: MDPRMCSLMQGSTLP
MDPRMFSLLQSSTTP

SEQ ID NO: 95014 - protein, 15 aa, Artificial Sequence
  Description of Artificial Sequence: Synthetic peptide
  Seed: MDPRMCSLMQGSTLP
MDPRMFSLLQSSTVP

SEQ ID NO: 95015 - protein, 15 aa, Artificial Sequence
  Description of Artificial Sequence: Synthetic peptide
  Seed: MDPRMCSLMQGSTLP
MDPRMFSLLQSSTYP

SEQ ID NO: 95016 - protein, 15 aa, Artificial Sequence
  Description of Artificial Sequence: Synthetic peptide
  Seed: MDPRMCSLMQGSTLP
MDPRMFSLLQTSTAP

SEQ ID NO: 95017 - protein, 15 aa, Artificial Sequence
  Description of Artificial Sequence: Synthetic peptide
  Seed: MDPRMCSLMQGSTLP
MDPRMFSLLQTSTCP

SEQ ID NO: 95018 - protein, 15 aa, Artificial Sequence
  Description of Artificial Sequence: Synthetic peptide
  Seed: MDPRMCSLMQGSTLP
MDPRMFSLLQTSTDP

SEQ ID NO: 95019 - protein, 15 aa, Artificial Sequence
  Description of Artificial Sequence: Synthetic peptide
  Seed: MDPRMCSLMQGSTLP
MDPRMFSLLQTSTEP

SEQ ID NO: 95020 - protein, 15 aa, Artificial Sequence
  Description of Artificial Sequence: Synthetic peptide
  Seed: MDPRMCSLMQGSTLP
MDPRMFSLLQTSTFP

SEQ ID NO: 95021 - protein, 15 aa, Artificial Sequence
  Description of Artificial Sequence: Synthetic peptide
  Seed: MDPRMCSLMQGSTLP
MDPRMFSLLQTSTGP

SEQ ID NO: 95022 - protein, 15 aa, Artificial Sequence
  Description of Artificial Sequence: Synthetic peptide
  Seed: MDPRMCSLMQGSTLP
MDPRMFSLLQTSTHP

SEQ ID NO: 95023 - protein, 15 aa, Artificial Sequence
  Description of Artificial Sequence: Synthetic peptide
  Seed: MDPRMCSLMQGSTLP
MDPRMFSLLQTSTIP

SEQ ID NO: 95024 - protein, 15 aa, Artificial Sequence
  Description of Artificial Sequence: Synthetic peptide
  Seed: MDPRMCSLMQGSTLP
MDPRMFSLLQTSTLP

SEQ ID NO: 95025 - protein, 15 aa, Artificial Sequence
  Description of Artificial Sequence: Synthetic peptide
  Seed: MDPRMCSLMQGSTLP
MDPRMFSLLQTSTMP

SEQ ID NO: 95026 - protein, 15 aa, Artificial Sequence
  Description of Artificial Sequence: Synthetic peptide
  Seed: MDPRMCSLMQGSTLP
MDPRMFSLLQTSTNP

SEQ ID NO: 95027 - protein, 15 aa, Artificial Sequence
  Description of Artificial Sequence: Synthetic peptide
  Seed: MDPRMCSLMQGSTLP
MDPRMFSLLQTSTPP

SEQ ID NO: 95028 - protein, 15 aa, Artificial Sequence
  Description of Artificial Sequence: Synthetic peptide
  Seed: MDPRMCSLMQGSTLP
MDPRMFSLLQTSTQP

SEQ ID NO: 95029 - protein, 15 aa, Artificial Sequence
  Description of Artificial Sequence: Synthetic peptide
  Seed: MDPRMCSLMQGSTLP
MDPRMFSLLQTSTSP

SEQ ID NO: 95030 - protein, 15 aa, Artificial Sequence
  Description of Artificial Sequence: Synthetic peptide
  Seed: MDPRMCSLMQGSTLP
MDPRMFSLLQTSTTP

SEQ ID NO: 95031 - protein, 15 aa, Artificial Sequence
  Description of Artificial Sequence: Synthetic peptide
  Seed: MDPRMCSLMQGSTLP
MDPRMFSLLQTSTVP

SEQ ID NO: 95032 - protein, 15 aa, Artificial Sequence
  Description of Artificial Sequence: Synthetic peptide
  Seed: MDPRMCSLMQGSTLP
MDPRMFSLLQVSTAP

SEQ ID NO: 95033 - protein, 15 aa, Artificial Sequence
  Description of Artificial Sequence: Synthetic peptide
  Seed: MDPRMCSLMQGSTLP
MDPRMFSLLQVSTCP

SEQ ID NO: 95034 - protein, 15 aa, Artificial Sequence
  Description of Artificial Sequence: Synthetic peptide
  Seed: MDPRMCSLMQGSTLP
MDPRMFSLLQVSTDP

SEQ ID NO: 95035 - protein, 15 aa, Artificial Sequence
  Description of Artificial Sequence: Synthetic peptide
  Seed: MDPRMCSLMQGSTLP
MDPRMFSLLQVSTEP

SEQ ID NO: 95036 - protein, 15 aa, Artificial Sequence
  Description of Artificial Sequence: Synthetic peptide
  Seed: MDPRMCSLMQGSTLP
MDPRMFSLLQVSTGP

SEQ ID NO: 95037 - protein, 15 aa, Artificial Sequence
  Description of Artificial Sequence: Synthetic peptide
  Seed: MDPRMCSLMQGSTLP
MDPRMFSLLQVSTHP

SEQ ID NO: 95038 - protein, 15 aa, Artificial Sequence
  Description of Artificial Sequence: Synthetic peptide
  Seed: MDPRMCSLMQGSTLP
MDPRMFSLLQVSTIP

SEQ ID NO: 95039 - protein, 15 aa, Artificial Sequence
  Description of Artificial Sequence: Synthetic peptide
  Seed: MDPRMCSLMQGSTLP
MDPRMFSLLQVSTLP

SEQ ID NO: 95040 - protein, 15 aa, Artificial Sequence
  Description of Artificial Sequence: Synthetic peptide
  Seed: MDPRMCSLMQGSTLP
MDPRMFSLLQVSTMP

SEQ ID NO: 95041 - protein, 15 aa, Artificial Sequence
  Description of Artificial Sequence: Synthetic peptide
  Seed: MDPRMCSLMQGSTLP
MDPRMFSLLQVSTNP

SEQ ID NO: 95042 - protein, 15 aa, Artificial Sequence
  Description of Artificial Sequence: Synthetic peptide
  Seed: MDPRMCSLMQGSTLP
MDPRMFSLLQVSTPP

SEQ ID NO: 95043 - protein, 15 aa, Artificial Sequence
  Description of Artificial Sequence: Synthetic peptide
  Seed: MDPRMCSLMQGSTLP
MDPRMFSLLQVSTQP

SEQ ID NO: 95044 - protein, 15 aa, Artificial Sequence
  Description of Artificial Sequence: Synthetic peptide
  Seed: MDPRMCSLMQGSTLP
MDPRMFSLLQVSTSP

SEQ ID NO: 95045 - protein, 15 aa, Artificial Sequence
  Description of Artificial Sequence: Synthetic peptide
  Seed: MDPRMCSLMQGSTLP
MDPRMFSLLQVSTTP

SEQ ID NO: 95046 - protein, 15 aa, Artificial Sequence
  Description of Artificial Sequence: Synthetic peptide
  Seed: MDPRMCSLMQGSTLP
MDPRMFSLLQVSTVP

SEQ ID NO: 95047 - protein, 15 aa, Artificial Sequence
  Description of Artificial Sequence: Synthetic peptide
  Seed: MDPRMCSLMQGSTLP
MDPRMFSLMQASTAP

SEQ ID NO: 95048 - protein, 15 aa, Artificial Sequence
  Description of Artificial Sequence: Synthetic peptide
  Seed: MDPRMCSLMQGSTLP
MDPRMFSLMQASTCP

SEQ ID NO: 95049 - protein, 15 aa, Artificial Sequence
  Description of Artificial Sequence: Synthetic peptide
  Seed: MDPRMCSLMQGSTLP
MDPRMFSLMQASTDP

SEQ ID NO: 95050 - protein, 15 aa, Artificial Sequence
  Description of Artificial Sequence: Synthetic peptide
  Seed: MDPRMCSLMQGSTLP
MDPRMFSLMQASTEP

SEQ ID NO: 95051 - protein, 15 aa, Artificial Sequence
  Description of Artificial Sequence: Synthetic peptide
  Seed: MDPRMCSLMQGSTLP
MDPRMFSLMQASTFP

SEQ ID NO: 95052 - protein, 15 aa, Artificial Sequence
  Description of Artificial Sequence: Synthetic peptide
  Seed: MDPRMCSLMQGSTLP
MDPRMFSLMQASTGP

SEQ ID NO: 95053 - protein, 15 aa, Artificial Sequence
  Description of Artificial Sequence: Synthetic peptide
  Seed: MDPRMCSLMQGSTLP
MDPRMFSLMQASTHP

SEQ ID NO: 95054 - protein, 15 aa, Artificial Sequence
  Description of Artificial Sequence: Synthetic peptide
  Seed: MDPRMCSLMQGSTLP
MDPRMFSLMQASTIP

SEQ ID NO: 95055 - protein, 15 aa, Artificial Sequence
  Description of Artificial Sequence: Synthetic peptide
  Seed: MDPRMCSLMQGSTLP
MDPRMFSLMQASTKP

SEQ ID NO: 95056 - protein, 15 aa, Artificial Sequence
  Description of Artificial Sequence: Synthetic peptide
  Seed: MDPRMCSLMQGSTLP
MDPRMFSLMQASTLP

SEQ ID NO: 95057 - protein, 15 aa, Artificial Sequence
  Description of Artificial Sequence: Synthetic peptide
  Seed: MDPRMCSLMQGSTLP
MDPRMFSLMQASTMP

SEQ ID NO: 95058 - protein, 15 aa, Artificial Sequence
  Description of Artificial Sequence: Synthetic peptide
  Seed: MDPRMCSLMQGSTLP
MDPRMFSLMQASTNP

SEQ ID NO: 95059 - protein, 15 aa, Artificial Sequence
  Description of Artificial Sequence: Synthetic peptide
  Seed: MDPRMCSLMQGSTLP
MDPRMFSLMQASTPP

SEQ ID NO: 95060 - protein, 15 aa, Artificial Sequence
  Description of Artificial Sequence: Synthetic peptide
  Seed: MDPRMCSLMQGSTLP
MDPRMFSLMQASTQP

SEQ ID NO: 95061 - protein, 15 aa, Artificial Sequence
  Description of Artificial Sequence: Synthetic peptide
  Seed: MDPRMCSLMQGSTLP
MDPRMFSLMQASTRP

SEQ ID NO: 95062 - protein, 15 aa, Artificial Sequence
  Description of Artificial Sequence: Synthetic peptide
  Seed: MDPRMCSLMQGSTLP
MDPRMFSLMQASTSP

SEQ ID NO: 95063 - protein, 15 aa, Artificial Sequence
  Description of Artificial Sequence: Synthetic peptide
  Seed: MDPRMCSLMQGSTLP
MDPRMFSLMQASTTP

SEQ ID NO: 95064 - protein, 15 aa, Artificial Sequence
  Description of Artificial Sequence: Synthetic peptide
  Seed: MDPRMCSLMQGSTLP
MDPRMFSLMQASTVP

SEQ ID NO: 95065 - protein, 15 aa, Artificial Sequence
  Description of Artificial Sequence: Synthetic peptide
  Seed: MDPRMCSLMQGSTLP
MDPRMFSLMQASTWP

SEQ ID NO: 95066 - protein, 15 aa, Artificial Sequence
  Description of Artificial Sequence: Synthetic peptide
  Seed: MDPRMCSLMQGSTLP
MDPRMFSLMQASTYP

SEQ ID NO: 95067 - protein, 15 aa, Artificial Sequence
  Description of Artificial Sequence: Synthetic peptide
  Seed: MDPRMCSLMQGSTLP
MDPRMFSLMQCSTAP

SEQ ID NO: 95068 - protein, 15 aa, Artificial Sequence
  Description of Artificial Sequence: Synthetic peptide
  Seed: MDPRMCSLMQGSTLP
MDPRMFSLMQCSTIP

SEQ ID NO: 95069 - protein, 15 aa, Artificial Sequence
  Description of Artificial Sequence: Synthetic peptide
  Seed: MDPRMCSLMQGSTLP
MDPRMFSLMQCSTLP

SEQ ID NO: 95070 - protein, 15 aa, Artificial Sequence
  Description of Artificial Sequence: Synthetic peptide
  Seed: MDPRMCSLMQGSTLP
MDPRMFSLMQCSTVP

SEQ ID NO: 95071 - protein, 15 aa, Artificial Sequence
  Description of Artificial Sequence: Synthetic peptide
  Seed: MDPRMCSLMQGSTLP
MDPRMFSLMQESTAP

SEQ ID NO: 95072 - protein, 15 aa, Artificial Sequence
  Description of Artificial Sequence: Synthetic peptide
  Seed: MDPRMCSLMQGSTLP
MDPRMFSLMQESTIP

SEQ ID NO: 95073 - protein, 15 aa, Artificial Sequence
  Description of Artificial Sequence: Synthetic peptide
  Seed: MDPRMCSLMQGSTLP
MDPRMFSLMQESTLP

SEQ ID NO: 95074 - protein, 15 aa, Artificial Sequence
  Description of Artificial Sequence: Synthetic peptide
  Seed: MDPRMCSLMQGSTLP
MDPRMFSLMQESTVP

SEQ ID NO: 95075 - protein, 15 aa, Artificial Sequence
  Description of Artificial Sequence: Synthetic peptide
  Seed: MDPRMCSLMQGSTLP
MDPRMFSLMQGSTAP

SEQ ID NO: 95076 - protein, 15 aa, Artificial Sequence
  Description of Artificial Sequence: Synthetic peptide
  Seed: MDPRMCSLMQGSTLP
MDPRMFSLMQGSTCP

SEQ ID NO: 95077 - protein, 15 aa, Artificial Sequence
  Description of Artificial Sequence: Synthetic peptide
  Seed: MDPRMCSLMQGSTLP
MDPRMFSLMQGSTFP

SEQ ID NO: 95078 - protein, 15 aa, Artificial Sequence
  Description of Artificial Sequence: Synthetic peptide
  Seed: MDPRMCSLMQGSTLP
MDPRMFSLMQGSTGP

SEQ ID NO: 95079 - protein, 15 aa, Artificial Sequence
  Description of Artificial Sequence: Synthetic peptide
  Seed: MDPRMCSLMQGSTLP
MDPRMFSLMQGSTHP

SEQ ID NO: 95080 - protein, 15 aa, Artificial Sequence
  Description of Artificial Sequence: Synthetic peptide
  Seed: MDPRMCSLMQGSTLP
MDPRMFSLMQGSTIP

SEQ ID NO: 95081 - protein, 15 aa, Artificial Sequence
  Description of Artificial Sequence: Synthetic peptide
  Seed: MDPRMCSLMQGSTLP
MDPRMFSLMQGSTKP

SEQ ID NO: 95082 - protein, 15 aa, Artificial Sequence
  Description of Artificial Sequence: Synthetic peptide
  Seed: MDPRMCSLMQGSTLP
MDPRMFSLMQGSTLP

SEQ ID NO: 95083 - protein, 15 aa, Artificial Sequence
  Description of Artificial Sequence: Synthetic peptide
  Seed: MDPRMCSLMQGSTLP
MDPRMFSLMQGSTMP

SEQ ID NO: 95084 - protein, 15 aa, Artificial Sequence
  Description of Artificial Sequence: Synthetic peptide
  Seed: MDPRMCSLMQGSTLP
MDPRMFSLMQGSTNP

SEQ ID NO: 95085 - protein, 15 aa, Artificial Sequence
  Description of Artificial Sequence: Synthetic peptide
  Seed: MDPRMCSLMQGSTLP
MDPRMFSLMQGSTPP

SEQ ID NO: 95086 - protein, 15 aa, Artificial Sequence
  Description of Artificial Sequence: Synthetic peptide
  Seed: MDPRMCSLMQGSTLP
MDPRMFSLMQGSTQP

SEQ ID NO: 95087 - protein, 15 aa, Artificial Sequence
  Description of Artificial Sequence: Synthetic peptide
  Seed: MDPRMCSLMQGSTLP
MDPRMFSLMQGSTRP

SEQ ID NO: 95088 - protein, 15 aa, Artificial Sequence
  Description of Artificial Sequence: Synthetic peptide
  Seed: MDPRMCSLMQGSTLP
MDPRMFSLMQGSTSP

SEQ ID NO: 95089 - protein, 15 aa, Artificial Sequence
  Description of Artificial Sequence: Synthetic peptide
  Seed: MDPRMCSLMQGSTLP
MDPRMFSLMQGSTTP

SEQ ID NO: 95090 - protein, 15 aa, Artificial Sequence
  Description of Artificial Sequence: Synthetic peptide
  Seed: MDPRMCSLMQGSTLP
MDPRMFSLMQGSTVP

SEQ ID NO: 95091 - protein, 15 aa, Artificial Sequence
  Description of Artificial Sequence: Synthetic peptide
  Seed: MDPRMCSLMQGSTLP
MDPRMFSLMQGSTWP

SEQ ID NO: 95092 - protein, 15 aa, Artificial Sequence
  Description of Artificial Sequence: Synthetic peptide
  Seed: MDPRMCSLMQGSTLP
MDPRMFSLMQGSTYP

SEQ ID NO: 95093 - protein, 15 aa, Artificial Sequence
  Description of Artificial Sequence: Synthetic peptide
  Seed: MDPRMCSLMQGSTLP
MDPRMFSLMQHSTAP

SEQ ID NO: 95094 - protein, 15 aa, Artificial Sequence
  Description of Artificial Sequence: Synthetic peptide
  Seed: MDPRMCSLMQGSTLP
MDPRMFSLMQHSTIP

SEQ ID NO: 95095 - protein, 15 aa, Artificial Sequence
  Description of Artificial Sequence: Synthetic peptide
  Seed: MDPRMCSLMQGSTLP
MDPRMFSLMQHSTLP

SEQ ID NO: 95096 - protein, 15 aa, Artificial Sequence
  Description of Artificial Sequence: Synthetic peptide
  Seed: MDPRMCSLMQGSTLP
MDPRMFSLMQHSTMP

SEQ ID NO: 95097 - protein, 15 aa, Artificial Sequence
  Description of Artificial Sequence: Synthetic peptide
  Seed: MDPRMCSLMQGSTLP
MDPRMFSLMQHSTNP

SEQ ID NO: 95098 - protein, 15 aa, Artificial Sequence
  Description of Artificial Sequence: Synthetic peptide
  Seed: MDPRMCSLMQGSTLP
MDPRMFSLMQHSTSP

SEQ ID NO: 95099 - protein, 15 aa, Artificial Sequence
  Description of Artificial Sequence: Synthetic peptide
  Seed: MDPRMCSLMQGSTLP
MDPRMFSLMQHSTTP

SEQ ID NO: 95100 - protein, 15 aa, Artificial Sequence
  Description of Artificial Sequence: Synthetic peptide
  Seed: MDPRMCSLMQGSTLP
MDPRMFSLMQHSTVP

SEQ ID NO: 95101 - protein, 15 aa, Artificial Sequence
  Description of Artificial Sequence: Synthetic peptide
  Seed: MDPRMCSLMQGSTLP
MDPRMFSLMQISTAP

SEQ ID NO: 95102 - protein, 15 aa, Artificial Sequence
  Description of Artificial Sequence: Synthetic peptide
  Seed: MDPRMCSLMQGSTLP
MDPRMFSLMQISTCP

SEQ ID NO: 95103 - protein, 15 aa, Artificial Sequence
  Description of Artificial Sequence: Synthetic peptide
  Seed: MDPRMCSLMQGSTLP
MDPRMFSLMQISTDP

SEQ ID NO: 95104 - protein, 15 aa, Artificial Sequence
  Description of Artificial Sequence: Synthetic peptide
  Seed: MDPRMCSLMQGSTLP
MDPRMFSLMQISTGP

SEQ ID NO: 95105 - protein, 15 aa, Artificial Sequence
  Description of Artificial Sequence: Synthetic peptide
  Seed: MDPRMCSLMQGSTLP
MDPRMFSLMQISTHP

SEQ ID NO: 95106 - protein, 15 aa, Artificial Sequence
  Description of Artificial Sequence: Synthetic peptide
  Seed: MDPRMCSLMQGSTLP
MDPRMFSLMQISTIP

SEQ ID NO: 95107 - protein, 15 aa, Artificial Sequence
  Description of Artificial Sequence: Synthetic peptide
  Seed: MDPRMCSLMQGSTLP
MDPRMFSLMQISTLP

SEQ ID NO: 95108 - protein, 15 aa, Artificial Sequence
  Description of Artificial Sequence: Synthetic peptide
  Seed: MDPRMCSLMQGSTLP
MDPRMFSLMQISTMP

SEQ ID NO: 95109 - protein, 15 aa, Artificial Sequence
  Description of Artificial Sequence: Synthetic peptide
  Seed: MDPRMCSLMQGSTLP
MDPRMFSLMQISTNP

SEQ ID NO: 95110 - protein, 15 aa, Artificial Sequence
  Description of Artificial Sequence: Synthetic peptide
  Seed: MDPRMCSLMQGSTLP
MDPRMFSLMQISTPP

SEQ ID NO: 95111 - protein, 15 aa, Artificial Sequence
  Description of Artificial Sequence: Synthetic peptide
  Seed: MDPRMCSLMQGSTLP
MDPRMFSLMQISTQP

SEQ ID NO: 95112 - protein, 15 aa, Artificial Sequence
  Description of Artificial Sequence: Synthetic peptide
  Seed: MDPRMCSLMQGSTLP
MDPRMFSLMQISTSP

SEQ ID NO: 95113 - protein, 15 aa, Artificial Sequence
  Description of Artificial Sequence: Synthetic peptide
  Seed: MDPRMCSLMQGSTLP
MDPRMFSLMQISTTP

SEQ ID NO: 95114 - protein, 15 aa, Artificial Sequence
  Description of Artificial Sequence: Synthetic peptide
  Seed: MDPRMCSLMQGSTLP
MDPRMFSLMQISTVP

SEQ ID NO: 95115 - protein, 15 aa, Artificial Sequence
  Description of Artificial Sequence: Synthetic peptide
  Seed: MDPRMCSLMQGSTLP
MDPRMFSLMQLSTAP

SEQ ID NO: 95116 - protein, 15 aa, Artificial Sequence
  Description of Artificial Sequence: Synthetic peptide
  Seed: MDPRMCSLMQGSTLP
MDPRMFSLMQLSTGP

SEQ ID NO: 95117 - protein, 15 aa, Artificial Sequence
  Description of Artificial Sequence: Synthetic peptide
  Seed: MDPRMCSLMQGSTLP
MDPRMFSLMQLSTHP

SEQ ID NO: 95118 - protein, 15 aa, Artificial Sequence
  Description of Artificial Sequence: Synthetic peptide
  Seed: MDPRMCSLMQGSTLP
MDPRMFSLMQLSTIP

SEQ ID NO: 95119 - protein, 15 aa, Artificial Sequence
  Description of Artificial Sequence: Synthetic peptide
  Seed: MDPRMCSLMQGSTLP
MDPRMFSLMQLSTLP

SEQ ID NO: 95120 - protein, 15 aa, Artificial Sequence
  Description of Artificial Sequence: Synthetic peptide
  Seed: MDPRMCSLMQGSTLP
MDPRMFSLMQLSTMP

SEQ ID NO: 95121 - protein, 15 aa, Artificial Sequence
  Description of Artificial Sequence: Synthetic peptide
  Seed: MDPRMCSLMQGSTLP
MDPRMFSLMQLSTNP

SEQ ID NO: 95122 - protein, 15 aa, Artificial Sequence
  Description of Artificial Sequence: Synthetic peptide
  Seed: MDPRMCSLMQGSTLP
MDPRMFSLMQLSTSP

SEQ ID NO: 95123 - protein, 15 aa, Artificial Sequence
  Description of Artificial Sequence: Synthetic peptide
  Seed: MDPRMCSLMQGSTLP
MDPRMFSLMQLSTTP

SEQ ID NO: 95124 - protein, 15 aa, Artificial Sequence
  Description of Artificial Sequence: Synthetic peptide
  Seed: MDPRMCSLMQGSTLP
MDPRMFSLMQLSTVP

SEQ ID NO: 95125 - protein, 15 aa, Artificial Sequence
  Description of Artificial Sequence: Synthetic peptide
  Seed: MDPRMCSLMQGSTLP
MDPRMFSLMQMSTAP

SEQ ID NO: 95126 - protein, 15 aa, Artificial Sequence
  Description of Artificial Sequence: Synthetic peptide
  Seed: MDPRMCSLMQGSTLP
MDPRMFSLMQMSTGP

SEQ ID NO: 95127 - protein, 15 aa, Artificial Sequence
  Description of Artificial Sequence: Synthetic peptide
  Seed: MDPRMCSLMQGSTLP
MDPRMFSLMQMSTHP

SEQ ID NO: 95128 - protein, 15 aa, Artificial Sequence
  Description of Artificial Sequence: Synthetic peptide
  Seed: MDPRMCSLMQGSTLP
MDPRMFSLMQMSTIP

SEQ ID NO: 95129 - protein, 15 aa, Artificial Sequence
  Description of Artificial Sequence: Synthetic peptide
  Seed: MDPRMCSLMQGSTLP
MDPRMFSLMQMSTLP

SEQ ID NO: 95130 - protein, 15 aa, Artificial Sequence
  Description of Artificial Sequence: Synthetic peptide
  Seed: MDPRMCSLMQGSTLP
MDPRMFSLMQMSTMP

SEQ ID NO: 95131 - protein, 15 aa, Artificial Sequence
  Description of Artificial Sequence: Synthetic peptide
  Seed: MDPRMCSLMQGSTLP
MDPRMFSLMQMSTNP

SEQ ID NO: 95132 - protein, 15 aa, Artificial Sequence
  Description of Artificial Sequence: Synthetic peptide
  Seed: MDPRMCSLMQGSTLP
MDPRMFSLMQMSTSP

SEQ ID NO: 95133 - protein, 15 aa, Artificial Sequence
  Description of Artificial Sequence: Synthetic peptide
  Seed: MDPRMCSLMQGSTLP
MDPRMFSLMQMSTTP

SEQ ID NO: 95134 - protein, 15 aa, Artificial Sequence
  Description of Artificial Sequence: Synthetic peptide
  Seed: MDPRMCSLMQGSTLP
MDPRMFSLMQMSTVP

SEQ ID NO: 95135 - protein, 15 aa, Artificial Sequence
  Description of Artificial Sequence: Synthetic peptide
  Seed: MDPRMCSLMQGSTLP
MDPRMFSLMQNSTAP

SEQ ID NO: 95136 - protein, 15 aa, Artificial Sequence
  Description of Artificial Sequence: Synthetic peptide
  Seed: MDPRMCSLMQGSTLP
MDPRMFSLMQNSTCP

SEQ ID NO: 95137 - protein, 15 aa, Artificial Sequence
  Description of Artificial Sequence: Synthetic peptide
  Seed: MDPRMCSLMQGSTLP
MDPRMFSLMQNSTFP

SEQ ID NO: 95138 - protein, 15 aa, Artificial Sequence
  Description of Artificial Sequence: Synthetic peptide
  Seed: MDPRMCSLMQGSTLP
MDPRMFSLMQNSTGP

SEQ ID NO: 95139 - protein, 15 aa, Artificial Sequence
  Description of Artificial Sequence: Synthetic peptide
  Seed: MDPRMCSLMQGSTLP
MDPRMFSLMQNSTHP

SEQ ID NO: 95140 - protein, 15 aa, Artificial Sequence
  Description of Artificial Sequence: Synthetic peptide
  Seed: MDPRMCSLMQGSTLP
MDPRMFSLMQNSTIP

SEQ ID NO: 95141 - protein, 15 aa, Artificial Sequence
  Description of Artificial Sequence: Synthetic peptide
  Seed: MDPRMCSLMQGSTLP
MDPRMFSLMQNSTLP

SEQ ID NO: 95142 - protein, 15 aa, Artificial Sequence
  Description of Artificial Sequence: Synthetic peptide
  Seed: MDPRMCSLMQGSTLP
MDPRMFSLMQNSTMP

SEQ ID NO: 95143 - protein, 15 aa, Artificial Sequence
  Description of Artificial Sequence: Synthetic peptide
  Seed: MDPRMCSLMQGSTLP
MDPRMFSLMQNSTNP

SEQ ID NO: 95144 - protein, 15 aa, Artificial Sequence
  Description of Artificial Sequence: Synthetic peptide
  Seed: MDPRMCSLMQGSTLP
MDPRMFSLMQNSTQP

SEQ ID NO: 95145 - protein, 15 aa, Artificial Sequence
  Description of Artificial Sequence: Synthetic peptide
  Seed: MDPRMCSLMQGSTLP
MDPRMFSLMQNSTSP

SEQ ID NO: 95146 - protein, 15 aa, Artificial Sequence
  Description of Artificial Sequence: Synthetic peptide
  Seed: MDPRMCSLMQGSTLP
MDPRMFSLMQNSTTP

SEQ ID NO: 95147 - protein, 15 aa, Artificial Sequence
  Description of Artificial Sequence: Synthetic peptide
  Seed: MDPRMCSLMQGSTLP
MDPRMFSLMQNSTVP

SEQ ID NO: 95148 - protein, 15 aa, Artificial Sequence
  Description of Artificial Sequence: Synthetic peptide
  Seed: MDPRMCSLMQGSTLP
MDPRMFSLMQPSTAP

SEQ ID NO: 95149 - protein, 15 aa, Artificial Sequence
  Description of Artificial Sequence: Synthetic peptide
  Seed: MDPRMCSLMQGSTLP
MDPRMFSLMQPSTCP

SEQ ID NO: 95150 - protein, 15 aa, Artificial Sequence
  Description of Artificial Sequence: Synthetic peptide
  Seed: MDPRMCSLMQGSTLP
MDPRMFSLMQPSTDP

SEQ ID NO: 95151 - protein, 15 aa, Artificial Sequence
  Description of Artificial Sequence: Synthetic peptide
  Seed: MDPRMCSLMQGSTLP
MDPRMFSLMQPSTEP

SEQ ID NO: 95152 - protein, 15 aa, Artificial Sequence
  Description of Artificial Sequence: Synthetic peptide
  Seed: MDPRMCSLMQGSTLP
MDPRMFSLMQPSTFP

SEQ ID NO: 95153 - protein, 15 aa, Artificial Sequence
  Description of Artificial Sequence: Synthetic peptide
  Seed: MDPRMCSLMQGSTLP
MDPRMFSLMQPSTGP

SEQ ID NO: 95154 - protein, 15 aa, Artificial Sequence
  Description of Artificial Sequence: Synthetic peptide
  Seed: MDPRMCSLMQGSTLP
MDPRMFSLMQPSTHP

SEQ ID NO: 95155 - protein, 15 aa, Artificial Sequence
  Description of Artificial Sequence: Synthetic peptide
  Seed: MDPRMCSLMQGSTLP
MDPRMFSLMQPSTIP

SEQ ID NO: 95156 - protein, 15 aa, Artificial Sequence
  Description of Artificial Sequence: Synthetic peptide
  Seed: MDPRMCSLMQGSTLP
MDPRMFSLMQPSTLP

SEQ ID NO: 95157 - protein, 15 aa, Artificial Sequence
  Description of Artificial Sequence: Synthetic peptide
  Seed: MDPRMCSLMQGSTLP
MDPRMFSLMQPSTMP

SEQ ID NO: 95158 - protein, 15 aa, Artificial Sequence
  Description of Artificial Sequence: Synthetic peptide
  Seed: MDPRMCSLMQGSTLP
MDPRMFSLMQPSTNP

SEQ ID NO: 95159 - protein, 15 aa, Artificial Sequence
  Description of Artificial Sequence: Synthetic peptide
  Seed: MDPRMCSLMQGSTLP
MDPRMFSLMQPSTPP

SEQ ID NO: 95160 - protein, 15 aa, Artificial Sequence
  Description of Artificial Sequence: Synthetic peptide
  Seed: MDPRMCSLMQGSTLP
MDPRMFSLMQPSTQP

SEQ ID NO: 95161 - protein, 15 aa, Artificial Sequence
  Description of Artificial Sequence: Synthetic peptide
  Seed: MDPRMCSLMQGSTLP
MDPRMFSLMQPSTSP

SEQ ID NO: 95162 - protein, 15 aa, Artificial Sequence
  Description of Artificial Sequence: Synthetic peptide
  Seed: MDPRMCSLMQGSTLP
MDPRMFSLMQPSTTP

SEQ ID NO: 95163 - protein, 15 aa, Artificial Sequence
  Description of Artificial Sequence: Synthetic peptide
  Seed: MDPRMCSLMQGSTLP
MDPRMFSLMQPSTVP

SEQ ID NO: 95164 - protein, 15 aa, Artificial Sequence
  Description of Artificial Sequence: Synthetic peptide
  Seed: MDPRMCSLMQGSTLP
MDPRMFSLMQPSTWP

SEQ ID NO: 95165 - protein, 15 aa, Artificial Sequence
  Description of Artificial Sequence: Synthetic peptide
  Seed: MDPRMCSLMQGSTLP
MDPRMFSLMQPSTYP

SEQ ID NO: 95166 - protein, 15 aa, Artificial Sequence
  Description of Artificial Sequence: Synthetic peptide
  Seed: MDPRMCSLMQGSTLP
MDPRMFSLMQQSTAP

SEQ ID NO: 95167 - protein, 15 aa, Artificial Sequence
  Description of Artificial Sequence: Synthetic peptide
  Seed: MDPRMCSLMQGSTLP
MDPRMFSLMQQSTIP

SEQ ID NO: 95168 - protein, 15 aa, Artificial Sequence
  Description of Artificial Sequence: Synthetic peptide
  Seed: MDPRMCSLMQGSTLP
MDPRMFSLMQQSTLP

SEQ ID NO: 95169 - protein, 15 aa, Artificial Sequence
  Description of Artificial Sequence: Synthetic peptide
  Seed: MDPRMCSLMQGSTLP
MDPRMFSLMQQSTSP

SEQ ID NO: 95170 - protein, 15 aa, Artificial Sequence
  Description of Artificial Sequence: Synthetic peptide
  Seed: MDPRMCSLMQGSTLP
MDPRMFSLMQQSTVP

SEQ ID NO: 95171 - protein, 15 aa, Artificial Sequence
  Description of Artificial Sequence: Synthetic peptide
  Seed: MDPRMCSLMQGSTLP
MDPRMFSLMQSSTAP

SEQ ID NO: 95172 - protein, 15 aa, Artificial Sequence
  Description of Artificial Sequence: Synthetic peptide
  Seed: MDPRMCSLMQGSTLP
MDPRMFSLMQSSTCP

SEQ ID NO: 95173 - protein, 15 aa, Artificial Sequence
  Description of Artificial Sequence: Synthetic peptide
  Seed: MDPRMCSLMQGSTLP
MDPRMFSLMQSSTDP

SEQ ID NO: 95174 - protein, 15 aa, Artificial Sequence
  Description of Artificial Sequence: Synthetic peptide
  Seed: MDPRMCSLMQGSTLP
MDPRMFSLMQSSTEP

SEQ ID NO: 95175 - protein, 15 aa, Artificial Sequence
  Description of Artificial Sequence: Synthetic peptide
  Seed: MDPRMCSLMQGSTLP
MDPRMFSLMQSSTFP

SEQ ID NO: 95176 - protein, 15 aa, Artificial Sequence
  Description of Artificial Sequence: Synthetic peptide
  Seed: MDPRMCSLMQGSTLP
MDPRMFSLMQSSTGP

SEQ ID NO: 95177 - protein, 15 aa, Artificial Sequence
  Description of Artificial Sequence: Synthetic peptide
  Seed: MDPRMCSLMQGSTLP
MDPRMFSLMQSSTHP

SEQ ID NO: 95178 - protein, 15 aa, Artificial Sequence
  Description of Artificial Sequence: Synthetic peptide
  Seed: MDPRMCSLMQGSTLP
MDPRMFSLMQSSTIP

SEQ ID NO: 95179 - protein, 15 aa, Artificial Sequence
  Description of Artificial Sequence: Synthetic peptide
  Seed: MDPRMCSLMQGSTLP
MDPRMFSLMQSSTKP

SEQ ID NO: 95180 - protein, 15 aa, Artificial Sequence
  Description of Artificial Sequence: Synthetic peptide
  Seed: MDPRMCSLMQGSTLP
MDPRMFSLMQSSTLP

SEQ ID NO: 95181 - protein, 15 aa, Artificial Sequence
  Description of Artificial Sequence: Synthetic peptide
  Seed: MDPRMCSLMQGSTLP
MDPRMFSLMQSSTMP

SEQ ID NO: 95182 - protein, 15 aa, Artificial Sequence
  Description of Artificial Sequence: Synthetic peptide
  Seed: MDPRMCSLMQGSTLP
MDPRMFSLMQSSTNP

SEQ ID NO: 95183 - protein, 15 aa, Artificial Sequence
  Description of Artificial Sequence: Synthetic peptide
  Seed: MDPRMCSLMQGSTLP
MDPRMFSLMQSSTPP

SEQ ID NO: 95184 - protein, 15 aa, Artificial Sequence
  Description of Artificial Sequence: Synthetic peptide
  Seed: MDPRMCSLMQGSTLP
MDPRMFSLMQSSTQP

SEQ ID NO: 95185 - protein, 15 aa, Artificial Sequence
  Description of Artificial Sequence: Synthetic peptide
  Seed: MDPRMCSLMQGSTLP
MDPRMFSLMQSSTRP

SEQ ID NO: 95186 - protein, 15 aa, Artificial Sequence
  Description of Artificial Sequence: Synthetic peptide
  Seed: MDPRMCSLMQGSTLP
MDPRMFSLMQSSTSP

SEQ ID NO: 95187 - protein, 15 aa, Artificial Sequence
  Description of Artificial Sequence: Synthetic peptide
  Seed: MDPRMCSLMQGSTLP
MDPRMFSLMQSSTTP

SEQ ID NO: 95188 - protein, 15 aa, Artificial Sequence
  Description of Artificial Sequence: Synthetic peptide
  Seed: MDPRMCSLMQGSTLP
MDPRMFSLMQSSTVP

SEQ ID NO: 95189 - protein, 15 aa, Artificial Sequence
  Description of Artificial Sequence: Synthetic peptide
  Seed: MDPRMCSLMQGSTLP
MDPRMFSLMQSSTYP

SEQ ID NO: 95190 - protein, 15 aa, Artificial Sequence
  Description of Artificial Sequence: Synthetic peptide
  Seed: MDPRMCSLMQGSTLP
MDPRMFSLMQTSTAP

SEQ ID NO: 95191 - protein, 15 aa, Artificial Sequence
  Description of Artificial Sequence: Synthetic peptide
  Seed: MDPRMCSLMQGSTLP
MDPRMFSLMQTSTCP

SEQ ID NO: 95192 - protein, 15 aa, Artificial Sequence
  Description of Artificial Sequence: Synthetic peptide
  Seed: MDPRMCSLMQGSTLP
MDPRMFSLMQTSTEP

SEQ ID NO: 95193 - protein, 15 aa, Artificial Sequence
  Description of Artificial Sequence: Synthetic peptide
  Seed: MDPRMCSLMQGSTLP
MDPRMFSLMQTSTFP

SEQ ID NO: 95194 - protein, 15 aa, Artificial Sequence
  Description of Artificial Sequence: Synthetic peptide
  Seed: MDPRMCSLMQGSTLP
MDPRMFSLMQTSTGP

SEQ ID NO: 95195 - protein, 15 aa, Artificial Sequence
  Description of Artificial Sequence: Synthetic peptide
  Seed: MDPRMCSLMQGSTLP
MDPRMFSLMQTSTHP

SEQ ID NO: 95196 - protein, 15 aa, Artificial Sequence
  Description of Artificial Sequence: Synthetic peptide
  Seed: MDPRMCSLMQGSTLP
MDPRMFSLMQTSTIP

SEQ ID NO: 95197 - protein, 15 aa, Artificial Sequence
  Description of Artificial Sequence: Synthetic peptide
  Seed: MDPRMCSLMQGSTLP
MDPRMFSLMQTSTLP

SEQ ID NO: 95198 - protein, 15 aa, Artificial Sequence
  Description of Artificial Sequence: Synthetic peptide
  Seed: MDPRMCSLMQGSTLP
MDPRMFSLMQTSTMP

SEQ ID NO: 95199 - protein, 15 aa, Artificial Sequence
  Description of Artificial Sequence: Synthetic peptide
  Seed: MDPRMCSLMQGSTLP
MDPRMFSLMQTSTNP

SEQ ID NO: 95200 - protein, 15 aa, Artificial Sequence
  Description of Artificial Sequence: Synthetic peptide
  Seed: MDPRMCSLMQGSTLP
MDPRMFSLMQTSTPP

SEQ ID NO: 95201 - protein, 15 aa, Artificial Sequence
  Description of Artificial Sequence: Synthetic peptide
  Seed: MDPRMCSLMQGSTLP
MDPRMFSLMQTSTQP

SEQ ID NO: 95202 - protein, 15 aa, Artificial Sequence
  Description of Artificial Sequence: Synthetic peptide
  Seed: MDPRMCSLMQGSTLP
MDPRMFSLMQTSTSP

SEQ ID NO: 95203 - protein, 15 aa, Artificial Sequence
  Description of Artificial Sequence: Synthetic peptide
  Seed: MDPRMCSLMQGSTLP
MDPRMFSLMQTSTTP

SEQ ID NO: 95204 - protein, 15 aa, Artificial Sequence
  Description of Artificial Sequence: Synthetic peptide
  Seed: MDPRMCSLMQGSTLP
MDPRMFSLMQTSTVP

SEQ ID NO: 95205 - protein, 15 aa, Artificial Sequence
  Description of Artificial Sequence: Synthetic peptide
  Seed: MDPRMCSLMQGSTLP
MDPRMFSLMQVSTAP

SEQ ID NO: 95206 - protein, 15 aa, Artificial Sequence
  Description of Artificial Sequence: Synthetic peptide
  Seed: MDPRMCSLMQGSTLP
MDPRMFSLMQVSTCP

SEQ ID NO: 95207 - protein, 15 aa, Artificial Sequence
  Description of Artificial Sequence: Synthetic peptide
  Seed: MDPRMCSLMQGSTLP
MDPRMFSLMQVSTDP

SEQ ID NO: 95208 - protein, 15 aa, Artificial Sequence
  Description of Artificial Sequence: Synthetic peptide
  Seed: MDPRMCSLMQGSTLP
MDPRMFSLMQVSTEP

SEQ ID NO: 95209 - protein, 15 aa, Artificial Sequence
  Description of Artificial Sequence: Synthetic peptide
  Seed: MDPRMCSLMQGSTLP
MDPRMFSLMQVSTGP

SEQ ID NO: 95210 - protein, 15 aa, Artificial Sequence
  Description of Artificial Sequence: Synthetic peptide
  Seed: MDPRMCSLMQGSTLP
MDPRMFSLMQVSTHP

SEQ ID NO: 95211 - protein, 15 aa, Artificial Sequence
  Description of Artificial Sequence: Synthetic peptide
  Seed: MDPRMCSLMQGSTLP
MDPRMFSLMQVSTIP

SEQ ID NO: 95212 - protein, 15 aa, Artificial Sequence
  Description of Artificial Sequence: Synthetic peptide
  Seed: MDPRMCSLMQGSTLP
MDPRMFSLMQVSTKP

SEQ ID NO: 95213 - protein, 15 aa, Artificial Sequence
  Description of Artificial Sequence: Synthetic peptide
  Seed: MDPRMCSLMQGSTLP
MDPRMFSLMQVSTLP

SEQ ID NO: 95214 - protein, 15 aa, Artificial Sequence
  Description of Artificial Sequence: Synthetic peptide
  Seed: MDPRMCSLMQGSTLP
MDPRMFSLMQVSTMP

SEQ ID NO: 95215 - protein, 15 aa, Artificial Sequence
  Description of Artificial Sequence: Synthetic peptide
  Seed: MDPRMCSLMQGSTLP
MDPRMFSLMQVSTNP

SEQ ID NO: 95216 - protein, 15 aa, Artificial Sequence
  Description of Artificial Sequence: Synthetic peptide
  Seed: MDPRMCSLMQGSTLP
MDPRMFSLMQVSTPP

SEQ ID NO: 95217 - protein, 15 aa, Artificial Sequence
  Description of Artificial Sequence: Synthetic peptide
  Seed: MDPRMCSLMQGSTLP
MDPRMFSLMQVSTQP

SEQ ID NO: 95218 - protein, 15 aa, Artificial Sequence
  Description of Artificial Sequence: Synthetic peptide
  Seed: MDPRMCSLMQGSTLP
MDPRMFSLMQVSTSP

SEQ ID NO: 95219 - protein, 15 aa, Artificial Sequence
  Description of Artificial Sequence: Synthetic peptide
  Seed: MDPRMCSLMQGSTLP
MDPRMFSLMQVSTTP

SEQ ID NO: 95220 - protein, 15 aa, Artificial Sequence
  Description of Artificial Sequence: Synthetic peptide
  Seed: MDPRMCSLMQGSTLP
MDPRMFSLMQVSTVP

SEQ ID NO: 95221 - protein, 15 aa, Artificial Sequence
  Description of Artificial Sequence: Synthetic peptide
  Seed: MDPRMCSLMQGSTLP
MDPRMFSLNQASTAP

SEQ ID NO: 95222 - protein, 15 aa, Artificial Sequence
  Description of Artificial Sequence: Synthetic peptide
  Seed: MDPRMCSLMQGSTLP
MDPRMFSLNQASTIP

SEQ ID NO: 95223 - protein, 15 aa, Artificial Sequence
  Description of Artificial Sequence: Synthetic peptide
  Seed: MDPRMCSLMQGSTLP
MDPRMFSLNQASTLP

SEQ ID NO: 95224 - protein, 15 aa, Artificial Sequence
  Description of Artificial Sequence: Synthetic peptide
  Seed: MDPRMCSLMQGSTLP
MDPRMFSLNQASTMP

SEQ ID NO: 95225 - protein, 15 aa, Artificial Sequence
  Description of Artificial Sequence: Synthetic peptide
  Seed: MDPRMCSLMQGSTLP
MDPRMFSLNQASTVP

SEQ ID NO: 95226 - protein, 15 aa, Artificial Sequence
  Description of Artificial Sequence: Synthetic peptide
  Seed: MDPRMCSLMQGSTLP
MDPRMFSLNQGSTLP

SEQ ID NO: 95227 - protein, 15 aa, Artificial Sequence
  Description of Artificial Sequence: Synthetic peptide
  Seed: MDPRMCSLMQGSTLP
MDPRMFSLNQSSTLP

SEQ ID NO: 95228 - protein, 15 aa, Artificial Sequence
  Description of Artificial Sequence: Synthetic peptide
  Seed: MDPRMCSLMQGSTLP
MDPRMFSLQQASTAP

SEQ ID NO: 95229 - protein, 15 aa, Artificial Sequence
  Description of Artificial Sequence: Synthetic peptide
  Seed: MDPRMCSLMQGSTLP
MDPRMFSLQQASTFP

SEQ ID NO: 95230 - protein, 15 aa, Artificial Sequence
  Description of Artificial Sequence: Synthetic peptide
  Seed: MDPRMCSLMQGSTLP
MDPRMFSLQQASTGP

SEQ ID NO: 95231 - protein, 15 aa, Artificial Sequence
  Description of Artificial Sequence: Synthetic peptide
  Seed: MDPRMCSLMQGSTLP
MDPRMFSLQQASTIP

SEQ ID NO: 95232 - protein, 15 aa, Artificial Sequence
  Description of Artificial Sequence: Synthetic peptide
  Seed: MDPRMCSLMQGSTLP
MDPRMFSLQQASTLP

SEQ ID NO: 95233 - protein, 15 aa, Artificial Sequence
  Description of Artificial Sequence: Synthetic peptide
  Seed: MDPRMCSLMQGSTLP
MDPRMFSLQQASTMP

SEQ ID NO: 95234 - protein, 15 aa, Artificial Sequence
  Description of Artificial Sequence: Synthetic peptide
  Seed: MDPRMCSLMQGSTLP
MDPRMFSLQQASTNP

SEQ ID NO: 95235 - protein, 15 aa, Artificial Sequence
  Description of Artificial Sequence: Synthetic peptide
  Seed: MDPRMCSLMQGSTLP
MDPRMFSLQQASTSP

SEQ ID NO: 95236 - protein, 15 aa, Artificial Sequence
  Description of Artificial Sequence: Synthetic peptide
  Seed: MDPRMCSLMQGSTLP
MDPRMFSLQQASTTP

SEQ ID NO: 95237 - protein, 15 aa, Artificial Sequence
  Description of Artificial Sequence: Synthetic peptide
  Seed: MDPRMCSLMQGSTLP
MDPRMFSLQQASTVP

SEQ ID NO: 95238 - protein, 15 aa, Artificial Sequence
  Description of Artificial Sequence: Synthetic peptide
  Seed: MDPRMCSLMQGSTLP
MDPRMFSLQQGSTAP

SEQ ID NO: 95239 - protein, 15 aa, Artificial Sequence
  Description of Artificial Sequence: Synthetic peptide
  Seed: MDPRMCSLMQGSTLP
MDPRMFSLQQGSTIP

SEQ ID NO: 95240 - protein, 15 aa, Artificial Sequence
  Description of Artificial Sequence: Synthetic peptide
  Seed: MDPRMCSLMQGSTLP
MDPRMFSLQQGSTLP

SEQ ID NO: 95241 - protein, 15 aa, Artificial Sequence
  Description of Artificial Sequence: Synthetic peptide
  Seed: MDPRMCSLMQGSTLP
MDPRMFSLQQGSTMP

SEQ ID NO: 95242 - protein, 15 aa, Artificial Sequence
  Description of Artificial Sequence: Synthetic peptide
  Seed: MDPRMCSLMQGSTLP
MDPRMFSLQQGSTSP

SEQ ID NO: 95243 - protein, 15 aa, Artificial Sequence
  Description of Artificial Sequence: Synthetic peptide
  Seed: MDPRMCSLMQGSTLP
MDPRMFSLQQGSTTP

SEQ ID NO: 95244 - protein, 15 aa, Artificial Sequence
  Description of Artificial Sequence: Synthetic peptide
  Seed: MDPRMCSLMQGSTLP
MDPRMFSLQQGSTVP

SEQ ID NO: 95245 - protein, 15 aa, Artificial Sequence
  Description of Artificial Sequence: Synthetic peptide
  Seed: MDPRMCSLMQGSTLP
MDPRMFSLQQISTAP

SEQ ID NO: 95246 - protein, 15 aa, Artificial Sequence
  Description of Artificial Sequence: Synthetic peptide
  Seed: MDPRMCSLMQGSTLP
MDPRMFSLQQISTNP

SEQ ID NO: 95247 - protein, 15 aa, Artificial Sequence
  Description of Artificial Sequence: Synthetic peptide
  Seed: MDPRMCSLMQGSTLP
MDPRMFSLQQISTSP

SEQ ID NO: 95248 - protein, 15 aa, Artificial Sequence
  Description of Artificial Sequence: Synthetic peptide
  Seed: MDPRMCSLMQGSTLP
MDPRMFSLQQNSTAP

SEQ ID NO: 95249 - protein, 15 aa, Artificial Sequence
  Description of Artificial Sequence: Synthetic peptide
  Seed: MDPRMCSLMQGSTLP
MDPRMFSLQQNSTIP

SEQ ID NO: 95250 - protein, 15 aa, Artificial Sequence
  Description of Artificial Sequence: Synthetic peptide
  Seed: MDPRMCSLMQGSTLP
MDPRMFSLQQNSTLP

SEQ ID NO: 95251 - protein, 15 aa, Artificial Sequence
  Description of Artificial Sequence: Synthetic peptide
  Seed: MDPRMCSLMQGSTLP
MDPRMFSLQQNSTVP

SEQ ID NO: 95252 - protein, 15 aa, Artificial Sequence
  Description of Artificial Sequence: Synthetic peptide
  Seed: MDPRMCSLMQGSTLP
MDPRMFSLQQPSTAP

SEQ ID NO: 95253 - protein, 15 aa, Artificial Sequence
  Description of Artificial Sequence: Synthetic peptide
  Seed: MDPRMCSLMQGSTLP
MDPRMFSLQQPSTIP

SEQ ID NO: 95254 - protein, 15 aa, Artificial Sequence
  Description of Artificial Sequence: Synthetic peptide
  Seed: MDPRMCSLMQGSTLP
MDPRMFSLQQPSTLP

SEQ ID NO: 95255 - protein, 15 aa, Artificial Sequence
  Description of Artificial Sequence: Synthetic peptide
  Seed: MDPRMCSLMQGSTLP
MDPRMFSLQQPSTMP

SEQ ID NO: 95256 - protein, 15 aa, Artificial Sequence
  Description of Artificial Sequence: Synthetic peptide
  Seed: MDPRMCSLMQGSTLP
MDPRMFSLQQPSTSP

SEQ ID NO: 95257 - protein, 15 aa, Artificial Sequence
  Description of Artificial Sequence: Synthetic peptide
  Seed: MDPRMCSLMQGSTLP
MDPRMFSLQQPSTVP

SEQ ID NO: 95258 - protein, 15 aa, Artificial Sequence
  Description of Artificial Sequence: Synthetic peptide
  Seed: MDPRMCSLMQGSTLP
MDPRMFSLQQSSTAP

SEQ ID NO: 95259 - protein, 15 aa, Artificial Sequence
  Description of Artificial Sequence: Synthetic peptide
  Seed: MDPRMCSLMQGSTLP
MDPRMFSLQQSSTIP

SEQ ID NO: 95260 - protein, 15 aa, Artificial Sequence
  Description of Artificial Sequence: Synthetic peptide
  Seed: MDPRMCSLMQGSTLP
MDPRMFSLQQSSTLP

SEQ ID NO: 95261 - protein, 15 aa, Artificial Sequence
  Description of Artificial Sequence: Synthetic peptide
  Seed: MDPRMCSLMQGSTLP
MDPRMFSLQQSSTMP

SEQ ID NO: 95262 - protein, 15 aa, Artificial Sequence
  Description of Artificial Sequence: Synthetic peptide
  Seed: MDPRMCSLMQGSTLP
MDPRMFSLQQSSTNP

SEQ ID NO: 95263 - protein, 15 aa, Artificial Sequence
  Description of Artificial Sequence: Synthetic peptide
  Seed: MDPRMCSLMQGSTLP
MDPRMFSLQQSSTSP

SEQ ID NO: 95264 - protein, 15 aa, Artificial Sequence
  Description of Artificial Sequence: Synthetic peptide
  Seed: MDPRMCSLMQGSTLP
MDPRMFSLQQSSTTP

SEQ ID NO: 95265 - protein, 15 aa, Artificial Sequence
  Description of Artificial Sequence: Synthetic peptide
  Seed: MDPRMCSLMQGSTLP
MDPRMFSLQQSSTVP

SEQ ID NO: 95266 - protein, 15 aa, Artificial Sequence
  Description of Artificial Sequence: Synthetic peptide
  Seed: MDPRMCSLMQGSTLP
MDPRMFSLQQTSTAP

SEQ ID NO: 95267 - protein, 15 aa, Artificial Sequence
  Description of Artificial Sequence: Synthetic peptide
  Seed: MDPRMCSLMQGSTLP
MDPRMFSLQQTSTIP

SEQ ID NO: 95268 - protein, 15 aa, Artificial Sequence
  Description of Artificial Sequence: Synthetic peptide
  Seed: MDPRMCSLMQGSTLP
MDPRMFSLQQTSTLP

SEQ ID NO: 95269 - protein, 15 aa, Artificial Sequence
  Description of Artificial Sequence: Synthetic peptide
  Seed: MDPRMCSLMQGSTLP
MDPRMFSLQQTSTNP

SEQ ID NO: 95270 - protein, 15 aa, Artificial Sequence
  Description of Artificial Sequence: Synthetic peptide
  Seed: MDPRMCSLMQGSTLP
MDPRMFSLQQTSTSP

SEQ ID NO: 95271 - protein, 15 aa, Artificial Sequence
  Description of Artificial Sequence: Synthetic peptide
  Seed: MDPRMCSLMQGSTLP
MDPRMFSLQQTSTVP

SEQ ID NO: 95272 - protein, 15 aa, Artificial Sequence
  Description of Artificial Sequence: Synthetic peptide
  Seed: MDPRMCSLMQGSTLP
MDPRMFSLQQVSTAP

SEQ ID NO: 95273 - protein, 15 aa, Artificial Sequence
  Description of Artificial Sequence: Synthetic peptide
  Seed: MDPRMCSLMQGSTLP
MDPRMFSLQQVSTIP

SEQ ID NO: 95274 - protein, 15 aa, Artificial Sequence
  Description of Artificial Sequence: Synthetic peptide
  Seed: MDPRMCSLMQGSTLP
MDPRMFSLQQVSTLP

SEQ ID NO: 95275 - protein, 15 aa, Artificial Sequence
  Description of Artificial Sequence: Synthetic peptide
  Seed: MDPRMCSLMQGSTLP
MDPRMFSLQQVSTNP

SEQ ID NO: 95276 - protein, 15 aa, Artificial Sequence
  Description of Artificial Sequence: Synthetic peptide
  Seed: MDPRMCSLMQGSTLP
MDPRMFSLQQVSTSP

SEQ ID NO: 95277 - protein, 15 aa, Artificial Sequence
  Description of Artificial Sequence: Synthetic peptide
  Seed: MDPRMCSLMQGSTLP
MDPRMFSLQQVSTVP

SEQ ID NO: 95278 - protein, 15 aa, Artificial Sequence
  Description of Artificial Sequence: Synthetic peptide
  Seed: MDPRMCSLMQGSTLP
MDPRMFSLSQASTAP

SEQ ID NO: 95279 - protein, 15 aa, Artificial Sequence
  Description of Artificial Sequence: Synthetic peptide
  Seed: MDPRMCSLMQGSTLP
MDPRMFSLSQASTFP

SEQ ID NO: 95280 - protein, 15 aa, Artificial Sequence
  Description of Artificial Sequence: Synthetic peptide
  Seed: MDPRMCSLMQGSTLP
MDPRMFSLSQASTIP

SEQ ID NO: 95281 - protein, 15 aa, Artificial Sequence
  Description of Artificial Sequence: Synthetic peptide
  Seed: MDPRMCSLMQGSTLP
MDPRMFSLSQASTLP

SEQ ID NO: 95282 - protein, 15 aa, Artificial Sequence
  Description of Artificial Sequence: Synthetic peptide
  Seed: MDPRMCSLMQGSTLP
MDPRMFSLSQASTMP

SEQ ID NO: 95283 - protein, 15 aa, Artificial Sequence
  Description of Artificial Sequence: Synthetic peptide
  Seed: MDPRMCSLMQGSTLP
MDPRMFSLSQASTNP

SEQ ID NO: 95284 - protein, 15 aa, Artificial Sequence
  Description of Artificial Sequence: Synthetic peptide
  Seed: MDPRMCSLMQGSTLP
MDPRMFSLSQASTSP

SEQ ID NO: 95285 - protein, 15 aa, Artificial Sequence
  Description of Artificial Sequence: Synthetic peptide
  Seed: MDPRMCSLMQGSTLP
MDPRMFSLSQASTTP

SEQ ID NO: 95286 - protein, 15 aa, Artificial Sequence
  Description of Artificial Sequence: Synthetic peptide
  Seed: MDPRMCSLMQGSTLP
MDPRMFSLSQASTVP

SEQ ID NO: 95287 - protein, 15 aa, Artificial Sequence
  Description of Artificial Sequence: Synthetic peptide
  Seed: MDPRMCSLMQGSTLP
MDPRMFSLSQGSTAP

SEQ ID NO: 95288 - protein, 15 aa, Artificial Sequence
  Description of Artificial Sequence: Synthetic peptide
  Seed: MDPRMCSLMQGSTLP
MDPRMFSLSQGSTIP

SEQ ID NO: 95289 - protein, 15 aa, Artificial Sequence
  Description of Artificial Sequence: Synthetic peptide
  Seed: MDPRMCSLMQGSTLP
MDPRMFSLSQGSTLP

SEQ ID NO: 95290 - protein, 15 aa, Artificial Sequence
  Description of Artificial Sequence: Synthetic peptide
  Seed: MDPRMCSLMQGSTLP
MDPRMFSLSQGSTMP

SEQ ID NO: 95291 - protein, 15 aa, Artificial Sequence
  Description of Artificial Sequence: Synthetic peptide
  Seed: MDPRMCSLMQGSTLP
MDPRMFSLSQGSTVP

SEQ ID NO: 95292 - protein, 15 aa, Artificial Sequence
  Description of Artificial Sequence: Synthetic peptide
  Seed: MDPRMCSLMQGSTLP
MDPRMFSLSQPSTAP

SEQ ID NO: 95293 - protein, 15 aa, Artificial Sequence
  Description of Artificial Sequence: Synthetic peptide
  Seed: MDPRMCSLMQGSTLP
MDPRMFSLSQPSTIP

SEQ ID NO: 95294 - protein, 15 aa, Artificial Sequence
  Description of Artificial Sequence: Synthetic peptide
  Seed: MDPRMCSLMQGSTLP
MDPRMFSLSQPSTLP

SEQ ID NO: 95295 - protein, 15 aa, Artificial Sequence
  Description of Artificial Sequence: Synthetic peptide
  Seed: MDPRMCSLMQGSTLP
MDPRMFSLSQPSTVP

SEQ ID NO: 95296 - protein, 15 aa, Artificial Sequence
  Description of Artificial Sequence: Synthetic peptide
  Seed: MDPRMCSLMQGSTLP
MDPRMFSLSQSSTAP

SEQ ID NO: 95297 - protein, 15 aa, Artificial Sequence
  Description of Artificial Sequence: Synthetic peptide
  Seed: MDPRMCSLMQGSTLP
MDPRMFSLSQSSTIP

SEQ ID NO: 95298 - protein, 15 aa, Artificial Sequence
  Description of Artificial Sequence: Synthetic peptide
  Seed: MDPRMCSLMQGSTLP
MDPRMFSLSQSSTLP

SEQ ID NO: 95299 - protein, 15 aa, Artificial Sequence
  Description of Artificial Sequence: Synthetic peptide
  Seed: MDPRMCSLMQGSTLP
MDPRMFSLSQSSTMP

SEQ ID NO: 95300 - protein, 15 aa, Artificial Sequence
  Description of Artificial Sequence: Synthetic peptide
  Seed: MDPRMCSLMQGSTLP
MDPRMFSLSQSSTVP

SEQ ID NO: 95301 - protein, 15 aa, Artificial Sequence
  Description of Artificial Sequence: Synthetic peptide
  Seed: MDPRMCSLMQGSTLP
MDPRMFSLSQTSTIP

SEQ ID NO: 95302 - protein, 15 aa, Artificial Sequence
  Description of Artificial Sequence: Synthetic peptide
  Seed: MDPRMCSLMQGSTLP
MDPRMFSLTQASTAP

SEQ ID NO: 95303 - protein, 15 aa, Artificial Sequence
  Description of Artificial Sequence: Synthetic peptide
  Seed: MDPRMCSLMQGSTLP
MDPRMFSLTQASTIP

SEQ ID NO: 95304 - protein, 15 aa, Artificial Sequence
  Description of Artificial Sequence: Synthetic peptide
  Seed: MDPRMCSLMQGSTLP
MDPRMFSLTQASTLP

SEQ ID NO: 95305 - protein, 15 aa, Artificial Sequence
  Description of Artificial Sequence: Synthetic peptide
  Seed: MDPRMCSLMQGSTLP
MDPRMFSLTQASTMP

SEQ ID NO: 95306 - protein, 15 aa, Artificial Sequence
  Description of Artificial Sequence: Synthetic peptide
  Seed: MDPRMCSLMQGSTLP
MDPRMFSLTQASTNP

SEQ ID NO: 95307 - protein, 15 aa, Artificial Sequence
  Description of Artificial Sequence: Synthetic peptide
  Seed: MDPRMCSLMQGSTLP
MDPRMFSLTQASTSP

SEQ ID NO: 95308 - protein, 15 aa, Artificial Sequence
  Description of Artificial Sequence: Synthetic peptide
  Seed: MDPRMCSLMQGSTLP
MDPRMFSLTQASTTP

SEQ ID NO: 95309 - protein, 15 aa, Artificial Sequence
  Description of Artificial Sequence: Synthetic peptide
  Seed: MDPRMCSLMQGSTLP
MDPRMFSLTQASTVP

SEQ ID NO: 95310 - protein, 15 aa, Artificial Sequence
  Description of Artificial Sequence: Synthetic peptide
  Seed: MDPRMCSLMQGSTLP
MDPRMFSLTQGSTAP

SEQ ID NO: 95311 - protein, 15 aa, Artificial Sequence
  Description of Artificial Sequence: Synthetic peptide
  Seed: MDPRMCSLMQGSTLP
MDPRMFSLTQGSTIP

SEQ ID NO: 95312 - protein, 15 aa, Artificial Sequence
  Description of Artificial Sequence: Synthetic peptide
  Seed: MDPRMCSLMQGSTLP
MDPRMFSLTQGSTLP

SEQ ID NO: 95313 - protein, 15 aa, Artificial Sequence
  Description of Artificial Sequence: Synthetic peptide
  Seed: MDPRMCSLMQGSTLP
MDPRMFSLTQGSTVP

SEQ ID NO: 95314 - protein, 15 aa, Artificial Sequence
  Description of Artificial Sequence: Synthetic peptide
  Seed: MDPRMCSLMQGSTLP
MDPRMFSLTQPSTIP

SEQ ID NO: 95315 - protein, 15 aa, Artificial Sequence
  Description of Artificial Sequence: Synthetic peptide
  Seed: MDPRMCSLMQGSTLP
MDPRMFSLTQPSTLP

SEQ ID NO: 95316 - protein, 15 aa, Artificial Sequence
  Description of Artificial Sequence: Synthetic peptide
  Seed: MDPRMCSLMQGSTLP
MDPRMFSLTQPSTVP

SEQ ID NO: 95317 - protein, 15 aa, Artificial Sequence
  Description of Artificial Sequence: Synthetic peptide
  Seed: MDPRMCSLMQGSTLP
MDPRMFSLTQSSTAP

SEQ ID NO: 95318 - protein, 15 aa, Artificial Sequence
  Description of Artificial Sequence: Synthetic peptide
  Seed: MDPRMCSLMQGSTLP
MDPRMFSLTQSSTIP

SEQ ID NO: 95319 - protein, 15 aa, Artificial Sequence
  Description of Artificial Sequence: Synthetic peptide
  Seed: MDPRMCSLMQGSTLP
MDPRMFSLTQSSTLP

SEQ ID NO: 95320 - protein, 15 aa, Artificial Sequence
  Description of Artificial Sequence: Synthetic peptide
  Seed: MDPRMCSLMQGSTLP
MDPRMFSLTQSSTVP

SEQ ID NO: 95321 - protein, 15 aa, Artificial Sequence
  Description of Artificial Sequence: Synthetic peptide
  Seed: MDPRMCSLMQGSTLP
MDPRMFSLVQASTAP

SEQ ID NO: 95322 - protein, 15 aa, Artificial Sequence
  Description of Artificial Sequence: Synthetic peptide
  Seed: MDPRMCSLMQGSTLP
MDPRMFSLVQASTCP

SEQ ID NO: 95323 - protein, 15 aa, Artificial Sequence
  Description of Artificial Sequence: Synthetic peptide
  Seed: MDPRMCSLMQGSTLP
MDPRMFSLVQASTFP

SEQ ID NO: 95324 - protein, 15 aa, Artificial Sequence
  Description of Artificial Sequence: Synthetic peptide
  Seed: MDPRMCSLMQGSTLP
MDPRMFSLVQASTGP

SEQ ID NO: 95325 - protein, 15 aa, Artificial Sequence
  Description of Artificial Sequence: Synthetic peptide
  Seed: MDPRMCSLMQGSTLP
MDPRMFSLVQASTHP

SEQ ID NO: 95326 - protein, 15 aa, Artificial Sequence
  Description of Artificial Sequence: Synthetic peptide
  Seed: MDPRMCSLMQGSTLP
MDPRMFSLVQASTIP

SEQ ID NO: 95327 - protein, 15 aa, Artificial Sequence
  Description of Artificial Sequence: Synthetic peptide
  Seed: MDPRMCSLMQGSTLP
MDPRMFSLVQASTLP

SEQ ID NO: 95328 - protein, 15 aa, Artificial Sequence
  Description of Artificial Sequence: Synthetic peptide
  Seed: MDPRMCSLMQGSTLP
MDPRMFSLVQASTMP

SEQ ID NO: 95329 - protein, 15 aa, Artificial Sequence
  Description of Artificial Sequence: Synthetic peptide
  Seed: MDPRMCSLMQGSTLP
MDPRMFSLVQASTNP

SEQ ID NO: 95330 - protein, 15 aa, Artificial Sequence
  Description of Artificial Sequence: Synthetic peptide
  Seed: MDPRMCSLMQGSTLP
MDPRMFSLVQASTQP

SEQ ID NO: 95331 - protein, 15 aa, Artificial Sequence
  Description of Artificial Sequence: Synthetic peptide
  Seed: MDPRMCSLMQGSTLP
MDPRMFSLVQASTSP

SEQ ID NO: 95332 - protein, 15 aa, Artificial Sequence
  Description of Artificial Sequence: Synthetic peptide
  Seed: MDPRMCSLMQGSTLP
MDPRMFSLVQASTTP

SEQ ID NO: 95333 - protein, 15 aa, Artificial Sequence
  Description of Artificial Sequence: Synthetic peptide
  Seed: MDPRMCSLMQGSTLP
MDPRMFSLVQASTVP

SEQ ID NO: 95334 - protein, 15 aa, Artificial Sequence
  Description of Artificial Sequence: Synthetic peptide
  Seed: MDPRMCSLMQGSTLP
MDPRMFSLVQGSTAP

SEQ ID NO: 95335 - protein, 15 aa, Artificial Sequence
  Description of Artificial Sequence: Synthetic peptide
  Seed: MDPRMCSLMQGSTLP
MDPRMFSLVQGSTGP

SEQ ID NO: 95336 - protein, 15 aa, Artificial Sequence
  Description of Artificial Sequence: Synthetic peptide
  Seed: MDPRMCSLMQGSTLP
MDPRMFSLVQGSTIP

SEQ ID NO: 95337 - protein, 15 aa, Artificial Sequence
  Description of Artificial Sequence: Synthetic peptide
  Seed: MDPRMCSLMQGSTLP
MDPRMFSLVQGSTLP

SEQ ID NO: 95338 - protein, 15 aa, Artificial Sequence
  Description of Artificial Sequence: Synthetic peptide
  Seed: MDPRMCSLMQGSTLP
MDPRMFSLVQGSTMP

SEQ ID NO: 95339 - protein, 15 aa, Artificial Sequence
  Description of Artificial Sequence: Synthetic peptide
  Seed: MDPRMCSLMQGSTLP
MDPRMFSLVQGSTNP

SEQ ID NO: 95340 - protein, 15 aa, Artificial Sequence
  Description of Artificial Sequence: Synthetic peptide
  Seed: MDPRMCSLMQGSTLP
MDPRMFSLVQGSTSP

SEQ ID NO: 95341 - protein, 15 aa, Artificial Sequence
  Description of Artificial Sequence: Synthetic peptide
  Seed: MDPRMCSLMQGSTLP
MDPRMFSLVQGSTTP

SEQ ID NO: 95342 - protein, 15 aa, Artificial Sequence
  Description of Artificial Sequence: Synthetic peptide
  Seed: MDPRMCSLMQGSTLP
MDPRMFSLVQGSTVP

SEQ ID NO: 95343 - protein, 15 aa, Artificial Sequence
  Description of Artificial Sequence: Synthetic peptide
  Seed: MDPRMCSLMQGSTLP
MDPRMFSLVQISTAP

SEQ ID NO: 95344 - protein, 15 aa, Artificial Sequence
  Description of Artificial Sequence: Synthetic peptide
  Seed: MDPRMCSLMQGSTLP
MDPRMFSLVQISTNP

SEQ ID NO: 95345 - protein, 15 aa, Artificial Sequence
  Description of Artificial Sequence: Synthetic peptide
  Seed: MDPRMCSLMQGSTLP
MDPRMFSLVQISTSP

SEQ ID NO: 95346 - protein, 15 aa, Artificial Sequence
  Description of Artificial Sequence: Synthetic peptide
  Seed: MDPRMCSLMQGSTLP
MDPRMFSLVQISTTP

SEQ ID NO: 95347 - protein, 15 aa, Artificial Sequence
  Description of Artificial Sequence: Synthetic peptide
  Seed: MDPRMCSLMQGSTLP
MDPRMFSLVQISTVP

SEQ ID NO: 95348 - protein, 15 aa, Artificial Sequence
  Description of Artificial Sequence: Synthetic peptide
  Seed: MDPRMCSLMQGSTLP
MDPRMFSLVQLSTAP

SEQ ID NO: 95349 - protein, 15 aa, Artificial Sequence
  Description of Artificial Sequence: Synthetic peptide
  Seed: MDPRMCSLMQGSTLP
MDPRMFSLVQNSTAP

SEQ ID NO: 95350 - protein, 15 aa, Artificial Sequence
  Description of Artificial Sequence: Synthetic peptide
  Seed: MDPRMCSLMQGSTLP
MDPRMFSLVQNSTIP

SEQ ID NO: 95351 - protein, 15 aa, Artificial Sequence
  Description of Artificial Sequence: Synthetic peptide
  Seed: MDPRMCSLMQGSTLP
MDPRMFSLVQNSTLP

SEQ ID NO: 95352 - protein, 15 aa, Artificial Sequence
  Description of Artificial Sequence: Synthetic peptide
  Seed: MDPRMCSLMQGSTLP
MDPRMFSLVQNSTNP

SEQ ID NO: 95353 - protein, 15 aa, Artificial Sequence
  Description of Artificial Sequence: Synthetic peptide
  Seed: MDPRMCSLMQGSTLP
MDPRMFSLVQNSTSP

SEQ ID NO: 95354 - protein, 15 aa, Artificial Sequence
  Description of Artificial Sequence: Synthetic peptide
  Seed: MDPRMCSLMQGSTLP
MDPRMFSLVQNSTVP

SEQ ID NO: 95355 - protein, 15 aa, Artificial Sequence
  Description of Artificial Sequence: Synthetic peptide
  Seed: MDPRMCSLMQGSTLP
MDPRMFSLVQPSTAP

SEQ ID NO: 95356 - protein, 15 aa, Artificial Sequence
  Description of Artificial Sequence: Synthetic peptide
  Seed: MDPRMCSLMQGSTLP
MDPRMFSLVQPSTGP

SEQ ID NO: 95357 - protein, 15 aa, Artificial Sequence
  Description of Artificial Sequence: Synthetic peptide
  Seed: MDPRMCSLMQGSTLP
MDPRMFSLVQPSTIP

SEQ ID NO: 95358 - protein, 15 aa, Artificial Sequence
  Description of Artificial Sequence: Synthetic peptide
  Seed: MDPRMCSLMQGSTLP
MDPRMFSLVQPSTLP

SEQ ID NO: 95359 - protein, 15 aa, Artificial Sequence
  Description of Artificial Sequence: Synthetic peptide
  Seed: MDPRMCSLMQGSTLP
MDPRMFSLVQPSTMP

SEQ ID NO: 95360 - protein, 15 aa, Artificial Sequence
  Description of Artificial Sequence: Synthetic peptide
  Seed: MDPRMCSLMQGSTLP
MDPRMFSLVQPSTNP

SEQ ID NO: 95361 - protein, 15 aa, Artificial Sequence
  Description of Artificial Sequence: Synthetic peptide
  Seed: MDPRMCSLMQGSTLP
MDPRMFSLVQPSTQP

SEQ ID NO: 95362 - protein, 15 aa, Artificial Sequence
  Description of Artificial Sequence: Synthetic peptide
  Seed: MDPRMCSLMQGSTLP
MDPRMFSLVQPSTSP

SEQ ID NO: 95363 - protein, 15 aa, Artificial Sequence
  Description of Artificial Sequence: Synthetic peptide
  Seed: MDPRMCSLMQGSTLP
MDPRMFSLVQPSTTP

SEQ ID NO: 95364 - protein, 15 aa, Artificial Sequence
  Description of Artificial Sequence: Synthetic peptide
  Seed: MDPRMCSLMQGSTLP
MDPRMFSLVQPSTVP

SEQ ID NO: 95365 - protein, 15 aa, Artificial Sequence
  Description of Artificial Sequence: Synthetic peptide
  Seed: MDPRMCSLMQGSTLP
MDPRMFSLVQSSTAP

SEQ ID NO: 95366 - protein, 15 aa, Artificial Sequence
  Description of Artificial Sequence: Synthetic peptide
  Seed: MDPRMCSLMQGSTLP
MDPRMFSLVQSSTGP

SEQ ID NO: 95367 - protein, 15 aa, Artificial Sequence
  Description of Artificial Sequence: Synthetic peptide
  Seed: MDPRMCSLMQGSTLP
MDPRMFSLVQSSTIP

SEQ ID NO: 95368 - protein, 15 aa, Artificial Sequence
  Description of Artificial Sequence: Synthetic peptide
  Seed: MDPRMCSLMQGSTLP
MDPRMFSLVQSSTLP

SEQ ID NO: 95369 - protein, 15 aa, Artificial Sequence
  Description of Artificial Sequence: Synthetic peptide
  Seed: MDPRMCSLMQGSTLP
MDPRMFSLVQSSTMP

SEQ ID NO: 95370 - protein, 15 aa, Artificial Sequence
  Description of Artificial Sequence: Synthetic peptide
  Seed: MDPRMCSLMQGSTLP
MDPRMFSLVQSSTNP

SEQ ID NO: 95371 - protein, 15 aa, Artificial Sequence
  Description of Artificial Sequence: Synthetic peptide
  Seed: MDPRMCSLMQGSTLP
MDPRMFSLVQSSTSP

SEQ ID NO: 95372 - protein, 15 aa, Artificial Sequence
  Description of Artificial Sequence: Synthetic peptide
  Seed: MDPRMCSLMQGSTLP
MDPRMFSLVQSSTTP

SEQ ID NO: 95373 - protein, 15 aa, Artificial Sequence
  Description of Artificial Sequence: Synthetic peptide
  Seed: MDPRMCSLMQGSTLP
MDPRMFSLVQSSTVP

SEQ ID NO: 95374 - protein, 15 aa, Artificial Sequence
  Description of Artificial Sequence: Synthetic peptide
  Seed: MDPRMCSLMQGSTLP
MDPRMFSLVQTSTAP

SEQ ID NO: 95375 - protein, 15 aa, Artificial Sequence
  Description of Artificial Sequence: Synthetic peptide
  Seed: MDPRMCSLMQGSTLP
MDPRMFSLVQTSTIP

SEQ ID NO: 95376 - protein, 15 aa, Artificial Sequence
  Description of Artificial Sequence: Synthetic peptide
  Seed: MDPRMCSLMQGSTLP
MDPRMFSLVQTSTLP

SEQ ID NO: 95377 - protein, 15 aa, Artificial Sequence
  Description of Artificial Sequence: Synthetic peptide
  Seed: MDPRMCSLMQGSTLP
MDPRMFSLVQTSTMP

SEQ ID NO: 95378 - protein, 15 aa, Artificial Sequence
  Description of Artificial Sequence: Synthetic peptide
  Seed: MDPRMCSLMQGSTLP
MDPRMFSLVQTSTNP

SEQ ID NO: 95379 - protein, 15 aa, Artificial Sequence
  Description of Artificial Sequence: Synthetic peptide
  Seed: MDPRMCSLMQGSTLP
MDPRMFSLVQTSTSP

SEQ ID NO: 95380 - protein, 15 aa, Artificial Sequence
  Description of Artificial Sequence: Synthetic peptide
  Seed: MDPRMCSLMQGSTLP
MDPRMFSLVQTSTTP

SEQ ID NO: 95381 - protein, 15 aa, Artificial Sequence
  Description of Artificial Sequence: Synthetic peptide
  Seed: MDPRMCSLMQGSTLP
MDPRMFSLVQTSTVP

SEQ ID NO: 95382 - protein, 15 aa, Artificial Sequence
  Description of Artificial Sequence: Synthetic peptide
  Seed: MDPRMCSLMQGSTLP
MDPRMFSLVQVSTAP

SEQ ID NO: 95383 - protein, 15 aa, Artificial Sequence
  Description of Artificial Sequence: Synthetic peptide
  Seed: MDPRMCSLMQGSTLP
MDPRMFSLVQVSTGP

SEQ ID NO: 95384 - protein, 15 aa, Artificial Sequence
  Description of Artificial Sequence: Synthetic peptide
  Seed: MDPRMCSLMQGSTLP
MDPRMFSLVQVSTIP

SEQ ID NO: 95385 - protein, 15 aa, Artificial Sequence
  Description of Artificial Sequence: Synthetic peptide
  Seed: MDPRMCSLMQGSTLP
MDPRMFSLVQVSTLP

SEQ ID NO: 95386 - protein, 15 aa, Artificial Sequence
  Description of Artificial Sequence: Synthetic peptide
  Seed: MDPRMCSLMQGSTLP
MDPRMFSLVQVSTMP

SEQ ID NO: 95387 - protein, 15 aa, Artificial Sequence
  Description of Artificial Sequence: Synthetic peptide
  Seed: MDPRMCSLMQGSTLP
MDPRMFSLVQVSTNP

SEQ ID NO: 95388 - protein, 15 aa, Artificial Sequence
  Description of Artificial Sequence: Synthetic peptide
  Seed: MDPRMCSLMQGSTLP
MDPRMFSLVQVSTSP

SEQ ID NO: 95389 - protein, 15 aa, Artificial Sequence
  Description of Artificial Sequence: Synthetic peptide
  Seed: MDPRMCSLMQGSTLP
MDPRMFSLVQVSTTP

SEQ ID NO: 95390 - protein, 15 aa, Artificial Sequence
  Description of Artificial Sequence: Synthetic peptide
  Seed: MDPRMCSLMQGSTLP
MDPRMFSLVQVSTVP

SEQ ID NO: 95391 - protein, 15 aa, Artificial Sequence
  Description of Artificial Sequence: Synthetic peptide
  Seed: MDPRMCSLMQGSTLP
MDPRMFSLWQASTIP

SEQ ID NO: 95392 - protein, 15 aa, Artificial Sequence
  Description of Artificial Sequence: Synthetic peptide
  Seed: MDPRMCSLMQGSTLP
MDPRMFSLWQASTLP

SEQ ID NO: 95393 - protein, 15 aa, Artificial Sequence
  Description of Artificial Sequence: Synthetic peptide
  Seed: MDPRMCSLMQGSTLP
MDPRMFSLWQASTVP

SEQ ID NO: 95394 - protein, 15 aa, Artificial Sequence
  Description of Artificial Sequence: Synthetic peptide
  Seed: MDPRMCSLMQGSTLP
MDPRMISLAQASTAP

SEQ ID NO: 95395 - protein, 15 aa, Artificial Sequence
  Description of Artificial Sequence: Synthetic peptide
  Seed: MDPRMCSLMQGSTLP
MDPRMISLAQASTIP

SEQ ID NO: 95396 - protein, 15 aa, Artificial Sequence
  Description of Artificial Sequence: Synthetic peptide
  Seed: MDPRMCSLMQGSTLP
MDPRMISLAQASTLP

SEQ ID NO: 95397 - protein, 15 aa, Artificial Sequence
  Description of Artificial Sequence: Synthetic peptide
  Seed: MDPRMCSLMQGSTLP
MDPRMISLAQASTMP

SEQ ID NO: 95398 - protein, 15 aa, Artificial Sequence
  Description of Artificial Sequence: Synthetic peptide
  Seed: MDPRMCSLMQGSTLP
MDPRMISLAQASTVP

SEQ ID NO: 95399 - protein, 15 aa, Artificial Sequence
  Description of Artificial Sequence: Synthetic peptide
  Seed: MDPRMCSLMQGSTLP
MDPRMISLAQGSTAP

SEQ ID NO: 95400 - protein, 15 aa, Artificial Sequence
  Description of Artificial Sequence: Synthetic peptide
  Seed: MDPRMCSLMQGSTLP
MDPRMISLAQGSTIP

SEQ ID NO: 95401 - protein, 15 aa, Artificial Sequence
  Description of Artificial Sequence: Synthetic peptide
  Seed: MDPRMCSLMQGSTLP
MDPRMISLAQGSTLP

SEQ ID NO: 95402 - protein, 15 aa, Artificial Sequence
  Description of Artificial Sequence: Synthetic peptide
  Seed: MDPRMCSLMQGSTLP
MDPRMISLAQGSTVP

SEQ ID NO: 95403 - protein, 15 aa, Artificial Sequence
  Description of Artificial Sequence: Synthetic peptide
  Seed: MDPRMCSLMQGSTLP
MDPRMISLAQSSTIP

SEQ ID NO: 95404 - protein, 15 aa, Artificial Sequence
  Description of Artificial Sequence: Synthetic peptide
  Seed: MDPRMCSLMQGSTLP
MDPRMISLAQSSTLP

SEQ ID NO: 95405 - protein, 15 aa, Artificial Sequence
  Description of Artificial Sequence: Synthetic peptide
  Seed: MDPRMCSLMQGSTLP
MDPRMISLAQSSTVP

SEQ ID NO: 95406 - protein, 15 aa, Artificial Sequence
  Description of Artificial Sequence: Synthetic peptide
  Seed: MDPRMCSLMQGSTLP
MDPRMISLIQASTAP

SEQ ID NO: 95407 - protein, 15 aa, Artificial Sequence
  Description of Artificial Sequence: Synthetic peptide
  Seed: MDPRMCSLMQGSTLP
MDPRMISLIQASTIP

SEQ ID NO: 95408 - protein, 15 aa, Artificial Sequence
  Description of Artificial Sequence: Synthetic peptide
  Seed: MDPRMCSLMQGSTLP
MDPRMISLIQASTLP

SEQ ID NO: 95409 - protein, 15 aa, Artificial Sequence
  Description of Artificial Sequence: Synthetic peptide
  Seed: MDPRMCSLMQGSTLP
MDPRMISLIQASTMP

SEQ ID NO: 95410 - protein, 15 aa, Artificial Sequence
  Description of Artificial Sequence: Synthetic peptide
  Seed: MDPRMCSLMQGSTLP
MDPRMISLIQASTNP

SEQ ID NO: 95411 - protein, 15 aa, Artificial Sequence
  Description of Artificial Sequence: Synthetic peptide
  Seed: MDPRMCSLMQGSTLP
MDPRMISLIQASTSP

SEQ ID NO: 95412 - protein, 15 aa, Artificial Sequence
  Description of Artificial Sequence: Synthetic peptide
  Seed: MDPRMCSLMQGSTLP
MDPRMISLIQASTTP

SEQ ID NO: 95413 - protein, 15 aa, Artificial Sequence
  Description of Artificial Sequence: Synthetic peptide
  Seed: MDPRMCSLMQGSTLP
MDPRMISLIQASTVP

SEQ ID NO: 95414 - protein, 15 aa, Artificial Sequence
  Description of Artificial Sequence: Synthetic peptide
  Seed: MDPRMCSLMQGSTLP
MDPRMISLIQGSTAP

SEQ ID NO: 95415 - protein, 15 aa, Artificial Sequence
  Description of Artificial Sequence: Synthetic peptide
  Seed: MDPRMCSLMQGSTLP
MDPRMISLIQGSTIP

SEQ ID NO: 95416 - protein, 15 aa, Artificial Sequence
  Description of Artificial Sequence: Synthetic peptide
  Seed: MDPRMCSLMQGSTLP
MDPRMISLIQGSTLP

SEQ ID NO: 95417 - protein, 15 aa, Artificial Sequence
  Description of Artificial Sequence: Synthetic peptide
  Seed: MDPRMCSLMQGSTLP
MDPRMISLIQGSTMP

SEQ ID NO: 95418 - protein, 15 aa, Artificial Sequence
  Description of Artificial Sequence: Synthetic peptide
  Seed: MDPRMCSLMQGSTLP
MDPRMISLIQGSTSP

SEQ ID NO: 95419 - protein, 15 aa, Artificial Sequence
  Description of Artificial Sequence: Synthetic peptide
  Seed: MDPRMCSLMQGSTLP
MDPRMISLIQGSTTP

SEQ ID NO: 95420 - protein, 15 aa, Artificial Sequence
  Description of Artificial Sequence: Synthetic peptide
  Seed: MDPRMCSLMQGSTLP
MDPRMISLIQGSTVP

SEQ ID NO: 95421 - protein, 15 aa, Artificial Sequence
  Description of Artificial Sequence: Synthetic peptide
  Seed: MDPRMCSLMQGSTLP
MDPRMISLIQPSTAP

SEQ ID NO: 95422 - protein, 15 aa, Artificial Sequence
  Description of Artificial Sequence: Synthetic peptide
  Seed: MDPRMCSLMQGSTLP
MDPRMISLIQPSTIP

SEQ ID NO: 95423 - protein, 15 aa, Artificial Sequence
  Description of Artificial Sequence: Synthetic peptide
  Seed: MDPRMCSLMQGSTLP
MDPRMISLIQPSTLP

SEQ ID NO: 95424 - protein, 15 aa, Artificial Sequence
  Description of Artificial Sequence: Synthetic peptide
  Seed: MDPRMCSLMQGSTLP
MDPRMISLIQPSTVP

SEQ ID NO: 95425 - protein, 15 aa, Artificial Sequence
  Description of Artificial Sequence: Synthetic peptide
  Seed: MDPRMCSLMQGSTLP
MDPRMISLIQSSTAP

SEQ ID NO: 95426 - protein, 15 aa, Artificial Sequence
  Description of Artificial Sequence: Synthetic peptide
  Seed: MDPRMCSLMQGSTLP
MDPRMISLIQSSTIP

SEQ ID NO: 95427 - protein, 15 aa, Artificial Sequence
  Description of Artificial Sequence: Synthetic peptide
  Seed: MDPRMCSLMQGSTLP
MDPRMISLIQSSTLP

SEQ ID NO: 95428 - protein, 15 aa, Artificial Sequence
  Description of Artificial Sequence: Synthetic peptide
  Seed: MDPRMCSLMQGSTLP
MDPRMISLIQSSTVP

SEQ ID NO: 95429 - protein, 15 aa, Artificial Sequence
  Description of Artificial Sequence: Synthetic peptide
  Seed: MDPRMCSLMQGSTLP
MDPRMISLLQASTAP

SEQ ID NO: 95430 - protein, 15 aa, Artificial Sequence
  Description of Artificial Sequence: Synthetic peptide
  Seed: MDPRMCSLMQGSTLP
MDPRMISLLQASTCP

SEQ ID NO: 95431 - protein, 15 aa, Artificial Sequence
  Description of Artificial Sequence: Synthetic peptide
  Seed: MDPRMCSLMQGSTLP
MDPRMISLLQASTFP

SEQ ID NO: 95432 - protein, 15 aa, Artificial Sequence
  Description of Artificial Sequence: Synthetic peptide
  Seed: MDPRMCSLMQGSTLP
MDPRMISLLQASTGP

SEQ ID NO: 95433 - protein, 15 aa, Artificial Sequence
  Description of Artificial Sequence: Synthetic peptide
  Seed: MDPRMCSLMQGSTLP
MDPRMISLLQASTIP

SEQ ID NO: 95434 - protein, 15 aa, Artificial Sequence
  Description of Artificial Sequence: Synthetic peptide
  Seed: MDPRMCSLMQGSTLP
MDPRMISLLQASTLP

SEQ ID NO: 95435 - protein, 15 aa, Artificial Sequence
  Description of Artificial Sequence: Synthetic peptide
  Seed: MDPRMCSLMQGSTLP
MDPRMISLLQASTMP

SEQ ID NO: 95436 - protein, 15 aa, Artificial Sequence
  Description of Artificial Sequence: Synthetic peptide
  Seed: MDPRMCSLMQGSTLP
MDPRMISLLQASTNP

SEQ ID NO: 95437 - protein, 15 aa, Artificial Sequence
  Description of Artificial Sequence: Synthetic peptide
  Seed: MDPRMCSLMQGSTLP
MDPRMISLLQASTSP

SEQ ID NO: 95438 - protein, 15 aa, Artificial Sequence
  Description of Artificial Sequence: Synthetic peptide
  Seed: MDPRMCSLMQGSTLP
MDPRMISLLQASTTP

SEQ ID NO: 95439 - protein, 15 aa, Artificial Sequence
  Description of Artificial Sequence: Synthetic peptide
  Seed: MDPRMCSLMQGSTLP
MDPRMISLLQASTVP

SEQ ID NO: 95440 - protein, 15 aa, Artificial Sequence
  Description of Artificial Sequence: Synthetic peptide
  Seed: MDPRMCSLMQGSTLP
MDPRMISLLQGSTAP

SEQ ID NO: 95441 - protein, 15 aa, Artificial Sequence
  Description of Artificial Sequence: Synthetic peptide
  Seed: MDPRMCSLMQGSTLP
MDPRMISLLQGSTGP

SEQ ID NO: 95442 - protein, 15 aa, Artificial Sequence
  Description of Artificial Sequence: Synthetic peptide
  Seed: MDPRMCSLMQGSTLP
MDPRMISLLQGSTIP

SEQ ID NO: 95443 - protein, 15 aa, Artificial Sequence
  Description of Artificial Sequence: Synthetic peptide
  Seed: MDPRMCSLMQGSTLP
MDPRMISLLQGSTLP

SEQ ID NO: 95444 - protein, 15 aa, Artificial Sequence
  Description of Artificial Sequence: Synthetic peptide
  Seed: MDPRMCSLMQGSTLP
MDPRMISLLQGSTMP

SEQ ID NO: 95445 - protein, 15 aa, Artificial Sequence
  Description of Artificial Sequence: Synthetic peptide
  Seed: MDPRMCSLMQGSTLP
MDPRMISLLQGSTSP

SEQ ID NO: 95446 - protein, 15 aa, Artificial Sequence
  Description of Artificial Sequence: Synthetic peptide
  Seed: MDPRMCSLMQGSTLP
MDPRMISLLQGSTTP

SEQ ID NO: 95447 - protein, 15 aa, Artificial Sequence
  Description of Artificial Sequence: Synthetic peptide
  Seed: MDPRMCSLMQGSTLP
MDPRMISLLQGSTVP

SEQ ID NO: 95448 - protein, 15 aa, Artificial Sequence
  Description of Artificial Sequence: Synthetic peptide
  Seed: MDPRMCSLMQGSTLP
MDPRMISLLQISTAP

SEQ ID NO: 95449 - protein, 15 aa, Artificial Sequence
  Description of Artificial Sequence: Synthetic peptide
  Seed: MDPRMCSLMQGSTLP
MDPRMISLLQISTSP

SEQ ID NO: 95450 - protein, 15 aa, Artificial Sequence
  Description of Artificial Sequence: Synthetic peptide
  Seed: MDPRMCSLMQGSTLP
MDPRMISLLQNSTAP

SEQ ID NO: 95451 - protein, 15 aa, Artificial Sequence
  Description of Artificial Sequence: Synthetic peptide
  Seed: MDPRMCSLMQGSTLP
MDPRMISLLQNSTIP

SEQ ID NO: 95452 - protein, 15 aa, Artificial Sequence
  Description of Artificial Sequence: Synthetic peptide
  Seed: MDPRMCSLMQGSTLP
MDPRMISLLQNSTLP

SEQ ID NO: 95453 - protein, 15 aa, Artificial Sequence
  Description of Artificial Sequence: Synthetic peptide
  Seed: MDPRMCSLMQGSTLP
MDPRMISLLQNSTTP

SEQ ID NO: 95454 - protein, 15 aa, Artificial Sequence
  Description of Artificial Sequence: Synthetic peptide
  Seed: MDPRMCSLMQGSTLP
MDPRMISLLQNSTVP

SEQ ID NO: 95455 - protein, 15 aa, Artificial Sequence
  Description of Artificial Sequence: Synthetic peptide
  Seed: MDPRMCSLMQGSTLP
MDPRMISLLQPSTAP

SEQ ID NO: 95456 - protein, 15 aa, Artificial Sequence
  Description of Artificial Sequence: Synthetic peptide
  Seed: MDPRMCSLMQGSTLP
MDPRMISLLQPSTIP

SEQ ID NO: 95457 - protein, 15 aa, Artificial Sequence
  Description of Artificial Sequence: Synthetic peptide
  Seed: MDPRMCSLMQGSTLP
MDPRMISLLQPSTLP

SEQ ID NO: 95458 - protein, 15 aa, Artificial Sequence
  Description of Artificial Sequence: Synthetic peptide
  Seed: MDPRMCSLMQGSTLP
MDPRMISLLQPSTMP

SEQ ID NO: 95459 - protein, 15 aa, Artificial Sequence
  Description of Artificial Sequence: Synthetic peptide
  Seed: MDPRMCSLMQGSTLP
MDPRMISLLQPSTNP

SEQ ID NO: 95460 - protein, 15 aa, Artificial Sequence
  Description of Artificial Sequence: Synthetic peptide
  Seed: MDPRMCSLMQGSTLP
MDPRMISLLQPSTSP

SEQ ID NO: 95461 - protein, 15 aa, Artificial Sequence
  Description of Artificial Sequence: Synthetic peptide
  Seed: MDPRMCSLMQGSTLP
MDPRMISLLQPSTTP

SEQ ID NO: 95462 - protein, 15 aa, Artificial Sequence
  Description of Artificial Sequence: Synthetic peptide
  Seed: MDPRMCSLMQGSTLP
MDPRMISLLQPSTVP

SEQ ID NO: 95463 - protein, 15 aa, Artificial Sequence
  Description of Artificial Sequence: Synthetic peptide
  Seed: MDPRMCSLMQGSTLP
MDPRMISLLQSSTAP

SEQ ID NO: 95464 - protein, 15 aa, Artificial Sequence
  Description of Artificial Sequence: Synthetic peptide
  Seed: MDPRMCSLMQGSTLP
MDPRMISLLQSSTGP

SEQ ID NO: 95465 - protein, 15 aa, Artificial Sequence
  Description of Artificial Sequence: Synthetic peptide
  Seed: MDPRMCSLMQGSTLP
MDPRMISLLQSSTIP

SEQ ID NO: 95466 - protein, 15 aa, Artificial Sequence
  Description of Artificial Sequence: Synthetic peptide
  Seed: MDPRMCSLMQGSTLP
MDPRMISLLQSSTLP

SEQ ID NO: 95467 - protein, 15 aa, Artificial Sequence
  Description of Artificial Sequence: Synthetic peptide
  Seed: MDPRMCSLMQGSTLP
MDPRMISLLQSSTMP

SEQ ID NO: 95468 - protein, 15 aa, Artificial Sequence
  Description of Artificial Sequence: Synthetic peptide
  Seed: MDPRMCSLMQGSTLP
MDPRMISLLQSSTNP

SEQ ID NO: 95469 - protein, 15 aa, Artificial Sequence
  Description of Artificial Sequence: Synthetic peptide
  Seed: MDPRMCSLMQGSTLP
MDPRMISLLQSSTSP

SEQ ID NO: 95470 - protein, 15 aa, Artificial Sequence
  Description of Artificial Sequence: Synthetic peptide
  Seed: MDPRMCSLMQGSTLP
MDPRMISLLQSSTTP

SEQ ID NO: 95471 - protein, 15 aa, Artificial Sequence
  Description of Artificial Sequence: Synthetic peptide
  Seed: MDPRMCSLMQGSTLP
MDPRMISLLQSSTVP

SEQ ID NO: 95472 - protein, 15 aa, Artificial Sequence
  Description of Artificial Sequence: Synthetic peptide
  Seed: MDPRMCSLMQGSTLP
MDPRMISLLQTSTAP

SEQ ID NO: 95473 - protein, 15 aa, Artificial Sequence
  Description of Artificial Sequence: Synthetic peptide
  Seed: MDPRMCSLMQGSTLP
MDPRMISLLQTSTIP

SEQ ID NO: 95474 - protein, 15 aa, Artificial Sequence
  Description of Artificial Sequence: Synthetic peptide
  Seed: MDPRMCSLMQGSTLP
MDPRMISLLQTSTLP

SEQ ID NO: 95475 - protein, 15 aa, Artificial Sequence
  Description of Artificial Sequence: Synthetic peptide
  Seed: MDPRMCSLMQGSTLP
MDPRMISLLQTSTMP

SEQ ID NO: 95476 - protein, 15 aa, Artificial Sequence
  Description of Artificial Sequence: Synthetic peptide
  Seed: MDPRMCSLMQGSTLP
MDPRMISLLQTSTNP

SEQ ID NO: 95477 - protein, 15 aa, Artificial Sequence
  Description of Artificial Sequence: Synthetic peptide
  Seed: MDPRMCSLMQGSTLP
MDPRMISLLQTSTSP

SEQ ID NO: 95478 - protein, 15 aa, Artificial Sequence
  Description of Artificial Sequence: Synthetic peptide
  Seed: MDPRMCSLMQGSTLP
MDPRMISLLQTSTTP

SEQ ID NO: 95479 - protein, 15 aa, Artificial Sequence
  Description of Artificial Sequence: Synthetic peptide
  Seed: MDPRMCSLMQGSTLP
MDPRMISLLQTSTVP

SEQ ID NO: 95480 - protein, 15 aa, Artificial Sequence
  Description of Artificial Sequence: Synthetic peptide
  Seed: MDPRMCSLMQGSTLP
MDPRMISLLQVSTAP

SEQ ID NO: 95481 - protein, 15 aa, Artificial Sequence
  Description of Artificial Sequence: Synthetic peptide
  Seed: MDPRMCSLMQGSTLP
MDPRMISLLQVSTIP

SEQ ID NO: 95482 - protein, 15 aa, Artificial Sequence
  Description of Artificial Sequence: Synthetic peptide
  Seed: MDPRMCSLMQGSTLP
MDPRMISLLQVSTLP

SEQ ID NO: 95483 - protein, 15 aa, Artificial Sequence
  Description of Artificial Sequence: Synthetic peptide
  Seed: MDPRMCSLMQGSTLP
MDPRMISLLQVSTNP

SEQ ID NO: 95484 - protein, 15 aa, Artificial Sequence
  Description of Artificial Sequence: Synthetic peptide
  Seed: MDPRMCSLMQGSTLP
MDPRMISLLQVSTSP

SEQ ID NO: 95485 - protein, 15 aa, Artificial Sequence
  Description of Artificial Sequence: Synthetic peptide
  Seed: MDPRMCSLMQGSTLP
MDPRMISLLQVSTVP

SEQ ID NO: 95486 - protein, 15 aa, Artificial Sequence
  Description of Artificial Sequence: Synthetic peptide
  Seed: MDPRMCSLMQGSTLP
MDPRMISLMQASTAP

SEQ ID NO: 95487 - protein, 15 aa, Artificial Sequence
  Description of Artificial Sequence: Synthetic peptide
  Seed: MDPRMCSLMQGSTLP
MDPRMISLMQASTCP

SEQ ID NO: 95488 - protein, 15 aa, Artificial Sequence
  Description of Artificial Sequence: Synthetic peptide
  Seed: MDPRMCSLMQGSTLP
MDPRMISLMQASTFP

SEQ ID NO: 95489 - protein, 15 aa, Artificial Sequence
  Description of Artificial Sequence: Synthetic peptide
  Seed: MDPRMCSLMQGSTLP
MDPRMISLMQASTGP

SEQ ID NO: 95490 - protein, 15 aa, Artificial Sequence
  Description of Artificial Sequence: Synthetic peptide
  Seed: MDPRMCSLMQGSTLP
MDPRMISLMQASTIP

SEQ ID NO: 95491 - protein, 15 aa, Artificial Sequence
  Description of Artificial Sequence: Synthetic peptide
  Seed: MDPRMCSLMQGSTLP
MDPRMISLMQASTLP

SEQ ID NO: 95492 - protein, 15 aa, Artificial Sequence
  Description of Artificial Sequence: Synthetic peptide
  Seed: MDPRMCSLMQGSTLP
MDPRMISLMQASTMP

SEQ ID NO: 95493 - protein, 15 aa, Artificial Sequence
  Description of Artificial Sequence: Synthetic peptide
  Seed: MDPRMCSLMQGSTLP
MDPRMISLMQASTNP

SEQ ID NO: 95494 - protein, 15 aa, Artificial Sequence
  Description of Artificial Sequence: Synthetic peptide
  Seed: MDPRMCSLMQGSTLP
MDPRMISLMQASTSP

SEQ ID NO: 95495 - protein, 15 aa, Artificial Sequence
  Description of Artificial Sequence: Synthetic peptide
  Seed: MDPRMCSLMQGSTLP
MDPRMISLMQASTTP

SEQ ID NO: 95496 - protein, 15 aa, Artificial Sequence
  Description of Artificial Sequence: Synthetic peptide
  Seed: MDPRMCSLMQGSTLP
MDPRMISLMQASTVP

SEQ ID NO: 95497 - protein, 15 aa, Artificial Sequence
  Description of Artificial Sequence: Synthetic peptide
  Seed: MDPRMCSLMQGSTLP
MDPRMISLMQGSTAP

SEQ ID NO: 95498 - protein, 15 aa, Artificial Sequence
  Description of Artificial Sequence: Synthetic peptide
  Seed: MDPRMCSLMQGSTLP
MDPRMISLMQGSTGP

SEQ ID NO: 95499 - protein, 15 aa, Artificial Sequence
  Description of Artificial Sequence: Synthetic peptide
  Seed: MDPRMCSLMQGSTLP
MDPRMISLMQGSTIP

SEQ ID NO: 95500 - protein, 15 aa, Artificial Sequence
  Description of Artificial Sequence: Synthetic peptide
  Seed: MDPRMCSLMQGSTLP
MDPRMISLMQGSTLP

SEQ ID NO: 95501 - protein, 15 aa, Artificial Sequence
  Description of Artificial Sequence: Synthetic peptide
  Seed: MDPRMCSLMQGSTLP
MDPRMISLMQGSTMP

SEQ ID NO: 95502 - protein, 15 aa, Artificial Sequence
  Description of Artificial Sequence: Synthetic peptide
  Seed: MDPRMCSLMQGSTLP
MDPRMISLMQGSTSP

SEQ ID NO: 95503 - protein, 15 aa, Artificial Sequence
  Description of Artificial Sequence: Synthetic peptide
  Seed: MDPRMCSLMQGSTLP
MDPRMISLMQGSTTP

SEQ ID NO: 95504 - protein, 15 aa, Artificial Sequence
  Description of Artificial Sequence: Synthetic peptide
  Seed: MDPRMCSLMQGSTLP
MDPRMISLMQGSTVP

SEQ ID NO: 95505 - protein, 15 aa, Artificial Sequence
  Description of Artificial Sequence: Synthetic peptide
  Seed: MDPRMCSLMQGSTLP
MDPRMISLMQISTAP

SEQ ID NO: 95506 - protein, 15 aa, Artificial Sequence
  Description of Artificial Sequence: Synthetic peptide
  Seed: MDPRMCSLMQGSTLP
MDPRMISLMQISTNP

SEQ ID NO: 95507 - protein, 15 aa, Artificial Sequence
  Description of Artificial Sequence: Synthetic peptide
  Seed: MDPRMCSLMQGSTLP
MDPRMISLMQISTSP

SEQ ID NO: 95508 - protein, 15 aa, Artificial Sequence
  Description of Artificial Sequence: Synthetic peptide
  Seed: MDPRMCSLMQGSTLP
MDPRMISLMQNSTAP

SEQ ID NO: 95509 - protein, 15 aa, Artificial Sequence
  Description of Artificial Sequence: Synthetic peptide
  Seed: MDPRMCSLMQGSTLP
MDPRMISLMQNSTIP

SEQ ID NO: 95510 - protein, 15 aa, Artificial Sequence
  Description of Artificial Sequence: Synthetic peptide
  Seed: MDPRMCSLMQGSTLP
MDPRMISLMQNSTLP

SEQ ID NO: 95511 - protein, 15 aa, Artificial Sequence
  Description of Artificial Sequence: Synthetic peptide
  Seed: MDPRMCSLMQGSTLP
MDPRMISLMQNSTTP

SEQ ID NO: 95512 - protein, 15 aa, Artificial Sequence
  Description of Artificial Sequence: Synthetic peptide
  Seed: MDPRMCSLMQGSTLP
MDPRMISLMQNSTVP

SEQ ID NO: 95513 - protein, 15 aa, Artificial Sequence
  Description of Artificial Sequence: Synthetic peptide
  Seed: MDPRMCSLMQGSTLP
MDPRMISLMQPSTAP

SEQ ID NO: 95514 - protein, 15 aa, Artificial Sequence
  Description of Artificial Sequence: Synthetic peptide
  Seed: MDPRMCSLMQGSTLP
MDPRMISLMQPSTIP

SEQ ID NO: 95515 - protein, 15 aa, Artificial Sequence
  Description of Artificial Sequence: Synthetic peptide
  Seed: MDPRMCSLMQGSTLP
MDPRMISLMQPSTLP

SEQ ID NO: 95516 - protein, 15 aa, Artificial Sequence
  Description of Artificial Sequence: Synthetic peptide
  Seed: MDPRMCSLMQGSTLP
MDPRMISLMQPSTMP

SEQ ID NO: 95517 - protein, 15 aa, Artificial Sequence
  Description of Artificial Sequence: Synthetic peptide
  Seed: MDPRMCSLMQGSTLP
MDPRMISLMQPSTNP

SEQ ID NO: 95518 - protein, 15 aa, Artificial Sequence
  Description of Artificial Sequence: Synthetic peptide
  Seed: MDPRMCSLMQGSTLP
MDPRMISLMQPSTSP

SEQ ID NO: 95519 - protein, 15 aa, Artificial Sequence
  Description of Artificial Sequence: Synthetic peptide
  Seed: MDPRMCSLMQGSTLP
MDPRMISLMQPSTTP

SEQ ID NO: 95520 - protein, 15 aa, Artificial Sequence
  Description of Artificial Sequence: Synthetic peptide
  Seed: MDPRMCSLMQGSTLP
MDPRMISLMQPSTVP

SEQ ID NO: 95521 - protein, 15 aa, Artificial Sequence
  Description of Artificial Sequence: Synthetic peptide
  Seed: MDPRMCSLMQGSTLP
MDPRMISLMQSSTAP

SEQ ID NO: 95522 - protein, 15 aa, Artificial Sequence
  Description of Artificial Sequence: Synthetic peptide
  Seed: MDPRMCSLMQGSTLP
MDPRMISLMQSSTIP

SEQ ID NO: 95523 - protein, 15 aa, Artificial Sequence
  Description of Artificial Sequence: Synthetic peptide
  Seed: MDPRMCSLMQGSTLP
MDPRMISLMQSSTLP

SEQ ID NO: 95524 - protein, 15 aa, Artificial Sequence
  Description of Artificial Sequence: Synthetic peptide
  Seed: MDPRMCSLMQGSTLP
MDPRMISLMQSSTMP

SEQ ID NO: 95525 - protein, 15 aa, Artificial Sequence
  Description of Artificial Sequence: Synthetic peptide
  Seed: MDPRMCSLMQGSTLP
MDPRMISLMQSSTNP

SEQ ID NO: 95526 - protein, 15 aa, Artificial Sequence
  Description of Artificial Sequence: Synthetic peptide
  Seed: MDPRMCSLMQGSTLP
MDPRMISLMQSSTSP

SEQ ID NO: 95527 - protein, 15 aa, Artificial Sequence
  Description of Artificial Sequence: Synthetic peptide
  Seed: MDPRMCSLMQGSTLP
MDPRMISLMQSSTTP

SEQ ID NO: 95528 - protein, 15 aa, Artificial Sequence
  Description of Artificial Sequence: Synthetic peptide
  Seed: MDPRMCSLMQGSTLP
MDPRMISLMQSSTVP

SEQ ID NO: 95529 - protein, 15 aa, Artificial Sequence
  Description of Artificial Sequence: Synthetic peptide
  Seed: MDPRMCSLMQGSTLP
MDPRMISLMQTSTAP

SEQ ID NO: 95530 - protein, 15 aa, Artificial Sequence
  Description of Artificial Sequence: Synthetic peptide
  Seed: MDPRMCSLMQGSTLP
MDPRMISLMQTSTIP

SEQ ID NO: 95531 - protein, 15 aa, Artificial Sequence
  Description of Artificial Sequence: Synthetic peptide
  Seed: MDPRMCSLMQGSTLP
MDPRMISLMQTSTLP

SEQ ID NO: 95532 - protein, 15 aa, Artificial Sequence
  Description of Artificial Sequence: Synthetic peptide
  Seed: MDPRMCSLMQGSTLP
MDPRMISLMQTSTMP

SEQ ID NO: 95533 - protein, 15 aa, Artificial Sequence
  Description of Artificial Sequence: Synthetic peptide
  Seed: MDPRMCSLMQGSTLP
MDPRMISLMQTSTSP

SEQ ID NO: 95534 - protein, 15 aa, Artificial Sequence
  Description of Artificial Sequence: Synthetic peptide
  Seed: MDPRMCSLMQGSTLP
MDPRMISLMQTSTTP

SEQ ID NO: 95535 - protein, 15 aa, Artificial Sequence
  Description of Artificial Sequence: Synthetic peptide
  Seed: MDPRMCSLMQGSTLP
MDPRMISLMQTSTVP

SEQ ID NO: 95536 - protein, 15 aa, Artificial Sequence
  Description of Artificial Sequence: Synthetic peptide
  Seed: MDPRMCSLMQGSTLP
MDPRMISLMQVSTAP

SEQ ID NO: 95537 - protein, 15 aa, Artificial Sequence
  Description of Artificial Sequence: Synthetic peptide
  Seed: MDPRMCSLMQGSTLP
MDPRMISLMQVSTIP

SEQ ID NO: 95538 - protein, 15 aa, Artificial Sequence
  Description of Artificial Sequence: Synthetic peptide
  Seed: MDPRMCSLMQGSTLP
MDPRMISLMQVSTLP

SEQ ID NO: 95539 - protein, 15 aa, Artificial Sequence
  Description of Artificial Sequence: Synthetic peptide
  Seed: MDPRMCSLMQGSTLP
MDPRMISLMQVSTNP

SEQ ID NO: 95540 - protein, 15 aa, Artificial Sequence
  Description of Artificial Sequence: Synthetic peptide
  Seed: MDPRMCSLMQGSTLP
MDPRMISLMQVSTSP

SEQ ID NO: 95541 - protein, 15 aa, Artificial Sequence
  Description of Artificial Sequence: Synthetic peptide
  Seed: MDPRMCSLMQGSTLP
MDPRMISLMQVSTTP

SEQ ID NO: 95542 - protein, 15 aa, Artificial Sequence
  Description of Artificial Sequence: Synthetic peptide
  Seed: MDPRMCSLMQGSTLP
MDPRMISLMQVSTVP

SEQ ID NO: 95543 - protein, 15 aa, Artificial Sequence
  Description of Artificial Sequence: Synthetic peptide
  Seed: MDPRMCSLMQGSTLP
MDPRMISLQQASTAP

SEQ ID NO: 95544 - protein, 15 aa, Artificial Sequence
  Description of Artificial Sequence: Synthetic peptide
  Seed: MDPRMCSLMQGSTLP
MDPRMISLQQASTIP

SEQ ID NO: 95545 - protein, 15 aa, Artificial Sequence
  Description of Artificial Sequence: Synthetic peptide
  Seed: MDPRMCSLMQGSTLP
MDPRMISLQQASTLP

SEQ ID NO: 95546 - protein, 15 aa, Artificial Sequence
  Description of Artificial Sequence: Synthetic peptide
  Seed: MDPRMCSLMQGSTLP
MDPRMISLQQASTVP

SEQ ID NO: 95547 - protein, 15 aa, Artificial Sequence
  Description of Artificial Sequence: Synthetic peptide
  Seed: MDPRMCSLMQGSTLP
MDPRMISLQQGSTAP

SEQ ID NO: 95548 - protein, 15 aa, Artificial Sequence
  Description of Artificial Sequence: Synthetic peptide
  Seed: MDPRMCSLMQGSTLP
MDPRMISLQQGSTIP

SEQ ID NO: 95549 - protein, 15 aa, Artificial Sequence
  Description of Artificial Sequence: Synthetic peptide
  Seed: MDPRMCSLMQGSTLP
MDPRMISLQQGSTLP

SEQ ID NO: 95550 - protein, 15 aa, Artificial Sequence
  Description of Artificial Sequence: Synthetic peptide
  Seed: MDPRMCSLMQGSTLP
MDPRMISLQQGSTVP

SEQ ID NO: 95551 - protein, 15 aa, Artificial Sequence
  Description of Artificial Sequence: Synthetic peptide
  Seed: MDPRMCSLMQGSTLP
MDPRMISLQQSSTLP

SEQ ID NO: 95552 - protein, 15 aa, Artificial Sequence
  Description of Artificial Sequence: Synthetic peptide
  Seed: MDPRMCSLMQGSTLP
MDPRMISLQQSSTVP

SEQ ID NO: 95553 - protein, 15 aa, Artificial Sequence
  Description of Artificial Sequence: Synthetic peptide
  Seed: MDPRMCSLMQGSTLP
MDPRMISLSQASTLP

SEQ ID NO: 95554 - protein, 15 aa, Artificial Sequence
  Description of Artificial Sequence: Synthetic peptide
  Seed: MDPRMCSLMQGSTLP
MDPRMISLVQASTAP

SEQ ID NO: 95555 - protein, 15 aa, Artificial Sequence
  Description of Artificial Sequence: Synthetic peptide
  Seed: MDPRMCSLMQGSTLP
MDPRMISLVQASTIP

SEQ ID NO: 95556 - protein, 15 aa, Artificial Sequence
  Description of Artificial Sequence: Synthetic peptide
  Seed: MDPRMCSLMQGSTLP
MDPRMISLVQASTLP

SEQ ID NO: 95557 - protein, 15 aa, Artificial Sequence
  Description of Artificial Sequence: Synthetic peptide
  Seed: MDPRMCSLMQGSTLP
MDPRMISLVQASTVP

SEQ ID NO: 95558 - protein, 15 aa, Artificial Sequence
  Description of Artificial Sequence: Synthetic peptide
  Seed: MDPRMCSLMQGSTLP
MDPRMISLVQGSTAP

SEQ ID NO: 95559 - protein, 15 aa, Artificial Sequence
  Description of Artificial Sequence: Synthetic peptide
  Seed: MDPRMCSLMQGSTLP
MDPRMISLVQGSTIP

SEQ ID NO: 95560 - protein, 15 aa, Artificial Sequence
  Description of Artificial Sequence: Synthetic peptide
  Seed: MDPRMCSLMQGSTLP
MDPRMISLVQGSTLP

SEQ ID NO: 95561 - protein, 15 aa, Artificial Sequence
  Description of Artificial Sequence: Synthetic peptide
  Seed: MDPRMCSLMQGSTLP
MDPRMISLVQGSTVP

SEQ ID NO: 95562 - protein, 15 aa, Artificial Sequence
  Description of Artificial Sequence: Synthetic peptide
  Seed: MDPRMCSLMQGSTLP
MDPRMISLVQSSTLP

SEQ ID NO: 95563 - protein, 15 aa, Artificial Sequence
  Description of Artificial Sequence: Synthetic peptide
  Seed: MDPRMCSLMQGSTLP
MDPRMISLVQSSTVP

SEQ ID NO: 95564 - protein, 15 aa, Artificial Sequence
  Description of Artificial Sequence: Synthetic peptide
  Seed: MDPRMCSLMQGSTLP
MDPRMLSLAQASTAP

SEQ ID NO: 95565 - protein, 15 aa, Artificial Sequence
  Description of Artificial Sequence: Synthetic peptide
  Seed: MDPRMCSLMQGSTLP
MDPRMLSLAQASTIP

SEQ ID NO: 95566 - protein, 15 aa, Artificial Sequence
  Description of Artificial Sequence: Synthetic peptide
  Seed: MDPRMCSLMQGSTLP
MDPRMLSLAQASTLP

SEQ ID NO: 95567 - protein, 15 aa, Artificial Sequence
  Description of Artificial Sequence: Synthetic peptide
  Seed: MDPRMCSLMQGSTLP
MDPRMLSLAQASTMP

SEQ ID NO: 95568 - protein, 15 aa, Artificial Sequence
  Description of Artificial Sequence: Synthetic peptide
  Seed: MDPRMCSLMQGSTLP
MDPRMLSLAQASTVP

SEQ ID NO: 95569 - protein, 15 aa, Artificial Sequence
  Description of Artificial Sequence: Synthetic peptide
  Seed: MDPRMCSLMQGSTLP
MDPRMLSLAQGSTLP

SEQ ID NO: 95570 - protein, 15 aa, Artificial Sequence
  Description of Artificial Sequence: Synthetic peptide
  Seed: MDPRMCSLMQGSTLP
MDPRMLSLAQGSTVP

SEQ ID NO: 95571 - protein, 15 aa, Artificial Sequence
  Description of Artificial Sequence: Synthetic peptide
  Seed: MDPRMCSLMQGSTLP
MDPRMLSLAQSSTLP

SEQ ID NO: 95572 - protein, 15 aa, Artificial Sequence
  Description of Artificial Sequence: Synthetic peptide
  Seed: MDPRMCSLMQGSTLP
MDPRMLSLIQASTAP

SEQ ID NO: 95573 - protein, 15 aa, Artificial Sequence
  Description of Artificial Sequence: Synthetic peptide
  Seed: MDPRMCSLMQGSTLP
MDPRMLSLIQASTIP

SEQ ID NO: 95574 - protein, 15 aa, Artificial Sequence
  Description of Artificial Sequence: Synthetic peptide
  Seed: MDPRMCSLMQGSTLP
MDPRMLSLIQASTLP

SEQ ID NO: 95575 - protein, 15 aa, Artificial Sequence
  Description of Artificial Sequence: Synthetic peptide
  Seed: MDPRMCSLMQGSTLP
MDPRMLSLIQASTMP

SEQ ID NO: 95576 - protein, 15 aa, Artificial Sequence
  Description of Artificial Sequence: Synthetic peptide
  Seed: MDPRMCSLMQGSTLP
MDPRMLSLIQASTNP

SEQ ID NO: 95577 - protein, 15 aa, Artificial Sequence
  Description of Artificial Sequence: Synthetic peptide
  Seed: MDPRMCSLMQGSTLP
MDPRMLSLIQASTSP

SEQ ID NO: 95578 - protein, 15 aa, Artificial Sequence
  Description of Artificial Sequence: Synthetic peptide
  Seed: MDPRMCSLMQGSTLP
MDPRMLSLIQASTTP

SEQ ID NO: 95579 - protein, 15 aa, Artificial Sequence
  Description of Artificial Sequence: Synthetic peptide
  Seed: MDPRMCSLMQGSTLP
MDPRMLSLIQASTVP

SEQ ID NO: 95580 - protein, 15 aa, Artificial Sequence
  Description of Artificial Sequence: Synthetic peptide
  Seed: MDPRMCSLMQGSTLP
MDPRMLSLIQGSTAP

SEQ ID NO: 95581 - protein, 15 aa, Artificial Sequence
  Description of Artificial Sequence: Synthetic peptide
  Seed: MDPRMCSLMQGSTLP
MDPRMLSLIQGSTIP

SEQ ID NO: 95582 - protein, 15 aa, Artificial Sequence
  Description of Artificial Sequence: Synthetic peptide
  Seed: MDPRMCSLMQGSTLP
MDPRMLSLIQGSTLP

SEQ ID NO: 95583 - protein, 15 aa, Artificial Sequence
  Description of Artificial Sequence: Synthetic peptide
  Seed: MDPRMCSLMQGSTLP
MDPRMLSLIQGSTVP

SEQ ID NO: 95584 - protein, 15 aa, Artificial Sequence
  Description of Artificial Sequence: Synthetic peptide
  Seed: MDPRMCSLMQGSTLP
MDPRMLSLIQPSTIP

SEQ ID NO: 95585 - protein, 15 aa, Artificial Sequence
  Description of Artificial Sequence: Synthetic peptide
  Seed: MDPRMCSLMQGSTLP
MDPRMLSLIQPSTLP

SEQ ID NO: 95586 - protein, 15 aa, Artificial Sequence
  Description of Artificial Sequence: Synthetic peptide
  Seed: MDPRMCSLMQGSTLP
MDPRMLSLIQPSTVP

SEQ ID NO: 95587 - protein, 15 aa, Artificial Sequence
  Description of Artificial Sequence: Synthetic peptide
  Seed: MDPRMCSLMQGSTLP
MDPRMLSLIQSSTAP

SEQ ID NO: 95588 - protein, 15 aa, Artificial Sequence
  Description of Artificial Sequence: Synthetic peptide
  Seed: MDPRMCSLMQGSTLP
MDPRMLSLIQSSTIP

SEQ ID NO: 95589 - protein, 15 aa, Artificial Sequence
  Description of Artificial Sequence: Synthetic peptide
  Seed: MDPRMCSLMQGSTLP
MDPRMLSLIQSSTLP

SEQ ID NO: 95590 - protein, 15 aa, Artificial Sequence
  Description of Artificial Sequence: Synthetic peptide
  Seed: MDPRMCSLMQGSTLP
MDPRMLSLIQSSTVP

SEQ ID NO: 95591 - protein, 15 aa, Artificial Sequence
  Description of Artificial Sequence: Synthetic peptide
  Seed: MDPRMCSLMQGSTLP
MDPRMLSLLQASTAP

SEQ ID NO: 95592 - protein, 15 aa, Artificial Sequence
  Description of Artificial Sequence: Synthetic peptide
  Seed: MDPRMCSLMQGSTLP
MDPRMLSLLQASTGP

SEQ ID NO: 95593 - protein, 15 aa, Artificial Sequence
  Description of Artificial Sequence: Synthetic peptide
  Seed: MDPRMCSLMQGSTLP
MDPRMLSLLQASTIP

SEQ ID NO: 95594 - protein, 15 aa, Artificial Sequence
  Description of Artificial Sequence: Synthetic peptide
  Seed: MDPRMCSLMQGSTLP
MDPRMLSLLQASTLP

SEQ ID NO: 95595 - protein, 15 aa, Artificial Sequence
  Description of Artificial Sequence: Synthetic peptide
  Seed: MDPRMCSLMQGSTLP
MDPRMLSLLQASTMP

SEQ ID NO: 95596 - protein, 15 aa, Artificial Sequence
  Description of Artificial Sequence: Synthetic peptide
  Seed: MDPRMCSLMQGSTLP
MDPRMLSLLQASTNP

SEQ ID NO: 95597 - protein, 15 aa, Artificial Sequence
  Description of Artificial Sequence: Synthetic peptide
  Seed: MDPRMCSLMQGSTLP
MDPRMLSLLQASTSP

SEQ ID NO: 95598 - protein, 15 aa, Artificial Sequence
  Description of Artificial Sequence: Synthetic peptide
  Seed: MDPRMCSLMQGSTLP
MDPRMLSLLQASTTP

SEQ ID NO: 95599 - protein, 15 aa, Artificial Sequence
  Description of Artificial Sequence: Synthetic peptide
  Seed: MDPRMCSLMQGSTLP
MDPRMLSLLQASTVP

SEQ ID NO: 95600 - protein, 15 aa, Artificial Sequence
  Description of Artificial Sequence: Synthetic peptide
  Seed: MDPRMCSLMQGSTLP
MDPRMLSLLQGSTAP

SEQ ID NO: 95601 - protein, 15 aa, Artificial Sequence
  Description of Artificial Sequence: Synthetic peptide
  Seed: MDPRMCSLMQGSTLP
MDPRMLSLLQGSTGP

SEQ ID NO: 95602 - protein, 15 aa, Artificial Sequence
  Description of Artificial Sequence: Synthetic peptide
  Seed: MDPRMCSLMQGSTLP
MDPRMLSLLQGSTIP

SEQ ID NO: 95603 - protein, 15 aa, Artificial Sequence
  Description of Artificial Sequence: Synthetic peptide
  Seed: MDPRMCSLMQGSTLP
MDPRMLSLLQGSTLP

SEQ ID NO: 95604 - protein, 15 aa, Artificial Sequence
  Description of Artificial Sequence: Synthetic peptide
  Seed: MDPRMCSLMQGSTLP
MDPRMLSLLQGSTMP

SEQ ID NO: 95605 - protein, 15 aa, Artificial Sequence
  Description of Artificial Sequence: Synthetic peptide
  Seed: MDPRMCSLMQGSTLP
MDPRMLSLLQGSTSP

SEQ ID NO: 95606 - protein, 15 aa, Artificial Sequence
  Description of Artificial Sequence: Synthetic peptide
  Seed: MDPRMCSLMQGSTLP
MDPRMLSLLQGSTTP

SEQ ID NO: 95607 - protein, 15 aa, Artificial Sequence
  Description of Artificial Sequence: Synthetic peptide
  Seed: MDPRMCSLMQGSTLP
MDPRMLSLLQGSTVP

SEQ ID NO: 95608 - protein, 15 aa, Artificial Sequence
  Description of Artificial Sequence: Synthetic peptide
  Seed: MDPRMCSLMQGSTLP
MDPRMLSLLQISTAP

SEQ ID NO: 95609 - protein, 15 aa, Artificial Sequence
  Description of Artificial Sequence: Synthetic peptide
  Seed: MDPRMCSLMQGSTLP
MDPRMLSLLQISTSP

SEQ ID NO: 95610 - protein, 15 aa, Artificial Sequence
  Description of Artificial Sequence: Synthetic peptide
  Seed: MDPRMCSLMQGSTLP
MDPRMLSLLQNSTAP

SEQ ID NO: 95611 - protein, 15 aa, Artificial Sequence
  Description of Artificial Sequence: Synthetic peptide
  Seed: MDPRMCSLMQGSTLP
MDPRMLSLLQNSTIP

SEQ ID NO: 95612 - protein, 15 aa, Artificial Sequence
  Description of Artificial Sequence: Synthetic peptide
  Seed: MDPRMCSLMQGSTLP
MDPRMLSLLQNSTLP

SEQ ID NO: 95613 - protein, 15 aa, Artificial Sequence
  Description of Artificial Sequence: Synthetic peptide
  Seed: MDPRMCSLMQGSTLP
MDPRMLSLLQNSTVP

SEQ ID NO: 95614 - protein, 15 aa, Artificial Sequence
  Description of Artificial Sequence: Synthetic peptide
  Seed: MDPRMCSLMQGSTLP
MDPRMLSLLQPSTAP

SEQ ID NO: 95615 - protein, 15 aa, Artificial Sequence
  Description of Artificial Sequence: Synthetic peptide
  Seed: MDPRMCSLMQGSTLP
MDPRMLSLLQPSTIP

SEQ ID NO: 95616 - protein, 15 aa, Artificial Sequence
  Description of Artificial Sequence: Synthetic peptide
  Seed: MDPRMCSLMQGSTLP
MDPRMLSLLQPSTLP

SEQ ID NO: 95617 - protein, 15 aa, Artificial Sequence
  Description of Artificial Sequence: Synthetic peptide
  Seed: MDPRMCSLMQGSTLP
MDPRMLSLLQPSTMP

SEQ ID NO: 95618 - protein, 15 aa, Artificial Sequence
  Description of Artificial Sequence: Synthetic peptide
  Seed: MDPRMCSLMQGSTLP
MDPRMLSLLQPSTNP

SEQ ID NO: 95619 - protein, 15 aa, Artificial Sequence
  Description of Artificial Sequence: Synthetic peptide
  Seed: MDPRMCSLMQGSTLP
MDPRMLSLLQPSTSP

SEQ ID NO: 95620 - protein, 15 aa, Artificial Sequence
  Description of Artificial Sequence: Synthetic peptide
  Seed: MDPRMCSLMQGSTLP
MDPRMLSLLQPSTTP

SEQ ID NO: 95621 - protein, 15 aa, Artificial Sequence
  Description of Artificial Sequence: Synthetic peptide
  Seed: MDPRMCSLMQGSTLP
MDPRMLSLLQPSTVP

SEQ ID NO: 95622 - protein, 15 aa, Artificial Sequence
  Description of Artificial Sequence: Synthetic peptide
  Seed: MDPRMCSLMQGSTLP
MDPRMLSLLQSSTAP

SEQ ID NO: 95623 - protein, 15 aa, Artificial Sequence
  Description of Artificial Sequence: Synthetic peptide
  Seed: MDPRMCSLMQGSTLP
MDPRMLSLLQSSTIP

SEQ ID NO: 95624 - protein, 15 aa, Artificial Sequence
  Description of Artificial Sequence: Synthetic peptide
  Seed: MDPRMCSLMQGSTLP
MDPRMLSLLQSSTLP

SEQ ID NO: 95625 - protein, 15 aa, Artificial Sequence
  Description of Artificial Sequence: Synthetic peptide
  Seed: MDPRMCSLMQGSTLP
MDPRMLSLLQSSTMP

SEQ ID NO: 95626 - protein, 15 aa, Artificial Sequence
  Description of Artificial Sequence: Synthetic peptide
  Seed: MDPRMCSLMQGSTLP
MDPRMLSLLQSSTNP

SEQ ID NO: 95627 - protein, 15 aa, Artificial Sequence
  Description of Artificial Sequence: Synthetic peptide
  Seed: MDPRMCSLMQGSTLP
MDPRMLSLLQSSTSP

SEQ ID NO: 95628 - protein, 15 aa, Artificial Sequence
  Description of Artificial Sequence: Synthetic peptide
  Seed: MDPRMCSLMQGSTLP
MDPRMLSLLQSSTTP

SEQ ID NO: 95629 - protein, 15 aa, Artificial Sequence
  Description of Artificial Sequence: Synthetic peptide
  Seed: MDPRMCSLMQGSTLP
MDPRMLSLLQSSTVP

SEQ ID NO: 95630 - protein, 15 aa, Artificial Sequence
  Description of Artificial Sequence: Synthetic peptide
  Seed: MDPRMCSLMQGSTLP
MDPRMLSLLQTSTAP

SEQ ID NO: 95631 - protein, 15 aa, Artificial Sequence
  Description of Artificial Sequence: Synthetic peptide
  Seed: MDPRMCSLMQGSTLP
MDPRMLSLLQTSTIP

SEQ ID NO: 95632 - protein, 15 aa, Artificial Sequence
  Description of Artificial Sequence: Synthetic peptide
  Seed: MDPRMCSLMQGSTLP
MDPRMLSLLQTSTLP

SEQ ID NO: 95633 - protein, 15 aa, Artificial Sequence
  Description of Artificial Sequence: Synthetic peptide
  Seed: MDPRMCSLMQGSTLP
MDPRMLSLLQTSTNP

SEQ ID NO: 95634 - protein, 15 aa, Artificial Sequence
  Description of Artificial Sequence: Synthetic peptide
  Seed: MDPRMCSLMQGSTLP
MDPRMLSLLQTSTSP

SEQ ID NO: 95635 - protein, 15 aa, Artificial Sequence
  Description of Artificial Sequence: Synthetic peptide
  Seed: MDPRMCSLMQGSTLP
MDPRMLSLLQTSTVP

SEQ ID NO: 95636 - protein, 15 aa, Artificial Sequence
  Description of Artificial Sequence: Synthetic peptide
  Seed: MDPRMCSLMQGSTLP
MDPRMLSLLQVSTAP

SEQ ID NO: 95637 - protein, 15 aa, Artificial Sequence
  Description of Artificial Sequence: Synthetic peptide
  Seed: MDPRMCSLMQGSTLP
MDPRMLSLLQVSTLP

SEQ ID NO: 95638 - protein, 15 aa, Artificial Sequence
  Description of Artificial Sequence: Synthetic peptide
  Seed: MDPRMCSLMQGSTLP
MDPRMLSLLQVSTNP

SEQ ID NO: 95639 - protein, 15 aa, Artificial Sequence
  Description of Artificial Sequence: Synthetic peptide
  Seed: MDPRMCSLMQGSTLP
MDPRMLSLLQVSTSP

SEQ ID NO: 95640 - protein, 15 aa, Artificial Sequence
  Description of Artificial Sequence: Synthetic peptide
  Seed: MDPRMCSLMQGSTLP
MDPRMLSLLQVSTVP

SEQ ID NO: 95641 - protein, 15 aa, Artificial Sequence
  Description of Artificial Sequence: Synthetic peptide
  Seed: MDPRMCSLMQGSTLP
MDPRMLSLMQASTAP

SEQ ID NO: 95642 - protein, 15 aa, Artificial Sequence
  Description of Artificial Sequence: Synthetic peptide
  Seed: MDPRMCSLMQGSTLP
MDPRMLSLMQASTGP

SEQ ID NO: 95643 - protein, 15 aa, Artificial Sequence
  Description of Artificial Sequence: Synthetic peptide
  Seed: MDPRMCSLMQGSTLP
MDPRMLSLMQASTIP

SEQ ID NO: 95644 - protein, 15 aa, Artificial Sequence
  Description of Artificial Sequence: Synthetic peptide
  Seed: MDPRMCSLMQGSTLP
MDPRMLSLMQASTLP

SEQ ID NO: 95645 - protein, 15 aa, Artificial Sequence
  Description of Artificial Sequence: Synthetic peptide
  Seed: MDPRMCSLMQGSTLP
MDPRMLSLMQASTMP

SEQ ID NO: 95646 - protein, 15 aa, Artificial Sequence
  Description of Artificial Sequence: Synthetic peptide
  Seed: MDPRMCSLMQGSTLP
MDPRMLSLMQASTNP

SEQ ID NO: 95647 - protein, 15 aa, Artificial Sequence
  Description of Artificial Sequence: Synthetic peptide
  Seed: MDPRMCSLMQGSTLP
MDPRMLSLMQASTSP

SEQ ID NO: 95648 - protein, 15 aa, Artificial Sequence
  Description of Artificial Sequence: Synthetic peptide
  Seed: MDPRMCSLMQGSTLP
MDPRMLSLMQASTTP

SEQ ID NO: 95649 - protein, 15 aa, Artificial Sequence
  Description of Artificial Sequence: Synthetic peptide
  Seed: MDPRMCSLMQGSTLP
MDPRMLSLMQASTVP

SEQ ID NO: 95650 - protein, 15 aa, Artificial Sequence
  Description of Artificial Sequence: Synthetic peptide
  Seed: MDPRMCSLMQGSTLP
MDPRMLSLMQGSTAP

SEQ ID NO: 95651 - protein, 15 aa, Artificial Sequence
  Description of Artificial Sequence: Synthetic peptide
  Seed: MDPRMCSLMQGSTLP
MDPRMLSLMQGSTGP

SEQ ID NO: 95652 - protein, 15 aa, Artificial Sequence
  Description of Artificial Sequence: Synthetic peptide
  Seed: MDPRMCSLMQGSTLP
MDPRMLSLMQGSTIP

SEQ ID NO: 95653 - protein, 15 aa, Artificial Sequence
  Description of Artificial Sequence: Synthetic peptide
  Seed: MDPRMCSLMQGSTLP
MDPRMLSLMQGSTLP

SEQ ID NO: 95654 - protein, 15 aa, Artificial Sequence
  Description of Artificial Sequence: Synthetic peptide
  Seed: MDPRMCSLMQGSTLP
MDPRMLSLMQGSTMP

SEQ ID NO: 95655 - protein, 15 aa, Artificial Sequence
  Description of Artificial Sequence: Synthetic peptide
  Seed: MDPRMCSLMQGSTLP
MDPRMLSLMQGSTSP

SEQ ID NO: 95656 - protein, 15 aa, Artificial Sequence
  Description of Artificial Sequence: Synthetic peptide
  Seed: MDPRMCSLMQGSTLP
MDPRMLSLMQGSTTP

SEQ ID NO: 95657 - protein, 15 aa, Artificial Sequence
  Description of Artificial Sequence: Synthetic peptide
  Seed: MDPRMCSLMQGSTLP
MDPRMLSLMQGSTVP

SEQ ID NO: 95658 - protein, 15 aa, Artificial Sequence
  Description of Artificial Sequence: Synthetic peptide
  Seed: MDPRMCSLMQGSTLP
MDPRMLSLMQISTAP

SEQ ID NO: 95659 - protein, 15 aa, Artificial Sequence
  Description of Artificial Sequence: Synthetic peptide
  Seed: MDPRMCSLMQGSTLP
MDPRMLSLMQISTSP

SEQ ID NO: 95660 - protein, 15 aa, Artificial Sequence
  Description of Artificial Sequence: Synthetic peptide
  Seed: MDPRMCSLMQGSTLP
MDPRMLSLMQNSTAP

SEQ ID NO: 95661 - protein, 15 aa, Artificial Sequence
  Description of Artificial Sequence: Synthetic peptide
  Seed: MDPRMCSLMQGSTLP
MDPRMLSLMQNSTIP

SEQ ID NO: 95662 - protein, 15 aa, Artificial Sequence
  Description of Artificial Sequence: Synthetic peptide
  Seed: MDPRMCSLMQGSTLP
MDPRMLSLMQNSTLP

SEQ ID NO: 95663 - protein, 15 aa, Artificial Sequence
  Description of Artificial Sequence: Synthetic peptide
  Seed: MDPRMCSLMQGSTLP
MDPRMLSLMQNSTVP

SEQ ID NO: 95664 - protein, 15 aa, Artificial Sequence
  Description of Artificial Sequence: Synthetic peptide
  Seed: MDPRMCSLMQGSTLP
MDPRMLSLMQPSTAP

SEQ ID NO: 95665 - protein, 15 aa, Artificial Sequence
  Description of Artificial Sequence: Synthetic peptide
  Seed: MDPRMCSLMQGSTLP
MDPRMLSLMQPSTIP

SEQ ID NO: 95666 - protein, 15 aa, Artificial Sequence
  Description of Artificial Sequence: Synthetic peptide
  Seed: MDPRMCSLMQGSTLP
MDPRMLSLMQPSTLP

SEQ ID NO: 95667 - protein, 15 aa, Artificial Sequence
  Description of Artificial Sequence: Synthetic peptide
  Seed: MDPRMCSLMQGSTLP
MDPRMLSLMQPSTMP

SEQ ID NO: 95668 - protein, 15 aa, Artificial Sequence
  Description of Artificial Sequence: Synthetic peptide
  Seed: MDPRMCSLMQGSTLP
MDPRMLSLMQPSTNP

SEQ ID NO: 95669 - protein, 15 aa, Artificial Sequence
  Description of Artificial Sequence: Synthetic peptide
  Seed: MDPRMCSLMQGSTLP
MDPRMLSLMQPSTSP

SEQ ID NO: 95670 - protein, 15 aa, Artificial Sequence
  Description of Artificial Sequence: Synthetic peptide
  Seed: MDPRMCSLMQGSTLP
MDPRMLSLMQPSTTP

SEQ ID NO: 95671 - protein, 15 aa, Artificial Sequence
  Description of Artificial Sequence: Synthetic peptide
  Seed: MDPRMCSLMQGSTLP
MDPRMLSLMQPSTVP

SEQ ID NO: 95672 - protein, 15 aa, Artificial Sequence
  Description of Artificial Sequence: Synthetic peptide
  Seed: MDPRMCSLMQGSTLP
MDPRMLSLMQSSTAP

SEQ ID NO: 95673 - protein, 15 aa, Artificial Sequence
  Description of Artificial Sequence: Synthetic peptide
  Seed: MDPRMCSLMQGSTLP
MDPRMLSLMQSSTIP

SEQ ID NO: 95674 - protein, 15 aa, Artificial Sequence
  Description of Artificial Sequence: Synthetic peptide
  Seed: MDPRMCSLMQGSTLP
MDPRMLSLMQSSTLP

SEQ ID NO: 95675 - protein, 15 aa, Artificial Sequence
  Description of Artificial Sequence: Synthetic peptide
  Seed: MDPRMCSLMQGSTLP
MDPRMLSLMQSSTMP

SEQ ID NO: 95676 - protein, 15 aa, Artificial Sequence
  Description of Artificial Sequence: Synthetic peptide
  Seed: MDPRMCSLMQGSTLP
MDPRMLSLMQSSTNP

SEQ ID NO: 95677 - protein, 15 aa, Artificial Sequence
  Description of Artificial Sequence: Synthetic peptide
  Seed: MDPRMCSLMQGSTLP
MDPRMLSLMQSSTSP

SEQ ID NO: 95678 - protein, 15 aa, Artificial Sequence
  Description of Artificial Sequence: Synthetic peptide
  Seed: MDPRMCSLMQGSTLP
MDPRMLSLMQSSTTP

SEQ ID NO: 95679 - protein, 15 aa, Artificial Sequence
  Description of Artificial Sequence: Synthetic peptide
  Seed: MDPRMCSLMQGSTLP
MDPRMLSLMQSSTVP

SEQ ID NO: 95680 - protein, 15 aa, Artificial Sequence
  Description of Artificial Sequence: Synthetic peptide
  Seed: MDPRMCSLMQGSTLP
MDPRMLSLMQTSTAP

SEQ ID NO: 95681 - protein, 15 aa, Artificial Sequence
  Description of Artificial Sequence: Synthetic peptide
  Seed: MDPRMCSLMQGSTLP
MDPRMLSLMQTSTIP

SEQ ID NO: 95682 - protein, 15 aa, Artificial Sequence
  Description of Artificial Sequence: Synthetic peptide
  Seed: MDPRMCSLMQGSTLP
MDPRMLSLMQTSTLP

SEQ ID NO: 95683 - protein, 15 aa, Artificial Sequence
  Description of Artificial Sequence: Synthetic peptide
  Seed: MDPRMCSLMQGSTLP
MDPRMLSLMQTSTNP

SEQ ID NO: 95684 - protein, 15 aa, Artificial Sequence
  Description of Artificial Sequence: Synthetic peptide
  Seed: MDPRMCSLMQGSTLP
MDPRMLSLMQTSTSP

SEQ ID NO: 95685 - protein, 15 aa, Artificial Sequence
  Description of Artificial Sequence: Synthetic peptide
  Seed: MDPRMCSLMQGSTLP
MDPRMLSLMQTSTVP

SEQ ID NO: 95686 - protein, 15 aa, Artificial Sequence
  Description of Artificial Sequence: Synthetic peptide
  Seed: MDPRMCSLMQGSTLP
MDPRMLSLMQVSTAP

SEQ ID NO: 95687 - protein, 15 aa, Artificial Sequence
  Description of Artificial Sequence: Synthetic peptide
  Seed: MDPRMCSLMQGSTLP
MDPRMLSLMQVSTLP

SEQ ID NO: 95688 - protein, 15 aa, Artificial Sequence
  Description of Artificial Sequence: Synthetic peptide
  Seed: MDPRMCSLMQGSTLP
MDPRMLSLMQVSTNP

SEQ ID NO: 95689 - protein, 15 aa, Artificial Sequence
  Description of Artificial Sequence: Synthetic peptide
  Seed: MDPRMCSLMQGSTLP
MDPRMLSLMQVSTSP

SEQ ID NO: 95690 - protein, 15 aa, Artificial Sequence
  Description of Artificial Sequence: Synthetic peptide
  Seed: MDPRMCSLMQGSTLP
MDPRMLSLMQVSTTP

SEQ ID NO: 95691 - protein, 15 aa, Artificial Sequence
  Description of Artificial Sequence: Synthetic peptide
  Seed: MDPRMCSLMQGSTLP
MDPRMLSLMQVSTVP

SEQ ID NO: 95692 - protein, 15 aa, Artificial Sequence
  Description of Artificial Sequence: Synthetic peptide
  Seed: MDPRMCSLMQGSTLP
MDPRMLSLQQASTAP

SEQ ID NO: 95693 - protein, 15 aa, Artificial Sequence
  Description of Artificial Sequence: Synthetic peptide
  Seed: MDPRMCSLMQGSTLP
MDPRMLSLQQASTIP

SEQ ID NO: 95694 - protein, 15 aa, Artificial Sequence
  Description of Artificial Sequence: Synthetic peptide
  Seed: MDPRMCSLMQGSTLP
MDPRMLSLQQASTLP

SEQ ID NO: 95695 - protein, 15 aa, Artificial Sequence
  Description of Artificial Sequence: Synthetic peptide
  Seed: MDPRMCSLMQGSTLP
MDPRMLSLQQASTVP

SEQ ID NO: 95696 - protein, 15 aa, Artificial Sequence
  Description of Artificial Sequence: Synthetic peptide
  Seed: MDPRMCSLMQGSTLP
MDPRMLSLQQGSTLP

SEQ ID NO: 95697 - protein, 15 aa, Artificial Sequence
  Description of Artificial Sequence: Synthetic peptide
  Seed: MDPRMCSLMQGSTLP
MDPRMLSLQQGSTVP

SEQ ID NO: 95698 - protein, 15 aa, Artificial Sequence
  Description of Artificial Sequence: Synthetic peptide
  Seed: MDPRMCSLMQGSTLP
MDPRMLSLVQASTIP

SEQ ID NO: 95699 - protein, 15 aa, Artificial Sequence
  Description of Artificial Sequence: Synthetic peptide
  Seed: MDPRMCSLMQGSTLP
MDPRMLSLVQASTLP

SEQ ID NO: 95700 - protein, 15 aa, Artificial Sequence
  Description of Artificial Sequence: Synthetic peptide
  Seed: MDPRMCSLMQGSTLP
MDPRMLSLVQASTVP

SEQ ID NO: 95701 - protein, 15 aa, Artificial Sequence
  Description of Artificial Sequence: Synthetic peptide
  Seed: MDPRMCSLMQGSTLP
MDPRMLSLVQGSTLP

SEQ ID NO: 95702 - protein, 15 aa, Artificial Sequence
  Description of Artificial Sequence: Synthetic peptide
  Seed: MDPRMCSLMQGSTLP
MDPRMLSLVQGSTVP

SEQ ID NO: 95703 - protein, 15 aa, Artificial Sequence
  Description of Artificial Sequence: Synthetic peptide
  Seed: MDPRMCSLMQGSTLP
MDPRMMSLAQASTLP

SEQ ID NO: 95704 - protein, 15 aa, Artificial Sequence
  Description of Artificial Sequence: Synthetic peptide
  Seed: MDPRMCSLMQGSTLP
MDPRMMSLIQASTAP

SEQ ID NO: 95705 - protein, 15 aa, Artificial Sequence
  Description of Artificial Sequence: Synthetic peptide
  Seed: MDPRMCSLMQGSTLP
MDPRMMSLIQASTIP

SEQ ID NO: 95706 - protein, 15 aa, Artificial Sequence
  Description of Artificial Sequence: Synthetic peptide
  Seed: MDPRMCSLMQGSTLP
MDPRMMSLIQASTLP

SEQ ID NO: 95707 - protein, 15 aa, Artificial Sequence
  Description of Artificial Sequence: Synthetic peptide
  Seed: MDPRMCSLMQGSTLP
MDPRMMSLIQASTVP

SEQ ID NO: 95708 - protein, 15 aa, Artificial Sequence
  Description of Artificial Sequence: Synthetic peptide
  Seed: MDPRMCSLMQGSTLP
MDPRMMSLIQGSTLP

SEQ ID NO: 95709 - protein, 15 aa, Artificial Sequence
  Description of Artificial Sequence: Synthetic peptide
  Seed: MDPRMCSLMQGSTLP
MDPRMMSLIQGSTVP

SEQ ID NO: 95710 - protein, 15 aa, Artificial Sequence
  Description of Artificial Sequence: Synthetic peptide
  Seed: MDPRMCSLMQGSTLP
MDPRMMSLLQASTAP

SEQ ID NO: 95711 - protein, 15 aa, Artificial Sequence
  Description of Artificial Sequence: Synthetic peptide
  Seed: MDPRMCSLMQGSTLP
MDPRMMSLLQASTIP

SEQ ID NO: 95712 - protein, 15 aa, Artificial Sequence
  Description of Artificial Sequence: Synthetic peptide
  Seed: MDPRMCSLMQGSTLP
MDPRMMSLLQASTLP

SEQ ID NO: 95713 - protein, 15 aa, Artificial Sequence
  Description of Artificial Sequence: Synthetic peptide
  Seed: MDPRMCSLMQGSTLP
MDPRMMSLLQASTMP

SEQ ID NO: 95714 - protein, 15 aa, Artificial Sequence
  Description of Artificial Sequence: Synthetic peptide
  Seed: MDPRMCSLMQGSTLP
MDPRMMSLLQASTNP

SEQ ID NO: 95715 - protein, 15 aa, Artificial Sequence
  Description of Artificial Sequence: Synthetic peptide
  Seed: MDPRMCSLMQGSTLP
MDPRMMSLLQASTSP

SEQ ID NO: 95716 - protein, 15 aa, Artificial Sequence
  Description of Artificial Sequence: Synthetic peptide
  Seed: MDPRMCSLMQGSTLP
MDPRMMSLLQASTTP

SEQ ID NO: 95717 - protein, 15 aa, Artificial Sequence
  Description of Artificial Sequence: Synthetic peptide
  Seed: MDPRMCSLMQGSTLP
MDPRMMSLLQASTVP

SEQ ID NO: 95718 - protein, 15 aa, Artificial Sequence
  Description of Artificial Sequence: Synthetic peptide
  Seed: MDPRMCSLMQGSTLP
MDPRMMSLLQGSTAP

SEQ ID NO: 95719 - protein, 15 aa, Artificial Sequence
  Description of Artificial Sequence: Synthetic peptide
  Seed: MDPRMCSLMQGSTLP
MDPRMMSLLQGSTIP

SEQ ID NO: 95720 - protein, 15 aa, Artificial Sequence
  Description of Artificial Sequence: Synthetic peptide
  Seed: MDPRMCSLMQGSTLP
MDPRMMSLLQGSTLP

SEQ ID NO: 95721 - protein, 15 aa, Artificial Sequence
  Description of Artificial Sequence: Synthetic peptide
  Seed: MDPRMCSLMQGSTLP
MDPRMMSLLQGSTMP

SEQ ID NO: 95722 - protein, 15 aa, Artificial Sequence
  Description of Artificial Sequence: Synthetic peptide
  Seed: MDPRMCSLMQGSTLP
MDPRMMSLLQGSTSP

SEQ ID NO: 95723 - protein, 15 aa, Artificial Sequence
  Description of Artificial Sequence: Synthetic peptide
  Seed: MDPRMCSLMQGSTLP
MDPRMMSLLQGSTTP

SEQ ID NO: 95724 - protein, 15 aa, Artificial Sequence
  Description of Artificial Sequence: Synthetic peptide
  Seed: MDPRMCSLMQGSTLP
MDPRMMSLLQGSTVP

SEQ ID NO: 95725 - protein, 15 aa, Artificial Sequence
  Description of Artificial Sequence: Synthetic peptide
  Seed: MDPRMCSLMQGSTLP
MDPRMMSLLQPSTAP

SEQ ID NO: 95726 - protein, 15 aa, Artificial Sequence
  Description of Artificial Sequence: Synthetic peptide
  Seed: MDPRMCSLMQGSTLP
MDPRMMSLLQPSTIP

SEQ ID NO: 95727 - protein, 15 aa, Artificial Sequence
  Description of Artificial Sequence: Synthetic peptide
  Seed: MDPRMCSLMQGSTLP
MDPRMMSLLQPSTLP

SEQ ID NO: 95728 - protein, 15 aa, Artificial Sequence
  Description of Artificial Sequence: Synthetic peptide
  Seed: MDPRMCSLMQGSTLP
MDPRMMSLLQPSTVP

SEQ ID NO: 95729 - protein, 15 aa, Artificial Sequence
  Description of Artificial Sequence: Synthetic peptide
  Seed: MDPRMCSLMQGSTLP
MDPRMMSLLQSSTAP

SEQ ID NO: 95730 - protein, 15 aa, Artificial Sequence
  Description of Artificial Sequence: Synthetic peptide
  Seed: MDPRMCSLMQGSTLP
MDPRMMSLLQSSTIP

SEQ ID NO: 95731 - protein, 15 aa, Artificial Sequence
  Description of Artificial Sequence: Synthetic peptide
  Seed: MDPRMCSLMQGSTLP
MDPRMMSLLQSSTLP

SEQ ID NO: 95732 - protein, 15 aa, Artificial Sequence
  Description of Artificial Sequence: Synthetic peptide
  Seed: MDPRMCSLMQGSTLP
MDPRMMSLLQSSTMP

SEQ ID NO: 95733 - protein, 15 aa, Artificial Sequence
  Description of Artificial Sequence: Synthetic peptide
  Seed: MDPRMCSLMQGSTLP
MDPRMMSLLQSSTSP

SEQ ID NO: 95734 - protein, 15 aa, Artificial Sequence
  Description of Artificial Sequence: Synthetic peptide
  Seed: MDPRMCSLMQGSTLP
MDPRMMSLLQSSTTP

SEQ ID NO: 95735 - protein, 15 aa, Artificial Sequence
  Description of Artificial Sequence: Synthetic peptide
  Seed: MDPRMCSLMQGSTLP
MDPRMMSLLQSSTVP

SEQ ID NO: 95736 - protein, 15 aa, Artificial Sequence
  Description of Artificial Sequence: Synthetic peptide
  Seed: MDPRMCSLMQGSTLP
MDPRMMSLLQTSTLP

SEQ ID NO: 95737 - protein, 15 aa, Artificial Sequence
  Description of Artificial Sequence: Synthetic peptide
  Seed: MDPRMCSLMQGSTLP
MDPRMMSLLQTSTVP

SEQ ID NO: 95738 - protein, 15 aa, Artificial Sequence
  Description of Artificial Sequence: Synthetic peptide
  Seed: MDPRMCSLMQGSTLP
MDPRMMSLLQVSTAP

SEQ ID NO: 95739 - protein, 15 aa, Artificial Sequence
  Description of Artificial Sequence: Synthetic peptide
  Seed: MDPRMCSLMQGSTLP
MDPRMMSLMQASTAP

SEQ ID NO: 95740 - protein, 15 aa, Artificial Sequence
  Description of Artificial Sequence: Synthetic peptide
  Seed: MDPRMCSLMQGSTLP
MDPRMMSLMQASTIP

SEQ ID NO: 95741 - protein, 15 aa, Artificial Sequence
  Description of Artificial Sequence: Synthetic peptide
  Seed: MDPRMCSLMQGSTLP
MDPRMMSLMQASTLP

SEQ ID NO: 95742 - protein, 15 aa, Artificial Sequence
  Description of Artificial Sequence: Synthetic peptide
  Seed: MDPRMCSLMQGSTLP
MDPRMMSLMQASTMP

SEQ ID NO: 95743 - protein, 15 aa, Artificial Sequence
  Description of Artificial Sequence: Synthetic peptide
  Seed: MDPRMCSLMQGSTLP
MDPRMMSLMQASTNP

SEQ ID NO: 95744 - protein, 15 aa, Artificial Sequence
  Description of Artificial Sequence: Synthetic peptide
  Seed: MDPRMCSLMQGSTLP
MDPRMMSLMQASTSP

SEQ ID NO: 95745 - protein, 15 aa, Artificial Sequence
  Description of Artificial Sequence: Synthetic peptide
  Seed: MDPRMCSLMQGSTLP
MDPRMMSLMQASTTP

SEQ ID NO: 95746 - protein, 15 aa, Artificial Sequence
  Description of Artificial Sequence: Synthetic peptide
  Seed: MDPRMCSLMQGSTLP
MDPRMMSLMQASTVP

SEQ ID NO: 95747 - protein, 15 aa, Artificial Sequence
  Description of Artificial Sequence: Synthetic peptide
  Seed: MDPRMCSLMQGSTLP
MDPRMMSLMQGSTAP

SEQ ID NO: 95748 - protein, 15 aa, Artificial Sequence
  Description of Artificial Sequence: Synthetic peptide
  Seed: MDPRMCSLMQGSTLP
MDPRMMSLMQGSTIP

SEQ ID NO: 95749 - protein, 15 aa, Artificial Sequence
  Description of Artificial Sequence: Synthetic peptide
  Seed: MDPRMCSLMQGSTLP
MDPRMMSLMQGSTLP

SEQ ID NO: 95750 - protein, 15 aa, Artificial Sequence
  Description of Artificial Sequence: Synthetic peptide
  Seed: MDPRMCSLMQGSTLP
MDPRMMSLMQGSTMP

SEQ ID NO: 95751 - protein, 15 aa, Artificial Sequence
  Description of Artificial Sequence: Synthetic peptide
  Seed: MDPRMCSLMQGSTLP
MDPRMMSLMQGSTSP

SEQ ID NO: 95752 - protein, 15 aa, Artificial Sequence
  Description of Artificial Sequence: Synthetic peptide
  Seed: MDPRMCSLMQGSTLP
MDPRMMSLMQGSTTP

SEQ ID NO: 95753 - protein, 15 aa, Artificial Sequence
  Description of Artificial Sequence: Synthetic peptide
  Seed: MDPRMCSLMQGSTLP
MDPRMMSLMQGSTVP

SEQ ID NO: 95754 - protein, 15 aa, Artificial Sequence
  Description of Artificial Sequence: Synthetic peptide
  Seed: MDPRMCSLMQGSTLP
MDPRMMSLMQPSTIP

SEQ ID NO: 95755 - protein, 15 aa, Artificial Sequence
  Description of Artificial Sequence: Synthetic peptide
  Seed: MDPRMCSLMQGSTLP
MDPRMMSLMQPSTLP

SEQ ID NO: 95756 - protein, 15 aa, Artificial Sequence
  Description of Artificial Sequence: Synthetic peptide
  Seed: MDPRMCSLMQGSTLP
MDPRMMSLMQPSTVP

SEQ ID NO: 95757 - protein, 15 aa, Artificial Sequence
  Description of Artificial Sequence: Synthetic peptide
  Seed: MDPRMCSLMQGSTLP
MDPRMMSLMQSSTAP

SEQ ID NO: 95758 - protein, 15 aa, Artificial Sequence
  Description of Artificial Sequence: Synthetic peptide
  Seed: MDPRMCSLMQGSTLP
MDPRMMSLMQSSTIP

SEQ ID NO: 95759 - protein, 15 aa, Artificial Sequence
  Description of Artificial Sequence: Synthetic peptide
  Seed: MDPRMCSLMQGSTLP
MDPRMMSLMQSSTLP

SEQ ID NO: 95760 - protein, 15 aa, Artificial Sequence
  Description of Artificial Sequence: Synthetic peptide
  Seed: MDPRMCSLMQGSTLP
MDPRMMSLMQSSTMP

SEQ ID NO: 95761 - protein, 15 aa, Artificial Sequence
  Description of Artificial Sequence: Synthetic peptide
  Seed: MDPRMCSLMQGSTLP
MDPRMMSLMQSSTTP

SEQ ID NO: 95762 - protein, 15 aa, Artificial Sequence
  Description of Artificial Sequence: Synthetic peptide
  Seed: MDPRMCSLMQGSTLP
MDPRMMSLMQSSTVP

SEQ ID NO: 95763 - protein, 15 aa, Artificial Sequence
  Description of Artificial Sequence: Synthetic peptide
  Seed: MDPRMCSLMQGSTLP
MDPRMMSLMQTSTLP

SEQ ID NO: 95764 - protein, 15 aa, Artificial Sequence
  Description of Artificial Sequence: Synthetic peptide
  Seed: MDPRMCSLMQGSTLP
MDPRMMSLMQVSTAP

SEQ ID NO: 95765 - protein, 15 aa, Artificial Sequence
  Description of Artificial Sequence: Synthetic peptide
  Seed: MDPRMCSLMQGSTLP
MDPRMVSLIQASTIP

SEQ ID NO: 95766 - protein, 15 aa, Artificial Sequence
  Description of Artificial Sequence: Synthetic peptide
  Seed: MDPRMCSLMQGSTLP
MDPRMVSLIQASTLP

SEQ ID NO: 95767 - protein, 15 aa, Artificial Sequence
  Description of Artificial Sequence: Synthetic peptide
  Seed: MDPRMCSLMQGSTLP
MDPRMVSLIQASTVP

SEQ ID NO: 95768 - protein, 15 aa, Artificial Sequence
  Description of Artificial Sequence: Synthetic peptide
  Seed: MDPRMCSLMQGSTLP
MDPRMVSLIQGSTLP

SEQ ID NO: 95769 - protein, 15 aa, Artificial Sequence
  Description of Artificial Sequence: Synthetic peptide
  Seed: MDPRMCSLMQGSTLP
MDPRMVSLIQGSTVP

SEQ ID NO: 95770 - protein, 15 aa, Artificial Sequence
  Description of Artificial Sequence: Synthetic peptide
  Seed: MDPRMCSLMQGSTLP
MDPRMVSLLQASTAP

SEQ ID NO: 95771 - protein, 15 aa, Artificial Sequence
  Description of Artificial Sequence: Synthetic peptide
  Seed: MDPRMCSLMQGSTLP
MDPRMVSLLQASTIP

SEQ ID NO: 95772 - protein, 15 aa, Artificial Sequence
  Description of Artificial Sequence: Synthetic peptide
  Seed: MDPRMCSLMQGSTLP
MDPRMVSLLQASTLP

SEQ ID NO: 95773 - protein, 15 aa, Artificial Sequence
  Description of Artificial Sequence: Synthetic peptide
  Seed: MDPRMCSLMQGSTLP
MDPRMVSLLQASTMP

SEQ ID NO: 95774 - protein, 15 aa, Artificial Sequence
  Description of Artificial Sequence: Synthetic peptide
  Seed: MDPRMCSLMQGSTLP
MDPRMVSLLQASTSP

SEQ ID NO: 95775 - protein, 15 aa, Artificial Sequence
  Description of Artificial Sequence: Synthetic peptide
  Seed: MDPRMCSLMQGSTLP
MDPRMVSLLQASTTP

SEQ ID NO: 95776 - protein, 15 aa, Artificial Sequence
  Description of Artificial Sequence: Synthetic peptide
  Seed: MDPRMCSLMQGSTLP
MDPRMVSLLQASTVP

SEQ ID NO: 95777 - protein, 15 aa, Artificial Sequence
  Description of Artificial Sequence: Synthetic peptide
  Seed: MDPRMCSLMQGSTLP
MDPRMVSLLQGSTAP

SEQ ID NO: 95778 - protein, 15 aa, Artificial Sequence
  Description of Artificial Sequence: Synthetic peptide
  Seed: MDPRMCSLMQGSTLP
MDPRMVSLLQGSTIP

SEQ ID NO: 95779 - protein, 15 aa, Artificial Sequence
  Description of Artificial Sequence: Synthetic peptide
  Seed: MDPRMCSLMQGSTLP
MDPRMVSLLQGSTLP

SEQ ID NO: 95780 - protein, 15 aa, Artificial Sequence
  Description of Artificial Sequence: Synthetic peptide
  Seed: MDPRMCSLMQGSTLP
MDPRMVSLLQGSTMP

SEQ ID NO: 95781 - protein, 15 aa, Artificial Sequence
  Description of Artificial Sequence: Synthetic peptide
  Seed: MDPRMCSLMQGSTLP
MDPRMVSLLQGSTSP

SEQ ID NO: 95782 - protein, 15 aa, Artificial Sequence
  Description of Artificial Sequence: Synthetic peptide
  Seed: MDPRMCSLMQGSTLP
MDPRMVSLLQGSTTP

SEQ ID NO: 95783 - protein, 15 aa, Artificial Sequence
  Description of Artificial Sequence: Synthetic peptide
  Seed: MDPRMCSLMQGSTLP
MDPRMVSLLQGSTVP

SEQ ID NO: 95784 - protein, 15 aa, Artificial Sequence
  Description of Artificial Sequence: Synthetic peptide
  Seed: MDPRMCSLMQGSTLP
MDPRMVSLLQNSTLP

SEQ ID NO: 95785 - protein, 15 aa, Artificial Sequence
  Description of Artificial Sequence: Synthetic peptide
  Seed: MDPRMCSLMQGSTLP
MDPRMVSLLQNSTVP

SEQ ID NO: 95786 - protein, 15 aa, Artificial Sequence
  Description of Artificial Sequence: Synthetic peptide
  Seed: MDPRMCSLMQGSTLP
MDPRMVSLLQPSTAP

SEQ ID NO: 95787 - protein, 15 aa, Artificial Sequence
  Description of Artificial Sequence: Synthetic peptide
  Seed: MDPRMCSLMQGSTLP
MDPRMVSLLQPSTIP

SEQ ID NO: 95788 - protein, 15 aa, Artificial Sequence
  Description of Artificial Sequence: Synthetic peptide
  Seed: MDPRMCSLMQGSTLP
MDPRMVSLLQPSTLP

SEQ ID NO: 95789 - protein, 15 aa, Artificial Sequence
  Description of Artificial Sequence: Synthetic peptide
  Seed: MDPRMCSLMQGSTLP
MDPRMVSLLQPSTVP

SEQ ID NO: 95790 - protein, 15 aa, Artificial Sequence
  Description of Artificial Sequence: Synthetic peptide
  Seed: MDPRMCSLMQGSTLP
MDPRMVSLLQSSTAP

SEQ ID NO: 95791 - protein, 15 aa, Artificial Sequence
  Description of Artificial Sequence: Synthetic peptide
  Seed: MDPRMCSLMQGSTLP
MDPRMVSLLQSSTIP

SEQ ID NO: 95792 - protein, 15 aa, Artificial Sequence
  Description of Artificial Sequence: Synthetic peptide
  Seed: MDPRMCSLMQGSTLP
MDPRMVSLLQSSTLP

SEQ ID NO: 95793 - protein, 15 aa, Artificial Sequence
  Description of Artificial Sequence: Synthetic peptide
  Seed: MDPRMCSLMQGSTLP
MDPRMVSLLQSSTMP

SEQ ID NO: 95794 - protein, 15 aa, Artificial Sequence
  Description of Artificial Sequence: Synthetic peptide
  Seed: MDPRMCSLMQGSTLP
MDPRMVSLLQSSTTP

SEQ ID NO: 95795 - protein, 15 aa, Artificial Sequence
  Description of Artificial Sequence: Synthetic peptide
  Seed: MDPRMCSLMQGSTLP
MDPRMVSLLQSSTVP

SEQ ID NO: 95796 - protein, 15 aa, Artificial Sequence
  Description of Artificial Sequence: Synthetic peptide
  Seed: MDPRMCSLMQGSTLP
MDPRMVSLMQASTAP

SEQ ID NO: 95797 - protein, 15 aa, Artificial Sequence
  Description of Artificial Sequence: Synthetic peptide
  Seed: MDPRMCSLMQGSTLP
MDPRMVSLMQASTIP

SEQ ID NO: 95798 - protein, 15 aa, Artificial Sequence
  Description of Artificial Sequence: Synthetic peptide
  Seed: MDPRMCSLMQGSTLP
MDPRMVSLMQASTLP

SEQ ID NO: 95799 - protein, 15 aa, Artificial Sequence
  Description of Artificial Sequence: Synthetic peptide
  Seed: MDPRMCSLMQGSTLP
MDPRMVSLMQASTMP

SEQ ID NO: 95800 - protein, 15 aa, Artificial Sequence
  Description of Artificial Sequence: Synthetic peptide
  Seed: MDPRMCSLMQGSTLP
MDPRMVSLMQASTTP

SEQ ID NO: 95801 - protein, 15 aa, Artificial Sequence
  Description of Artificial Sequence: Synthetic peptide
  Seed: MDPRMCSLMQGSTLP
MDPRMVSLMQASTVP

SEQ ID NO: 95802 - protein, 15 aa, Artificial Sequence
  Description of Artificial Sequence: Synthetic peptide
  Seed: MDPRMCSLMQGSTLP
MDPRMVSLMQGSTAP

SEQ ID NO: 95803 - protein, 15 aa, Artificial Sequence
  Description of Artificial Sequence: Synthetic peptide
  Seed: MDPRMCSLMQGSTLP
MDPRMVSLMQGSTIP

SEQ ID NO: 95804 - protein, 15 aa, Artificial Sequence
  Description of Artificial Sequence: Synthetic peptide
  Seed: MDPRMCSLMQGSTLP
MDPRMVSLMQGSTLP

SEQ ID NO: 95805 - protein, 15 aa, Artificial Sequence
  Description of Artificial Sequence: Synthetic peptide
  Seed: MDPRMCSLMQGSTLP
MDPRMVSLMQGSTMP

SEQ ID NO: 95806 - protein, 15 aa, Artificial Sequence
  Description of Artificial Sequence: Synthetic peptide
  Seed: MDPRMCSLMQGSTLP
MDPRMVSLMQGSTTP

SEQ ID NO: 95807 - protein, 15 aa, Artificial Sequence
  Description of Artificial Sequence: Synthetic peptide
  Seed: MDPRMCSLMQGSTLP
MDPRMVSLMQGSTVP

SEQ ID NO: 95808 - protein, 15 aa, Artificial Sequence
  Description of Artificial Sequence: Synthetic peptide
  Seed: MDPRMCSLMQGSTLP
MDPRMVSLMQPSTIP

SEQ ID NO: 95809 - protein, 15 aa, Artificial Sequence
  Description of Artificial Sequence: Synthetic peptide
  Seed: MDPRMCSLMQGSTLP
MDPRMVSLMQPSTLP

SEQ ID NO: 95810 - protein, 15 aa, Artificial Sequence
  Description of Artificial Sequence: Synthetic peptide
  Seed: MDPRMCSLMQGSTLP
MDPRMVSLMQPSTVP

SEQ ID NO: 95811 - protein, 15 aa, Artificial Sequence
  Description of Artificial Sequence: Synthetic peptide
  Seed: MDPRMCSLMQGSTLP
MDPRMVSLMQSSTAP

SEQ ID NO: 95812 - protein, 15 aa, Artificial Sequence
  Description of Artificial Sequence: Synthetic peptide
  Seed: MDPRMCSLMQGSTLP
MDPRMVSLMQSSTIP

SEQ ID NO: 95813 - protein, 15 aa, Artificial Sequence
  Description of Artificial Sequence: Synthetic peptide
  Seed: MDPRMCSLMQGSTLP
MDPRMVSLMQSSTLP

SEQ ID NO: 95814 - protein, 15 aa, Artificial Sequence
  Description of Artificial Sequence: Synthetic peptide
  Seed: MDPRMCSLMQGSTLP
MDPRMVSLMQSSTVP

SEQ ID NO: 95815 - protein, 15 aa, Artificial Sequence
  Description of Artificial Sequence: Synthetic peptide
  Seed: MDPRMCSLMQGSTLP
MDPRMWSLAQASTAP

SEQ ID NO: 95816 - protein, 15 aa, Artificial Sequence
  Description of Artificial Sequence: Synthetic peptide
  Seed: MDPRMCSLMQGSTLP
MDPRMWSLAQASTIP

SEQ ID NO: 95817 - protein, 15 aa, Artificial Sequence
  Description of Artificial Sequence: Synthetic peptide
  Seed: MDPRMCSLMQGSTLP
MDPRMWSLAQASTLP

SEQ ID NO: 95818 - protein, 15 aa, Artificial Sequence
  Description of Artificial Sequence: Synthetic peptide
  Seed: MDPRMCSLMQGSTLP
MDPRMWSLAQASTMP

SEQ ID NO: 95819 - protein, 15 aa, Artificial Sequence
  Description of Artificial Sequence: Synthetic peptide
  Seed: MDPRMCSLMQGSTLP
MDPRMWSLAQASTSP

SEQ ID NO: 95820 - protein, 15 aa, Artificial Sequence
  Description of Artificial Sequence: Synthetic peptide
  Seed: MDPRMCSLMQGSTLP
MDPRMWSLAQASTTP

SEQ ID NO: 95821 - protein, 15 aa, Artificial Sequence
  Description of Artificial Sequence: Synthetic peptide
  Seed: MDPRMCSLMQGSTLP
MDPRMWSLAQASTVP

SEQ ID NO: 95822 - protein, 15 aa, Artificial Sequence
  Description of Artificial Sequence: Synthetic peptide
  Seed: MDPRMCSLMQGSTLP
MDPRMWSLAQGSTAP

SEQ ID NO: 95823 - protein, 15 aa, Artificial Sequence
  Description of Artificial Sequence: Synthetic peptide
  Seed: MDPRMCSLMQGSTLP
MDPRMWSLAQGSTIP

SEQ ID NO: 95824 - protein, 15 aa, Artificial Sequence
  Description of Artificial Sequence: Synthetic peptide
  Seed: MDPRMCSLMQGSTLP
MDPRMWSLAQGSTLP

SEQ ID NO: 95825 - protein, 15 aa, Artificial Sequence
  Description of Artificial Sequence: Synthetic peptide
  Seed: MDPRMCSLMQGSTLP
MDPRMWSLAQGSTVP

SEQ ID NO: 95826 - protein, 15 aa, Artificial Sequence
  Description of Artificial Sequence: Synthetic peptide
  Seed: MDPRMCSLMQGSTLP
MDPRMWSLAQPSTIP

SEQ ID NO: 95827 - protein, 15 aa, Artificial Sequence
  Description of Artificial Sequence: Synthetic peptide
  Seed: MDPRMCSLMQGSTLP
MDPRMWSLAQPSTLP

SEQ ID NO: 95828 - protein, 15 aa, Artificial Sequence
  Description of Artificial Sequence: Synthetic peptide
  Seed: MDPRMCSLMQGSTLP
MDPRMWSLAQPSTVP

SEQ ID NO: 95829 - protein, 15 aa, Artificial Sequence
  Description of Artificial Sequence: Synthetic peptide
  Seed: MDPRMCSLMQGSTLP
MDPRMWSLAQSSTAP

SEQ ID NO: 95830 - protein, 15 aa, Artificial Sequence
  Description of Artificial Sequence: Synthetic peptide
  Seed: MDPRMCSLMQGSTLP
MDPRMWSLAQSSTIP

SEQ ID NO: 95831 - protein, 15 aa, Artificial Sequence
  Description of Artificial Sequence: Synthetic peptide
  Seed: MDPRMCSLMQGSTLP
MDPRMWSLAQSSTLP

SEQ ID NO: 95832 - protein, 15 aa, Artificial Sequence
  Description of Artificial Sequence: Synthetic peptide
  Seed: MDPRMCSLMQGSTLP
MDPRMWSLAQSSTVP

SEQ ID NO: 95833 - protein, 15 aa, Artificial Sequence
  Description of Artificial Sequence: Synthetic peptide
  Seed: MDPRMCSLMQGSTLP
MDPRMWSLIQASTAP

SEQ ID NO: 95834 - protein, 15 aa, Artificial Sequence
  Description of Artificial Sequence: Synthetic peptide
  Seed: MDPRMCSLMQGSTLP
MDPRMWSLIQASTIP

SEQ ID NO: 95835 - protein, 15 aa, Artificial Sequence
  Description of Artificial Sequence: Synthetic peptide
  Seed: MDPRMCSLMQGSTLP
MDPRMWSLIQASTLP

SEQ ID NO: 95836 - protein, 15 aa, Artificial Sequence
  Description of Artificial Sequence: Synthetic peptide
  Seed: MDPRMCSLMQGSTLP
MDPRMWSLIQASTMP

SEQ ID NO: 95837 - protein, 15 aa, Artificial Sequence
  Description of Artificial Sequence: Synthetic peptide
  Seed: MDPRMCSLMQGSTLP
MDPRMWSLIQASTNP

SEQ ID NO: 95838 - protein, 15 aa, Artificial Sequence
  Description of Artificial Sequence: Synthetic peptide
  Seed: MDPRMCSLMQGSTLP
MDPRMWSLIQASTSP

SEQ ID NO: 95839 - protein, 15 aa, Artificial Sequence
  Description of Artificial Sequence: Synthetic peptide
  Seed: MDPRMCSLMQGSTLP
MDPRMWSLIQASTTP

SEQ ID NO: 95840 - protein, 15 aa, Artificial Sequence
  Description of Artificial Sequence: Synthetic peptide
  Seed: MDPRMCSLMQGSTLP
MDPRMWSLIQASTVP

SEQ ID NO: 95841 - protein, 15 aa, Artificial Sequence
  Description of Artificial Sequence: Synthetic peptide
  Seed: MDPRMCSLMQGSTLP
MDPRMWSLIQGSTAP

SEQ ID NO: 95842 - protein, 15 aa, Artificial Sequence
  Description of Artificial Sequence: Synthetic peptide
  Seed: MDPRMCSLMQGSTLP
MDPRMWSLIQGSTIP

SEQ ID NO: 95843 - protein, 15 aa, Artificial Sequence
  Description of Artificial Sequence: Synthetic peptide
  Seed: MDPRMCSLMQGSTLP
MDPRMWSLIQGSTLP

SEQ ID NO: 95844 - protein, 15 aa, Artificial Sequence
  Description of Artificial Sequence: Synthetic peptide
  Seed: MDPRMCSLMQGSTLP
MDPRMWSLIQGSTMP

SEQ ID NO: 95845 - protein, 15 aa, Artificial Sequence
  Description of Artificial Sequence: Synthetic peptide
  Seed: MDPRMCSLMQGSTLP
MDPRMWSLIQGSTSP

SEQ ID NO: 95846 - protein, 15 aa, Artificial Sequence
  Description of Artificial Sequence: Synthetic peptide
  Seed: MDPRMCSLMQGSTLP
MDPRMWSLIQGSTTP

SEQ ID NO: 95847 - protein, 15 aa, Artificial Sequence
  Description of Artificial Sequence: Synthetic peptide
  Seed: MDPRMCSLMQGSTLP
MDPRMWSLIQGSTVP

SEQ ID NO: 95848 - protein, 15 aa, Artificial Sequence
  Description of Artificial Sequence: Synthetic peptide
  Seed: MDPRMCSLMQGSTLP
MDPRMWSLIQISTAP

SEQ ID NO: 95849 - protein, 15 aa, Artificial Sequence
  Description of Artificial Sequence: Synthetic peptide
  Seed: MDPRMCSLMQGSTLP
MDPRMWSLIQISTNP

SEQ ID NO: 95850 - protein, 15 aa, Artificial Sequence
  Description of Artificial Sequence: Synthetic peptide
  Seed: MDPRMCSLMQGSTLP
MDPRMWSLIQISTSP

SEQ ID NO: 95851 - protein, 15 aa, Artificial Sequence
  Description of Artificial Sequence: Synthetic peptide
  Seed: MDPRMCSLMQGSTLP
MDPRMWSLIQNSTIP

SEQ ID NO: 95852 - protein, 15 aa, Artificial Sequence
  Description of Artificial Sequence: Synthetic peptide
  Seed: MDPRMCSLMQGSTLP
MDPRMWSLIQNSTLP

SEQ ID NO: 95853 - protein, 15 aa, Artificial Sequence
  Description of Artificial Sequence: Synthetic peptide
  Seed: MDPRMCSLMQGSTLP
MDPRMWSLIQNSTVP

SEQ ID NO: 95854 - protein, 15 aa, Artificial Sequence
  Description of Artificial Sequence: Synthetic peptide
  Seed: MDPRMCSLMQGSTLP
MDPRMWSLIQPSTAP

SEQ ID NO: 95855 - protein, 15 aa, Artificial Sequence
  Description of Artificial Sequence: Synthetic peptide
  Seed: MDPRMCSLMQGSTLP
MDPRMWSLIQPSTIP

SEQ ID NO: 95856 - protein, 15 aa, Artificial Sequence
  Description of Artificial Sequence: Synthetic peptide
  Seed: MDPRMCSLMQGSTLP
MDPRMWSLIQPSTLP

SEQ ID NO: 95857 - protein, 15 aa, Artificial Sequence
  Description of Artificial Sequence: Synthetic peptide
  Seed: MDPRMCSLMQGSTLP
MDPRMWSLIQPSTNP

SEQ ID NO: 95858 - protein, 15 aa, Artificial Sequence
  Description of Artificial Sequence: Synthetic peptide
  Seed: MDPRMCSLMQGSTLP
MDPRMWSLIQPSTSP

SEQ ID NO: 95859 - protein, 15 aa, Artificial Sequence
  Description of Artificial Sequence: Synthetic peptide
  Seed: MDPRMCSLMQGSTLP
MDPRMWSLIQPSTTP

SEQ ID NO: 95860 - protein, 15 aa, Artificial Sequence
  Description of Artificial Sequence: Synthetic peptide
  Seed: MDPRMCSLMQGSTLP
MDPRMWSLIQPSTVP

SEQ ID NO: 95861 - protein, 15 aa, Artificial Sequence
  Description of Artificial Sequence: Synthetic peptide
  Seed: MDPRMCSLMQGSTLP
MDPRMWSLIQSSTAP

SEQ ID NO: 95862 - protein, 15 aa, Artificial Sequence
  Description of Artificial Sequence: Synthetic peptide
  Seed: MDPRMCSLMQGSTLP
MDPRMWSLIQSSTIP

SEQ ID NO: 95863 - protein, 15 aa, Artificial Sequence
  Description of Artificial Sequence: Synthetic peptide
  Seed: MDPRMCSLMQGSTLP
MDPRMWSLIQSSTLP

SEQ ID NO: 95864 - protein, 15 aa, Artificial Sequence
  Description of Artificial Sequence: Synthetic peptide
  Seed: MDPRMCSLMQGSTLP
MDPRMWSLIQSSTMP

SEQ ID NO: 95865 - protein, 15 aa, Artificial Sequence
  Description of Artificial Sequence: Synthetic peptide
  Seed: MDPRMCSLMQGSTLP
MDPRMWSLIQSSTNP

SEQ ID NO: 95866 - protein, 15 aa, Artificial Sequence
  Description of Artificial Sequence: Synthetic peptide
  Seed: MDPRMCSLMQGSTLP
MDPRMWSLIQSSTSP

SEQ ID NO: 95867 - protein, 15 aa, Artificial Sequence
  Description of Artificial Sequence: Synthetic peptide
  Seed: MDPRMCSLMQGSTLP
MDPRMWSLIQSSTTP

SEQ ID NO: 95868 - protein, 15 aa, Artificial Sequence
  Description of Artificial Sequence: Synthetic peptide
  Seed: MDPRMCSLMQGSTLP
MDPRMWSLIQSSTVP

SEQ ID NO: 95869 - protein, 15 aa, Artificial Sequence
  Description of Artificial Sequence: Synthetic peptide
  Seed: MDPRMCSLMQGSTLP
MDPRMWSLIQTSTAP

SEQ ID NO: 95870 - protein, 15 aa, Artificial Sequence
  Description of Artificial Sequence: Synthetic peptide
  Seed: MDPRMCSLMQGSTLP
MDPRMWSLIQTSTIP

SEQ ID NO: 95871 - protein, 15 aa, Artificial Sequence
  Description of Artificial Sequence: Synthetic peptide
  Seed: MDPRMCSLMQGSTLP
MDPRMWSLIQTSTLP

SEQ ID NO: 95872 - protein, 15 aa, Artificial Sequence
  Description of Artificial Sequence: Synthetic peptide
  Seed: MDPRMCSLMQGSTLP
MDPRMWSLIQTSTNP

SEQ ID NO: 95873 - protein, 15 aa, Artificial Sequence
  Description of Artificial Sequence: Synthetic peptide
  Seed: MDPRMCSLMQGSTLP
MDPRMWSLIQTSTSP

SEQ ID NO: 95874 - protein, 15 aa, Artificial Sequence
  Description of Artificial Sequence: Synthetic peptide
  Seed: MDPRMCSLMQGSTLP
MDPRMWSLIQTSTTP

SEQ ID NO: 95875 - protein, 15 aa, Artificial Sequence
  Description of Artificial Sequence: Synthetic peptide
  Seed: MDPRMCSLMQGSTLP
MDPRMWSLIQTSTVP

SEQ ID NO: 95876 - protein, 15 aa, Artificial Sequence
  Description of Artificial Sequence: Synthetic peptide
  Seed: MDPRMCSLMQGSTLP
MDPRMWSLIQVSTAP

SEQ ID NO: 95877 - protein, 15 aa, Artificial Sequence
  Description of Artificial Sequence: Synthetic peptide
  Seed: MDPRMCSLMQGSTLP
MDPRMWSLIQVSTNP

SEQ ID NO: 95878 - protein, 15 aa, Artificial Sequence
  Description of Artificial Sequence: Synthetic peptide
  Seed: MDPRMCSLMQGSTLP
MDPRMWSLIQVSTSP

SEQ ID NO: 95879 - protein, 15 aa, Artificial Sequence
  Description of Artificial Sequence: Synthetic peptide
  Seed: MDPRMCSLMQGSTLP
MDPRMWSLIQVSTTP

SEQ ID NO: 95880 - protein, 15 aa, Artificial Sequence
  Description of Artificial Sequence: Synthetic peptide
  Seed: MDPRMCSLMQGSTLP
MDPRMWSLLQASTAP

SEQ ID NO: 95881 - protein, 15 aa, Artificial Sequence
  Description of Artificial Sequence: Synthetic peptide
  Seed: MDPRMCSLMQGSTLP
MDPRMWSLLQASTCP

SEQ ID NO: 95882 - protein, 15 aa, Artificial Sequence
  Description of Artificial Sequence: Synthetic peptide
  Seed: MDPRMCSLMQGSTLP
MDPRMWSLLQASTFP

SEQ ID NO: 95883 - protein, 15 aa, Artificial Sequence
  Description of Artificial Sequence: Synthetic peptide
  Seed: MDPRMCSLMQGSTLP
MDPRMWSLLQASTGP

SEQ ID NO: 95884 - protein, 15 aa, Artificial Sequence
  Description of Artificial Sequence: Synthetic peptide
  Seed: MDPRMCSLMQGSTLP
MDPRMWSLLQASTHP

SEQ ID NO: 95885 - protein, 15 aa, Artificial Sequence
  Description of Artificial Sequence: Synthetic peptide
  Seed: MDPRMCSLMQGSTLP
MDPRMWSLLQASTIP

SEQ ID NO: 95886 - protein, 15 aa, Artificial Sequence
  Description of Artificial Sequence: Synthetic peptide
  Seed: MDPRMCSLMQGSTLP
MDPRMWSLLQASTLP

SEQ ID NO: 95887 - protein, 15 aa, Artificial Sequence
  Description of Artificial Sequence: Synthetic peptide
  Seed: MDPRMCSLMQGSTLP
MDPRMWSLLQASTMP

SEQ ID NO: 95888 - protein, 15 aa, Artificial Sequence
  Description of Artificial Sequence: Synthetic peptide
  Seed: MDPRMCSLMQGSTLP
MDPRMWSLLQASTNP

SEQ ID NO: 95889 - protein, 15 aa, Artificial Sequence
  Description of Artificial Sequence: Synthetic peptide
  Seed: MDPRMCSLMQGSTLP
MDPRMWSLLQASTQP

SEQ ID NO: 95890 - protein, 15 aa, Artificial Sequence
  Description of Artificial Sequence: Synthetic peptide
  Seed: MDPRMCSLMQGSTLP
MDPRMWSLLQASTSP

SEQ ID NO: 95891 - protein, 15 aa, Artificial Sequence
  Description of Artificial Sequence: Synthetic peptide
  Seed: MDPRMCSLMQGSTLP
MDPRMWSLLQASTTP

SEQ ID NO: 95892 - protein, 15 aa, Artificial Sequence
  Description of Artificial Sequence: Synthetic peptide
  Seed: MDPRMCSLMQGSTLP
MDPRMWSLLQASTVP

SEQ ID NO: 95893 - protein, 15 aa, Artificial Sequence
  Description of Artificial Sequence: Synthetic peptide
  Seed: MDPRMCSLMQGSTLP
MDPRMWSLLQGSTAP

SEQ ID NO: 95894 - protein, 15 aa, Artificial Sequence
  Description of Artificial Sequence: Synthetic peptide
  Seed: MDPRMCSLMQGSTLP
MDPRMWSLLQGSTGP

SEQ ID NO: 95895 - protein, 15 aa, Artificial Sequence
  Description of Artificial Sequence: Synthetic peptide
  Seed: MDPRMCSLMQGSTLP
MDPRMWSLLQGSTIP

SEQ ID NO: 95896 - protein, 15 aa, Artificial Sequence
  Description of Artificial Sequence: Synthetic peptide
  Seed: MDPRMCSLMQGSTLP
MDPRMWSLLQGSTLP

SEQ ID NO: 95897 - protein, 15 aa, Artificial Sequence
  Description of Artificial Sequence: Synthetic peptide
  Seed: MDPRMCSLMQGSTLP
MDPRMWSLLQGSTMP

SEQ ID NO: 95898 - protein, 15 aa, Artificial Sequence
  Description of Artificial Sequence: Synthetic peptide
  Seed: MDPRMCSLMQGSTLP
MDPRMWSLLQGSTNP

SEQ ID NO: 95899 - protein, 15 aa, Artificial Sequence
  Description of Artificial Sequence: Synthetic peptide
  Seed: MDPRMCSLMQGSTLP
MDPRMWSLLQGSTSP

SEQ ID NO: 95900 - protein, 15 aa, Artificial Sequence
  Description of Artificial Sequence: Synthetic peptide
  Seed: MDPRMCSLMQGSTLP
MDPRMWSLLQGSTTP

SEQ ID NO: 95901 - protein, 15 aa, Artificial Sequence
  Description of Artificial Sequence: Synthetic peptide
  Seed: MDPRMCSLMQGSTLP
MDPRMWSLLQGSTVP

SEQ ID NO: 95902 - protein, 15 aa, Artificial Sequence
  Description of Artificial Sequence: Synthetic peptide
  Seed: MDPRMCSLMQGSTLP
MDPRMWSLLQISTAP

SEQ ID NO: 95903 - protein, 15 aa, Artificial Sequence
  Description of Artificial Sequence: Synthetic peptide
  Seed: MDPRMCSLMQGSTLP
MDPRMWSLLQISTNP

SEQ ID NO: 95904 - protein, 15 aa, Artificial Sequence
  Description of Artificial Sequence: Synthetic peptide
  Seed: MDPRMCSLMQGSTLP
MDPRMWSLLQISTSP

SEQ ID NO: 95905 - protein, 15 aa, Artificial Sequence
  Description of Artificial Sequence: Synthetic peptide
  Seed: MDPRMCSLMQGSTLP
MDPRMWSLLQISTTP

SEQ ID NO: 95906 - protein, 15 aa, Artificial Sequence
  Description of Artificial Sequence: Synthetic peptide
  Seed: MDPRMCSLMQGSTLP
MDPRMWSLLQNSTAP

SEQ ID NO: 95907 - protein, 15 aa, Artificial Sequence
  Description of Artificial Sequence: Synthetic peptide
  Seed: MDPRMCSLMQGSTLP
MDPRMWSLLQNSTIP

SEQ ID NO: 95908 - protein, 15 aa, Artificial Sequence
  Description of Artificial Sequence: Synthetic peptide
  Seed: MDPRMCSLMQGSTLP
MDPRMWSLLQNSTLP

SEQ ID NO: 95909 - protein, 15 aa, Artificial Sequence
  Description of Artificial Sequence: Synthetic peptide
  Seed: MDPRMCSLMQGSTLP
MDPRMWSLLQNSTMP

SEQ ID NO: 95910 - protein, 15 aa, Artificial Sequence
  Description of Artificial Sequence: Synthetic peptide
  Seed: MDPRMCSLMQGSTLP
MDPRMWSLLQNSTNP

SEQ ID NO: 95911 - protein, 15 aa, Artificial Sequence
  Description of Artificial Sequence: Synthetic peptide
  Seed: MDPRMCSLMQGSTLP
MDPRMWSLLQNSTSP

SEQ ID NO: 95912 - protein, 15 aa, Artificial Sequence
  Description of Artificial Sequence: Synthetic peptide
  Seed: MDPRMCSLMQGSTLP
MDPRMWSLLQNSTTP

SEQ ID NO: 95913 - protein, 15 aa, Artificial Sequence
  Description of Artificial Sequence: Synthetic peptide
  Seed: MDPRMCSLMQGSTLP
MDPRMWSLLQNSTVP

SEQ ID NO: 95914 - protein, 15 aa, Artificial Sequence
  Description of Artificial Sequence: Synthetic peptide
  Seed: MDPRMCSLMQGSTLP
MDPRMWSLLQPSTAP

SEQ ID NO: 95915 - protein, 15 aa, Artificial Sequence
  Description of Artificial Sequence: Synthetic peptide
  Seed: MDPRMCSLMQGSTLP
MDPRMWSLLQPSTIP

SEQ ID NO: 95916 - protein, 15 aa, Artificial Sequence
  Description of Artificial Sequence: Synthetic peptide
  Seed: MDPRMCSLMQGSTLP
MDPRMWSLLQPSTLP

SEQ ID NO: 95917 - protein, 15 aa, Artificial Sequence
  Description of Artificial Sequence: Synthetic peptide
  Seed: MDPRMCSLMQGSTLP
MDPRMWSLLQPSTMP

SEQ ID NO: 95918 - protein, 15 aa, Artificial Sequence
  Description of Artificial Sequence: Synthetic peptide
  Seed: MDPRMCSLMQGSTLP
MDPRMWSLLQPSTNP

SEQ ID NO: 95919 - protein, 15 aa, Artificial Sequence
  Description of Artificial Sequence: Synthetic peptide
  Seed: MDPRMCSLMQGSTLP
MDPRMWSLLQPSTSP

SEQ ID NO: 95920 - protein, 15 aa, Artificial Sequence
  Description of Artificial Sequence: Synthetic peptide
  Seed: MDPRMCSLMQGSTLP
MDPRMWSLLQPSTTP

SEQ ID NO: 95921 - protein, 15 aa, Artificial Sequence
  Description of Artificial Sequence: Synthetic peptide
  Seed: MDPRMCSLMQGSTLP
MDPRMWSLLQPSTVP

SEQ ID NO: 95922 - protein, 15 aa, Artificial Sequence
  Description of Artificial Sequence: Synthetic peptide
  Seed: MDPRMCSLMQGSTLP
MDPRMWSLLQSSTAP

SEQ ID NO: 95923 - protein, 15 aa, Artificial Sequence
  Description of Artificial Sequence: Synthetic peptide
  Seed: MDPRMCSLMQGSTLP
MDPRMWSLLQSSTGP

SEQ ID NO: 95924 - protein, 15 aa, Artificial Sequence
  Description of Artificial Sequence: Synthetic peptide
  Seed: MDPRMCSLMQGSTLP
MDPRMWSLLQSSTIP

SEQ ID NO: 95925 - protein, 15 aa, Artificial Sequence
  Description of Artificial Sequence: Synthetic peptide
  Seed: MDPRMCSLMQGSTLP
MDPRMWSLLQSSTLP

SEQ ID NO: 95926 - protein, 15 aa, Artificial Sequence
  Description of Artificial Sequence: Synthetic peptide
  Seed: MDPRMCSLMQGSTLP
MDPRMWSLLQSSTMP

SEQ ID NO: 95927 - protein, 15 aa, Artificial Sequence
  Description of Artificial Sequence: Synthetic peptide
  Seed: MDPRMCSLMQGSTLP
MDPRMWSLLQSSTNP

SEQ ID NO: 95928 - protein, 15 aa, Artificial Sequence
  Description of Artificial Sequence: Synthetic peptide
  Seed: MDPRMCSLMQGSTLP
MDPRMWSLLQSSTSP

SEQ ID NO: 95929 - protein, 15 aa, Artificial Sequence
  Description of Artificial Sequence: Synthetic peptide
  Seed: MDPRMCSLMQGSTLP
MDPRMWSLLQSSTTP

SEQ ID NO: 95930 - protein, 15 aa, Artificial Sequence
  Description of Artificial Sequence: Synthetic peptide
  Seed: MDPRMCSLMQGSTLP
MDPRMWSLLQSSTVP

SEQ ID NO: 95931 - protein, 15 aa, Artificial Sequence
  Description of Artificial Sequence: Synthetic peptide
  Seed: MDPRMCSLMQGSTLP
MDPRMWSLLQTSTAP

SEQ ID NO: 95932 - protein, 15 aa, Artificial Sequence
  Description of Artificial Sequence: Synthetic peptide
  Seed: MDPRMCSLMQGSTLP
MDPRMWSLLQTSTIP

SEQ ID NO: 95933 - protein, 15 aa, Artificial Sequence
  Description of Artificial Sequence: Synthetic peptide
  Seed: MDPRMCSLMQGSTLP
MDPRMWSLLQTSTLP

SEQ ID NO: 95934 - protein, 15 aa, Artificial Sequence
  Description of Artificial Sequence: Synthetic peptide
  Seed: MDPRMCSLMQGSTLP
MDPRMWSLLQTSTMP

SEQ ID NO: 95935 - protein, 15 aa, Artificial Sequence
  Description of Artificial Sequence: Synthetic peptide
  Seed: MDPRMCSLMQGSTLP
MDPRMWSLLQTSTNP

SEQ ID NO: 95936 - protein, 15 aa, Artificial Sequence
  Description of Artificial Sequence: Synthetic peptide
  Seed: MDPRMCSLMQGSTLP
MDPRMWSLLQTSTSP

SEQ ID NO: 95937 - protein, 15 aa, Artificial Sequence
  Description of Artificial Sequence: Synthetic peptide
  Seed: MDPRMCSLMQGSTLP
MDPRMWSLLQTSTTP

SEQ ID NO: 95938 - protein, 15 aa, Artificial Sequence
  Description of Artificial Sequence: Synthetic peptide
  Seed: MDPRMCSLMQGSTLP
MDPRMWSLLQTSTVP

SEQ ID NO: 95939 - protein, 15 aa, Artificial Sequence
  Description of Artificial Sequence: Synthetic peptide
  Seed: MDPRMCSLMQGSTLP
MDPRMWSLLQVSTAP

SEQ ID NO: 95940 - protein, 15 aa, Artificial Sequence
  Description of Artificial Sequence: Synthetic peptide
  Seed: MDPRMCSLMQGSTLP
MDPRMWSLLQVSTIP

SEQ ID NO: 95941 - protein, 15 aa, Artificial Sequence
  Description of Artificial Sequence: Synthetic peptide
  Seed: MDPRMCSLMQGSTLP
MDPRMWSLLQVSTLP

SEQ ID NO: 95942 - protein, 15 aa, Artificial Sequence
  Description of Artificial Sequence: Synthetic peptide
  Seed: MDPRMCSLMQGSTLP
MDPRMWSLLQVSTNP

SEQ ID NO: 95943 - protein, 15 aa, Artificial Sequence
  Description of Artificial Sequence: Synthetic peptide
  Seed: MDPRMCSLMQGSTLP
MDPRMWSLLQVSTSP

SEQ ID NO: 95944 - protein, 15 aa, Artificial Sequence
  Description of Artificial Sequence: Synthetic peptide
  Seed: MDPRMCSLMQGSTLP
MDPRMWSLLQVSTTP

SEQ ID NO: 95945 - protein, 15 aa, Artificial Sequence
  Description of Artificial Sequence: Synthetic peptide
  Seed: MDPRMCSLMQGSTLP
MDPRMWSLLQVSTVP

SEQ ID NO: 95946 - protein, 15 aa, Artificial Sequence
  Description of Artificial Sequence: Synthetic peptide
  Seed: MDPRMCSLMQGSTLP
MDPRMWSLMQASTAP

SEQ ID NO: 95947 - protein, 15 aa, Artificial Sequence
  Description of Artificial Sequence: Synthetic peptide
  Seed: MDPRMCSLMQGSTLP
MDPRMWSLMQASTFP

SEQ ID NO: 95948 - protein, 15 aa, Artificial Sequence
  Description of Artificial Sequence: Synthetic peptide
  Seed: MDPRMCSLMQGSTLP
MDPRMWSLMQASTGP

SEQ ID NO: 95949 - protein, 15 aa, Artificial Sequence
  Description of Artificial Sequence: Synthetic peptide
  Seed: MDPRMCSLMQGSTLP
MDPRMWSLMQASTHP

SEQ ID NO: 95950 - protein, 15 aa, Artificial Sequence
  Description of Artificial Sequence: Synthetic peptide
  Seed: MDPRMCSLMQGSTLP
MDPRMWSLMQASTIP

SEQ ID NO: 95951 - protein, 15 aa, Artificial Sequence
  Description of Artificial Sequence: Synthetic peptide
  Seed: MDPRMCSLMQGSTLP
MDPRMWSLMQASTLP

SEQ ID NO: 95952 - protein, 15 aa, Artificial Sequence
  Description of Artificial Sequence: Synthetic peptide
  Seed: MDPRMCSLMQGSTLP
MDPRMWSLMQASTMP

SEQ ID NO: 95953 - protein, 15 aa, Artificial Sequence
  Description of Artificial Sequence: Synthetic peptide
  Seed: MDPRMCSLMQGSTLP
MDPRMWSLMQASTNP

SEQ ID NO: 95954 - protein, 15 aa, Artificial Sequence
  Description of Artificial Sequence: Synthetic peptide
  Seed: MDPRMCSLMQGSTLP
MDPRMWSLMQASTQP

SEQ ID NO: 95955 - protein, 15 aa, Artificial Sequence
  Description of Artificial Sequence: Synthetic peptide
  Seed: MDPRMCSLMQGSTLP
MDPRMWSLMQASTSP

SEQ ID NO: 95956 - protein, 15 aa, Artificial Sequence
  Description of Artificial Sequence: Synthetic peptide
  Seed: MDPRMCSLMQGSTLP
MDPRMWSLMQASTTP

SEQ ID NO: 95957 - protein, 15 aa, Artificial Sequence
  Description of Artificial Sequence: Synthetic peptide
  Seed: MDPRMCSLMQGSTLP
MDPRMWSLMQASTVP

SEQ ID NO: 95958 - protein, 15 aa, Artificial Sequence
  Description of Artificial Sequence: Synthetic peptide
  Seed: MDPRMCSLMQGSTLP
MDPRMWSLMQGSTAP

SEQ ID NO: 95959 - protein, 15 aa, Artificial Sequence
  Description of Artificial Sequence: Synthetic peptide
  Seed: MDPRMCSLMQGSTLP
MDPRMWSLMQGSTGP

SEQ ID NO: 95960 - protein, 15 aa, Artificial Sequence
  Description of Artificial Sequence: Synthetic peptide
  Seed: MDPRMCSLMQGSTLP
MDPRMWSLMQGSTIP

SEQ ID NO: 95961 - protein, 15 aa, Artificial Sequence
  Description of Artificial Sequence: Synthetic peptide
  Seed: MDPRMCSLMQGSTLP
MDPRMWSLMQGSTLP

SEQ ID NO: 95962 - protein, 15 aa, Artificial Sequence
  Description of Artificial Sequence: Synthetic peptide
  Seed: MDPRMCSLMQGSTLP
MDPRMWSLMQGSTMP

SEQ ID NO: 95963 - protein, 15 aa, Artificial Sequence
  Description of Artificial Sequence: Synthetic peptide
  Seed: MDPRMCSLMQGSTLP
MDPRMWSLMQGSTSP

SEQ ID NO: 95964 - protein, 15 aa, Artificial Sequence
  Description of Artificial Sequence: Synthetic peptide
  Seed: MDPRMCSLMQGSTLP
MDPRMWSLMQGSTTP

SEQ ID NO: 95965 - protein, 15 aa, Artificial Sequence
  Description of Artificial Sequence: Synthetic peptide
  Seed: MDPRMCSLMQGSTLP
MDPRMWSLMQGSTVP

SEQ ID NO: 95966 - protein, 15 aa, Artificial Sequence
  Description of Artificial Sequence: Synthetic peptide
  Seed: MDPRMCSLMQGSTLP
MDPRMWSLMQISTAP

SEQ ID NO: 95967 - protein, 15 aa, Artificial Sequence
  Description of Artificial Sequence: Synthetic peptide
  Seed: MDPRMCSLMQGSTLP
MDPRMWSLMQISTNP

SEQ ID NO: 95968 - protein, 15 aa, Artificial Sequence
  Description of Artificial Sequence: Synthetic peptide
  Seed: MDPRMCSLMQGSTLP
MDPRMWSLMQISTSP

SEQ ID NO: 95969 - protein, 15 aa, Artificial Sequence
  Description of Artificial Sequence: Synthetic peptide
  Seed: MDPRMCSLMQGSTLP
MDPRMWSLMQISTTP

SEQ ID NO: 95970 - protein, 15 aa, Artificial Sequence
  Description of Artificial Sequence: Synthetic peptide
  Seed: MDPRMCSLMQGSTLP
MDPRMWSLMQNSTAP

SEQ ID NO: 95971 - protein, 15 aa, Artificial Sequence
  Description of Artificial Sequence: Synthetic peptide
  Seed: MDPRMCSLMQGSTLP
MDPRMWSLMQNSTIP

SEQ ID NO: 95972 - protein, 15 aa, Artificial Sequence
  Description of Artificial Sequence: Synthetic peptide
  Seed: MDPRMCSLMQGSTLP
MDPRMWSLMQNSTLP

SEQ ID NO: 95973 - protein, 15 aa, Artificial Sequence
  Description of Artificial Sequence: Synthetic peptide
  Seed: MDPRMCSLMQGSTLP
MDPRMWSLMQNSTMP

SEQ ID NO: 95974 - protein, 15 aa, Artificial Sequence
  Description of Artificial Sequence: Synthetic peptide
  Seed: MDPRMCSLMQGSTLP
MDPRMWSLMQNSTSP

SEQ ID NO: 95975 - protein, 15 aa, Artificial Sequence
  Description of Artificial Sequence: Synthetic peptide
  Seed: MDPRMCSLMQGSTLP
MDPRMWSLMQNSTTP

SEQ ID NO: 95976 - protein, 15 aa, Artificial Sequence
  Description of Artificial Sequence: Synthetic peptide
  Seed: MDPRMCSLMQGSTLP
MDPRMWSLMQNSTVP

SEQ ID NO: 95977 - protein, 15 aa, Artificial Sequence
  Description of Artificial Sequence: Synthetic peptide
  Seed: MDPRMCSLMQGSTLP
MDPRMWSLMQPSTAP

SEQ ID NO: 95978 - protein, 15 aa, Artificial Sequence
  Description of Artificial Sequence: Synthetic peptide
  Seed: MDPRMCSLMQGSTLP
MDPRMWSLMQPSTIP

SEQ ID NO: 95979 - protein, 15 aa, Artificial Sequence
  Description of Artificial Sequence: Synthetic peptide
  Seed: MDPRMCSLMQGSTLP
MDPRMWSLMQPSTLP

SEQ ID NO: 95980 - protein, 15 aa, Artificial Sequence
  Description of Artificial Sequence: Synthetic peptide
  Seed: MDPRMCSLMQGSTLP
MDPRMWSLMQPSTMP

SEQ ID NO: 95981 - protein, 15 aa, Artificial Sequence
  Description of Artificial Sequence: Synthetic peptide
  Seed: MDPRMCSLMQGSTLP
MDPRMWSLMQPSTNP

SEQ ID NO: 95982 - protein, 15 aa, Artificial Sequence
  Description of Artificial Sequence: Synthetic peptide
  Seed: MDPRMCSLMQGSTLP
MDPRMWSLMQPSTSP

SEQ ID NO: 95983 - protein, 15 aa, Artificial Sequence
  Description of Artificial Sequence: Synthetic peptide
  Seed: MDPRMCSLMQGSTLP
MDPRMWSLMQPSTTP

SEQ ID NO: 95984 - protein, 15 aa, Artificial Sequence
  Description of Artificial Sequence: Synthetic peptide
  Seed: MDPRMCSLMQGSTLP
MDPRMWSLMQPSTVP

SEQ ID NO: 95985 - protein, 15 aa, Artificial Sequence
  Description of Artificial Sequence: Synthetic peptide
  Seed: MDPRMCSLMQGSTLP
MDPRMWSLMQSSTAP

SEQ ID NO: 95986 - protein, 15 aa, Artificial Sequence
  Description of Artificial Sequence: Synthetic peptide
  Seed: MDPRMCSLMQGSTLP
MDPRMWSLMQSSTGP

SEQ ID NO: 95987 - protein, 15 aa, Artificial Sequence
  Description of Artificial Sequence: Synthetic peptide
  Seed: MDPRMCSLMQGSTLP
MDPRMWSLMQSSTIP

SEQ ID NO: 95988 - protein, 15 aa, Artificial Sequence
  Description of Artificial Sequence: Synthetic peptide
  Seed: MDPRMCSLMQGSTLP
MDPRMWSLMQSSTLP

SEQ ID NO: 95989 - protein, 15 aa, Artificial Sequence
  Description of Artificial Sequence: Synthetic peptide
  Seed: MDPRMCSLMQGSTLP
MDPRMWSLMQSSTMP

SEQ ID NO: 95990 - protein, 15 aa, Artificial Sequence
  Description of Artificial Sequence: Synthetic peptide
  Seed: MDPRMCSLMQGSTLP
MDPRMWSLMQSSTNP

SEQ ID NO: 95991 - protein, 15 aa, Artificial Sequence
  Description of Artificial Sequence: Synthetic peptide
  Seed: MDPRMCSLMQGSTLP
MDPRMWSLMQSSTSP

SEQ ID NO: 95992 - protein, 15 aa, Artificial Sequence
  Description of Artificial Sequence: Synthetic peptide
  Seed: MDPRMCSLMQGSTLP
MDPRMWSLMQSSTTP

SEQ ID NO: 95993 - protein, 15 aa, Artificial Sequence
  Description of Artificial Sequence: Synthetic peptide
  Seed: MDPRMCSLMQGSTLP
MDPRMWSLMQSSTVP

SEQ ID NO: 95994 - protein, 15 aa, Artificial Sequence
  Description of Artificial Sequence: Synthetic peptide
  Seed: MDPRMCSLMQGSTLP
MDPRMWSLMQTSTAP

SEQ ID NO: 95995 - protein, 15 aa, Artificial Sequence
  Description of Artificial Sequence: Synthetic peptide
  Seed: MDPRMCSLMQGSTLP
MDPRMWSLMQTSTIP

SEQ ID NO: 95996 - protein, 15 aa, Artificial Sequence
  Description of Artificial Sequence: Synthetic peptide
  Seed: MDPRMCSLMQGSTLP
MDPRMWSLMQTSTLP

SEQ ID NO: 95997 - protein, 15 aa, Artificial Sequence
  Description of Artificial Sequence: Synthetic peptide
  Seed: MDPRMCSLMQGSTLP
MDPRMWSLMQTSTMP

SEQ ID NO: 95998 - protein, 15 aa, Artificial Sequence
  Description of Artificial Sequence: Synthetic peptide
  Seed: MDPRMCSLMQGSTLP
MDPRMWSLMQTSTNP

SEQ ID NO: 95999 - protein, 15 aa, Artificial Sequence
  Description of Artificial Sequence: Synthetic peptide
  Seed: MDPRMCSLMQGSTLP
MDPRMWSLMQTSTSP

SEQ ID NO: 96000 - protein, 15 aa, Artificial Sequence
  Description of Artificial Sequence: Synthetic peptide
  Seed: MDPRMCSLMQGSTLP
MDPRMWSLMQTSTTP

SEQ ID NO: 96001 - protein, 15 aa, Artificial Sequence
  Description of Artificial Sequence: Synthetic peptide
  Seed: MDPRMCSLMQGSTLP
MDPRMWSLMQTSTVP

SEQ ID NO: 96002 - protein, 15 aa, Artificial Sequence
  Description of Artificial Sequence: Synthetic peptide
  Seed: MDPRMCSLMQGSTLP
MDPRMWSLMQVSTAP

SEQ ID NO: 96003 - protein, 15 aa, Artificial Sequence
  Description of Artificial Sequence: Synthetic peptide
  Seed: MDPRMCSLMQGSTLP
MDPRMWSLMQVSTIP

SEQ ID NO: 96004 - protein, 15 aa, Artificial Sequence
  Description of Artificial Sequence: Synthetic peptide
  Seed: MDPRMCSLMQGSTLP
MDPRMWSLMQVSTLP

SEQ ID NO: 96005 - protein, 15 aa, Artificial Sequence
  Description of Artificial Sequence: Synthetic peptide
  Seed: MDPRMCSLMQGSTLP
MDPRMWSLMQVSTNP

SEQ ID NO: 96006 - protein, 15 aa, Artificial Sequence
  Description of Artificial Sequence: Synthetic peptide
  Seed: MDPRMCSLMQGSTLP
MDPRMWSLMQVSTSP

SEQ ID NO: 96007 - protein, 15 aa, Artificial Sequence
  Description of Artificial Sequence: Synthetic peptide
  Seed: MDPRMCSLMQGSTLP
MDPRMWSLMQVSTTP

SEQ ID NO: 96008 - protein, 15 aa, Artificial Sequence
  Description of Artificial Sequence: Synthetic peptide
  Seed: MDPRMCSLMQGSTLP
MDPRMWSLMQVSTVP

SEQ ID NO: 96009 - protein, 15 aa, Artificial Sequence
  Description of Artificial Sequence: Synthetic peptide
  Seed: MDPRMCSLMQGSTLP
MDPRMWSLQQASTAP

SEQ ID NO: 96010 - protein, 15 aa, Artificial Sequence
  Description of Artificial Sequence: Synthetic peptide
  Seed: MDPRMCSLMQGSTLP
MDPRMWSLQQASTIP

SEQ ID NO: 96011 - protein, 15 aa, Artificial Sequence
  Description of Artificial Sequence: Synthetic peptide
  Seed: MDPRMCSLMQGSTLP
MDPRMWSLQQASTLP

SEQ ID NO: 96012 - protein, 15 aa, Artificial Sequence
  Description of Artificial Sequence: Synthetic peptide
  Seed: MDPRMCSLMQGSTLP
MDPRMWSLQQASTMP

SEQ ID NO: 96013 - protein, 15 aa, Artificial Sequence
  Description of Artificial Sequence: Synthetic peptide
  Seed: MDPRMCSLMQGSTLP
MDPRMWSLQQASTVP

SEQ ID NO: 96014 - protein, 15 aa, Artificial Sequence
  Description of Artificial Sequence: Synthetic peptide
  Seed: MDPRMCSLMQGSTLP
MDPRMWSLQQGSTAP

SEQ ID NO: 96015 - protein, 15 aa, Artificial Sequence
  Description of Artificial Sequence: Synthetic peptide
  Seed: MDPRMCSLMQGSTLP
MDPRMWSLQQGSTIP

SEQ ID NO: 96016 - protein, 15 aa, Artificial Sequence
  Description of Artificial Sequence: Synthetic peptide
  Seed: MDPRMCSLMQGSTLP
MDPRMWSLQQGSTLP

SEQ ID NO: 96017 - protein, 15 aa, Artificial Sequence
  Description of Artificial Sequence: Synthetic peptide
  Seed: MDPRMCSLMQGSTLP
MDPRMWSLQQGSTVP

SEQ ID NO: 96018 - protein, 15 aa, Artificial Sequence
  Description of Artificial Sequence: Synthetic peptide
  Seed: MDPRMCSLMQGSTLP
MDPRMWSLQQSSTIP

SEQ ID NO: 96019 - protein, 15 aa, Artificial Sequence
  Description of Artificial Sequence: Synthetic peptide
  Seed: MDPRMCSLMQGSTLP
MDPRMWSLQQSSTLP

SEQ ID NO: 96020 - protein, 15 aa, Artificial Sequence
  Description of Artificial Sequence: Synthetic peptide
  Seed: MDPRMCSLMQGSTLP
MDPRMWSLQQSSTVP

SEQ ID NO: 96021 - protein, 15 aa, Artificial Sequence
  Description of Artificial Sequence: Synthetic peptide
  Seed: MDPRMCSLMQGSTLP
MDPRMWSLSQASTIP

SEQ ID NO: 96022 - protein, 15 aa, Artificial Sequence
  Description of Artificial Sequence: Synthetic peptide
  Seed: MDPRMCSLMQGSTLP
MDPRMWSLSQASTLP

SEQ ID NO: 96023 - protein, 15 aa, Artificial Sequence
  Description of Artificial Sequence: Synthetic peptide
  Seed: MDPRMCSLMQGSTLP
MDPRMWSLSQASTVP

SEQ ID NO: 96024 - protein, 15 aa, Artificial Sequence
  Description of Artificial Sequence: Synthetic peptide
  Seed: MDPRMCSLMQGSTLP
MDPRMWSLVQASTAP

SEQ ID NO: 96025 - protein, 15 aa, Artificial Sequence
  Description of Artificial Sequence: Synthetic peptide
  Seed: MDPRMCSLMQGSTLP
MDPRMWSLVQASTIP

SEQ ID NO: 96026 - protein, 15 aa, Artificial Sequence
  Description of Artificial Sequence: Synthetic peptide
  Seed: MDPRMCSLMQGSTLP
MDPRMWSLVQASTLP

SEQ ID NO: 96027 - protein, 15 aa, Artificial Sequence
  Description of Artificial Sequence: Synthetic peptide
  Seed: MDPRMCSLMQGSTLP
MDPRMWSLVQASTMP

SEQ ID NO: 96028 - protein, 15 aa, Artificial Sequence
  Description of Artificial Sequence: Synthetic peptide
  Seed: MDPRMCSLMQGSTLP
MDPRMWSLVQASTSP

SEQ ID NO: 96029 - protein, 15 aa, Artificial Sequence
  Description of Artificial Sequence: Synthetic peptide
  Seed: MDPRMCSLMQGSTLP
MDPRMWSLVQASTTP

SEQ ID NO: 96030 - protein, 15 aa, Artificial Sequence
  Description of Artificial Sequence: Synthetic peptide
  Seed: MDPRMCSLMQGSTLP
MDPRMWSLVQASTVP

SEQ ID NO: 96031 - protein, 15 aa, Artificial Sequence
  Description of Artificial Sequence: Synthetic peptide
  Seed: MDPRMCSLMQGSTLP
MDPRMWSLVQGSTAP

SEQ ID NO: 96032 - protein, 15 aa, Artificial Sequence
  Description of Artificial Sequence: Synthetic peptide
  Seed: MDPRMCSLMQGSTLP
MDPRMWSLVQGSTIP

SEQ ID NO: 96033 - protein, 15 aa, Artificial Sequence
  Description of Artificial Sequence: Synthetic peptide
  Seed: MDPRMCSLMQGSTLP
MDPRMWSLVQGSTLP

SEQ ID NO: 96034 - protein, 15 aa, Artificial Sequence
  Description of Artificial Sequence: Synthetic peptide
  Seed: MDPRMCSLMQGSTLP
MDPRMWSLVQGSTVP

SEQ ID NO: 96035 - protein, 15 aa, Artificial Sequence
  Description of Artificial Sequence: Synthetic peptide
  Seed: MDPRMCSLMQGSTLP
MDPRMWSLVQPSTLP

SEQ ID NO: 96036 - protein, 15 aa, Artificial Sequence
  Description of Artificial Sequence: Synthetic peptide
  Seed: MDPRMCSLMQGSTLP
MDPRMWSLVQPSTVP

SEQ ID NO: 96037 - protein, 15 aa, Artificial Sequence
  Description of Artificial Sequence: Synthetic peptide
  Seed: MDPRMCSLMQGSTLP
MDPRMWSLVQSSTAP

SEQ ID NO: 96038 - protein, 15 aa, Artificial Sequence
  Description of Artificial Sequence: Synthetic peptide
  Seed: MDPRMCSLMQGSTLP
MDPRMWSLVQSSTIP

SEQ ID NO: 96039 - protein, 15 aa, Artificial Sequence
  Description of Artificial Sequence: Synthetic peptide
  Seed: MDPRMCSLMQGSTLP
MDPRMWSLVQSSTLP

SEQ ID NO: 96040 - protein, 15 aa, Artificial Sequence
  Description of Artificial Sequence: Synthetic peptide
  Seed: MDPRMCSLMQGSTLP
MDPRMWSLVQSSTVP

SEQ ID NO: 96041 - protein, 15 aa, Artificial Sequence
  Description of Artificial Sequence: Synthetic peptide
  Seed: MDPRMCSLMQGSTLP
MDPRMYSLAQASTAP

SEQ ID NO: 96042 - protein, 15 aa, Artificial Sequence
  Description of Artificial Sequence: Synthetic peptide
  Seed: MDPRMCSLMQGSTLP
MDPRMYSLAQASTFP

SEQ ID NO: 96043 - protein, 15 aa, Artificial Sequence
  Description of Artificial Sequence: Synthetic peptide
  Seed: MDPRMCSLMQGSTLP
MDPRMYSLAQASTGP

SEQ ID NO: 96044 - protein, 15 aa, Artificial Sequence
  Description of Artificial Sequence: Synthetic peptide
  Seed: MDPRMCSLMQGSTLP
MDPRMYSLAQASTIP

SEQ ID NO: 96045 - protein, 15 aa, Artificial Sequence
  Description of Artificial Sequence: Synthetic peptide
  Seed: MDPRMCSLMQGSTLP
MDPRMYSLAQASTLP

SEQ ID NO: 96046 - protein, 15 aa, Artificial Sequence
  Description of Artificial Sequence: Synthetic peptide
  Seed: MDPRMCSLMQGSTLP
MDPRMYSLAQASTMP

SEQ ID NO: 96047 - protein, 15 aa, Artificial Sequence
  Description of Artificial Sequence: Synthetic peptide
  Seed: MDPRMCSLMQGSTLP
MDPRMYSLAQASTNP

SEQ ID NO: 96048 - protein, 15 aa, Artificial Sequence
  Description of Artificial Sequence: Synthetic peptide
  Seed: MDPRMCSLMQGSTLP
MDPRMYSLAQASTQP

SEQ ID NO: 96049 - protein, 15 aa, Artificial Sequence
  Description of Artificial Sequence: Synthetic peptide
  Seed: MDPRMCSLMQGSTLP
MDPRMYSLAQASTSP

SEQ ID NO: 96050 - protein, 15 aa, Artificial Sequence
  Description of Artificial Sequence: Synthetic peptide
  Seed: MDPRMCSLMQGSTLP
MDPRMYSLAQASTTP

SEQ ID NO: 96051 - protein, 15 aa, Artificial Sequence
  Description of Artificial Sequence: Synthetic peptide
  Seed: MDPRMCSLMQGSTLP
MDPRMYSLAQASTVP

SEQ ID NO: 96052 - protein, 15 aa, Artificial Sequence
  Description of Artificial Sequence: Synthetic peptide
  Seed: MDPRMCSLMQGSTLP
MDPRMYSLAQGSTAP

SEQ ID NO: 96053 - protein, 15 aa, Artificial Sequence
  Description of Artificial Sequence: Synthetic peptide
  Seed: MDPRMCSLMQGSTLP
MDPRMYSLAQGSTIP

SEQ ID NO: 96054 - protein, 15 aa, Artificial Sequence
  Description of Artificial Sequence: Synthetic peptide
  Seed: MDPRMCSLMQGSTLP
MDPRMYSLAQGSTLP

SEQ ID NO: 96055 - protein, 15 aa, Artificial Sequence
  Description of Artificial Sequence: Synthetic peptide
  Seed: MDPRMCSLMQGSTLP
MDPRMYSLAQGSTMP

SEQ ID NO: 96056 - protein, 15 aa, Artificial Sequence
  Description of Artificial Sequence: Synthetic peptide
  Seed: MDPRMCSLMQGSTLP
MDPRMYSLAQGSTSP

SEQ ID NO: 96057 - protein, 15 aa, Artificial Sequence
  Description of Artificial Sequence: Synthetic peptide
  Seed: MDPRMCSLMQGSTLP
MDPRMYSLAQGSTTP

SEQ ID NO: 96058 - protein, 15 aa, Artificial Sequence
  Description of Artificial Sequence: Synthetic peptide
  Seed: MDPRMCSLMQGSTLP
MDPRMYSLAQGSTVP

SEQ ID NO: 96059 - protein, 15 aa, Artificial Sequence
  Description of Artificial Sequence: Synthetic peptide
  Seed: MDPRMCSLMQGSTLP
MDPRMYSLAQISTAP

SEQ ID NO: 96060 - protein, 15 aa, Artificial Sequence
  Description of Artificial Sequence: Synthetic peptide
  Seed: MDPRMCSLMQGSTLP
MDPRMYSLAQISTIP

SEQ ID NO: 96061 - protein, 15 aa, Artificial Sequence
  Description of Artificial Sequence: Synthetic peptide
  Seed: MDPRMCSLMQGSTLP
MDPRMYSLAQISTLP

SEQ ID NO: 96062 - protein, 15 aa, Artificial Sequence
  Description of Artificial Sequence: Synthetic peptide
  Seed: MDPRMCSLMQGSTLP
MDPRMYSLAQISTNP

SEQ ID NO: 96063 - protein, 15 aa, Artificial Sequence
  Description of Artificial Sequence: Synthetic peptide
  Seed: MDPRMCSLMQGSTLP
MDPRMYSLAQISTSP

SEQ ID NO: 96064 - protein, 15 aa, Artificial Sequence
  Description of Artificial Sequence: Synthetic peptide
  Seed: MDPRMCSLMQGSTLP
MDPRMYSLAQISTVP

SEQ ID NO: 96065 - protein, 15 aa, Artificial Sequence
  Description of Artificial Sequence: Synthetic peptide
  Seed: MDPRMCSLMQGSTLP
MDPRMYSLAQLSTAP

SEQ ID NO: 96066 - protein, 15 aa, Artificial Sequence
  Description of Artificial Sequence: Synthetic peptide
  Seed: MDPRMCSLMQGSTLP
MDPRMYSLAQNSTAP

SEQ ID NO: 96067 - protein, 15 aa, Artificial Sequence
  Description of Artificial Sequence: Synthetic peptide
  Seed: MDPRMCSLMQGSTLP
MDPRMYSLAQNSTIP

SEQ ID NO: 96068 - protein, 15 aa, Artificial Sequence
  Description of Artificial Sequence: Synthetic peptide
  Seed: MDPRMCSLMQGSTLP
MDPRMYSLAQNSTLP

SEQ ID NO: 96069 - protein, 15 aa, Artificial Sequence
  Description of Artificial Sequence: Synthetic peptide
  Seed: MDPRMCSLMQGSTLP
MDPRMYSLAQNSTVP

SEQ ID NO: 96070 - protein, 15 aa, Artificial Sequence
  Description of Artificial Sequence: Synthetic peptide
  Seed: MDPRMCSLMQGSTLP
MDPRMYSLAQPSTAP

SEQ ID NO: 96071 - protein, 15 aa, Artificial Sequence
  Description of Artificial Sequence: Synthetic peptide
  Seed: MDPRMCSLMQGSTLP
MDPRMYSLAQPSTIP

SEQ ID NO: 96072 - protein, 15 aa, Artificial Sequence
  Description of Artificial Sequence: Synthetic peptide
  Seed: MDPRMCSLMQGSTLP
MDPRMYSLAQPSTLP

SEQ ID NO: 96073 - protein, 15 aa, Artificial Sequence
  Description of Artificial Sequence: Synthetic peptide
  Seed: MDPRMCSLMQGSTLP
MDPRMYSLAQPSTMP

SEQ ID NO: 96074 - protein, 15 aa, Artificial Sequence
  Description of Artificial Sequence: Synthetic peptide
  Seed: MDPRMCSLMQGSTLP
MDPRMYSLAQPSTNP

SEQ ID NO: 96075 - protein, 15 aa, Artificial Sequence
  Description of Artificial Sequence: Synthetic peptide
  Seed: MDPRMCSLMQGSTLP
MDPRMYSLAQPSTSP

SEQ ID NO: 96076 - protein, 15 aa, Artificial Sequence
  Description of Artificial Sequence: Synthetic peptide
  Seed: MDPRMCSLMQGSTLP
MDPRMYSLAQPSTVP

SEQ ID NO: 96077 - protein, 15 aa, Artificial Sequence
  Description of Artificial Sequence: Synthetic peptide
  Seed: MDPRMCSLMQGSTLP
MDPRMYSLAQSSTAP

SEQ ID NO: 96078 - protein, 15 aa, Artificial Sequence
  Description of Artificial Sequence: Synthetic peptide
  Seed: MDPRMCSLMQGSTLP
MDPRMYSLAQSSTIP

SEQ ID NO: 96079 - protein, 15 aa, Artificial Sequence
  Description of Artificial Sequence: Synthetic peptide
  Seed: MDPRMCSLMQGSTLP
MDPRMYSLAQSSTLP

SEQ ID NO: 96080 - protein, 15 aa, Artificial Sequence
  Description of Artificial Sequence: Synthetic peptide
  Seed: MDPRMCSLMQGSTLP
MDPRMYSLAQSSTMP

SEQ ID NO: 96081 - protein, 15 aa, Artificial Sequence
  Description of Artificial Sequence: Synthetic peptide
  Seed: MDPRMCSLMQGSTLP
MDPRMYSLAQSSTNP

SEQ ID NO: 96082 - protein, 15 aa, Artificial Sequence
  Description of Artificial Sequence: Synthetic peptide
  Seed: MDPRMCSLMQGSTLP
MDPRMYSLAQSSTSP

SEQ ID NO: 96083 - protein, 15 aa, Artificial Sequence
  Description of Artificial Sequence: Synthetic peptide
  Seed: MDPRMCSLMQGSTLP
MDPRMYSLAQSSTTP

SEQ ID NO: 96084 - protein, 15 aa, Artificial Sequence
  Description of Artificial Sequence: Synthetic peptide
  Seed: MDPRMCSLMQGSTLP
MDPRMYSLAQSSTVP

SEQ ID NO: 96085 - protein, 15 aa, Artificial Sequence
  Description of Artificial Sequence: Synthetic peptide
  Seed: MDPRMCSLMQGSTLP
MDPRMYSLAQTSTAP

SEQ ID NO: 96086 - protein, 15 aa, Artificial Sequence
  Description of Artificial Sequence: Synthetic peptide
  Seed: MDPRMCSLMQGSTLP
MDPRMYSLAQTSTIP

SEQ ID NO: 96087 - protein, 15 aa, Artificial Sequence
  Description of Artificial Sequence: Synthetic peptide
  Seed: MDPRMCSLMQGSTLP
MDPRMYSLAQTSTLP

SEQ ID NO: 96088 - protein, 15 aa, Artificial Sequence
  Description of Artificial Sequence: Synthetic peptide
  Seed: MDPRMCSLMQGSTLP
MDPRMYSLAQTSTMP

SEQ ID NO: 96089 - protein, 15 aa, Artificial Sequence
  Description of Artificial Sequence: Synthetic peptide
  Seed: MDPRMCSLMQGSTLP
MDPRMYSLAQTSTNP

SEQ ID NO: 96090 - protein, 15 aa, Artificial Sequence
  Description of Artificial Sequence: Synthetic peptide
  Seed: MDPRMCSLMQGSTLP
MDPRMYSLAQTSTSP

SEQ ID NO: 96091 - protein, 15 aa, Artificial Sequence
  Description of Artificial Sequence: Synthetic peptide
  Seed: MDPRMCSLMQGSTLP
MDPRMYSLAQTSTVP

SEQ ID NO: 96092 - protein, 15 aa, Artificial Sequence
  Description of Artificial Sequence: Synthetic peptide
  Seed: MDPRMCSLMQGSTLP
MDPRMYSLAQVSTAP

SEQ ID NO: 96093 - protein, 15 aa, Artificial Sequence
  Description of Artificial Sequence: Synthetic peptide
  Seed: MDPRMCSLMQGSTLP
MDPRMYSLAQVSTIP

SEQ ID NO: 96094 - protein, 15 aa, Artificial Sequence
  Description of Artificial Sequence: Synthetic peptide
  Seed: MDPRMCSLMQGSTLP
MDPRMYSLAQVSTLP

SEQ ID NO: 96095 - protein, 15 aa, Artificial Sequence
  Description of Artificial Sequence: Synthetic peptide
  Seed: MDPRMCSLMQGSTLP
MDPRMYSLAQVSTMP

SEQ ID NO: 96096 - protein, 15 aa, Artificial Sequence
  Description of Artificial Sequence: Synthetic peptide
  Seed: MDPRMCSLMQGSTLP
MDPRMYSLAQVSTNP

SEQ ID NO: 96097 - protein, 15 aa, Artificial Sequence
  Description of Artificial Sequence: Synthetic peptide
  Seed: MDPRMCSLMQGSTLP
MDPRMYSLAQVSTSP

SEQ ID NO: 96098 - protein, 15 aa, Artificial Sequence
  Description of Artificial Sequence: Synthetic peptide
  Seed: MDPRMCSLMQGSTLP
MDPRMYSLAQVSTTP

SEQ ID NO: 96099 - protein, 15 aa, Artificial Sequence
  Description of Artificial Sequence: Synthetic peptide
  Seed: MDPRMCSLMQGSTLP
MDPRMYSLAQVSTVP

SEQ ID NO: 96100 - protein, 15 aa, Artificial Sequence
  Description of Artificial Sequence: Synthetic peptide
  Seed: MDPRMCSLMQGSTLP
MDPRMYSLCQASTIP

SEQ ID NO: 96101 - protein, 15 aa, Artificial Sequence
  Description of Artificial Sequence: Synthetic peptide
  Seed: MDPRMCSLMQGSTLP
MDPRMYSLCQASTLP

SEQ ID NO: 96102 - protein, 15 aa, Artificial Sequence
  Description of Artificial Sequence: Synthetic peptide
  Seed: MDPRMCSLMQGSTLP
MDPRMYSLCQASTVP

SEQ ID NO: 96103 - protein, 15 aa, Artificial Sequence
  Description of Artificial Sequence: Synthetic peptide
  Seed: MDPRMCSLMQGSTLP
MDPRMYSLEQASTAP

SEQ ID NO: 96104 - protein, 15 aa, Artificial Sequence
  Description of Artificial Sequence: Synthetic peptide
  Seed: MDPRMCSLMQGSTLP
MDPRMYSLEQASTIP

SEQ ID NO: 96105 - protein, 15 aa, Artificial Sequence
  Description of Artificial Sequence: Synthetic peptide
  Seed: MDPRMCSLMQGSTLP
MDPRMYSLEQASTLP

SEQ ID NO: 96106 - protein, 15 aa, Artificial Sequence
  Description of Artificial Sequence: Synthetic peptide
  Seed: MDPRMCSLMQGSTLP
MDPRMYSLEQASTVP

SEQ ID NO: 96107 - protein, 15 aa, Artificial Sequence
  Description of Artificial Sequence: Synthetic peptide
  Seed: MDPRMCSLMQGSTLP
MDPRMYSLEQGSTLP

SEQ ID NO: 96108 - protein, 15 aa, Artificial Sequence
  Description of Artificial Sequence: Synthetic peptide
  Seed: MDPRMCSLMQGSTLP
MDPRMYSLEQGSTVP

SEQ ID NO: 96109 - protein, 15 aa, Artificial Sequence
  Description of Artificial Sequence: Synthetic peptide
  Seed: MDPRMCSLMQGSTLP
MDPRMYSLEQSSTLP

SEQ ID NO: 96110 - protein, 15 aa, Artificial Sequence
  Description of Artificial Sequence: Synthetic peptide
  Seed: MDPRMCSLMQGSTLP
MDPRMYSLFQASTAP

SEQ ID NO: 96111 - protein, 15 aa, Artificial Sequence
  Description of Artificial Sequence: Synthetic peptide
  Seed: MDPRMCSLMQGSTLP
MDPRMYSLFQASTIP

SEQ ID NO: 96112 - protein, 15 aa, Artificial Sequence
  Description of Artificial Sequence: Synthetic peptide
  Seed: MDPRMCSLMQGSTLP
MDPRMYSLFQASTLP

SEQ ID NO: 96113 - protein, 15 aa, Artificial Sequence
  Description of Artificial Sequence: Synthetic peptide
  Seed: MDPRMCSLMQGSTLP
MDPRMYSLFQASTMP

SEQ ID NO: 96114 - protein, 15 aa, Artificial Sequence
  Description of Artificial Sequence: Synthetic peptide
  Seed: MDPRMCSLMQGSTLP
MDPRMYSLFQASTNP

SEQ ID NO: 96115 - protein, 15 aa, Artificial Sequence
  Description of Artificial Sequence: Synthetic peptide
  Seed: MDPRMCSLMQGSTLP
MDPRMYSLFQASTSP

SEQ ID NO: 96116 - protein, 15 aa, Artificial Sequence
  Description of Artificial Sequence: Synthetic peptide
  Seed: MDPRMCSLMQGSTLP
MDPRMYSLFQASTVP

SEQ ID NO: 96117 - protein, 15 aa, Artificial Sequence
  Description of Artificial Sequence: Synthetic peptide
  Seed: MDPRMCSLMQGSTLP
MDPRMYSLFQGSTAP

SEQ ID NO: 96118 - protein, 15 aa, Artificial Sequence
  Description of Artificial Sequence: Synthetic peptide
  Seed: MDPRMCSLMQGSTLP
MDPRMYSLFQGSTIP

SEQ ID NO: 96119 - protein, 15 aa, Artificial Sequence
  Description of Artificial Sequence: Synthetic peptide
  Seed: MDPRMCSLMQGSTLP
MDPRMYSLFQGSTLP

SEQ ID NO: 96120 - protein, 15 aa, Artificial Sequence
  Description of Artificial Sequence: Synthetic peptide
  Seed: MDPRMCSLMQGSTLP
MDPRMYSLFQGSTVP

SEQ ID NO: 96121 - protein, 15 aa, Artificial Sequence
  Description of Artificial Sequence: Synthetic peptide
  Seed: MDPRMCSLMQGSTLP
MDPRMYSLFQPSTAP

SEQ ID NO: 96122 - protein, 15 aa, Artificial Sequence
  Description of Artificial Sequence: Synthetic peptide
  Seed: MDPRMCSLMQGSTLP
MDPRMYSLFQPSTIP

SEQ ID NO: 96123 - protein, 15 aa, Artificial Sequence
  Description of Artificial Sequence: Synthetic peptide
  Seed: MDPRMCSLMQGSTLP
MDPRMYSLFQPSTLP

SEQ ID NO: 96124 - protein, 15 aa, Artificial Sequence
  Description of Artificial Sequence: Synthetic peptide
  Seed: MDPRMCSLMQGSTLP
MDPRMYSLFQPSTSP

SEQ ID NO: 96125 - protein, 15 aa, Artificial Sequence
  Description of Artificial Sequence: Synthetic peptide
  Seed: MDPRMCSLMQGSTLP
MDPRMYSLFQPSTVP

SEQ ID NO: 96126 - protein, 15 aa, Artificial Sequence
  Description of Artificial Sequence: Synthetic peptide
  Seed: MDPRMCSLMQGSTLP
MDPRMYSLFQSSTAP

SEQ ID NO: 96127 - protein, 15 aa, Artificial Sequence
  Description of Artificial Sequence: Synthetic peptide
  Seed: MDPRMCSLMQGSTLP
MDPRMYSLFQSSTIP

SEQ ID NO: 96128 - protein, 15 aa, Artificial Sequence
  Description of Artificial Sequence: Synthetic peptide
  Seed: MDPRMCSLMQGSTLP
MDPRMYSLFQSSTLP

SEQ ID NO: 96129 - protein, 15 aa, Artificial Sequence
  Description of Artificial Sequence: Synthetic peptide
  Seed: MDPRMCSLMQGSTLP
MDPRMYSLFQSSTVP

SEQ ID NO: 96130 - protein, 15 aa, Artificial Sequence
  Description of Artificial Sequence: Synthetic peptide
  Seed: MDPRMCSLMQGSTLP
MDPRMYSLFQTSTAP

SEQ ID NO: 96131 - protein, 15 aa, Artificial Sequence
  Description of Artificial Sequence: Synthetic peptide
  Seed: MDPRMCSLMQGSTLP
MDPRMYSLGQASTIP

SEQ ID NO: 96132 - protein, 15 aa, Artificial Sequence
  Description of Artificial Sequence: Synthetic peptide
  Seed: MDPRMCSLMQGSTLP
MDPRMYSLGQASTLP

SEQ ID NO: 96133 - protein, 15 aa, Artificial Sequence
  Description of Artificial Sequence: Synthetic peptide
  Seed: MDPRMCSLMQGSTLP
MDPRMYSLGQASTVP

SEQ ID NO: 96134 - protein, 15 aa, Artificial Sequence
  Description of Artificial Sequence: Synthetic peptide
  Seed: MDPRMCSLMQGSTLP
MDPRMYSLGQGSTLP

SEQ ID NO: 96135 - protein, 15 aa, Artificial Sequence
  Description of Artificial Sequence: Synthetic peptide
  Seed: MDPRMCSLMQGSTLP
MDPRMYSLGQSSTLP

SEQ ID NO: 96136 - protein, 15 aa, Artificial Sequence
  Description of Artificial Sequence: Synthetic peptide
  Seed: MDPRMCSLMQGSTLP
MDPRMYSLHQASTLP

SEQ ID NO: 96137 - protein, 15 aa, Artificial Sequence
  Description of Artificial Sequence: Synthetic peptide
  Seed: MDPRMCSLMQGSTLP
MDPRMYSLIQASTAP

SEQ ID NO: 96138 - protein, 15 aa, Artificial Sequence
  Description of Artificial Sequence: Synthetic peptide
  Seed: MDPRMCSLMQGSTLP
MDPRMYSLIQASTCP

SEQ ID NO: 96139 - protein, 15 aa, Artificial Sequence
  Description of Artificial Sequence: Synthetic peptide
  Seed: MDPRMCSLMQGSTLP
MDPRMYSLIQASTFP

SEQ ID NO: 96140 - protein, 15 aa, Artificial Sequence
  Description of Artificial Sequence: Synthetic peptide
  Seed: MDPRMCSLMQGSTLP
MDPRMYSLIQASTGP

SEQ ID NO: 96141 - protein, 15 aa, Artificial Sequence
  Description of Artificial Sequence: Synthetic peptide
  Seed: MDPRMCSLMQGSTLP
MDPRMYSLIQASTHP

SEQ ID NO: 96142 - protein, 15 aa, Artificial Sequence
  Description of Artificial Sequence: Synthetic peptide
  Seed: MDPRMCSLMQGSTLP
MDPRMYSLIQASTIP

SEQ ID NO: 96143 - protein, 15 aa, Artificial Sequence
  Description of Artificial Sequence: Synthetic peptide
  Seed: MDPRMCSLMQGSTLP
MDPRMYSLIQASTLP

SEQ ID NO: 96144 - protein, 15 aa, Artificial Sequence
  Description of Artificial Sequence: Synthetic peptide
  Seed: MDPRMCSLMQGSTLP
MDPRMYSLIQASTMP

SEQ ID NO: 96145 - protein, 15 aa, Artificial Sequence
  Description of Artificial Sequence: Synthetic peptide
  Seed: MDPRMCSLMQGSTLP
MDPRMYSLIQASTNP

SEQ ID NO: 96146 - protein, 15 aa, Artificial Sequence
  Description of Artificial Sequence: Synthetic peptide
  Seed: MDPRMCSLMQGSTLP
MDPRMYSLIQASTPP

SEQ ID NO: 96147 - protein, 15 aa, Artificial Sequence
  Description of Artificial Sequence: Synthetic peptide
  Seed: MDPRMCSLMQGSTLP
MDPRMYSLIQASTQP

SEQ ID NO: 96148 - protein, 15 aa, Artificial Sequence
  Description of Artificial Sequence: Synthetic peptide
  Seed: MDPRMCSLMQGSTLP
MDPRMYSLIQASTSP

SEQ ID NO: 96149 - protein, 15 aa, Artificial Sequence
  Description of Artificial Sequence: Synthetic peptide
  Seed: MDPRMCSLMQGSTLP
MDPRMYSLIQASTTP

SEQ ID NO: 96150 - protein, 15 aa, Artificial Sequence
  Description of Artificial Sequence: Synthetic peptide
  Seed: MDPRMCSLMQGSTLP
MDPRMYSLIQASTVP

SEQ ID NO: 96151 - protein, 15 aa, Artificial Sequence
  Description of Artificial Sequence: Synthetic peptide
  Seed: MDPRMCSLMQGSTLP
MDPRMYSLIQGSTAP

SEQ ID NO: 96152 - protein, 15 aa, Artificial Sequence
  Description of Artificial Sequence: Synthetic peptide
  Seed: MDPRMCSLMQGSTLP
MDPRMYSLIQGSTCP

SEQ ID NO: 96153 - protein, 15 aa, Artificial Sequence
  Description of Artificial Sequence: Synthetic peptide
  Seed: MDPRMCSLMQGSTLP
MDPRMYSLIQGSTGP

SEQ ID NO: 96154 - protein, 15 aa, Artificial Sequence
  Description of Artificial Sequence: Synthetic peptide
  Seed: MDPRMCSLMQGSTLP
MDPRMYSLIQGSTIP

SEQ ID NO: 96155 - protein, 15 aa, Artificial Sequence
  Description of Artificial Sequence: Synthetic peptide
  Seed: MDPRMCSLMQGSTLP
MDPRMYSLIQGSTLP

SEQ ID NO: 96156 - protein, 15 aa, Artificial Sequence
  Description of Artificial Sequence: Synthetic peptide
  Seed: MDPRMCSLMQGSTLP
MDPRMYSLIQGSTMP

SEQ ID NO: 96157 - protein, 15 aa, Artificial Sequence
  Description of Artificial Sequence: Synthetic peptide
  Seed: MDPRMCSLMQGSTLP
MDPRMYSLIQGSTNP

SEQ ID NO: 96158 - protein, 15 aa, Artificial Sequence
  Description of Artificial Sequence: Synthetic peptide
  Seed: MDPRMCSLMQGSTLP
MDPRMYSLIQGSTSP

SEQ ID NO: 96159 - protein, 15 aa, Artificial Sequence
  Description of Artificial Sequence: Synthetic peptide
  Seed: MDPRMCSLMQGSTLP
MDPRMYSLIQGSTTP

SEQ ID NO: 96160 - protein, 15 aa, Artificial Sequence
  Description of Artificial Sequence: Synthetic peptide
  Seed: MDPRMCSLMQGSTLP
MDPRMYSLIQGSTVP

SEQ ID NO: 96161 - protein, 15 aa, Artificial Sequence
  Description of Artificial Sequence: Synthetic peptide
  Seed: MDPRMCSLMQGSTLP
MDPRMYSLIQISTAP

SEQ ID NO: 96162 - protein, 15 aa, Artificial Sequence
  Description of Artificial Sequence: Synthetic peptide
  Seed: MDPRMCSLMQGSTLP
MDPRMYSLIQISTGP

SEQ ID NO: 96163 - protein, 15 aa, Artificial Sequence
  Description of Artificial Sequence: Synthetic peptide
  Seed: MDPRMCSLMQGSTLP
MDPRMYSLIQISTIP

SEQ ID NO: 96164 - protein, 15 aa, Artificial Sequence
  Description of Artificial Sequence: Synthetic peptide
  Seed: MDPRMCSLMQGSTLP
MDPRMYSLIQISTLP

SEQ ID NO: 96165 - protein, 15 aa, Artificial Sequence
  Description of Artificial Sequence: Synthetic peptide
  Seed: MDPRMCSLMQGSTLP
MDPRMYSLIQISTMP

SEQ ID NO: 96166 - protein, 15 aa, Artificial Sequence
  Description of Artificial Sequence: Synthetic peptide
  Seed: MDPRMCSLMQGSTLP
MDPRMYSLIQISTNP

SEQ ID NO: 96167 - protein, 15 aa, Artificial Sequence
  Description of Artificial Sequence: Synthetic peptide
  Seed: MDPRMCSLMQGSTLP
MDPRMYSLIQISTSP

SEQ ID NO: 96168 - protein, 15 aa, Artificial Sequence
  Description of Artificial Sequence: Synthetic peptide
  Seed: MDPRMCSLMQGSTLP
MDPRMYSLIQISTTP

SEQ ID NO: 96169 - protein, 15 aa, Artificial Sequence
  Description of Artificial Sequence: Synthetic peptide
  Seed: MDPRMCSLMQGSTLP
MDPRMYSLIQISTVP

SEQ ID NO: 96170 - protein, 15 aa, Artificial Sequence
  Description of Artificial Sequence: Synthetic peptide
  Seed: MDPRMCSLMQGSTLP
MDPRMYSLIQLSTAP

SEQ ID NO: 96171 - protein, 15 aa, Artificial Sequence
  Description of Artificial Sequence: Synthetic peptide
  Seed: MDPRMCSLMQGSTLP
MDPRMYSLIQLSTNP

SEQ ID NO: 96172 - protein, 15 aa, Artificial Sequence
  Description of Artificial Sequence: Synthetic peptide
  Seed: MDPRMCSLMQGSTLP
MDPRMYSLIQLSTSP

SEQ ID NO: 96173 - protein, 15 aa, Artificial Sequence
  Description of Artificial Sequence: Synthetic peptide
  Seed: MDPRMCSLMQGSTLP
MDPRMYSLIQMSTAP

SEQ ID NO: 96174 - protein, 15 aa, Artificial Sequence
  Description of Artificial Sequence: Synthetic peptide
  Seed: MDPRMCSLMQGSTLP
MDPRMYSLIQMSTSP

SEQ ID NO: 96175 - protein, 15 aa, Artificial Sequence
  Description of Artificial Sequence: Synthetic peptide
  Seed: MDPRMCSLMQGSTLP
MDPRMYSLIQNSTAP

SEQ ID NO: 96176 - protein, 15 aa, Artificial Sequence
  Description of Artificial Sequence: Synthetic peptide
  Seed: MDPRMCSLMQGSTLP
MDPRMYSLIQNSTIP

SEQ ID NO: 96177 - protein, 15 aa, Artificial Sequence
  Description of Artificial Sequence: Synthetic peptide
  Seed: MDPRMCSLMQGSTLP
MDPRMYSLIQNSTLP

SEQ ID NO: 96178 - protein, 15 aa, Artificial Sequence
  Description of Artificial Sequence: Synthetic peptide
  Seed: MDPRMCSLMQGSTLP
MDPRMYSLIQNSTMP

SEQ ID NO: 96179 - protein, 15 aa, Artificial Sequence
  Description of Artificial Sequence: Synthetic peptide
  Seed: MDPRMCSLMQGSTLP
MDPRMYSLIQNSTNP

SEQ ID NO: 96180 - protein, 15 aa, Artificial Sequence
  Description of Artificial Sequence: Synthetic peptide
  Seed: MDPRMCSLMQGSTLP
MDPRMYSLIQNSTSP

SEQ ID NO: 96181 - protein, 15 aa, Artificial Sequence
  Description of Artificial Sequence: Synthetic peptide
  Seed: MDPRMCSLMQGSTLP
MDPRMYSLIQNSTTP

SEQ ID NO: 96182 - protein, 15 aa, Artificial Sequence
  Description of Artificial Sequence: Synthetic peptide
  Seed: MDPRMCSLMQGSTLP
MDPRMYSLIQNSTVP

SEQ ID NO: 96183 - protein, 15 aa, Artificial Sequence
  Description of Artificial Sequence: Synthetic peptide
  Seed: MDPRMCSLMQGSTLP
MDPRMYSLIQPSTAP

SEQ ID NO: 96184 - protein, 15 aa, Artificial Sequence
  Description of Artificial Sequence: Synthetic peptide
  Seed: MDPRMCSLMQGSTLP
MDPRMYSLIQPSTGP

SEQ ID NO: 96185 - protein, 15 aa, Artificial Sequence
  Description of Artificial Sequence: Synthetic peptide
  Seed: MDPRMCSLMQGSTLP
MDPRMYSLIQPSTHP

SEQ ID NO: 96186 - protein, 15 aa, Artificial Sequence
  Description of Artificial Sequence: Synthetic peptide
  Seed: MDPRMCSLMQGSTLP
MDPRMYSLIQPSTIP

SEQ ID NO: 96187 - protein, 15 aa, Artificial Sequence
  Description of Artificial Sequence: Synthetic peptide
  Seed: MDPRMCSLMQGSTLP
MDPRMYSLIQPSTLP

SEQ ID NO: 96188 - protein, 15 aa, Artificial Sequence
  Description of Artificial Sequence: Synthetic peptide
  Seed: MDPRMCSLMQGSTLP
MDPRMYSLIQPSTMP

SEQ ID NO: 96189 - protein, 15 aa, Artificial Sequence
  Description of Artificial Sequence: Synthetic peptide
  Seed: MDPRMCSLMQGSTLP
MDPRMYSLIQPSTNP

SEQ ID NO: 96190 - protein, 15 aa, Artificial Sequence
  Description of Artificial Sequence: Synthetic peptide
  Seed: MDPRMCSLMQGSTLP
MDPRMYSLIQPSTQP

SEQ ID NO: 96191 - protein, 15 aa, Artificial Sequence
  Description of Artificial Sequence: Synthetic peptide
  Seed: MDPRMCSLMQGSTLP
MDPRMYSLIQPSTSP

SEQ ID NO: 96192 - protein, 15 aa, Artificial Sequence
  Description of Artificial Sequence: Synthetic peptide
  Seed: MDPRMCSLMQGSTLP
MDPRMYSLIQPSTTP

SEQ ID NO: 96193 - protein, 15 aa, Artificial Sequence
  Description of Artificial Sequence: Synthetic peptide
  Seed: MDPRMCSLMQGSTLP
MDPRMYSLIQPSTVP

SEQ ID NO: 96194 - protein, 15 aa, Artificial Sequence
  Description of Artificial Sequence: Synthetic peptide
  Seed: MDPRMCSLMQGSTLP
MDPRMYSLIQSSTAP

SEQ ID NO: 96195 - protein, 15 aa, Artificial Sequence
  Description of Artificial Sequence: Synthetic peptide
  Seed: MDPRMCSLMQGSTLP
MDPRMYSLIQSSTGP

SEQ ID NO: 96196 - protein, 15 aa, Artificial Sequence
  Description of Artificial Sequence: Synthetic peptide
  Seed: MDPRMCSLMQGSTLP
MDPRMYSLIQSSTHP

SEQ ID NO: 96197 - protein, 15 aa, Artificial Sequence
  Description of Artificial Sequence: Synthetic peptide
  Seed: MDPRMCSLMQGSTLP
MDPRMYSLIQSSTIP

SEQ ID NO: 96198 - protein, 15 aa, Artificial Sequence
  Description of Artificial Sequence: Synthetic peptide
  Seed: MDPRMCSLMQGSTLP
MDPRMYSLIQSSTLP

SEQ ID NO: 96199 - protein, 15 aa, Artificial Sequence
  Description of Artificial Sequence: Synthetic peptide
  Seed: MDPRMCSLMQGSTLP
MDPRMYSLIQSSTMP

SEQ ID NO: 96200 - protein, 15 aa, Artificial Sequence
  Description of Artificial Sequence: Synthetic peptide
  Seed: MDPRMCSLMQGSTLP
MDPRMYSLIQSSTNP

SEQ ID NO: 96201 - protein, 15 aa, Artificial Sequence
  Description of Artificial Sequence: Synthetic peptide
  Seed: MDPRMCSLMQGSTLP
MDPRMYSLIQSSTQP

SEQ ID NO: 96202 - protein, 15 aa, Artificial Sequence
  Description of Artificial Sequence: Synthetic peptide
  Seed: MDPRMCSLMQGSTLP
MDPRMYSLIQSSTSP

SEQ ID NO: 96203 - protein, 15 aa, Artificial Sequence
  Description of Artificial Sequence: Synthetic peptide
  Seed: MDPRMCSLMQGSTLP
MDPRMYSLIQSSTTP

SEQ ID NO: 96204 - protein, 15 aa, Artificial Sequence
  Description of Artificial Sequence: Synthetic peptide
  Seed: MDPRMCSLMQGSTLP
MDPRMYSLIQSSTVP

SEQ ID NO: 96205 - protein, 15 aa, Artificial Sequence
  Description of Artificial Sequence: Synthetic peptide
  Seed: MDPRMCSLMQGSTLP
MDPRMYSLIQTSTAP

SEQ ID NO: 96206 - protein, 15 aa, Artificial Sequence
  Description of Artificial Sequence: Synthetic peptide
  Seed: MDPRMCSLMQGSTLP
MDPRMYSLIQTSTGP

SEQ ID NO: 96207 - protein, 15 aa, Artificial Sequence
  Description of Artificial Sequence: Synthetic peptide
  Seed: MDPRMCSLMQGSTLP
MDPRMYSLIQTSTHP

SEQ ID NO: 96208 - protein, 15 aa, Artificial Sequence
  Description of Artificial Sequence: Synthetic peptide
  Seed: MDPRMCSLMQGSTLP
MDPRMYSLIQTSTIP

SEQ ID NO: 96209 - protein, 15 aa, Artificial Sequence
  Description of Artificial Sequence: Synthetic peptide
  Seed: MDPRMCSLMQGSTLP
MDPRMYSLIQTSTLP

SEQ ID NO: 96210 - protein, 15 aa, Artificial Sequence
  Description of Artificial Sequence: Synthetic peptide
  Seed: MDPRMCSLMQGSTLP
MDPRMYSLIQTSTMP

SEQ ID NO: 96211 - protein, 15 aa, Artificial Sequence
  Description of Artificial Sequence: Synthetic peptide
  Seed: MDPRMCSLMQGSTLP
MDPRMYSLIQTSTNP

SEQ ID NO: 96212 - protein, 15 aa, Artificial Sequence
  Description of Artificial Sequence: Synthetic peptide
  Seed: MDPRMCSLMQGSTLP
MDPRMYSLIQTSTSP

SEQ ID NO: 96213 - protein, 15 aa, Artificial Sequence
  Description of Artificial Sequence: Synthetic peptide
  Seed: MDPRMCSLMQGSTLP
MDPRMYSLIQTSTTP

SEQ ID NO: 96214 - protein, 15 aa, Artificial Sequence
  Description of Artificial Sequence: Synthetic peptide
  Seed: MDPRMCSLMQGSTLP
MDPRMYSLIQTSTVP

SEQ ID NO: 96215 - protein, 15 aa, Artificial Sequence
  Description of Artificial Sequence: Synthetic peptide
  Seed: MDPRMCSLMQGSTLP
MDPRMYSLIQVSTAP

SEQ ID NO: 96216 - protein, 15 aa, Artificial Sequence
  Description of Artificial Sequence: Synthetic peptide
  Seed: MDPRMCSLMQGSTLP
MDPRMYSLIQVSTGP

SEQ ID NO: 96217 - protein, 15 aa, Artificial Sequence
  Description of Artificial Sequence: Synthetic peptide
  Seed: MDPRMCSLMQGSTLP
MDPRMYSLIQVSTHP

SEQ ID NO: 96218 - protein, 15 aa, Artificial Sequence
  Description of Artificial Sequence: Synthetic peptide
  Seed: MDPRMCSLMQGSTLP
MDPRMYSLIQVSTIP

SEQ ID NO: 96219 - protein, 15 aa, Artificial Sequence
  Description of Artificial Sequence: Synthetic peptide
  Seed: MDPRMCSLMQGSTLP
MDPRMYSLIQVSTLP

SEQ ID NO: 96220 - protein, 15 aa, Artificial Sequence
  Description of Artificial Sequence: Synthetic peptide
  Seed: MDPRMCSLMQGSTLP
MDPRMYSLIQVSTMP

SEQ ID NO: 96221 - protein, 15 aa, Artificial Sequence
  Description of Artificial Sequence: Synthetic peptide
  Seed: MDPRMCSLMQGSTLP
MDPRMYSLIQVSTNP

SEQ ID NO: 96222 - protein, 15 aa, Artificial Sequence
  Description of Artificial Sequence: Synthetic peptide
  Seed: MDPRMCSLMQGSTLP
MDPRMYSLIQVSTQP

SEQ ID NO: 96223 - protein, 15 aa, Artificial Sequence
  Description of Artificial Sequence: Synthetic peptide
  Seed: MDPRMCSLMQGSTLP
MDPRMYSLIQVSTSP

SEQ ID NO: 96224 - protein, 15 aa, Artificial Sequence
  Description of Artificial Sequence: Synthetic peptide
  Seed: MDPRMCSLMQGSTLP
MDPRMYSLIQVSTTP

SEQ ID NO: 96225 - protein, 15 aa, Artificial Sequence
  Description of Artificial Sequence: Synthetic peptide
  Seed: MDPRMCSLMQGSTLP
MDPRMYSLIQVSTVP

SEQ ID NO: 96226 - protein, 15 aa, Artificial Sequence
  Description of Artificial Sequence: Synthetic peptide
  Seed: MDPRMCSLMQGSTLP
MDPRMYSLLQASTAP

SEQ ID NO: 96227 - protein, 15 aa, Artificial Sequence
  Description of Artificial Sequence: Synthetic peptide
  Seed: MDPRMCSLMQGSTLP
MDPRMYSLLQASTCP

SEQ ID NO: 96228 - protein, 15 aa, Artificial Sequence
  Description of Artificial Sequence: Synthetic peptide
  Seed: MDPRMCSLMQGSTLP
MDPRMYSLLQASTDP

SEQ ID NO: 96229 - protein, 15 aa, Artificial Sequence
  Description of Artificial Sequence: Synthetic peptide
  Seed: MDPRMCSLMQGSTLP
MDPRMYSLLQASTEP

SEQ ID NO: 96230 - protein, 15 aa, Artificial Sequence
  Description of Artificial Sequence: Synthetic peptide
  Seed: MDPRMCSLMQGSTLP
MDPRMYSLLQASTFP

SEQ ID NO: 96231 - protein, 15 aa, Artificial Sequence
  Description of Artificial Sequence: Synthetic peptide
  Seed: MDPRMCSLMQGSTLP
MDPRMYSLLQASTGP

SEQ ID NO: 96232 - protein, 15 aa, Artificial Sequence
  Description of Artificial Sequence: Synthetic peptide
  Seed: MDPRMCSLMQGSTLP
MDPRMYSLLQASTHP

SEQ ID NO: 96233 - protein, 15 aa, Artificial Sequence
  Description of Artificial Sequence: Synthetic peptide
  Seed: MDPRMCSLMQGSTLP
MDPRMYSLLQASTIP

SEQ ID NO: 96234 - protein, 15 aa, Artificial Sequence
  Description of Artificial Sequence: Synthetic peptide
  Seed: MDPRMCSLMQGSTLP
MDPRMYSLLQASTKP

SEQ ID NO: 96235 - protein, 15 aa, Artificial Sequence
  Description of Artificial Sequence: Synthetic peptide
  Seed: MDPRMCSLMQGSTLP
MDPRMYSLLQASTLP

SEQ ID NO: 96236 - protein, 15 aa, Artificial Sequence
  Description of Artificial Sequence: Synthetic peptide
  Seed: MDPRMCSLMQGSTLP
MDPRMYSLLQASTMP

SEQ ID NO: 96237 - protein, 15 aa, Artificial Sequence
  Description of Artificial Sequence: Synthetic peptide
  Seed: MDPRMCSLMQGSTLP
MDPRMYSLLQASTNP

SEQ ID NO: 96238 - protein, 15 aa, Artificial Sequence
  Description of Artificial Sequence: Synthetic peptide
  Seed: MDPRMCSLMQGSTLP
MDPRMYSLLQASTPP

SEQ ID NO: 96239 - protein, 15 aa, Artificial Sequence
  Description of Artificial Sequence: Synthetic peptide
  Seed: MDPRMCSLMQGSTLP
MDPRMYSLLQASTQP

SEQ ID NO: 96240 - protein, 15 aa, Artificial Sequence
  Description of Artificial Sequence: Synthetic peptide
  Seed: MDPRMCSLMQGSTLP
MDPRMYSLLQASTRP

SEQ ID NO: 96241 - protein, 15 aa, Artificial Sequence
  Description of Artificial Sequence: Synthetic peptide
  Seed: MDPRMCSLMQGSTLP
MDPRMYSLLQASTSP

SEQ ID NO: 96242 - protein, 15 aa, Artificial Sequence
  Description of Artificial Sequence: Synthetic peptide
  Seed: MDPRMCSLMQGSTLP
MDPRMYSLLQASTTP

SEQ ID NO: 96243 - protein, 15 aa, Artificial Sequence
  Description of Artificial Sequence: Synthetic peptide
  Seed: MDPRMCSLMQGSTLP
MDPRMYSLLQASTVP

SEQ ID NO: 96244 - protein, 15 aa, Artificial Sequence
  Description of Artificial Sequence: Synthetic peptide
  Seed: MDPRMCSLMQGSTLP
MDPRMYSLLQASTWP

SEQ ID NO: 96245 - protein, 15 aa, Artificial Sequence
  Description of Artificial Sequence: Synthetic peptide
  Seed: MDPRMCSLMQGSTLP
MDPRMYSLLQASTYP

SEQ ID NO: 96246 - protein, 15 aa, Artificial Sequence
  Description of Artificial Sequence: Synthetic peptide
  Seed: MDPRMCSLMQGSTLP
MDPRMYSLLQGSTAP

SEQ ID NO: 96247 - protein, 15 aa, Artificial Sequence
  Description of Artificial Sequence: Synthetic peptide
  Seed: MDPRMCSLMQGSTLP
MDPRMYSLLQGSTCP

SEQ ID NO: 96248 - protein, 15 aa, Artificial Sequence
  Description of Artificial Sequence: Synthetic peptide
  Seed: MDPRMCSLMQGSTLP
MDPRMYSLLQGSTFP

SEQ ID NO: 96249 - protein, 15 aa, Artificial Sequence
  Description of Artificial Sequence: Synthetic peptide
  Seed: MDPRMCSLMQGSTLP
MDPRMYSLLQGSTGP

SEQ ID NO: 96250 - protein, 15 aa, Artificial Sequence
  Description of Artificial Sequence: Synthetic peptide
  Seed: MDPRMCSLMQGSTLP
MDPRMYSLLQGSTHP

SEQ ID NO: 96251 - protein, 15 aa, Artificial Sequence
  Description of Artificial Sequence: Synthetic peptide
  Seed: MDPRMCSLMQGSTLP
MDPRMYSLLQGSTIP

SEQ ID NO: 96252 - protein, 15 aa, Artificial Sequence
  Description of Artificial Sequence: Synthetic peptide
  Seed: MDPRMCSLMQGSTLP
MDPRMYSLLQGSTLP

SEQ ID NO: 96253 - protein, 15 aa, Artificial Sequence
  Description of Artificial Sequence: Synthetic peptide
  Seed: MDPRMCSLMQGSTLP
MDPRMYSLLQGSTMP

SEQ ID NO: 96254 - protein, 15 aa, Artificial Sequence
  Description of Artificial Sequence: Synthetic peptide
  Seed: MDPRMCSLMQGSTLP
MDPRMYSLLQGSTNP

SEQ ID NO: 96255 - protein, 15 aa, Artificial Sequence
  Description of Artificial Sequence: Synthetic peptide
  Seed: MDPRMCSLMQGSTLP
MDPRMYSLLQGSTPP

SEQ ID NO: 96256 - protein, 15 aa, Artificial Sequence
  Description of Artificial Sequence: Synthetic peptide
  Seed: MDPRMCSLMQGSTLP
MDPRMYSLLQGSTQP

SEQ ID NO: 96257 - protein, 15 aa, Artificial Sequence
  Description of Artificial Sequence: Synthetic peptide
  Seed: MDPRMCSLMQGSTLP
MDPRMYSLLQGSTSP

SEQ ID NO: 96258 - protein, 15 aa, Artificial Sequence
  Description of Artificial Sequence: Synthetic peptide
  Seed: MDPRMCSLMQGSTLP
MDPRMYSLLQGSTTP

SEQ ID NO: 96259 - protein, 15 aa, Artificial Sequence
  Description of Artificial Sequence: Synthetic peptide
  Seed: MDPRMCSLMQGSTLP
MDPRMYSLLQGSTVP

SEQ ID NO: 96260 - protein, 15 aa, Artificial Sequence
  Description of Artificial Sequence: Synthetic peptide
  Seed: MDPRMCSLMQGSTLP
MDPRMYSLLQGSTYP

SEQ ID NO: 96261 - protein, 15 aa, Artificial Sequence
  Description of Artificial Sequence: Synthetic peptide
  Seed: MDPRMCSLMQGSTLP
MDPRMYSLLQHSTAP

SEQ ID NO: 96262 - protein, 15 aa, Artificial Sequence
  Description of Artificial Sequence: Synthetic peptide
  Seed: MDPRMCSLMQGSTLP
MDPRMYSLLQHSTIP

SEQ ID NO: 96263 - protein, 15 aa, Artificial Sequence
  Description of Artificial Sequence: Synthetic peptide
  Seed: MDPRMCSLMQGSTLP
MDPRMYSLLQHSTLP

SEQ ID NO: 96264 - protein, 15 aa, Artificial Sequence
  Description of Artificial Sequence: Synthetic peptide
  Seed: MDPRMCSLMQGSTLP
MDPRMYSLLQHSTVP

SEQ ID NO: 96265 - protein, 15 aa, Artificial Sequence
  Description of Artificial Sequence: Synthetic peptide
  Seed: MDPRMCSLMQGSTLP
MDPRMYSLLQISTAP

SEQ ID NO: 96266 - protein, 15 aa, Artificial Sequence
  Description of Artificial Sequence: Synthetic peptide
  Seed: MDPRMCSLMQGSTLP
MDPRMYSLLQISTGP

SEQ ID NO: 96267 - protein, 15 aa, Artificial Sequence
  Description of Artificial Sequence: Synthetic peptide
  Seed: MDPRMCSLMQGSTLP
MDPRMYSLLQISTHP

SEQ ID NO: 96268 - protein, 15 aa, Artificial Sequence
  Description of Artificial Sequence: Synthetic peptide
  Seed: MDPRMCSLMQGSTLP
MDPRMYSLLQISTIP

SEQ ID NO: 96269 - protein, 15 aa, Artificial Sequence
  Description of Artificial Sequence: Synthetic peptide
  Seed: MDPRMCSLMQGSTLP
MDPRMYSLLQISTLP

SEQ ID NO: 96270 - protein, 15 aa, Artificial Sequence
  Description of Artificial Sequence: Synthetic peptide
  Seed: MDPRMCSLMQGSTLP
MDPRMYSLLQISTMP

SEQ ID NO: 96271 - protein, 15 aa, Artificial Sequence
  Description of Artificial Sequence: Synthetic peptide
  Seed: MDPRMCSLMQGSTLP
MDPRMYSLLQISTNP

SEQ ID NO: 96272 - protein, 15 aa, Artificial Sequence
  Description of Artificial Sequence: Synthetic peptide
  Seed: MDPRMCSLMQGSTLP
MDPRMYSLLQISTQP

SEQ ID NO: 96273 - protein, 15 aa, Artificial Sequence
  Description of Artificial Sequence: Synthetic peptide
  Seed: MDPRMCSLMQGSTLP
MDPRMYSLLQISTSP

SEQ ID NO: 96274 - protein, 15 aa, Artificial Sequence
  Description of Artificial Sequence: Synthetic peptide
  Seed: MDPRMCSLMQGSTLP
MDPRMYSLLQISTTP

SEQ ID NO: 96275 - protein, 15 aa, Artificial Sequence
  Description of Artificial Sequence: Synthetic peptide
  Seed: MDPRMCSLMQGSTLP
MDPRMYSLLQISTVP

SEQ ID NO: 96276 - protein, 15 aa, Artificial Sequence
  Description of Artificial Sequence: Synthetic peptide
  Seed: MDPRMCSLMQGSTLP
MDPRMYSLLQLSTAP

SEQ ID NO: 96277 - protein, 15 aa, Artificial Sequence
  Description of Artificial Sequence: Synthetic peptide
  Seed: MDPRMCSLMQGSTLP
MDPRMYSLLQLSTIP

SEQ ID NO: 96278 - protein, 15 aa, Artificial Sequence
  Description of Artificial Sequence: Synthetic peptide
  Seed: MDPRMCSLMQGSTLP
MDPRMYSLLQLSTLP

SEQ ID NO: 96279 - protein, 15 aa, Artificial Sequence
  Description of Artificial Sequence: Synthetic peptide
  Seed: MDPRMCSLMQGSTLP
MDPRMYSLLQLSTMP

SEQ ID NO: 96280 - protein, 15 aa, Artificial Sequence
  Description of Artificial Sequence: Synthetic peptide
  Seed: MDPRMCSLMQGSTLP
MDPRMYSLLQLSTNP

SEQ ID NO: 96281 - protein, 15 aa, Artificial Sequence
  Description of Artificial Sequence: Synthetic peptide
  Seed: MDPRMCSLMQGSTLP
MDPRMYSLLQLSTSP

SEQ ID NO: 96282 - protein, 15 aa, Artificial Sequence
  Description of Artificial Sequence: Synthetic peptide
  Seed: MDPRMCSLMQGSTLP
MDPRMYSLLQLSTTP

SEQ ID NO: 96283 - protein, 15 aa, Artificial Sequence
  Description of Artificial Sequence: Synthetic peptide
  Seed: MDPRMCSLMQGSTLP
MDPRMYSLLQLSTVP

SEQ ID NO: 96284 - protein, 15 aa, Artificial Sequence
  Description of Artificial Sequence: Synthetic peptide
  Seed: MDPRMCSLMQGSTLP
MDPRMYSLLQMSTAP

SEQ ID NO: 96285 - protein, 15 aa, Artificial Sequence
  Description of Artificial Sequence: Synthetic peptide
  Seed: MDPRMCSLMQGSTLP
MDPRMYSLLQMSTIP

SEQ ID NO: 96286 - protein, 15 aa, Artificial Sequence
  Description of Artificial Sequence: Synthetic peptide
  Seed: MDPRMCSLMQGSTLP
MDPRMYSLLQMSTLP

SEQ ID NO: 96287 - protein, 15 aa, Artificial Sequence
  Description of Artificial Sequence: Synthetic peptide
  Seed: MDPRMCSLMQGSTLP
MDPRMYSLLQMSTNP

SEQ ID NO: 96288 - protein, 15 aa, Artificial Sequence
  Description of Artificial Sequence: Synthetic peptide
  Seed: MDPRMCSLMQGSTLP
MDPRMYSLLQMSTSP

SEQ ID NO: 96289 - protein, 15 aa, Artificial Sequence
  Description of Artificial Sequence: Synthetic peptide
  Seed: MDPRMCSLMQGSTLP
MDPRMYSLLQMSTTP

SEQ ID NO: 96290 - protein, 15 aa, Artificial Sequence
  Description of Artificial Sequence: Synthetic peptide
  Seed: MDPRMCSLMQGSTLP
MDPRMYSLLQMSTVP

SEQ ID NO: 96291 - protein, 15 aa, Artificial Sequence
  Description of Artificial Sequence: Synthetic peptide
  Seed: MDPRMCSLMQGSTLP
MDPRMYSLLQNSTAP

SEQ ID NO: 96292 - protein, 15 aa, Artificial Sequence
  Description of Artificial Sequence: Synthetic peptide
  Seed: MDPRMCSLMQGSTLP
MDPRMYSLLQNSTGP

SEQ ID NO: 96293 - protein, 15 aa, Artificial Sequence
  Description of Artificial Sequence: Synthetic peptide
  Seed: MDPRMCSLMQGSTLP
MDPRMYSLLQNSTIP

SEQ ID NO: 96294 - protein, 15 aa, Artificial Sequence
  Description of Artificial Sequence: Synthetic peptide
  Seed: MDPRMCSLMQGSTLP
MDPRMYSLLQNSTLP

SEQ ID NO: 96295 - protein, 15 aa, Artificial Sequence
  Description of Artificial Sequence: Synthetic peptide
  Seed: MDPRMCSLMQGSTLP
MDPRMYSLLQNSTMP

SEQ ID NO: 96296 - protein, 15 aa, Artificial Sequence
  Description of Artificial Sequence: Synthetic peptide
  Seed: MDPRMCSLMQGSTLP
MDPRMYSLLQNSTNP

SEQ ID NO: 96297 - protein, 15 aa, Artificial Sequence
  Description of Artificial Sequence: Synthetic peptide
  Seed: MDPRMCSLMQGSTLP
MDPRMYSLLQNSTSP

SEQ ID NO: 96298 - protein, 15 aa, Artificial Sequence
  Description of Artificial Sequence: Synthetic peptide
  Seed: MDPRMCSLMQGSTLP
MDPRMYSLLQNSTTP

SEQ ID NO: 96299 - protein, 15 aa, Artificial Sequence
  Description of Artificial Sequence: Synthetic peptide
  Seed: MDPRMCSLMQGSTLP
MDPRMYSLLQNSTVP

SEQ ID NO: 96300 - protein, 15 aa, Artificial Sequence
  Description of Artificial Sequence: Synthetic peptide
  Seed: MDPRMCSLMQGSTLP
MDPRMYSLLQPSTAP

SEQ ID NO: 96301 - protein, 15 aa, Artificial Sequence
  Description of Artificial Sequence: Synthetic peptide
  Seed: MDPRMCSLMQGSTLP
MDPRMYSLLQPSTCP

SEQ ID NO: 96302 - protein, 15 aa, Artificial Sequence
  Description of Artificial Sequence: Synthetic peptide
  Seed: MDPRMCSLMQGSTLP
MDPRMYSLLQPSTFP

SEQ ID NO: 96303 - protein, 15 aa, Artificial Sequence
  Description of Artificial Sequence: Synthetic peptide
  Seed: MDPRMCSLMQGSTLP
MDPRMYSLLQPSTGP

SEQ ID NO: 96304 - protein, 15 aa, Artificial Sequence
  Description of Artificial Sequence: Synthetic peptide
  Seed: MDPRMCSLMQGSTLP
MDPRMYSLLQPSTHP

SEQ ID NO: 96305 - protein, 15 aa, Artificial Sequence
  Description of Artificial Sequence: Synthetic peptide
  Seed: MDPRMCSLMQGSTLP
MDPRMYSLLQPSTIP

SEQ ID NO: 96306 - protein, 15 aa, Artificial Sequence
  Description of Artificial Sequence: Synthetic peptide
  Seed: MDPRMCSLMQGSTLP
MDPRMYSLLQPSTLP

SEQ ID NO: 96307 - protein, 15 aa, Artificial Sequence
  Description of Artificial Sequence: Synthetic peptide
  Seed: MDPRMCSLMQGSTLP
MDPRMYSLLQPSTMP

SEQ ID NO: 96308 - protein, 15 aa, Artificial Sequence
  Description of Artificial Sequence: Synthetic peptide
  Seed: MDPRMCSLMQGSTLP
MDPRMYSLLQPSTNP

SEQ ID NO: 96309 - protein, 15 aa, Artificial Sequence
  Description of Artificial Sequence: Synthetic peptide
  Seed: MDPRMCSLMQGSTLP
MDPRMYSLLQPSTPP

SEQ ID NO: 96310 - protein, 15 aa, Artificial Sequence
  Description of Artificial Sequence: Synthetic peptide
  Seed: MDPRMCSLMQGSTLP
MDPRMYSLLQPSTQP

SEQ ID NO: 96311 - protein, 15 aa, Artificial Sequence
  Description of Artificial Sequence: Synthetic peptide
  Seed: MDPRMCSLMQGSTLP
MDPRMYSLLQPSTSP

SEQ ID NO: 96312 - protein, 15 aa, Artificial Sequence
  Description of Artificial Sequence: Synthetic peptide
  Seed: MDPRMCSLMQGSTLP
MDPRMYSLLQPSTTP

SEQ ID NO: 96313 - protein, 15 aa, Artificial Sequence
  Description of Artificial Sequence: Synthetic peptide
  Seed: MDPRMCSLMQGSTLP
MDPRMYSLLQPSTVP

SEQ ID NO: 96314 - protein, 15 aa, Artificial Sequence
  Description of Artificial Sequence: Synthetic peptide
  Seed: MDPRMCSLMQGSTLP
MDPRMYSLLQQSTLP

SEQ ID NO: 96315 - protein, 15 aa, Artificial Sequence
  Description of Artificial Sequence: Synthetic peptide
  Seed: MDPRMCSLMQGSTLP
MDPRMYSLLQQSTVP

SEQ ID NO: 96316 - protein, 15 aa, Artificial Sequence
  Description of Artificial Sequence: Synthetic peptide
  Seed: MDPRMCSLMQGSTLP
MDPRMYSLLQSSTAP

SEQ ID NO: 96317 - protein, 15 aa, Artificial Sequence
  Description of Artificial Sequence: Synthetic peptide
  Seed: MDPRMCSLMQGSTLP
MDPRMYSLLQSSTCP

SEQ ID NO: 96318 - protein, 15 aa, Artificial Sequence
  Description of Artificial Sequence: Synthetic peptide
  Seed: MDPRMCSLMQGSTLP
MDPRMYSLLQSSTFP

SEQ ID NO: 96319 - protein, 15 aa, Artificial Sequence
  Description of Artificial Sequence: Synthetic peptide
  Seed: MDPRMCSLMQGSTLP
MDPRMYSLLQSSTGP

SEQ ID NO: 96320 - protein, 15 aa, Artificial Sequence
  Description of Artificial Sequence: Synthetic peptide
  Seed: MDPRMCSLMQGSTLP
MDPRMYSLLQSSTHP

SEQ ID NO: 96321 - protein, 15 aa, Artificial Sequence
  Description of Artificial Sequence: Synthetic peptide
  Seed: MDPRMCSLMQGSTLP
MDPRMYSLLQSSTIP

SEQ ID NO: 96322 - protein, 15 aa, Artificial Sequence
  Description of Artificial Sequence: Synthetic peptide
  Seed: MDPRMCSLMQGSTLP
MDPRMYSLLQSSTLP

SEQ ID NO: 96323 - protein, 15 aa, Artificial Sequence
  Description of Artificial Sequence: Synthetic peptide
  Seed: MDPRMCSLMQGSTLP
MDPRMYSLLQSSTMP

SEQ ID NO: 96324 - protein, 15 aa, Artificial Sequence
  Description of Artificial Sequence: Synthetic peptide
  Seed: MDPRMCSLMQGSTLP
MDPRMYSLLQSSTNP

SEQ ID NO: 96325 - protein, 15 aa, Artificial Sequence
  Description of Artificial Sequence: Synthetic peptide
  Seed: MDPRMCSLMQGSTLP
MDPRMYSLLQSSTPP

SEQ ID NO: 96326 - protein, 15 aa, Artificial Sequence
  Description of Artificial Sequence: Synthetic peptide
  Seed: MDPRMCSLMQGSTLP
MDPRMYSLLQSSTQP

SEQ ID NO: 96327 - protein, 15 aa, Artificial Sequence
  Description of Artificial Sequence: Synthetic peptide
  Seed: MDPRMCSLMQGSTLP
MDPRMYSLLQSSTSP

SEQ ID NO: 96328 - protein, 15 aa, Artificial Sequence
  Description of Artificial Sequence: Synthetic peptide
  Seed: MDPRMCSLMQGSTLP
MDPRMYSLLQSSTTP

SEQ ID NO: 96329 - protein, 15 aa, Artificial Sequence
  Description of Artificial Sequence: Synthetic peptide
  Seed: MDPRMCSLMQGSTLP
MDPRMYSLLQSSTVP

SEQ ID NO: 96330 - protein, 15 aa, Artificial Sequence
  Description of Artificial Sequence: Synthetic peptide
  Seed: MDPRMCSLMQGSTLP
MDPRMYSLLQSSTYP

SEQ ID NO: 96331 - protein, 15 aa, Artificial Sequence
  Description of Artificial Sequence: Synthetic peptide
  Seed: MDPRMCSLMQGSTLP
MDPRMYSLLQTSTAP

SEQ ID NO: 96332 - protein, 15 aa, Artificial Sequence
  Description of Artificial Sequence: Synthetic peptide
  Seed: MDPRMCSLMQGSTLP
MDPRMYSLLQTSTGP

SEQ ID NO: 96333 - protein, 15 aa, Artificial Sequence
  Description of Artificial Sequence: Synthetic peptide
  Seed: MDPRMCSLMQGSTLP
MDPRMYSLLQTSTHP

SEQ ID NO: 96334 - protein, 15 aa, Artificial Sequence
  Description of Artificial Sequence: Synthetic peptide
  Seed: MDPRMCSLMQGSTLP
MDPRMYSLLQTSTIP

SEQ ID NO: 96335 - protein, 15 aa, Artificial Sequence
  Description of Artificial Sequence: Synthetic peptide
  Seed: MDPRMCSLMQGSTLP
MDPRMYSLLQTSTLP

SEQ ID NO: 96336 - protein, 15 aa, Artificial Sequence
  Description of Artificial Sequence: Synthetic peptide
  Seed: MDPRMCSLMQGSTLP
MDPRMYSLLQTSTMP

SEQ ID NO: 96337 - protein, 15 aa, Artificial Sequence
  Description of Artificial Sequence: Synthetic peptide
  Seed: MDPRMCSLMQGSTLP
MDPRMYSLLQTSTNP

SEQ ID NO: 96338 - protein, 15 aa, Artificial Sequence
  Description of Artificial Sequence: Synthetic peptide
  Seed: MDPRMCSLMQGSTLP
MDPRMYSLLQTSTQP

SEQ ID NO: 96339 - protein, 15 aa, Artificial Sequence
  Description of Artificial Sequence: Synthetic peptide
  Seed: MDPRMCSLMQGSTLP
MDPRMYSLLQTSTSP

SEQ ID NO: 96340 - protein, 15 aa, Artificial Sequence
  Description of Artificial Sequence: Synthetic peptide
  Seed: MDPRMCSLMQGSTLP
MDPRMYSLLQTSTTP

SEQ ID NO: 96341 - protein, 15 aa, Artificial Sequence
  Description of Artificial Sequence: Synthetic peptide
  Seed: MDPRMCSLMQGSTLP
MDPRMYSLLQTSTVP

SEQ ID NO: 96342 - protein, 15 aa, Artificial Sequence
  Description of Artificial Sequence: Synthetic peptide
  Seed: MDPRMCSLMQGSTLP
MDPRMYSLLQVSTAP

SEQ ID NO: 96343 - protein, 15 aa, Artificial Sequence
  Description of Artificial Sequence: Synthetic peptide
  Seed: MDPRMCSLMQGSTLP
MDPRMYSLLQVSTGP

SEQ ID NO: 96344 - protein, 15 aa, Artificial Sequence
  Description of Artificial Sequence: Synthetic peptide
  Seed: MDPRMCSLMQGSTLP
MDPRMYSLLQVSTHP

SEQ ID NO: 96345 - protein, 15 aa, Artificial Sequence
  Description of Artificial Sequence: Synthetic peptide
  Seed: MDPRMCSLMQGSTLP
MDPRMYSLLQVSTIP

SEQ ID NO: 96346 - protein, 15 aa, Artificial Sequence
  Description of Artificial Sequence: Synthetic peptide
  Seed: MDPRMCSLMQGSTLP
MDPRMYSLLQVSTLP

SEQ ID NO: 96347 - protein, 15 aa, Artificial Sequence
  Description of Artificial Sequence: Synthetic peptide
  Seed: MDPRMCSLMQGSTLP
MDPRMYSLLQVSTMP

SEQ ID NO: 96348 - protein, 15 aa, Artificial Sequence
  Description of Artificial Sequence: Synthetic peptide
  Seed: MDPRMCSLMQGSTLP
MDPRMYSLLQVSTNP

SEQ ID NO: 96349 - protein, 15 aa, Artificial Sequence
  Description of Artificial Sequence: Synthetic peptide
  Seed: MDPRMCSLMQGSTLP
MDPRMYSLLQVSTPP

SEQ ID NO: 96350 - protein, 15 aa, Artificial Sequence
  Description of Artificial Sequence: Synthetic peptide
  Seed: MDPRMCSLMQGSTLP
MDPRMYSLLQVSTQP

SEQ ID NO: 96351 - protein, 15 aa, Artificial Sequence
  Description of Artificial Sequence: Synthetic peptide
  Seed: MDPRMCSLMQGSTLP
MDPRMYSLLQVSTSP

SEQ ID NO: 96352 - protein, 15 aa, Artificial Sequence
  Description of Artificial Sequence: Synthetic peptide
  Seed: MDPRMCSLMQGSTLP
MDPRMYSLLQVSTTP

SEQ ID NO: 96353 - protein, 15 aa, Artificial Sequence
  Description of Artificial Sequence: Synthetic peptide
  Seed: MDPRMCSLMQGSTLP
MDPRMYSLLQVSTVP

SEQ ID NO: 96354 - protein, 15 aa, Artificial Sequence
  Description of Artificial Sequence: Synthetic peptide
  Seed: MDPRMCSLMQGSTLP
MDPRMYSLMQASTAP

SEQ ID NO: 96355 - protein, 15 aa, Artificial Sequence
  Description of Artificial Sequence: Synthetic peptide
  Seed: MDPRMCSLMQGSTLP
MDPRMYSLMQASTCP

SEQ ID NO: 96356 - protein, 15 aa, Artificial Sequence
  Description of Artificial Sequence: Synthetic peptide
  Seed: MDPRMCSLMQGSTLP
MDPRMYSLMQASTEP

SEQ ID NO: 96357 - protein, 15 aa, Artificial Sequence
  Description of Artificial Sequence: Synthetic peptide
  Seed: MDPRMCSLMQGSTLP
MDPRMYSLMQASTFP

SEQ ID NO: 96358 - protein, 15 aa, Artificial Sequence
  Description of Artificial Sequence: Synthetic peptide
  Seed: MDPRMCSLMQGSTLP
MDPRMYSLMQASTGP

SEQ ID NO: 96359 - protein, 15 aa, Artificial Sequence
  Description of Artificial Sequence: Synthetic peptide
  Seed: MDPRMCSLMQGSTLP
MDPRMYSLMQASTHP

SEQ ID NO: 96360 - protein, 15 aa, Artificial Sequence
  Description of Artificial Sequence: Synthetic peptide
  Seed: MDPRMCSLMQGSTLP
MDPRMYSLMQASTIP

SEQ ID NO: 96361 - protein, 15 aa, Artificial Sequence
  Description of Artificial Sequence: Synthetic peptide
  Seed: MDPRMCSLMQGSTLP
MDPRMYSLMQASTKP

SEQ ID NO: 96362 - protein, 15 aa, Artificial Sequence
  Description of Artificial Sequence: Synthetic peptide
  Seed: MDPRMCSLMQGSTLP
MDPRMYSLMQASTLP

SEQ ID NO: 96363 - protein, 15 aa, Artificial Sequence
  Description of Artificial Sequence: Synthetic peptide
  Seed: MDPRMCSLMQGSTLP
MDPRMYSLMQASTMP

SEQ ID NO: 96364 - protein, 15 aa, Artificial Sequence
  Description of Artificial Sequence: Synthetic peptide
  Seed: MDPRMCSLMQGSTLP
MDPRMYSLMQASTNP

SEQ ID NO: 96365 - protein, 15 aa, Artificial Sequence
  Description of Artificial Sequence: Synthetic peptide
  Seed: MDPRMCSLMQGSTLP
MDPRMYSLMQASTPP

SEQ ID NO: 96366 - protein, 15 aa, Artificial Sequence
  Description of Artificial Sequence: Synthetic peptide
  Seed: MDPRMCSLMQGSTLP
MDPRMYSLMQASTQP

SEQ ID NO: 96367 - protein, 15 aa, Artificial Sequence
  Description of Artificial Sequence: Synthetic peptide
  Seed: MDPRMCSLMQGSTLP
MDPRMYSLMQASTRP

SEQ ID NO: 96368 - protein, 15 aa, Artificial Sequence
  Description of Artificial Sequence: Synthetic peptide
  Seed: MDPRMCSLMQGSTLP
MDPRMYSLMQASTSP

SEQ ID NO: 96369 - protein, 15 aa, Artificial Sequence
  Description of Artificial Sequence: Synthetic peptide
  Seed: MDPRMCSLMQGSTLP
MDPRMYSLMQASTTP

SEQ ID NO: 96370 - protein, 15 aa, Artificial Sequence
  Description of Artificial Sequence: Synthetic peptide
  Seed: MDPRMCSLMQGSTLP
MDPRMYSLMQASTVP

SEQ ID NO: 96371 - protein, 15 aa, Artificial Sequence
  Description of Artificial Sequence: Synthetic peptide
  Seed: MDPRMCSLMQGSTLP
MDPRMYSLMQASTWP

SEQ ID NO: 96372 - protein, 15 aa, Artificial Sequence
  Description of Artificial Sequence: Synthetic peptide
  Seed: MDPRMCSLMQGSTLP
MDPRMYSLMQASTYP

SEQ ID NO: 96373 - protein, 15 aa, Artificial Sequence
  Description of Artificial Sequence: Synthetic peptide
  Seed: MDPRMCSLMQGSTLP
MDPRMYSLMQGSTAP

SEQ ID NO: 96374 - protein, 15 aa, Artificial Sequence
  Description of Artificial Sequence: Synthetic peptide
  Seed: MDPRMCSLMQGSTLP
MDPRMYSLMQGSTCP

SEQ ID NO: 96375 - protein, 15 aa, Artificial Sequence
  Description of Artificial Sequence: Synthetic peptide
  Seed: MDPRMCSLMQGSTLP
MDPRMYSLMQGSTFP

SEQ ID NO: 96376 - protein, 15 aa, Artificial Sequence
  Description of Artificial Sequence: Synthetic peptide
  Seed: MDPRMCSLMQGSTLP
MDPRMYSLMQGSTGP

SEQ ID NO: 96377 - protein, 15 aa, Artificial Sequence
  Description of Artificial Sequence: Synthetic peptide
  Seed: MDPRMCSLMQGSTLP
MDPRMYSLMQGSTHP

SEQ ID NO: 96378 - protein, 15 aa, Artificial Sequence
  Description of Artificial Sequence: Synthetic peptide
  Seed: MDPRMCSLMQGSTLP
MDPRMYSLMQGSTIP

SEQ ID NO: 96379 - protein, 15 aa, Artificial Sequence
  Description of Artificial Sequence: Synthetic peptide
  Seed: MDPRMCSLMQGSTLP
MDPRMYSLMQGSTLP

SEQ ID NO: 96380 - protein, 15 aa, Artificial Sequence
  Description of Artificial Sequence: Synthetic peptide
  Seed: MDPRMCSLMQGSTLP
MDPRMYSLMQGSTMP

SEQ ID NO: 96381 - protein, 15 aa, Artificial Sequence
  Description of Artificial Sequence: Synthetic peptide
  Seed: MDPRMCSLMQGSTLP
MDPRMYSLMQGSTNP

SEQ ID NO: 96382 - protein, 15 aa, Artificial Sequence
  Description of Artificial Sequence: Synthetic peptide
  Seed: MDPRMCSLMQGSTLP
MDPRMYSLMQGSTQP

SEQ ID NO: 96383 - protein, 15 aa, Artificial Sequence
  Description of Artificial Sequence: Synthetic peptide
  Seed: MDPRMCSLMQGSTLP
MDPRMYSLMQGSTSP

SEQ ID NO: 96384 - protein, 15 aa, Artificial Sequence
  Description of Artificial Sequence: Synthetic peptide
  Seed: MDPRMCSLMQGSTLP
MDPRMYSLMQGSTTP

SEQ ID NO: 96385 - protein, 15 aa, Artificial Sequence
  Description of Artificial Sequence: Synthetic peptide
  Seed: MDPRMCSLMQGSTLP
MDPRMYSLMQGSTVP

SEQ ID NO: 96386 - protein, 15 aa, Artificial Sequence
  Description of Artificial Sequence: Synthetic peptide
  Seed: MDPRMCSLMQGSTLP
MDPRMYSLMQGSTYP

SEQ ID NO: 96387 - protein, 15 aa, Artificial Sequence
  Description of Artificial Sequence: Synthetic peptide
  Seed: MDPRMCSLMQGSTLP
MDPRMYSLMQHSTAP

SEQ ID NO: 96388 - protein, 15 aa, Artificial Sequence
  Description of Artificial Sequence: Synthetic peptide
  Seed: MDPRMCSLMQGSTLP
MDPRMYSLMQHSTIP

SEQ ID NO: 96389 - protein, 15 aa, Artificial Sequence
  Description of Artificial Sequence: Synthetic peptide
  Seed: MDPRMCSLMQGSTLP
MDPRMYSLMQHSTLP

SEQ ID NO: 96390 - protein, 15 aa, Artificial Sequence
  Description of Artificial Sequence: Synthetic peptide
  Seed: MDPRMCSLMQGSTLP
MDPRMYSLMQHSTVP

SEQ ID NO: 96391 - protein, 15 aa, Artificial Sequence
  Description of Artificial Sequence: Synthetic peptide
  Seed: MDPRMCSLMQGSTLP
MDPRMYSLMQISTAP

SEQ ID NO: 96392 - protein, 15 aa, Artificial Sequence
  Description of Artificial Sequence: Synthetic peptide
  Seed: MDPRMCSLMQGSTLP
MDPRMYSLMQISTGP

SEQ ID NO: 96393 - protein, 15 aa, Artificial Sequence
  Description of Artificial Sequence: Synthetic peptide
  Seed: MDPRMCSLMQGSTLP
MDPRMYSLMQISTHP

SEQ ID NO: 96394 - protein, 15 aa, Artificial Sequence
  Description of Artificial Sequence: Synthetic peptide
  Seed: MDPRMCSLMQGSTLP
MDPRMYSLMQISTIP

SEQ ID NO: 96395 - protein, 15 aa, Artificial Sequence
  Description of Artificial Sequence: Synthetic peptide
  Seed: MDPRMCSLMQGSTLP
MDPRMYSLMQISTLP

SEQ ID NO: 96396 - protein, 15 aa, Artificial Sequence
  Description of Artificial Sequence: Synthetic peptide
  Seed: MDPRMCSLMQGSTLP
MDPRMYSLMQISTMP

SEQ ID NO: 96397 - protein, 15 aa, Artificial Sequence
  Description of Artificial Sequence: Synthetic peptide
  Seed: MDPRMCSLMQGSTLP
MDPRMYSLMQISTNP

SEQ ID NO: 96398 - protein, 15 aa, Artificial Sequence
  Description of Artificial Sequence: Synthetic peptide
  Seed: MDPRMCSLMQGSTLP
MDPRMYSLMQISTQP

SEQ ID NO: 96399 - protein, 15 aa, Artificial Sequence
  Description of Artificial Sequence: Synthetic peptide
  Seed: MDPRMCSLMQGSTLP
MDPRMYSLMQISTSP

SEQ ID NO: 96400 - protein, 15 aa, Artificial Sequence
  Description of Artificial Sequence: Synthetic peptide
  Seed: MDPRMCSLMQGSTLP
MDPRMYSLMQISTTP

SEQ ID NO: 96401 - protein, 15 aa, Artificial Sequence
  Description of Artificial Sequence: Synthetic peptide
  Seed: MDPRMCSLMQGSTLP
MDPRMYSLMQISTVP

SEQ ID NO: 96402 - protein, 15 aa, Artificial Sequence
  Description of Artificial Sequence: Synthetic peptide
  Seed: MDPRMCSLMQGSTLP
MDPRMYSLMQLSTAP

SEQ ID NO: 96403 - protein, 15 aa, Artificial Sequence
  Description of Artificial Sequence: Synthetic peptide
  Seed: MDPRMCSLMQGSTLP
MDPRMYSLMQLSTIP

SEQ ID NO: 96404 - protein, 15 aa, Artificial Sequence
  Description of Artificial Sequence: Synthetic peptide
  Seed: MDPRMCSLMQGSTLP
MDPRMYSLMQLSTLP

SEQ ID NO: 96405 - protein, 15 aa, Artificial Sequence
  Description of Artificial Sequence: Synthetic peptide
  Seed: MDPRMCSLMQGSTLP
MDPRMYSLMQLSTMP

SEQ ID NO: 96406 - protein, 15 aa, Artificial Sequence
  Description of Artificial Sequence: Synthetic peptide
  Seed: MDPRMCSLMQGSTLP
MDPRMYSLMQLSTNP

SEQ ID NO: 96407 - protein, 15 aa, Artificial Sequence
  Description of Artificial Sequence: Synthetic peptide
  Seed: MDPRMCSLMQGSTLP
MDPRMYSLMQLSTSP

SEQ ID NO: 96408 - protein, 15 aa, Artificial Sequence
  Description of Artificial Sequence: Synthetic peptide
  Seed: MDPRMCSLMQGSTLP
MDPRMYSLMQLSTTP

SEQ ID NO: 96409 - protein, 15 aa, Artificial Sequence
  Description of Artificial Sequence: Synthetic peptide
  Seed: MDPRMCSLMQGSTLP
MDPRMYSLMQLSTVP

SEQ ID NO: 96410 - protein, 15 aa, Artificial Sequence
  Description of Artificial Sequence: Synthetic peptide
  Seed: MDPRMCSLMQGSTLP
MDPRMYSLMQMSTAP

SEQ ID NO: 96411 - protein, 15 aa, Artificial Sequence
  Description of Artificial Sequence: Synthetic peptide
  Seed: MDPRMCSLMQGSTLP
MDPRMYSLMQMSTIP

SEQ ID NO: 96412 - protein, 15 aa, Artificial Sequence
  Description of Artificial Sequence: Synthetic peptide
  Seed: MDPRMCSLMQGSTLP
MDPRMYSLMQMSTLP

SEQ ID NO: 96413 - protein, 15 aa, Artificial Sequence
  Description of Artificial Sequence: Synthetic peptide
  Seed: MDPRMCSLMQGSTLP
MDPRMYSLMQMSTNP

SEQ ID NO: 96414 - protein, 15 aa, Artificial Sequence
  Description of Artificial Sequence: Synthetic peptide
  Seed: MDPRMCSLMQGSTLP
MDPRMYSLMQMSTSP

SEQ ID NO: 96415 - protein, 15 aa, Artificial Sequence
  Description of Artificial Sequence: Synthetic peptide
  Seed: MDPRMCSLMQGSTLP
MDPRMYSLMQMSTTP

SEQ ID NO: 96416 - protein, 15 aa, Artificial Sequence
  Description of Artificial Sequence: Synthetic peptide
  Seed: MDPRMCSLMQGSTLP
MDPRMYSLMQMSTVP

SEQ ID NO: 96417 - protein, 15 aa, Artificial Sequence
  Description of Artificial Sequence: Synthetic peptide
  Seed: MDPRMCSLMQGSTLP
MDPRMYSLMQNSTAP

SEQ ID NO: 96418 - protein, 15 aa, Artificial Sequence
  Description of Artificial Sequence: Synthetic peptide
  Seed: MDPRMCSLMQGSTLP
MDPRMYSLMQNSTGP

SEQ ID NO: 96419 - protein, 15 aa, Artificial Sequence
  Description of Artificial Sequence: Synthetic peptide
  Seed: MDPRMCSLMQGSTLP
MDPRMYSLMQNSTIP

SEQ ID NO: 96420 - protein, 15 aa, Artificial Sequence
  Description of Artificial Sequence: Synthetic peptide
  Seed: MDPRMCSLMQGSTLP
MDPRMYSLMQNSTLP

SEQ ID NO: 96421 - protein, 15 aa, Artificial Sequence
  Description of Artificial Sequence: Synthetic peptide
  Seed: MDPRMCSLMQGSTLP
MDPRMYSLMQNSTMP

SEQ ID NO: 96422 - protein, 15 aa, Artificial Sequence
  Description of Artificial Sequence: Synthetic peptide
  Seed: MDPRMCSLMQGSTLP
MDPRMYSLMQNSTNP

SEQ ID NO: 96423 - protein, 15 aa, Artificial Sequence
  Description of Artificial Sequence: Synthetic peptide
  Seed: MDPRMCSLMQGSTLP
MDPRMYSLMQNSTSP

SEQ ID NO: 96424 - protein, 15 aa, Artificial Sequence
  Description of Artificial Sequence: Synthetic peptide
  Seed: MDPRMCSLMQGSTLP
MDPRMYSLMQNSTTP

SEQ ID NO: 96425 - protein, 15 aa, Artificial Sequence
  Description of Artificial Sequence: Synthetic peptide
  Seed: MDPRMCSLMQGSTLP
MDPRMYSLMQNSTVP

SEQ ID NO: 96426 - protein, 15 aa, Artificial Sequence
  Description of Artificial Sequence: Synthetic peptide
  Seed: MDPRMCSLMQGSTLP
MDPRMYSLMQPSTAP

SEQ ID NO: 96427 - protein, 15 aa, Artificial Sequence
  Description of Artificial Sequence: Synthetic peptide
  Seed: MDPRMCSLMQGSTLP
MDPRMYSLMQPSTFP

SEQ ID NO: 96428 - protein, 15 aa, Artificial Sequence
  Description of Artificial Sequence: Synthetic peptide
  Seed: MDPRMCSLMQGSTLP
MDPRMYSLMQPSTGP

SEQ ID NO: 96429 - protein, 15 aa, Artificial Sequence
  Description of Artificial Sequence: Synthetic peptide
  Seed: MDPRMCSLMQGSTLP
MDPRMYSLMQPSTHP

SEQ ID NO: 96430 - protein, 15 aa, Artificial Sequence
  Description of Artificial Sequence: Synthetic peptide
  Seed: MDPRMCSLMQGSTLP
MDPRMYSLMQPSTIP

SEQ ID NO: 96431 - protein, 15 aa, Artificial Sequence
  Description of Artificial Sequence: Synthetic peptide
  Seed: MDPRMCSLMQGSTLP
MDPRMYSLMQPSTLP

SEQ ID NO: 96432 - protein, 15 aa, Artificial Sequence
  Description of Artificial Sequence: Synthetic peptide
  Seed: MDPRMCSLMQGSTLP
MDPRMYSLMQPSTMP

SEQ ID NO: 96433 - protein, 15 aa, Artificial Sequence
  Description of Artificial Sequence: Synthetic peptide
  Seed: MDPRMCSLMQGSTLP
MDPRMYSLMQPSTNP

SEQ ID NO: 96434 - protein, 15 aa, Artificial Sequence
  Description of Artificial Sequence: Synthetic peptide
  Seed: MDPRMCSLMQGSTLP
MDPRMYSLMQPSTPP

SEQ ID NO: 96435 - protein, 15 aa, Artificial Sequence
  Description of Artificial Sequence: Synthetic peptide
  Seed: MDPRMCSLMQGSTLP
MDPRMYSLMQPSTQP

SEQ ID NO: 96436 - protein, 15 aa, Artificial Sequence
  Description of Artificial Sequence: Synthetic peptide
  Seed: MDPRMCSLMQGSTLP
MDPRMYSLMQPSTSP

SEQ ID NO: 96437 - protein, 15 aa, Artificial Sequence
  Description of Artificial Sequence: Synthetic peptide
  Seed: MDPRMCSLMQGSTLP
MDPRMYSLMQPSTTP

SEQ ID NO: 96438 - protein, 15 aa, Artificial Sequence
  Description of Artificial Sequence: Synthetic peptide
  Seed: MDPRMCSLMQGSTLP
MDPRMYSLMQPSTVP

SEQ ID NO: 96439 - protein, 15 aa, Artificial Sequence
  Description of Artificial Sequence: Synthetic peptide
  Seed: MDPRMCSLMQGSTLP
MDPRMYSLMQQSTLP

SEQ ID NO: 96440 - protein, 15 aa, Artificial Sequence
  Description of Artificial Sequence: Synthetic peptide
  Seed: MDPRMCSLMQGSTLP
MDPRMYSLMQQSTVP

SEQ ID NO: 96441 - protein, 15 aa, Artificial Sequence
  Description of Artificial Sequence: Synthetic peptide
  Seed: MDPRMCSLMQGSTLP
MDPRMYSLMQSSTAP

SEQ ID NO: 96442 - protein, 15 aa, Artificial Sequence
  Description of Artificial Sequence: Synthetic peptide
  Seed: MDPRMCSLMQGSTLP
MDPRMYSLMQSSTCP

SEQ ID NO: 96443 - protein, 15 aa, Artificial Sequence
  Description of Artificial Sequence: Synthetic peptide
  Seed: MDPRMCSLMQGSTLP
MDPRMYSLMQSSTFP

SEQ ID NO: 96444 - protein, 15 aa, Artificial Sequence
  Description of Artificial Sequence: Synthetic peptide
  Seed: MDPRMCSLMQGSTLP
MDPRMYSLMQSSTGP

SEQ ID NO: 96445 - protein, 15 aa, Artificial Sequence
  Description of Artificial Sequence: Synthetic peptide
  Seed: MDPRMCSLMQGSTLP
MDPRMYSLMQSSTHP

SEQ ID NO: 96446 - protein, 15 aa, Artificial Sequence
  Description of Artificial Sequence: Synthetic peptide
  Seed: MDPRMCSLMQGSTLP
MDPRMYSLMQSSTIP

SEQ ID NO: 96447 - protein, 15 aa, Artificial Sequence
  Description of Artificial Sequence: Synthetic peptide
  Seed: MDPRMCSLMQGSTLP
MDPRMYSLMQSSTLP

SEQ ID NO: 96448 - protein, 15 aa, Artificial Sequence
  Description of Artificial Sequence: Synthetic peptide
  Seed: MDPRMCSLMQGSTLP
MDPRMYSLMQSSTMP

SEQ ID NO: 96449 - protein, 15 aa, Artificial Sequence
  Description of Artificial Sequence: Synthetic peptide
  Seed: MDPRMCSLMQGSTLP
MDPRMYSLMQSSTNP

SEQ ID NO: 96450 - protein, 15 aa, Artificial Sequence
  Description of Artificial Sequence: Synthetic peptide
  Seed: MDPRMCSLMQGSTLP
MDPRMYSLMQSSTQP

SEQ ID NO: 96451 - protein, 15 aa, Artificial Sequence
  Description of Artificial Sequence: Synthetic peptide
  Seed: MDPRMCSLMQGSTLP
MDPRMYSLMQSSTSP

SEQ ID NO: 96452 - protein, 15 aa, Artificial Sequence
  Description of Artificial Sequence: Synthetic peptide
  Seed: MDPRMCSLMQGSTLP
MDPRMYSLMQSSTTP

SEQ ID NO: 96453 - protein, 15 aa, Artificial Sequence
  Description of Artificial Sequence: Synthetic peptide
  Seed: MDPRMCSLMQGSTLP
MDPRMYSLMQSSTVP

SEQ ID NO: 96454 - protein, 15 aa, Artificial Sequence
  Description of Artificial Sequence: Synthetic peptide
  Seed: MDPRMCSLMQGSTLP
MDPRMYSLMQTSTAP

SEQ ID NO: 96455 - protein, 15 aa, Artificial Sequence
  Description of Artificial Sequence: Synthetic peptide
  Seed: MDPRMCSLMQGSTLP
MDPRMYSLMQTSTGP

SEQ ID NO: 96456 - protein, 15 aa, Artificial Sequence
  Description of Artificial Sequence: Synthetic peptide
  Seed: MDPRMCSLMQGSTLP
MDPRMYSLMQTSTHP

SEQ ID NO: 96457 - protein, 15 aa, Artificial Sequence
  Description of Artificial Sequence: Synthetic peptide
  Seed: MDPRMCSLMQGSTLP
MDPRMYSLMQTSTIP

SEQ ID NO: 96458 - protein, 15 aa, Artificial Sequence
  Description of Artificial Sequence: Synthetic peptide
  Seed: MDPRMCSLMQGSTLP
MDPRMYSLMQTSTLP

SEQ ID NO: 96459 - protein, 15 aa, Artificial Sequence
  Description of Artificial Sequence: Synthetic peptide
  Seed: MDPRMCSLMQGSTLP
MDPRMYSLMQTSTMP

SEQ ID NO: 96460 - protein, 15 aa, Artificial Sequence
  Description of Artificial Sequence: Synthetic peptide
  Seed: MDPRMCSLMQGSTLP
MDPRMYSLMQTSTNP

SEQ ID NO: 96461 - protein, 15 aa, Artificial Sequence
  Description of Artificial Sequence: Synthetic peptide
  Seed: MDPRMCSLMQGSTLP
MDPRMYSLMQTSTQP

SEQ ID NO: 96462 - protein, 15 aa, Artificial Sequence
  Description of Artificial Sequence: Synthetic peptide
  Seed: MDPRMCSLMQGSTLP
MDPRMYSLMQTSTSP

SEQ ID NO: 96463 - protein, 15 aa, Artificial Sequence
  Description of Artificial Sequence: Synthetic peptide
  Seed: MDPRMCSLMQGSTLP
MDPRMYSLMQTSTTP

SEQ ID NO: 96464 - protein, 15 aa, Artificial Sequence
  Description of Artificial Sequence: Synthetic peptide
  Seed: MDPRMCSLMQGSTLP
MDPRMYSLMQTSTVP

SEQ ID NO: 96465 - protein, 15 aa, Artificial Sequence
  Description of Artificial Sequence: Synthetic peptide
  Seed: MDPRMCSLMQGSTLP
MDPRMYSLMQVSTAP

SEQ ID NO: 96466 - protein, 15 aa, Artificial Sequence
  Description of Artificial Sequence: Synthetic peptide
  Seed: MDPRMCSLMQGSTLP
MDPRMYSLMQVSTGP

SEQ ID NO: 96467 - protein, 15 aa, Artificial Sequence
  Description of Artificial Sequence: Synthetic peptide
  Seed: MDPRMCSLMQGSTLP
MDPRMYSLMQVSTHP

SEQ ID NO: 96468 - protein, 15 aa, Artificial Sequence
  Description of Artificial Sequence: Synthetic peptide
  Seed: MDPRMCSLMQGSTLP
MDPRMYSLMQVSTIP

SEQ ID NO: 96469 - protein, 15 aa, Artificial Sequence
  Description of Artificial Sequence: Synthetic peptide
  Seed: MDPRMCSLMQGSTLP
MDPRMYSLMQVSTLP

SEQ ID NO: 96470 - protein, 15 aa, Artificial Sequence
  Description of Artificial Sequence: Synthetic peptide
  Seed: MDPRMCSLMQGSTLP
MDPRMYSLMQVSTMP

SEQ ID NO: 96471 - protein, 15 aa, Artificial Sequence
  Description of Artificial Sequence: Synthetic peptide
  Seed: MDPRMCSLMQGSTLP
MDPRMYSLMQVSTNP

SEQ ID NO: 96472 - protein, 15 aa, Artificial Sequence
  Description of Artificial Sequence: Synthetic peptide
  Seed: MDPRMCSLMQGSTLP
MDPRMYSLMQVSTPP

SEQ ID NO: 96473 - protein, 15 aa, Artificial Sequence
  Description of Artificial Sequence: Synthetic peptide
  Seed: MDPRMCSLMQGSTLP
MDPRMYSLMQVSTQP

SEQ ID NO: 96474 - protein, 15 aa, Artificial Sequence
  Description of Artificial Sequence: Synthetic peptide
  Seed: MDPRMCSLMQGSTLP
MDPRMYSLMQVSTSP

SEQ ID NO: 96475 - protein, 15 aa, Artificial Sequence
  Description of Artificial Sequence: Synthetic peptide
  Seed: MDPRMCSLMQGSTLP
MDPRMYSLMQVSTTP

SEQ ID NO: 96476 - protein, 15 aa, Artificial Sequence
  Description of Artificial Sequence: Synthetic peptide
  Seed: MDPRMCSLMQGSTLP
MDPRMYSLMQVSTVP

SEQ ID NO: 96477 - protein, 15 aa, Artificial Sequence
  Description of Artificial Sequence: Synthetic peptide
  Seed: MDPRMCSLMQGSTLP
MDPRMYSLNQASTIP

SEQ ID NO: 96478 - protein, 15 aa, Artificial Sequence
  Description of Artificial Sequence: Synthetic peptide
  Seed: MDPRMCSLMQGSTLP
MDPRMYSLNQASTLP

SEQ ID NO: 96479 - protein, 15 aa, Artificial Sequence
  Description of Artificial Sequence: Synthetic peptide
  Seed: MDPRMCSLMQGSTLP
MDPRMYSLNQASTVP

SEQ ID NO: 96480 - protein, 15 aa, Artificial Sequence
  Description of Artificial Sequence: Synthetic peptide
  Seed: MDPRMCSLMQGSTLP
MDPRMYSLQQASTAP

SEQ ID NO: 96481 - protein, 15 aa, Artificial Sequence
  Description of Artificial Sequence: Synthetic peptide
  Seed: MDPRMCSLMQGSTLP
MDPRMYSLQQASTIP

SEQ ID NO: 96482 - protein, 15 aa, Artificial Sequence
  Description of Artificial Sequence: Synthetic peptide
  Seed: MDPRMCSLMQGSTLP
MDPRMYSLQQASTLP

SEQ ID NO: 96483 - protein, 15 aa, Artificial Sequence
  Description of Artificial Sequence: Synthetic peptide
  Seed: MDPRMCSLMQGSTLP
MDPRMYSLQQASTMP

SEQ ID NO: 96484 - protein, 15 aa, Artificial Sequence
  Description of Artificial Sequence: Synthetic peptide
  Seed: MDPRMCSLMQGSTLP
MDPRMYSLQQASTSP

SEQ ID NO: 96485 - protein, 15 aa, Artificial Sequence
  Description of Artificial Sequence: Synthetic peptide
  Seed: MDPRMCSLMQGSTLP
MDPRMYSLQQASTTP

SEQ ID NO: 96486 - protein, 15 aa, Artificial Sequence
  Description of Artificial Sequence: Synthetic peptide
  Seed: MDPRMCSLMQGSTLP
MDPRMYSLQQASTVP

SEQ ID NO: 96487 - protein, 15 aa, Artificial Sequence
  Description of Artificial Sequence: Synthetic peptide
  Seed: MDPRMCSLMQGSTLP
MDPRMYSLQQGSTAP

SEQ ID NO: 96488 - protein, 15 aa, Artificial Sequence
  Description of Artificial Sequence: Synthetic peptide
  Seed: MDPRMCSLMQGSTLP
MDPRMYSLQQGSTIP

SEQ ID NO: 96489 - protein, 15 aa, Artificial Sequence
  Description of Artificial Sequence: Synthetic peptide
  Seed: MDPRMCSLMQGSTLP
MDPRMYSLQQGSTLP

SEQ ID NO: 96490 - protein, 15 aa, Artificial Sequence
  Description of Artificial Sequence: Synthetic peptide
  Seed: MDPRMCSLMQGSTLP
MDPRMYSLQQGSTMP

SEQ ID NO: 96491 - protein, 15 aa, Artificial Sequence
  Description of Artificial Sequence: Synthetic peptide
  Seed: MDPRMCSLMQGSTLP
MDPRMYSLQQGSTTP

SEQ ID NO: 96492 - protein, 15 aa, Artificial Sequence
  Description of Artificial Sequence: Synthetic peptide
  Seed: MDPRMCSLMQGSTLP
MDPRMYSLQQGSTVP

SEQ ID NO: 96493 - protein, 15 aa, Artificial Sequence
  Description of Artificial Sequence: Synthetic peptide
  Seed: MDPRMCSLMQGSTLP
MDPRMYSLQQNSTIP

SEQ ID NO: 96494 - protein, 15 aa, Artificial Sequence
  Description of Artificial Sequence: Synthetic peptide
  Seed: MDPRMCSLMQGSTLP
MDPRMYSLQQNSTLP

SEQ ID NO: 96495 - protein, 15 aa, Artificial Sequence
  Description of Artificial Sequence: Synthetic peptide
  Seed: MDPRMCSLMQGSTLP
MDPRMYSLQQNSTVP

SEQ ID NO: 96496 - protein, 15 aa, Artificial Sequence
  Description of Artificial Sequence: Synthetic peptide
  Seed: MDPRMCSLMQGSTLP
MDPRMYSLQQPSTAP

SEQ ID NO: 96497 - protein, 15 aa, Artificial Sequence
  Description of Artificial Sequence: Synthetic peptide
  Seed: MDPRMCSLMQGSTLP
MDPRMYSLQQPSTIP

SEQ ID NO: 96498 - protein, 15 aa, Artificial Sequence
  Description of Artificial Sequence: Synthetic peptide
  Seed: MDPRMCSLMQGSTLP
MDPRMYSLQQPSTLP

SEQ ID NO: 96499 - protein, 15 aa, Artificial Sequence
  Description of Artificial Sequence: Synthetic peptide
  Seed: MDPRMCSLMQGSTLP
MDPRMYSLQQPSTVP

SEQ ID NO: 96500 - protein, 15 aa, Artificial Sequence
  Description of Artificial Sequence: Synthetic peptide
  Seed: MDPRMCSLMQGSTLP
MDPRMYSLQQSSTAP

SEQ ID NO: 96501 - protein, 15 aa, Artificial Sequence
  Description of Artificial Sequence: Synthetic peptide
  Seed: MDPRMCSLMQGSTLP
MDPRMYSLQQSSTIP

SEQ ID NO: 96502 - protein, 15 aa, Artificial Sequence
  Description of Artificial Sequence: Synthetic peptide
  Seed: MDPRMCSLMQGSTLP
MDPRMYSLQQSSTLP

SEQ ID NO: 96503 - protein, 15 aa, Artificial Sequence
  Description of Artificial Sequence: Synthetic peptide
  Seed: MDPRMCSLMQGSTLP
MDPRMYSLQQSSTMP

SEQ ID NO: 96504 - protein, 15 aa, Artificial Sequence
  Description of Artificial Sequence: Synthetic peptide
  Seed: MDPRMCSLMQGSTLP
MDPRMYSLQQSSTTP

SEQ ID NO: 96505 - protein, 15 aa, Artificial Sequence
  Description of Artificial Sequence: Synthetic peptide
  Seed: MDPRMCSLMQGSTLP
MDPRMYSLQQSSTVP

SEQ ID NO: 96506 - protein, 15 aa, Artificial Sequence
  Description of Artificial Sequence: Synthetic peptide
  Seed: MDPRMCSLMQGSTLP
MDPRMYSLQQTSTIP

SEQ ID NO: 96507 - protein, 15 aa, Artificial Sequence
  Description of Artificial Sequence: Synthetic peptide
  Seed: MDPRMCSLMQGSTLP
MDPRMYSLQQTSTLP

SEQ ID NO: 96508 - protein, 15 aa, Artificial Sequence
  Description of Artificial Sequence: Synthetic peptide
  Seed: MDPRMCSLMQGSTLP
MDPRMYSLQQTSTVP

SEQ ID NO: 96509 - protein, 15 aa, Artificial Sequence
  Description of Artificial Sequence: Synthetic peptide
  Seed: MDPRMCSLMQGSTLP
MDPRMYSLQQVSTAP

SEQ ID NO: 96510 - protein, 15 aa, Artificial Sequence
  Description of Artificial Sequence: Synthetic peptide
  Seed: MDPRMCSLMQGSTLP
MDPRMYSLSQASTAP

SEQ ID NO: 96511 - protein, 15 aa, Artificial Sequence
  Description of Artificial Sequence: Synthetic peptide
  Seed: MDPRMCSLMQGSTLP
MDPRMYSLSQASTIP

SEQ ID NO: 96512 - protein, 15 aa, Artificial Sequence
  Description of Artificial Sequence: Synthetic peptide
  Seed: MDPRMCSLMQGSTLP
MDPRMYSLSQASTLP

SEQ ID NO: 96513 - protein, 15 aa, Artificial Sequence
  Description of Artificial Sequence: Synthetic peptide
  Seed: MDPRMCSLMQGSTLP
MDPRMYSLSQASTMP

SEQ ID NO: 96514 - protein, 15 aa, Artificial Sequence
  Description of Artificial Sequence: Synthetic peptide
  Seed: MDPRMCSLMQGSTLP
MDPRMYSLSQASTVP

SEQ ID NO: 96515 - protein, 15 aa, Artificial Sequence
  Description of Artificial Sequence: Synthetic peptide
  Seed: MDPRMCSLMQGSTLP
MDPRMYSLSQGSTIP

SEQ ID NO: 96516 - protein, 15 aa, Artificial Sequence
  Description of Artificial Sequence: Synthetic peptide
  Seed: MDPRMCSLMQGSTLP
MDPRMYSLSQGSTLP

SEQ ID NO: 96517 - protein, 15 aa, Artificial Sequence
  Description of Artificial Sequence: Synthetic peptide
  Seed: MDPRMCSLMQGSTLP
MDPRMYSLSQGSTVP

SEQ ID NO: 96518 - protein, 15 aa, Artificial Sequence
  Description of Artificial Sequence: Synthetic peptide
  Seed: MDPRMCSLMQGSTLP
MDPRMYSLSQPSTIP

SEQ ID NO: 96519 - protein, 15 aa, Artificial Sequence
  Description of Artificial Sequence: Synthetic peptide
  Seed: MDPRMCSLMQGSTLP
MDPRMYSLSQPSTLP

SEQ ID NO: 96520 - protein, 15 aa, Artificial Sequence
  Description of Artificial Sequence: Synthetic peptide
  Seed: MDPRMCSLMQGSTLP
MDPRMYSLSQSSTIP

SEQ ID NO: 96521 - protein, 15 aa, Artificial Sequence
  Description of Artificial Sequence: Synthetic peptide
  Seed: MDPRMCSLMQGSTLP
MDPRMYSLSQSSTLP

SEQ ID NO: 96522 - protein, 15 aa, Artificial Sequence
  Description of Artificial Sequence: Synthetic peptide
  Seed: MDPRMCSLMQGSTLP
MDPRMYSLSQSSTVP

SEQ ID NO: 96523 - protein, 15 aa, Artificial Sequence
  Description of Artificial Sequence: Synthetic peptide
  Seed: MDPRMCSLMQGSTLP
MDPRMYSLTQASTAP

SEQ ID NO: 96524 - protein, 15 aa, Artificial Sequence
  Description of Artificial Sequence: Synthetic peptide
  Seed: MDPRMCSLMQGSTLP
MDPRMYSLTQASTIP

SEQ ID NO: 96525 - protein, 15 aa, Artificial Sequence
  Description of Artificial Sequence: Synthetic peptide
  Seed: MDPRMCSLMQGSTLP
MDPRMYSLTQASTLP

SEQ ID NO: 96526 - protein, 15 aa, Artificial Sequence
  Description of Artificial Sequence: Synthetic peptide
  Seed: MDPRMCSLMQGSTLP
MDPRMYSLTQASTVP

SEQ ID NO: 96527 - protein, 15 aa, Artificial Sequence
  Description of Artificial Sequence: Synthetic peptide
  Seed: MDPRMCSLMQGSTLP
MDPRMYSLTQGSTLP

SEQ ID NO: 96528 - protein, 15 aa, Artificial Sequence
  Description of Artificial Sequence: Synthetic peptide
  Seed: MDPRMCSLMQGSTLP
MDPRMYSLTQSSTLP

SEQ ID NO: 96529 - protein, 15 aa, Artificial Sequence
  Description of Artificial Sequence: Synthetic peptide
  Seed: MDPRMCSLMQGSTLP
MDPRMYSLVQASTAP

SEQ ID NO: 96530 - protein, 15 aa, Artificial Sequence
  Description of Artificial Sequence: Synthetic peptide
  Seed: MDPRMCSLMQGSTLP
MDPRMYSLVQASTGP

SEQ ID NO: 96531 - protein, 15 aa, Artificial Sequence
  Description of Artificial Sequence: Synthetic peptide
  Seed: MDPRMCSLMQGSTLP
MDPRMYSLVQASTHP

SEQ ID NO: 96532 - protein, 15 aa, Artificial Sequence
  Description of Artificial Sequence: Synthetic peptide
  Seed: MDPRMCSLMQGSTLP
MDPRMYSLVQASTIP

SEQ ID NO: 96533 - protein, 15 aa, Artificial Sequence
  Description of Artificial Sequence: Synthetic peptide
  Seed: MDPRMCSLMQGSTLP
MDPRMYSLVQASTLP

SEQ ID NO: 96534 - protein, 15 aa, Artificial Sequence
  Description of Artificial Sequence: Synthetic peptide
  Seed: MDPRMCSLMQGSTLP
MDPRMYSLVQASTMP

SEQ ID NO: 96535 - protein, 15 aa, Artificial Sequence
  Description of Artificial Sequence: Synthetic peptide
  Seed: MDPRMCSLMQGSTLP
MDPRMYSLVQASTNP

SEQ ID NO: 96536 - protein, 15 aa, Artificial Sequence
  Description of Artificial Sequence: Synthetic peptide
  Seed: MDPRMCSLMQGSTLP
MDPRMYSLVQASTQP

SEQ ID NO: 96537 - protein, 15 aa, Artificial Sequence
  Description of Artificial Sequence: Synthetic peptide
  Seed: MDPRMCSLMQGSTLP
MDPRMYSLVQASTSP

SEQ ID NO: 96538 - protein, 15 aa, Artificial Sequence
  Description of Artificial Sequence: Synthetic peptide
  Seed: MDPRMCSLMQGSTLP
MDPRMYSLVQASTTP

SEQ ID NO: 96539 - protein, 15 aa, Artificial Sequence
  Description of Artificial Sequence: Synthetic peptide
  Seed: MDPRMCSLMQGSTLP
MDPRMYSLVQASTVP

SEQ ID NO: 96540 - protein, 15 aa, Artificial Sequence
  Description of Artificial Sequence: Synthetic peptide
  Seed: MDPRMCSLMQGSTLP
MDPRMYSLVQGSTAP

SEQ ID NO: 96541 - protein, 15 aa, Artificial Sequence
  Description of Artificial Sequence: Synthetic peptide
  Seed: MDPRMCSLMQGSTLP
MDPRMYSLVQGSTIP

SEQ ID NO: 96542 - protein, 15 aa, Artificial Sequence
  Description of Artificial Sequence: Synthetic peptide
  Seed: MDPRMCSLMQGSTLP
MDPRMYSLVQGSTLP

SEQ ID NO: 96543 - protein, 15 aa, Artificial Sequence
  Description of Artificial Sequence: Synthetic peptide
  Seed: MDPRMCSLMQGSTLP
MDPRMYSLVQGSTMP

SEQ ID NO: 96544 - protein, 15 aa, Artificial Sequence
  Description of Artificial Sequence: Synthetic peptide
  Seed: MDPRMCSLMQGSTLP
MDPRMYSLVQGSTSP

SEQ ID NO: 96545 - protein, 15 aa, Artificial Sequence
  Description of Artificial Sequence: Synthetic peptide
  Seed: MDPRMCSLMQGSTLP
MDPRMYSLVQGSTTP

SEQ ID NO: 96546 - protein, 15 aa, Artificial Sequence
  Description of Artificial Sequence: Synthetic peptide
  Seed: MDPRMCSLMQGSTLP
MDPRMYSLVQGSTVP

SEQ ID NO: 96547 - protein, 15 aa, Artificial Sequence
  Description of Artificial Sequence: Synthetic peptide
  Seed: MDPRMCSLMQGSTLP
MDPRMYSLVQISTAP

SEQ ID NO: 96548 - protein, 15 aa, Artificial Sequence
  Description of Artificial Sequence: Synthetic peptide
  Seed: MDPRMCSLMQGSTLP
MDPRMYSLVQISTNP

SEQ ID NO: 96549 - protein, 15 aa, Artificial Sequence
  Description of Artificial Sequence: Synthetic peptide
  Seed: MDPRMCSLMQGSTLP
MDPRMYSLVQISTSP

SEQ ID NO: 96550 - protein, 15 aa, Artificial Sequence
  Description of Artificial Sequence: Synthetic peptide
  Seed: MDPRMCSLMQGSTLP
MDPRMYSLVQISTVP

SEQ ID NO: 96551 - protein, 15 aa, Artificial Sequence
  Description of Artificial Sequence: Synthetic peptide
  Seed: MDPRMCSLMQGSTLP
MDPRMYSLVQNSTAP

SEQ ID NO: 96552 - protein, 15 aa, Artificial Sequence
  Description of Artificial Sequence: Synthetic peptide
  Seed: MDPRMCSLMQGSTLP
MDPRMYSLVQNSTIP

SEQ ID NO: 96553 - protein, 15 aa, Artificial Sequence
  Description of Artificial Sequence: Synthetic peptide
  Seed: MDPRMCSLMQGSTLP
MDPRMYSLVQNSTLP

SEQ ID NO: 96554 - protein, 15 aa, Artificial Sequence
  Description of Artificial Sequence: Synthetic peptide
  Seed: MDPRMCSLMQGSTLP
MDPRMYSLVQNSTVP

SEQ ID NO: 96555 - protein, 15 aa, Artificial Sequence
  Description of Artificial Sequence: Synthetic peptide
  Seed: MDPRMCSLMQGSTLP
MDPRMYSLVQPSTAP

SEQ ID NO: 96556 - protein, 15 aa, Artificial Sequence
  Description of Artificial Sequence: Synthetic peptide
  Seed: MDPRMCSLMQGSTLP
MDPRMYSLVQPSTIP

SEQ ID NO: 96557 - protein, 15 aa, Artificial Sequence
  Description of Artificial Sequence: Synthetic peptide
  Seed: MDPRMCSLMQGSTLP
MDPRMYSLVQPSTLP

SEQ ID NO: 96558 - protein, 15 aa, Artificial Sequence
  Description of Artificial Sequence: Synthetic peptide
  Seed: MDPRMCSLMQGSTLP
MDPRMYSLVQPSTMP

SEQ ID NO: 96559 - protein, 15 aa, Artificial Sequence
  Description of Artificial Sequence: Synthetic peptide
  Seed: MDPRMCSLMQGSTLP
MDPRMYSLVQPSTNP

SEQ ID NO: 96560 - protein, 15 aa, Artificial Sequence
  Description of Artificial Sequence: Synthetic peptide
  Seed: MDPRMCSLMQGSTLP
MDPRMYSLVQPSTSP

SEQ ID NO: 96561 - protein, 15 aa, Artificial Sequence
  Description of Artificial Sequence: Synthetic peptide
  Seed: MDPRMCSLMQGSTLP
MDPRMYSLVQPSTTP

SEQ ID NO: 96562 - protein, 15 aa, Artificial Sequence
  Description of Artificial Sequence: Synthetic peptide
  Seed: MDPRMCSLMQGSTLP
MDPRMYSLVQPSTVP

SEQ ID NO: 96563 - protein, 15 aa, Artificial Sequence
  Description of Artificial Sequence: Synthetic peptide
  Seed: MDPRMCSLMQGSTLP
MDPRMYSLVQSSTAP

SEQ ID NO: 96564 - protein, 15 aa, Artificial Sequence
  Description of Artificial Sequence: Synthetic peptide
  Seed: MDPRMCSLMQGSTLP
MDPRMYSLVQSSTIP

SEQ ID NO: 96565 - protein, 15 aa, Artificial Sequence
  Description of Artificial Sequence: Synthetic peptide
  Seed: MDPRMCSLMQGSTLP
MDPRMYSLVQSSTLP

SEQ ID NO: 96566 - protein, 15 aa, Artificial Sequence
  Description of Artificial Sequence: Synthetic peptide
  Seed: MDPRMCSLMQGSTLP
MDPRMYSLVQSSTMP

SEQ ID NO: 96567 - protein, 15 aa, Artificial Sequence
  Description of Artificial Sequence: Synthetic peptide
  Seed: MDPRMCSLMQGSTLP
MDPRMYSLVQSSTNP

SEQ ID NO: 96568 - protein, 15 aa, Artificial Sequence
  Description of Artificial Sequence: Synthetic peptide
  Seed: MDPRMCSLMQGSTLP
MDPRMYSLVQSSTSP

SEQ ID NO: 96569 - protein, 15 aa, Artificial Sequence
  Description of Artificial Sequence: Synthetic peptide
  Seed: MDPRMCSLMQGSTLP
MDPRMYSLVQSSTTP

SEQ ID NO: 96570 - protein, 15 aa, Artificial Sequence
  Description of Artificial Sequence: Synthetic peptide
  Seed: MDPRMCSLMQGSTLP
MDPRMYSLVQSSTVP

SEQ ID NO: 96571 - protein, 15 aa, Artificial Sequence
  Description of Artificial Sequence: Synthetic peptide
  Seed: MDPRMCSLMQGSTLP
MDPRMYSLVQTSTAP

SEQ ID NO: 96572 - protein, 15 aa, Artificial Sequence
  Description of Artificial Sequence: Synthetic peptide
  Seed: MDPRMCSLMQGSTLP
MDPRMYSLVQTSTIP

SEQ ID NO: 96573 - protein, 15 aa, Artificial Sequence
  Description of Artificial Sequence: Synthetic peptide
  Seed: MDPRMCSLMQGSTLP
MDPRMYSLVQTSTLP

SEQ ID NO: 96574 - protein, 15 aa, Artificial Sequence
  Description of Artificial Sequence: Synthetic peptide
  Seed: MDPRMCSLMQGSTLP
MDPRMYSLVQTSTNP

SEQ ID NO: 96575 - protein, 15 aa, Artificial Sequence
  Description of Artificial Sequence: Synthetic peptide
  Seed: MDPRMCSLMQGSTLP
MDPRMYSLVQTSTSP

SEQ ID NO: 96576 - protein, 15 aa, Artificial Sequence
  Description of Artificial Sequence: Synthetic peptide
  Seed: MDPRMCSLMQGSTLP
MDPRMYSLVQTSTTP

SEQ ID NO: 96577 - protein, 15 aa, Artificial Sequence
  Description of Artificial Sequence: Synthetic peptide
  Seed: MDPRMCSLMQGSTLP
MDPRMYSLVQTSTVP

SEQ ID NO: 96578 - protein, 15 aa, Artificial Sequence
  Description of Artificial Sequence: Synthetic peptide
  Seed: MDPRMCSLMQGSTLP
MDPRMYSLVQVSTAP

SEQ ID NO: 96579 - protein, 15 aa, Artificial Sequence
  Description of Artificial Sequence: Synthetic peptide
  Seed: MDPRMCSLMQGSTLP
MDPRMYSLVQVSTIP

SEQ ID NO: 96580 - protein, 15 aa, Artificial Sequence
  Description of Artificial Sequence: Synthetic peptide
  Seed: MDPRMCSLMQGSTLP
MDPRMYSLVQVSTLP

SEQ ID NO: 96581 - protein, 15 aa, Artificial Sequence
  Description of Artificial Sequence: Synthetic peptide
  Seed: MDPRMCSLMQGSTLP
MDPRMYSLVQVSTNP

SEQ ID NO: 96582 - protein, 15 aa, Artificial Sequence
  Description of Artificial Sequence: Synthetic peptide
  Seed: MDPRMCSLMQGSTLP
MDPRMYSLVQVSTSP

SEQ ID NO: 96583 - protein, 15 aa, Artificial Sequence
  Description of Artificial Sequence: Synthetic peptide
  Seed: MDPRMCSLMQGSTLP
MDPRMYSLVQVSTTP

SEQ ID NO: 96584 - protein, 15 aa, Artificial Sequence
  Description of Artificial Sequence: Synthetic peptide
  Seed: MDPRMCSLMQGSTLP
MDPRMYSLVQVSTVP

SEQ ID NO: 96585 - protein, 16 aa, Artificial Sequence
  Description of Artificial Sequence: Synthetic peptide
  Seed: MDPRMCSLMQGSTLPR
MDPRMFSLAQASTAPR

SEQ ID NO: 96586 - protein, 16 aa, Artificial Sequence
  Description of Artificial Sequence: Synthetic peptide
  Seed: MDPRMCSLMQGSTLPR
MDPRMFSLAQASTGPR

SEQ ID NO: 96587 - protein, 16 aa, Artificial Sequence
  Description of Artificial Sequence: Synthetic peptide
  Seed: MDPRMCSLMQGSTLPR
MDPRMFSLAQASTHPR

SEQ ID NO: 96588 - protein, 16 aa, Artificial Sequence
  Description of Artificial Sequence: Synthetic peptide
  Seed: MDPRMCSLMQGSTLPR
MDPRMFSLAQASTIPR

SEQ ID NO: 96589 - protein, 16 aa, Artificial Sequence
  Description of Artificial Sequence: Synthetic peptide
  Seed: MDPRMCSLMQGSTLPR
MDPRMFSLAQASTLPR

SEQ ID NO: 96590 - protein, 16 aa, Artificial Sequence
  Description of Artificial Sequence: Synthetic peptide
  Seed: MDPRMCSLMQGSTLPR
MDPRMFSLAQASTMPR

SEQ ID NO: 96591 - protein, 16 aa, Artificial Sequence
  Description of Artificial Sequence: Synthetic peptide
  Seed: MDPRMCSLMQGSTLPR
MDPRMFSLAQASTNPR

SEQ ID NO: 96592 - protein, 16 aa, Artificial Sequence
  Description of Artificial Sequence: Synthetic peptide
  Seed: MDPRMCSLMQGSTLPR
MDPRMFSLAQASTQPR

SEQ ID NO: 96593 - protein, 16 aa, Artificial Sequence
  Description of Artificial Sequence: Synthetic peptide
  Seed: MDPRMCSLMQGSTLPR
MDPRMFSLAQASTSPR

SEQ ID NO: 96594 - protein, 16 aa, Artificial Sequence
  Description of Artificial Sequence: Synthetic peptide
  Seed: MDPRMCSLMQGSTLPR
MDPRMFSLAQASTTPR

SEQ ID NO: 96595 - protein, 16 aa, Artificial Sequence
  Description of Artificial Sequence: Synthetic peptide
  Seed: MDPRMCSLMQGSTLPR
MDPRMFSLAQASTVPR

SEQ ID NO: 96596 - protein, 16 aa, Artificial Sequence
  Description of Artificial Sequence: Synthetic peptide
  Seed: MDPRMCSLMQGSTLPR
MDPRMFSLAQGSTAPR

SEQ ID NO: 96597 - protein, 16 aa, Artificial Sequence
  Description of Artificial Sequence: Synthetic peptide
  Seed: MDPRMCSLMQGSTLPR
MDPRMFSLAQGSTIPR

SEQ ID NO: 96598 - protein, 16 aa, Artificial Sequence
  Description of Artificial Sequence: Synthetic peptide
  Seed: MDPRMCSLMQGSTLPR
MDPRMFSLAQGSTLPR

SEQ ID NO: 96599 - protein, 16 aa, Artificial Sequence
  Description of Artificial Sequence: Synthetic peptide
  Seed: MDPRMCSLMQGSTLPR
MDPRMFSLAQGSTMPR

SEQ ID NO: 96600 - protein, 16 aa, Artificial Sequence
  Description of Artificial Sequence: Synthetic peptide
  Seed: MDPRMCSLMQGSTLPR
MDPRMFSLAQGSTSPR

SEQ ID NO: 96601 - protein, 16 aa, Artificial Sequence
  Description of Artificial Sequence: Synthetic peptide
  Seed: MDPRMCSLMQGSTLPR
MDPRMFSLAQGSTTPR

SEQ ID NO: 96602 - protein, 16 aa, Artificial Sequence
  Description of Artificial Sequence: Synthetic peptide
  Seed: MDPRMCSLMQGSTLPR
MDPRMFSLAQGSTVPR

SEQ ID NO: 96603 - protein, 16 aa, Artificial Sequence
  Description of Artificial Sequence: Synthetic peptide
  Seed: MDPRMCSLMQGSTLPR
MDPRMFSLAQISTAPR

SEQ ID NO: 96604 - protein, 16 aa, Artificial Sequence
  Description of Artificial Sequence: Synthetic peptide
  Seed: MDPRMCSLMQGSTLPR
MDPRMFSLAQISTNPR

SEQ ID NO: 96605 - protein, 16 aa, Artificial Sequence
  Description of Artificial Sequence: Synthetic peptide
  Seed: MDPRMCSLMQGSTLPR
MDPRMFSLAQISTSPR

SEQ ID NO: 96606 - protein, 16 aa, Artificial Sequence
  Description of Artificial Sequence: Synthetic peptide
  Seed: MDPRMCSLMQGSTLPR
MDPRMFSLAQISTVPR

SEQ ID NO: 96607 - protein, 16 aa, Artificial Sequence
  Description of Artificial Sequence: Synthetic peptide
  Seed: MDPRMCSLMQGSTLPR
MDPRMFSLAQNSTAPR

SEQ ID NO: 96608 - protein, 16 aa, Artificial Sequence
  Description of Artificial Sequence: Synthetic peptide
  Seed: MDPRMCSLMQGSTLPR
MDPRMFSLAQNSTIPR

SEQ ID NO: 96609 - protein, 16 aa, Artificial Sequence
  Description of Artificial Sequence: Synthetic peptide
  Seed: MDPRMCSLMQGSTLPR
MDPRMFSLAQNSTLPR

SEQ ID NO: 96610 - protein, 16 aa, Artificial Sequence
  Description of Artificial Sequence: Synthetic peptide
  Seed: MDPRMCSLMQGSTLPR
MDPRMFSLAQNSTVPR

SEQ ID NO: 96611 - protein, 16 aa, Artificial Sequence
  Description of Artificial Sequence: Synthetic peptide
  Seed: MDPRMCSLMQGSTLPR
MDPRMFSLAQPSTAPR

SEQ ID NO: 96612 - protein, 16 aa, Artificial Sequence
  Description of Artificial Sequence: Synthetic peptide
  Seed: MDPRMCSLMQGSTLPR
MDPRMFSLAQPSTIPR

SEQ ID NO: 96613 - protein, 16 aa, Artificial Sequence
  Description of Artificial Sequence: Synthetic peptide
  Seed: MDPRMCSLMQGSTLPR
MDPRMFSLAQPSTLPR

SEQ ID NO: 96614 - protein, 16 aa, Artificial Sequence
  Description of Artificial Sequence: Synthetic peptide
  Seed: MDPRMCSLMQGSTLPR
MDPRMFSLAQPSTMPR

SEQ ID NO: 96615 - protein, 16 aa, Artificial Sequence
  Description of Artificial Sequence: Synthetic peptide
  Seed: MDPRMCSLMQGSTLPR
MDPRMFSLAQPSTNPR

SEQ ID NO: 96616 - protein, 16 aa, Artificial Sequence
  Description of Artificial Sequence: Synthetic peptide
  Seed: MDPRMCSLMQGSTLPR
MDPRMFSLAQPSTSPR

SEQ ID NO: 96617 - protein, 16 aa, Artificial Sequence
  Description of Artificial Sequence: Synthetic peptide
  Seed: MDPRMCSLMQGSTLPR
MDPRMFSLAQPSTTPR

SEQ ID NO: 96618 - protein, 16 aa, Artificial Sequence
  Description of Artificial Sequence: Synthetic peptide
  Seed: MDPRMCSLMQGSTLPR
MDPRMFSLAQPSTVPR

SEQ ID NO: 96619 - protein, 16 aa, Artificial Sequence
  Description of Artificial Sequence: Synthetic peptide
  Seed: MDPRMCSLMQGSTLPR
MDPRMFSLAQSSTAPR

SEQ ID NO: 96620 - protein, 16 aa, Artificial Sequence
  Description of Artificial Sequence: Synthetic peptide
  Seed: MDPRMCSLMQGSTLPR
MDPRMFSLAQSSTIPR

SEQ ID NO: 96621 - protein, 16 aa, Artificial Sequence
  Description of Artificial Sequence: Synthetic peptide
  Seed: MDPRMCSLMQGSTLPR
MDPRMFSLAQSSTLPR

SEQ ID NO: 96622 - protein, 16 aa, Artificial Sequence
  Description of Artificial Sequence: Synthetic peptide
  Seed: MDPRMCSLMQGSTLPR
MDPRMFSLAQSSTMPR

SEQ ID NO: 96623 - protein, 16 aa, Artificial Sequence
  Description of Artificial Sequence: Synthetic peptide
  Seed: MDPRMCSLMQGSTLPR
MDPRMFSLAQSSTNPR

SEQ ID NO: 96624 - protein, 16 aa, Artificial Sequence
  Description of Artificial Sequence: Synthetic peptide
  Seed: MDPRMCSLMQGSTLPR
MDPRMFSLAQSSTSPR

SEQ ID NO: 96625 - protein, 16 aa, Artificial Sequence
  Description of Artificial Sequence: Synthetic peptide
  Seed: MDPRMCSLMQGSTLPR
MDPRMFSLAQSSTTPR

SEQ ID NO: 96626 - protein, 16 aa, Artificial Sequence
  Description of Artificial Sequence: Synthetic peptide
  Seed: MDPRMCSLMQGSTLPR
MDPRMFSLAQSSTVPR

SEQ ID NO: 96627 - protein, 16 aa, Artificial Sequence
  Description of Artificial Sequence: Synthetic peptide
  Seed: MDPRMCSLMQGSTLPR
MDPRMFSLAQTSTAPR

SEQ ID NO: 96628 - protein, 16 aa, Artificial Sequence
  Description of Artificial Sequence: Synthetic peptide
  Seed: MDPRMCSLMQGSTLPR
MDPRMFSLAQTSTIPR

SEQ ID NO: 96629 - protein, 16 aa, Artificial Sequence
  Description of Artificial Sequence: Synthetic peptide
  Seed: MDPRMCSLMQGSTLPR
MDPRMFSLAQTSTLPR

SEQ ID NO: 96630 - protein, 16 aa, Artificial Sequence
  Description of Artificial Sequence: Synthetic peptide
  Seed: MDPRMCSLMQGSTLPR
MDPRMFSLAQTSTMPR

SEQ ID NO: 96631 - protein, 16 aa, Artificial Sequence
  Description of Artificial Sequence: Synthetic peptide
  Seed: MDPRMCSLMQGSTLPR
MDPRMFSLAQTSTNPR

SEQ ID NO: 96632 - protein, 16 aa, Artificial Sequence
  Description of Artificial Sequence: Synthetic peptide
  Seed: MDPRMCSLMQGSTLPR
MDPRMFSLAQTSTSPR

SEQ ID NO: 96633 - protein, 16 aa, Artificial Sequence
  Description of Artificial Sequence: Synthetic peptide
  Seed: MDPRMCSLMQGSTLPR
MDPRMFSLAQTSTTPR

SEQ ID NO: 96634 - protein, 16 aa, Artificial Sequence
  Description of Artificial Sequence: Synthetic peptide
  Seed: MDPRMCSLMQGSTLPR
MDPRMFSLAQTSTVPR

SEQ ID NO: 96635 - protein, 16 aa, Artificial Sequence
  Description of Artificial Sequence: Synthetic peptide
  Seed: MDPRMCSLMQGSTLPR
MDPRMFSLAQVSTAPR

SEQ ID NO: 96636 - protein, 16 aa, Artificial Sequence
  Description of Artificial Sequence: Synthetic peptide
  Seed: MDPRMCSLMQGSTLPR
MDPRMFSLAQVSTIPR

SEQ ID NO: 96637 - protein, 16 aa, Artificial Sequence
  Description of Artificial Sequence: Synthetic peptide
  Seed: MDPRMCSLMQGSTLPR
MDPRMFSLAQVSTLPR

SEQ ID NO: 96638 - protein, 16 aa, Artificial Sequence
  Description of Artificial Sequence: Synthetic peptide
  Seed: MDPRMCSLMQGSTLPR
MDPRMFSLAQVSTMPR

SEQ ID NO: 96639 - protein, 16 aa, Artificial Sequence
  Description of Artificial Sequence: Synthetic peptide
  Seed: MDPRMCSLMQGSTLPR
MDPRMFSLAQVSTNPR

SEQ ID NO: 96640 - protein, 16 aa, Artificial Sequence
  Description of Artificial Sequence: Synthetic peptide
  Seed: MDPRMCSLMQGSTLPR
MDPRMFSLAQVSTSPR

SEQ ID NO: 96641 - protein, 16 aa, Artificial Sequence
  Description of Artificial Sequence: Synthetic peptide
  Seed: MDPRMCSLMQGSTLPR
MDPRMFSLAQVSTTPR

SEQ ID NO: 96642 - protein, 16 aa, Artificial Sequence
  Description of Artificial Sequence: Synthetic peptide
  Seed: MDPRMCSLMQGSTLPR
MDPRMFSLAQVSTVPR

SEQ ID NO: 96643 - protein, 16 aa, Artificial Sequence
  Description of Artificial Sequence: Synthetic peptide
  Seed: MDPRMCSLMQGSTLPR
MDPRMFSLEQASTAPR

SEQ ID NO: 96644 - protein, 16 aa, Artificial Sequence
  Description of Artificial Sequence: Synthetic peptide
  Seed: MDPRMCSLMQGSTLPR
MDPRMFSLEQASTIPR

SEQ ID NO: 96645 - protein, 16 aa, Artificial Sequence
  Description of Artificial Sequence: Synthetic peptide
  Seed: MDPRMCSLMQGSTLPR
MDPRMFSLEQASTLPR

SEQ ID NO: 96646 - protein, 16 aa, Artificial Sequence
  Description of Artificial Sequence: Synthetic peptide
  Seed: MDPRMCSLMQGSTLPR
MDPRMFSLEQASTVPR

SEQ ID NO: 96647 - protein, 16 aa, Artificial Sequence
  Description of Artificial Sequence: Synthetic peptide
  Seed: MDPRMCSLMQGSTLPR
MDPRMFSLEQGSTLPR

SEQ ID NO: 96648 - protein, 16 aa, Artificial Sequence
  Description of Artificial Sequence: Synthetic peptide
  Seed: MDPRMCSLMQGSTLPR
MDPRMFSLFQASTAPR

SEQ ID NO: 96649 - protein, 16 aa, Artificial Sequence
  Description of Artificial Sequence: Synthetic peptide
  Seed: MDPRMCSLMQGSTLPR
MDPRMFSLFQASTIPR

SEQ ID NO: 96650 - protein, 16 aa, Artificial Sequence
  Description of Artificial Sequence: Synthetic peptide
  Seed: MDPRMCSLMQGSTLPR
MDPRMFSLFQASTLPR

SEQ ID NO: 96651 - protein, 16 aa, Artificial Sequence
  Description of Artificial Sequence: Synthetic peptide
  Seed: MDPRMCSLMQGSTLPR
MDPRMFSLFQASTSPR

SEQ ID NO: 96652 - protein, 16 aa, Artificial Sequence
  Description of Artificial Sequence: Synthetic peptide
  Seed: MDPRMCSLMQGSTLPR
MDPRMFSLFQASTVPR

SEQ ID NO: 96653 - protein, 16 aa, Artificial Sequence
  Description of Artificial Sequence: Synthetic peptide
  Seed: MDPRMCSLMQGSTLPR
MDPRMFSLFQGSTLPR

SEQ ID NO: 96654 - protein, 16 aa, Artificial Sequence
  Description of Artificial Sequence: Synthetic peptide
  Seed: MDPRMCSLMQGSTLPR
MDPRMFSLFQGSTVPR

SEQ ID NO: 96655 - protein, 16 aa, Artificial Sequence
  Description of Artificial Sequence: Synthetic peptide
  Seed: MDPRMCSLMQGSTLPR
MDPRMFSLFQPSTAPR

SEQ ID NO: 96656 - protein, 16 aa, Artificial Sequence
  Description of Artificial Sequence: Synthetic peptide
  Seed: MDPRMCSLMQGSTLPR
MDPRMFSLFQPSTSPR

SEQ ID NO: 96657 - protein, 16 aa, Artificial Sequence
  Description of Artificial Sequence: Synthetic peptide
  Seed: MDPRMCSLMQGSTLPR
MDPRMFSLGQASTIPR

SEQ ID NO: 96658 - protein, 16 aa, Artificial Sequence
  Description of Artificial Sequence: Synthetic peptide
  Seed: MDPRMCSLMQGSTLPR
MDPRMFSLGQASTLPR

SEQ ID NO: 96659 - protein, 16 aa, Artificial Sequence
  Description of Artificial Sequence: Synthetic peptide
  Seed: MDPRMCSLMQGSTLPR
MDPRMFSLGQASTVPR

SEQ ID NO: 96660 - protein, 16 aa, Artificial Sequence
  Description of Artificial Sequence: Synthetic peptide
  Seed: MDPRMCSLMQGSTLPR
MDPRMFSLIQASTAPR

SEQ ID NO: 96661 - protein, 16 aa, Artificial Sequence
  Description of Artificial Sequence: Synthetic peptide
  Seed: MDPRMCSLMQGSTLPR
MDPRMFSLIQASTCPR

SEQ ID NO: 96662 - protein, 16 aa, Artificial Sequence
  Description of Artificial Sequence: Synthetic peptide
  Seed: MDPRMCSLMQGSTLPR
MDPRMFSLIQASTGPR

SEQ ID NO: 96663 - protein, 16 aa, Artificial Sequence
  Description of Artificial Sequence: Synthetic peptide
  Seed: MDPRMCSLMQGSTLPR
MDPRMFSLIQASTHPR

SEQ ID NO: 96664 - protein, 16 aa, Artificial Sequence
  Description of Artificial Sequence: Synthetic peptide
  Seed: MDPRMCSLMQGSTLPR
MDPRMFSLIQASTIPR

SEQ ID NO: 96665 - protein, 16 aa, Artificial Sequence
  Description of Artificial Sequence: Synthetic peptide
  Seed: MDPRMCSLMQGSTLPR
MDPRMFSLIQASTLPR

SEQ ID NO: 96666 - protein, 16 aa, Artificial Sequence
  Description of Artificial Sequence: Synthetic peptide
  Seed: MDPRMCSLMQGSTLPR
MDPRMFSLIQASTMPR

SEQ ID NO: 96667 - protein, 16 aa, Artificial Sequence
  Description of Artificial Sequence: Synthetic peptide
  Seed: MDPRMCSLMQGSTLPR
MDPRMFSLIQASTNPR

SEQ ID NO: 96668 - protein, 16 aa, Artificial Sequence
  Description of Artificial Sequence: Synthetic peptide
  Seed: MDPRMCSLMQGSTLPR
MDPRMFSLIQASTPPR

SEQ ID NO: 96669 - protein, 16 aa, Artificial Sequence
  Description of Artificial Sequence: Synthetic peptide
  Seed: MDPRMCSLMQGSTLPR
MDPRMFSLIQASTQPR

SEQ ID NO: 96670 - protein, 16 aa, Artificial Sequence
  Description of Artificial Sequence: Synthetic peptide
  Seed: MDPRMCSLMQGSTLPR
MDPRMFSLIQASTSPR

SEQ ID NO: 96671 - protein, 16 aa, Artificial Sequence
  Description of Artificial Sequence: Synthetic peptide
  Seed: MDPRMCSLMQGSTLPR
MDPRMFSLIQASTTPR

SEQ ID NO: 96672 - protein, 16 aa, Artificial Sequence
  Description of Artificial Sequence: Synthetic peptide
  Seed: MDPRMCSLMQGSTLPR
MDPRMFSLIQASTVPR

SEQ ID NO: 96673 - protein, 16 aa, Artificial Sequence
  Description of Artificial Sequence: Synthetic peptide
  Seed: MDPRMCSLMQGSTLPR
MDPRMFSLIQGSTAPR

SEQ ID NO: 96674 - protein, 16 aa, Artificial Sequence
  Description of Artificial Sequence: Synthetic peptide
  Seed: MDPRMCSLMQGSTLPR
MDPRMFSLIQGSTGPR

SEQ ID NO: 96675 - protein, 16 aa, Artificial Sequence
  Description of Artificial Sequence: Synthetic peptide
  Seed: MDPRMCSLMQGSTLPR
MDPRMFSLIQGSTIPR

SEQ ID NO: 96676 - protein, 16 aa, Artificial Sequence
  Description of Artificial Sequence: Synthetic peptide
  Seed: MDPRMCSLMQGSTLPR
MDPRMFSLIQGSTLPR

SEQ ID NO: 96677 - protein, 16 aa, Artificial Sequence
  Description of Artificial Sequence: Synthetic peptide
  Seed: MDPRMCSLMQGSTLPR
MDPRMFSLIQGSTMPR

SEQ ID NO: 96678 - protein, 16 aa, Artificial Sequence
  Description of Artificial Sequence: Synthetic peptide
  Seed: MDPRMCSLMQGSTLPR
MDPRMFSLIQGSTNPR

SEQ ID NO: 96679 - protein, 16 aa, Artificial Sequence
  Description of Artificial Sequence: Synthetic peptide
  Seed: MDPRMCSLMQGSTLPR
MDPRMFSLIQGSTSPR

SEQ ID NO: 96680 - protein, 16 aa, Artificial Sequence
  Description of Artificial Sequence: Synthetic peptide
  Seed: MDPRMCSLMQGSTLPR
MDPRMFSLIQGSTTPR

SEQ ID NO: 96681 - protein, 16 aa, Artificial Sequence
  Description of Artificial Sequence: Synthetic peptide
  Seed: MDPRMCSLMQGSTLPR
MDPRMFSLIQGSTVPR

SEQ ID NO: 96682 - protein, 16 aa, Artificial Sequence
  Description of Artificial Sequence: Synthetic peptide
  Seed: MDPRMCSLMQGSTLPR
MDPRMFSLIQISTAPR

SEQ ID NO: 96683 - protein, 16 aa, Artificial Sequence
  Description of Artificial Sequence: Synthetic peptide
  Seed: MDPRMCSLMQGSTLPR
MDPRMFSLIQISTGPR

SEQ ID NO: 96684 - protein, 16 aa, Artificial Sequence
  Description of Artificial Sequence: Synthetic peptide
  Seed: MDPRMCSLMQGSTLPR
MDPRMFSLIQISTIPR

SEQ ID NO: 96685 - protein, 16 aa, Artificial Sequence
  Description of Artificial Sequence: Synthetic peptide
  Seed: MDPRMCSLMQGSTLPR
MDPRMFSLIQISTLPR

SEQ ID NO: 96686 - protein, 16 aa, Artificial Sequence
  Description of Artificial Sequence: Synthetic peptide
  Seed: MDPRMCSLMQGSTLPR
MDPRMFSLIQISTMPR

SEQ ID NO: 96687 - protein, 16 aa, Artificial Sequence
  Description of Artificial Sequence: Synthetic peptide
  Seed: MDPRMCSLMQGSTLPR
MDPRMFSLIQISTNPR

SEQ ID NO: 96688 - protein, 16 aa, Artificial Sequence
  Description of Artificial Sequence: Synthetic peptide
  Seed: MDPRMCSLMQGSTLPR
MDPRMFSLIQISTSPR

SEQ ID NO: 96689 - protein, 16 aa, Artificial Sequence
  Description of Artificial Sequence: Synthetic peptide
  Seed: MDPRMCSLMQGSTLPR
MDPRMFSLIQISTTPR

SEQ ID NO: 96690 - protein, 16 aa, Artificial Sequence
  Description of Artificial Sequence: Synthetic peptide
  Seed: MDPRMCSLMQGSTLPR
MDPRMFSLIQISTVPR

SEQ ID NO: 96691 - protein, 16 aa, Artificial Sequence
  Description of Artificial Sequence: Synthetic peptide
  Seed: MDPRMCSLMQGSTLPR
MDPRMFSLIQLSTAPR

SEQ ID NO: 96692 - protein, 16 aa, Artificial Sequence
  Description of Artificial Sequence: Synthetic peptide
  Seed: MDPRMCSLMQGSTLPR
MDPRMFSLIQMSTAPR

SEQ ID NO: 96693 - protein, 16 aa, Artificial Sequence
  Description of Artificial Sequence: Synthetic peptide
  Seed: MDPRMCSLMQGSTLPR
MDPRMFSLIQNSTAPR

SEQ ID NO: 96694 - protein, 16 aa, Artificial Sequence
  Description of Artificial Sequence: Synthetic peptide
  Seed: MDPRMCSLMQGSTLPR
MDPRMFSLIQNSTIPR

SEQ ID NO: 96695 - protein, 16 aa, Artificial Sequence
  Description of Artificial Sequence: Synthetic peptide
  Seed: MDPRMCSLMQGSTLPR
MDPRMFSLIQNSTLPR

SEQ ID NO: 96696 - protein, 16 aa, Artificial Sequence
  Description of Artificial Sequence: Synthetic peptide
  Seed: MDPRMCSLMQGSTLPR
MDPRMFSLIQNSTNPR

SEQ ID NO: 96697 - protein, 16 aa, Artificial Sequence
  Description of Artificial Sequence: Synthetic peptide
  Seed: MDPRMCSLMQGSTLPR
MDPRMFSLIQNSTSPR

SEQ ID NO: 96698 - protein, 16 aa, Artificial Sequence
  Description of Artificial Sequence: Synthetic peptide
  Seed: MDPRMCSLMQGSTLPR
MDPRMFSLIQNSTTPR

SEQ ID NO: 96699 - protein, 16 aa, Artificial Sequence
  Description of Artificial Sequence: Synthetic peptide
  Seed: MDPRMCSLMQGSTLPR
MDPRMFSLIQNSTVPR

SEQ ID NO: 96700 - protein, 16 aa, Artificial Sequence
  Description of Artificial Sequence: Synthetic peptide
  Seed: MDPRMCSLMQGSTLPR
MDPRMFSLIQPSTAPR

SEQ ID NO: 96701 - protein, 16 aa, Artificial Sequence
  Description of Artificial Sequence: Synthetic peptide
  Seed: MDPRMCSLMQGSTLPR
MDPRMFSLIQPSTGPR

SEQ ID NO: 96702 - protein, 16 aa, Artificial Sequence
  Description of Artificial Sequence: Synthetic peptide
  Seed: MDPRMCSLMQGSTLPR
MDPRMFSLIQPSTHPR

SEQ ID NO: 96703 - protein, 16 aa, Artificial Sequence
  Description of Artificial Sequence: Synthetic peptide
  Seed: MDPRMCSLMQGSTLPR
MDPRMFSLIQPSTIPR

SEQ ID NO: 96704 - protein, 16 aa, Artificial Sequence
  Description of Artificial Sequence: Synthetic peptide
  Seed: MDPRMCSLMQGSTLPR
MDPRMFSLIQPSTLPR

SEQ ID NO: 96705 - protein, 16 aa, Artificial Sequence
  Description of Artificial Sequence: Synthetic peptide
  Seed: MDPRMCSLMQGSTLPR
MDPRMFSLIQPSTMPR

SEQ ID NO: 96706 - protein, 16 aa, Artificial Sequence
  Description of Artificial Sequence: Synthetic peptide
  Seed: MDPRMCSLMQGSTLPR
MDPRMFSLIQPSTNPR

SEQ ID NO: 96707 - protein, 16 aa, Artificial Sequence
  Description of Artificial Sequence: Synthetic peptide
  Seed: MDPRMCSLMQGSTLPR
MDPRMFSLIQPSTQPR

SEQ ID NO: 96708 - protein, 16 aa, Artificial Sequence
  Description of Artificial Sequence: Synthetic peptide
  Seed: MDPRMCSLMQGSTLPR
MDPRMFSLIQPSTSPR

SEQ ID NO: 96709 - protein, 16 aa, Artificial Sequence
  Description of Artificial Sequence: Synthetic peptide
  Seed: MDPRMCSLMQGSTLPR
MDPRMFSLIQPSTTPR

SEQ ID NO: 96710 - protein, 16 aa, Artificial Sequence
  Description of Artificial Sequence: Synthetic peptide
  Seed: MDPRMCSLMQGSTLPR
MDPRMFSLIQPSTVPR

SEQ ID NO: 96711 - protein, 16 aa, Artificial Sequence
  Description of Artificial Sequence: Synthetic peptide
  Seed: MDPRMCSLMQGSTLPR
MDPRMFSLIQSSTAPR

SEQ ID NO: 96712 - protein, 16 aa, Artificial Sequence
  Description of Artificial Sequence: Synthetic peptide
  Seed: MDPRMCSLMQGSTLPR
MDPRMFSLIQSSTGPR

SEQ ID NO: 96713 - protein, 16 aa, Artificial Sequence
  Description of Artificial Sequence: Synthetic peptide
  Seed: MDPRMCSLMQGSTLPR
MDPRMFSLIQSSTHPR

SEQ ID NO: 96714 - protein, 16 aa, Artificial Sequence
  Description of Artificial Sequence: Synthetic peptide
  Seed: MDPRMCSLMQGSTLPR
MDPRMFSLIQSSTIPR

SEQ ID NO: 96715 - protein, 16 aa, Artificial Sequence
  Description of Artificial Sequence: Synthetic peptide
  Seed: MDPRMCSLMQGSTLPR
MDPRMFSLIQSSTLPR

SEQ ID NO: 96716 - protein, 16 aa, Artificial Sequence
  Description of Artificial Sequence: Synthetic peptide
  Seed: MDPRMCSLMQGSTLPR
MDPRMFSLIQSSTMPR

SEQ ID NO: 96717 - protein, 16 aa, Artificial Sequence
  Description of Artificial Sequence: Synthetic peptide
  Seed: MDPRMCSLMQGSTLPR
MDPRMFSLIQSSTNPR

SEQ ID NO: 96718 - protein, 16 aa, Artificial Sequence
  Description of Artificial Sequence: Synthetic peptide
  Seed: MDPRMCSLMQGSTLPR
MDPRMFSLIQSSTSPR

SEQ ID NO: 96719 - protein, 16 aa, Artificial Sequence
  Description of Artificial Sequence: Synthetic peptide
  Seed: MDPRMCSLMQGSTLPR
MDPRMFSLIQSSTTPR

SEQ ID NO: 96720 - protein, 16 aa, Artificial Sequence
  Description of Artificial Sequence: Synthetic peptide
  Seed: MDPRMCSLMQGSTLPR
MDPRMFSLIQSSTVPR

SEQ ID NO: 96721 - protein, 16 aa, Artificial Sequence
  Description of Artificial Sequence: Synthetic peptide
  Seed: MDPRMCSLMQGSTLPR
MDPRMFSLIQTSTAPR

SEQ ID NO: 96722 - protein, 16 aa, Artificial Sequence
  Description of Artificial Sequence: Synthetic peptide
  Seed: MDPRMCSLMQGSTLPR
MDPRMFSLIQTSTGPR

SEQ ID NO: 96723 - protein, 16 aa, Artificial Sequence
  Description of Artificial Sequence: Synthetic peptide
  Seed: MDPRMCSLMQGSTLPR
MDPRMFSLIQTSTHPR

SEQ ID NO: 96724 - protein, 16 aa, Artificial Sequence
  Description of Artificial Sequence: Synthetic peptide
  Seed: MDPRMCSLMQGSTLPR
MDPRMFSLIQTSTIPR

SEQ ID NO: 96725 - protein, 16 aa, Artificial Sequence
  Description of Artificial Sequence: Synthetic peptide
  Seed: MDPRMCSLMQGSTLPR
MDPRMFSLIQTSTLPR

SEQ ID NO: 96726 - protein, 16 aa, Artificial Sequence
  Description of Artificial Sequence: Synthetic peptide
  Seed: MDPRMCSLMQGSTLPR
MDPRMFSLIQTSTMPR

SEQ ID NO: 96727 - protein, 16 aa, Artificial Sequence
  Description of Artificial Sequence: Synthetic peptide
  Seed: MDPRMCSLMQGSTLPR
MDPRMFSLIQTSTNPR

SEQ ID NO: 96728 - protein, 16 aa, Artificial Sequence
  Description of Artificial Sequence: Synthetic peptide
  Seed: MDPRMCSLMQGSTLPR
MDPRMFSLIQTSTSPR

SEQ ID NO: 96729 - protein, 16 aa, Artificial Sequence
  Description of Artificial Sequence: Synthetic peptide
  Seed: MDPRMCSLMQGSTLPR
MDPRMFSLIQTSTTPR

SEQ ID NO: 96730 - protein, 16 aa, Artificial Sequence
  Description of Artificial Sequence: Synthetic peptide
  Seed: MDPRMCSLMQGSTLPR
MDPRMFSLIQTSTVPR

SEQ ID NO: 96731 - protein, 16 aa, Artificial Sequence
  Description of Artificial Sequence: Synthetic peptide
  Seed: MDPRMCSLMQGSTLPR
MDPRMFSLIQVSTAPR

SEQ ID NO: 96732 - protein, 16 aa, Artificial Sequence
  Description of Artificial Sequence: Synthetic peptide
  Seed: MDPRMCSLMQGSTLPR
MDPRMFSLIQVSTGPR

SEQ ID NO: 96733 - protein, 16 aa, Artificial Sequence
  Description of Artificial Sequence: Synthetic peptide
  Seed: MDPRMCSLMQGSTLPR
MDPRMFSLIQVSTHPR

SEQ ID NO: 96734 - protein, 16 aa, Artificial Sequence
  Description of Artificial Sequence: Synthetic peptide
  Seed: MDPRMCSLMQGSTLPR
MDPRMFSLIQVSTIPR

SEQ ID NO: 96735 - protein, 16 aa, Artificial Sequence
  Description of Artificial Sequence: Synthetic peptide
  Seed: MDPRMCSLMQGSTLPR
MDPRMFSLIQVSTLPR

SEQ ID NO: 96736 - protein, 16 aa, Artificial Sequence
  Description of Artificial Sequence: Synthetic peptide
  Seed: MDPRMCSLMQGSTLPR
MDPRMFSLIQVSTMPR

SEQ ID NO: 96737 - protein, 16 aa, Artificial Sequence
  Description of Artificial Sequence: Synthetic peptide
  Seed: MDPRMCSLMQGSTLPR
MDPRMFSLIQVSTNPR

SEQ ID NO: 96738 - protein, 16 aa, Artificial Sequence
  Description of Artificial Sequence: Synthetic peptide
  Seed: MDPRMCSLMQGSTLPR
MDPRMFSLIQVSTSPR

SEQ ID NO: 96739 - protein, 16 aa, Artificial Sequence
  Description of Artificial Sequence: Synthetic peptide
  Seed: MDPRMCSLMQGSTLPR
MDPRMFSLIQVSTTPR

SEQ ID NO: 96740 - protein, 16 aa, Artificial Sequence
  Description of Artificial Sequence: Synthetic peptide
  Seed: MDPRMCSLMQGSTLPR
MDPRMFSLIQVSTVPR

SEQ ID NO: 96741 - protein, 16 aa, Artificial Sequence
  Description of Artificial Sequence: Synthetic peptide
  Seed: MDPRMCSLMQGSTLPR
MDPRMFSLLQASTAPR

SEQ ID NO: 96742 - protein, 16 aa, Artificial Sequence
  Description of Artificial Sequence: Synthetic peptide
  Seed: MDPRMCSLMQGSTLPR
MDPRMFSLLQASTCPR

SEQ ID NO: 96743 - protein, 16 aa, Artificial Sequence
  Description of Artificial Sequence: Synthetic peptide
  Seed: MDPRMCSLMQGSTLPR
MDPRMFSLLQASTDPR

SEQ ID NO: 96744 - protein, 16 aa, Artificial Sequence
  Description of Artificial Sequence: Synthetic peptide
  Seed: MDPRMCSLMQGSTLPR
MDPRMFSLLQASTEPR

SEQ ID NO: 96745 - protein, 16 aa, Artificial Sequence
  Description of Artificial Sequence: Synthetic peptide
  Seed: MDPRMCSLMQGSTLPR
MDPRMFSLLQASTFPR

SEQ ID NO: 96746 - protein, 16 aa, Artificial Sequence
  Description of Artificial Sequence: Synthetic peptide
  Seed: MDPRMCSLMQGSTLPR
MDPRMFSLLQASTGPR

SEQ ID NO: 96747 - protein, 16 aa, Artificial Sequence
  Description of Artificial Sequence: Synthetic peptide
  Seed: MDPRMCSLMQGSTLPR
MDPRMFSLLQASTHPR

SEQ ID NO: 96748 - protein, 16 aa, Artificial Sequence
  Description of Artificial Sequence: Synthetic peptide
  Seed: MDPRMCSLMQGSTLPR
MDPRMFSLLQASTIPR

SEQ ID NO: 96749 - protein, 16 aa, Artificial Sequence
  Description of Artificial Sequence: Synthetic peptide
  Seed: MDPRMCSLMQGSTLPR
MDPRMFSLLQASTLPR

SEQ ID NO: 96750 - protein, 16 aa, Artificial Sequence
  Description of Artificial Sequence: Synthetic peptide
  Seed: MDPRMCSLMQGSTLPR
MDPRMFSLLQASTMPR

SEQ ID NO: 96751 - protein, 16 aa, Artificial Sequence
  Description of Artificial Sequence: Synthetic peptide
  Seed: MDPRMCSLMQGSTLPR
MDPRMFSLLQASTNPR

SEQ ID NO: 96752 - protein, 16 aa, Artificial Sequence
  Description of Artificial Sequence: Synthetic peptide
  Seed: MDPRMCSLMQGSTLPR
MDPRMFSLLQASTPPR

SEQ ID NO: 96753 - protein, 16 aa, Artificial Sequence
  Description of Artificial Sequence: Synthetic peptide
  Seed: MDPRMCSLMQGSTLPR
MDPRMFSLLQASTQPR

SEQ ID NO: 96754 - protein, 16 aa, Artificial Sequence
  Description of Artificial Sequence: Synthetic peptide
  Seed: MDPRMCSLMQGSTLPR
MDPRMFSLLQASTSPR

SEQ ID NO: 96755 - protein, 16 aa, Artificial Sequence
  Description of Artificial Sequence: Synthetic peptide
  Seed: MDPRMCSLMQGSTLPR
MDPRMFSLLQASTTPR

SEQ ID NO: 96756 - protein, 16 aa, Artificial Sequence
  Description of Artificial Sequence: Synthetic peptide
  Seed: MDPRMCSLMQGSTLPR
MDPRMFSLLQASTVPR

SEQ ID NO: 96757 - protein, 16 aa, Artificial Sequence
  Description of Artificial Sequence: Synthetic peptide
  Seed: MDPRMCSLMQGSTLPR
MDPRMFSLLQGSTAPR

SEQ ID NO: 96758 - protein, 16 aa, Artificial Sequence
  Description of Artificial Sequence: Synthetic peptide
  Seed: MDPRMCSLMQGSTLPR
MDPRMFSLLQGSTCPR

SEQ ID NO: 96759 - protein, 16 aa, Artificial Sequence
  Description of Artificial Sequence: Synthetic peptide
  Seed: MDPRMCSLMQGSTLPR
MDPRMFSLLQGSTFPR

SEQ ID NO: 96760 - protein, 16 aa, Artificial Sequence
  Description of Artificial Sequence: Synthetic peptide
  Seed: MDPRMCSLMQGSTLPR
MDPRMFSLLQGSTGPR

SEQ ID NO: 96761 - protein, 16 aa, Artificial Sequence
  Description of Artificial Sequence: Synthetic peptide
  Seed: MDPRMCSLMQGSTLPR
MDPRMFSLLQGSTIPR

SEQ ID NO: 96762 - protein, 16 aa, Artificial Sequence
  Description of Artificial Sequence: Synthetic peptide
  Seed: MDPRMCSLMQGSTLPR
MDPRMFSLLQGSTLPR

SEQ ID NO: 96763 - protein, 16 aa, Artificial Sequence
  Description of Artificial Sequence: Synthetic peptide
  Seed: MDPRMCSLMQGSTLPR
MDPRMFSLLQGSTMPR

SEQ ID NO: 96764 - protein, 16 aa, Artificial Sequence
  Description of Artificial Sequence: Synthetic peptide
  Seed: MDPRMCSLMQGSTLPR
MDPRMFSLLQGSTNPR

SEQ ID NO: 96765 - protein, 16 aa, Artificial Sequence
  Description of Artificial Sequence: Synthetic peptide
  Seed: MDPRMCSLMQGSTLPR
MDPRMFSLLQGSTSPR

SEQ ID NO: 96766 - protein, 16 aa, Artificial Sequence
  Description of Artificial Sequence: Synthetic peptide
  Seed: MDPRMCSLMQGSTLPR
MDPRMFSLLQGSTTPR

SEQ ID NO: 96767 - protein, 16 aa, Artificial Sequence
  Description of Artificial Sequence: Synthetic peptide
  Seed: MDPRMCSLMQGSTLPR
MDPRMFSLLQGSTVPR

SEQ ID NO: 96768 - protein, 16 aa, Artificial Sequence
  Description of Artificial Sequence: Synthetic peptide
  Seed: MDPRMCSLMQGSTLPR
MDPRMFSLLQISTAPR

SEQ ID NO: 96769 - protein, 16 aa, Artificial Sequence
  Description of Artificial Sequence: Synthetic peptide
  Seed: MDPRMCSLMQGSTLPR
MDPRMFSLLQISTGPR

SEQ ID NO: 96770 - protein, 16 aa, Artificial Sequence
  Description of Artificial Sequence: Synthetic peptide
  Seed: MDPRMCSLMQGSTLPR
MDPRMFSLLQISTHPR

SEQ ID NO: 96771 - protein, 16 aa, Artificial Sequence
  Description of Artificial Sequence: Synthetic peptide
  Seed: MDPRMCSLMQGSTLPR
MDPRMFSLLQISTIPR

SEQ ID NO: 96772 - protein, 16 aa, Artificial Sequence
  Description of Artificial Sequence: Synthetic peptide
  Seed: MDPRMCSLMQGSTLPR
MDPRMFSLLQISTLPR

SEQ ID NO: 96773 - protein, 16 aa, Artificial Sequence
  Description of Artificial Sequence: Synthetic peptide
  Seed: MDPRMCSLMQGSTLPR
MDPRMFSLLQISTMPR

SEQ ID NO: 96774 - protein, 16 aa, Artificial Sequence
  Description of Artificial Sequence: Synthetic peptide
  Seed: MDPRMCSLMQGSTLPR
MDPRMFSLLQISTNPR

SEQ ID NO: 96775 - protein, 16 aa, Artificial Sequence
  Description of Artificial Sequence: Synthetic peptide
  Seed: MDPRMCSLMQGSTLPR
MDPRMFSLLQISTSPR

SEQ ID NO: 96776 - protein, 16 aa, Artificial Sequence
  Description of Artificial Sequence: Synthetic peptide
  Seed: MDPRMCSLMQGSTLPR
MDPRMFSLLQISTTPR

SEQ ID NO: 96777 - protein, 16 aa, Artificial Sequence
  Description of Artificial Sequence: Synthetic peptide
  Seed: MDPRMCSLMQGSTLPR
MDPRMFSLLQISTVPR

SEQ ID NO: 96778 - protein, 16 aa, Artificial Sequence
  Description of Artificial Sequence: Synthetic peptide
  Seed: MDPRMCSLMQGSTLPR
MDPRMFSLLQLSTAPR

SEQ ID NO: 96779 - protein, 16 aa, Artificial Sequence
  Description of Artificial Sequence: Synthetic peptide
  Seed: MDPRMCSLMQGSTLPR
MDPRMFSLLQLSTNPR

SEQ ID NO: 96780 - protein, 16 aa, Artificial Sequence
  Description of Artificial Sequence: Synthetic peptide
  Seed: MDPRMCSLMQGSTLPR
MDPRMFSLLQLSTSPR

SEQ ID NO: 96781 - protein, 16 aa, Artificial Sequence
  Description of Artificial Sequence: Synthetic peptide
  Seed: MDPRMCSLMQGSTLPR
MDPRMFSLLQMSTAPR

SEQ ID NO: 96782 - protein, 16 aa, Artificial Sequence
  Description of Artificial Sequence: Synthetic peptide
  Seed: MDPRMCSLMQGSTLPR
MDPRMFSLLQMSTNPR

SEQ ID NO: 96783 - protein, 16 aa, Artificial Sequence
  Description of Artificial Sequence: Synthetic peptide
  Seed: MDPRMCSLMQGSTLPR
MDPRMFSLLQMSTSPR

SEQ ID NO: 96784 - protein, 16 aa, Artificial Sequence
  Description of Artificial Sequence: Synthetic peptide
  Seed: MDPRMCSLMQGSTLPR
MDPRMFSLLQNSTAPR

SEQ ID NO: 96785 - protein, 16 aa, Artificial Sequence
  Description of Artificial Sequence: Synthetic peptide
  Seed: MDPRMCSLMQGSTLPR
MDPRMFSLLQNSTGPR

SEQ ID NO: 96786 - protein, 16 aa, Artificial Sequence
  Description of Artificial Sequence: Synthetic peptide
  Seed: MDPRMCSLMQGSTLPR
MDPRMFSLLQNSTIPR

SEQ ID NO: 96787 - protein, 16 aa, Artificial Sequence
  Description of Artificial Sequence: Synthetic peptide
  Seed: MDPRMCSLMQGSTLPR
MDPRMFSLLQNSTLPR

SEQ ID NO: 96788 - protein, 16 aa, Artificial Sequence
  Description of Artificial Sequence: Synthetic peptide
  Seed: MDPRMCSLMQGSTLPR
MDPRMFSLLQNSTMPR

SEQ ID NO: 96789 - protein, 16 aa, Artificial Sequence
  Description of Artificial Sequence: Synthetic peptide
  Seed: MDPRMCSLMQGSTLPR
MDPRMFSLLQNSTNPR

SEQ ID NO: 96790 - protein, 16 aa, Artificial Sequence
  Description of Artificial Sequence: Synthetic peptide
  Seed: MDPRMCSLMQGSTLPR
MDPRMFSLLQNSTSPR

SEQ ID NO: 96791 - protein, 16 aa, Artificial Sequence
  Description of Artificial Sequence: Synthetic peptide
  Seed: MDPRMCSLMQGSTLPR
MDPRMFSLLQNSTTPR

SEQ ID NO: 96792 - protein, 16 aa, Artificial Sequence
  Description of Artificial Sequence: Synthetic peptide
  Seed: MDPRMCSLMQGSTLPR
MDPRMFSLLQNSTVPR

SEQ ID NO: 96793 - protein, 16 aa, Artificial Sequence
  Description of Artificial Sequence: Synthetic peptide
  Seed: MDPRMCSLMQGSTLPR
MDPRMFSLLQPSTAPR

SEQ ID NO: 96794 - protein, 16 aa, Artificial Sequence
  Description of Artificial Sequence: Synthetic peptide
  Seed: MDPRMCSLMQGSTLPR
MDPRMFSLLQPSTFPR

SEQ ID NO: 96795 - protein, 16 aa, Artificial Sequence
  Description of Artificial Sequence: Synthetic peptide
  Seed: MDPRMCSLMQGSTLPR
MDPRMFSLLQPSTGPR

SEQ ID NO: 96796 - protein, 16 aa, Artificial Sequence
  Description of Artificial Sequence: Synthetic peptide
  Seed: MDPRMCSLMQGSTLPR
MDPRMFSLLQPSTHPR

SEQ ID NO: 96797 - protein, 16 aa, Artificial Sequence
  Description of Artificial Sequence: Synthetic peptide
  Seed: MDPRMCSLMQGSTLPR
MDPRMFSLLQPSTIPR

SEQ ID NO: 96798 - protein, 16 aa, Artificial Sequence
  Description of Artificial Sequence: Synthetic peptide
  Seed: MDPRMCSLMQGSTLPR
MDPRMFSLLQPSTLPR

SEQ ID NO: 96799 - protein, 16 aa, Artificial Sequence
  Description of Artificial Sequence: Synthetic peptide
  Seed: MDPRMCSLMQGSTLPR
MDPRMFSLLQPSTMPR

SEQ ID NO: 96800 - protein, 16 aa, Artificial Sequence
  Description of Artificial Sequence: Synthetic peptide
  Seed: MDPRMCSLMQGSTLPR
MDPRMFSLLQPSTNPR

SEQ ID NO: 96801 - protein, 16 aa, Artificial Sequence
  Description of Artificial Sequence: Synthetic peptide
  Seed: MDPRMCSLMQGSTLPR
MDPRMFSLLQPSTPPR

SEQ ID NO: 96802 - protein, 16 aa, Artificial Sequence
  Description of Artificial Sequence: Synthetic peptide
  Seed: MDPRMCSLMQGSTLPR
MDPRMFSLLQPSTQPR

SEQ ID NO: 96803 - protein, 16 aa, Artificial Sequence
  Description of Artificial Sequence: Synthetic peptide
  Seed: MDPRMCSLMQGSTLPR
MDPRMFSLLQPSTSPR

SEQ ID NO: 96804 - protein, 16 aa, Artificial Sequence
  Description of Artificial Sequence: Synthetic peptide
  Seed: MDPRMCSLMQGSTLPR
MDPRMFSLLQPSTTPR

SEQ ID NO: 96805 - protein, 16 aa, Artificial Sequence
  Description of Artificial Sequence: Synthetic peptide
  Seed: MDPRMCSLMQGSTLPR
MDPRMFSLLQPSTVPR

SEQ ID NO: 96806 - protein, 16 aa, Artificial Sequence
  Description of Artificial Sequence: Synthetic peptide
  Seed: MDPRMCSLMQGSTLPR
MDPRMFSLLQSSTAPR

SEQ ID NO: 96807 - protein, 16 aa, Artificial Sequence
  Description of Artificial Sequence: Synthetic peptide
  Seed: MDPRMCSLMQGSTLPR
MDPRMFSLLQSSTCPR

SEQ ID NO: 96808 - protein, 16 aa, Artificial Sequence
  Description of Artificial Sequence: Synthetic peptide
  Seed: MDPRMCSLMQGSTLPR
MDPRMFSLLQSSTFPR

SEQ ID NO: 96809 - protein, 16 aa, Artificial Sequence
  Description of Artificial Sequence: Synthetic peptide
  Seed: MDPRMCSLMQGSTLPR
MDPRMFSLLQSSTGPR

SEQ ID NO: 96810 - protein, 16 aa, Artificial Sequence
  Description of Artificial Sequence: Synthetic peptide
  Seed: MDPRMCSLMQGSTLPR
MDPRMFSLLQSSTHPR

SEQ ID NO: 96811 - protein, 16 aa, Artificial Sequence
  Description of Artificial Sequence: Synthetic peptide
  Seed: MDPRMCSLMQGSTLPR
MDPRMFSLLQSSTIPR

SEQ ID NO: 96812 - protein, 16 aa, Artificial Sequence
  Description of Artificial Sequence: Synthetic peptide
  Seed: MDPRMCSLMQGSTLPR
MDPRMFSLLQSSTLPR

SEQ ID NO: 96813 - protein, 16 aa, Artificial Sequence
  Description of Artificial Sequence: Synthetic peptide
  Seed: MDPRMCSLMQGSTLPR
MDPRMFSLLQSSTMPR

SEQ ID NO: 96814 - protein, 16 aa, Artificial Sequence
  Description of Artificial Sequence: Synthetic peptide
  Seed: MDPRMCSLMQGSTLPR
MDPRMFSLLQSSTNPR

SEQ ID NO: 96815 - protein, 16 aa, Artificial Sequence
  Description of Artificial Sequence: Synthetic peptide
  Seed: MDPRMCSLMQGSTLPR
MDPRMFSLLQSSTQPR

SEQ ID NO: 96816 - protein, 16 aa, Artificial Sequence
  Description of Artificial Sequence: Synthetic peptide
  Seed: MDPRMCSLMQGSTLPR
MDPRMFSLLQSSTSPR

SEQ ID NO: 96817 - protein, 16 aa, Artificial Sequence
  Description of Artificial Sequence: Synthetic peptide
  Seed: MDPRMCSLMQGSTLPR
MDPRMFSLLQSSTTPR

SEQ ID NO: 96818 - protein, 16 aa, Artificial Sequence
  Description of Artificial Sequence: Synthetic peptide
  Seed: MDPRMCSLMQGSTLPR
MDPRMFSLLQSSTVPR

SEQ ID NO: 96819 - protein, 16 aa, Artificial Sequence
  Description of Artificial Sequence: Synthetic peptide
  Seed: MDPRMCSLMQGSTLPR
MDPRMFSLLQTSTAPR

SEQ ID NO: 96820 - protein, 16 aa, Artificial Sequence
  Description of Artificial Sequence: Synthetic peptide
  Seed: MDPRMCSLMQGSTLPR
MDPRMFSLLQTSTGPR

SEQ ID NO: 96821 - protein, 16 aa, Artificial Sequence
  Description of Artificial Sequence: Synthetic peptide
  Seed: MDPRMCSLMQGSTLPR
MDPRMFSLLQTSTHPR

SEQ ID NO: 96822 - protein, 16 aa, Artificial Sequence
  Description of Artificial Sequence: Synthetic peptide
  Seed: MDPRMCSLMQGSTLPR
MDPRMFSLLQTSTIPR

SEQ ID NO: 96823 - protein, 16 aa, Artificial Sequence
  Description of Artificial Sequence: Synthetic peptide
  Seed: MDPRMCSLMQGSTLPR
MDPRMFSLLQTSTLPR

SEQ ID NO: 96824 - protein, 16 aa, Artificial Sequence
  Description of Artificial Sequence: Synthetic peptide
  Seed: MDPRMCSLMQGSTLPR
MDPRMFSLLQTSTMPR

SEQ ID NO: 96825 - protein, 16 aa, Artificial Sequence
  Description of Artificial Sequence: Synthetic peptide
  Seed: MDPRMCSLMQGSTLPR
MDPRMFSLLQTSTNPR

SEQ ID NO: 96826 - protein, 16 aa, Artificial Sequence
  Description of Artificial Sequence: Synthetic peptide
  Seed: MDPRMCSLMQGSTLPR
MDPRMFSLLQTSTQPR

SEQ ID NO: 96827 - protein, 16 aa, Artificial Sequence
  Description of Artificial Sequence: Synthetic peptide
  Seed: MDPRMCSLMQGSTLPR
MDPRMFSLLQTSTSPR

SEQ ID NO: 96828 - protein, 16 aa, Artificial Sequence
  Description of Artificial Sequence: Synthetic peptide
  Seed: MDPRMCSLMQGSTLPR
MDPRMFSLLQTSTTPR

SEQ ID NO: 96829 - protein, 16 aa, Artificial Sequence
  Description of Artificial Sequence: Synthetic peptide
  Seed: MDPRMCSLMQGSTLPR
MDPRMFSLLQTSTVPR

SEQ ID NO: 96830 - protein, 16 aa, Artificial Sequence
  Description of Artificial Sequence: Synthetic peptide
  Seed: MDPRMCSLMQGSTLPR
MDPRMFSLLQVSTAPR

SEQ ID NO: 96831 - protein, 16 aa, Artificial Sequence
  Description of Artificial Sequence: Synthetic peptide
  Seed: MDPRMCSLMQGSTLPR
MDPRMFSLLQVSTGPR

SEQ ID NO: 96832 - protein, 16 aa, Artificial Sequence
  Description of Artificial Sequence: Synthetic peptide
  Seed: MDPRMCSLMQGSTLPR
MDPRMFSLLQVSTHPR

SEQ ID NO: 96833 - protein, 16 aa, Artificial Sequence
  Description of Artificial Sequence: Synthetic peptide
  Seed: MDPRMCSLMQGSTLPR
MDPRMFSLLQVSTIPR

SEQ ID NO: 96834 - protein, 16 aa, Artificial Sequence
  Description of Artificial Sequence: Synthetic peptide
  Seed: MDPRMCSLMQGSTLPR
MDPRMFSLLQVSTLPR

SEQ ID NO: 96835 - protein, 16 aa, Artificial Sequence
  Description of Artificial Sequence: Synthetic peptide
  Seed: MDPRMCSLMQGSTLPR
MDPRMFSLLQVSTMPR

SEQ ID NO: 96836 - protein, 16 aa, Artificial Sequence
  Description of Artificial Sequence: Synthetic peptide
  Seed: MDPRMCSLMQGSTLPR
MDPRMFSLLQVSTNPR

SEQ ID NO: 96837 - protein, 16 aa, Artificial Sequence
  Description of Artificial Sequence: Synthetic peptide
  Seed: MDPRMCSLMQGSTLPR
MDPRMFSLLQVSTPPR

SEQ ID NO: 96838 - protein, 16 aa, Artificial Sequence
  Description of Artificial Sequence: Synthetic peptide
  Seed: MDPRMCSLMQGSTLPR
MDPRMFSLLQVSTQPR

SEQ ID NO: 96839 - protein, 16 aa, Artificial Sequence
  Description of Artificial Sequence: Synthetic peptide
  Seed: MDPRMCSLMQGSTLPR
MDPRMFSLLQVSTSPR

SEQ ID NO: 96840 - protein, 16 aa, Artificial Sequence
  Description of Artificial Sequence: Synthetic peptide
  Seed: MDPRMCSLMQGSTLPR
MDPRMFSLLQVSTTPR

SEQ ID NO: 96841 - protein, 16 aa, Artificial Sequence
  Description of Artificial Sequence: Synthetic peptide
  Seed: MDPRMCSLMQGSTLPR
MDPRMFSLLQVSTVPR

SEQ ID NO: 96842 - protein, 16 aa, Artificial Sequence
  Description of Artificial Sequence: Synthetic peptide
  Seed: MDPRMCSLMQGSTLPR
MDPRMFSLMQASTAPR

SEQ ID NO: 96843 - protein, 16 aa, Artificial Sequence
  Description of Artificial Sequence: Synthetic peptide
  Seed: MDPRMCSLMQGSTLPR
MDPRMFSLMQASTCPR

SEQ ID NO: 96844 - protein, 16 aa, Artificial Sequence
  Description of Artificial Sequence: Synthetic peptide
  Seed: MDPRMCSLMQGSTLPR
MDPRMFSLMQASTDPR

SEQ ID NO: 96845 - protein, 16 aa, Artificial Sequence
  Description of Artificial Sequence: Synthetic peptide
  Seed: MDPRMCSLMQGSTLPR
MDPRMFSLMQASTEPR

SEQ ID NO: 96846 - protein, 16 aa, Artificial Sequence
  Description of Artificial Sequence: Synthetic peptide
  Seed: MDPRMCSLMQGSTLPR
MDPRMFSLMQASTFPR

SEQ ID NO: 96847 - protein, 16 aa, Artificial Sequence
  Description of Artificial Sequence: Synthetic peptide
  Seed: MDPRMCSLMQGSTLPR
MDPRMFSLMQASTGPR

SEQ ID NO: 96848 - protein, 16 aa, Artificial Sequence
  Description of Artificial Sequence: Synthetic peptide
  Seed: MDPRMCSLMQGSTLPR
MDPRMFSLMQASTHPR

SEQ ID NO: 96849 - protein, 16 aa, Artificial Sequence
  Description of Artificial Sequence: Synthetic peptide
  Seed: MDPRMCSLMQGSTLPR
MDPRMFSLMQASTIPR

SEQ ID NO: 96850 - protein, 16 aa, Artificial Sequence
  Description of Artificial Sequence: Synthetic peptide
  Seed: MDPRMCSLMQGSTLPR
MDPRMFSLMQASTLPR

SEQ ID NO: 96851 - protein, 16 aa, Artificial Sequence
  Description of Artificial Sequence: Synthetic peptide
  Seed: MDPRMCSLMQGSTLPR
MDPRMFSLMQASTMPR

SEQ ID NO: 96852 - protein, 16 aa, Artificial Sequence
  Description of Artificial Sequence: Synthetic peptide
  Seed: MDPRMCSLMQGSTLPR
MDPRMFSLMQASTNPR

SEQ ID NO: 96853 - protein, 16 aa, Artificial Sequence
  Description of Artificial Sequence: Synthetic peptide
  Seed: MDPRMCSLMQGSTLPR
MDPRMFSLMQASTPPR

SEQ ID NO: 96854 - protein, 16 aa, Artificial Sequence
  Description of Artificial Sequence: Synthetic peptide
  Seed: MDPRMCSLMQGSTLPR
MDPRMFSLMQASTQPR

SEQ ID NO: 96855 - protein, 16 aa, Artificial Sequence
  Description of Artificial Sequence: Synthetic peptide
  Seed: MDPRMCSLMQGSTLPR
MDPRMFSLMQASTSPR

SEQ ID NO: 96856 - protein, 16 aa, Artificial Sequence
  Description of Artificial Sequence: Synthetic peptide
  Seed: MDPRMCSLMQGSTLPR
MDPRMFSLMQASTTPR

SEQ ID NO: 96857 - protein, 16 aa, Artificial Sequence
  Description of Artificial Sequence: Synthetic peptide
  Seed: MDPRMCSLMQGSTLPR
MDPRMFSLMQASTVPR

SEQ ID NO: 96858 - protein, 16 aa, Artificial Sequence
  Description of Artificial Sequence: Synthetic peptide
  Seed: MDPRMCSLMQGSTLPR
MDPRMFSLMQGSTAPR

SEQ ID NO: 96859 - protein, 16 aa, Artificial Sequence
  Description of Artificial Sequence: Synthetic peptide
  Seed: MDPRMCSLMQGSTLPR
MDPRMFSLMQGSTCPR

SEQ ID NO: 96860 - protein, 16 aa, Artificial Sequence
  Description of Artificial Sequence: Synthetic peptide
  Seed: MDPRMCSLMQGSTLPR
MDPRMFSLMQGSTFPR

SEQ ID NO: 96861 - protein, 16 aa, Artificial Sequence
  Description of Artificial Sequence: Synthetic peptide
  Seed: MDPRMCSLMQGSTLPR
MDPRMFSLMQGSTGPR

SEQ ID NO: 96862 - protein, 16 aa, Artificial Sequence
  Description of Artificial Sequence: Synthetic peptide
  Seed: MDPRMCSLMQGSTLPR
MDPRMFSLMQGSTHPR

SEQ ID NO: 96863 - protein, 16 aa, Artificial Sequence
  Description of Artificial Sequence: Synthetic peptide
  Seed: MDPRMCSLMQGSTLPR
MDPRMFSLMQGSTIPR

SEQ ID NO: 96864 - protein, 16 aa, Artificial Sequence
  Description of Artificial Sequence: Synthetic peptide
  Seed: MDPRMCSLMQGSTLPR
MDPRMFSLMQGSTLPR

SEQ ID NO: 96865 - protein, 16 aa, Artificial Sequence
  Description of Artificial Sequence: Synthetic peptide
  Seed: MDPRMCSLMQGSTLPR
MDPRMFSLMQGSTMPR

SEQ ID NO: 96866 - protein, 16 aa, Artificial Sequence
  Description of Artificial Sequence: Synthetic peptide
  Seed: MDPRMCSLMQGSTLPR
MDPRMFSLMQGSTNPR

SEQ ID NO: 96867 - protein, 16 aa, Artificial Sequence
  Description of Artificial Sequence: Synthetic peptide
  Seed: MDPRMCSLMQGSTLPR
MDPRMFSLMQGSTQPR

SEQ ID NO: 96868 - protein, 16 aa, Artificial Sequence
  Description of Artificial Sequence: Synthetic peptide
  Seed: MDPRMCSLMQGSTLPR
MDPRMFSLMQGSTSPR

SEQ ID NO: 96869 - protein, 16 aa, Artificial Sequence
  Description of Artificial Sequence: Synthetic peptide
  Seed: MDPRMCSLMQGSTLPR
MDPRMFSLMQGSTTPR

SEQ ID NO: 96870 - protein, 16 aa, Artificial Sequence
  Description of Artificial Sequence: Synthetic peptide
  Seed: MDPRMCSLMQGSTLPR
MDPRMFSLMQGSTVPR

SEQ ID NO: 96871 - protein, 16 aa, Artificial Sequence
  Description of Artificial Sequence: Synthetic peptide
  Seed: MDPRMCSLMQGSTLPR
MDPRMFSLMQHSTLPR

SEQ ID NO: 96872 - protein, 16 aa, Artificial Sequence
  Description of Artificial Sequence: Synthetic peptide
  Seed: MDPRMCSLMQGSTLPR
MDPRMFSLMQISTAPR

SEQ ID NO: 96873 - protein, 16 aa, Artificial Sequence
  Description of Artificial Sequence: Synthetic peptide
  Seed: MDPRMCSLMQGSTLPR
MDPRMFSLMQISTGPR

SEQ ID NO: 96874 - protein, 16 aa, Artificial Sequence
  Description of Artificial Sequence: Synthetic peptide
  Seed: MDPRMCSLMQGSTLPR
MDPRMFSLMQISTHPR

SEQ ID NO: 96875 - protein, 16 aa, Artificial Sequence
  Description of Artificial Sequence: Synthetic peptide
  Seed: MDPRMCSLMQGSTLPR
MDPRMFSLMQISTIPR

SEQ ID NO: 96876 - protein, 16 aa, Artificial Sequence
  Description of Artificial Sequence: Synthetic peptide
  Seed: MDPRMCSLMQGSTLPR
MDPRMFSLMQISTLPR

SEQ ID NO: 96877 - protein, 16 aa, Artificial Sequence
  Description of Artificial Sequence: Synthetic peptide
  Seed: MDPRMCSLMQGSTLPR
MDPRMFSLMQISTMPR

SEQ ID NO: 96878 - protein, 16 aa, Artificial Sequence
  Description of Artificial Sequence: Synthetic peptide
  Seed: MDPRMCSLMQGSTLPR
MDPRMFSLMQISTNPR

SEQ ID NO: 96879 - protein, 16 aa, Artificial Sequence
  Description of Artificial Sequence: Synthetic peptide
  Seed: MDPRMCSLMQGSTLPR
MDPRMFSLMQISTQPR

SEQ ID NO: 96880 - protein, 16 aa, Artificial Sequence
  Description of Artificial Sequence: Synthetic peptide
  Seed: MDPRMCSLMQGSTLPR
MDPRMFSLMQISTSPR

SEQ ID NO: 96881 - protein, 16 aa, Artificial Sequence
  Description of Artificial Sequence: Synthetic peptide
  Seed: MDPRMCSLMQGSTLPR
MDPRMFSLMQISTTPR

SEQ ID NO: 96882 - protein, 16 aa, Artificial Sequence
  Description of Artificial Sequence: Synthetic peptide
  Seed: MDPRMCSLMQGSTLPR
MDPRMFSLMQISTVPR

SEQ ID NO: 96883 - protein, 16 aa, Artificial Sequence
  Description of Artificial Sequence: Synthetic peptide
  Seed: MDPRMCSLMQGSTLPR
MDPRMFSLMQLSTAPR

SEQ ID NO: 96884 - protein, 16 aa, Artificial Sequence
  Description of Artificial Sequence: Synthetic peptide
  Seed: MDPRMCSLMQGSTLPR
MDPRMFSLMQLSTLPR

SEQ ID NO: 96885 - protein, 16 aa, Artificial Sequence
  Description of Artificial Sequence: Synthetic peptide
  Seed: MDPRMCSLMQGSTLPR
MDPRMFSLMQLSTNPR

SEQ ID NO: 96886 - protein, 16 aa, Artificial Sequence
  Description of Artificial Sequence: Synthetic peptide
  Seed: MDPRMCSLMQGSTLPR
MDPRMFSLMQLSTSPR

SEQ ID NO: 96887 - protein, 16 aa, Artificial Sequence
  Description of Artificial Sequence: Synthetic peptide
  Seed: MDPRMCSLMQGSTLPR
MDPRMFSLMQLSTTPR

SEQ ID NO: 96888 - protein, 16 aa, Artificial Sequence
  Description of Artificial Sequence: Synthetic peptide
  Seed: MDPRMCSLMQGSTLPR
MDPRMFSLMQLSTVPR

SEQ ID NO: 96889 - protein, 16 aa, Artificial Sequence
  Description of Artificial Sequence: Synthetic peptide
  Seed: MDPRMCSLMQGSTLPR
MDPRMFSLMQMSTAPR

SEQ ID NO: 96890 - protein, 16 aa, Artificial Sequence
  Description of Artificial Sequence: Synthetic peptide
  Seed: MDPRMCSLMQGSTLPR
MDPRMFSLMQMSTNPR

SEQ ID NO: 96891 - protein, 16 aa, Artificial Sequence
  Description of Artificial Sequence: Synthetic peptide
  Seed: MDPRMCSLMQGSTLPR
MDPRMFSLMQMSTSPR

SEQ ID NO: 96892 - protein, 16 aa, Artificial Sequence
  Description of Artificial Sequence: Synthetic peptide
  Seed: MDPRMCSLMQGSTLPR
MDPRMFSLMQMSTTPR

SEQ ID NO: 96893 - protein, 16 aa, Artificial Sequence
  Description of Artificial Sequence: Synthetic peptide
  Seed: MDPRMCSLMQGSTLPR
MDPRMFSLMQMSTVPR

SEQ ID NO: 96894 - protein, 16 aa, Artificial Sequence
  Description of Artificial Sequence: Synthetic peptide
  Seed: MDPRMCSLMQGSTLPR
MDPRMFSLMQNSTAPR

SEQ ID NO: 96895 - protein, 16 aa, Artificial Sequence
  Description of Artificial Sequence: Synthetic peptide
  Seed: MDPRMCSLMQGSTLPR
MDPRMFSLMQNSTGPR

SEQ ID NO: 96896 - protein, 16 aa, Artificial Sequence
  Description of Artificial Sequence: Synthetic peptide
  Seed: MDPRMCSLMQGSTLPR
MDPRMFSLMQNSTIPR

SEQ ID NO: 96897 - protein, 16 aa, Artificial Sequence
  Description of Artificial Sequence: Synthetic peptide
  Seed: MDPRMCSLMQGSTLPR
MDPRMFSLMQNSTLPR

SEQ ID NO: 96898 - protein, 16 aa, Artificial Sequence
  Description of Artificial Sequence: Synthetic peptide
  Seed: MDPRMCSLMQGSTLPR
MDPRMFSLMQNSTMPR

SEQ ID NO: 96899 - protein, 16 aa, Artificial Sequence
  Description of Artificial Sequence: Synthetic peptide
  Seed: MDPRMCSLMQGSTLPR
MDPRMFSLMQNSTNPR

SEQ ID NO: 96900 - protein, 16 aa, Artificial Sequence
  Description of Artificial Sequence: Synthetic peptide
  Seed: MDPRMCSLMQGSTLPR
MDPRMFSLMQNSTSPR

SEQ ID NO: 96901 - protein, 16 aa, Artificial Sequence
  Description of Artificial Sequence: Synthetic peptide
  Seed: MDPRMCSLMQGSTLPR
MDPRMFSLMQNSTTPR

SEQ ID NO: 96902 - protein, 16 aa, Artificial Sequence
  Description of Artificial Sequence: Synthetic peptide
  Seed: MDPRMCSLMQGSTLPR
MDPRMFSLMQNSTVPR

SEQ ID NO: 96903 - protein, 16 aa, Artificial Sequence
  Description of Artificial Sequence: Synthetic peptide
  Seed: MDPRMCSLMQGSTLPR
MDPRMFSLMQPSTAPR

SEQ ID NO: 96904 - protein, 16 aa, Artificial Sequence
  Description of Artificial Sequence: Synthetic peptide
  Seed: MDPRMCSLMQGSTLPR
MDPRMFSLMQPSTFPR

SEQ ID NO: 96905 - protein, 16 aa, Artificial Sequence
  Description of Artificial Sequence: Synthetic peptide
  Seed: MDPRMCSLMQGSTLPR
MDPRMFSLMQPSTGPR

SEQ ID NO: 96906 - protein, 16 aa, Artificial Sequence
  Description of Artificial Sequence: Synthetic peptide
  Seed: MDPRMCSLMQGSTLPR
MDPRMFSLMQPSTHPR

SEQ ID NO: 96907 - protein, 16 aa, Artificial Sequence
  Description of Artificial Sequence: Synthetic peptide
  Seed: MDPRMCSLMQGSTLPR
MDPRMFSLMQPSTIPR

SEQ ID NO: 96908 - protein, 16 aa, Artificial Sequence
  Description of Artificial Sequence: Synthetic peptide
  Seed: MDPRMCSLMQGSTLPR
MDPRMFSLMQPSTLPR

SEQ ID NO: 96909 - protein, 16 aa, Artificial Sequence
  Description of Artificial Sequence: Synthetic peptide
  Seed: MDPRMCSLMQGSTLPR
MDPRMFSLMQPSTMPR

SEQ ID NO: 96910 - protein, 16 aa, Artificial Sequence
  Description of Artificial Sequence: Synthetic peptide
  Seed: MDPRMCSLMQGSTLPR
MDPRMFSLMQPSTNPR

SEQ ID NO: 96911 - protein, 16 aa, Artificial Sequence
  Description of Artificial Sequence: Synthetic peptide
  Seed: MDPRMCSLMQGSTLPR
MDPRMFSLMQPSTPPR

SEQ ID NO: 96912 - protein, 16 aa, Artificial Sequence
  Description of Artificial Sequence: Synthetic peptide
  Seed: MDPRMCSLMQGSTLPR
MDPRMFSLMQPSTQPR

SEQ ID NO: 96913 - protein, 16 aa, Artificial Sequence
  Description of Artificial Sequence: Synthetic peptide
  Seed: MDPRMCSLMQGSTLPR
MDPRMFSLMQPSTSPR

SEQ ID NO: 96914 - protein, 16 aa, Artificial Sequence
  Description of Artificial Sequence: Synthetic peptide
  Seed: MDPRMCSLMQGSTLPR
MDPRMFSLMQPSTTPR

SEQ ID NO: 96915 - protein, 16 aa, Artificial Sequence
  Description of Artificial Sequence: Synthetic peptide
  Seed: MDPRMCSLMQGSTLPR
MDPRMFSLMQPSTVPR

SEQ ID NO: 96916 - protein, 16 aa, Artificial Sequence
  Description of Artificial Sequence: Synthetic peptide
  Seed: MDPRMCSLMQGSTLPR
MDPRMFSLMQSSTAPR

SEQ ID NO: 96917 - protein, 16 aa, Artificial Sequence
  Description of Artificial Sequence: Synthetic peptide
  Seed: MDPRMCSLMQGSTLPR
MDPRMFSLMQSSTCPR

SEQ ID NO: 96918 - protein, 16 aa, Artificial Sequence
  Description of Artificial Sequence: Synthetic peptide
  Seed: MDPRMCSLMQGSTLPR
MDPRMFSLMQSSTFPR

SEQ ID NO: 96919 - protein, 16 aa, Artificial Sequence
  Description of Artificial Sequence: Synthetic peptide
  Seed: MDPRMCSLMQGSTLPR
MDPRMFSLMQSSTGPR

SEQ ID NO: 96920 - protein, 16 aa, Artificial Sequence
  Description of Artificial Sequence: Synthetic peptide
  Seed: MDPRMCSLMQGSTLPR
MDPRMFSLMQSSTHPR

SEQ ID NO: 96921 - protein, 16 aa, Artificial Sequence
  Description of Artificial Sequence: Synthetic peptide
  Seed: MDPRMCSLMQGSTLPR
MDPRMFSLMQSSTIPR

SEQ ID NO: 96922 - protein, 16 aa, Artificial Sequence
  Description of Artificial Sequence: Synthetic peptide
  Seed: MDPRMCSLMQGSTLPR
MDPRMFSLMQSSTLPR

SEQ ID NO: 96923 - protein, 16 aa, Artificial Sequence
  Description of Artificial Sequence: Synthetic peptide
  Seed: MDPRMCSLMQGSTLPR
MDPRMFSLMQSSTMPR

SEQ ID NO: 96924 - protein, 16 aa, Artificial Sequence
  Description of Artificial Sequence: Synthetic peptide
  Seed: MDPRMCSLMQGSTLPR
MDPRMFSLMQSSTNPR

SEQ ID NO: 96925 - protein, 16 aa, Artificial Sequence
  Description of Artificial Sequence: Synthetic peptide
  Seed: MDPRMCSLMQGSTLPR
MDPRMFSLMQSSTPPR

SEQ ID NO: 96926 - protein, 16 aa, Artificial Sequence
  Description of Artificial Sequence: Synthetic peptide
  Seed: MDPRMCSLMQGSTLPR
MDPRMFSLMQSSTQPR

SEQ ID NO: 96927 - protein, 16 aa, Artificial Sequence
  Description of Artificial Sequence: Synthetic peptide
  Seed: MDPRMCSLMQGSTLPR
MDPRMFSLMQSSTSPR

SEQ ID NO: 96928 - protein, 16 aa, Artificial Sequence
  Description of Artificial Sequence: Synthetic peptide
  Seed: MDPRMCSLMQGSTLPR
MDPRMFSLMQSSTTPR

SEQ ID NO: 96929 - protein, 16 aa, Artificial Sequence
  Description of Artificial Sequence: Synthetic peptide
  Seed: MDPRMCSLMQGSTLPR
MDPRMFSLMQSSTVPR

SEQ ID NO: 96930 - protein, 16 aa, Artificial Sequence
  Description of Artificial Sequence: Synthetic peptide
  Seed: MDPRMCSLMQGSTLPR
MDPRMFSLMQTSTAPR

SEQ ID NO: 96931 - protein, 16 aa, Artificial Sequence
  Description of Artificial Sequence: Synthetic peptide
  Seed: MDPRMCSLMQGSTLPR
MDPRMFSLMQTSTGPR

SEQ ID NO: 96932 - protein, 16 aa, Artificial Sequence
  Description of Artificial Sequence: Synthetic peptide
  Seed: MDPRMCSLMQGSTLPR
MDPRMFSLMQTSTHPR

SEQ ID NO: 96933 - protein, 16 aa, Artificial Sequence
  Description of Artificial Sequence: Synthetic peptide
  Seed: MDPRMCSLMQGSTLPR
MDPRMFSLMQTSTIPR

SEQ ID NO: 96934 - protein, 16 aa, Artificial Sequence
  Description of Artificial Sequence: Synthetic peptide
  Seed: MDPRMCSLMQGSTLPR
MDPRMFSLMQTSTLPR

SEQ ID NO: 96935 - protein, 16 aa, Artificial Sequence
  Description of Artificial Sequence: Synthetic peptide
  Seed: MDPRMCSLMQGSTLPR
MDPRMFSLMQTSTMPR

SEQ ID NO: 96936 - protein, 16 aa, Artificial Sequence
  Description of Artificial Sequence: Synthetic peptide
  Seed: MDPRMCSLMQGSTLPR
MDPRMFSLMQTSTNPR

SEQ ID NO: 96937 - protein, 16 aa, Artificial Sequence
  Description of Artificial Sequence: Synthetic peptide
  Seed: MDPRMCSLMQGSTLPR
MDPRMFSLMQTSTQPR

SEQ ID NO: 96938 - protein, 16 aa, Artificial Sequence
  Description of Artificial Sequence: Synthetic peptide
  Seed: MDPRMCSLMQGSTLPR
MDPRMFSLMQTSTSPR

SEQ ID NO: 96939 - protein, 16 aa, Artificial Sequence
  Description of Artificial Sequence: Synthetic peptide
  Seed: MDPRMCSLMQGSTLPR
MDPRMFSLMQTSTTPR

SEQ ID NO: 96940 - protein, 16 aa, Artificial Sequence
  Description of Artificial Sequence: Synthetic peptide
  Seed: MDPRMCSLMQGSTLPR
MDPRMFSLMQTSTVPR

SEQ ID NO: 96941 - protein, 16 aa, Artificial Sequence
  Description of Artificial Sequence: Synthetic peptide
  Seed: MDPRMCSLMQGSTLPR
MDPRMFSLMQVSTAPR

SEQ ID NO: 96942 - protein, 16 aa, Artificial Sequence
  Description of Artificial Sequence: Synthetic peptide
  Seed: MDPRMCSLMQGSTLPR
MDPRMFSLMQVSTGPR

SEQ ID NO: 96943 - protein, 16 aa, Artificial Sequence
  Description of Artificial Sequence: Synthetic peptide
  Seed: MDPRMCSLMQGSTLPR
MDPRMFSLMQVSTHPR

SEQ ID NO: 96944 - protein, 16 aa, Artificial Sequence
  Description of Artificial Sequence: Synthetic peptide
  Seed: MDPRMCSLMQGSTLPR
MDPRMFSLMQVSTIPR

SEQ ID NO: 96945 - protein, 16 aa, Artificial Sequence
  Description of Artificial Sequence: Synthetic peptide
  Seed: MDPRMCSLMQGSTLPR
MDPRMFSLMQVSTLPR

SEQ ID NO: 96946 - protein, 16 aa, Artificial Sequence
  Description of Artificial Sequence: Synthetic peptide
  Seed: MDPRMCSLMQGSTLPR
MDPRMFSLMQVSTMPR

SEQ ID NO: 96947 - protein, 16 aa, Artificial Sequence
  Description of Artificial Sequence: Synthetic peptide
  Seed: MDPRMCSLMQGSTLPR
MDPRMFSLMQVSTNPR

SEQ ID NO: 96948 - protein, 16 aa, Artificial Sequence
  Description of Artificial Sequence: Synthetic peptide
  Seed: MDPRMCSLMQGSTLPR
MDPRMFSLMQVSTPPR

SEQ ID NO: 96949 - protein, 16 aa, Artificial Sequence
  Description of Artificial Sequence: Synthetic peptide
  Seed: MDPRMCSLMQGSTLPR
MDPRMFSLMQVSTQPR

SEQ ID NO: 96950 - protein, 16 aa, Artificial Sequence
  Description of Artificial Sequence: Synthetic peptide
  Seed: MDPRMCSLMQGSTLPR
MDPRMFSLMQVSTSPR

SEQ ID NO: 96951 - protein, 16 aa, Artificial Sequence
  Description of Artificial Sequence: Synthetic peptide
  Seed: MDPRMCSLMQGSTLPR
MDPRMFSLMQVSTTPR

SEQ ID NO: 96952 - protein, 16 aa, Artificial Sequence
  Description of Artificial Sequence: Synthetic peptide
  Seed: MDPRMCSLMQGSTLPR
MDPRMFSLMQVSTVPR

SEQ ID NO: 96953 - protein, 16 aa, Artificial Sequence
  Description of Artificial Sequence: Synthetic peptide
  Seed: MDPRMCSLMQGSTLPR
MDPRMFSLNQASTIPR

SEQ ID NO: 96954 - protein, 16 aa, Artificial Sequence
  Description of Artificial Sequence: Synthetic peptide
  Seed: MDPRMCSLMQGSTLPR
MDPRMFSLNQASTLPR

SEQ ID NO: 96955 - protein, 16 aa, Artificial Sequence
  Description of Artificial Sequence: Synthetic peptide
  Seed: MDPRMCSLMQGSTLPR
MDPRMFSLNQASTVPR

SEQ ID NO: 96956 - protein, 16 aa, Artificial Sequence
  Description of Artificial Sequence: Synthetic peptide
  Seed: MDPRMCSLMQGSTLPR
MDPRMFSLQQASTAPR

SEQ ID NO: 96957 - protein, 16 aa, Artificial Sequence
  Description of Artificial Sequence: Synthetic peptide
  Seed: MDPRMCSLMQGSTLPR
MDPRMFSLQQASTIPR

SEQ ID NO: 96958 - protein, 16 aa, Artificial Sequence
  Description of Artificial Sequence: Synthetic peptide
  Seed: MDPRMCSLMQGSTLPR
MDPRMFSLQQASTLPR

SEQ ID NO: 96959 - protein, 16 aa, Artificial Sequence
  Description of Artificial Sequence: Synthetic peptide
  Seed: MDPRMCSLMQGSTLPR
MDPRMFSLQQASTMPR

SEQ ID NO: 96960 - protein, 16 aa, Artificial Sequence
  Description of Artificial Sequence: Synthetic peptide
  Seed: MDPRMCSLMQGSTLPR
MDPRMFSLQQASTNPR

SEQ ID NO: 96961 - protein, 16 aa, Artificial Sequence
  Description of Artificial Sequence: Synthetic peptide
  Seed: MDPRMCSLMQGSTLPR
MDPRMFSLQQASTSPR

SEQ ID NO: 96962 - protein, 16 aa, Artificial Sequence
  Description of Artificial Sequence: Synthetic peptide
  Seed: MDPRMCSLMQGSTLPR
MDPRMFSLQQASTTPR

SEQ ID NO: 96963 - protein, 16 aa, Artificial Sequence
  Description of Artificial Sequence: Synthetic peptide
  Seed: MDPRMCSLMQGSTLPR
MDPRMFSLQQASTVPR

SEQ ID NO: 96964 - protein, 16 aa, Artificial Sequence
  Description of Artificial Sequence: Synthetic peptide
  Seed: MDPRMCSLMQGSTLPR
MDPRMFSLQQGSTAPR

SEQ ID NO: 96965 - protein, 16 aa, Artificial Sequence
  Description of Artificial Sequence: Synthetic peptide
  Seed: MDPRMCSLMQGSTLPR
MDPRMFSLQQGSTIPR

SEQ ID NO: 96966 - protein, 16 aa, Artificial Sequence
  Description of Artificial Sequence: Synthetic peptide
  Seed: MDPRMCSLMQGSTLPR
MDPRMFSLQQGSTLPR

SEQ ID NO: 96967 - protein, 16 aa, Artificial Sequence
  Description of Artificial Sequence: Synthetic peptide
  Seed: MDPRMCSLMQGSTLPR
MDPRMFSLQQGSTMPR

SEQ ID NO: 96968 - protein, 16 aa, Artificial Sequence
  Description of Artificial Sequence: Synthetic peptide
  Seed: MDPRMCSLMQGSTLPR
MDPRMFSLQQGSTVPR

SEQ ID NO: 96969 - protein, 16 aa, Artificial Sequence
  Description of Artificial Sequence: Synthetic peptide
  Seed: MDPRMCSLMQGSTLPR
MDPRMFSLQQISTAPR

SEQ ID NO: 96970 - protein, 16 aa, Artificial Sequence
  Description of Artificial Sequence: Synthetic peptide
  Seed: MDPRMCSLMQGSTLPR
MDPRMFSLQQNSTLPR

SEQ ID NO: 96971 - protein, 16 aa, Artificial Sequence
  Description of Artificial Sequence: Synthetic peptide
  Seed: MDPRMCSLMQGSTLPR
MDPRMFSLQQNSTVPR

SEQ ID NO: 96972 - protein, 16 aa, Artificial Sequence
  Description of Artificial Sequence: Synthetic peptide
  Seed: MDPRMCSLMQGSTLPR
MDPRMFSLQQPSTAPR

SEQ ID NO: 96973 - protein, 16 aa, Artificial Sequence
  Description of Artificial Sequence: Synthetic peptide
  Seed: MDPRMCSLMQGSTLPR
MDPRMFSLQQPSTIPR

SEQ ID NO: 96974 - protein, 16 aa, Artificial Sequence
  Description of Artificial Sequence: Synthetic peptide
  Seed: MDPRMCSLMQGSTLPR
MDPRMFSLQQPSTLPR

SEQ ID NO: 96975 - protein, 16 aa, Artificial Sequence
  Description of Artificial Sequence: Synthetic peptide
  Seed: MDPRMCSLMQGSTLPR
MDPRMFSLQQPSTVPR

SEQ ID NO: 96976 - protein, 16 aa, Artificial Sequence
  Description of Artificial Sequence: Synthetic peptide
  Seed: MDPRMCSLMQGSTLPR
MDPRMFSLQQSSTAPR

SEQ ID NO: 96977 - protein, 16 aa, Artificial Sequence
  Description of Artificial Sequence: Synthetic peptide
  Seed: MDPRMCSLMQGSTLPR
MDPRMFSLQQSSTIPR

SEQ ID NO: 96978 - protein, 16 aa, Artificial Sequence
  Description of Artificial Sequence: Synthetic peptide
  Seed: MDPRMCSLMQGSTLPR
MDPRMFSLQQSSTLPR

SEQ ID NO: 96979 - protein, 16 aa, Artificial Sequence
  Description of Artificial Sequence: Synthetic peptide
  Seed: MDPRMCSLMQGSTLPR
MDPRMFSLQQSSTMPR

SEQ ID NO: 96980 - protein, 16 aa, Artificial Sequence
  Description of Artificial Sequence: Synthetic peptide
  Seed: MDPRMCSLMQGSTLPR
MDPRMFSLQQSSTVPR

SEQ ID NO: 96981 - protein, 16 aa, Artificial Sequence
  Description of Artificial Sequence: Synthetic peptide
  Seed: MDPRMCSLMQGSTLPR
MDPRMFSLQQTSTAPR

SEQ ID NO: 96982 - protein, 16 aa, Artificial Sequence
  Description of Artificial Sequence: Synthetic peptide
  Seed: MDPRMCSLMQGSTLPR
MDPRMFSLQQTSTLPR

SEQ ID NO: 96983 - protein, 16 aa, Artificial Sequence
  Description of Artificial Sequence: Synthetic peptide
  Seed: MDPRMCSLMQGSTLPR
MDPRMFSLQQVSTAPR

SEQ ID NO: 96984 - protein, 16 aa, Artificial Sequence
  Description of Artificial Sequence: Synthetic peptide
  Seed: MDPRMCSLMQGSTLPR
MDPRMFSLSQASTAPR

SEQ ID NO: 96985 - protein, 16 aa, Artificial Sequence
  Description of Artificial Sequence: Synthetic peptide
  Seed: MDPRMCSLMQGSTLPR
MDPRMFSLSQASTIPR

SEQ ID NO: 96986 - protein, 16 aa, Artificial Sequence
  Description of Artificial Sequence: Synthetic peptide
  Seed: MDPRMCSLMQGSTLPR
MDPRMFSLSQASTLPR

SEQ ID NO: 96987 - protein, 16 aa, Artificial Sequence
  Description of Artificial Sequence: Synthetic peptide
  Seed: MDPRMCSLMQGSTLPR
MDPRMFSLSQASTVPR

SEQ ID NO: 96988 - protein, 16 aa, Artificial Sequence
  Description of Artificial Sequence: Synthetic peptide
  Seed: MDPRMCSLMQGSTLPR
MDPRMFSLSQGSTIPR

SEQ ID NO: 96989 - protein, 16 aa, Artificial Sequence
  Description of Artificial Sequence: Synthetic peptide
  Seed: MDPRMCSLMQGSTLPR
MDPRMFSLSQGSTLPR

SEQ ID NO: 96990 - protein, 16 aa, Artificial Sequence
  Description of Artificial Sequence: Synthetic peptide
  Seed: MDPRMCSLMQGSTLPR
MDPRMFSLSQGSTVPR

SEQ ID NO: 96991 - protein, 16 aa, Artificial Sequence
  Description of Artificial Sequence: Synthetic peptide
  Seed: MDPRMCSLMQGSTLPR
MDPRMFSLSQSSTLPR

SEQ ID NO: 96992 - protein, 16 aa, Artificial Sequence
  Description of Artificial Sequence: Synthetic peptide
  Seed: MDPRMCSLMQGSTLPR
MDPRMFSLSQSSTVPR

SEQ ID NO: 96993 - protein, 16 aa, Artificial Sequence
  Description of Artificial Sequence: Synthetic peptide
  Seed: MDPRMCSLMQGSTLPR
MDPRMFSLTQASTIPR

SEQ ID NO: 96994 - protein, 16 aa, Artificial Sequence
  Description of Artificial Sequence: Synthetic peptide
  Seed: MDPRMCSLMQGSTLPR
MDPRMFSLTQASTLPR

SEQ ID NO: 96995 - protein, 16 aa, Artificial Sequence
  Description of Artificial Sequence: Synthetic peptide
  Seed: MDPRMCSLMQGSTLPR
MDPRMFSLTQASTVPR

SEQ ID NO: 96996 - protein, 16 aa, Artificial Sequence
  Description of Artificial Sequence: Synthetic peptide
  Seed: MDPRMCSLMQGSTLPR
MDPRMFSLVQASTAPR

SEQ ID NO: 96997 - protein, 16 aa, Artificial Sequence
  Description of Artificial Sequence: Synthetic peptide
  Seed: MDPRMCSLMQGSTLPR
MDPRMFSLVQASTGPR

SEQ ID NO: 96998 - protein, 16 aa, Artificial Sequence
  Description of Artificial Sequence: Synthetic peptide
  Seed: MDPRMCSLMQGSTLPR
MDPRMFSLVQASTHPR

SEQ ID NO: 96999 - protein, 16 aa, Artificial Sequence
  Description of Artificial Sequence: Synthetic peptide
  Seed: MDPRMCSLMQGSTLPR
MDPRMFSLVQASTIPR

SEQ ID NO: 97000 - protein, 16 aa, Artificial Sequence
  Description of Artificial Sequence: Synthetic peptide
  Seed: MDPRMCSLMQGSTLPR
MDPRMFSLVQASTLPR

SEQ ID NO: 97001 - protein, 16 aa, Artificial Sequence
  Description of Artificial Sequence: Synthetic peptide
  Seed: MDPRMCSLMQGSTLPR
MDPRMFSLVQASTMPR

SEQ ID NO: 97002 - protein, 16 aa, Artificial Sequence
  Description of Artificial Sequence: Synthetic peptide
  Seed: MDPRMCSLMQGSTLPR
MDPRMFSLVQASTNPR

SEQ ID NO: 97003 - protein, 16 aa, Artificial Sequence
  Description of Artificial Sequence: Synthetic peptide
  Seed: MDPRMCSLMQGSTLPR
MDPRMFSLVQASTSPR

SEQ ID NO: 97004 - protein, 16 aa, Artificial Sequence
  Description of Artificial Sequence: Synthetic peptide
  Seed: MDPRMCSLMQGSTLPR
MDPRMFSLVQASTTPR

SEQ ID NO: 97005 - protein, 16 aa, Artificial Sequence
  Description of Artificial Sequence: Synthetic peptide
  Seed: MDPRMCSLMQGSTLPR
MDPRMFSLVQASTVPR

SEQ ID NO: 97006 - protein, 16 aa, Artificial Sequence
  Description of Artificial Sequence: Synthetic peptide
  Seed: MDPRMCSLMQGSTLPR
MDPRMFSLVQGSTAPR

SEQ ID NO: 97007 - protein, 16 aa, Artificial Sequence
  Description of Artificial Sequence: Synthetic peptide
  Seed: MDPRMCSLMQGSTLPR
MDPRMFSLVQGSTIPR

SEQ ID NO: 97008 - protein, 16 aa, Artificial Sequence
  Description of Artificial Sequence: Synthetic peptide
  Seed: MDPRMCSLMQGSTLPR
MDPRMFSLVQGSTLPR

SEQ ID NO: 97009 - protein, 16 aa, Artificial Sequence
  Description of Artificial Sequence: Synthetic peptide
  Seed: MDPRMCSLMQGSTLPR
MDPRMFSLVQGSTMPR

SEQ ID NO: 97010 - protein, 16 aa, Artificial Sequence
  Description of Artificial Sequence: Synthetic peptide
  Seed: MDPRMCSLMQGSTLPR
MDPRMFSLVQGSTSPR

SEQ ID NO: 97011 - protein, 16 aa, Artificial Sequence
  Description of Artificial Sequence: Synthetic peptide
  Seed: MDPRMCSLMQGSTLPR
MDPRMFSLVQGSTTPR

SEQ ID NO: 97012 - protein, 16 aa, Artificial Sequence
  Description of Artificial Sequence: Synthetic peptide
  Seed: MDPRMCSLMQGSTLPR
MDPRMFSLVQGSTVPR

SEQ ID NO: 97013 - protein, 16 aa, Artificial Sequence
  Description of Artificial Sequence: Synthetic peptide
  Seed: MDPRMCSLMQGSTLPR
MDPRMFSLVQISTAPR

SEQ ID NO: 97014 - protein, 16 aa, Artificial Sequence
  Description of Artificial Sequence: Synthetic peptide
  Seed: MDPRMCSLMQGSTLPR
MDPRMFSLVQISTNPR

SEQ ID NO: 97015 - protein, 16 aa, Artificial Sequence
  Description of Artificial Sequence: Synthetic peptide
  Seed: MDPRMCSLMQGSTLPR
MDPRMFSLVQISTSPR

SEQ ID NO: 97016 - protein, 16 aa, Artificial Sequence
  Description of Artificial Sequence: Synthetic peptide
  Seed: MDPRMCSLMQGSTLPR
MDPRMFSLVQNSTAPR

SEQ ID NO: 97017 - protein, 16 aa, Artificial Sequence
  Description of Artificial Sequence: Synthetic peptide
  Seed: MDPRMCSLMQGSTLPR
MDPRMFSLVQNSTLPR

SEQ ID NO: 97018 - protein, 16 aa, Artificial Sequence
  Description of Artificial Sequence: Synthetic peptide
  Seed: MDPRMCSLMQGSTLPR
MDPRMFSLVQNSTVPR

SEQ ID NO: 97019 - protein, 16 aa, Artificial Sequence
  Description of Artificial Sequence: Synthetic peptide
  Seed: MDPRMCSLMQGSTLPR
MDPRMFSLVQPSTAPR

SEQ ID NO: 97020 - protein, 16 aa, Artificial Sequence
  Description of Artificial Sequence: Synthetic peptide
  Seed: MDPRMCSLMQGSTLPR
MDPRMFSLVQPSTIPR

SEQ ID NO: 97021 - protein, 16 aa, Artificial Sequence
  Description of Artificial Sequence: Synthetic peptide
  Seed: MDPRMCSLMQGSTLPR
MDPRMFSLVQPSTLPR

SEQ ID NO: 97022 - protein, 16 aa, Artificial Sequence
  Description of Artificial Sequence: Synthetic peptide
  Seed: MDPRMCSLMQGSTLPR
MDPRMFSLVQPSTNPR

SEQ ID NO: 97023 - protein, 16 aa, Artificial Sequence
  Description of Artificial Sequence: Synthetic peptide
  Seed: MDPRMCSLMQGSTLPR
MDPRMFSLVQPSTSPR

SEQ ID NO: 97024 - protein, 16 aa, Artificial Sequence
  Description of Artificial Sequence: Synthetic peptide
  Seed: MDPRMCSLMQGSTLPR
MDPRMFSLVQPSTTPR

SEQ ID NO: 97025 - protein, 16 aa, Artificial Sequence
  Description of Artificial Sequence: Synthetic peptide
  Seed: MDPRMCSLMQGSTLPR
MDPRMFSLVQPSTVPR

SEQ ID NO: 97026 - protein, 16 aa, Artificial Sequence
  Description of Artificial Sequence: Synthetic peptide
  Seed: MDPRMCSLMQGSTLPR
MDPRMFSLVQSSTAPR

SEQ ID NO: 97027 - protein, 16 aa, Artificial Sequence
  Description of Artificial Sequence: Synthetic peptide
  Seed: MDPRMCSLMQGSTLPR
MDPRMFSLVQSSTIPR

SEQ ID NO: 97028 - protein, 16 aa, Artificial Sequence
  Description of Artificial Sequence: Synthetic peptide
  Seed: MDPRMCSLMQGSTLPR
MDPRMFSLVQSSTLPR

SEQ ID NO: 97029 - protein, 16 aa, Artificial Sequence
  Description of Artificial Sequence: Synthetic peptide
  Seed: MDPRMCSLMQGSTLPR
MDPRMFSLVQSSTMPR

SEQ ID NO: 97030 - protein, 16 aa, Artificial Sequence
  Description of Artificial Sequence: Synthetic peptide
  Seed: MDPRMCSLMQGSTLPR
MDPRMFSLVQSSTNPR

SEQ ID NO: 97031 - protein, 16 aa, Artificial Sequence
  Description of Artificial Sequence: Synthetic peptide
  Seed: MDPRMCSLMQGSTLPR
MDPRMFSLVQSSTSPR

SEQ ID NO: 97032 - protein, 16 aa, Artificial Sequence
  Description of Artificial Sequence: Synthetic peptide
  Seed: MDPRMCSLMQGSTLPR
MDPRMFSLVQSSTTPR

SEQ ID NO: 97033 - protein, 16 aa, Artificial Sequence
  Description of Artificial Sequence: Synthetic peptide
  Seed: MDPRMCSLMQGSTLPR
MDPRMFSLVQSSTVPR

SEQ ID NO: 97034 - protein, 16 aa, Artificial Sequence
  Description of Artificial Sequence: Synthetic peptide
  Seed: MDPRMCSLMQGSTLPR
MDPRMFSLVQTSTAPR

SEQ ID NO: 97035 - protein, 16 aa, Artificial Sequence
  Description of Artificial Sequence: Synthetic peptide
  Seed: MDPRMCSLMQGSTLPR
MDPRMFSLVQTSTIPR

SEQ ID NO: 97036 - protein, 16 aa, Artificial Sequence
  Description of Artificial Sequence: Synthetic peptide
  Seed: MDPRMCSLMQGSTLPR
MDPRMFSLVQTSTLPR

SEQ ID NO: 97037 - protein, 16 aa, Artificial Sequence
  Description of Artificial Sequence: Synthetic peptide
  Seed: MDPRMCSLMQGSTLPR
MDPRMFSLVQTSTNPR

SEQ ID NO: 97038 - protein, 16 aa, Artificial Sequence
  Description of Artificial Sequence: Synthetic peptide
  Seed: MDPRMCSLMQGSTLPR
MDPRMFSLVQTSTSPR

SEQ ID NO: 97039 - protein, 16 aa, Artificial Sequence
  Description of Artificial Sequence: Synthetic peptide
  Seed: MDPRMCSLMQGSTLPR
MDPRMFSLVQTSTTPR

SEQ ID NO: 97040 - protein, 16 aa, Artificial Sequence
  Description of Artificial Sequence: Synthetic peptide
  Seed: MDPRMCSLMQGSTLPR
MDPRMFSLVQTSTVPR

SEQ ID NO: 97041 - protein, 16 aa, Artificial Sequence
  Description of Artificial Sequence: Synthetic peptide
  Seed: MDPRMCSLMQGSTLPR
MDPRMFSLVQVSTAPR

SEQ ID NO: 97042 - protein, 16 aa, Artificial Sequence
  Description of Artificial Sequence: Synthetic peptide
  Seed: MDPRMCSLMQGSTLPR
MDPRMFSLVQVSTNPR

SEQ ID NO: 97043 - protein, 16 aa, Artificial Sequence
  Description of Artificial Sequence: Synthetic peptide
  Seed: MDPRMCSLMQGSTLPR
MDPRMFSLVQVSTSPR

SEQ ID NO: 97044 - protein, 16 aa, Artificial Sequence
  Description of Artificial Sequence: Synthetic peptide
  Seed: MDPRMCSLMQGSTLPR
MDPRMFSLVQVSTTPR

SEQ ID NO: 97045 - protein, 16 aa, Artificial Sequence
  Description of Artificial Sequence: Synthetic peptide
  Seed: MDPRMCSLMQGSTLPR
MDPRMFSLVQVSTVPR

SEQ ID NO: 97046 - protein, 16 aa, Artificial Sequence
  Description of Artificial Sequence: Synthetic peptide
  Seed: MDPRMCSLMQGSTLPR
MDPRMISLAQASTIPR

SEQ ID NO: 97047 - protein, 16 aa, Artificial Sequence
  Description of Artificial Sequence: Synthetic peptide
  Seed: MDPRMCSLMQGSTLPR
MDPRMISLAQASTLPR

SEQ ID NO: 97048 - protein, 16 aa, Artificial Sequence
  Description of Artificial Sequence: Synthetic peptide
  Seed: MDPRMCSLMQGSTLPR
MDPRMISLAQASTVPR

SEQ ID NO: 97049 - protein, 16 aa, Artificial Sequence
  Description of Artificial Sequence: Synthetic peptide
  Seed: MDPRMCSLMQGSTLPR
MDPRMISLAQGSTLPR

SEQ ID NO: 97050 - protein, 16 aa, Artificial Sequence
  Description of Artificial Sequence: Synthetic peptide
  Seed: MDPRMCSLMQGSTLPR
MDPRMISLIQASTAPR

SEQ ID NO: 97051 - protein, 16 aa, Artificial Sequence
  Description of Artificial Sequence: Synthetic peptide
  Seed: MDPRMCSLMQGSTLPR
MDPRMISLIQASTIPR

SEQ ID NO: 97052 - protein, 16 aa, Artificial Sequence
  Description of Artificial Sequence: Synthetic peptide
  Seed: MDPRMCSLMQGSTLPR
MDPRMISLIQASTLPR

SEQ ID NO: 97053 - protein, 16 aa, Artificial Sequence
  Description of Artificial Sequence: Synthetic peptide
  Seed: MDPRMCSLMQGSTLPR
MDPRMISLIQASTVPR

SEQ ID NO: 97054 - protein, 16 aa, Artificial Sequence
  Description of Artificial Sequence: Synthetic peptide
  Seed: MDPRMCSLMQGSTLPR
MDPRMISLIQGSTAPR

SEQ ID NO: 97055 - protein, 16 aa, Artificial Sequence
  Description of Artificial Sequence: Synthetic peptide
  Seed: MDPRMCSLMQGSTLPR
MDPRMISLIQGSTIPR

SEQ ID NO: 97056 - protein, 16 aa, Artificial Sequence
  Description of Artificial Sequence: Synthetic peptide
  Seed: MDPRMCSLMQGSTLPR
MDPRMISLIQGSTLPR

SEQ ID NO: 97057 - protein, 16 aa, Artificial Sequence
  Description of Artificial Sequence: Synthetic peptide
  Seed: MDPRMCSLMQGSTLPR
MDPRMISLIQGSTVPR

SEQ ID NO: 97058 - protein, 16 aa, Artificial Sequence
  Description of Artificial Sequence: Synthetic peptide
  Seed: MDPRMCSLMQGSTLPR
MDPRMISLIQSSTLPR

SEQ ID NO: 97059 - protein, 16 aa, Artificial Sequence
  Description of Artificial Sequence: Synthetic peptide
  Seed: MDPRMCSLMQGSTLPR
MDPRMISLIQSSTVPR

SEQ ID NO: 97060 - protein, 16 aa, Artificial Sequence
  Description of Artificial Sequence: Synthetic peptide
  Seed: MDPRMCSLMQGSTLPR
MDPRMISLLQASTAPR

SEQ ID NO: 97061 - protein, 16 aa, Artificial Sequence
  Description of Artificial Sequence: Synthetic peptide
  Seed: MDPRMCSLMQGSTLPR
MDPRMISLLQASTIPR

SEQ ID NO: 97062 - protein, 16 aa, Artificial Sequence
  Description of Artificial Sequence: Synthetic peptide
  Seed: MDPRMCSLMQGSTLPR
MDPRMISLLQASTLPR

SEQ ID NO: 97063 - protein, 16 aa, Artificial Sequence
  Description of Artificial Sequence: Synthetic peptide
  Seed: MDPRMCSLMQGSTLPR
MDPRMISLLQASTMPR

SEQ ID NO: 97064 - protein, 16 aa, Artificial Sequence
  Description of Artificial Sequence: Synthetic peptide
  Seed: MDPRMCSLMQGSTLPR
MDPRMISLLQASTSPR

SEQ ID NO: 97065 - protein, 16 aa, Artificial Sequence
  Description of Artificial Sequence: Synthetic peptide
  Seed: MDPRMCSLMQGSTLPR
MDPRMISLLQASTTPR

SEQ ID NO: 97066 - protein, 16 aa, Artificial Sequence
  Description of Artificial Sequence: Synthetic peptide
  Seed: MDPRMCSLMQGSTLPR
MDPRMISLLQASTVPR

SEQ ID NO: 97067 - protein, 16 aa, Artificial Sequence
  Description of Artificial Sequence: Synthetic peptide
  Seed: MDPRMCSLMQGSTLPR
MDPRMISLLQGSTAPR

SEQ ID NO: 97068 - protein, 16 aa, Artificial Sequence
  Description of Artificial Sequence: Synthetic peptide
  Seed: MDPRMCSLMQGSTLPR
MDPRMISLLQGSTIPR

SEQ ID NO: 97069 - protein, 16 aa, Artificial Sequence
  Description of Artificial Sequence: Synthetic peptide
  Seed: MDPRMCSLMQGSTLPR
MDPRMISLLQGSTLPR

SEQ ID NO: 97070 - protein, 16 aa, Artificial Sequence
  Description of Artificial Sequence: Synthetic peptide
  Seed: MDPRMCSLMQGSTLPR
MDPRMISLLQGSTMPR

SEQ ID NO: 97071 - protein, 16 aa, Artificial Sequence
  Description of Artificial Sequence: Synthetic peptide
  Seed: MDPRMCSLMQGSTLPR
MDPRMISLLQGSTSPR

SEQ ID NO: 97072 - protein, 16 aa, Artificial Sequence
  Description of Artificial Sequence: Synthetic peptide
  Seed: MDPRMCSLMQGSTLPR
MDPRMISLLQGSTTPR

SEQ ID NO: 97073 - protein, 16 aa, Artificial Sequence
  Description of Artificial Sequence: Synthetic peptide
  Seed: MDPRMCSLMQGSTLPR
MDPRMISLLQGSTVPR

SEQ ID NO: 97074 - protein, 16 aa, Artificial Sequence
  Description of Artificial Sequence: Synthetic peptide
  Seed: MDPRMCSLMQGSTLPR
MDPRMISLLQNSTLPR

SEQ ID NO: 97075 - protein, 16 aa, Artificial Sequence
  Description of Artificial Sequence: Synthetic peptide
  Seed: MDPRMCSLMQGSTLPR
MDPRMISLLQNSTVPR

SEQ ID NO: 97076 - protein, 16 aa, Artificial Sequence
  Description of Artificial Sequence: Synthetic peptide
  Seed: MDPRMCSLMQGSTLPR
MDPRMISLLQPSTAPR

SEQ ID NO: 97077 - protein, 16 aa, Artificial Sequence
  Description of Artificial Sequence: Synthetic peptide
  Seed: MDPRMCSLMQGSTLPR
MDPRMISLLQPSTIPR

SEQ ID NO: 97078 - protein, 16 aa, Artificial Sequence
  Description of Artificial Sequence: Synthetic peptide
  Seed: MDPRMCSLMQGSTLPR
MDPRMISLLQPSTLPR

SEQ ID NO: 97079 - protein, 16 aa, Artificial Sequence
  Description of Artificial Sequence: Synthetic peptide
  Seed: MDPRMCSLMQGSTLPR
MDPRMISLLQPSTVPR

SEQ ID NO: 97080 - protein, 16 aa, Artificial Sequence
  Description of Artificial Sequence: Synthetic peptide
  Seed: MDPRMCSLMQGSTLPR
MDPRMISLLQSSTAPR

SEQ ID NO: 97081 - protein, 16 aa, Artificial Sequence
  Description of Artificial Sequence: Synthetic peptide
  Seed: MDPRMCSLMQGSTLPR
MDPRMISLLQSSTIPR

SEQ ID NO: 97082 - protein, 16 aa, Artificial Sequence
  Description of Artificial Sequence: Synthetic peptide
  Seed: MDPRMCSLMQGSTLPR
MDPRMISLLQSSTLPR

SEQ ID NO: 97083 - protein, 16 aa, Artificial Sequence
  Description of Artificial Sequence: Synthetic peptide
  Seed: MDPRMCSLMQGSTLPR
MDPRMISLLQSSTMPR

SEQ ID NO: 97084 - protein, 16 aa, Artificial Sequence
  Description of Artificial Sequence: Synthetic peptide
  Seed: MDPRMCSLMQGSTLPR
MDPRMISLLQSSTSPR

SEQ ID NO: 97085 - protein, 16 aa, Artificial Sequence
  Description of Artificial Sequence: Synthetic peptide
  Seed: MDPRMCSLMQGSTLPR
MDPRMISLLQSSTTPR

SEQ ID NO: 97086 - protein, 16 aa, Artificial Sequence
  Description of Artificial Sequence: Synthetic peptide
  Seed: MDPRMCSLMQGSTLPR
MDPRMISLLQSSTVPR

SEQ ID NO: 97087 - protein, 16 aa, Artificial Sequence
  Description of Artificial Sequence: Synthetic peptide
  Seed: MDPRMCSLMQGSTLPR
MDPRMISLLQTSTIPR

SEQ ID NO: 97088 - protein, 16 aa, Artificial Sequence
  Description of Artificial Sequence: Synthetic peptide
  Seed: MDPRMCSLMQGSTLPR
MDPRMISLLQTSTLPR

SEQ ID NO: 97089 - protein, 16 aa, Artificial Sequence
  Description of Artificial Sequence: Synthetic peptide
  Seed: MDPRMCSLMQGSTLPR
MDPRMISLLQTSTVPR

SEQ ID NO: 97090 - protein, 16 aa, Artificial Sequence
  Description of Artificial Sequence: Synthetic peptide
  Seed: MDPRMCSLMQGSTLPR
MDPRMISLMQASTAPR

SEQ ID NO: 97091 - protein, 16 aa, Artificial Sequence
  Description of Artificial Sequence: Synthetic peptide
  Seed: MDPRMCSLMQGSTLPR
MDPRMISLMQASTIPR

SEQ ID NO: 97092 - protein, 16 aa, Artificial Sequence
  Description of Artificial Sequence: Synthetic peptide
  Seed: MDPRMCSLMQGSTLPR
MDPRMISLMQASTLPR

SEQ ID NO: 97093 - protein, 16 aa, Artificial Sequence
  Description of Artificial Sequence: Synthetic peptide
  Seed: MDPRMCSLMQGSTLPR
MDPRMISLMQASTMPR

SEQ ID NO: 97094 - protein, 16 aa, Artificial Sequence
  Description of Artificial Sequence: Synthetic peptide
  Seed: MDPRMCSLMQGSTLPR
MDPRMISLMQASTSPR

SEQ ID NO: 97095 - protein, 16 aa, Artificial Sequence
  Description of Artificial Sequence: Synthetic peptide
  Seed: MDPRMCSLMQGSTLPR
MDPRMISLMQASTTPR

SEQ ID NO: 97096 - protein, 16 aa, Artificial Sequence
  Description of Artificial Sequence: Synthetic peptide
  Seed: MDPRMCSLMQGSTLPR
MDPRMISLMQASTVPR

SEQ ID NO: 97097 - protein, 16 aa, Artificial Sequence
  Description of Artificial Sequence: Synthetic peptide
  Seed: MDPRMCSLMQGSTLPR
MDPRMISLMQGSTAPR

SEQ ID NO: 97098 - protein, 16 aa, Artificial Sequence
  Description of Artificial Sequence: Synthetic peptide
  Seed: MDPRMCSLMQGSTLPR
MDPRMISLMQGSTIPR

SEQ ID NO: 97099 - protein, 16 aa, Artificial Sequence
  Description of Artificial Sequence: Synthetic peptide
  Seed: MDPRMCSLMQGSTLPR
MDPRMISLMQGSTLPR

SEQ ID NO: 97100 - protein, 16 aa, Artificial Sequence
  Description of Artificial Sequence: Synthetic peptide
  Seed: MDPRMCSLMQGSTLPR
MDPRMISLMQGSTMPR

SEQ ID NO: 97101 - protein, 16 aa, Artificial Sequence
  Description of Artificial Sequence: Synthetic peptide
  Seed: MDPRMCSLMQGSTLPR
MDPRMISLMQGSTSPR

SEQ ID NO: 97102 - protein, 16 aa, Artificial Sequence
  Description of Artificial Sequence: Synthetic peptide
  Seed: MDPRMCSLMQGSTLPR
MDPRMISLMQGSTTPR

SEQ ID NO: 97103 - protein, 16 aa, Artificial Sequence
  Description of Artificial Sequence: Synthetic peptide
  Seed: MDPRMCSLMQGSTLPR
MDPRMISLMQGSTVPR

SEQ ID NO: 97104 - protein, 16 aa, Artificial Sequence
  Description of Artificial Sequence: Synthetic peptide
  Seed: MDPRMCSLMQGSTLPR
MDPRMISLMQNSTLPR

SEQ ID NO: 97105 - protein, 16 aa, Artificial Sequence
  Description of Artificial Sequence: Synthetic peptide
  Seed: MDPRMCSLMQGSTLPR
MDPRMISLMQNSTVPR

SEQ ID NO: 97106 - protein, 16 aa, Artificial Sequence
  Description of Artificial Sequence: Synthetic peptide
  Seed: MDPRMCSLMQGSTLPR
MDPRMISLMQPSTAPR

SEQ ID NO: 97107 - protein, 16 aa, Artificial Sequence
  Description of Artificial Sequence: Synthetic peptide
  Seed: MDPRMCSLMQGSTLPR
MDPRMISLMQPSTIPR

SEQ ID NO: 97108 - protein, 16 aa, Artificial Sequence
  Description of Artificial Sequence: Synthetic peptide
  Seed: MDPRMCSLMQGSTLPR
MDPRMISLMQPSTLPR

SEQ ID NO: 97109 - protein, 16 aa, Artificial Sequence
  Description of Artificial Sequence: Synthetic peptide
  Seed: MDPRMCSLMQGSTLPR
MDPRMISLMQPSTVPR

SEQ ID NO: 97110 - protein, 16 aa, Artificial Sequence
  Description of Artificial Sequence: Synthetic peptide
  Seed: MDPRMCSLMQGSTLPR
MDPRMISLMQSSTAPR

SEQ ID NO: 97111 - protein, 16 aa, Artificial Sequence
  Description of Artificial Sequence: Synthetic peptide
  Seed: MDPRMCSLMQGSTLPR
MDPRMISLMQSSTIPR

SEQ ID NO: 97112 - protein, 16 aa, Artificial Sequence
  Description of Artificial Sequence: Synthetic peptide
  Seed: MDPRMCSLMQGSTLPR
MDPRMISLMQSSTLPR

SEQ ID NO: 97113 - protein, 16 aa, Artificial Sequence
  Description of Artificial Sequence: Synthetic peptide
  Seed: MDPRMCSLMQGSTLPR
MDPRMISLMQSSTMPR

SEQ ID NO: 97114 - protein, 16 aa, Artificial Sequence
  Description of Artificial Sequence: Synthetic peptide
  Seed: MDPRMCSLMQGSTLPR
MDPRMISLMQSSTTPR

SEQ ID NO: 97115 - protein, 16 aa, Artificial Sequence
  Description of Artificial Sequence: Synthetic peptide
  Seed: MDPRMCSLMQGSTLPR
MDPRMISLMQSSTVPR

SEQ ID NO: 97116 - protein, 16 aa, Artificial Sequence
  Description of Artificial Sequence: Synthetic peptide
  Seed: MDPRMCSLMQGSTLPR
MDPRMISLMQTSTLPR

SEQ ID NO: 97117 - protein, 16 aa, Artificial Sequence
  Description of Artificial Sequence: Synthetic peptide
  Seed: MDPRMCSLMQGSTLPR
MDPRMISLMQTSTVPR

SEQ ID NO: 97118 - protein, 16 aa, Artificial Sequence
  Description of Artificial Sequence: Synthetic peptide
  Seed: MDPRMCSLMQGSTLPR
MDPRMISLMQVSTAPR

SEQ ID NO: 97119 - protein, 16 aa, Artificial Sequence
  Description of Artificial Sequence: Synthetic peptide
  Seed: MDPRMCSLMQGSTLPR
MDPRMISLQQASTLPR

SEQ ID NO: 97120 - protein, 16 aa, Artificial Sequence
  Description of Artificial Sequence: Synthetic peptide
  Seed: MDPRMCSLMQGSTLPR
MDPRMLSLAQASTLPR

SEQ ID NO: 97121 - protein, 16 aa, Artificial Sequence
  Description of Artificial Sequence: Synthetic peptide
  Seed: MDPRMCSLMQGSTLPR
MDPRMLSLIQASTIPR

SEQ ID NO: 97122 - protein, 16 aa, Artificial Sequence
  Description of Artificial Sequence: Synthetic peptide
  Seed: MDPRMCSLMQGSTLPR
MDPRMLSLIQASTLPR

SEQ ID NO: 97123 - protein, 16 aa, Artificial Sequence
  Description of Artificial Sequence: Synthetic peptide
  Seed: MDPRMCSLMQGSTLPR
MDPRMLSLIQASTVPR

SEQ ID NO: 97124 - protein, 16 aa, Artificial Sequence
  Description of Artificial Sequence: Synthetic peptide
  Seed: MDPRMCSLMQGSTLPR
MDPRMLSLIQGSTLPR

SEQ ID NO: 97125 - protein, 16 aa, Artificial Sequence
  Description of Artificial Sequence: Synthetic peptide
  Seed: MDPRMCSLMQGSTLPR
MDPRMLSLIQGSTVPR

SEQ ID NO: 97126 - protein, 16 aa, Artificial Sequence
  Description of Artificial Sequence: Synthetic peptide
  Seed: MDPRMCSLMQGSTLPR
MDPRMLSLLQASTAPR

SEQ ID NO: 97127 - protein, 16 aa, Artificial Sequence
  Description of Artificial Sequence: Synthetic peptide
  Seed: MDPRMCSLMQGSTLPR
MDPRMLSLLQASTIPR

SEQ ID NO: 97128 - protein, 16 aa, Artificial Sequence
  Description of Artificial Sequence: Synthetic peptide
  Seed: MDPRMCSLMQGSTLPR
MDPRMLSLLQASTLPR

SEQ ID NO: 97129 - protein, 16 aa, Artificial Sequence
  Description of Artificial Sequence: Synthetic peptide
  Seed: MDPRMCSLMQGSTLPR
MDPRMLSLLQASTMPR

SEQ ID NO: 97130 - protein, 16 aa, Artificial Sequence
  Description of Artificial Sequence: Synthetic peptide
  Seed: MDPRMCSLMQGSTLPR
MDPRMLSLLQASTNPR

SEQ ID NO: 97131 - protein, 16 aa, Artificial Sequence
  Description of Artificial Sequence: Synthetic peptide
  Seed: MDPRMCSLMQGSTLPR
MDPRMLSLLQASTSPR

SEQ ID NO: 97132 - protein, 16 aa, Artificial Sequence
  Description of Artificial Sequence: Synthetic peptide
  Seed: MDPRMCSLMQGSTLPR
MDPRMLSLLQASTTPR

SEQ ID NO: 97133 - protein, 16 aa, Artificial Sequence
  Description of Artificial Sequence: Synthetic peptide
  Seed: MDPRMCSLMQGSTLPR
MDPRMLSLLQASTVPR

SEQ ID NO: 97134 - protein, 16 aa, Artificial Sequence
  Description of Artificial Sequence: Synthetic peptide
  Seed: MDPRMCSLMQGSTLPR
MDPRMLSLLQGSTAPR

SEQ ID NO: 97135 - protein, 16 aa, Artificial Sequence
  Description of Artificial Sequence: Synthetic peptide
  Seed: MDPRMCSLMQGSTLPR
MDPRMLSLLQGSTIPR

SEQ ID NO: 97136 - protein, 16 aa, Artificial Sequence
  Description of Artificial Sequence: Synthetic peptide
  Seed: MDPRMCSLMQGSTLPR
MDPRMLSLLQGSTLPR

SEQ ID NO: 97137 - protein, 16 aa, Artificial Sequence
  Description of Artificial Sequence: Synthetic peptide
  Seed: MDPRMCSLMQGSTLPR
MDPRMLSLLQGSTMPR

SEQ ID NO: 97138 - protein, 16 aa, Artificial Sequence
  Description of Artificial Sequence: Synthetic peptide
  Seed: MDPRMCSLMQGSTLPR
MDPRMLSLLQGSTSPR

SEQ ID NO: 97139 - protein, 16 aa, Artificial Sequence
  Description of Artificial Sequence: Synthetic peptide
  Seed: MDPRMCSLMQGSTLPR
MDPRMLSLLQGSTTPR

SEQ ID NO: 97140 - protein, 16 aa, Artificial Sequence
  Description of Artificial Sequence: Synthetic peptide
  Seed: MDPRMCSLMQGSTLPR
MDPRMLSLLQGSTVPR

SEQ ID NO: 97141 - protein, 16 aa, Artificial Sequence
  Description of Artificial Sequence: Synthetic peptide
  Seed: MDPRMCSLMQGSTLPR
MDPRMLSLLQPSTAPR

SEQ ID NO: 97142 - protein, 16 aa, Artificial Sequence
  Description of Artificial Sequence: Synthetic peptide
  Seed: MDPRMCSLMQGSTLPR
MDPRMLSLLQPSTIPR

SEQ ID NO: 97143 - protein, 16 aa, Artificial Sequence
  Description of Artificial Sequence: Synthetic peptide
  Seed: MDPRMCSLMQGSTLPR
MDPRMLSLLQPSTLPR

SEQ ID NO: 97144 - protein, 16 aa, Artificial Sequence
  Description of Artificial Sequence: Synthetic peptide
  Seed: MDPRMCSLMQGSTLPR
MDPRMLSLLQPSTVPR

SEQ ID NO: 97145 - protein, 16 aa, Artificial Sequence
  Description of Artificial Sequence: Synthetic peptide
  Seed: MDPRMCSLMQGSTLPR
MDPRMLSLLQSSTAPR

SEQ ID NO: 97146 - protein, 16 aa, Artificial Sequence
  Description of Artificial Sequence: Synthetic peptide
  Seed: MDPRMCSLMQGSTLPR
MDPRMLSLLQSSTIPR

SEQ ID NO: 97147 - protein, 16 aa, Artificial Sequence
  Description of Artificial Sequence: Synthetic peptide
  Seed: MDPRMCSLMQGSTLPR
MDPRMLSLLQSSTLPR

SEQ ID NO: 97148 - protein, 16 aa, Artificial Sequence
  Description of Artificial Sequence: Synthetic peptide
  Seed: MDPRMCSLMQGSTLPR
MDPRMLSLLQSSTTPR

SEQ ID NO: 97149 - protein, 16 aa, Artificial Sequence
  Description of Artificial Sequence: Synthetic peptide
  Seed: MDPRMCSLMQGSTLPR
MDPRMLSLLQSSTVPR

SEQ ID NO: 97150 - protein, 16 aa, Artificial Sequence
  Description of Artificial Sequence: Synthetic peptide
  Seed: MDPRMCSLMQGSTLPR
MDPRMLSLMQASTAPR

SEQ ID NO: 97151 - protein, 16 aa, Artificial Sequence
  Description of Artificial Sequence: Synthetic peptide
  Seed: MDPRMCSLMQGSTLPR
MDPRMLSLMQASTIPR

SEQ ID NO: 97152 - protein, 16 aa, Artificial Sequence
  Description of Artificial Sequence: Synthetic peptide
  Seed: MDPRMCSLMQGSTLPR
MDPRMLSLMQASTLPR

SEQ ID NO: 97153 - protein, 16 aa, Artificial Sequence
  Description of Artificial Sequence: Synthetic peptide
  Seed: MDPRMCSLMQGSTLPR
MDPRMLSLMQASTMPR

SEQ ID NO: 97154 - protein, 16 aa, Artificial Sequence
  Description of Artificial Sequence: Synthetic peptide
  Seed: MDPRMCSLMQGSTLPR
MDPRMLSLMQASTSPR

SEQ ID NO: 97155 - protein, 16 aa, Artificial Sequence
  Description of Artificial Sequence: Synthetic peptide
  Seed: MDPRMCSLMQGSTLPR
MDPRMLSLMQASTTPR

SEQ ID NO: 97156 - protein, 16 aa, Artificial Sequence
  Description of Artificial Sequence: Synthetic peptide
  Seed: MDPRMCSLMQGSTLPR
MDPRMLSLMQASTVPR

SEQ ID NO: 97157 - protein, 16 aa, Artificial Sequence
  Description of Artificial Sequence: Synthetic peptide
  Seed: MDPRMCSLMQGSTLPR
MDPRMLSLMQGSTAPR

SEQ ID NO: 97158 - protein, 16 aa, Artificial Sequence
  Description of Artificial Sequence: Synthetic peptide
  Seed: MDPRMCSLMQGSTLPR
MDPRMLSLMQGSTIPR

SEQ ID NO: 97159 - protein, 16 aa, Artificial Sequence
  Description of Artificial Sequence: Synthetic peptide
  Seed: MDPRMCSLMQGSTLPR
MDPRMLSLMQGSTLPR

SEQ ID NO: 97160 - protein, 16 aa, Artificial Sequence
  Description of Artificial Sequence: Synthetic peptide
  Seed: MDPRMCSLMQGSTLPR
MDPRMLSLMQGSTMPR

SEQ ID NO: 97161 - protein, 16 aa, Artificial Sequence
  Description of Artificial Sequence: Synthetic peptide
  Seed: MDPRMCSLMQGSTLPR
MDPRMLSLMQGSTSPR

SEQ ID NO: 97162 - protein, 16 aa, Artificial Sequence
  Description of Artificial Sequence: Synthetic peptide
  Seed: MDPRMCSLMQGSTLPR
MDPRMLSLMQGSTTPR

SEQ ID NO: 97163 - protein, 16 aa, Artificial Sequence
  Description of Artificial Sequence: Synthetic peptide
  Seed: MDPRMCSLMQGSTLPR
MDPRMLSLMQGSTVPR

SEQ ID NO: 97164 - protein, 16 aa, Artificial Sequence
  Description of Artificial Sequence: Synthetic peptide
  Seed: MDPRMCSLMQGSTLPR
MDPRMLSLMQPSTAPR

SEQ ID NO: 97165 - protein, 16 aa, Artificial Sequence
  Description of Artificial Sequence: Synthetic peptide
  Seed: MDPRMCSLMQGSTLPR
MDPRMLSLMQPSTIPR

SEQ ID NO: 97166 - protein, 16 aa, Artificial Sequence
  Description of Artificial Sequence: Synthetic peptide
  Seed: MDPRMCSLMQGSTLPR
MDPRMLSLMQPSTLPR

SEQ ID NO: 97167 - protein, 16 aa, Artificial Sequence
  Description of Artificial Sequence: Synthetic peptide
  Seed: MDPRMCSLMQGSTLPR
MDPRMLSLMQPSTVPR

SEQ ID NO: 97168 - protein, 16 aa, Artificial Sequence
  Description of Artificial Sequence: Synthetic peptide
  Seed: MDPRMCSLMQGSTLPR
MDPRMLSLMQSSTAPR

SEQ ID NO: 97169 - protein, 16 aa, Artificial Sequence
  Description of Artificial Sequence: Synthetic peptide
  Seed: MDPRMCSLMQGSTLPR
MDPRMLSLMQSSTIPR

SEQ ID NO: 97170 - protein, 16 aa, Artificial Sequence
  Description of Artificial Sequence: Synthetic peptide
  Seed: MDPRMCSLMQGSTLPR
MDPRMLSLMQSSTLPR

SEQ ID NO: 97171 - protein, 16 aa, Artificial Sequence
  Description of Artificial Sequence: Synthetic peptide
  Seed: MDPRMCSLMQGSTLPR
MDPRMLSLMQSSTTPR

SEQ ID NO: 97172 - protein, 16 aa, Artificial Sequence
  Description of Artificial Sequence: Synthetic peptide
  Seed: MDPRMCSLMQGSTLPR
MDPRMLSLMQSSTVPR

SEQ ID NO: 97173 - protein, 16 aa, Artificial Sequence
  Description of Artificial Sequence: Synthetic peptide
  Seed: MDPRMCSLMQGSTLPR
MDPRMLSLMQVSTAPR

SEQ ID NO: 97174 - protein, 16 aa, Artificial Sequence
  Description of Artificial Sequence: Synthetic peptide
  Seed: MDPRMCSLMQGSTLPR
MDPRMMSLLQASTAPR

SEQ ID NO: 97175 - protein, 16 aa, Artificial Sequence
  Description of Artificial Sequence: Synthetic peptide
  Seed: MDPRMCSLMQGSTLPR
MDPRMMSLLQASTIPR

SEQ ID NO: 97176 - protein, 16 aa, Artificial Sequence
  Description of Artificial Sequence: Synthetic peptide
  Seed: MDPRMCSLMQGSTLPR
MDPRMMSLLQASTLPR

SEQ ID NO: 97177 - protein, 16 aa, Artificial Sequence
  Description of Artificial Sequence: Synthetic peptide
  Seed: MDPRMCSLMQGSTLPR
MDPRMMSLLQASTVPR

SEQ ID NO: 97178 - protein, 16 aa, Artificial Sequence
  Description of Artificial Sequence: Synthetic peptide
  Seed: MDPRMCSLMQGSTLPR
MDPRMMSLLQGSTAPR

SEQ ID NO: 97179 - protein, 16 aa, Artificial Sequence
  Description of Artificial Sequence: Synthetic peptide
  Seed: MDPRMCSLMQGSTLPR
MDPRMMSLLQGSTIPR

SEQ ID NO: 97180 - protein, 16 aa, Artificial Sequence
  Description of Artificial Sequence: Synthetic peptide
  Seed: MDPRMCSLMQGSTLPR
MDPRMMSLLQGSTLPR

SEQ ID NO: 97181 - protein, 16 aa, Artificial Sequence
  Description of Artificial Sequence: Synthetic peptide
  Seed: MDPRMCSLMQGSTLPR
MDPRMMSLLQGSTVPR

SEQ ID NO: 97182 - protein, 16 aa, Artificial Sequence
  Description of Artificial Sequence: Synthetic peptide
  Seed: MDPRMCSLMQGSTLPR
MDPRMMSLLQSSTIPR

SEQ ID NO: 97183 - protein, 16 aa, Artificial Sequence
  Description of Artificial Sequence: Synthetic peptide
  Seed: MDPRMCSLMQGSTLPR
MDPRMMSLLQSSTLPR

SEQ ID NO: 97184 - protein, 16 aa, Artificial Sequence
  Description of Artificial Sequence: Synthetic peptide
  Seed: MDPRMCSLMQGSTLPR
MDPRMMSLLQSSTVPR

SEQ ID NO: 97185 - protein, 16 aa, Artificial Sequence
  Description of Artificial Sequence: Synthetic peptide
  Seed: MDPRMCSLMQGSTLPR
MDPRMMSLMQASTAPR

SEQ ID NO: 97186 - protein, 16 aa, Artificial Sequence
  Description of Artificial Sequence: Synthetic peptide
  Seed: MDPRMCSLMQGSTLPR
MDPRMMSLMQASTIPR

SEQ ID NO: 97187 - protein, 16 aa, Artificial Sequence
  Description of Artificial Sequence: Synthetic peptide
  Seed: MDPRMCSLMQGSTLPR
MDPRMMSLMQASTLPR

SEQ ID NO: 97188 - protein, 16 aa, Artificial Sequence
  Description of Artificial Sequence: Synthetic peptide
  Seed: MDPRMCSLMQGSTLPR
MDPRMMSLMQASTVPR

SEQ ID NO: 97189 - protein, 16 aa, Artificial Sequence
  Description of Artificial Sequence: Synthetic peptide
  Seed: MDPRMCSLMQGSTLPR
MDPRMMSLMQGSTAPR

SEQ ID NO: 97190 - protein, 16 aa, Artificial Sequence
  Description of Artificial Sequence: Synthetic peptide
  Seed: MDPRMCSLMQGSTLPR
MDPRMMSLMQGSTIPR

SEQ ID NO: 97191 - protein, 16 aa, Artificial Sequence
  Description of Artificial Sequence: Synthetic peptide
  Seed: MDPRMCSLMQGSTLPR
MDPRMMSLMQGSTLPR

SEQ ID NO: 97192 - protein, 16 aa, Artificial Sequence
  Description of Artificial Sequence: Synthetic peptide
  Seed: MDPRMCSLMQGSTLPR
MDPRMMSLMQGSTVPR

SEQ ID NO: 97193 - protein, 16 aa, Artificial Sequence
  Description of Artificial Sequence: Synthetic peptide
  Seed: MDPRMCSLMQGSTLPR
MDPRMMSLMQSSTIPR

SEQ ID NO: 97194 - protein, 16 aa, Artificial Sequence
  Description of Artificial Sequence: Synthetic peptide
  Seed: MDPRMCSLMQGSTLPR
MDPRMMSLMQSSTLPR

SEQ ID NO: 97195 - protein, 16 aa, Artificial Sequence
  Description of Artificial Sequence: Synthetic peptide
  Seed: MDPRMCSLMQGSTLPR
MDPRMMSLMQSSTVPR

SEQ ID NO: 97196 - protein, 16 aa, Artificial Sequence
  Description of Artificial Sequence: Synthetic peptide
  Seed: MDPRMCSLMQGSTLPR
MDPRMVSLLQASTAPR

SEQ ID NO: 97197 - protein, 16 aa, Artificial Sequence
  Description of Artificial Sequence: Synthetic peptide
  Seed: MDPRMCSLMQGSTLPR
MDPRMVSLLQASTIPR

SEQ ID NO: 97198 - protein, 16 aa, Artificial Sequence
  Description of Artificial Sequence: Synthetic peptide
  Seed: MDPRMCSLMQGSTLPR
MDPRMVSLLQASTLPR

SEQ ID NO: 97199 - protein, 16 aa, Artificial Sequence
  Description of Artificial Sequence: Synthetic peptide
  Seed: MDPRMCSLMQGSTLPR
MDPRMVSLLQASTVPR

SEQ ID NO: 97200 - protein, 16 aa, Artificial Sequence
  Description of Artificial Sequence: Synthetic peptide
  Seed: MDPRMCSLMQGSTLPR
MDPRMVSLLQGSTAPR

SEQ ID NO: 97201 - protein, 16 aa, Artificial Sequence
  Description of Artificial Sequence: Synthetic peptide
  Seed: MDPRMCSLMQGSTLPR
MDPRMVSLLQGSTIPR

SEQ ID NO: 97202 - protein, 16 aa, Artificial Sequence
  Description of Artificial Sequence: Synthetic peptide
  Seed: MDPRMCSLMQGSTLPR
MDPRMVSLLQGSTLPR

SEQ ID NO: 97203 - protein, 16 aa, Artificial Sequence
  Description of Artificial Sequence: Synthetic peptide
  Seed: MDPRMCSLMQGSTLPR
MDPRMVSLLQGSTVPR

SEQ ID NO: 97204 - protein, 16 aa, Artificial Sequence
  Description of Artificial Sequence: Synthetic peptide
  Seed: MDPRMCSLMQGSTLPR
MDPRMVSLLQSSTIPR

SEQ ID NO: 97205 - protein, 16 aa, Artificial Sequence
  Description of Artificial Sequence: Synthetic peptide
  Seed: MDPRMCSLMQGSTLPR
MDPRMVSLLQSSTLPR

SEQ ID NO: 97206 - protein, 16 aa, Artificial Sequence
  Description of Artificial Sequence: Synthetic peptide
  Seed: MDPRMCSLMQGSTLPR
MDPRMVSLLQSSTVPR

SEQ ID NO: 97207 - protein, 16 aa, Artificial Sequence
  Description of Artificial Sequence: Synthetic peptide
  Seed: MDPRMCSLMQGSTLPR
MDPRMVSLMQASTAPR

SEQ ID NO: 97208 - protein, 16 aa, Artificial Sequence
  Description of Artificial Sequence: Synthetic peptide
  Seed: MDPRMCSLMQGSTLPR
MDPRMVSLMQASTIPR

SEQ ID NO: 97209 - protein, 16 aa, Artificial Sequence
  Description of Artificial Sequence: Synthetic peptide
  Seed: MDPRMCSLMQGSTLPR
MDPRMVSLMQASTLPR

SEQ ID NO: 97210 - protein, 16 aa, Artificial Sequence
  Description of Artificial Sequence: Synthetic peptide
  Seed: MDPRMCSLMQGSTLPR
MDPRMVSLMQASTVPR

SEQ ID NO: 97211 - protein, 16 aa, Artificial Sequence
  Description of Artificial Sequence: Synthetic peptide
  Seed: MDPRMCSLMQGSTLPR
MDPRMVSLMQGSTAPR

SEQ ID NO: 97212 - protein, 16 aa, Artificial Sequence
  Description of Artificial Sequence: Synthetic peptide
  Seed: MDPRMCSLMQGSTLPR
MDPRMVSLMQGSTIPR

SEQ ID NO: 97213 - protein, 16 aa, Artificial Sequence
  Description of Artificial Sequence: Synthetic peptide
  Seed: MDPRMCSLMQGSTLPR
MDPRMVSLMQGSTLPR

SEQ ID NO: 97214 - protein, 16 aa, Artificial Sequence
  Description of Artificial Sequence: Synthetic peptide
  Seed: MDPRMCSLMQGSTLPR
MDPRMVSLMQGSTVPR

SEQ ID NO: 97215 - protein, 16 aa, Artificial Sequence
  Description of Artificial Sequence: Synthetic peptide
  Seed: MDPRMCSLMQGSTLPR
MDPRMVSLMQSSTLPR

SEQ ID NO: 97216 - protein, 16 aa, Artificial Sequence
  Description of Artificial Sequence: Synthetic peptide
  Seed: MDPRMCSLMQGSTLPR
MDPRMVSLMQSSTVPR

SEQ ID NO: 97217 - protein, 16 aa, Artificial Sequence
  Description of Artificial Sequence: Synthetic peptide
  Seed: MDPRMCSLMQGSTLPR
MDPRMWSLAQASTAPR

SEQ ID NO: 97218 - protein, 16 aa, Artificial Sequence
  Description of Artificial Sequence: Synthetic peptide
  Seed: MDPRMCSLMQGSTLPR
MDPRMWSLAQASTIPR

SEQ ID NO: 97219 - protein, 16 aa, Artificial Sequence
  Description of Artificial Sequence: Synthetic peptide
  Seed: MDPRMCSLMQGSTLPR
MDPRMWSLAQASTLPR

SEQ ID NO: 97220 - protein, 16 aa, Artificial Sequence
  Description of Artificial Sequence: Synthetic peptide
  Seed: MDPRMCSLMQGSTLPR
MDPRMWSLAQASTVPR

SEQ ID NO: 97221 - protein, 16 aa, Artificial Sequence
  Description of Artificial Sequence: Synthetic peptide
  Seed: MDPRMCSLMQGSTLPR
MDPRMWSLAQGSTLPR

SEQ ID NO: 97222 - protein, 16 aa, Artificial Sequence
  Description of Artificial Sequence: Synthetic peptide
  Seed: MDPRMCSLMQGSTLPR
MDPRMWSLAQGSTVPR

SEQ ID NO: 97223 - protein, 16 aa, Artificial Sequence
  Description of Artificial Sequence: Synthetic peptide
  Seed: MDPRMCSLMQGSTLPR
MDPRMWSLAQSSTLPR

SEQ ID NO: 97224 - protein, 16 aa, Artificial Sequence
  Description of Artificial Sequence: Synthetic peptide
  Seed: MDPRMCSLMQGSTLPR
MDPRMWSLAQSSTVPR

SEQ ID NO: 97225 - protein, 16 aa, Artificial Sequence
  Description of Artificial Sequence: Synthetic peptide
  Seed: MDPRMCSLMQGSTLPR
MDPRMWSLIQASTAPR

SEQ ID NO: 97226 - protein, 16 aa, Artificial Sequence
  Description of Artificial Sequence: Synthetic peptide
  Seed: MDPRMCSLMQGSTLPR
MDPRMWSLIQASTIPR

SEQ ID NO: 97227 - protein, 16 aa, Artificial Sequence
  Description of Artificial Sequence: Synthetic peptide
  Seed: MDPRMCSLMQGSTLPR
MDPRMWSLIQASTLPR

SEQ ID NO: 97228 - protein, 16 aa, Artificial Sequence
  Description of Artificial Sequence: Synthetic peptide
  Seed: MDPRMCSLMQGSTLPR
MDPRMWSLIQASTNPR

SEQ ID NO: 97229 - protein, 16 aa, Artificial Sequence
  Description of Artificial Sequence: Synthetic peptide
  Seed: MDPRMCSLMQGSTLPR
MDPRMWSLIQASTSPR

SEQ ID NO: 97230 - protein, 16 aa, Artificial Sequence
  Description of Artificial Sequence: Synthetic peptide
  Seed: MDPRMCSLMQGSTLPR
MDPRMWSLIQASTTPR

SEQ ID NO: 97231 - protein, 16 aa, Artificial Sequence
  Description of Artificial Sequence: Synthetic peptide
  Seed: MDPRMCSLMQGSTLPR
MDPRMWSLIQASTVPR

SEQ ID NO: 97232 - protein, 16 aa, Artificial Sequence
  Description of Artificial Sequence: Synthetic peptide
  Seed: MDPRMCSLMQGSTLPR
MDPRMWSLIQGSTAPR

SEQ ID NO: 97233 - protein, 16 aa, Artificial Sequence
  Description of Artificial Sequence: Synthetic peptide
  Seed: MDPRMCSLMQGSTLPR
MDPRMWSLIQGSTIPR

SEQ ID NO: 97234 - protein, 16 aa, Artificial Sequence
  Description of Artificial Sequence: Synthetic peptide
  Seed: MDPRMCSLMQGSTLPR
MDPRMWSLIQGSTLPR

SEQ ID NO: 97235 - protein, 16 aa, Artificial Sequence
  Description of Artificial Sequence: Synthetic peptide
  Seed: MDPRMCSLMQGSTLPR
MDPRMWSLIQGSTVPR

SEQ ID NO: 97236 - protein, 16 aa, Artificial Sequence
  Description of Artificial Sequence: Synthetic peptide
  Seed: MDPRMCSLMQGSTLPR
MDPRMWSLIQPSTAPR

SEQ ID NO: 97237 - protein, 16 aa, Artificial Sequence
  Description of Artificial Sequence: Synthetic peptide
  Seed: MDPRMCSLMQGSTLPR
MDPRMWSLIQPSTSPR

SEQ ID NO: 97238 - protein, 16 aa, Artificial Sequence
  Description of Artificial Sequence: Synthetic peptide
  Seed: MDPRMCSLMQGSTLPR
MDPRMWSLIQPSTVPR

SEQ ID NO: 97239 - protein, 16 aa, Artificial Sequence
  Description of Artificial Sequence: Synthetic peptide
  Seed: MDPRMCSLMQGSTLPR
MDPRMWSLIQSSTAPR

SEQ ID NO: 97240 - protein, 16 aa, Artificial Sequence
  Description of Artificial Sequence: Synthetic peptide
  Seed: MDPRMCSLMQGSTLPR
MDPRMWSLIQSSTIPR

SEQ ID NO: 97241 - protein, 16 aa, Artificial Sequence
  Description of Artificial Sequence: Synthetic peptide
  Seed: MDPRMCSLMQGSTLPR
MDPRMWSLIQSSTLPR

SEQ ID NO: 97242 - protein, 16 aa, Artificial Sequence
  Description of Artificial Sequence: Synthetic peptide
  Seed: MDPRMCSLMQGSTLPR
MDPRMWSLIQSSTSPR

SEQ ID NO: 97243 - protein, 16 aa, Artificial Sequence
  Description of Artificial Sequence: Synthetic peptide
  Seed: MDPRMCSLMQGSTLPR
MDPRMWSLIQSSTVPR

SEQ ID NO: 97244 - protein, 16 aa, Artificial Sequence
  Description of Artificial Sequence: Synthetic peptide
  Seed: MDPRMCSLMQGSTLPR
MDPRMWSLIQTSTAPR

SEQ ID NO: 97245 - protein, 16 aa, Artificial Sequence
  Description of Artificial Sequence: Synthetic peptide
  Seed: MDPRMCSLMQGSTLPR
MDPRMWSLIQTSTSPR

SEQ ID NO: 97246 - protein, 16 aa, Artificial Sequence
  Description of Artificial Sequence: Synthetic peptide
  Seed: MDPRMCSLMQGSTLPR
MDPRMWSLIQVSTAPR

SEQ ID NO: 97247 - protein, 16 aa, Artificial Sequence
  Description of Artificial Sequence: Synthetic peptide
  Seed: MDPRMCSLMQGSTLPR
MDPRMWSLLQASTAPR

SEQ ID NO: 97248 - protein, 16 aa, Artificial Sequence
  Description of Artificial Sequence: Synthetic peptide
  Seed: MDPRMCSLMQGSTLPR
MDPRMWSLLQASTIPR

SEQ ID NO: 97249 - protein, 16 aa, Artificial Sequence
  Description of Artificial Sequence: Synthetic peptide
  Seed: MDPRMCSLMQGSTLPR
MDPRMWSLLQASTLPR

SEQ ID NO: 97250 - protein, 16 aa, Artificial Sequence
  Description of Artificial Sequence: Synthetic peptide
  Seed: MDPRMCSLMQGSTLPR
MDPRMWSLLQASTMPR

SEQ ID NO: 97251 - protein, 16 aa, Artificial Sequence
  Description of Artificial Sequence: Synthetic peptide
  Seed: MDPRMCSLMQGSTLPR
MDPRMWSLLQASTNPR

SEQ ID NO: 97252 - protein, 16 aa, Artificial Sequence
  Description of Artificial Sequence: Synthetic peptide
  Seed: MDPRMCSLMQGSTLPR
MDPRMWSLLQASTSPR

SEQ ID NO: 97253 - protein, 16 aa, Artificial Sequence
  Description of Artificial Sequence: Synthetic peptide
  Seed: MDPRMCSLMQGSTLPR
MDPRMWSLLQASTTPR

SEQ ID NO: 97254 - protein, 16 aa, Artificial Sequence
  Description of Artificial Sequence: Synthetic peptide
  Seed: MDPRMCSLMQGSTLPR
MDPRMWSLLQASTVPR

SEQ ID NO: 97255 - protein, 16 aa, Artificial Sequence
  Description of Artificial Sequence: Synthetic peptide
  Seed: MDPRMCSLMQGSTLPR
MDPRMWSLLQGSTAPR

SEQ ID NO: 97256 - protein, 16 aa, Artificial Sequence
  Description of Artificial Sequence: Synthetic peptide
  Seed: MDPRMCSLMQGSTLPR
MDPRMWSLLQGSTIPR

SEQ ID NO: 97257 - protein, 16 aa, Artificial Sequence
  Description of Artificial Sequence: Synthetic peptide
  Seed: MDPRMCSLMQGSTLPR
MDPRMWSLLQGSTLPR

SEQ ID NO: 97258 - protein, 16 aa, Artificial Sequence
  Description of Artificial Sequence: Synthetic peptide
  Seed: MDPRMCSLMQGSTLPR
MDPRMWSLLQGSTMPR

SEQ ID NO: 97259 - protein, 16 aa, Artificial Sequence
  Description of Artificial Sequence: Synthetic peptide
  Seed: MDPRMCSLMQGSTLPR
MDPRMWSLLQGSTSPR

SEQ ID NO: 97260 - protein, 16 aa, Artificial Sequence
  Description of Artificial Sequence: Synthetic peptide
  Seed: MDPRMCSLMQGSTLPR
MDPRMWSLLQGSTTPR

SEQ ID NO: 97261 - protein, 16 aa, Artificial Sequence
  Description of Artificial Sequence: Synthetic peptide
  Seed: MDPRMCSLMQGSTLPR
MDPRMWSLLQGSTVPR

SEQ ID NO: 97262 - protein, 16 aa, Artificial Sequence
  Description of Artificial Sequence: Synthetic peptide
  Seed: MDPRMCSLMQGSTLPR
MDPRMWSLLQISTAPR

SEQ ID NO: 97263 - protein, 16 aa, Artificial Sequence
  Description of Artificial Sequence: Synthetic peptide
  Seed: MDPRMCSLMQGSTLPR
MDPRMWSLLQNSTAPR

SEQ ID NO: 97264 - protein, 16 aa, Artificial Sequence
  Description of Artificial Sequence: Synthetic peptide
  Seed: MDPRMCSLMQGSTLPR
MDPRMWSLLQNSTIPR

SEQ ID NO: 97265 - protein, 16 aa, Artificial Sequence
  Description of Artificial Sequence: Synthetic peptide
  Seed: MDPRMCSLMQGSTLPR
MDPRMWSLLQNSTLPR

SEQ ID NO: 97266 - protein, 16 aa, Artificial Sequence
  Description of Artificial Sequence: Synthetic peptide
  Seed: MDPRMCSLMQGSTLPR
MDPRMWSLLQNSTVPR

SEQ ID NO: 97267 - protein, 16 aa, Artificial Sequence
  Description of Artificial Sequence: Synthetic peptide
  Seed: MDPRMCSLMQGSTLPR
MDPRMWSLLQPSTAPR

SEQ ID NO: 97268 - protein, 16 aa, Artificial Sequence
  Description of Artificial Sequence: Synthetic peptide
  Seed: MDPRMCSLMQGSTLPR
MDPRMWSLLQPSTIPR

SEQ ID NO: 97269 - protein, 16 aa, Artificial Sequence
  Description of Artificial Sequence: Synthetic peptide
  Seed: MDPRMCSLMQGSTLPR
MDPRMWSLLQPSTLPR

SEQ ID NO: 97270 - protein, 16 aa, Artificial Sequence
  Description of Artificial Sequence: Synthetic peptide
  Seed: MDPRMCSLMQGSTLPR
MDPRMWSLLQPSTNPR

SEQ ID NO: 97271 - protein, 16 aa, Artificial Sequence
  Description of Artificial Sequence: Synthetic peptide
  Seed: MDPRMCSLMQGSTLPR
MDPRMWSLLQPSTSPR

SEQ ID NO: 97272 - protein, 16 aa, Artificial Sequence
  Description of Artificial Sequence: Synthetic peptide
  Seed: MDPRMCSLMQGSTLPR
MDPRMWSLLQPSTTPR

SEQ ID NO: 97273 - protein, 16 aa, Artificial Sequence
  Description of Artificial Sequence: Synthetic peptide
  Seed: MDPRMCSLMQGSTLPR
MDPRMWSLLQPSTVPR

SEQ ID NO: 97274 - protein, 16 aa, Artificial Sequence
  Description of Artificial Sequence: Synthetic peptide
  Seed: MDPRMCSLMQGSTLPR
MDPRMWSLLQSSTAPR

SEQ ID NO: 97275 - protein, 16 aa, Artificial Sequence
  Description of Artificial Sequence: Synthetic peptide
  Seed: MDPRMCSLMQGSTLPR
MDPRMWSLLQSSTIPR

SEQ ID NO: 97276 - protein, 16 aa, Artificial Sequence
  Description of Artificial Sequence: Synthetic peptide
  Seed: MDPRMCSLMQGSTLPR
MDPRMWSLLQSSTLPR

SEQ ID NO: 97277 - protein, 16 aa, Artificial Sequence
  Description of Artificial Sequence: Synthetic peptide
  Seed: MDPRMCSLMQGSTLPR
MDPRMWSLLQSSTMPR

SEQ ID NO: 97278 - protein, 16 aa, Artificial Sequence
  Description of Artificial Sequence: Synthetic peptide
  Seed: MDPRMCSLMQGSTLPR
MDPRMWSLLQSSTNPR

SEQ ID NO: 97279 - protein, 16 aa, Artificial Sequence
  Description of Artificial Sequence: Synthetic peptide
  Seed: MDPRMCSLMQGSTLPR
MDPRMWSLLQSSTSPR

SEQ ID NO: 97280 - protein, 16 aa, Artificial Sequence
  Description of Artificial Sequence: Synthetic peptide
  Seed: MDPRMCSLMQGSTLPR
MDPRMWSLLQSSTTPR

SEQ ID NO: 97281 - protein, 16 aa, Artificial Sequence
  Description of Artificial Sequence: Synthetic peptide
  Seed: MDPRMCSLMQGSTLPR
MDPRMWSLLQSSTVPR

SEQ ID NO: 97282 - protein, 16 aa, Artificial Sequence
  Description of Artificial Sequence: Synthetic peptide
  Seed: MDPRMCSLMQGSTLPR
MDPRMWSLLQTSTAPR

SEQ ID NO: 97283 - protein, 16 aa, Artificial Sequence
  Description of Artificial Sequence: Synthetic peptide
  Seed: MDPRMCSLMQGSTLPR
MDPRMWSLLQTSTIPR

SEQ ID NO: 97284 - protein, 16 aa, Artificial Sequence
  Description of Artificial Sequence: Synthetic peptide
  Seed: MDPRMCSLMQGSTLPR
MDPRMWSLLQTSTLPR

SEQ ID NO: 97285 - protein, 16 aa, Artificial Sequence
  Description of Artificial Sequence: Synthetic peptide
  Seed: MDPRMCSLMQGSTLPR
MDPRMWSLLQTSTNPR

SEQ ID NO: 97286 - protein, 16 aa, Artificial Sequence
  Description of Artificial Sequence: Synthetic peptide
  Seed: MDPRMCSLMQGSTLPR
MDPRMWSLLQTSTSPR

SEQ ID NO: 97287 - protein, 16 aa, Artificial Sequence
  Description of Artificial Sequence: Synthetic peptide
  Seed: MDPRMCSLMQGSTLPR
MDPRMWSLLQTSTTPR

SEQ ID NO: 97288 - protein, 16 aa, Artificial Sequence
  Description of Artificial Sequence: Synthetic peptide
  Seed: MDPRMCSLMQGSTLPR
MDPRMWSLLQTSTVPR

SEQ ID NO: 97289 - protein, 16 aa, Artificial Sequence
  Description of Artificial Sequence: Synthetic peptide
  Seed: MDPRMCSLMQGSTLPR
MDPRMWSLLQVSTAPR

SEQ ID NO: 97290 - protein, 16 aa, Artificial Sequence
  Description of Artificial Sequence: Synthetic peptide
  Seed: MDPRMCSLMQGSTLPR
MDPRMWSLLQVSTNPR

SEQ ID NO: 97291 - protein, 16 aa, Artificial Sequence
  Description of Artificial Sequence: Synthetic peptide
  Seed: MDPRMCSLMQGSTLPR
MDPRMWSLLQVSTSPR

SEQ ID NO: 97292 - protein, 16 aa, Artificial Sequence
  Description of Artificial Sequence: Synthetic peptide
  Seed: MDPRMCSLMQGSTLPR
MDPRMWSLLQVSTTPR

SEQ ID NO: 97293 - protein, 16 aa, Artificial Sequence
  Description of Artificial Sequence: Synthetic peptide
  Seed: MDPRMCSLMQGSTLPR
MDPRMWSLMQASTAPR

SEQ ID NO: 97294 - protein, 16 aa, Artificial Sequence
  Description of Artificial Sequence: Synthetic peptide
  Seed: MDPRMCSLMQGSTLPR
MDPRMWSLMQASTIPR

SEQ ID NO: 97295 - protein, 16 aa, Artificial Sequence
  Description of Artificial Sequence: Synthetic peptide
  Seed: MDPRMCSLMQGSTLPR
MDPRMWSLMQASTLPR

SEQ ID NO: 97296 - protein, 16 aa, Artificial Sequence
  Description of Artificial Sequence: Synthetic peptide
  Seed: MDPRMCSLMQGSTLPR
MDPRMWSLMQASTMPR

SEQ ID NO: 97297 - protein, 16 aa, Artificial Sequence
  Description of Artificial Sequence: Synthetic peptide
  Seed: MDPRMCSLMQGSTLPR
MDPRMWSLMQASTNPR

SEQ ID NO: 97298 - protein, 16 aa, Artificial Sequence
  Description of Artificial Sequence: Synthetic peptide
  Seed: MDPRMCSLMQGSTLPR
MDPRMWSLMQASTSPR

SEQ ID NO: 97299 - protein, 16 aa, Artificial Sequence
  Description of Artificial Sequence: Synthetic peptide
  Seed: MDPRMCSLMQGSTLPR
MDPRMWSLMQASTTPR

SEQ ID NO: 97300 - protein, 16 aa, Artificial Sequence
  Description of Artificial Sequence: Synthetic peptide
  Seed: MDPRMCSLMQGSTLPR
MDPRMWSLMQASTVPR

SEQ ID NO: 97301 - protein, 16 aa, Artificial Sequence
  Description of Artificial Sequence: Synthetic peptide
  Seed: MDPRMCSLMQGSTLPR
MDPRMWSLMQGSTAPR

SEQ ID NO: 97302 - protein, 16 aa, Artificial Sequence
  Description of Artificial Sequence: Synthetic peptide
  Seed: MDPRMCSLMQGSTLPR
MDPRMWSLMQGSTIPR

SEQ ID NO: 97303 - protein, 16 aa, Artificial Sequence
  Description of Artificial Sequence: Synthetic peptide
  Seed: MDPRMCSLMQGSTLPR
MDPRMWSLMQGSTLPR

SEQ ID NO: 97304 - protein, 16 aa, Artificial Sequence
  Description of Artificial Sequence: Synthetic peptide
  Seed: MDPRMCSLMQGSTLPR
MDPRMWSLMQGSTMPR

SEQ ID NO: 97305 - protein, 16 aa, Artificial Sequence
  Description of Artificial Sequence: Synthetic peptide
  Seed: MDPRMCSLMQGSTLPR
MDPRMWSLMQGSTSPR

SEQ ID NO: 97306 - protein, 16 aa, Artificial Sequence
  Description of Artificial Sequence: Synthetic peptide
  Seed: MDPRMCSLMQGSTLPR
MDPRMWSLMQGSTTPR

SEQ ID NO: 97307 - protein, 16 aa, Artificial Sequence
  Description of Artificial Sequence: Synthetic peptide
  Seed: MDPRMCSLMQGSTLPR
MDPRMWSLMQGSTVPR

SEQ ID NO: 97308 - protein, 16 aa, Artificial Sequence
  Description of Artificial Sequence: Synthetic peptide
  Seed: MDPRMCSLMQGSTLPR
MDPRMWSLMQISTAPR

SEQ ID NO: 97309 - protein, 16 aa, Artificial Sequence
  Description of Artificial Sequence: Synthetic peptide
  Seed: MDPRMCSLMQGSTLPR
MDPRMWSLMQISTNPR

SEQ ID NO: 97310 - protein, 16 aa, Artificial Sequence
  Description of Artificial Sequence: Synthetic peptide
  Seed: MDPRMCSLMQGSTLPR
MDPRMWSLMQISTSPR

SEQ ID NO: 97311 - protein, 16 aa, Artificial Sequence
  Description of Artificial Sequence: Synthetic peptide
  Seed: MDPRMCSLMQGSTLPR
MDPRMWSLMQNSTAPR

SEQ ID NO: 97312 - protein, 16 aa, Artificial Sequence
  Description of Artificial Sequence: Synthetic peptide
  Seed: MDPRMCSLMQGSTLPR
MDPRMWSLMQNSTIPR

SEQ ID NO: 97313 - protein, 16 aa, Artificial Sequence
  Description of Artificial Sequence: Synthetic peptide
  Seed: MDPRMCSLMQGSTLPR
MDPRMWSLMQNSTLPR

SEQ ID NO: 97314 - protein, 16 aa, Artificial Sequence
  Description of Artificial Sequence: Synthetic peptide
  Seed: MDPRMCSLMQGSTLPR
MDPRMWSLMQNSTVPR

SEQ ID NO: 97315 - protein, 16 aa, Artificial Sequence
  Description of Artificial Sequence: Synthetic peptide
  Seed: MDPRMCSLMQGSTLPR
MDPRMWSLMQPSTAPR

SEQ ID NO: 97316 - protein, 16 aa, Artificial Sequence
  Description of Artificial Sequence: Synthetic peptide
  Seed: MDPRMCSLMQGSTLPR
MDPRMWSLMQPSTIPR

SEQ ID NO: 97317 - protein, 16 aa, Artificial Sequence
  Description of Artificial Sequence: Synthetic peptide
  Seed: MDPRMCSLMQGSTLPR
MDPRMWSLMQPSTLPR

SEQ ID NO: 97318 - protein, 16 aa, Artificial Sequence
  Description of Artificial Sequence: Synthetic peptide
  Seed: MDPRMCSLMQGSTLPR
MDPRMWSLMQPSTNPR

SEQ ID NO: 97319 - protein, 16 aa, Artificial Sequence
  Description of Artificial Sequence: Synthetic peptide
  Seed: MDPRMCSLMQGSTLPR
MDPRMWSLMQPSTSPR

SEQ ID NO: 97320 - protein, 16 aa, Artificial Sequence
  Description of Artificial Sequence: Synthetic peptide
  Seed: MDPRMCSLMQGSTLPR
MDPRMWSLMQPSTTPR

SEQ ID NO: 97321 - protein, 16 aa, Artificial Sequence
  Description of Artificial Sequence: Synthetic peptide
  Seed: MDPRMCSLMQGSTLPR
MDPRMWSLMQPSTVPR

SEQ ID NO: 97322 - protein, 16 aa, Artificial Sequence
  Description of Artificial Sequence: Synthetic peptide
  Seed: MDPRMCSLMQGSTLPR
MDPRMWSLMQSSTAPR

SEQ ID NO: 97323 - protein, 16 aa, Artificial Sequence
  Description of Artificial Sequence: Synthetic peptide
  Seed: MDPRMCSLMQGSTLPR
MDPRMWSLMQSSTIPR

SEQ ID NO: 97324 - protein, 16 aa, Artificial Sequence
  Description of Artificial Sequence: Synthetic peptide
  Seed: MDPRMCSLMQGSTLPR
MDPRMWSLMQSSTLPR

SEQ ID NO: 97325 - protein, 16 aa, Artificial Sequence
  Description of Artificial Sequence: Synthetic peptide
  Seed: MDPRMCSLMQGSTLPR
MDPRMWSLMQSSTMPR

SEQ ID NO: 97326 - protein, 16 aa, Artificial Sequence
  Description of Artificial Sequence: Synthetic peptide
  Seed: MDPRMCSLMQGSTLPR
MDPRMWSLMQSSTNPR

SEQ ID NO: 97327 - protein, 16 aa, Artificial Sequence
  Description of Artificial Sequence: Synthetic peptide
  Seed: MDPRMCSLMQGSTLPR
MDPRMWSLMQSSTSPR

SEQ ID NO: 97328 - protein, 16 aa, Artificial Sequence
  Description of Artificial Sequence: Synthetic peptide
  Seed: MDPRMCSLMQGSTLPR
MDPRMWSLMQSSTTPR

SEQ ID NO: 97329 - protein, 16 aa, Artificial Sequence
  Description of Artificial Sequence: Synthetic peptide
  Seed: MDPRMCSLMQGSTLPR
MDPRMWSLMQSSTVPR

SEQ ID NO: 97330 - protein, 16 aa, Artificial Sequence
  Description of Artificial Sequence: Synthetic peptide
  Seed: MDPRMCSLMQGSTLPR
MDPRMWSLMQTSTAPR

SEQ ID NO: 97331 - protein, 16 aa, Artificial Sequence
  Description of Artificial Sequence: Synthetic peptide
  Seed: MDPRMCSLMQGSTLPR
MDPRMWSLMQTSTIPR

SEQ ID NO: 97332 - protein, 16 aa, Artificial Sequence
  Description of Artificial Sequence: Synthetic peptide
  Seed: MDPRMCSLMQGSTLPR
MDPRMWSLMQTSTLPR

SEQ ID NO: 97333 - protein, 16 aa, Artificial Sequence
  Description of Artificial Sequence: Synthetic peptide
  Seed: MDPRMCSLMQGSTLPR
MDPRMWSLMQTSTNPR

SEQ ID NO: 97334 - protein, 16 aa, Artificial Sequence
  Description of Artificial Sequence: Synthetic peptide
  Seed: MDPRMCSLMQGSTLPR
MDPRMWSLMQTSTSPR

SEQ ID NO: 97335 - protein, 16 aa, Artificial Sequence
  Description of Artificial Sequence: Synthetic peptide
  Seed: MDPRMCSLMQGSTLPR
MDPRMWSLMQTSTTPR

SEQ ID NO: 97336 - protein, 16 aa, Artificial Sequence
  Description of Artificial Sequence: Synthetic peptide
  Seed: MDPRMCSLMQGSTLPR
MDPRMWSLMQTSTVPR

SEQ ID NO: 97337 - protein, 16 aa, Artificial Sequence
  Description of Artificial Sequence: Synthetic peptide
  Seed: MDPRMCSLMQGSTLPR
MDPRMWSLMQVSTAPR

SEQ ID NO: 97338 - protein, 16 aa, Artificial Sequence
  Description of Artificial Sequence: Synthetic peptide
  Seed: MDPRMCSLMQGSTLPR
MDPRMWSLMQVSTNPR

SEQ ID NO: 97339 - protein, 16 aa, Artificial Sequence
  Description of Artificial Sequence: Synthetic peptide
  Seed: MDPRMCSLMQGSTLPR
MDPRMWSLMQVSTSPR

SEQ ID NO: 97340 - protein, 16 aa, Artificial Sequence
  Description of Artificial Sequence: Synthetic peptide
  Seed: MDPRMCSLMQGSTLPR
MDPRMWSLMQVSTTPR

SEQ ID NO: 97341 - protein, 16 aa, Artificial Sequence
  Description of Artificial Sequence: Synthetic peptide
  Seed: MDPRMCSLMQGSTLPR
MDPRMWSLQQASTIPR

SEQ ID NO: 97342 - protein, 16 aa, Artificial Sequence
  Description of Artificial Sequence: Synthetic peptide
  Seed: MDPRMCSLMQGSTLPR
MDPRMWSLQQASTLPR

SEQ ID NO: 97343 - protein, 16 aa, Artificial Sequence
  Description of Artificial Sequence: Synthetic peptide
  Seed: MDPRMCSLMQGSTLPR
MDPRMWSLQQASTVPR

SEQ ID NO: 97344 - protein, 16 aa, Artificial Sequence
  Description of Artificial Sequence: Synthetic peptide
  Seed: MDPRMCSLMQGSTLPR
MDPRMWSLQQGSTLPR

SEQ ID NO: 97345 - protein, 16 aa, Artificial Sequence
  Description of Artificial Sequence: Synthetic peptide
  Seed: MDPRMCSLMQGSTLPR
MDPRMWSLVQASTLPR

SEQ ID NO: 97346 - protein, 16 aa, Artificial Sequence
  Description of Artificial Sequence: Synthetic peptide
  Seed: MDPRMCSLMQGSTLPR
MDPRMWSLVQASTVPR

SEQ ID NO: 97347 - protein, 16 aa, Artificial Sequence
  Description of Artificial Sequence: Synthetic peptide
  Seed: MDPRMCSLMQGSTLPR
MDPRMWSLVQGSTVPR

SEQ ID NO: 97348 - protein, 16 aa, Artificial Sequence
  Description of Artificial Sequence: Synthetic peptide
  Seed: MDPRMCSLMQGSTLPR
MDPRMYSLAQASTAPR

SEQ ID NO: 97349 - protein, 16 aa, Artificial Sequence
  Description of Artificial Sequence: Synthetic peptide
  Seed: MDPRMCSLMQGSTLPR
MDPRMYSLAQASTIPR

SEQ ID NO: 97350 - protein, 16 aa, Artificial Sequence
  Description of Artificial Sequence: Synthetic peptide
  Seed: MDPRMCSLMQGSTLPR
MDPRMYSLAQASTLPR

SEQ ID NO: 97351 - protein, 16 aa, Artificial Sequence
  Description of Artificial Sequence: Synthetic peptide
  Seed: MDPRMCSLMQGSTLPR
MDPRMYSLAQASTMPR

SEQ ID NO: 97352 - protein, 16 aa, Artificial Sequence
  Description of Artificial Sequence: Synthetic peptide
  Seed: MDPRMCSLMQGSTLPR
MDPRMYSLAQASTNPR

SEQ ID NO: 97353 - protein, 16 aa, Artificial Sequence
  Description of Artificial Sequence: Synthetic peptide
  Seed: MDPRMCSLMQGSTLPR
MDPRMYSLAQASTSPR

SEQ ID NO: 97354 - protein, 16 aa, Artificial Sequence
  Description of Artificial Sequence: Synthetic peptide
  Seed: MDPRMCSLMQGSTLPR
MDPRMYSLAQASTTPR

SEQ ID NO: 97355 - protein, 16 aa, Artificial Sequence
  Description of Artificial Sequence: Synthetic peptide
  Seed: MDPRMCSLMQGSTLPR
MDPRMYSLAQASTVPR

SEQ ID NO: 97356 - protein, 16 aa, Artificial Sequence
  Description of Artificial Sequence: Synthetic peptide
  Seed: MDPRMCSLMQGSTLPR
MDPRMYSLAQGSTAPR

SEQ ID NO: 97357 - protein, 16 aa, Artificial Sequence
  Description of Artificial Sequence: Synthetic peptide
  Seed: MDPRMCSLMQGSTLPR
MDPRMYSLAQGSTIPR

SEQ ID NO: 97358 - protein, 16 aa, Artificial Sequence
  Description of Artificial Sequence: Synthetic peptide
  Seed: MDPRMCSLMQGSTLPR
MDPRMYSLAQGSTLPR

SEQ ID NO: 97359 - protein, 16 aa, Artificial Sequence
  Description of Artificial Sequence: Synthetic peptide
  Seed: MDPRMCSLMQGSTLPR
MDPRMYSLAQGSTMPR

SEQ ID NO: 97360 - protein, 16 aa, Artificial Sequence
  Description of Artificial Sequence: Synthetic peptide
  Seed: MDPRMCSLMQGSTLPR
MDPRMYSLAQGSTVPR

SEQ ID NO: 97361 - protein, 16 aa, Artificial Sequence
  Description of Artificial Sequence: Synthetic peptide
  Seed: MDPRMCSLMQGSTLPR
MDPRMYSLAQISTAPR

SEQ ID NO: 97362 - protein, 16 aa, Artificial Sequence
  Description of Artificial Sequence: Synthetic peptide
  Seed: MDPRMCSLMQGSTLPR
MDPRMYSLAQISTSPR

SEQ ID NO: 97363 - protein, 16 aa, Artificial Sequence
  Description of Artificial Sequence: Synthetic peptide
  Seed: MDPRMCSLMQGSTLPR
MDPRMYSLAQNSTLPR

SEQ ID NO: 97364 - protein, 16 aa, Artificial Sequence
  Description of Artificial Sequence: Synthetic peptide
  Seed: MDPRMCSLMQGSTLPR
MDPRMYSLAQPSTAPR

SEQ ID NO: 97365 - protein, 16 aa, Artificial Sequence
  Description of Artificial Sequence: Synthetic peptide
  Seed: MDPRMCSLMQGSTLPR
MDPRMYSLAQPSTIPR

SEQ ID NO: 97366 - protein, 16 aa, Artificial Sequence
  Description of Artificial Sequence: Synthetic peptide
  Seed: MDPRMCSLMQGSTLPR
MDPRMYSLAQPSTLPR

SEQ ID NO: 97367 - protein, 16 aa, Artificial Sequence
  Description of Artificial Sequence: Synthetic peptide
  Seed: MDPRMCSLMQGSTLPR
MDPRMYSLAQPSTVPR

SEQ ID NO: 97368 - protein, 16 aa, Artificial Sequence
  Description of Artificial Sequence: Synthetic peptide
  Seed: MDPRMCSLMQGSTLPR
MDPRMYSLAQSSTAPR

SEQ ID NO: 97369 - protein, 16 aa, Artificial Sequence
  Description of Artificial Sequence: Synthetic peptide
  Seed: MDPRMCSLMQGSTLPR
MDPRMYSLAQSSTIPR

SEQ ID NO: 97370 - protein, 16 aa, Artificial Sequence
  Description of Artificial Sequence: Synthetic peptide
  Seed: MDPRMCSLMQGSTLPR
MDPRMYSLAQSSTLPR

SEQ ID NO: 97371 - protein, 16 aa, Artificial Sequence
  Description of Artificial Sequence: Synthetic peptide
  Seed: MDPRMCSLMQGSTLPR
MDPRMYSLAQSSTMPR

SEQ ID NO: 97372 - protein, 16 aa, Artificial Sequence
  Description of Artificial Sequence: Synthetic peptide
  Seed: MDPRMCSLMQGSTLPR
MDPRMYSLAQSSTSPR

SEQ ID NO: 97373 - protein, 16 aa, Artificial Sequence
  Description of Artificial Sequence: Synthetic peptide
  Seed: MDPRMCSLMQGSTLPR
MDPRMYSLAQSSTVPR

SEQ ID NO: 97374 - protein, 16 aa, Artificial Sequence
  Description of Artificial Sequence: Synthetic peptide
  Seed: MDPRMCSLMQGSTLPR
MDPRMYSLAQTSTAPR

SEQ ID NO: 97375 - protein, 16 aa, Artificial Sequence
  Description of Artificial Sequence: Synthetic peptide
  Seed: MDPRMCSLMQGSTLPR
MDPRMYSLAQTSTLPR

SEQ ID NO: 97376 - protein, 16 aa, Artificial Sequence
  Description of Artificial Sequence: Synthetic peptide
  Seed: MDPRMCSLMQGSTLPR
MDPRMYSLAQVSTAPR

SEQ ID NO: 97377 - protein, 16 aa, Artificial Sequence
  Description of Artificial Sequence: Synthetic peptide
  Seed: MDPRMCSLMQGSTLPR
MDPRMYSLAQVSTNPR

SEQ ID NO: 97378 - protein, 16 aa, Artificial Sequence
  Description of Artificial Sequence: Synthetic peptide
  Seed: MDPRMCSLMQGSTLPR
MDPRMYSLAQVSTSPR

SEQ ID NO: 97379 - protein, 16 aa, Artificial Sequence
  Description of Artificial Sequence: Synthetic peptide
  Seed: MDPRMCSLMQGSTLPR
MDPRMYSLAQVSTVPR

SEQ ID NO: 97380 - protein, 16 aa, Artificial Sequence
  Description of Artificial Sequence: Synthetic peptide
  Seed: MDPRMCSLMQGSTLPR
MDPRMYSLFQASTAPR

SEQ ID NO: 97381 - protein, 16 aa, Artificial Sequence
  Description of Artificial Sequence: Synthetic peptide
  Seed: MDPRMCSLMQGSTLPR
MDPRMYSLFQASTLPR

SEQ ID NO: 97382 - protein, 16 aa, Artificial Sequence
  Description of Artificial Sequence: Synthetic peptide
  Seed: MDPRMCSLMQGSTLPR
MDPRMYSLFQASTVPR

SEQ ID NO: 97383 - protein, 16 aa, Artificial Sequence
  Description of Artificial Sequence: Synthetic peptide
  Seed: MDPRMCSLMQGSTLPR
MDPRMYSLGQASTLPR

SEQ ID NO: 97384 - protein, 16 aa, Artificial Sequence
  Description of Artificial Sequence: Synthetic peptide
  Seed: MDPRMCSLMQGSTLPR
MDPRMYSLIQASTAPR

SEQ ID NO: 97385 - protein, 16 aa, Artificial Sequence
  Description of Artificial Sequence: Synthetic peptide
  Seed: MDPRMCSLMQGSTLPR
MDPRMYSLIQASTGPR

SEQ ID NO: 97386 - protein, 16 aa, Artificial Sequence
  Description of Artificial Sequence: Synthetic peptide
  Seed: MDPRMCSLMQGSTLPR
MDPRMYSLIQASTHPR

SEQ ID NO: 97387 - protein, 16 aa, Artificial Sequence
  Description of Artificial Sequence: Synthetic peptide
  Seed: MDPRMCSLMQGSTLPR
MDPRMYSLIQASTIPR

SEQ ID NO: 97388 - protein, 16 aa, Artificial Sequence
  Description of Artificial Sequence: Synthetic peptide
  Seed: MDPRMCSLMQGSTLPR
MDPRMYSLIQASTLPR

SEQ ID NO: 97389 - protein, 16 aa, Artificial Sequence
  Description of Artificial Sequence: Synthetic peptide
  Seed: MDPRMCSLMQGSTLPR
MDPRMYSLIQASTMPR

SEQ ID NO: 97390 - protein, 16 aa, Artificial Sequence
  Description of Artificial Sequence: Synthetic peptide
  Seed: MDPRMCSLMQGSTLPR
MDPRMYSLIQASTNPR

SEQ ID NO: 97391 - protein, 16 aa, Artificial Sequence
  Description of Artificial Sequence: Synthetic peptide
  Seed: MDPRMCSLMQGSTLPR
MDPRMYSLIQASTSPR

SEQ ID NO: 97392 - protein, 16 aa, Artificial Sequence
  Description of Artificial Sequence: Synthetic peptide
  Seed: MDPRMCSLMQGSTLPR
MDPRMYSLIQASTTPR

SEQ ID NO: 97393 - protein, 16 aa, Artificial Sequence
  Description of Artificial Sequence: Synthetic peptide
  Seed: MDPRMCSLMQGSTLPR
MDPRMYSLIQASTVPR

SEQ ID NO: 97394 - protein, 16 aa, Artificial Sequence
  Description of Artificial Sequence: Synthetic peptide
  Seed: MDPRMCSLMQGSTLPR
MDPRMYSLIQGSTAPR

SEQ ID NO: 97395 - protein, 16 aa, Artificial Sequence
  Description of Artificial Sequence: Synthetic peptide
  Seed: MDPRMCSLMQGSTLPR
MDPRMYSLIQGSTIPR

SEQ ID NO: 97396 - protein, 16 aa, Artificial Sequence
  Description of Artificial Sequence: Synthetic peptide
  Seed: MDPRMCSLMQGSTLPR
MDPRMYSLIQGSTLPR

SEQ ID NO: 97397 - protein, 16 aa, Artificial Sequence
  Description of Artificial Sequence: Synthetic peptide
  Seed: MDPRMCSLMQGSTLPR
MDPRMYSLIQGSTMPR

SEQ ID NO: 97398 - protein, 16 aa, Artificial Sequence
  Description of Artificial Sequence: Synthetic peptide
  Seed: MDPRMCSLMQGSTLPR
MDPRMYSLIQGSTSPR

SEQ ID NO: 97399 - protein, 16 aa, Artificial Sequence
  Description of Artificial Sequence: Synthetic peptide
  Seed: MDPRMCSLMQGSTLPR
MDPRMYSLIQGSTTPR

SEQ ID NO: 97400 - protein, 16 aa, Artificial Sequence
  Description of Artificial Sequence: Synthetic peptide
  Seed: MDPRMCSLMQGSTLPR
MDPRMYSLIQGSTVPR

SEQ ID NO: 97401 - protein, 16 aa, Artificial Sequence
  Description of Artificial Sequence: Synthetic peptide
  Seed: MDPRMCSLMQGSTLPR
MDPRMYSLIQISTAPR

SEQ ID NO: 97402 - protein, 16 aa, Artificial Sequence
  Description of Artificial Sequence: Synthetic peptide
  Seed: MDPRMCSLMQGSTLPR
MDPRMYSLIQISTNPR

SEQ ID NO: 97403 - protein, 16 aa, Artificial Sequence
  Description of Artificial Sequence: Synthetic peptide
  Seed: MDPRMCSLMQGSTLPR
MDPRMYSLIQISTSPR

SEQ ID NO: 97404 - protein, 16 aa, Artificial Sequence
  Description of Artificial Sequence: Synthetic peptide
  Seed: MDPRMCSLMQGSTLPR
MDPRMYSLIQISTTPR

SEQ ID NO: 97405 - protein, 16 aa, Artificial Sequence
  Description of Artificial Sequence: Synthetic peptide
  Seed: MDPRMCSLMQGSTLPR
MDPRMYSLIQISTVPR

SEQ ID NO: 97406 - protein, 16 aa, Artificial Sequence
  Description of Artificial Sequence: Synthetic peptide
  Seed: MDPRMCSLMQGSTLPR
MDPRMYSLIQNSTAPR

SEQ ID NO: 97407 - protein, 16 aa, Artificial Sequence
  Description of Artificial Sequence: Synthetic peptide
  Seed: MDPRMCSLMQGSTLPR
MDPRMYSLIQNSTIPR

SEQ ID NO: 97408 - protein, 16 aa, Artificial Sequence
  Description of Artificial Sequence: Synthetic peptide
  Seed: MDPRMCSLMQGSTLPR
MDPRMYSLIQNSTLPR

SEQ ID NO: 97409 - protein, 16 aa, Artificial Sequence
  Description of Artificial Sequence: Synthetic peptide
  Seed: MDPRMCSLMQGSTLPR
MDPRMYSLIQNSTSPR

SEQ ID NO: 97410 - protein, 16 aa, Artificial Sequence
  Description of Artificial Sequence: Synthetic peptide
  Seed: MDPRMCSLMQGSTLPR
MDPRMYSLIQNSTVPR

SEQ ID NO: 97411 - protein, 16 aa, Artificial Sequence
  Description of Artificial Sequence: Synthetic peptide
  Seed: MDPRMCSLMQGSTLPR
MDPRMYSLIQPSTAPR

SEQ ID NO: 97412 - protein, 16 aa, Artificial Sequence
  Description of Artificial Sequence: Synthetic peptide
  Seed: MDPRMCSLMQGSTLPR
MDPRMYSLIQPSTIPR

SEQ ID NO: 97413 - protein, 16 aa, Artificial Sequence
  Description of Artificial Sequence: Synthetic peptide
  Seed: MDPRMCSLMQGSTLPR
MDPRMYSLIQPSTLPR

SEQ ID NO: 97414 - protein, 16 aa, Artificial Sequence
  Description of Artificial Sequence: Synthetic peptide
  Seed: MDPRMCSLMQGSTLPR
MDPRMYSLIQPSTMPR

SEQ ID NO: 97415 - protein, 16 aa, Artificial Sequence
  Description of Artificial Sequence: Synthetic peptide
  Seed: MDPRMCSLMQGSTLPR
MDPRMYSLIQPSTNPR

SEQ ID NO: 97416 - protein, 16 aa, Artificial Sequence
  Description of Artificial Sequence: Synthetic peptide
  Seed: MDPRMCSLMQGSTLPR
MDPRMYSLIQPSTSPR

SEQ ID NO: 97417 - protein, 16 aa, Artificial Sequence
  Description of Artificial Sequence: Synthetic peptide
  Seed: MDPRMCSLMQGSTLPR
MDPRMYSLIQPSTTPR

SEQ ID NO: 97418 - protein, 16 aa, Artificial Sequence
  Description of Artificial Sequence: Synthetic peptide
  Seed: MDPRMCSLMQGSTLPR
MDPRMYSLIQPSTVPR

SEQ ID NO: 97419 - protein, 16 aa, Artificial Sequence
  Description of Artificial Sequence: Synthetic peptide
  Seed: MDPRMCSLMQGSTLPR
MDPRMYSLIQSSTAPR

SEQ ID NO: 97420 - protein, 16 aa, Artificial Sequence
  Description of Artificial Sequence: Synthetic peptide
  Seed: MDPRMCSLMQGSTLPR
MDPRMYSLIQSSTIPR

SEQ ID NO: 97421 - protein, 16 aa, Artificial Sequence
  Description of Artificial Sequence: Synthetic peptide
  Seed: MDPRMCSLMQGSTLPR
MDPRMYSLIQSSTLPR

SEQ ID NO: 97422 - protein, 16 aa, Artificial Sequence
  Description of Artificial Sequence: Synthetic peptide
  Seed: MDPRMCSLMQGSTLPR
MDPRMYSLIQSSTMPR

SEQ ID NO: 97423 - protein, 16 aa, Artificial Sequence
  Description of Artificial Sequence: Synthetic peptide
  Seed: MDPRMCSLMQGSTLPR
MDPRMYSLIQSSTNPR

SEQ ID NO: 97424 - protein, 16 aa, Artificial Sequence
  Description of Artificial Sequence: Synthetic peptide
  Seed: MDPRMCSLMQGSTLPR
MDPRMYSLIQSSTSPR

SEQ ID NO: 97425 - protein, 16 aa, Artificial Sequence
  Description of Artificial Sequence: Synthetic peptide
  Seed: MDPRMCSLMQGSTLPR
MDPRMYSLIQSSTTPR

SEQ ID NO: 97426 - protein, 16 aa, Artificial Sequence
  Description of Artificial Sequence: Synthetic peptide
  Seed: MDPRMCSLMQGSTLPR
MDPRMYSLIQSSTVPR

SEQ ID NO: 97427 - protein, 16 aa, Artificial Sequence
  Description of Artificial Sequence: Synthetic peptide
  Seed: MDPRMCSLMQGSTLPR
MDPRMYSLIQTSTAPR

SEQ ID NO: 97428 - protein, 16 aa, Artificial Sequence
  Description of Artificial Sequence: Synthetic peptide
  Seed: MDPRMCSLMQGSTLPR
MDPRMYSLIQTSTIPR

SEQ ID NO: 97429 - protein, 16 aa, Artificial Sequence
  Description of Artificial Sequence: Synthetic peptide
  Seed: MDPRMCSLMQGSTLPR
MDPRMYSLIQTSTLPR

SEQ ID NO: 97430 - protein, 16 aa, Artificial Sequence
  Description of Artificial Sequence: Synthetic peptide
  Seed: MDPRMCSLMQGSTLPR
MDPRMYSLIQTSTMPR

SEQ ID NO: 97431 - protein, 16 aa, Artificial Sequence
  Description of Artificial Sequence: Synthetic peptide
  Seed: MDPRMCSLMQGSTLPR
MDPRMYSLIQTSTNPR

SEQ ID NO: 97432 - protein, 16 aa, Artificial Sequence
  Description of Artificial Sequence: Synthetic peptide
  Seed: MDPRMCSLMQGSTLPR
MDPRMYSLIQTSTSPR

SEQ ID NO: 97433 - protein, 16 aa, Artificial Sequence
  Description of Artificial Sequence: Synthetic peptide
  Seed: MDPRMCSLMQGSTLPR
MDPRMYSLIQTSTTPR

SEQ ID NO: 97434 - protein, 16 aa, Artificial Sequence
  Description of Artificial Sequence: Synthetic peptide
  Seed: MDPRMCSLMQGSTLPR
MDPRMYSLIQTSTVPR

SEQ ID NO: 97435 - protein, 16 aa, Artificial Sequence
  Description of Artificial Sequence: Synthetic peptide
  Seed: MDPRMCSLMQGSTLPR
MDPRMYSLIQVSTAPR

SEQ ID NO: 97436 - protein, 16 aa, Artificial Sequence
  Description of Artificial Sequence: Synthetic peptide
  Seed: MDPRMCSLMQGSTLPR
MDPRMYSLIQVSTIPR

SEQ ID NO: 97437 - protein, 16 aa, Artificial Sequence
  Description of Artificial Sequence: Synthetic peptide
  Seed: MDPRMCSLMQGSTLPR
MDPRMYSLIQVSTLPR

SEQ ID NO: 97438 - protein, 16 aa, Artificial Sequence
  Description of Artificial Sequence: Synthetic peptide
  Seed: MDPRMCSLMQGSTLPR
MDPRMYSLIQVSTMPR

SEQ ID NO: 97439 - protein, 16 aa, Artificial Sequence
  Description of Artificial Sequence: Synthetic peptide
  Seed: MDPRMCSLMQGSTLPR
MDPRMYSLIQVSTNPR

SEQ ID NO: 97440 - protein, 16 aa, Artificial Sequence
  Description of Artificial Sequence: Synthetic peptide
  Seed: MDPRMCSLMQGSTLPR
MDPRMYSLIQVSTSPR

SEQ ID NO: 97441 - protein, 16 aa, Artificial Sequence
  Description of Artificial Sequence: Synthetic peptide
  Seed: MDPRMCSLMQGSTLPR
MDPRMYSLIQVSTTPR

SEQ ID NO: 97442 - protein, 16 aa, Artificial Sequence
  Description of Artificial Sequence: Synthetic peptide
  Seed: MDPRMCSLMQGSTLPR
MDPRMYSLIQVSTVPR

SEQ ID NO: 97443 - protein, 16 aa, Artificial Sequence
  Description of Artificial Sequence: Synthetic peptide
  Seed: MDPRMCSLMQGSTLPR
MDPRMYSLLQASTAPR

SEQ ID NO: 97444 - protein, 16 aa, Artificial Sequence
  Description of Artificial Sequence: Synthetic peptide
  Seed: MDPRMCSLMQGSTLPR
MDPRMYSLLQASTFPR

SEQ ID NO: 97445 - protein, 16 aa, Artificial Sequence
  Description of Artificial Sequence: Synthetic peptide
  Seed: MDPRMCSLMQGSTLPR
MDPRMYSLLQASTGPR

SEQ ID NO: 97446 - protein, 16 aa, Artificial Sequence
  Description of Artificial Sequence: Synthetic peptide
  Seed: MDPRMCSLMQGSTLPR
MDPRMYSLLQASTHPR

SEQ ID NO: 97447 - protein, 16 aa, Artificial Sequence
  Description of Artificial Sequence: Synthetic peptide
  Seed: MDPRMCSLMQGSTLPR
MDPRMYSLLQASTIPR

SEQ ID NO: 97448 - protein, 16 aa, Artificial Sequence
  Description of Artificial Sequence: Synthetic peptide
  Seed: MDPRMCSLMQGSTLPR
MDPRMYSLLQASTLPR

SEQ ID NO: 97449 - protein, 16 aa, Artificial Sequence
  Description of Artificial Sequence: Synthetic peptide
  Seed: MDPRMCSLMQGSTLPR
MDPRMYSLLQASTMPR

SEQ ID NO: 97450 - protein, 16 aa, Artificial Sequence
  Description of Artificial Sequence: Synthetic peptide
  Seed: MDPRMCSLMQGSTLPR
MDPRMYSLLQASTNPR

SEQ ID NO: 97451 - protein, 16 aa, Artificial Sequence
  Description of Artificial Sequence: Synthetic peptide
  Seed: MDPRMCSLMQGSTLPR
MDPRMYSLLQASTPPR

SEQ ID NO: 97452 - protein, 16 aa, Artificial Sequence
  Description of Artificial Sequence: Synthetic peptide
  Seed: MDPRMCSLMQGSTLPR
MDPRMYSLLQASTQPR

SEQ ID NO: 97453 - protein, 16 aa, Artificial Sequence
  Description of Artificial Sequence: Synthetic peptide
  Seed: MDPRMCSLMQGSTLPR
MDPRMYSLLQASTSPR

SEQ ID NO: 97454 - protein, 16 aa, Artificial Sequence
  Description of Artificial Sequence: Synthetic peptide
  Seed: MDPRMCSLMQGSTLPR
MDPRMYSLLQASTTPR

SEQ ID NO: 97455 - protein, 16 aa, Artificial Sequence
  Description of Artificial Sequence: Synthetic peptide
  Seed: MDPRMCSLMQGSTLPR
MDPRMYSLLQASTVPR

SEQ ID NO: 97456 - protein, 16 aa, Artificial Sequence
  Description of Artificial Sequence: Synthetic peptide
  Seed: MDPRMCSLMQGSTLPR
MDPRMYSLLQGSTAPR

SEQ ID NO: 97457 - protein, 16 aa, Artificial Sequence
  Description of Artificial Sequence: Synthetic peptide
  Seed: MDPRMCSLMQGSTLPR
MDPRMYSLLQGSTFPR

SEQ ID NO: 97458 - protein, 16 aa, Artificial Sequence
  Description of Artificial Sequence: Synthetic peptide
  Seed: MDPRMCSLMQGSTLPR
MDPRMYSLLQGSTGPR

SEQ ID NO: 97459 - protein, 16 aa, Artificial Sequence
  Description of Artificial Sequence: Synthetic peptide
  Seed: MDPRMCSLMQGSTLPR
MDPRMYSLLQGSTIPR

SEQ ID NO: 97460 - protein, 16 aa, Artificial Sequence
  Description of Artificial Sequence: Synthetic peptide
  Seed: MDPRMCSLMQGSTLPR
MDPRMYSLLQGSTLPR

SEQ ID NO: 97461 - protein, 16 aa, Artificial Sequence
  Description of Artificial Sequence: Synthetic peptide
  Seed: MDPRMCSLMQGSTLPR
MDPRMYSLLQGSTMPR

SEQ ID NO: 97462 - protein, 16 aa, Artificial Sequence
  Description of Artificial Sequence: Synthetic peptide
  Seed: MDPRMCSLMQGSTLPR
MDPRMYSLLQGSTNPR

SEQ ID NO: 97463 - protein, 16 aa, Artificial Sequence
  Description of Artificial Sequence: Synthetic peptide
  Seed: MDPRMCSLMQGSTLPR
MDPRMYSLLQGSTSPR

SEQ ID NO: 97464 - protein, 16 aa, Artificial Sequence
  Description of Artificial Sequence: Synthetic peptide
  Seed: MDPRMCSLMQGSTLPR
MDPRMYSLLQGSTTPR

SEQ ID NO: 97465 - protein, 16 aa, Artificial Sequence
  Description of Artificial Sequence: Synthetic peptide
  Seed: MDPRMCSLMQGSTLPR
MDPRMYSLLQGSTVPR

SEQ ID NO: 97466 - protein, 16 aa, Artificial Sequence
  Description of Artificial Sequence: Synthetic peptide
  Seed: MDPRMCSLMQGSTLPR
MDPRMYSLLQISTAPR

SEQ ID NO: 97467 - protein, 16 aa, Artificial Sequence
  Description of Artificial Sequence: Synthetic peptide
  Seed: MDPRMCSLMQGSTLPR
MDPRMYSLLQISTIPR

SEQ ID NO: 97468 - protein, 16 aa, Artificial Sequence
  Description of Artificial Sequence: Synthetic peptide
  Seed: MDPRMCSLMQGSTLPR
MDPRMYSLLQISTLPR

SEQ ID NO: 97469 - protein, 16 aa, Artificial Sequence
  Description of Artificial Sequence: Synthetic peptide
  Seed: MDPRMCSLMQGSTLPR
MDPRMYSLLQISTMPR

SEQ ID NO: 97470 - protein, 16 aa, Artificial Sequence
  Description of Artificial Sequence: Synthetic peptide
  Seed: MDPRMCSLMQGSTLPR
MDPRMYSLLQISTNPR

SEQ ID NO: 97471 - protein, 16 aa, Artificial Sequence
  Description of Artificial Sequence: Synthetic peptide
  Seed: MDPRMCSLMQGSTLPR
MDPRMYSLLQISTSPR

SEQ ID NO: 97472 - protein, 16 aa, Artificial Sequence
  Description of Artificial Sequence: Synthetic peptide
  Seed: MDPRMCSLMQGSTLPR
MDPRMYSLLQISTTPR

SEQ ID NO: 97473 - protein, 16 aa, Artificial Sequence
  Description of Artificial Sequence: Synthetic peptide
  Seed: MDPRMCSLMQGSTLPR
MDPRMYSLLQISTVPR

SEQ ID NO: 97474 - protein, 16 aa, Artificial Sequence
  Description of Artificial Sequence: Synthetic peptide
  Seed: MDPRMCSLMQGSTLPR
MDPRMYSLLQLSTAPR

SEQ ID NO: 97475 - protein, 16 aa, Artificial Sequence
  Description of Artificial Sequence: Synthetic peptide
  Seed: MDPRMCSLMQGSTLPR
MDPRMYSLLQMSTAPR

SEQ ID NO: 97476 - protein, 16 aa, Artificial Sequence
  Description of Artificial Sequence: Synthetic peptide
  Seed: MDPRMCSLMQGSTLPR
MDPRMYSLLQNSTAPR

SEQ ID NO: 97477 - protein, 16 aa, Artificial Sequence
  Description of Artificial Sequence: Synthetic peptide
  Seed: MDPRMCSLMQGSTLPR
MDPRMYSLLQNSTIPR

SEQ ID NO: 97478 - protein, 16 aa, Artificial Sequence
  Description of Artificial Sequence: Synthetic peptide
  Seed: MDPRMCSLMQGSTLPR
MDPRMYSLLQNSTLPR

SEQ ID NO: 97479 - protein, 16 aa, Artificial Sequence
  Description of Artificial Sequence: Synthetic peptide
  Seed: MDPRMCSLMQGSTLPR
MDPRMYSLLQNSTMPR

SEQ ID NO: 97480 - protein, 16 aa, Artificial Sequence
  Description of Artificial Sequence: Synthetic peptide
  Seed: MDPRMCSLMQGSTLPR
MDPRMYSLLQNSTNPR

SEQ ID NO: 97481 - protein, 16 aa, Artificial Sequence
  Description of Artificial Sequence: Synthetic peptide
  Seed: MDPRMCSLMQGSTLPR
MDPRMYSLLQNSTSPR

SEQ ID NO: 97482 - protein, 16 aa, Artificial Sequence
  Description of Artificial Sequence: Synthetic peptide
  Seed: MDPRMCSLMQGSTLPR
MDPRMYSLLQNSTTPR

SEQ ID NO: 97483 - protein, 16 aa, Artificial Sequence
  Description of Artificial Sequence: Synthetic peptide
  Seed: MDPRMCSLMQGSTLPR
MDPRMYSLLQNSTVPR

SEQ ID NO: 97484 - protein, 16 aa, Artificial Sequence
  Description of Artificial Sequence: Synthetic peptide
  Seed: MDPRMCSLMQGSTLPR
MDPRMYSLLQPSTAPR

SEQ ID NO: 97485 - protein, 16 aa, Artificial Sequence
  Description of Artificial Sequence: Synthetic peptide
  Seed: MDPRMCSLMQGSTLPR
MDPRMYSLLQPSTGPR

SEQ ID NO: 97486 - protein, 16 aa, Artificial Sequence
  Description of Artificial Sequence: Synthetic peptide
  Seed: MDPRMCSLMQGSTLPR
MDPRMYSLLQPSTHPR

SEQ ID NO: 97487 - protein, 16 aa, Artificial Sequence
  Description of Artificial Sequence: Synthetic peptide
  Seed: MDPRMCSLMQGSTLPR
MDPRMYSLLQPSTIPR

SEQ ID NO: 97488 - protein, 16 aa, Artificial Sequence
  Description of Artificial Sequence: Synthetic peptide
  Seed: MDPRMCSLMQGSTLPR
MDPRMYSLLQPSTLPR

SEQ ID NO: 97489 - protein, 16 aa, Artificial Sequence
  Description of Artificial Sequence: Synthetic peptide
  Seed: MDPRMCSLMQGSTLPR
MDPRMYSLLQPSTMPR

SEQ ID NO: 97490 - protein, 16 aa, Artificial Sequence
  Description of Artificial Sequence: Synthetic peptide
  Seed: MDPRMCSLMQGSTLPR
MDPRMYSLLQPSTNPR

SEQ ID NO: 97491 - protein, 16 aa, Artificial Sequence
  Description of Artificial Sequence: Synthetic peptide
  Seed: MDPRMCSLMQGSTLPR
MDPRMYSLLQPSTSPR

SEQ ID NO: 97492 - protein, 16 aa, Artificial Sequence
  Description of Artificial Sequence: Synthetic peptide
  Seed: MDPRMCSLMQGSTLPR
MDPRMYSLLQPSTTPR

SEQ ID NO: 97493 - protein, 16 aa, Artificial Sequence
  Description of Artificial Sequence: Synthetic peptide
  Seed: MDPRMCSLMQGSTLPR
MDPRMYSLLQPSTVPR

SEQ ID NO: 97494 - protein, 16 aa, Artificial Sequence
  Description of Artificial Sequence: Synthetic peptide
  Seed: MDPRMCSLMQGSTLPR
MDPRMYSLLQSSTAPR

SEQ ID NO: 97495 - protein, 16 aa, Artificial Sequence
  Description of Artificial Sequence: Synthetic peptide
  Seed: MDPRMCSLMQGSTLPR
MDPRMYSLLQSSTGPR

SEQ ID NO: 97496 - protein, 16 aa, Artificial Sequence
  Description of Artificial Sequence: Synthetic peptide
  Seed: MDPRMCSLMQGSTLPR
MDPRMYSLLQSSTIPR

SEQ ID NO: 97497 - protein, 16 aa, Artificial Sequence
  Description of Artificial Sequence: Synthetic peptide
  Seed: MDPRMCSLMQGSTLPR
MDPRMYSLLQSSTLPR

SEQ ID NO: 97498 - protein, 16 aa, Artificial Sequence
  Description of Artificial Sequence: Synthetic peptide
  Seed: MDPRMCSLMQGSTLPR
MDPRMYSLLQSSTMPR

SEQ ID NO: 97499 - protein, 16 aa, Artificial Sequence
  Description of Artificial Sequence: Synthetic peptide
  Seed: MDPRMCSLMQGSTLPR
MDPRMYSLLQSSTNPR

SEQ ID NO: 97500 - protein, 16 aa, Artificial Sequence
  Description of Artificial Sequence: Synthetic peptide
  Seed: MDPRMCSLMQGSTLPR
MDPRMYSLLQSSTSPR

SEQ ID NO: 97501 - protein, 16 aa, Artificial Sequence
  Description of Artificial Sequence: Synthetic peptide
  Seed: MDPRMCSLMQGSTLPR
MDPRMYSLLQSSTTPR

SEQ ID NO: 97502 - protein, 16 aa, Artificial Sequence
  Description of Artificial Sequence: Synthetic peptide
  Seed: MDPRMCSLMQGSTLPR
MDPRMYSLLQSSTVPR

SEQ ID NO: 97503 - protein, 16 aa, Artificial Sequence
  Description of Artificial Sequence: Synthetic peptide
  Seed: MDPRMCSLMQGSTLPR
MDPRMYSLLQTSTAPR

SEQ ID NO: 97504 - protein, 16 aa, Artificial Sequence
  Description of Artificial Sequence: Synthetic peptide
  Seed: MDPRMCSLMQGSTLPR
MDPRMYSLLQTSTIPR

SEQ ID NO: 97505 - protein, 16 aa, Artificial Sequence
  Description of Artificial Sequence: Synthetic peptide
  Seed: MDPRMCSLMQGSTLPR
MDPRMYSLLQTSTLPR

SEQ ID NO: 97506 - protein, 16 aa, Artificial Sequence
  Description of Artificial Sequence: Synthetic peptide
  Seed: MDPRMCSLMQGSTLPR
MDPRMYSLLQTSTMPR

SEQ ID NO: 97507 - protein, 16 aa, Artificial Sequence
  Description of Artificial Sequence: Synthetic peptide
  Seed: MDPRMCSLMQGSTLPR
MDPRMYSLLQTSTNPR

SEQ ID NO: 97508 - protein, 16 aa, Artificial Sequence
  Description of Artificial Sequence: Synthetic peptide
  Seed: MDPRMCSLMQGSTLPR
MDPRMYSLLQTSTSPR

SEQ ID NO: 97509 - protein, 16 aa, Artificial Sequence
  Description of Artificial Sequence: Synthetic peptide
  Seed: MDPRMCSLMQGSTLPR
MDPRMYSLLQTSTTPR

SEQ ID NO: 97510 - protein, 16 aa, Artificial Sequence
  Description of Artificial Sequence: Synthetic peptide
  Seed: MDPRMCSLMQGSTLPR
MDPRMYSLLQTSTVPR

SEQ ID NO: 97511 - protein, 16 aa, Artificial Sequence
  Description of Artificial Sequence: Synthetic peptide
  Seed: MDPRMCSLMQGSTLPR
MDPRMYSLLQVSTAPR

SEQ ID NO: 97512 - protein, 16 aa, Artificial Sequence
  Description of Artificial Sequence: Synthetic peptide
  Seed: MDPRMCSLMQGSTLPR
MDPRMYSLLQVSTGPR

SEQ ID NO: 97513 - protein, 16 aa, Artificial Sequence
  Description of Artificial Sequence: Synthetic peptide
  Seed: MDPRMCSLMQGSTLPR
MDPRMYSLLQVSTHPR

SEQ ID NO: 97514 - protein, 16 aa, Artificial Sequence
  Description of Artificial Sequence: Synthetic peptide
  Seed: MDPRMCSLMQGSTLPR
MDPRMYSLLQVSTIPR

SEQ ID NO: 97515 - protein, 16 aa, Artificial Sequence
  Description of Artificial Sequence: Synthetic peptide
  Seed: MDPRMCSLMQGSTLPR
MDPRMYSLLQVSTLPR

SEQ ID NO: 97516 - protein, 16 aa, Artificial Sequence
  Description of Artificial Sequence: Synthetic peptide
  Seed: MDPRMCSLMQGSTLPR
MDPRMYSLLQVSTMPR

SEQ ID NO: 97517 - protein, 16 aa, Artificial Sequence
  Description of Artificial Sequence: Synthetic peptide
  Seed: MDPRMCSLMQGSTLPR
MDPRMYSLLQVSTNPR

SEQ ID NO: 97518 - protein, 16 aa, Artificial Sequence
  Description of Artificial Sequence: Synthetic peptide
  Seed: MDPRMCSLMQGSTLPR
MDPRMYSLLQVSTSPR

SEQ ID NO: 97519 - protein, 16 aa, Artificial Sequence
  Description of Artificial Sequence: Synthetic peptide
  Seed: MDPRMCSLMQGSTLPR
MDPRMYSLLQVSTTPR

SEQ ID NO: 97520 - protein, 16 aa, Artificial Sequence
  Description of Artificial Sequence: Synthetic peptide
  Seed: MDPRMCSLMQGSTLPR
MDPRMYSLLQVSTVPR

SEQ ID NO: 97521 - protein, 16 aa, Artificial Sequence
  Description of Artificial Sequence: Synthetic peptide
  Seed: MDPRMCSLMQGSTLPR
MDPRMYSLMQASTAPR

SEQ ID NO: 97522 - protein, 16 aa, Artificial Sequence
  Description of Artificial Sequence: Synthetic peptide
  Seed: MDPRMCSLMQGSTLPR
MDPRMYSLMQASTFPR

SEQ ID NO: 97523 - protein, 16 aa, Artificial Sequence
  Description of Artificial Sequence: Synthetic peptide
  Seed: MDPRMCSLMQGSTLPR
MDPRMYSLMQASTGPR

SEQ ID NO: 97524 - protein, 16 aa, Artificial Sequence
  Description of Artificial Sequence: Synthetic peptide
  Seed: MDPRMCSLMQGSTLPR
MDPRMYSLMQASTHPR

SEQ ID NO: 97525 - protein, 16 aa, Artificial Sequence
  Description of Artificial Sequence: Synthetic peptide
  Seed: MDPRMCSLMQGSTLPR
MDPRMYSLMQASTIPR

SEQ ID NO: 97526 - protein, 16 aa, Artificial Sequence
  Description of Artificial Sequence: Synthetic peptide
  Seed: MDPRMCSLMQGSTLPR
MDPRMYSLMQASTLPR

SEQ ID NO: 97527 - protein, 16 aa, Artificial Sequence
  Description of Artificial Sequence: Synthetic peptide
  Seed: MDPRMCSLMQGSTLPR
MDPRMYSLMQASTMPR

SEQ ID NO: 97528 - protein, 16 aa, Artificial Sequence
  Description of Artificial Sequence: Synthetic peptide
  Seed: MDPRMCSLMQGSTLPR
MDPRMYSLMQASTNPR

SEQ ID NO: 97529 - protein, 16 aa, Artificial Sequence
  Description of Artificial Sequence: Synthetic peptide
  Seed: MDPRMCSLMQGSTLPR
MDPRMYSLMQASTQPR

SEQ ID NO: 97530 - protein, 16 aa, Artificial Sequence
  Description of Artificial Sequence: Synthetic peptide
  Seed: MDPRMCSLMQGSTLPR
MDPRMYSLMQASTSPR

SEQ ID NO: 97531 - protein, 16 aa, Artificial Sequence
  Description of Artificial Sequence: Synthetic peptide
  Seed: MDPRMCSLMQGSTLPR
MDPRMYSLMQASTTPR

SEQ ID NO: 97532 - protein, 16 aa, Artificial Sequence
  Description of Artificial Sequence: Synthetic peptide
  Seed: MDPRMCSLMQGSTLPR
MDPRMYSLMQASTVPR

SEQ ID NO: 97533 - protein, 16 aa, Artificial Sequence
  Description of Artificial Sequence: Synthetic peptide
  Seed: MDPRMCSLMQGSTLPR
MDPRMYSLMQGSTAPR

SEQ ID NO: 97534 - protein, 16 aa, Artificial Sequence
  Description of Artificial Sequence: Synthetic peptide
  Seed: MDPRMCSLMQGSTLPR
MDPRMYSLMQGSTFPR

SEQ ID NO: 97535 - protein, 16 aa, Artificial Sequence
  Description of Artificial Sequence: Synthetic peptide
  Seed: MDPRMCSLMQGSTLPR
MDPRMYSLMQGSTGPR

SEQ ID NO: 97536 - protein, 16 aa, Artificial Sequence
  Description of Artificial Sequence: Synthetic peptide
  Seed: MDPRMCSLMQGSTLPR
MDPRMYSLMQGSTIPR

SEQ ID NO: 97537 - protein, 16 aa, Artificial Sequence
  Description of Artificial Sequence: Synthetic peptide
  Seed: MDPRMCSLMQGSTLPR
MDPRMYSLMQGSTLPR

SEQ ID NO: 97538 - protein, 16 aa, Artificial Sequence
  Description of Artificial Sequence: Synthetic peptide
  Seed: MDPRMCSLMQGSTLPR
MDPRMYSLMQGSTMPR

SEQ ID NO: 97539 - protein, 16 aa, Artificial Sequence
  Description of Artificial Sequence: Synthetic peptide
  Seed: MDPRMCSLMQGSTLPR
MDPRMYSLMQGSTNPR

SEQ ID NO: 97540 - protein, 16 aa, Artificial Sequence
  Description of Artificial Sequence: Synthetic peptide
  Seed: MDPRMCSLMQGSTLPR
MDPRMYSLMQGSTSPR

SEQ ID NO: 97541 - protein, 16 aa, Artificial Sequence
  Description of Artificial Sequence: Synthetic peptide
  Seed: MDPRMCSLMQGSTLPR
MDPRMYSLMQGSTTPR

SEQ ID NO: 97542 - protein, 16 aa, Artificial Sequence
  Description of Artificial Sequence: Synthetic peptide
  Seed: MDPRMCSLMQGSTLPR
MDPRMYSLMQGSTVPR

SEQ ID NO: 97543 - protein, 16 aa, Artificial Sequence
  Description of Artificial Sequence: Synthetic peptide
  Seed: MDPRMCSLMQGSTLPR
MDPRMYSLMQISTAPR

SEQ ID NO: 97544 - protein, 16 aa, Artificial Sequence
  Description of Artificial Sequence: Synthetic peptide
  Seed: MDPRMCSLMQGSTLPR
MDPRMYSLMQISTHPR

SEQ ID NO: 97545 - protein, 16 aa, Artificial Sequence
  Description of Artificial Sequence: Synthetic peptide
  Seed: MDPRMCSLMQGSTLPR
MDPRMYSLMQISTIPR

SEQ ID NO: 97546 - protein, 16 aa, Artificial Sequence
  Description of Artificial Sequence: Synthetic peptide
  Seed: MDPRMCSLMQGSTLPR
MDPRMYSLMQISTLPR

SEQ ID NO: 97547 - protein, 16 aa, Artificial Sequence
  Description of Artificial Sequence: Synthetic peptide
  Seed: MDPRMCSLMQGSTLPR
MDPRMYSLMQISTMPR

SEQ ID NO: 97548 - protein, 16 aa, Artificial Sequence
  Description of Artificial Sequence: Synthetic peptide
  Seed: MDPRMCSLMQGSTLPR
MDPRMYSLMQISTNPR

SEQ ID NO: 97549 - protein, 16 aa, Artificial Sequence
  Description of Artificial Sequence: Synthetic peptide
  Seed: MDPRMCSLMQGSTLPR
MDPRMYSLMQISTSPR

SEQ ID NO: 97550 - protein, 16 aa, Artificial Sequence
  Description of Artificial Sequence: Synthetic peptide
  Seed: MDPRMCSLMQGSTLPR
MDPRMYSLMQISTTPR

SEQ ID NO: 97551 - protein, 16 aa, Artificial Sequence
  Description of Artificial Sequence: Synthetic peptide
  Seed: MDPRMCSLMQGSTLPR
MDPRMYSLMQISTVPR

SEQ ID NO: 97552 - protein, 16 aa, Artificial Sequence
  Description of Artificial Sequence: Synthetic peptide
  Seed: MDPRMCSLMQGSTLPR
MDPRMYSLMQLSTAPR

SEQ ID NO: 97553 - protein, 16 aa, Artificial Sequence
  Description of Artificial Sequence: Synthetic peptide
  Seed: MDPRMCSLMQGSTLPR
MDPRMYSLMQLSTSPR

SEQ ID NO: 97554 - protein, 16 aa, Artificial Sequence
  Description of Artificial Sequence: Synthetic peptide
  Seed: MDPRMCSLMQGSTLPR
MDPRMYSLMQMSTAPR

SEQ ID NO: 97555 - protein, 16 aa, Artificial Sequence
  Description of Artificial Sequence: Synthetic peptide
  Seed: MDPRMCSLMQGSTLPR
MDPRMYSLMQNSTAPR

SEQ ID NO: 97556 - protein, 16 aa, Artificial Sequence
  Description of Artificial Sequence: Synthetic peptide
  Seed: MDPRMCSLMQGSTLPR
MDPRMYSLMQNSTIPR

SEQ ID NO: 97557 - protein, 16 aa, Artificial Sequence
  Description of Artificial Sequence: Synthetic peptide
  Seed: MDPRMCSLMQGSTLPR
MDPRMYSLMQNSTLPR

SEQ ID NO: 97558 - protein, 16 aa, Artificial Sequence
  Description of Artificial Sequence: Synthetic peptide
  Seed: MDPRMCSLMQGSTLPR
MDPRMYSLMQNSTMPR

SEQ ID NO: 97559 - protein, 16 aa, Artificial Sequence
  Description of Artificial Sequence: Synthetic peptide
  Seed: MDPRMCSLMQGSTLPR
MDPRMYSLMQNSTNPR

SEQ ID NO: 97560 - protein, 16 aa, Artificial Sequence
  Description of Artificial Sequence: Synthetic peptide
  Seed: MDPRMCSLMQGSTLPR
MDPRMYSLMQNSTSPR

SEQ ID NO: 97561 - protein, 16 aa, Artificial Sequence
  Description of Artificial Sequence: Synthetic peptide
  Seed: MDPRMCSLMQGSTLPR
MDPRMYSLMQNSTTPR

SEQ ID NO: 97562 - protein, 16 aa, Artificial Sequence
  Description of Artificial Sequence: Synthetic peptide
  Seed: MDPRMCSLMQGSTLPR
MDPRMYSLMQNSTVPR

SEQ ID NO: 97563 - protein, 16 aa, Artificial Sequence
  Description of Artificial Sequence: Synthetic peptide
  Seed: MDPRMCSLMQGSTLPR
MDPRMYSLMQPSTAPR

SEQ ID NO: 97564 - protein, 16 aa, Artificial Sequence
  Description of Artificial Sequence: Synthetic peptide
  Seed: MDPRMCSLMQGSTLPR
MDPRMYSLMQPSTHPR

SEQ ID NO: 97565 - protein, 16 aa, Artificial Sequence
  Description of Artificial Sequence: Synthetic peptide
  Seed: MDPRMCSLMQGSTLPR
MDPRMYSLMQPSTIPR

SEQ ID NO: 97566 - protein, 16 aa, Artificial Sequence
  Description of Artificial Sequence: Synthetic peptide
  Seed: MDPRMCSLMQGSTLPR
MDPRMYSLMQPSTLPR

SEQ ID NO: 97567 - protein, 16 aa, Artificial Sequence
  Description of Artificial Sequence: Synthetic peptide
  Seed: MDPRMCSLMQGSTLPR
MDPRMYSLMQPSTMPR

SEQ ID NO: 97568 - protein, 16 aa, Artificial Sequence
  Description of Artificial Sequence: Synthetic peptide
  Seed: MDPRMCSLMQGSTLPR
MDPRMYSLMQPSTNPR

SEQ ID NO: 97569 - protein, 16 aa, Artificial Sequence
  Description of Artificial Sequence: Synthetic peptide
  Seed: MDPRMCSLMQGSTLPR
MDPRMYSLMQPSTSPR

SEQ ID NO: 97570 - protein, 16 aa, Artificial Sequence
  Description of Artificial Sequence: Synthetic peptide
  Seed: MDPRMCSLMQGSTLPR
MDPRMYSLMQPSTTPR

SEQ ID NO: 97571 - protein, 16 aa, Artificial Sequence
  Description of Artificial Sequence: Synthetic peptide
  Seed: MDPRMCSLMQGSTLPR
MDPRMYSLMQPSTVPR

SEQ ID NO: 97572 - protein, 16 aa, Artificial Sequence
  Description of Artificial Sequence: Synthetic peptide
  Seed: MDPRMCSLMQGSTLPR
MDPRMYSLMQSSTAPR

SEQ ID NO: 97573 - protein, 16 aa, Artificial Sequence
  Description of Artificial Sequence: Synthetic peptide
  Seed: MDPRMCSLMQGSTLPR
MDPRMYSLMQSSTGPR

SEQ ID NO: 97574 - protein, 16 aa, Artificial Sequence
  Description of Artificial Sequence: Synthetic peptide
  Seed: MDPRMCSLMQGSTLPR
MDPRMYSLMQSSTIPR

SEQ ID NO: 97575 - protein, 16 aa, Artificial Sequence
  Description of Artificial Sequence: Synthetic peptide
  Seed: MDPRMCSLMQGSTLPR
MDPRMYSLMQSSTLPR

SEQ ID NO: 97576 - protein, 16 aa, Artificial Sequence
  Description of Artificial Sequence: Synthetic peptide
  Seed: MDPRMCSLMQGSTLPR
MDPRMYSLMQSSTMPR

SEQ ID NO: 97577 - protein, 16 aa, Artificial Sequence
  Description of Artificial Sequence: Synthetic peptide
  Seed: MDPRMCSLMQGSTLPR
MDPRMYSLMQSSTNPR

SEQ ID NO: 97578 - protein, 16 aa, Artificial Sequence
  Description of Artificial Sequence: Synthetic peptide
  Seed: MDPRMCSLMQGSTLPR
MDPRMYSLMQSSTSPR

SEQ ID NO: 97579 - protein, 16 aa, Artificial Sequence
  Description of Artificial Sequence: Synthetic peptide
  Seed: MDPRMCSLMQGSTLPR
MDPRMYSLMQSSTTPR

SEQ ID NO: 97580 - protein, 16 aa, Artificial Sequence
  Description of Artificial Sequence: Synthetic peptide
  Seed: MDPRMCSLMQGSTLPR
MDPRMYSLMQSSTVPR

SEQ ID NO: 97581 - protein, 16 aa, Artificial Sequence
  Description of Artificial Sequence: Synthetic peptide
  Seed: MDPRMCSLMQGSTLPR
MDPRMYSLMQTSTAPR

SEQ ID NO: 97582 - protein, 16 aa, Artificial Sequence
  Description of Artificial Sequence: Synthetic peptide
  Seed: MDPRMCSLMQGSTLPR
MDPRMYSLMQTSTIPR

SEQ ID NO: 97583 - protein, 16 aa, Artificial Sequence
  Description of Artificial Sequence: Synthetic peptide
  Seed: MDPRMCSLMQGSTLPR
MDPRMYSLMQTSTLPR

SEQ ID NO: 97584 - protein, 16 aa, Artificial Sequence
  Description of Artificial Sequence: Synthetic peptide
  Seed: MDPRMCSLMQGSTLPR
MDPRMYSLMQTSTMPR

SEQ ID NO: 97585 - protein, 16 aa, Artificial Sequence
  Description of Artificial Sequence: Synthetic peptide
  Seed: MDPRMCSLMQGSTLPR
MDPRMYSLMQTSTNPR

SEQ ID NO: 97586 - protein, 16 aa, Artificial Sequence
  Description of Artificial Sequence: Synthetic peptide
  Seed: MDPRMCSLMQGSTLPR
MDPRMYSLMQTSTSPR

SEQ ID NO: 97587 - protein, 16 aa, Artificial Sequence
  Description of Artificial Sequence: Synthetic peptide
  Seed: MDPRMCSLMQGSTLPR
MDPRMYSLMQTSTTPR

SEQ ID NO: 97588 - protein, 16 aa, Artificial Sequence
  Description of Artificial Sequence: Synthetic peptide
  Seed: MDPRMCSLMQGSTLPR
MDPRMYSLMQTSTVPR

SEQ ID NO: 97589 - protein, 16 aa, Artificial Sequence
  Description of Artificial Sequence: Synthetic peptide
  Seed: MDPRMCSLMQGSTLPR
MDPRMYSLMQVSTAPR

SEQ ID NO: 97590 - protein, 16 aa, Artificial Sequence
  Description of Artificial Sequence: Synthetic peptide
  Seed: MDPRMCSLMQGSTLPR
MDPRMYSLMQVSTGPR

SEQ ID NO: 97591 - protein, 16 aa, Artificial Sequence
  Description of Artificial Sequence: Synthetic peptide
  Seed: MDPRMCSLMQGSTLPR
MDPRMYSLMQVSTHPR

SEQ ID NO: 97592 - protein, 16 aa, Artificial Sequence
  Description of Artificial Sequence: Synthetic peptide
  Seed: MDPRMCSLMQGSTLPR
MDPRMYSLMQVSTIPR

SEQ ID NO: 97593 - protein, 16 aa, Artificial Sequence
  Description of Artificial Sequence: Synthetic peptide
  Seed: MDPRMCSLMQGSTLPR
MDPRMYSLMQVSTLPR

SEQ ID NO: 97594 - protein, 16 aa, Artificial Sequence
  Description of Artificial Sequence: Synthetic peptide
  Seed: MDPRMCSLMQGSTLPR
MDPRMYSLMQVSTMPR

SEQ ID NO: 97595 - protein, 16 aa, Artificial Sequence
  Description of Artificial Sequence: Synthetic peptide
  Seed: MDPRMCSLMQGSTLPR
MDPRMYSLMQVSTNPR

SEQ ID NO: 97596 - protein, 16 aa, Artificial Sequence
  Description of Artificial Sequence: Synthetic peptide
  Seed: MDPRMCSLMQGSTLPR
MDPRMYSLMQVSTSPR

SEQ ID NO: 97597 - protein, 16 aa, Artificial Sequence
  Description of Artificial Sequence: Synthetic peptide
  Seed: MDPRMCSLMQGSTLPR
MDPRMYSLMQVSTTPR

SEQ ID NO: 97598 - protein, 16 aa, Artificial Sequence
  Description of Artificial Sequence: Synthetic peptide
  Seed: MDPRMCSLMQGSTLPR
MDPRMYSLMQVSTVPR

SEQ ID NO: 97599 - protein, 16 aa, Artificial Sequence
  Description of Artificial Sequence: Synthetic peptide
  Seed: MDPRMCSLMQGSTLPR
MDPRMYSLQQASTAPR

SEQ ID NO: 97600 - protein, 16 aa, Artificial Sequence
  Description of Artificial Sequence: Synthetic peptide
  Seed: MDPRMCSLMQGSTLPR
MDPRMYSLQQASTIPR

SEQ ID NO: 97601 - protein, 16 aa, Artificial Sequence
  Description of Artificial Sequence: Synthetic peptide
  Seed: MDPRMCSLMQGSTLPR
MDPRMYSLQQASTLPR

SEQ ID NO: 97602 - protein, 16 aa, Artificial Sequence
  Description of Artificial Sequence: Synthetic peptide
  Seed: MDPRMCSLMQGSTLPR
MDPRMYSLQQASTMPR

SEQ ID NO: 97603 - protein, 16 aa, Artificial Sequence
  Description of Artificial Sequence: Synthetic peptide
  Seed: MDPRMCSLMQGSTLPR
MDPRMYSLQQASTVPR

SEQ ID NO: 97604 - protein, 16 aa, Artificial Sequence
  Description of Artificial Sequence: Synthetic peptide
  Seed: MDPRMCSLMQGSTLPR
MDPRMYSLQQGSTAPR

SEQ ID NO: 97605 - protein, 16 aa, Artificial Sequence
  Description of Artificial Sequence: Synthetic peptide
  Seed: MDPRMCSLMQGSTLPR
MDPRMYSLQQGSTIPR

SEQ ID NO: 97606 - protein, 16 aa, Artificial Sequence
  Description of Artificial Sequence: Synthetic peptide
  Seed: MDPRMCSLMQGSTLPR
MDPRMYSLQQGSTLPR

SEQ ID NO: 97607 - protein, 16 aa, Artificial Sequence
  Description of Artificial Sequence: Synthetic peptide
  Seed: MDPRMCSLMQGSTLPR
MDPRMYSLQQGSTVPR

SEQ ID NO: 97608 - protein, 16 aa, Artificial Sequence
  Description of Artificial Sequence: Synthetic peptide
  Seed: MDPRMCSLMQGSTLPR
MDPRMYSLQQPSTLPR

SEQ ID NO: 97609 - protein, 16 aa, Artificial Sequence
  Description of Artificial Sequence: Synthetic peptide
  Seed: MDPRMCSLMQGSTLPR
MDPRMYSLQQSSTAPR

SEQ ID NO: 97610 - protein, 16 aa, Artificial Sequence
  Description of Artificial Sequence: Synthetic peptide
  Seed: MDPRMCSLMQGSTLPR
MDPRMYSLQQSSTIPR

SEQ ID NO: 97611 - protein, 16 aa, Artificial Sequence
  Description of Artificial Sequence: Synthetic peptide
  Seed: MDPRMCSLMQGSTLPR
MDPRMYSLQQSSTLPR

SEQ ID NO: 97612 - protein, 16 aa, Artificial Sequence
  Description of Artificial Sequence: Synthetic peptide
  Seed: MDPRMCSLMQGSTLPR
MDPRMYSLQQSSTVPR

SEQ ID NO: 97613 - protein, 16 aa, Artificial Sequence
  Description of Artificial Sequence: Synthetic peptide
  Seed: MDPRMCSLMQGSTLPR
MDPRMYSLSQASTIPR

SEQ ID NO: 97614 - protein, 16 aa, Artificial Sequence
  Description of Artificial Sequence: Synthetic peptide
  Seed: MDPRMCSLMQGSTLPR
MDPRMYSLSQASTLPR

SEQ ID NO: 97615 - protein, 16 aa, Artificial Sequence
  Description of Artificial Sequence: Synthetic peptide
  Seed: MDPRMCSLMQGSTLPR
MDPRMYSLSQASTVPR

SEQ ID NO: 97616 - protein, 16 aa, Artificial Sequence
  Description of Artificial Sequence: Synthetic peptide
  Seed: MDPRMCSLMQGSTLPR
MDPRMYSLVQASTAPR

SEQ ID NO: 97617 - protein, 16 aa, Artificial Sequence
  Description of Artificial Sequence: Synthetic peptide
  Seed: MDPRMCSLMQGSTLPR
MDPRMYSLVQASTIPR

SEQ ID NO: 97618 - protein, 16 aa, Artificial Sequence
  Description of Artificial Sequence: Synthetic peptide
  Seed: MDPRMCSLMQGSTLPR
MDPRMYSLVQASTLPR

SEQ ID NO: 97619 - protein, 16 aa, Artificial Sequence
  Description of Artificial Sequence: Synthetic peptide
  Seed: MDPRMCSLMQGSTLPR
MDPRMYSLVQASTNPR

SEQ ID NO: 97620 - protein, 16 aa, Artificial Sequence
  Description of Artificial Sequence: Synthetic peptide
  Seed: MDPRMCSLMQGSTLPR
MDPRMYSLVQASTSPR

SEQ ID NO: 97621 - protein, 16 aa, Artificial Sequence
  Description of Artificial Sequence: Synthetic peptide
  Seed: MDPRMCSLMQGSTLPR
MDPRMYSLVQASTTPR

SEQ ID NO: 97622 - protein, 16 aa, Artificial Sequence
  Description of Artificial Sequence: Synthetic peptide
  Seed: MDPRMCSLMQGSTLPR
MDPRMYSLVQASTVPR

SEQ ID NO: 97623 - protein, 16 aa, Artificial Sequence
  Description of Artificial Sequence: Synthetic peptide
  Seed: MDPRMCSLMQGSTLPR
MDPRMYSLVQGSTAPR

SEQ ID NO: 97624 - protein, 16 aa, Artificial Sequence
  Description of Artificial Sequence: Synthetic peptide
  Seed: MDPRMCSLMQGSTLPR
MDPRMYSLVQGSTIPR

SEQ ID NO: 97625 - protein, 16 aa, Artificial Sequence
  Description of Artificial Sequence: Synthetic peptide
  Seed: MDPRMCSLMQGSTLPR
MDPRMYSLVQGSTLPR

SEQ ID NO: 97626 - protein, 16 aa, Artificial Sequence
  Description of Artificial Sequence: Synthetic peptide
  Seed: MDPRMCSLMQGSTLPR
MDPRMYSLVQGSTVPR

SEQ ID NO: 97627 - protein, 16 aa, Artificial Sequence
  Description of Artificial Sequence: Synthetic peptide
  Seed: MDPRMCSLMQGSTLPR
MDPRMYSLVQISTAPR

SEQ ID NO: 97628 - protein, 16 aa, Artificial Sequence
  Description of Artificial Sequence: Synthetic peptide
  Seed: MDPRMCSLMQGSTLPR
MDPRMYSLVQPSTAPR

SEQ ID NO: 97629 - protein, 16 aa, Artificial Sequence
  Description of Artificial Sequence: Synthetic peptide
  Seed: MDPRMCSLMQGSTLPR
MDPRMYSLVQPSTIPR

SEQ ID NO: 97630 - protein, 16 aa, Artificial Sequence
  Description of Artificial Sequence: Synthetic peptide
  Seed: MDPRMCSLMQGSTLPR
MDPRMYSLVQPSTLPR

SEQ ID NO: 97631 - protein, 16 aa, Artificial Sequence
  Description of Artificial Sequence: Synthetic peptide
  Seed: MDPRMCSLMQGSTLPR
MDPRMYSLVQPSTSPR

SEQ ID NO: 97632 - protein, 16 aa, Artificial Sequence
  Description of Artificial Sequence: Synthetic peptide
  Seed: MDPRMCSLMQGSTLPR
MDPRMYSLVQPSTVPR

SEQ ID NO: 97633 - protein, 16 aa, Artificial Sequence
  Description of Artificial Sequence: Synthetic peptide
  Seed: MDPRMCSLMQGSTLPR
MDPRMYSLVQSSTAPR

SEQ ID NO: 97634 - protein, 16 aa, Artificial Sequence
  Description of Artificial Sequence: Synthetic peptide
  Seed: MDPRMCSLMQGSTLPR
MDPRMYSLVQSSTIPR

SEQ ID NO: 97635 - protein, 16 aa, Artificial Sequence
  Description of Artificial Sequence: Synthetic peptide
  Seed: MDPRMCSLMQGSTLPR
MDPRMYSLVQSSTLPR

SEQ ID NO: 97636 - protein, 16 aa, Artificial Sequence
  Description of Artificial Sequence: Synthetic peptide
  Seed: MDPRMCSLMQGSTLPR
MDPRMYSLVQSSTSPR

SEQ ID NO: 97637 - protein, 16 aa, Artificial Sequence
  Description of Artificial Sequence: Synthetic peptide
  Seed: MDPRMCSLMQGSTLPR
MDPRMYSLVQSSTVPR

SEQ ID NO: 97638 - protein, 16 aa, Artificial Sequence
  Description of Artificial Sequence: Synthetic peptide
  Seed: MDPRMCSLMQGSTLPR
MDPRMYSLVQTSTAPR

SEQ ID NO: 97639 - protein, 16 aa, Artificial Sequence
  Description of Artificial Sequence: Synthetic peptide
  Seed: MDPRMCSLMQGSTLPR
MDPRMYSLVQVSTAPR

SEQ ID NO: 97640 - protein, 16 aa, Artificial Sequence
  Description of Artificial Sequence: Synthetic peptide
  Seed: MDPRMCSLMQGSTLPR
MDPRMYSLVQVSTSPR

SEQ ID NO: 97641 - protein, 17 aa, Artificial Sequence
  Description of Artificial Sequence: Synthetic peptide
  Seed: MDPRMCSLMQGSTLPRR
MDPRMCSLLQASTVPRR

SEQ ID NO: 97642 - protein, 17 aa, Artificial Sequence
  Description of Artificial Sequence: Synthetic peptide
  Seed: MDPRMCSLMQGSTLPRR
MDPRMFSLAQASTAPRR

SEQ ID NO: 97643 - protein, 17 aa, Artificial Sequence
  Description of Artificial Sequence: Synthetic peptide
  Seed: MDPRMCSLMQGSTLPRR
MDPRMFSLAQASTCPRR

SEQ ID NO: 97644 - protein, 17 aa, Artificial Sequence
  Description of Artificial Sequence: Synthetic peptide
  Seed: MDPRMCSLMQGSTLPRR
MDPRMFSLAQASTEPRR

SEQ ID NO: 97645 - protein, 17 aa, Artificial Sequence
  Description of Artificial Sequence: Synthetic peptide
  Seed: MDPRMCSLMQGSTLPRR
MDPRMFSLAQASTFPRR

SEQ ID NO: 97646 - protein, 17 aa, Artificial Sequence
  Description of Artificial Sequence: Synthetic peptide
  Seed: MDPRMCSLMQGSTLPRR
MDPRMFSLAQASTGPRR

SEQ ID NO: 97647 - protein, 17 aa, Artificial Sequence
  Description of Artificial Sequence: Synthetic peptide
  Seed: MDPRMCSLMQGSTLPRR
MDPRMFSLAQASTHPRR

SEQ ID NO: 97648 - protein, 17 aa, Artificial Sequence
  Description of Artificial Sequence: Synthetic peptide
  Seed: MDPRMCSLMQGSTLPRR
MDPRMFSLAQASTIPRR

SEQ ID NO: 97649 - protein, 17 aa, Artificial Sequence
  Description of Artificial Sequence: Synthetic peptide
  Seed: MDPRMCSLMQGSTLPRR
MDPRMFSLAQASTLPRR

SEQ ID NO: 97650 - protein, 17 aa, Artificial Sequence
  Description of Artificial Sequence: Synthetic peptide
  Seed: MDPRMCSLMQGSTLPRR
MDPRMFSLAQASTMPRR

SEQ ID NO: 97651 - protein, 17 aa, Artificial Sequence
  Description of Artificial Sequence: Synthetic peptide
  Seed: MDPRMCSLMQGSTLPRR
MDPRMFSLAQASTNPRR

SEQ ID NO: 97652 - protein, 17 aa, Artificial Sequence
  Description of Artificial Sequence: Synthetic peptide
  Seed: MDPRMCSLMQGSTLPRR
MDPRMFSLAQASTPPRR

SEQ ID NO: 97653 - protein, 17 aa, Artificial Sequence
  Description of Artificial Sequence: Synthetic peptide
  Seed: MDPRMCSLMQGSTLPRR
MDPRMFSLAQASTQPRR

SEQ ID NO: 97654 - protein, 17 aa, Artificial Sequence
  Description of Artificial Sequence: Synthetic peptide
  Seed: MDPRMCSLMQGSTLPRR
MDPRMFSLAQASTSPRR

SEQ ID NO: 97655 - protein, 17 aa, Artificial Sequence
  Description of Artificial Sequence: Synthetic peptide
  Seed: MDPRMCSLMQGSTLPRR
MDPRMFSLAQASTTPRR

SEQ ID NO: 97656 - protein, 17 aa, Artificial Sequence
  Description of Artificial Sequence: Synthetic peptide
  Seed: MDPRMCSLMQGSTLPRR
MDPRMFSLAQASTVPRR

SEQ ID NO: 97657 - protein, 17 aa, Artificial Sequence
  Description of Artificial Sequence: Synthetic peptide
  Seed: MDPRMCSLMQGSTLPRR
MDPRMFSLAQASTWPRR

SEQ ID NO: 97658 - protein, 17 aa, Artificial Sequence
  Description of Artificial Sequence: Synthetic peptide
  Seed: MDPRMCSLMQGSTLPRR
MDPRMFSLAQASTYPRR

SEQ ID NO: 97659 - protein, 17 aa, Artificial Sequence
  Description of Artificial Sequence: Synthetic peptide
  Seed: MDPRMCSLMQGSTLPRR
MDPRMFSLAQFSTLPRR

SEQ ID NO: 97660 - protein, 17 aa, Artificial Sequence
  Description of Artificial Sequence: Synthetic peptide
  Seed: MDPRMCSLMQGSTLPRR
MDPRMFSLAQGSTAPRR

SEQ ID NO: 97661 - protein, 17 aa, Artificial Sequence
  Description of Artificial Sequence: Synthetic peptide
  Seed: MDPRMCSLMQGSTLPRR
MDPRMFSLAQGSTFPRR

SEQ ID NO: 97662 - protein, 17 aa, Artificial Sequence
  Description of Artificial Sequence: Synthetic peptide
  Seed: MDPRMCSLMQGSTLPRR
MDPRMFSLAQGSTGPRR

SEQ ID NO: 97663 - protein, 17 aa, Artificial Sequence
  Description of Artificial Sequence: Synthetic peptide
  Seed: MDPRMCSLMQGSTLPRR
MDPRMFSLAQGSTIPRR

SEQ ID NO: 97664 - protein, 17 aa, Artificial Sequence
  Description of Artificial Sequence: Synthetic peptide
  Seed: MDPRMCSLMQGSTLPRR
MDPRMFSLAQGSTLPRR

SEQ ID NO: 97665 - protein, 17 aa, Artificial Sequence
  Description of Artificial Sequence: Synthetic peptide
  Seed: MDPRMCSLMQGSTLPRR
MDPRMFSLAQGSTMPRR

SEQ ID NO: 97666 - protein, 17 aa, Artificial Sequence
  Description of Artificial Sequence: Synthetic peptide
  Seed: MDPRMCSLMQGSTLPRR
MDPRMFSLAQGSTNPRR

SEQ ID NO: 97667 - protein, 17 aa, Artificial Sequence
  Description of Artificial Sequence: Synthetic peptide
  Seed: MDPRMCSLMQGSTLPRR
MDPRMFSLAQGSTSPRR

SEQ ID NO: 97668 - protein, 17 aa, Artificial Sequence
  Description of Artificial Sequence: Synthetic peptide
  Seed: MDPRMCSLMQGSTLPRR
MDPRMFSLAQGSTTPRR

SEQ ID NO: 97669 - protein, 17 aa, Artificial Sequence
  Description of Artificial Sequence: Synthetic peptide
  Seed: MDPRMCSLMQGSTLPRR
MDPRMFSLAQGSTVPRR

SEQ ID NO: 97670 - protein, 17 aa, Artificial Sequence
  Description of Artificial Sequence: Synthetic peptide
  Seed: MDPRMCSLMQGSTLPRR
MDPRMFSLAQISTAPRR

SEQ ID NO: 97671 - protein, 17 aa, Artificial Sequence
  Description of Artificial Sequence: Synthetic peptide
  Seed: MDPRMCSLMQGSTLPRR
MDPRMFSLAQISTGPRR

SEQ ID NO: 97672 - protein, 17 aa, Artificial Sequence
  Description of Artificial Sequence: Synthetic peptide
  Seed: MDPRMCSLMQGSTLPRR
MDPRMFSLAQISTHPRR

SEQ ID NO: 97673 - protein, 17 aa, Artificial Sequence
  Description of Artificial Sequence: Synthetic peptide
  Seed: MDPRMCSLMQGSTLPRR
MDPRMFSLAQISTIPRR

SEQ ID NO: 97674 - protein, 17 aa, Artificial Sequence
  Description of Artificial Sequence: Synthetic peptide
  Seed: MDPRMCSLMQGSTLPRR
MDPRMFSLAQISTLPRR

SEQ ID NO: 97675 - protein, 17 aa, Artificial Sequence
  Description of Artificial Sequence: Synthetic peptide
  Seed: MDPRMCSLMQGSTLPRR
MDPRMFSLAQISTMPRR

SEQ ID NO: 97676 - protein, 17 aa, Artificial Sequence
  Description of Artificial Sequence: Synthetic peptide
  Seed: MDPRMCSLMQGSTLPRR
MDPRMFSLAQISTNPRR

SEQ ID NO: 97677 - protein, 17 aa, Artificial Sequence
  Description of Artificial Sequence: Synthetic peptide
  Seed: MDPRMCSLMQGSTLPRR
MDPRMFSLAQISTQPRR

SEQ ID NO: 97678 - protein, 17 aa, Artificial Sequence
  Description of Artificial Sequence: Synthetic peptide
  Seed: MDPRMCSLMQGSTLPRR
MDPRMFSLAQISTSPRR

SEQ ID NO: 97679 - protein, 17 aa, Artificial Sequence
  Description of Artificial Sequence: Synthetic peptide
  Seed: MDPRMCSLMQGSTLPRR
MDPRMFSLAQISTTPRR

SEQ ID NO: 97680 - protein, 17 aa, Artificial Sequence
  Description of Artificial Sequence: Synthetic peptide
  Seed: MDPRMCSLMQGSTLPRR
MDPRMFSLAQISTVPRR

SEQ ID NO: 97681 - protein, 17 aa, Artificial Sequence
  Description of Artificial Sequence: Synthetic peptide
  Seed: MDPRMCSLMQGSTLPRR
MDPRMFSLAQLSTAPRR

SEQ ID NO: 97682 - protein, 17 aa, Artificial Sequence
  Description of Artificial Sequence: Synthetic peptide
  Seed: MDPRMCSLMQGSTLPRR
MDPRMFSLAQLSTIPRR

SEQ ID NO: 97683 - protein, 17 aa, Artificial Sequence
  Description of Artificial Sequence: Synthetic peptide
  Seed: MDPRMCSLMQGSTLPRR
MDPRMFSLAQLSTLPRR

SEQ ID NO: 97684 - protein, 17 aa, Artificial Sequence
  Description of Artificial Sequence: Synthetic peptide
  Seed: MDPRMCSLMQGSTLPRR
MDPRMFSLAQLSTMPRR

SEQ ID NO: 97685 - protein, 17 aa, Artificial Sequence
  Description of Artificial Sequence: Synthetic peptide
  Seed: MDPRMCSLMQGSTLPRR
MDPRMFSLAQLSTNPRR

SEQ ID NO: 97686 - protein, 17 aa, Artificial Sequence
  Description of Artificial Sequence: Synthetic peptide
  Seed: MDPRMCSLMQGSTLPRR
MDPRMFSLAQLSTSPRR

SEQ ID NO: 97687 - protein, 17 aa, Artificial Sequence
  Description of Artificial Sequence: Synthetic peptide
  Seed: MDPRMCSLMQGSTLPRR
MDPRMFSLAQLSTVPRR

SEQ ID NO: 97688 - protein, 17 aa, Artificial Sequence
  Description of Artificial Sequence: Synthetic peptide
  Seed: MDPRMCSLMQGSTLPRR
MDPRMFSLAQMSTAPRR

SEQ ID NO: 97689 - protein, 17 aa, Artificial Sequence
  Description of Artificial Sequence: Synthetic peptide
  Seed: MDPRMCSLMQGSTLPRR
MDPRMFSLAQMSTLPRR

SEQ ID NO: 97690 - protein, 17 aa, Artificial Sequence
  Description of Artificial Sequence: Synthetic peptide
  Seed: MDPRMCSLMQGSTLPRR
MDPRMFSLAQMSTNPRR

SEQ ID NO: 97691 - protein, 17 aa, Artificial Sequence
  Description of Artificial Sequence: Synthetic peptide
  Seed: MDPRMCSLMQGSTLPRR
MDPRMFSLAQMSTSPRR

SEQ ID NO: 97692 - protein, 17 aa, Artificial Sequence
  Description of Artificial Sequence: Synthetic peptide
  Seed: MDPRMCSLMQGSTLPRR
MDPRMFSLAQMSTVPRR

SEQ ID NO: 97693 - protein, 17 aa, Artificial Sequence
  Description of Artificial Sequence: Synthetic peptide
  Seed: MDPRMCSLMQGSTLPRR
MDPRMFSLAQNSTAPRR

SEQ ID NO: 97694 - protein, 17 aa, Artificial Sequence
  Description of Artificial Sequence: Synthetic peptide
  Seed: MDPRMCSLMQGSTLPRR
MDPRMFSLAQNSTIPRR

SEQ ID NO: 97695 - protein, 17 aa, Artificial Sequence
  Description of Artificial Sequence: Synthetic peptide
  Seed: MDPRMCSLMQGSTLPRR
MDPRMFSLAQNSTLPRR

SEQ ID NO: 97696 - protein, 17 aa, Artificial Sequence
  Description of Artificial Sequence: Synthetic peptide
  Seed: MDPRMCSLMQGSTLPRR
MDPRMFSLAQNSTMPRR

SEQ ID NO: 97697 - protein, 17 aa, Artificial Sequence
  Description of Artificial Sequence: Synthetic peptide
  Seed: MDPRMCSLMQGSTLPRR
MDPRMFSLAQNSTNPRR

SEQ ID NO: 97698 - protein, 17 aa, Artificial Sequence
  Description of Artificial Sequence: Synthetic peptide
  Seed: MDPRMCSLMQGSTLPRR
MDPRMFSLAQNSTSPRR

SEQ ID NO: 97699 - protein, 17 aa, Artificial Sequence
  Description of Artificial Sequence: Synthetic peptide
  Seed: MDPRMCSLMQGSTLPRR
MDPRMFSLAQNSTTPRR

SEQ ID NO: 97700 - protein, 17 aa, Artificial Sequence
  Description of Artificial Sequence: Synthetic peptide
  Seed: MDPRMCSLMQGSTLPRR
MDPRMFSLAQNSTVPRR

SEQ ID NO: 97701 - protein, 17 aa, Artificial Sequence
  Description of Artificial Sequence: Synthetic peptide
  Seed: MDPRMCSLMQGSTLPRR
MDPRMFSLAQPSTAPRR

SEQ ID NO: 97702 - protein, 17 aa, Artificial Sequence
  Description of Artificial Sequence: Synthetic peptide
  Seed: MDPRMCSLMQGSTLPRR
MDPRMFSLAQPSTGPRR

SEQ ID NO: 97703 - protein, 17 aa, Artificial Sequence
  Description of Artificial Sequence: Synthetic peptide
  Seed: MDPRMCSLMQGSTLPRR
MDPRMFSLAQPSTHPRR

SEQ ID NO: 97704 - protein, 17 aa, Artificial Sequence
  Description of Artificial Sequence: Synthetic peptide
  Seed: MDPRMCSLMQGSTLPRR
MDPRMFSLAQPSTIPRR

SEQ ID NO: 97705 - protein, 17 aa, Artificial Sequence
  Description of Artificial Sequence: Synthetic peptide
  Seed: MDPRMCSLMQGSTLPRR
MDPRMFSLAQPSTLPRR

SEQ ID NO: 97706 - protein, 17 aa, Artificial Sequence
  Description of Artificial Sequence: Synthetic peptide
  Seed: MDPRMCSLMQGSTLPRR
MDPRMFSLAQPSTMPRR

SEQ ID NO: 97707 - protein, 17 aa, Artificial Sequence
  Description of Artificial Sequence: Synthetic peptide
  Seed: MDPRMCSLMQGSTLPRR
MDPRMFSLAQPSTNPRR

SEQ ID NO: 97708 - protein, 17 aa, Artificial Sequence
  Description of Artificial Sequence: Synthetic peptide
  Seed: MDPRMCSLMQGSTLPRR
MDPRMFSLAQPSTQPRR

SEQ ID NO: 97709 - protein, 17 aa, Artificial Sequence
  Description of Artificial Sequence: Synthetic peptide
  Seed: MDPRMCSLMQGSTLPRR
MDPRMFSLAQPSTSPRR

SEQ ID NO: 97710 - protein, 17 aa, Artificial Sequence
  Description of Artificial Sequence: Synthetic peptide
  Seed: MDPRMCSLMQGSTLPRR
MDPRMFSLAQPSTTPRR

SEQ ID NO: 97711 - protein, 17 aa, Artificial Sequence
  Description of Artificial Sequence: Synthetic peptide
  Seed: MDPRMCSLMQGSTLPRR
MDPRMFSLAQPSTVPRR

SEQ ID NO: 97712 - protein, 17 aa, Artificial Sequence
  Description of Artificial Sequence: Synthetic peptide
  Seed: MDPRMCSLMQGSTLPRR
MDPRMFSLAQSSTAPRR

SEQ ID NO: 97713 - protein, 17 aa, Artificial Sequence
  Description of Artificial Sequence: Synthetic peptide
  Seed: MDPRMCSLMQGSTLPRR
MDPRMFSLAQSSTFPRR

SEQ ID NO: 97714 - protein, 17 aa, Artificial Sequence
  Description of Artificial Sequence: Synthetic peptide
  Seed: MDPRMCSLMQGSTLPRR
MDPRMFSLAQSSTGPRR

SEQ ID NO: 97715 - protein, 17 aa, Artificial Sequence
  Description of Artificial Sequence: Synthetic peptide
  Seed: MDPRMCSLMQGSTLPRR
MDPRMFSLAQSSTHPRR

SEQ ID NO: 97716 - protein, 17 aa, Artificial Sequence
  Description of Artificial Sequence: Synthetic peptide
  Seed: MDPRMCSLMQGSTLPRR
MDPRMFSLAQSSTIPRR

SEQ ID NO: 97717 - protein, 17 aa, Artificial Sequence
  Description of Artificial Sequence: Synthetic peptide
  Seed: MDPRMCSLMQGSTLPRR
MDPRMFSLAQSSTLPRR

SEQ ID NO: 97718 - protein, 17 aa, Artificial Sequence
  Description of Artificial Sequence: Synthetic peptide
  Seed: MDPRMCSLMQGSTLPRR
MDPRMFSLAQSSTMPRR

SEQ ID NO: 97719 - protein, 17 aa, Artificial Sequence
  Description of Artificial Sequence: Synthetic peptide
  Seed: MDPRMCSLMQGSTLPRR
MDPRMFSLAQSSTNPRR

SEQ ID NO: 97720 - protein, 17 aa, Artificial Sequence
  Description of Artificial Sequence: Synthetic peptide
  Seed: MDPRMCSLMQGSTLPRR
MDPRMFSLAQSSTQPRR

SEQ ID NO: 97721 - protein, 17 aa, Artificial Sequence
  Description of Artificial Sequence: Synthetic peptide
  Seed: MDPRMCSLMQGSTLPRR
MDPRMFSLAQSSTSPRR

SEQ ID NO: 97722 - protein, 17 aa, Artificial Sequence
  Description of Artificial Sequence: Synthetic peptide
  Seed: MDPRMCSLMQGSTLPRR
MDPRMFSLAQSSTTPRR

SEQ ID NO: 97723 - protein, 17 aa, Artificial Sequence
  Description of Artificial Sequence: Synthetic peptide
  Seed: MDPRMCSLMQGSTLPRR
MDPRMFSLAQSSTVPRR

SEQ ID NO: 97724 - protein, 17 aa, Artificial Sequence
  Description of Artificial Sequence: Synthetic peptide
  Seed: MDPRMCSLMQGSTLPRR
MDPRMFSLAQTSTAPRR

SEQ ID NO: 97725 - protein, 17 aa, Artificial Sequence
  Description of Artificial Sequence: Synthetic peptide
  Seed: MDPRMCSLMQGSTLPRR
MDPRMFSLAQTSTHPRR

SEQ ID NO: 97726 - protein, 17 aa, Artificial Sequence
  Description of Artificial Sequence: Synthetic peptide
  Seed: MDPRMCSLMQGSTLPRR
MDPRMFSLAQTSTIPRR

SEQ ID NO: 97727 - protein, 17 aa, Artificial Sequence
  Description of Artificial Sequence: Synthetic peptide
  Seed: MDPRMCSLMQGSTLPRR
MDPRMFSLAQTSTLPRR

SEQ ID NO: 97728 - protein, 17 aa, Artificial Sequence
  Description of Artificial Sequence: Synthetic peptide
  Seed: MDPRMCSLMQGSTLPRR
MDPRMFSLAQTSTMPRR

SEQ ID NO: 97729 - protein, 17 aa, Artificial Sequence
  Description of Artificial Sequence: Synthetic peptide
  Seed: MDPRMCSLMQGSTLPRR
MDPRMFSLAQTSTNPRR

SEQ ID NO: 97730 - protein, 17 aa, Artificial Sequence
  Description of Artificial Sequence: Synthetic peptide
  Seed: MDPRMCSLMQGSTLPRR
MDPRMFSLAQTSTQPRR

SEQ ID NO: 97731 - protein, 17 aa, Artificial Sequence
  Description of Artificial Sequence: Synthetic peptide
  Seed: MDPRMCSLMQGSTLPRR
MDPRMFSLAQTSTSPRR

SEQ ID NO: 97732 - protein, 17 aa, Artificial Sequence
  Description of Artificial Sequence: Synthetic peptide
  Seed: MDPRMCSLMQGSTLPRR
MDPRMFSLAQTSTTPRR

SEQ ID NO: 97733 - protein, 17 aa, Artificial Sequence
  Description of Artificial Sequence: Synthetic peptide
  Seed: MDPRMCSLMQGSTLPRR
MDPRMFSLAQTSTVPRR

SEQ ID NO: 97734 - protein, 17 aa, Artificial Sequence
  Description of Artificial Sequence: Synthetic peptide
  Seed: MDPRMCSLMQGSTLPRR
MDPRMFSLAQVSTAPRR

SEQ ID NO: 97735 - protein, 17 aa, Artificial Sequence
  Description of Artificial Sequence: Synthetic peptide
  Seed: MDPRMCSLMQGSTLPRR
MDPRMFSLAQVSTGPRR

SEQ ID NO: 97736 - protein, 17 aa, Artificial Sequence
  Description of Artificial Sequence: Synthetic peptide
  Seed: MDPRMCSLMQGSTLPRR
MDPRMFSLAQVSTHPRR

SEQ ID NO: 97737 - protein, 17 aa, Artificial Sequence
  Description of Artificial Sequence: Synthetic peptide
  Seed: MDPRMCSLMQGSTLPRR
MDPRMFSLAQVSTIPRR

SEQ ID NO: 97738 - protein, 17 aa, Artificial Sequence
  Description of Artificial Sequence: Synthetic peptide
  Seed: MDPRMCSLMQGSTLPRR
MDPRMFSLAQVSTLPRR

SEQ ID NO: 97739 - protein, 17 aa, Artificial Sequence
  Description of Artificial Sequence: Synthetic peptide
  Seed: MDPRMCSLMQGSTLPRR
MDPRMFSLAQVSTMPRR

SEQ ID NO: 97740 - protein, 17 aa, Artificial Sequence
  Description of Artificial Sequence: Synthetic peptide
  Seed: MDPRMCSLMQGSTLPRR
MDPRMFSLAQVSTNPRR

SEQ ID NO: 97741 - protein, 17 aa, Artificial Sequence
  Description of Artificial Sequence: Synthetic peptide
  Seed: MDPRMCSLMQGSTLPRR
MDPRMFSLAQVSTQPRR

SEQ ID NO: 97742 - protein, 17 aa, Artificial Sequence
  Description of Artificial Sequence: Synthetic peptide
  Seed: MDPRMCSLMQGSTLPRR
MDPRMFSLAQVSTSPRR

SEQ ID NO: 97743 - protein, 17 aa, Artificial Sequence
  Description of Artificial Sequence: Synthetic peptide
  Seed: MDPRMCSLMQGSTLPRR
MDPRMFSLAQVSTTPRR

SEQ ID NO: 97744 - protein, 17 aa, Artificial Sequence
  Description of Artificial Sequence: Synthetic peptide
  Seed: MDPRMCSLMQGSTLPRR
MDPRMFSLAQVSTVPRR

SEQ ID NO: 97745 - protein, 17 aa, Artificial Sequence
  Description of Artificial Sequence: Synthetic peptide
  Seed: MDPRMCSLMQGSTLPRR
MDPRMFSLCQASTAPRR

SEQ ID NO: 97746 - protein, 17 aa, Artificial Sequence
  Description of Artificial Sequence: Synthetic peptide
  Seed: MDPRMCSLMQGSTLPRR
MDPRMFSLCQASTIPRR

SEQ ID NO: 97747 - protein, 17 aa, Artificial Sequence
  Description of Artificial Sequence: Synthetic peptide
  Seed: MDPRMCSLMQGSTLPRR
MDPRMFSLCQASTLPRR

SEQ ID NO: 97748 - protein, 17 aa, Artificial Sequence
  Description of Artificial Sequence: Synthetic peptide
  Seed: MDPRMCSLMQGSTLPRR
MDPRMFSLCQASTVPRR

SEQ ID NO: 97749 - protein, 17 aa, Artificial Sequence
  Description of Artificial Sequence: Synthetic peptide
  Seed: MDPRMCSLMQGSTLPRR
MDPRMFSLEQASTAPRR

SEQ ID NO: 97750 - protein, 17 aa, Artificial Sequence
  Description of Artificial Sequence: Synthetic peptide
  Seed: MDPRMCSLMQGSTLPRR
MDPRMFSLEQASTIPRR

SEQ ID NO: 97751 - protein, 17 aa, Artificial Sequence
  Description of Artificial Sequence: Synthetic peptide
  Seed: MDPRMCSLMQGSTLPRR
MDPRMFSLEQASTLPRR

SEQ ID NO: 97752 - protein, 17 aa, Artificial Sequence
  Description of Artificial Sequence: Synthetic peptide
  Seed: MDPRMCSLMQGSTLPRR
MDPRMFSLEQASTMPRR

SEQ ID NO: 97753 - protein, 17 aa, Artificial Sequence
  Description of Artificial Sequence: Synthetic peptide
  Seed: MDPRMCSLMQGSTLPRR
MDPRMFSLEQASTVPRR

SEQ ID NO: 97754 - protein, 17 aa, Artificial Sequence
  Description of Artificial Sequence: Synthetic peptide
  Seed: MDPRMCSLMQGSTLPRR
MDPRMFSLEQGSTAPRR

SEQ ID NO: 97755 - protein, 17 aa, Artificial Sequence
  Description of Artificial Sequence: Synthetic peptide
  Seed: MDPRMCSLMQGSTLPRR
MDPRMFSLEQGSTIPRR

SEQ ID NO: 97756 - protein, 17 aa, Artificial Sequence
  Description of Artificial Sequence: Synthetic peptide
  Seed: MDPRMCSLMQGSTLPRR
MDPRMFSLEQGSTLPRR

SEQ ID NO: 97757 - protein, 17 aa, Artificial Sequence
  Description of Artificial Sequence: Synthetic peptide
  Seed: MDPRMCSLMQGSTLPRR
MDPRMFSLEQGSTVPRR

SEQ ID NO: 97758 - protein, 17 aa, Artificial Sequence
  Description of Artificial Sequence: Synthetic peptide
  Seed: MDPRMCSLMQGSTLPRR
MDPRMFSLEQSSTAPRR

SEQ ID NO: 97759 - protein, 17 aa, Artificial Sequence
  Description of Artificial Sequence: Synthetic peptide
  Seed: MDPRMCSLMQGSTLPRR
MDPRMFSLEQSSTIPRR

SEQ ID NO: 97760 - protein, 17 aa, Artificial Sequence
  Description of Artificial Sequence: Synthetic peptide
  Seed: MDPRMCSLMQGSTLPRR
MDPRMFSLEQSSTLPRR

SEQ ID NO: 97761 - protein, 17 aa, Artificial Sequence
  Description of Artificial Sequence: Synthetic peptide
  Seed: MDPRMCSLMQGSTLPRR
MDPRMFSLEQSSTVPRR

SEQ ID NO: 97762 - protein, 17 aa, Artificial Sequence
  Description of Artificial Sequence: Synthetic peptide
  Seed: MDPRMCSLMQGSTLPRR
MDPRMFSLFQASTAPRR

SEQ ID NO: 97763 - protein, 17 aa, Artificial Sequence
  Description of Artificial Sequence: Synthetic peptide
  Seed: MDPRMCSLMQGSTLPRR
MDPRMFSLFQASTGPRR

SEQ ID NO: 97764 - protein, 17 aa, Artificial Sequence
  Description of Artificial Sequence: Synthetic peptide
  Seed: MDPRMCSLMQGSTLPRR
MDPRMFSLFQASTIPRR

SEQ ID NO: 97765 - protein, 17 aa, Artificial Sequence
  Description of Artificial Sequence: Synthetic peptide
  Seed: MDPRMCSLMQGSTLPRR
MDPRMFSLFQASTLPRR

SEQ ID NO: 97766 - protein, 17 aa, Artificial Sequence
  Description of Artificial Sequence: Synthetic peptide
  Seed: MDPRMCSLMQGSTLPRR
MDPRMFSLFQASTMPRR

SEQ ID NO: 97767 - protein, 17 aa, Artificial Sequence
  Description of Artificial Sequence: Synthetic peptide
  Seed: MDPRMCSLMQGSTLPRR
MDPRMFSLFQASTNPRR

SEQ ID NO: 97768 - protein, 17 aa, Artificial Sequence
  Description of Artificial Sequence: Synthetic peptide
  Seed: MDPRMCSLMQGSTLPRR
MDPRMFSLFQASTSPRR

SEQ ID NO: 97769 - protein, 17 aa, Artificial Sequence
  Description of Artificial Sequence: Synthetic peptide
  Seed: MDPRMCSLMQGSTLPRR
MDPRMFSLFQASTTPRR

SEQ ID NO: 97770 - protein, 17 aa, Artificial Sequence
  Description of Artificial Sequence: Synthetic peptide
  Seed: MDPRMCSLMQGSTLPRR
MDPRMFSLFQASTVPRR

SEQ ID NO: 97771 - protein, 17 aa, Artificial Sequence
  Description of Artificial Sequence: Synthetic peptide
  Seed: MDPRMCSLMQGSTLPRR
MDPRMFSLFQFSTFPRR

SEQ ID NO: 97772 - protein, 17 aa, Artificial Sequence
  Description of Artificial Sequence: Synthetic peptide
  Seed: MDPRMCSLMQGSTLPRR
MDPRMFSLFQFSTLPRR

SEQ ID NO: 97773 - protein, 17 aa, Artificial Sequence
  Description of Artificial Sequence: Synthetic peptide
  Seed: MDPRMCSLMQGSTLPRR
MDPRMFSLFQGSTAPRR

SEQ ID NO: 97774 - protein, 17 aa, Artificial Sequence
  Description of Artificial Sequence: Synthetic peptide
  Seed: MDPRMCSLMQGSTLPRR
MDPRMFSLFQGSTIPRR

SEQ ID NO: 97775 - protein, 17 aa, Artificial Sequence
  Description of Artificial Sequence: Synthetic peptide
  Seed: MDPRMCSLMQGSTLPRR
MDPRMFSLFQGSTLPRR

SEQ ID NO: 97776 - protein, 17 aa, Artificial Sequence
  Description of Artificial Sequence: Synthetic peptide
  Seed: MDPRMCSLMQGSTLPRR
MDPRMFSLFQGSTMPRR

SEQ ID NO: 97777 - protein, 17 aa, Artificial Sequence
  Description of Artificial Sequence: Synthetic peptide
  Seed: MDPRMCSLMQGSTLPRR
MDPRMFSLFQGSTVPRR

SEQ ID NO: 97778 - protein, 17 aa, Artificial Sequence
  Description of Artificial Sequence: Synthetic peptide
  Seed: MDPRMCSLMQGSTLPRR
MDPRMFSLFQISTAPRR

SEQ ID NO: 97779 - protein, 17 aa, Artificial Sequence
  Description of Artificial Sequence: Synthetic peptide
  Seed: MDPRMCSLMQGSTLPRR
MDPRMFSLFQISTSPRR

SEQ ID NO: 97780 - protein, 17 aa, Artificial Sequence
  Description of Artificial Sequence: Synthetic peptide
  Seed: MDPRMCSLMQGSTLPRR
MDPRMFSLFQLSTFPRR

SEQ ID NO: 97781 - protein, 17 aa, Artificial Sequence
  Description of Artificial Sequence: Synthetic peptide
  Seed: MDPRMCSLMQGSTLPRR
MDPRMFSLFQNSTLPRR

SEQ ID NO: 97782 - protein, 17 aa, Artificial Sequence
  Description of Artificial Sequence: Synthetic peptide
  Seed: MDPRMCSLMQGSTLPRR
MDPRMFSLFQPSTAPRR

SEQ ID NO: 97783 - protein, 17 aa, Artificial Sequence
  Description of Artificial Sequence: Synthetic peptide
  Seed: MDPRMCSLMQGSTLPRR
MDPRMFSLFQPSTIPRR

SEQ ID NO: 97784 - protein, 17 aa, Artificial Sequence
  Description of Artificial Sequence: Synthetic peptide
  Seed: MDPRMCSLMQGSTLPRR
MDPRMFSLFQPSTLPRR

SEQ ID NO: 97785 - protein, 17 aa, Artificial Sequence
  Description of Artificial Sequence: Synthetic peptide
  Seed: MDPRMCSLMQGSTLPRR
MDPRMFSLFQPSTNPRR

SEQ ID NO: 97786 - protein, 17 aa, Artificial Sequence
  Description of Artificial Sequence: Synthetic peptide
  Seed: MDPRMCSLMQGSTLPRR
MDPRMFSLFQPSTSPRR

SEQ ID NO: 97787 - protein, 17 aa, Artificial Sequence
  Description of Artificial Sequence: Synthetic peptide
  Seed: MDPRMCSLMQGSTLPRR
MDPRMFSLFQPSTTPRR

SEQ ID NO: 97788 - protein, 17 aa, Artificial Sequence
  Description of Artificial Sequence: Synthetic peptide
  Seed: MDPRMCSLMQGSTLPRR
MDPRMFSLFQPSTVPRR

SEQ ID NO: 97789 - protein, 17 aa, Artificial Sequence
  Description of Artificial Sequence: Synthetic peptide
  Seed: MDPRMCSLMQGSTLPRR
MDPRMFSLFQSSTAPRR

SEQ ID NO: 97790 - protein, 17 aa, Artificial Sequence
  Description of Artificial Sequence: Synthetic peptide
  Seed: MDPRMCSLMQGSTLPRR
MDPRMFSLFQSSTIPRR

SEQ ID NO: 97791 - protein, 17 aa, Artificial Sequence
  Description of Artificial Sequence: Synthetic peptide
  Seed: MDPRMCSLMQGSTLPRR
MDPRMFSLFQSSTLPRR

SEQ ID NO: 97792 - protein, 17 aa, Artificial Sequence
  Description of Artificial Sequence: Synthetic peptide
  Seed: MDPRMCSLMQGSTLPRR
MDPRMFSLFQSSTNPRR

SEQ ID NO: 97793 - protein, 17 aa, Artificial Sequence
  Description of Artificial Sequence: Synthetic peptide
  Seed: MDPRMCSLMQGSTLPRR
MDPRMFSLFQSSTSPRR

SEQ ID NO: 97794 - protein, 17 aa, Artificial Sequence
  Description of Artificial Sequence: Synthetic peptide
  Seed: MDPRMCSLMQGSTLPRR
MDPRMFSLFQSSTVPRR

SEQ ID NO: 97795 - protein, 17 aa, Artificial Sequence
  Description of Artificial Sequence: Synthetic peptide
  Seed: MDPRMCSLMQGSTLPRR
MDPRMFSLFQTSTAPRR

SEQ ID NO: 97796 - protein, 17 aa, Artificial Sequence
  Description of Artificial Sequence: Synthetic peptide
  Seed: MDPRMCSLMQGSTLPRR
MDPRMFSLFQTSTNPRR

SEQ ID NO: 97797 - protein, 17 aa, Artificial Sequence
  Description of Artificial Sequence: Synthetic peptide
  Seed: MDPRMCSLMQGSTLPRR
MDPRMFSLFQTSTSPRR

SEQ ID NO: 97798 - protein, 17 aa, Artificial Sequence
  Description of Artificial Sequence: Synthetic peptide
  Seed: MDPRMCSLMQGSTLPRR
MDPRMFSLFQVSTAPRR

SEQ ID NO: 97799 - protein, 17 aa, Artificial Sequence
  Description of Artificial Sequence: Synthetic peptide
  Seed: MDPRMCSLMQGSTLPRR
MDPRMFSLFQVSTNPRR

SEQ ID NO: 97800 - protein, 17 aa, Artificial Sequence
  Description of Artificial Sequence: Synthetic peptide
  Seed: MDPRMCSLMQGSTLPRR
MDPRMFSLFQVSTSPRR

SEQ ID NO: 97801 - protein, 17 aa, Artificial Sequence
  Description of Artificial Sequence: Synthetic peptide
  Seed: MDPRMCSLMQGSTLPRR
MDPRMFSLGQASTAPRR

SEQ ID NO: 97802 - protein, 17 aa, Artificial Sequence
  Description of Artificial Sequence: Synthetic peptide
  Seed: MDPRMCSLMQGSTLPRR
MDPRMFSLGQASTIPRR

SEQ ID NO: 97803 - protein, 17 aa, Artificial Sequence
  Description of Artificial Sequence: Synthetic peptide
  Seed: MDPRMCSLMQGSTLPRR
MDPRMFSLGQASTLPRR

SEQ ID NO: 97804 - protein, 17 aa, Artificial Sequence
  Description of Artificial Sequence: Synthetic peptide
  Seed: MDPRMCSLMQGSTLPRR
MDPRMFSLGQASTMPRR

SEQ ID NO: 97805 - protein, 17 aa, Artificial Sequence
  Description of Artificial Sequence: Synthetic peptide
  Seed: MDPRMCSLMQGSTLPRR
MDPRMFSLGQASTVPRR

SEQ ID NO: 97806 - protein, 17 aa, Artificial Sequence
  Description of Artificial Sequence: Synthetic peptide
  Seed: MDPRMCSLMQGSTLPRR
MDPRMFSLGQGSTIPRR

SEQ ID NO: 97807 - protein, 17 aa, Artificial Sequence
  Description of Artificial Sequence: Synthetic peptide
  Seed: MDPRMCSLMQGSTLPRR
MDPRMFSLGQGSTLPRR

SEQ ID NO: 97808 - protein, 17 aa, Artificial Sequence
  Description of Artificial Sequence: Synthetic peptide
  Seed: MDPRMCSLMQGSTLPRR
MDPRMFSLGQGSTVPRR

SEQ ID NO: 97809 - protein, 17 aa, Artificial Sequence
  Description of Artificial Sequence: Synthetic peptide
  Seed: MDPRMCSLMQGSTLPRR
MDPRMFSLGQPSTLPRR

SEQ ID NO: 97810 - protein, 17 aa, Artificial Sequence
  Description of Artificial Sequence: Synthetic peptide
  Seed: MDPRMCSLMQGSTLPRR
MDPRMFSLGQSSTIPRR

SEQ ID NO: 97811 - protein, 17 aa, Artificial Sequence
  Description of Artificial Sequence: Synthetic peptide
  Seed: MDPRMCSLMQGSTLPRR
MDPRMFSLGQSSTLPRR

SEQ ID NO: 97812 - protein, 17 aa, Artificial Sequence
  Description of Artificial Sequence: Synthetic peptide
  Seed: MDPRMCSLMQGSTLPRR
MDPRMFSLGQSSTVPRR

SEQ ID NO: 97813 - protein, 17 aa, Artificial Sequence
  Description of Artificial Sequence: Synthetic peptide
  Seed: MDPRMCSLMQGSTLPRR
MDPRMFSLHQASTIPRR

SEQ ID NO: 97814 - protein, 17 aa, Artificial Sequence
  Description of Artificial Sequence: Synthetic peptide
  Seed: MDPRMCSLMQGSTLPRR
MDPRMFSLHQASTLPRR

SEQ ID NO: 97815 - protein, 17 aa, Artificial Sequence
  Description of Artificial Sequence: Synthetic peptide
  Seed: MDPRMCSLMQGSTLPRR
MDPRMFSLHQASTVPRR

SEQ ID NO: 97816 - protein, 17 aa, Artificial Sequence
  Description of Artificial Sequence: Synthetic peptide
  Seed: MDPRMCSLMQGSTLPRR
MDPRMFSLHQGSTLPRR

SEQ ID NO: 97817 - protein, 17 aa, Artificial Sequence
  Description of Artificial Sequence: Synthetic peptide
  Seed: MDPRMCSLMQGSTLPRR
MDPRMFSLIQASTAPRR

SEQ ID NO: 97818 - protein, 17 aa, Artificial Sequence
  Description of Artificial Sequence: Synthetic peptide
  Seed: MDPRMCSLMQGSTLPRR
MDPRMFSLIQASTCPRR

SEQ ID NO: 97819 - protein, 17 aa, Artificial Sequence
  Description of Artificial Sequence: Synthetic peptide
  Seed: MDPRMCSLMQGSTLPRR
MDPRMFSLIQASTDPRR

SEQ ID NO: 97820 - protein, 17 aa, Artificial Sequence
  Description of Artificial Sequence: Synthetic peptide
  Seed: MDPRMCSLMQGSTLPRR
MDPRMFSLIQASTEPRR

SEQ ID NO: 97821 - protein, 17 aa, Artificial Sequence
  Description of Artificial Sequence: Synthetic peptide
  Seed: MDPRMCSLMQGSTLPRR
MDPRMFSLIQASTFPRR

SEQ ID NO: 97822 - protein, 17 aa, Artificial Sequence
  Description of Artificial Sequence: Synthetic peptide
  Seed: MDPRMCSLMQGSTLPRR
MDPRMFSLIQASTGPRR

SEQ ID NO: 97823 - protein, 17 aa, Artificial Sequence
  Description of Artificial Sequence: Synthetic peptide
  Seed: MDPRMCSLMQGSTLPRR
MDPRMFSLIQASTHPRR

SEQ ID NO: 97824 - protein, 17 aa, Artificial Sequence
  Description of Artificial Sequence: Synthetic peptide
  Seed: MDPRMCSLMQGSTLPRR
MDPRMFSLIQASTIPRR

SEQ ID NO: 97825 - protein, 17 aa, Artificial Sequence
  Description of Artificial Sequence: Synthetic peptide
  Seed: MDPRMCSLMQGSTLPRR
MDPRMFSLIQASTLPRR

SEQ ID NO: 97826 - protein, 17 aa, Artificial Sequence
  Description of Artificial Sequence: Synthetic peptide
  Seed: MDPRMCSLMQGSTLPRR
MDPRMFSLIQASTMPRR

SEQ ID NO: 97827 - protein, 17 aa, Artificial Sequence
  Description of Artificial Sequence: Synthetic peptide
  Seed: MDPRMCSLMQGSTLPRR
MDPRMFSLIQASTNPRR

SEQ ID NO: 97828 - protein, 17 aa, Artificial Sequence
  Description of Artificial Sequence: Synthetic peptide
  Seed: MDPRMCSLMQGSTLPRR
MDPRMFSLIQASTPPRR

SEQ ID NO: 97829 - protein, 17 aa, Artificial Sequence
  Description of Artificial Sequence: Synthetic peptide
  Seed: MDPRMCSLMQGSTLPRR
MDPRMFSLIQASTQPRR

SEQ ID NO: 97830 - protein, 17 aa, Artificial Sequence
  Description of Artificial Sequence: Synthetic peptide
  Seed: MDPRMCSLMQGSTLPRR
MDPRMFSLIQASTSPRR

SEQ ID NO: 97831 - protein, 17 aa, Artificial Sequence
  Description of Artificial Sequence: Synthetic peptide
  Seed: MDPRMCSLMQGSTLPRR
MDPRMFSLIQASTTPRR

SEQ ID NO: 97832 - protein, 17 aa, Artificial Sequence
  Description of Artificial Sequence: Synthetic peptide
  Seed: MDPRMCSLMQGSTLPRR
MDPRMFSLIQASTVPRR

SEQ ID NO: 97833 - protein, 17 aa, Artificial Sequence
  Description of Artificial Sequence: Synthetic peptide
  Seed: MDPRMCSLMQGSTLPRR
MDPRMFSLIQASTWPRR

SEQ ID NO: 97834 - protein, 17 aa, Artificial Sequence
  Description of Artificial Sequence: Synthetic peptide
  Seed: MDPRMCSLMQGSTLPRR
MDPRMFSLIQFSTFPRR

SEQ ID NO: 97835 - protein, 17 aa, Artificial Sequence
  Description of Artificial Sequence: Synthetic peptide
  Seed: MDPRMCSLMQGSTLPRR
MDPRMFSLIQFSTIPRR

SEQ ID NO: 97836 - protein, 17 aa, Artificial Sequence
  Description of Artificial Sequence: Synthetic peptide
  Seed: MDPRMCSLMQGSTLPRR
MDPRMFSLIQFSTLPRR

SEQ ID NO: 97837 - protein, 17 aa, Artificial Sequence
  Description of Artificial Sequence: Synthetic peptide
  Seed: MDPRMCSLMQGSTLPRR
MDPRMFSLIQFSTMPRR

SEQ ID NO: 97838 - protein, 17 aa, Artificial Sequence
  Description of Artificial Sequence: Synthetic peptide
  Seed: MDPRMCSLMQGSTLPRR
MDPRMFSLIQFSTVPRR

SEQ ID NO: 97839 - protein, 17 aa, Artificial Sequence
  Description of Artificial Sequence: Synthetic peptide
  Seed: MDPRMCSLMQGSTLPRR
MDPRMFSLIQGSTAPRR

SEQ ID NO: 97840 - protein, 17 aa, Artificial Sequence
  Description of Artificial Sequence: Synthetic peptide
  Seed: MDPRMCSLMQGSTLPRR
MDPRMFSLIQGSTCPRR

SEQ ID NO: 97841 - protein, 17 aa, Artificial Sequence
  Description of Artificial Sequence: Synthetic peptide
  Seed: MDPRMCSLMQGSTLPRR
MDPRMFSLIQGSTFPRR

SEQ ID NO: 97842 - protein, 17 aa, Artificial Sequence
  Description of Artificial Sequence: Synthetic peptide
  Seed: MDPRMCSLMQGSTLPRR
MDPRMFSLIQGSTGPRR

SEQ ID NO: 97843 - protein, 17 aa, Artificial Sequence
  Description of Artificial Sequence: Synthetic peptide
  Seed: MDPRMCSLMQGSTLPRR
MDPRMFSLIQGSTHPRR

SEQ ID NO: 97844 - protein, 17 aa, Artificial Sequence
  Description of Artificial Sequence: Synthetic peptide
  Seed: MDPRMCSLMQGSTLPRR
MDPRMFSLIQGSTIPRR

SEQ ID NO: 97845 - protein, 17 aa, Artificial Sequence
  Description of Artificial Sequence: Synthetic peptide
  Seed: MDPRMCSLMQGSTLPRR
MDPRMFSLIQGSTLPRR

SEQ ID NO: 97846 - protein, 17 aa, Artificial Sequence
  Description of Artificial Sequence: Synthetic peptide
  Seed: MDPRMCSLMQGSTLPRR
MDPRMFSLIQGSTMPRR

SEQ ID NO: 97847 - protein, 17 aa, Artificial Sequence
  Description of Artificial Sequence: Synthetic peptide
  Seed: MDPRMCSLMQGSTLPRR
MDPRMFSLIQGSTNPRR

SEQ ID NO: 97848 - protein, 17 aa, Artificial Sequence
  Description of Artificial Sequence: Synthetic peptide
  Seed: MDPRMCSLMQGSTLPRR
MDPRMFSLIQGSTQPRR

SEQ ID NO: 97849 - protein, 17 aa, Artificial Sequence
  Description of Artificial Sequence: Synthetic peptide
  Seed: MDPRMCSLMQGSTLPRR
MDPRMFSLIQGSTSPRR

SEQ ID NO: 97850 - protein, 17 aa, Artificial Sequence
  Description of Artificial Sequence: Synthetic peptide
  Seed: MDPRMCSLMQGSTLPRR
MDPRMFSLIQGSTTPRR

SEQ ID NO: 97851 - protein, 17 aa, Artificial Sequence
  Description of Artificial Sequence: Synthetic peptide
  Seed: MDPRMCSLMQGSTLPRR
MDPRMFSLIQGSTVPRR

SEQ ID NO: 97852 - protein, 17 aa, Artificial Sequence
  Description of Artificial Sequence: Synthetic peptide
  Seed: MDPRMCSLMQGSTLPRR
MDPRMFSLIQISTAPRR

SEQ ID NO: 97853 - protein, 17 aa, Artificial Sequence
  Description of Artificial Sequence: Synthetic peptide
  Seed: MDPRMCSLMQGSTLPRR
MDPRMFSLIQISTGPRR

SEQ ID NO: 97854 - protein, 17 aa, Artificial Sequence
  Description of Artificial Sequence: Synthetic peptide
  Seed: MDPRMCSLMQGSTLPRR
MDPRMFSLIQISTHPRR

SEQ ID NO: 97855 - protein, 17 aa, Artificial Sequence
  Description of Artificial Sequence: Synthetic peptide
  Seed: MDPRMCSLMQGSTLPRR
MDPRMFSLIQISTIPRR

SEQ ID NO: 97856 - protein, 17 aa, Artificial Sequence
  Description of Artificial Sequence: Synthetic peptide
  Seed: MDPRMCSLMQGSTLPRR
MDPRMFSLIQISTLPRR

SEQ ID NO: 97857 - protein, 17 aa, Artificial Sequence
  Description of Artificial Sequence: Synthetic peptide
  Seed: MDPRMCSLMQGSTLPRR
MDPRMFSLIQISTMPRR

SEQ ID NO: 97858 - protein, 17 aa, Artificial Sequence
  Description of Artificial Sequence: Synthetic peptide
  Seed: MDPRMCSLMQGSTLPRR
MDPRMFSLIQISTNPRR

SEQ ID NO: 97859 - protein, 17 aa, Artificial Sequence
  Description of Artificial Sequence: Synthetic peptide
  Seed: MDPRMCSLMQGSTLPRR
MDPRMFSLIQISTQPRR

SEQ ID NO: 97860 - protein, 17 aa, Artificial Sequence
  Description of Artificial Sequence: Synthetic peptide
  Seed: MDPRMCSLMQGSTLPRR
MDPRMFSLIQISTSPRR

SEQ ID NO: 97861 - protein, 17 aa, Artificial Sequence
  Description of Artificial Sequence: Synthetic peptide
  Seed: MDPRMCSLMQGSTLPRR
MDPRMFSLIQISTTPRR

SEQ ID NO: 97862 - protein, 17 aa, Artificial Sequence
  Description of Artificial Sequence: Synthetic peptide
  Seed: MDPRMCSLMQGSTLPRR
MDPRMFSLIQISTVPRR

SEQ ID NO: 97863 - protein, 17 aa, Artificial Sequence
  Description of Artificial Sequence: Synthetic peptide
  Seed: MDPRMCSLMQGSTLPRR
MDPRMFSLIQLSTAPRR

SEQ ID NO: 97864 - protein, 17 aa, Artificial Sequence
  Description of Artificial Sequence: Synthetic peptide
  Seed: MDPRMCSLMQGSTLPRR
MDPRMFSLIQLSTFPRR

SEQ ID NO: 97865 - protein, 17 aa, Artificial Sequence
  Description of Artificial Sequence: Synthetic peptide
  Seed: MDPRMCSLMQGSTLPRR
MDPRMFSLIQLSTIPRR

SEQ ID NO: 97866 - protein, 17 aa, Artificial Sequence
  Description of Artificial Sequence: Synthetic peptide
  Seed: MDPRMCSLMQGSTLPRR
MDPRMFSLIQLSTLPRR

SEQ ID NO: 97867 - protein, 17 aa, Artificial Sequence
  Description of Artificial Sequence: Synthetic peptide
  Seed: MDPRMCSLMQGSTLPRR
MDPRMFSLIQLSTMPRR

SEQ ID NO: 97868 - protein, 17 aa, Artificial Sequence
  Description of Artificial Sequence: Synthetic peptide
  Seed: MDPRMCSLMQGSTLPRR
MDPRMFSLIQLSTNPRR

SEQ ID NO: 97869 - protein, 17 aa, Artificial Sequence
  Description of Artificial Sequence: Synthetic peptide
  Seed: MDPRMCSLMQGSTLPRR
MDPRMFSLIQLSTSPRR

SEQ ID NO: 97870 - protein, 17 aa, Artificial Sequence
  Description of Artificial Sequence: Synthetic peptide
  Seed: MDPRMCSLMQGSTLPRR
MDPRMFSLIQLSTTPRR

SEQ ID NO: 97871 - protein, 17 aa, Artificial Sequence
  Description of Artificial Sequence: Synthetic peptide
  Seed: MDPRMCSLMQGSTLPRR
MDPRMFSLIQLSTVPRR

SEQ ID NO: 97872 - protein, 17 aa, Artificial Sequence
  Description of Artificial Sequence: Synthetic peptide
  Seed: MDPRMCSLMQGSTLPRR
MDPRMFSLIQMSTAPRR

SEQ ID NO: 97873 - protein, 17 aa, Artificial Sequence
  Description of Artificial Sequence: Synthetic peptide
  Seed: MDPRMCSLMQGSTLPRR
MDPRMFSLIQMSTIPRR

SEQ ID NO: 97874 - protein, 17 aa, Artificial Sequence
  Description of Artificial Sequence: Synthetic peptide
  Seed: MDPRMCSLMQGSTLPRR
MDPRMFSLIQMSTLPRR

SEQ ID NO: 97875 - protein, 17 aa, Artificial Sequence
  Description of Artificial Sequence: Synthetic peptide
  Seed: MDPRMCSLMQGSTLPRR
MDPRMFSLIQMSTMPRR

SEQ ID NO: 97876 - protein, 17 aa, Artificial Sequence
  Description of Artificial Sequence: Synthetic peptide
  Seed: MDPRMCSLMQGSTLPRR
MDPRMFSLIQMSTNPRR

SEQ ID NO: 97877 - protein, 17 aa, Artificial Sequence
  Description of Artificial Sequence: Synthetic peptide
  Seed: MDPRMCSLMQGSTLPRR
MDPRMFSLIQMSTSPRR

SEQ ID NO: 97878 - protein, 17 aa, Artificial Sequence
  Description of Artificial Sequence: Synthetic peptide
  Seed: MDPRMCSLMQGSTLPRR
MDPRMFSLIQMSTTPRR

SEQ ID NO: 97879 - protein, 17 aa, Artificial Sequence
  Description of Artificial Sequence: Synthetic peptide
  Seed: MDPRMCSLMQGSTLPRR
MDPRMFSLIQMSTVPRR

SEQ ID NO: 97880 - protein, 17 aa, Artificial Sequence
  Description of Artificial Sequence: Synthetic peptide
  Seed: MDPRMCSLMQGSTLPRR
MDPRMFSLIQNSTAPRR

SEQ ID NO: 97881 - protein, 17 aa, Artificial Sequence
  Description of Artificial Sequence: Synthetic peptide
  Seed: MDPRMCSLMQGSTLPRR
MDPRMFSLIQNSTGPRR

SEQ ID NO: 97882 - protein, 17 aa, Artificial Sequence
  Description of Artificial Sequence: Synthetic peptide
  Seed: MDPRMCSLMQGSTLPRR
MDPRMFSLIQNSTIPRR

SEQ ID NO: 97883 - protein, 17 aa, Artificial Sequence
  Description of Artificial Sequence: Synthetic peptide
  Seed: MDPRMCSLMQGSTLPRR
MDPRMFSLIQNSTLPRR

SEQ ID NO: 97884 - protein, 17 aa, Artificial Sequence
  Description of Artificial Sequence: Synthetic peptide
  Seed: MDPRMCSLMQGSTLPRR
MDPRMFSLIQNSTMPRR

SEQ ID NO: 97885 - protein, 17 aa, Artificial Sequence
  Description of Artificial Sequence: Synthetic peptide
  Seed: MDPRMCSLMQGSTLPRR
MDPRMFSLIQNSTNPRR

SEQ ID NO: 97886 - protein, 17 aa, Artificial Sequence
  Description of Artificial Sequence: Synthetic peptide
  Seed: MDPRMCSLMQGSTLPRR
MDPRMFSLIQNSTSPRR

SEQ ID NO: 97887 - protein, 17 aa, Artificial Sequence
  Description of Artificial Sequence: Synthetic peptide
  Seed: MDPRMCSLMQGSTLPRR
MDPRMFSLIQNSTTPRR

SEQ ID NO: 97888 - protein, 17 aa, Artificial Sequence
  Description of Artificial Sequence: Synthetic peptide
  Seed: MDPRMCSLMQGSTLPRR
MDPRMFSLIQNSTVPRR

SEQ ID NO: 97889 - protein, 17 aa, Artificial Sequence
  Description of Artificial Sequence: Synthetic peptide
  Seed: MDPRMCSLMQGSTLPRR
MDPRMFSLIQPSTAPRR

SEQ ID NO: 97890 - protein, 17 aa, Artificial Sequence
  Description of Artificial Sequence: Synthetic peptide
  Seed: MDPRMCSLMQGSTLPRR
MDPRMFSLIQPSTCPRR

SEQ ID NO: 97891 - protein, 17 aa, Artificial Sequence
  Description of Artificial Sequence: Synthetic peptide
  Seed: MDPRMCSLMQGSTLPRR
MDPRMFSLIQPSTEPRR

SEQ ID NO: 97892 - protein, 17 aa, Artificial Sequence
  Description of Artificial Sequence: Synthetic peptide
  Seed: MDPRMCSLMQGSTLPRR
MDPRMFSLIQPSTGPRR

SEQ ID NO: 97893 - protein, 17 aa, Artificial Sequence
  Description of Artificial Sequence: Synthetic peptide
  Seed: MDPRMCSLMQGSTLPRR
MDPRMFSLIQPSTHPRR

SEQ ID NO: 97894 - protein, 17 aa, Artificial Sequence
  Description of Artificial Sequence: Synthetic peptide
  Seed: MDPRMCSLMQGSTLPRR
MDPRMFSLIQPSTIPRR

SEQ ID NO: 97895 - protein, 17 aa, Artificial Sequence
  Description of Artificial Sequence: Synthetic peptide
  Seed: MDPRMCSLMQGSTLPRR
MDPRMFSLIQPSTLPRR

SEQ ID NO: 97896 - protein, 17 aa, Artificial Sequence
  Description of Artificial Sequence: Synthetic peptide
  Seed: MDPRMCSLMQGSTLPRR
MDPRMFSLIQPSTMPRR

SEQ ID NO: 97897 - protein, 17 aa, Artificial Sequence
  Description of Artificial Sequence: Synthetic peptide
  Seed: MDPRMCSLMQGSTLPRR
MDPRMFSLIQPSTNPRR

SEQ ID NO: 97898 - protein, 17 aa, Artificial Sequence
  Description of Artificial Sequence: Synthetic peptide
  Seed: MDPRMCSLMQGSTLPRR
MDPRMFSLIQPSTPPRR

SEQ ID NO: 97899 - protein, 17 aa, Artificial Sequence
  Description of Artificial Sequence: Synthetic peptide
  Seed: MDPRMCSLMQGSTLPRR
MDPRMFSLIQPSTQPRR

SEQ ID NO: 97900 - protein, 17 aa, Artificial Sequence
  Description of Artificial Sequence: Synthetic peptide
  Seed: MDPRMCSLMQGSTLPRR
MDPRMFSLIQPSTSPRR

SEQ ID NO: 97901 - protein, 17 aa, Artificial Sequence
  Description of Artificial Sequence: Synthetic peptide
  Seed: MDPRMCSLMQGSTLPRR
MDPRMFSLIQPSTTPRR

SEQ ID NO: 97902 - protein, 17 aa, Artificial Sequence
  Description of Artificial Sequence: Synthetic peptide
  Seed: MDPRMCSLMQGSTLPRR
MDPRMFSLIQPSTVPRR

SEQ ID NO: 97903 - protein, 17 aa, Artificial Sequence
  Description of Artificial Sequence: Synthetic peptide
  Seed: MDPRMCSLMQGSTLPRR
MDPRMFSLIQPSTWPRR

SEQ ID NO: 97904 - protein, 17 aa, Artificial Sequence
  Description of Artificial Sequence: Synthetic peptide
  Seed: MDPRMCSLMQGSTLPRR
MDPRMFSLIQSSTAPRR

SEQ ID NO: 97905 - protein, 17 aa, Artificial Sequence
  Description of Artificial Sequence: Synthetic peptide
  Seed: MDPRMCSLMQGSTLPRR
MDPRMFSLIQSSTCPRR

SEQ ID NO: 97906 - protein, 17 aa, Artificial Sequence
  Description of Artificial Sequence: Synthetic peptide
  Seed: MDPRMCSLMQGSTLPRR
MDPRMFSLIQSSTFPRR

SEQ ID NO: 97907 - protein, 17 aa, Artificial Sequence
  Description of Artificial Sequence: Synthetic peptide
  Seed: MDPRMCSLMQGSTLPRR
MDPRMFSLIQSSTGPRR

SEQ ID NO: 97908 - protein, 17 aa, Artificial Sequence
  Description of Artificial Sequence: Synthetic peptide
  Seed: MDPRMCSLMQGSTLPRR
MDPRMFSLIQSSTHPRR

SEQ ID NO: 97909 - protein, 17 aa, Artificial Sequence
  Description of Artificial Sequence: Synthetic peptide
  Seed: MDPRMCSLMQGSTLPRR
MDPRMFSLIQSSTIPRR

SEQ ID NO: 97910 - protein, 17 aa, Artificial Sequence
  Description of Artificial Sequence: Synthetic peptide
  Seed: MDPRMCSLMQGSTLPRR
MDPRMFSLIQSSTLPRR

SEQ ID NO: 97911 - protein, 17 aa, Artificial Sequence
  Description of Artificial Sequence: Synthetic peptide
  Seed: MDPRMCSLMQGSTLPRR
MDPRMFSLIQSSTMPRR

SEQ ID NO: 97912 - protein, 17 aa, Artificial Sequence
  Description of Artificial Sequence: Synthetic peptide
  Seed: MDPRMCSLMQGSTLPRR
MDPRMFSLIQSSTNPRR

SEQ ID NO: 97913 - protein, 17 aa, Artificial Sequence
  Description of Artificial Sequence: Synthetic peptide
  Seed: MDPRMCSLMQGSTLPRR
MDPRMFSLIQSSTPPRR

SEQ ID NO: 97914 - protein, 17 aa, Artificial Sequence
  Description of Artificial Sequence: Synthetic peptide
  Seed: MDPRMCSLMQGSTLPRR
MDPRMFSLIQSSTQPRR

SEQ ID NO: 97915 - protein, 17 aa, Artificial Sequence
  Description of Artificial Sequence: Synthetic peptide
  Seed: MDPRMCSLMQGSTLPRR
MDPRMFSLIQSSTSPRR

SEQ ID NO: 97916 - protein, 17 aa, Artificial Sequence
  Description of Artificial Sequence: Synthetic peptide
  Seed: MDPRMCSLMQGSTLPRR
MDPRMFSLIQSSTTPRR

SEQ ID NO: 97917 - protein, 17 aa, Artificial Sequence
  Description of Artificial Sequence: Synthetic peptide
  Seed: MDPRMCSLMQGSTLPRR
MDPRMFSLIQSSTVPRR

SEQ ID NO: 97918 - protein, 17 aa, Artificial Sequence
  Description of Artificial Sequence: Synthetic peptide
  Seed: MDPRMCSLMQGSTLPRR
MDPRMFSLIQTSTAPRR

SEQ ID NO: 97919 - protein, 17 aa, Artificial Sequence
  Description of Artificial Sequence: Synthetic peptide
  Seed: MDPRMCSLMQGSTLPRR
MDPRMFSLIQTSTCPRR

SEQ ID NO: 97920 - protein, 17 aa, Artificial Sequence
  Description of Artificial Sequence: Synthetic peptide
  Seed: MDPRMCSLMQGSTLPRR
MDPRMFSLIQTSTGPRR

SEQ ID NO: 97921 - protein, 17 aa, Artificial Sequence
  Description of Artificial Sequence: Synthetic peptide
  Seed: MDPRMCSLMQGSTLPRR
MDPRMFSLIQTSTHPRR

SEQ ID NO: 97922 - protein, 17 aa, Artificial Sequence
  Description of Artificial Sequence: Synthetic peptide
  Seed: MDPRMCSLMQGSTLPRR
MDPRMFSLIQTSTIPRR

SEQ ID NO: 97923 - protein, 17 aa, Artificial Sequence
  Description of Artificial Sequence: Synthetic peptide
  Seed: MDPRMCSLMQGSTLPRR
MDPRMFSLIQTSTLPRR

SEQ ID NO: 97924 - protein, 17 aa, Artificial Sequence
  Description of Artificial Sequence: Synthetic peptide
  Seed: MDPRMCSLMQGSTLPRR
MDPRMFSLIQTSTMPRR

SEQ ID NO: 97925 - protein, 17 aa, Artificial Sequence
  Description of Artificial Sequence: Synthetic peptide
  Seed: MDPRMCSLMQGSTLPRR
MDPRMFSLIQTSTNPRR

SEQ ID NO: 97926 - protein, 17 aa, Artificial Sequence
  Description of Artificial Sequence: Synthetic peptide
  Seed: MDPRMCSLMQGSTLPRR
MDPRMFSLIQTSTPPRR

SEQ ID NO: 97927 - protein, 17 aa, Artificial Sequence
  Description of Artificial Sequence: Synthetic peptide
  Seed: MDPRMCSLMQGSTLPRR
MDPRMFSLIQTSTQPRR

SEQ ID NO: 97928 - protein, 17 aa, Artificial Sequence
  Description of Artificial Sequence: Synthetic peptide
  Seed: MDPRMCSLMQGSTLPRR
MDPRMFSLIQTSTSPRR

SEQ ID NO: 97929 - protein, 17 aa, Artificial Sequence
  Description of Artificial Sequence: Synthetic peptide
  Seed: MDPRMCSLMQGSTLPRR
MDPRMFSLIQTSTTPRR

SEQ ID NO: 97930 - protein, 17 aa, Artificial Sequence
  Description of Artificial Sequence: Synthetic peptide
  Seed: MDPRMCSLMQGSTLPRR
MDPRMFSLIQTSTVPRR

SEQ ID NO: 97931 - protein, 17 aa, Artificial Sequence
  Description of Artificial Sequence: Synthetic peptide
  Seed: MDPRMCSLMQGSTLPRR
MDPRMFSLIQVSTAPRR

SEQ ID NO: 97932 - protein, 17 aa, Artificial Sequence
  Description of Artificial Sequence: Synthetic peptide
  Seed: MDPRMCSLMQGSTLPRR
MDPRMFSLIQVSTCPRR

SEQ ID NO: 97933 - protein, 17 aa, Artificial Sequence
  Description of Artificial Sequence: Synthetic peptide
  Seed: MDPRMCSLMQGSTLPRR
MDPRMFSLIQVSTGPRR

SEQ ID NO: 97934 - protein, 17 aa, Artificial Sequence
  Description of Artificial Sequence: Synthetic peptide
  Seed: MDPRMCSLMQGSTLPRR
MDPRMFSLIQVSTHPRR

SEQ ID NO: 97935 - protein, 17 aa, Artificial Sequence
  Description of Artificial Sequence: Synthetic peptide
  Seed: MDPRMCSLMQGSTLPRR
MDPRMFSLIQVSTIPRR

SEQ ID NO: 97936 - protein, 17 aa, Artificial Sequence
  Description of Artificial Sequence: Synthetic peptide
  Seed: MDPRMCSLMQGSTLPRR
MDPRMFSLIQVSTLPRR

SEQ ID NO: 97937 - protein, 17 aa, Artificial Sequence
  Description of Artificial Sequence: Synthetic peptide
  Seed: MDPRMCSLMQGSTLPRR
MDPRMFSLIQVSTMPRR

SEQ ID NO: 97938 - protein, 17 aa, Artificial Sequence
  Description of Artificial Sequence: Synthetic peptide
  Seed: MDPRMCSLMQGSTLPRR
MDPRMFSLIQVSTNPRR

SEQ ID NO: 97939 - protein, 17 aa, Artificial Sequence
  Description of Artificial Sequence: Synthetic peptide
  Seed: MDPRMCSLMQGSTLPRR
MDPRMFSLIQVSTPPRR

SEQ ID NO: 97940 - protein, 17 aa, Artificial Sequence
  Description of Artificial Sequence: Synthetic peptide
  Seed: MDPRMCSLMQGSTLPRR
MDPRMFSLIQVSTQPRR

SEQ ID NO: 97941 - protein, 17 aa, Artificial Sequence
  Description of Artificial Sequence: Synthetic peptide
  Seed: MDPRMCSLMQGSTLPRR
MDPRMFSLIQVSTSPRR

SEQ ID NO: 97942 - protein, 17 aa, Artificial Sequence
  Description of Artificial Sequence: Synthetic peptide
  Seed: MDPRMCSLMQGSTLPRR
MDPRMFSLIQVSTTPRR

SEQ ID NO: 97943 - protein, 17 aa, Artificial Sequence
  Description of Artificial Sequence: Synthetic peptide
  Seed: MDPRMCSLMQGSTLPRR
MDPRMFSLIQVSTVPRR

SEQ ID NO: 97944 - protein, 17 aa, Artificial Sequence
  Description of Artificial Sequence: Synthetic peptide
  Seed: MDPRMCSLMQGSTLPRR
MDPRMFSLLQASTAPRR

SEQ ID NO: 97945 - protein, 17 aa, Artificial Sequence
  Description of Artificial Sequence: Synthetic peptide
  Seed: MDPRMCSLMQGSTLPRR
MDPRMFSLLQASTCPRR

SEQ ID NO: 97946 - protein, 17 aa, Artificial Sequence
  Description of Artificial Sequence: Synthetic peptide
  Seed: MDPRMCSLMQGSTLPRR
MDPRMFSLLQASTDPRR

SEQ ID NO: 97947 - protein, 17 aa, Artificial Sequence
  Description of Artificial Sequence: Synthetic peptide
  Seed: MDPRMCSLMQGSTLPRR
MDPRMFSLLQASTEPRR

SEQ ID NO: 97948 - protein, 17 aa, Artificial Sequence
  Description of Artificial Sequence: Synthetic peptide
  Seed: MDPRMCSLMQGSTLPRR
MDPRMFSLLQASTFPRR

SEQ ID NO: 97949 - protein, 17 aa, Artificial Sequence
  Description of Artificial Sequence: Synthetic peptide
  Seed: MDPRMCSLMQGSTLPRR
MDPRMFSLLQASTGPRR

SEQ ID NO: 97950 - protein, 17 aa, Artificial Sequence
  Description of Artificial Sequence: Synthetic peptide
  Seed: MDPRMCSLMQGSTLPRR
MDPRMFSLLQASTHPRR

SEQ ID NO: 97951 - protein, 17 aa, Artificial Sequence
  Description of Artificial Sequence: Synthetic peptide
  Seed: MDPRMCSLMQGSTLPRR
MDPRMFSLLQASTIPRR

SEQ ID NO: 97952 - protein, 17 aa, Artificial Sequence
  Description of Artificial Sequence: Synthetic peptide
  Seed: MDPRMCSLMQGSTLPRR
MDPRMFSLLQASTKPRR

SEQ ID NO: 97953 - protein, 17 aa, Artificial Sequence
  Description of Artificial Sequence: Synthetic peptide
  Seed: MDPRMCSLMQGSTLPRR
MDPRMFSLLQASTLPRR

SEQ ID NO: 97954 - protein, 17 aa, Artificial Sequence
  Description of Artificial Sequence: Synthetic peptide
  Seed: MDPRMCSLMQGSTLPRR
MDPRMFSLLQASTMPRR

SEQ ID NO: 97955 - protein, 17 aa, Artificial Sequence
  Description of Artificial Sequence: Synthetic peptide
  Seed: MDPRMCSLMQGSTLPRR
MDPRMFSLLQASTNPRR

SEQ ID NO: 97956 - protein, 17 aa, Artificial Sequence
  Description of Artificial Sequence: Synthetic peptide
  Seed: MDPRMCSLMQGSTLPRR
MDPRMFSLLQASTPPRR

SEQ ID NO: 97957 - protein, 17 aa, Artificial Sequence
  Description of Artificial Sequence: Synthetic peptide
  Seed: MDPRMCSLMQGSTLPRR
MDPRMFSLLQASTQPRR

SEQ ID NO: 97958 - protein, 17 aa, Artificial Sequence
  Description of Artificial Sequence: Synthetic peptide
  Seed: MDPRMCSLMQGSTLPRR
MDPRMFSLLQASTRPRR

SEQ ID NO: 97959 - protein, 17 aa, Artificial Sequence
  Description of Artificial Sequence: Synthetic peptide
  Seed: MDPRMCSLMQGSTLPRR
MDPRMFSLLQASTSPRR

SEQ ID NO: 97960 - protein, 17 aa, Artificial Sequence
  Description of Artificial Sequence: Synthetic peptide
  Seed: MDPRMCSLMQGSTLPRR
MDPRMFSLLQASTTPRR

SEQ ID NO: 97961 - protein, 17 aa, Artificial Sequence
  Description of Artificial Sequence: Synthetic peptide
  Seed: MDPRMCSLMQGSTLPRR
MDPRMFSLLQASTVPRR

SEQ ID NO: 97962 - protein, 17 aa, Artificial Sequence
  Description of Artificial Sequence: Synthetic peptide
  Seed: MDPRMCSLMQGSTLPRR
MDPRMFSLLQASTWPRR

SEQ ID NO: 97963 - protein, 17 aa, Artificial Sequence
  Description of Artificial Sequence: Synthetic peptide
  Seed: MDPRMCSLMQGSTLPRR
MDPRMFSLLQASTYPRR

SEQ ID NO: 97964 - protein, 17 aa, Artificial Sequence
  Description of Artificial Sequence: Synthetic peptide
  Seed: MDPRMCSLMQGSTLPRR
MDPRMFSLLQCSTAPRR

SEQ ID NO: 97965 - protein, 17 aa, Artificial Sequence
  Description of Artificial Sequence: Synthetic peptide
  Seed: MDPRMCSLMQGSTLPRR
MDPRMFSLLQCSTIPRR

SEQ ID NO: 97966 - protein, 17 aa, Artificial Sequence
  Description of Artificial Sequence: Synthetic peptide
  Seed: MDPRMCSLMQGSTLPRR
MDPRMFSLLQCSTLPRR

SEQ ID NO: 97967 - protein, 17 aa, Artificial Sequence
  Description of Artificial Sequence: Synthetic peptide
  Seed: MDPRMCSLMQGSTLPRR
MDPRMFSLLQCSTVPRR

SEQ ID NO: 97968 - protein, 17 aa, Artificial Sequence
  Description of Artificial Sequence: Synthetic peptide
  Seed: MDPRMCSLMQGSTLPRR
MDPRMFSLLQFSTFPRR

SEQ ID NO: 97969 - protein, 17 aa, Artificial Sequence
  Description of Artificial Sequence: Synthetic peptide
  Seed: MDPRMCSLMQGSTLPRR
MDPRMFSLLQFSTIPRR

SEQ ID NO: 97970 - protein, 17 aa, Artificial Sequence
  Description of Artificial Sequence: Synthetic peptide
  Seed: MDPRMCSLMQGSTLPRR
MDPRMFSLLQFSTLPRR

SEQ ID NO: 97971 - protein, 17 aa, Artificial Sequence
  Description of Artificial Sequence: Synthetic peptide
  Seed: MDPRMCSLMQGSTLPRR
MDPRMFSLLQFSTMPRR

SEQ ID NO: 97972 - protein, 17 aa, Artificial Sequence
  Description of Artificial Sequence: Synthetic peptide
  Seed: MDPRMCSLMQGSTLPRR
MDPRMFSLLQFSTVPRR

SEQ ID NO: 97973 - protein, 17 aa, Artificial Sequence
  Description of Artificial Sequence: Synthetic peptide
  Seed: MDPRMCSLMQGSTLPRR
MDPRMFSLLQGSTAPRR

SEQ ID NO: 97974 - protein, 17 aa, Artificial Sequence
  Description of Artificial Sequence: Synthetic peptide
  Seed: MDPRMCSLMQGSTLPRR
MDPRMFSLLQGSTCPRR

SEQ ID NO: 97975 - protein, 17 aa, Artificial Sequence
  Description of Artificial Sequence: Synthetic peptide
  Seed: MDPRMCSLMQGSTLPRR
MDPRMFSLLQGSTFPRR

SEQ ID NO: 97976 - protein, 17 aa, Artificial Sequence
  Description of Artificial Sequence: Synthetic peptide
  Seed: MDPRMCSLMQGSTLPRR
MDPRMFSLLQGSTGPRR

SEQ ID NO: 97977 - protein, 17 aa, Artificial Sequence
  Description of Artificial Sequence: Synthetic peptide
  Seed: MDPRMCSLMQGSTLPRR
MDPRMFSLLQGSTHPRR

SEQ ID NO: 97978 - protein, 17 aa, Artificial Sequence
  Description of Artificial Sequence: Synthetic peptide
  Seed: MDPRMCSLMQGSTLPRR
MDPRMFSLLQGSTIPRR

SEQ ID NO: 97979 - protein, 17 aa, Artificial Sequence
  Description of Artificial Sequence: Synthetic peptide
  Seed: MDPRMCSLMQGSTLPRR
MDPRMFSLLQGSTLPRR

SEQ ID NO: 97980 - protein, 17 aa, Artificial Sequence
  Description of Artificial Sequence: Synthetic peptide
  Seed: MDPRMCSLMQGSTLPRR
MDPRMFSLLQGSTMPRR

SEQ ID NO: 97981 - protein, 17 aa, Artificial Sequence
  Description of Artificial Sequence: Synthetic peptide
  Seed: MDPRMCSLMQGSTLPRR
MDPRMFSLLQGSTNPRR

SEQ ID NO: 97982 - protein, 17 aa, Artificial Sequence
  Description of Artificial Sequence: Synthetic peptide
  Seed: MDPRMCSLMQGSTLPRR
MDPRMFSLLQGSTPPRR

SEQ ID NO: 97983 - protein, 17 aa, Artificial Sequence
  Description of Artificial Sequence: Synthetic peptide
  Seed: MDPRMCSLMQGSTLPRR
MDPRMFSLLQGSTQPRR

SEQ ID NO: 97984 - protein, 17 aa, Artificial Sequence
  Description of Artificial Sequence: Synthetic peptide
  Seed: MDPRMCSLMQGSTLPRR
MDPRMFSLLQGSTSPRR

SEQ ID NO: 97985 - protein, 17 aa, Artificial Sequence
  Description of Artificial Sequence: Synthetic peptide
  Seed: MDPRMCSLMQGSTLPRR
MDPRMFSLLQGSTTPRR

SEQ ID NO: 97986 - protein, 17 aa, Artificial Sequence
  Description of Artificial Sequence: Synthetic peptide
  Seed: MDPRMCSLMQGSTLPRR
MDPRMFSLLQGSTVPRR

SEQ ID NO: 97987 - protein, 17 aa, Artificial Sequence
  Description of Artificial Sequence: Synthetic peptide
  Seed: MDPRMCSLMQGSTLPRR
MDPRMFSLLQGSTWPRR

SEQ ID NO: 97988 - protein, 17 aa, Artificial Sequence
  Description of Artificial Sequence: Synthetic peptide
  Seed: MDPRMCSLMQGSTLPRR
MDPRMFSLLQGSTYPRR

SEQ ID NO: 97989 - protein, 17 aa, Artificial Sequence
  Description of Artificial Sequence: Synthetic peptide
  Seed: MDPRMCSLMQGSTLPRR
MDPRMFSLLQHSTIPRR

SEQ ID NO: 97990 - protein, 17 aa, Artificial Sequence
  Description of Artificial Sequence: Synthetic peptide
  Seed: MDPRMCSLMQGSTLPRR
MDPRMFSLLQHSTLPRR

SEQ ID NO: 97991 - protein, 17 aa, Artificial Sequence
  Description of Artificial Sequence: Synthetic peptide
  Seed: MDPRMCSLMQGSTLPRR
MDPRMFSLLQHSTVPRR

SEQ ID NO: 97992 - protein, 17 aa, Artificial Sequence
  Description of Artificial Sequence: Synthetic peptide
  Seed: MDPRMCSLMQGSTLPRR
MDPRMFSLLQISTAPRR

SEQ ID NO: 97993 - protein, 17 aa, Artificial Sequence
  Description of Artificial Sequence: Synthetic peptide
  Seed: MDPRMCSLMQGSTLPRR
MDPRMFSLLQISTDPRR

SEQ ID NO: 97994 - protein, 17 aa, Artificial Sequence
  Description of Artificial Sequence: Synthetic peptide
  Seed: MDPRMCSLMQGSTLPRR
MDPRMFSLLQISTEPRR

SEQ ID NO: 97995 - protein, 17 aa, Artificial Sequence
  Description of Artificial Sequence: Synthetic peptide
  Seed: MDPRMCSLMQGSTLPRR
MDPRMFSLLQISTGPRR

SEQ ID NO: 97996 - protein, 17 aa, Artificial Sequence
  Description of Artificial Sequence: Synthetic peptide
  Seed: MDPRMCSLMQGSTLPRR
MDPRMFSLLQISTHPRR

SEQ ID NO: 97997 - protein, 17 aa, Artificial Sequence
  Description of Artificial Sequence: Synthetic peptide
  Seed: MDPRMCSLMQGSTLPRR
MDPRMFSLLQISTIPRR

SEQ ID NO: 97998 - protein, 17 aa, Artificial Sequence
  Description of Artificial Sequence: Synthetic peptide
  Seed: MDPRMCSLMQGSTLPRR
MDPRMFSLLQISTLPRR

SEQ ID NO: 97999 - protein, 17 aa, Artificial Sequence
  Description of Artificial Sequence: Synthetic peptide
  Seed: MDPRMCSLMQGSTLPRR
MDPRMFSLLQISTMPRR

SEQ ID NO: 98000 - protein, 17 aa, Artificial Sequence
  Description of Artificial Sequence: Synthetic peptide
  Seed: MDPRMCSLMQGSTLPRR
MDPRMFSLLQISTNPRR

SEQ ID NO: 98001 - protein, 17 aa, Artificial Sequence
  Description of Artificial Sequence: Synthetic peptide
  Seed: MDPRMCSLMQGSTLPRR
MDPRMFSLLQISTPPRR

SEQ ID NO: 98002 - protein, 17 aa, Artificial Sequence
  Description of Artificial Sequence: Synthetic peptide
  Seed: MDPRMCSLMQGSTLPRR
MDPRMFSLLQISTQPRR

SEQ ID NO: 98003 - protein, 17 aa, Artificial Sequence
  Description of Artificial Sequence: Synthetic peptide
  Seed: MDPRMCSLMQGSTLPRR
MDPRMFSLLQISTSPRR

SEQ ID NO: 98004 - protein, 17 aa, Artificial Sequence
  Description of Artificial Sequence: Synthetic peptide
  Seed: MDPRMCSLMQGSTLPRR
MDPRMFSLLQISTTPRR

SEQ ID NO: 98005 - protein, 17 aa, Artificial Sequence
  Description of Artificial Sequence: Synthetic peptide
  Seed: MDPRMCSLMQGSTLPRR
MDPRMFSLLQISTVPRR

SEQ ID NO: 98006 - protein, 17 aa, Artificial Sequence
  Description of Artificial Sequence: Synthetic peptide
  Seed: MDPRMCSLMQGSTLPRR
MDPRMFSLLQLSTAPRR

SEQ ID NO: 98007 - protein, 17 aa, Artificial Sequence
  Description of Artificial Sequence: Synthetic peptide
  Seed: MDPRMCSLMQGSTLPRR
MDPRMFSLLQLSTFPRR

SEQ ID NO: 98008 - protein, 17 aa, Artificial Sequence
  Description of Artificial Sequence: Synthetic peptide
  Seed: MDPRMCSLMQGSTLPRR
MDPRMFSLLQLSTGPRR

SEQ ID NO: 98009 - protein, 17 aa, Artificial Sequence
  Description of Artificial Sequence: Synthetic peptide
  Seed: MDPRMCSLMQGSTLPRR
MDPRMFSLLQLSTHPRR

SEQ ID NO: 98010 - protein, 17 aa, Artificial Sequence
  Description of Artificial Sequence: Synthetic peptide
  Seed: MDPRMCSLMQGSTLPRR
MDPRMFSLLQLSTIPRR

SEQ ID NO: 98011 - protein, 17 aa, Artificial Sequence
  Description of Artificial Sequence: Synthetic peptide
  Seed: MDPRMCSLMQGSTLPRR
MDPRMFSLLQLSTLPRR

SEQ ID NO: 98012 - protein, 17 aa, Artificial Sequence
  Description of Artificial Sequence: Synthetic peptide
  Seed: MDPRMCSLMQGSTLPRR
MDPRMFSLLQLSTMPRR

SEQ ID NO: 98013 - protein, 17 aa, Artificial Sequence
  Description of Artificial Sequence: Synthetic peptide
  Seed: MDPRMCSLMQGSTLPRR
MDPRMFSLLQLSTNPRR

SEQ ID NO: 98014 - protein, 17 aa, Artificial Sequence
  Description of Artificial Sequence: Synthetic peptide
  Seed: MDPRMCSLMQGSTLPRR
MDPRMFSLLQLSTSPRR

SEQ ID NO: 98015 - protein, 17 aa, Artificial Sequence
  Description of Artificial Sequence: Synthetic peptide
  Seed: MDPRMCSLMQGSTLPRR
MDPRMFSLLQLSTTPRR

SEQ ID NO: 98016 - protein, 17 aa, Artificial Sequence
  Description of Artificial Sequence: Synthetic peptide
  Seed: MDPRMCSLMQGSTLPRR
MDPRMFSLLQLSTVPRR

SEQ ID NO: 98017 - protein, 17 aa, Artificial Sequence
  Description of Artificial Sequence: Synthetic peptide
  Seed: MDPRMCSLMQGSTLPRR
MDPRMFSLLQMSTAPRR

SEQ ID NO: 98018 - protein, 17 aa, Artificial Sequence
  Description of Artificial Sequence: Synthetic peptide
  Seed: MDPRMCSLMQGSTLPRR
MDPRMFSLLQMSTGPRR

SEQ ID NO: 98019 - protein, 17 aa, Artificial Sequence
  Description of Artificial Sequence: Synthetic peptide
  Seed: MDPRMCSLMQGSTLPRR
MDPRMFSLLQMSTHPRR

SEQ ID NO: 98020 - protein, 17 aa, Artificial Sequence
  Description of Artificial Sequence: Synthetic peptide
  Seed: MDPRMCSLMQGSTLPRR
MDPRMFSLLQMSTIPRR

SEQ ID NO: 98021 - protein, 17 aa, Artificial Sequence
  Description of Artificial Sequence: Synthetic peptide
  Seed: MDPRMCSLMQGSTLPRR
MDPRMFSLLQMSTLPRR

SEQ ID NO: 98022 - protein, 17 aa, Artificial Sequence
  Description of Artificial Sequence: Synthetic peptide
  Seed: MDPRMCSLMQGSTLPRR
MDPRMFSLLQMSTMPRR

SEQ ID NO: 98023 - protein, 17 aa, Artificial Sequence
  Description of Artificial Sequence: Synthetic peptide
  Seed: MDPRMCSLMQGSTLPRR
MDPRMFSLLQMSTNPRR

SEQ ID NO: 98024 - protein, 17 aa, Artificial Sequence
  Description of Artificial Sequence: Synthetic peptide
  Seed: MDPRMCSLMQGSTLPRR
MDPRMFSLLQMSTSPRR

SEQ ID NO: 98025 - protein, 17 aa, Artificial Sequence
  Description of Artificial Sequence: Synthetic peptide
  Seed: MDPRMCSLMQGSTLPRR
MDPRMFSLLQMSTTPRR

SEQ ID NO: 98026 - protein, 17 aa, Artificial Sequence
  Description of Artificial Sequence: Synthetic peptide
  Seed: MDPRMCSLMQGSTLPRR
MDPRMFSLLQMSTVPRR

SEQ ID NO: 98027 - protein, 17 aa, Artificial Sequence
  Description of Artificial Sequence: Synthetic peptide
  Seed: MDPRMCSLMQGSTLPRR
MDPRMFSLLQNSTAPRR

SEQ ID NO: 98028 - protein, 17 aa, Artificial Sequence
  Description of Artificial Sequence: Synthetic peptide
  Seed: MDPRMCSLMQGSTLPRR
MDPRMFSLLQNSTCPRR

SEQ ID NO: 98029 - protein, 17 aa, Artificial Sequence
  Description of Artificial Sequence: Synthetic peptide
  Seed: MDPRMCSLMQGSTLPRR
MDPRMFSLLQNSTFPRR

SEQ ID NO: 98030 - protein, 17 aa, Artificial Sequence
  Description of Artificial Sequence: Synthetic peptide
  Seed: MDPRMCSLMQGSTLPRR
MDPRMFSLLQNSTGPRR

SEQ ID NO: 98031 - protein, 17 aa, Artificial Sequence
  Description of Artificial Sequence: Synthetic peptide
  Seed: MDPRMCSLMQGSTLPRR
MDPRMFSLLQNSTHPRR

SEQ ID NO: 98032 - protein, 17 aa, Artificial Sequence
  Description of Artificial Sequence: Synthetic peptide
  Seed: MDPRMCSLMQGSTLPRR
MDPRMFSLLQNSTIPRR

SEQ ID NO: 98033 - protein, 17 aa, Artificial Sequence
  Description of Artificial Sequence: Synthetic peptide
  Seed: MDPRMCSLMQGSTLPRR
MDPRMFSLLQNSTLPRR

SEQ ID NO: 98034 - protein, 17 aa, Artificial Sequence
  Description of Artificial Sequence: Synthetic peptide
  Seed: MDPRMCSLMQGSTLPRR
MDPRMFSLLQNSTMPRR

SEQ ID NO: 98035 - protein, 17 aa, Artificial Sequence
  Description of Artificial Sequence: Synthetic peptide
  Seed: MDPRMCSLMQGSTLPRR
MDPRMFSLLQNSTNPRR

SEQ ID NO: 98036 - protein, 17 aa, Artificial Sequence
  Description of Artificial Sequence: Synthetic peptide
  Seed: MDPRMCSLMQGSTLPRR
MDPRMFSLLQNSTQPRR

SEQ ID NO: 98037 - protein, 17 aa, Artificial Sequence
  Description of Artificial Sequence: Synthetic peptide
  Seed: MDPRMCSLMQGSTLPRR
MDPRMFSLLQNSTSPRR

SEQ ID NO: 98038 - protein, 17 aa, Artificial Sequence
  Description of Artificial Sequence: Synthetic peptide
  Seed: MDPRMCSLMQGSTLPRR
MDPRMFSLLQNSTTPRR

SEQ ID NO: 98039 - protein, 17 aa, Artificial Sequence
  Description of Artificial Sequence: Synthetic peptide
  Seed: MDPRMCSLMQGSTLPRR
MDPRMFSLLQNSTVPRR

SEQ ID NO: 98040 - protein, 17 aa, Artificial Sequence
  Description of Artificial Sequence: Synthetic peptide
  Seed: MDPRMCSLMQGSTLPRR
MDPRMFSLLQPSTAPRR

SEQ ID NO: 98041 - protein, 17 aa, Artificial Sequence
  Description of Artificial Sequence: Synthetic peptide
  Seed: MDPRMCSLMQGSTLPRR
MDPRMFSLLQPSTCPRR

SEQ ID NO: 98042 - protein, 17 aa, Artificial Sequence
  Description of Artificial Sequence: Synthetic peptide
  Seed: MDPRMCSLMQGSTLPRR
MDPRMFSLLQPSTDPRR

SEQ ID NO: 98043 - protein, 17 aa, Artificial Sequence
  Description of Artificial Sequence: Synthetic peptide
  Seed: MDPRMCSLMQGSTLPRR
MDPRMFSLLQPSTEPRR

SEQ ID NO: 98044 - protein, 17 aa, Artificial Sequence
  Description of Artificial Sequence: Synthetic peptide
  Seed: MDPRMCSLMQGSTLPRR
MDPRMFSLLQPSTFPRR

SEQ ID NO: 98045 - protein, 17 aa, Artificial Sequence
  Description of Artificial Sequence: Synthetic peptide
  Seed: MDPRMCSLMQGSTLPRR
MDPRMFSLLQPSTGPRR

SEQ ID NO: 98046 - protein, 17 aa, Artificial Sequence
  Description of Artificial Sequence: Synthetic peptide
  Seed: MDPRMCSLMQGSTLPRR
MDPRMFSLLQPSTHPRR

SEQ ID NO: 98047 - protein, 17 aa, Artificial Sequence
  Description of Artificial Sequence: Synthetic peptide
  Seed: MDPRMCSLMQGSTLPRR
MDPRMFSLLQPSTIPRR

SEQ ID NO: 98048 - protein, 17 aa, Artificial Sequence
  Description of Artificial Sequence: Synthetic peptide
  Seed: MDPRMCSLMQGSTLPRR
MDPRMFSLLQPSTLPRR

SEQ ID NO: 98049 - protein, 17 aa, Artificial Sequence
  Description of Artificial Sequence: Synthetic peptide
  Seed: MDPRMCSLMQGSTLPRR
MDPRMFSLLQPSTMPRR

SEQ ID NO: 98050 - protein, 17 aa, Artificial Sequence
  Description of Artificial Sequence: Synthetic peptide
  Seed: MDPRMCSLMQGSTLPRR
MDPRMFSLLQPSTNPRR

SEQ ID NO: 98051 - protein, 17 aa, Artificial Sequence
  Description of Artificial Sequence: Synthetic peptide
  Seed: MDPRMCSLMQGSTLPRR
MDPRMFSLLQPSTPPRR

SEQ ID NO: 98052 - protein, 17 aa, Artificial Sequence
  Description of Artificial Sequence: Synthetic peptide
  Seed: MDPRMCSLMQGSTLPRR
MDPRMFSLLQPSTQPRR

SEQ ID NO: 98053 - protein, 17 aa, Artificial Sequence
  Description of Artificial Sequence: Synthetic peptide
  Seed: MDPRMCSLMQGSTLPRR
MDPRMFSLLQPSTSPRR

SEQ ID NO: 98054 - protein, 17 aa, Artificial Sequence
  Description of Artificial Sequence: Synthetic peptide
  Seed: MDPRMCSLMQGSTLPRR
MDPRMFSLLQPSTTPRR

SEQ ID NO: 98055 - protein, 17 aa, Artificial Sequence
  Description of Artificial Sequence: Synthetic peptide
  Seed: MDPRMCSLMQGSTLPRR
MDPRMFSLLQPSTVPRR

SEQ ID NO: 98056 - protein, 17 aa, Artificial Sequence
  Description of Artificial Sequence: Synthetic peptide
  Seed: MDPRMCSLMQGSTLPRR
MDPRMFSLLQPSTWPRR

SEQ ID NO: 98057 - protein, 17 aa, Artificial Sequence
  Description of Artificial Sequence: Synthetic peptide
  Seed: MDPRMCSLMQGSTLPRR
MDPRMFSLLQPSTYPRR

SEQ ID NO: 98058 - protein, 17 aa, Artificial Sequence
  Description of Artificial Sequence: Synthetic peptide
  Seed: MDPRMCSLMQGSTLPRR
MDPRMFSLLQQSTLPRR

SEQ ID NO: 98059 - protein, 17 aa, Artificial Sequence
  Description of Artificial Sequence: Synthetic peptide
  Seed: MDPRMCSLMQGSTLPRR
MDPRMFSLLQQSTVPRR

SEQ ID NO: 98060 - protein, 17 aa, Artificial Sequence
  Description of Artificial Sequence: Synthetic peptide
  Seed: MDPRMCSLMQGSTLPRR
MDPRMFSLLQSSTAPRR

SEQ ID NO: 98061 - protein, 17 aa, Artificial Sequence
  Description of Artificial Sequence: Synthetic peptide
  Seed: MDPRMCSLMQGSTLPRR
MDPRMFSLLQSSTCPRR

SEQ ID NO: 98062 - protein, 17 aa, Artificial Sequence
  Description of Artificial Sequence: Synthetic peptide
  Seed: MDPRMCSLMQGSTLPRR
MDPRMFSLLQSSTDPRR

SEQ ID NO: 98063 - protein, 17 aa, Artificial Sequence
  Description of Artificial Sequence: Synthetic peptide
  Seed: MDPRMCSLMQGSTLPRR
MDPRMFSLLQSSTEPRR

SEQ ID NO: 98064 - protein, 17 aa, Artificial Sequence
  Description of Artificial Sequence: Synthetic peptide
  Seed: MDPRMCSLMQGSTLPRR
MDPRMFSLLQSSTFPRR

SEQ ID NO: 98065 - protein, 17 aa, Artificial Sequence
  Description of Artificial Sequence: Synthetic peptide
  Seed: MDPRMCSLMQGSTLPRR
MDPRMFSLLQSSTGPRR

SEQ ID NO: 98066 - protein, 17 aa, Artificial Sequence
  Description of Artificial Sequence: Synthetic peptide
  Seed: MDPRMCSLMQGSTLPRR
MDPRMFSLLQSSTHPRR

SEQ ID NO: 98067 - protein, 17 aa, Artificial Sequence
  Description of Artificial Sequence: Synthetic peptide
  Seed: MDPRMCSLMQGSTLPRR
MDPRMFSLLQSSTIPRR

SEQ ID NO: 98068 - protein, 17 aa, Artificial Sequence
  Description of Artificial Sequence: Synthetic peptide
  Seed: MDPRMCSLMQGSTLPRR
MDPRMFSLLQSSTLPRR

SEQ ID NO: 98069 - protein, 17 aa, Artificial Sequence
  Description of Artificial Sequence: Synthetic peptide
  Seed: MDPRMCSLMQGSTLPRR
MDPRMFSLLQSSTMPRR

SEQ ID NO: 98070 - protein, 17 aa, Artificial Sequence
  Description of Artificial Sequence: Synthetic peptide
  Seed: MDPRMCSLMQGSTLPRR
MDPRMFSLLQSSTNPRR

SEQ ID NO: 98071 - protein, 17 aa, Artificial Sequence
  Description of Artificial Sequence: Synthetic peptide
  Seed: MDPRMCSLMQGSTLPRR
MDPRMFSLLQSSTPPRR

SEQ ID NO: 98072 - protein, 17 aa, Artificial Sequence
  Description of Artificial Sequence: Synthetic peptide
  Seed: MDPRMCSLMQGSTLPRR
MDPRMFSLLQSSTQPRR

SEQ ID NO: 98073 - protein, 17 aa, Artificial Sequence
  Description of Artificial Sequence: Synthetic peptide
  Seed: MDPRMCSLMQGSTLPRR
MDPRMFSLLQSSTSPRR

SEQ ID NO: 98074 - protein, 17 aa, Artificial Sequence
  Description of Artificial Sequence: Synthetic peptide
  Seed: MDPRMCSLMQGSTLPRR
MDPRMFSLLQSSTTPRR

SEQ ID NO: 98075 - protein, 17 aa, Artificial Sequence
  Description of Artificial Sequence: Synthetic peptide
  Seed: MDPRMCSLMQGSTLPRR
MDPRMFSLLQSSTVPRR

SEQ ID NO: 98076 - protein, 17 aa, Artificial Sequence
  Description of Artificial Sequence: Synthetic peptide
  Seed: MDPRMCSLMQGSTLPRR
MDPRMFSLLQSSTWPRR

SEQ ID NO: 98077 - protein, 17 aa, Artificial Sequence
  Description of Artificial Sequence: Synthetic peptide
  Seed: MDPRMCSLMQGSTLPRR
MDPRMFSLLQSSTYPRR

SEQ ID NO: 98078 - protein, 17 aa, Artificial Sequence
  Description of Artificial Sequence: Synthetic peptide
  Seed: MDPRMCSLMQGSTLPRR
MDPRMFSLLQTSTAPRR

SEQ ID NO: 98079 - protein, 17 aa, Artificial Sequence
  Description of Artificial Sequence: Synthetic peptide
  Seed: MDPRMCSLMQGSTLPRR
MDPRMFSLLQTSTCPRR

SEQ ID NO: 98080 - protein, 17 aa, Artificial Sequence
  Description of Artificial Sequence: Synthetic peptide
  Seed: MDPRMCSLMQGSTLPRR
MDPRMFSLLQTSTDPRR

SEQ ID NO: 98081 - protein, 17 aa, Artificial Sequence
  Description of Artificial Sequence: Synthetic peptide
  Seed: MDPRMCSLMQGSTLPRR
MDPRMFSLLQTSTEPRR

SEQ ID NO: 98082 - protein, 17 aa, Artificial Sequence
  Description of Artificial Sequence: Synthetic peptide
  Seed: MDPRMCSLMQGSTLPRR
MDPRMFSLLQTSTFPRR

SEQ ID NO: 98083 - protein, 17 aa, Artificial Sequence
  Description of Artificial Sequence: Synthetic peptide
  Seed: MDPRMCSLMQGSTLPRR
MDPRMFSLLQTSTGPRR

SEQ ID NO: 98084 - protein, 17 aa, Artificial Sequence
  Description of Artificial Sequence: Synthetic peptide
  Seed: MDPRMCSLMQGSTLPRR
MDPRMFSLLQTSTHPRR

SEQ ID NO: 98085 - protein, 17 aa, Artificial Sequence
  Description of Artificial Sequence: Synthetic peptide
  Seed: MDPRMCSLMQGSTLPRR
MDPRMFSLLQTSTIPRR

SEQ ID NO: 98086 - protein, 17 aa, Artificial Sequence
  Description of Artificial Sequence: Synthetic peptide
  Seed: MDPRMCSLMQGSTLPRR
MDPRMFSLLQTSTLPRR

SEQ ID NO: 98087 - protein, 17 aa, Artificial Sequence
  Description of Artificial Sequence: Synthetic peptide
  Seed: MDPRMCSLMQGSTLPRR
MDPRMFSLLQTSTMPRR

SEQ ID NO: 98088 - protein, 17 aa, Artificial Sequence
  Description of Artificial Sequence: Synthetic peptide
  Seed: MDPRMCSLMQGSTLPRR
MDPRMFSLLQTSTNPRR

SEQ ID NO: 98089 - protein, 17 aa, Artificial Sequence
  Description of Artificial Sequence: Synthetic peptide
  Seed: MDPRMCSLMQGSTLPRR
MDPRMFSLLQTSTPPRR

SEQ ID NO: 98090 - protein, 17 aa, Artificial Sequence
  Description of Artificial Sequence: Synthetic peptide
  Seed: MDPRMCSLMQGSTLPRR
MDPRMFSLLQTSTQPRR

SEQ ID NO: 98091 - protein, 17 aa, Artificial Sequence
  Description of Artificial Sequence: Synthetic peptide
  Seed: MDPRMCSLMQGSTLPRR
MDPRMFSLLQTSTSPRR

SEQ ID NO: 98092 - protein, 17 aa, Artificial Sequence
  Description of Artificial Sequence: Synthetic peptide
  Seed: MDPRMCSLMQGSTLPRR
MDPRMFSLLQTSTTPRR

SEQ ID NO: 98093 - protein, 17 aa, Artificial Sequence
  Description of Artificial Sequence: Synthetic peptide
  Seed: MDPRMCSLMQGSTLPRR
MDPRMFSLLQTSTVPRR

SEQ ID NO: 98094 - protein, 17 aa, Artificial Sequence
  Description of Artificial Sequence: Synthetic peptide
  Seed: MDPRMCSLMQGSTLPRR
MDPRMFSLLQVSTAPRR

SEQ ID NO: 98095 - protein, 17 aa, Artificial Sequence
  Description of Artificial Sequence: Synthetic peptide
  Seed: MDPRMCSLMQGSTLPRR
MDPRMFSLLQVSTCPRR

SEQ ID NO: 98096 - protein, 17 aa, Artificial Sequence
  Description of Artificial Sequence: Synthetic peptide
  Seed: MDPRMCSLMQGSTLPRR
MDPRMFSLLQVSTDPRR

SEQ ID NO: 98097 - protein, 17 aa, Artificial Sequence
  Description of Artificial Sequence: Synthetic peptide
  Seed: MDPRMCSLMQGSTLPRR
MDPRMFSLLQVSTEPRR

SEQ ID NO: 98098 - protein, 17 aa, Artificial Sequence
  Description of Artificial Sequence: Synthetic peptide
  Seed: MDPRMCSLMQGSTLPRR
MDPRMFSLLQVSTGPRR

SEQ ID NO: 98099 - protein, 17 aa, Artificial Sequence
  Description of Artificial Sequence: Synthetic peptide
  Seed: MDPRMCSLMQGSTLPRR
MDPRMFSLLQVSTHPRR

SEQ ID NO: 98100 - protein, 17 aa, Artificial Sequence
  Description of Artificial Sequence: Synthetic peptide
  Seed: MDPRMCSLMQGSTLPRR
MDPRMFSLLQVSTIPRR

SEQ ID NO: 98101 - protein, 17 aa, Artificial Sequence
  Description of Artificial Sequence: Synthetic peptide
  Seed: MDPRMCSLMQGSTLPRR
MDPRMFSLLQVSTLPRR

SEQ ID NO: 98102 - protein, 17 aa, Artificial Sequence
  Description of Artificial Sequence: Synthetic peptide
  Seed: MDPRMCSLMQGSTLPRR
MDPRMFSLLQVSTMPRR

SEQ ID NO: 98103 - protein, 17 aa, Artificial Sequence
  Description of Artificial Sequence: Synthetic peptide
  Seed: MDPRMCSLMQGSTLPRR
MDPRMFSLLQVSTNPRR

SEQ ID NO: 98104 - protein, 17 aa, Artificial Sequence
  Description of Artificial Sequence: Synthetic peptide
  Seed: MDPRMCSLMQGSTLPRR
MDPRMFSLLQVSTPPRR

SEQ ID NO: 98105 - protein, 17 aa, Artificial Sequence
  Description of Artificial Sequence: Synthetic peptide
  Seed: MDPRMCSLMQGSTLPRR
MDPRMFSLLQVSTQPRR

SEQ ID NO: 98106 - protein, 17 aa, Artificial Sequence
  Description of Artificial Sequence: Synthetic peptide
  Seed: MDPRMCSLMQGSTLPRR
MDPRMFSLLQVSTSPRR

SEQ ID NO: 98107 - protein, 17 aa, Artificial Sequence
  Description of Artificial Sequence: Synthetic peptide
  Seed: MDPRMCSLMQGSTLPRR
MDPRMFSLLQVSTTPRR

SEQ ID NO: 98108 - protein, 17 aa, Artificial Sequence
  Description of Artificial Sequence: Synthetic peptide
  Seed: MDPRMCSLMQGSTLPRR
MDPRMFSLLQVSTVPRR

SEQ ID NO: 98109 - protein, 17 aa, Artificial Sequence
  Description of Artificial Sequence: Synthetic peptide
  Seed: MDPRMCSLMQGSTLPRR
MDPRMFSLMQASTAPRR

SEQ ID NO: 98110 - protein, 17 aa, Artificial Sequence
  Description of Artificial Sequence: Synthetic peptide
  Seed: MDPRMCSLMQGSTLPRR
MDPRMFSLMQASTCPRR

SEQ ID NO: 98111 - protein, 17 aa, Artificial Sequence
  Description of Artificial Sequence: Synthetic peptide
  Seed: MDPRMCSLMQGSTLPRR
MDPRMFSLMQASTDPRR

SEQ ID NO: 98112 - protein, 17 aa, Artificial Sequence
  Description of Artificial Sequence: Synthetic peptide
  Seed: MDPRMCSLMQGSTLPRR
MDPRMFSLMQASTEPRR

SEQ ID NO: 98113 - protein, 17 aa, Artificial Sequence
  Description of Artificial Sequence: Synthetic peptide
  Seed: MDPRMCSLMQGSTLPRR
MDPRMFSLMQASTFPRR

SEQ ID NO: 98114 - protein, 17 aa, Artificial Sequence
  Description of Artificial Sequence: Synthetic peptide
  Seed: MDPRMCSLMQGSTLPRR
MDPRMFSLMQASTGPRR

SEQ ID NO: 98115 - protein, 17 aa, Artificial Sequence
  Description of Artificial Sequence: Synthetic peptide
  Seed: MDPRMCSLMQGSTLPRR
MDPRMFSLMQASTHPRR

SEQ ID NO: 98116 - protein, 17 aa, Artificial Sequence
  Description of Artificial Sequence: Synthetic peptide
  Seed: MDPRMCSLMQGSTLPRR
MDPRMFSLMQASTIPRR

SEQ ID NO: 98117 - protein, 17 aa, Artificial Sequence
  Description of Artificial Sequence: Synthetic peptide
  Seed: MDPRMCSLMQGSTLPRR
MDPRMFSLMQASTKPRR

SEQ ID NO: 98118 - protein, 17 aa, Artificial Sequence
  Description of Artificial Sequence: Synthetic peptide
  Seed: MDPRMCSLMQGSTLPRR
MDPRMFSLMQASTLPRR

SEQ ID NO: 98119 - protein, 17 aa, Artificial Sequence
  Description of Artificial Sequence: Synthetic peptide
  Seed: MDPRMCSLMQGSTLPRR
MDPRMFSLMQASTMPRR

SEQ ID NO: 98120 - protein, 17 aa, Artificial Sequence
  Description of Artificial Sequence: Synthetic peptide
  Seed: MDPRMCSLMQGSTLPRR
MDPRMFSLMQASTNPRR

SEQ ID NO: 98121 - protein, 17 aa, Artificial Sequence
  Description of Artificial Sequence: Synthetic peptide
  Seed: MDPRMCSLMQGSTLPRR
MDPRMFSLMQASTPPRR

SEQ ID NO: 98122 - protein, 17 aa, Artificial Sequence
  Description of Artificial Sequence: Synthetic peptide
  Seed: MDPRMCSLMQGSTLPRR
MDPRMFSLMQASTQPRR

SEQ ID NO: 98123 - protein, 17 aa, Artificial Sequence
  Description of Artificial Sequence: Synthetic peptide
  Seed: MDPRMCSLMQGSTLPRR
MDPRMFSLMQASTRPRR

SEQ ID NO: 98124 - protein, 17 aa, Artificial Sequence
  Description of Artificial Sequence: Synthetic peptide
  Seed: MDPRMCSLMQGSTLPRR
MDPRMFSLMQASTSPRR

SEQ ID NO: 98125 - protein, 17 aa, Artificial Sequence
  Description of Artificial Sequence: Synthetic peptide
  Seed: MDPRMCSLMQGSTLPRR
MDPRMFSLMQASTTPRR

SEQ ID NO: 98126 - protein, 17 aa, Artificial Sequence
  Description of Artificial Sequence: Synthetic peptide
  Seed: MDPRMCSLMQGSTLPRR
MDPRMFSLMQASTVPRR

SEQ ID NO: 98127 - protein, 17 aa, Artificial Sequence
  Description of Artificial Sequence: Synthetic peptide
  Seed: MDPRMCSLMQGSTLPRR
MDPRMFSLMQASTWPRR

SEQ ID NO: 98128 - protein, 17 aa, Artificial Sequence
  Description of Artificial Sequence: Synthetic peptide
  Seed: MDPRMCSLMQGSTLPRR
MDPRMFSLMQASTYPRR

SEQ ID NO: 98129 - protein, 17 aa, Artificial Sequence
  Description of Artificial Sequence: Synthetic peptide
  Seed: MDPRMCSLMQGSTLPRR
MDPRMFSLMQCSTAPRR

SEQ ID NO: 98130 - protein, 17 aa, Artificial Sequence
  Description of Artificial Sequence: Synthetic peptide
  Seed: MDPRMCSLMQGSTLPRR
MDPRMFSLMQCSTIPRR

SEQ ID NO: 98131 - protein, 17 aa, Artificial Sequence
  Description of Artificial Sequence: Synthetic peptide
  Seed: MDPRMCSLMQGSTLPRR
MDPRMFSLMQCSTLPRR

SEQ ID NO: 98132 - protein, 17 aa, Artificial Sequence
  Description of Artificial Sequence: Synthetic peptide
  Seed: MDPRMCSLMQGSTLPRR
MDPRMFSLMQCSTSPRR

SEQ ID NO: 98133 - protein, 17 aa, Artificial Sequence
  Description of Artificial Sequence: Synthetic peptide
  Seed: MDPRMCSLMQGSTLPRR
MDPRMFSLMQCSTVPRR

SEQ ID NO: 98134 - protein, 17 aa, Artificial Sequence
  Description of Artificial Sequence: Synthetic peptide
  Seed: MDPRMCSLMQGSTLPRR
MDPRMFSLMQESTAPRR

SEQ ID NO: 98135 - protein, 17 aa, Artificial Sequence
  Description of Artificial Sequence: Synthetic peptide
  Seed: MDPRMCSLMQGSTLPRR
MDPRMFSLMQFSTAPRR

SEQ ID NO: 98136 - protein, 17 aa, Artificial Sequence
  Description of Artificial Sequence: Synthetic peptide
  Seed: MDPRMCSLMQGSTLPRR
MDPRMFSLMQFSTIPRR

SEQ ID NO: 98137 - protein, 17 aa, Artificial Sequence
  Description of Artificial Sequence: Synthetic peptide
  Seed: MDPRMCSLMQGSTLPRR
MDPRMFSLMQFSTLPRR

SEQ ID NO: 98138 - protein, 17 aa, Artificial Sequence
  Description of Artificial Sequence: Synthetic peptide
  Seed: MDPRMCSLMQGSTLPRR
MDPRMFSLMQFSTVPRR

SEQ ID NO: 98139 - protein, 17 aa, Artificial Sequence
  Description of Artificial Sequence: Synthetic peptide
  Seed: MDPRMCSLMQGSTLPRR
MDPRMFSLMQGSTAPRR

SEQ ID NO: 98140 - protein, 17 aa, Artificial Sequence
  Description of Artificial Sequence: Synthetic peptide
  Seed: MDPRMCSLMQGSTLPRR
MDPRMFSLMQGSTCPRR

SEQ ID NO: 98141 - protein, 17 aa, Artificial Sequence
  Description of Artificial Sequence: Synthetic peptide
  Seed: MDPRMCSLMQGSTLPRR
MDPRMFSLMQGSTFPRR

SEQ ID NO: 98142 - protein, 17 aa, Artificial Sequence
  Description of Artificial Sequence: Synthetic peptide
  Seed: MDPRMCSLMQGSTLPRR
MDPRMFSLMQGSTGPRR

SEQ ID NO: 98143 - protein, 17 aa, Artificial Sequence
  Description of Artificial Sequence: Synthetic peptide
  Seed: MDPRMCSLMQGSTLPRR
MDPRMFSLMQGSTHPRR

SEQ ID NO: 98144 - protein, 17 aa, Artificial Sequence
  Description of Artificial Sequence: Synthetic peptide
  Seed: MDPRMCSLMQGSTLPRR
MDPRMFSLMQGSTIPRR

SEQ ID NO: 98145 - protein, 17 aa, Artificial Sequence
  Description of Artificial Sequence: Synthetic peptide
  Seed: MDPRMCSLMQGSTLPRR
MDPRMFSLMQGSTLPRR

SEQ ID NO: 98146 - protein, 17 aa, Artificial Sequence
  Description of Artificial Sequence: Synthetic peptide
  Seed: MDPRMCSLMQGSTLPRR
MDPRMFSLMQGSTMPRR

SEQ ID NO: 98147 - protein, 17 aa, Artificial Sequence
  Description of Artificial Sequence: Synthetic peptide
  Seed: MDPRMCSLMQGSTLPRR
MDPRMFSLMQGSTNPRR

SEQ ID NO: 98148 - protein, 17 aa, Artificial Sequence
  Description of Artificial Sequence: Synthetic peptide
  Seed: MDPRMCSLMQGSTLPRR
MDPRMFSLMQGSTPPRR

SEQ ID NO: 98149 - protein, 17 aa, Artificial Sequence
  Description of Artificial Sequence: Synthetic peptide
  Seed: MDPRMCSLMQGSTLPRR
MDPRMFSLMQGSTQPRR

SEQ ID NO: 98150 - protein, 17 aa, Artificial Sequence
  Description of Artificial Sequence: Synthetic peptide
  Seed: MDPRMCSLMQGSTLPRR
MDPRMFSLMQGSTSPRR

SEQ ID NO: 98151 - protein, 17 aa, Artificial Sequence
  Description of Artificial Sequence: Synthetic peptide
  Seed: MDPRMCSLMQGSTLPRR
MDPRMFSLMQGSTTPRR

SEQ ID NO: 98152 - protein, 17 aa, Artificial Sequence
  Description of Artificial Sequence: Synthetic peptide
  Seed: MDPRMCSLMQGSTLPRR
MDPRMFSLMQGSTVPRR

SEQ ID NO: 98153 - protein, 17 aa, Artificial Sequence
  Description of Artificial Sequence: Synthetic peptide
  Seed: MDPRMCSLMQGSTLPRR
MDPRMFSLMQGSTWPRR

SEQ ID NO: 98154 - protein, 17 aa, Artificial Sequence
  Description of Artificial Sequence: Synthetic peptide
  Seed: MDPRMCSLMQGSTLPRR
MDPRMFSLMQGSTYPRR

SEQ ID NO: 98155 - protein, 17 aa, Artificial Sequence
  Description of Artificial Sequence: Synthetic peptide
  Seed: MDPRMCSLMQGSTLPRR
MDPRMFSLMQHSTAPRR

SEQ ID NO: 98156 - protein, 17 aa, Artificial Sequence
  Description of Artificial Sequence: Synthetic peptide
  Seed: MDPRMCSLMQGSTLPRR
MDPRMFSLMQHSTIPRR

SEQ ID NO: 98157 - protein, 17 aa, Artificial Sequence
  Description of Artificial Sequence: Synthetic peptide
  Seed: MDPRMCSLMQGSTLPRR
MDPRMFSLMQHSTLPRR

SEQ ID NO: 98158 - protein, 17 aa, Artificial Sequence
  Description of Artificial Sequence: Synthetic peptide
  Seed: MDPRMCSLMQGSTLPRR
MDPRMFSLMQHSTVPRR

SEQ ID NO: 98159 - protein, 17 aa, Artificial Sequence
  Description of Artificial Sequence: Synthetic peptide
  Seed: MDPRMCSLMQGSTLPRR
MDPRMFSLMQISTAPRR

SEQ ID NO: 98160 - protein, 17 aa, Artificial Sequence
  Description of Artificial Sequence: Synthetic peptide
  Seed: MDPRMCSLMQGSTLPRR
MDPRMFSLMQISTCPRR

SEQ ID NO: 98161 - protein, 17 aa, Artificial Sequence
  Description of Artificial Sequence: Synthetic peptide
  Seed: MDPRMCSLMQGSTLPRR
MDPRMFSLMQISTDPRR

SEQ ID NO: 98162 - protein, 17 aa, Artificial Sequence
  Description of Artificial Sequence: Synthetic peptide
  Seed: MDPRMCSLMQGSTLPRR
MDPRMFSLMQISTEPRR

SEQ ID NO: 98163 - protein, 17 aa, Artificial Sequence
  Description of Artificial Sequence: Synthetic peptide
  Seed: MDPRMCSLMQGSTLPRR
MDPRMFSLMQISTGPRR

SEQ ID NO: 98164 - protein, 17 aa, Artificial Sequence
  Description of Artificial Sequence: Synthetic peptide
  Seed: MDPRMCSLMQGSTLPRR
MDPRMFSLMQISTHPRR

SEQ ID NO: 98165 - protein, 17 aa, Artificial Sequence
  Description of Artificial Sequence: Synthetic peptide
  Seed: MDPRMCSLMQGSTLPRR
MDPRMFSLMQISTIPRR

SEQ ID NO: 98166 - protein, 17 aa, Artificial Sequence
  Description of Artificial Sequence: Synthetic peptide
  Seed: MDPRMCSLMQGSTLPRR
MDPRMFSLMQISTLPRR

SEQ ID NO: 98167 - protein, 17 aa, Artificial Sequence
  Description of Artificial Sequence: Synthetic peptide
  Seed: MDPRMCSLMQGSTLPRR
MDPRMFSLMQISTMPRR

SEQ ID NO: 98168 - protein, 17 aa, Artificial Sequence
  Description of Artificial Sequence: Synthetic peptide
  Seed: MDPRMCSLMQGSTLPRR
MDPRMFSLMQISTNPRR

SEQ ID NO: 98169 - protein, 17 aa, Artificial Sequence
  Description of Artificial Sequence: Synthetic peptide
  Seed: MDPRMCSLMQGSTLPRR
MDPRMFSLMQISTPPRR

SEQ ID NO: 98170 - protein, 17 aa, Artificial Sequence
  Description of Artificial Sequence: Synthetic peptide
  Seed: MDPRMCSLMQGSTLPRR
MDPRMFSLMQISTQPRR

SEQ ID NO: 98171 - protein, 17 aa, Artificial Sequence
  Description of Artificial Sequence: Synthetic peptide
  Seed: MDPRMCSLMQGSTLPRR
MDPRMFSLMQISTSPRR

SEQ ID NO: 98172 - protein, 17 aa, Artificial Sequence
  Description of Artificial Sequence: Synthetic peptide
  Seed: MDPRMCSLMQGSTLPRR
MDPRMFSLMQISTTPRR

SEQ ID NO: 98173 - protein, 17 aa, Artificial Sequence
  Description of Artificial Sequence: Synthetic peptide
  Seed: MDPRMCSLMQGSTLPRR
MDPRMFSLMQISTVPRR

SEQ ID NO: 98174 - protein, 17 aa, Artificial Sequence
  Description of Artificial Sequence: Synthetic peptide
  Seed: MDPRMCSLMQGSTLPRR
MDPRMFSLMQLSTAPRR

SEQ ID NO: 98175 - protein, 17 aa, Artificial Sequence
  Description of Artificial Sequence: Synthetic peptide
  Seed: MDPRMCSLMQGSTLPRR
MDPRMFSLMQLSTGPRR

SEQ ID NO: 98176 - protein, 17 aa, Artificial Sequence
  Description of Artificial Sequence: Synthetic peptide
  Seed: MDPRMCSLMQGSTLPRR
MDPRMFSLMQLSTHPRR

SEQ ID NO: 98177 - protein, 17 aa, Artificial Sequence
  Description of Artificial Sequence: Synthetic peptide
  Seed: MDPRMCSLMQGSTLPRR
MDPRMFSLMQLSTIPRR

SEQ ID NO: 98178 - protein, 17 aa, Artificial Sequence
  Description of Artificial Sequence: Synthetic peptide
  Seed: MDPRMCSLMQGSTLPRR
MDPRMFSLMQLSTLPRR

SEQ ID NO: 98179 - protein, 17 aa, Artificial Sequence
  Description of Artificial Sequence: Synthetic peptide
  Seed: MDPRMCSLMQGSTLPRR
MDPRMFSLMQLSTMPRR

SEQ ID NO: 98180 - protein, 17 aa, Artificial Sequence
  Description of Artificial Sequence: Synthetic peptide
  Seed: MDPRMCSLMQGSTLPRR
MDPRMFSLMQLSTNPRR

SEQ ID NO: 98181 - protein, 17 aa, Artificial Sequence
  Description of Artificial Sequence: Synthetic peptide
  Seed: MDPRMCSLMQGSTLPRR
MDPRMFSLMQLSTSPRR

SEQ ID NO: 98182 - protein, 17 aa, Artificial Sequence
  Description of Artificial Sequence: Synthetic peptide
  Seed: MDPRMCSLMQGSTLPRR
MDPRMFSLMQLSTTPRR

SEQ ID NO: 98183 - protein, 17 aa, Artificial Sequence
  Description of Artificial Sequence: Synthetic peptide
  Seed: MDPRMCSLMQGSTLPRR
MDPRMFSLMQLSTVPRR

SEQ ID NO: 98184 - protein, 17 aa, Artificial Sequence
  Description of Artificial Sequence: Synthetic peptide
  Seed: MDPRMCSLMQGSTLPRR
MDPRMFSLMQMSTAPRR

SEQ ID NO: 98185 - protein, 17 aa, Artificial Sequence
  Description of Artificial Sequence: Synthetic peptide
  Seed: MDPRMCSLMQGSTLPRR
MDPRMFSLMQMSTGPRR

SEQ ID NO: 98186 - protein, 17 aa, Artificial Sequence
  Description of Artificial Sequence: Synthetic peptide
  Seed: MDPRMCSLMQGSTLPRR
MDPRMFSLMQMSTHPRR

SEQ ID NO: 98187 - protein, 17 aa, Artificial Sequence
  Description of Artificial Sequence: Synthetic peptide
  Seed: MDPRMCSLMQGSTLPRR
MDPRMFSLMQMSTIPRR

SEQ ID NO: 98188 - protein, 17 aa, Artificial Sequence
  Description of Artificial Sequence: Synthetic peptide
  Seed: MDPRMCSLMQGSTLPRR
MDPRMFSLMQMSTLPRR

SEQ ID NO: 98189 - protein, 17 aa, Artificial Sequence
  Description of Artificial Sequence: Synthetic peptide
  Seed: MDPRMCSLMQGSTLPRR
MDPRMFSLMQMSTMPRR

SEQ ID NO: 98190 - protein, 17 aa, Artificial Sequence
  Description of Artificial Sequence: Synthetic peptide
  Seed: MDPRMCSLMQGSTLPRR
MDPRMFSLMQMSTNPRR

SEQ ID NO: 98191 - protein, 17 aa, Artificial Sequence
  Description of Artificial Sequence: Synthetic peptide
  Seed: MDPRMCSLMQGSTLPRR
MDPRMFSLMQMSTQPRR

SEQ ID NO: 98192 - protein, 17 aa, Artificial Sequence
  Description of Artificial Sequence: Synthetic peptide
  Seed: MDPRMCSLMQGSTLPRR
MDPRMFSLMQMSTSPRR

SEQ ID NO: 98193 - protein, 17 aa, Artificial Sequence
  Description of Artificial Sequence: Synthetic peptide
  Seed: MDPRMCSLMQGSTLPRR
MDPRMFSLMQMSTTPRR

SEQ ID NO: 98194 - protein, 17 aa, Artificial Sequence
  Description of Artificial Sequence: Synthetic peptide
  Seed: MDPRMCSLMQGSTLPRR
MDPRMFSLMQMSTVPRR

SEQ ID NO: 98195 - protein, 17 aa, Artificial Sequence
  Description of Artificial Sequence: Synthetic peptide
  Seed: MDPRMCSLMQGSTLPRR
MDPRMFSLMQNSTAPRR

SEQ ID NO: 98196 - protein, 17 aa, Artificial Sequence
  Description of Artificial Sequence: Synthetic peptide
  Seed: MDPRMCSLMQGSTLPRR
MDPRMFSLMQNSTCPRR

SEQ ID NO: 98197 - protein, 17 aa, Artificial Sequence
  Description of Artificial Sequence: Synthetic peptide
  Seed: MDPRMCSLMQGSTLPRR
MDPRMFSLMQNSTFPRR

SEQ ID NO: 98198 - protein, 17 aa, Artificial Sequence
  Description of Artificial Sequence: Synthetic peptide
  Seed: MDPRMCSLMQGSTLPRR
MDPRMFSLMQNSTGPRR

SEQ ID NO: 98199 - protein, 17 aa, Artificial Sequence
  Description of Artificial Sequence: Synthetic peptide
  Seed: MDPRMCSLMQGSTLPRR
MDPRMFSLMQNSTHPRR

SEQ ID NO: 98200 - protein, 17 aa, Artificial Sequence
  Description of Artificial Sequence: Synthetic peptide
  Seed: MDPRMCSLMQGSTLPRR
MDPRMFSLMQNSTIPRR

SEQ ID NO: 98201 - protein, 17 aa, Artificial Sequence
  Description of Artificial Sequence: Synthetic peptide
  Seed: MDPRMCSLMQGSTLPRR
MDPRMFSLMQNSTLPRR

SEQ ID NO: 98202 - protein, 17 aa, Artificial Sequence
  Description of Artificial Sequence: Synthetic peptide
  Seed: MDPRMCSLMQGSTLPRR
MDPRMFSLMQNSTMPRR

SEQ ID NO: 98203 - protein, 17 aa, Artificial Sequence
  Description of Artificial Sequence: Synthetic peptide
  Seed: MDPRMCSLMQGSTLPRR
MDPRMFSLMQNSTNPRR

SEQ ID NO: 98204 - protein, 17 aa, Artificial Sequence
  Description of Artificial Sequence: Synthetic peptide
  Seed: MDPRMCSLMQGSTLPRR
MDPRMFSLMQNSTQPRR

SEQ ID NO: 98205 - protein, 17 aa, Artificial Sequence
  Description of Artificial Sequence: Synthetic peptide
  Seed: MDPRMCSLMQGSTLPRR
MDPRMFSLMQNSTSPRR

SEQ ID NO: 98206 - protein, 17 aa, Artificial Sequence
  Description of Artificial Sequence: Synthetic peptide
  Seed: MDPRMCSLMQGSTLPRR
MDPRMFSLMQNSTTPRR

SEQ ID NO: 98207 - protein, 17 aa, Artificial Sequence
  Description of Artificial Sequence: Synthetic peptide
  Seed: MDPRMCSLMQGSTLPRR
MDPRMFSLMQNSTVPRR

SEQ ID NO: 98208 - protein, 17 aa, Artificial Sequence
  Description of Artificial Sequence: Synthetic peptide
  Seed: MDPRMCSLMQGSTLPRR
MDPRMFSLMQPSTAPRR

SEQ ID NO: 98209 - protein, 17 aa, Artificial Sequence
  Description of Artificial Sequence: Synthetic peptide
  Seed: MDPRMCSLMQGSTLPRR
MDPRMFSLMQPSTCPRR

SEQ ID NO: 98210 - protein, 17 aa, Artificial Sequence
  Description of Artificial Sequence: Synthetic peptide
  Seed: MDPRMCSLMQGSTLPRR
MDPRMFSLMQPSTDPRR

SEQ ID NO: 98211 - protein, 17 aa, Artificial Sequence
  Description of Artificial Sequence: Synthetic peptide
  Seed: MDPRMCSLMQGSTLPRR
MDPRMFSLMQPSTEPRR

SEQ ID NO: 98212 - protein, 17 aa, Artificial Sequence
  Description of Artificial Sequence: Synthetic peptide
  Seed: MDPRMCSLMQGSTLPRR
MDPRMFSLMQPSTFPRR

SEQ ID NO: 98213 - protein, 17 aa, Artificial Sequence
  Description of Artificial Sequence: Synthetic peptide
  Seed: MDPRMCSLMQGSTLPRR
MDPRMFSLMQPSTGPRR

SEQ ID NO: 98214 - protein, 17 aa, Artificial Sequence
  Description of Artificial Sequence: Synthetic peptide
  Seed: MDPRMCSLMQGSTLPRR
MDPRMFSLMQPSTHPRR

SEQ ID NO: 98215 - protein, 17 aa, Artificial Sequence
  Description of Artificial Sequence: Synthetic peptide
  Seed: MDPRMCSLMQGSTLPRR
MDPRMFSLMQPSTIPRR

SEQ ID NO: 98216 - protein, 17 aa, Artificial Sequence
  Description of Artificial Sequence: Synthetic peptide
  Seed: MDPRMCSLMQGSTLPRR
MDPRMFSLMQPSTLPRR

SEQ ID NO: 98217 - protein, 17 aa, Artificial Sequence
  Description of Artificial Sequence: Synthetic peptide
  Seed: MDPRMCSLMQGSTLPRR
MDPRMFSLMQPSTMPRR

SEQ ID NO: 98218 - protein, 17 aa, Artificial Sequence
  Description of Artificial Sequence: Synthetic peptide
  Seed: MDPRMCSLMQGSTLPRR
MDPRMFSLMQPSTNPRR

SEQ ID NO: 98219 - protein, 17 aa, Artificial Sequence
  Description of Artificial Sequence: Synthetic peptide
  Seed: MDPRMCSLMQGSTLPRR
MDPRMFSLMQPSTPPRR

SEQ ID NO: 98220 - protein, 17 aa, Artificial Sequence
  Description of Artificial Sequence: Synthetic peptide
  Seed: MDPRMCSLMQGSTLPRR
MDPRMFSLMQPSTQPRR

SEQ ID NO: 98221 - protein, 17 aa, Artificial Sequence
  Description of Artificial Sequence: Synthetic peptide
  Seed: MDPRMCSLMQGSTLPRR
MDPRMFSLMQPSTSPRR

SEQ ID NO: 98222 - protein, 17 aa, Artificial Sequence
  Description of Artificial Sequence: Synthetic peptide
  Seed: MDPRMCSLMQGSTLPRR
MDPRMFSLMQPSTTPRR

SEQ ID NO: 98223 - protein, 17 aa, Artificial Sequence
  Description of Artificial Sequence: Synthetic peptide
  Seed: MDPRMCSLMQGSTLPRR
MDPRMFSLMQPSTVPRR

SEQ ID NO: 98224 - protein, 17 aa, Artificial Sequence
  Description of Artificial Sequence: Synthetic peptide
  Seed: MDPRMCSLMQGSTLPRR
MDPRMFSLMQPSTWPRR

SEQ ID NO: 98225 - protein, 17 aa, Artificial Sequence
  Description of Artificial Sequence: Synthetic peptide
  Seed: MDPRMCSLMQGSTLPRR
MDPRMFSLMQPSTYPRR

SEQ ID NO: 98226 - protein, 17 aa, Artificial Sequence
  Description of Artificial Sequence: Synthetic peptide
  Seed: MDPRMCSLMQGSTLPRR
MDPRMFSLMQQSTAPRR

SEQ ID NO: 98227 - protein, 17 aa, Artificial Sequence
  Description of Artificial Sequence: Synthetic peptide
  Seed: MDPRMCSLMQGSTLPRR
MDPRMFSLMQQSTIPRR

SEQ ID NO: 98228 - protein, 17 aa, Artificial Sequence
  Description of Artificial Sequence: Synthetic peptide
  Seed: MDPRMCSLMQGSTLPRR
MDPRMFSLMQQSTLPRR

SEQ ID NO: 98229 - protein, 17 aa, Artificial Sequence
  Description of Artificial Sequence: Synthetic peptide
  Seed: MDPRMCSLMQGSTLPRR
MDPRMFSLMQQSTVPRR

SEQ ID NO: 98230 - protein, 17 aa, Artificial Sequence
  Description of Artificial Sequence: Synthetic peptide
  Seed: MDPRMCSLMQGSTLPRR
MDPRMFSLMQSSTAPRR

SEQ ID NO: 98231 - protein, 17 aa, Artificial Sequence
  Description of Artificial Sequence: Synthetic peptide
  Seed: MDPRMCSLMQGSTLPRR
MDPRMFSLMQSSTCPRR

SEQ ID NO: 98232 - protein, 17 aa, Artificial Sequence
  Description of Artificial Sequence: Synthetic peptide
  Seed: MDPRMCSLMQGSTLPRR
MDPRMFSLMQSSTDPRR

SEQ ID NO: 98233 - protein, 17 aa, Artificial Sequence
  Description of Artificial Sequence: Synthetic peptide
  Seed: MDPRMCSLMQGSTLPRR
MDPRMFSLMQSSTEPRR

SEQ ID NO: 98234 - protein, 17 aa, Artificial Sequence
  Description of Artificial Sequence: Synthetic peptide
  Seed: MDPRMCSLMQGSTLPRR
MDPRMFSLMQSSTFPRR

SEQ ID NO: 98235 - protein, 17 aa, Artificial Sequence
  Description of Artificial Sequence: Synthetic peptide
  Seed: MDPRMCSLMQGSTLPRR
MDPRMFSLMQSSTGPRR

SEQ ID NO: 98236 - protein, 17 aa, Artificial Sequence
  Description of Artificial Sequence: Synthetic peptide
  Seed: MDPRMCSLMQGSTLPRR
MDPRMFSLMQSSTHPRR

SEQ ID NO: 98237 - protein, 17 aa, Artificial Sequence
  Description of Artificial Sequence: Synthetic peptide
  Seed: MDPRMCSLMQGSTLPRR
MDPRMFSLMQSSTIPRR

SEQ ID NO: 98238 - protein, 17 aa, Artificial Sequence
  Description of Artificial Sequence: Synthetic peptide
  Seed: MDPRMCSLMQGSTLPRR
MDPRMFSLMQSSTLPRR

SEQ ID NO: 98239 - protein, 17 aa, Artificial Sequence
  Description of Artificial Sequence: Synthetic peptide
  Seed: MDPRMCSLMQGSTLPRR
MDPRMFSLMQSSTMPRR

SEQ ID NO: 98240 - protein, 17 aa, Artificial Sequence
  Description of Artificial Sequence: Synthetic peptide
  Seed: MDPRMCSLMQGSTLPRR
MDPRMFSLMQSSTNPRR

SEQ ID NO: 98241 - protein, 17 aa, Artificial Sequence
  Description of Artificial Sequence: Synthetic peptide
  Seed: MDPRMCSLMQGSTLPRR
MDPRMFSLMQSSTPPRR

SEQ ID NO: 98242 - protein, 17 aa, Artificial Sequence
  Description of Artificial Sequence: Synthetic peptide
  Seed: MDPRMCSLMQGSTLPRR
MDPRMFSLMQSSTQPRR

SEQ ID NO: 98243 - protein, 17 aa, Artificial Sequence
  Description of Artificial Sequence: Synthetic peptide
  Seed: MDPRMCSLMQGSTLPRR
MDPRMFSLMQSSTSPRR

SEQ ID NO: 98244 - protein, 17 aa, Artificial Sequence
  Description of Artificial Sequence: Synthetic peptide
  Seed: MDPRMCSLMQGSTLPRR
MDPRMFSLMQSSTTPRR

SEQ ID NO: 98245 - protein, 17 aa, Artificial Sequence
  Description of Artificial Sequence: Synthetic peptide
  Seed: MDPRMCSLMQGSTLPRR
MDPRMFSLMQSSTVPRR

SEQ ID NO: 98246 - protein, 17 aa, Artificial Sequence
  Description of Artificial Sequence: Synthetic peptide
  Seed: MDPRMCSLMQGSTLPRR
MDPRMFSLMQSSTWPRR

SEQ ID NO: 98247 - protein, 17 aa, Artificial Sequence
  Description of Artificial Sequence: Synthetic peptide
  Seed: MDPRMCSLMQGSTLPRR
MDPRMFSLMQSSTYPRR

SEQ ID NO: 98248 - protein, 17 aa, Artificial Sequence
  Description of Artificial Sequence: Synthetic peptide
  Seed: MDPRMCSLMQGSTLPRR
MDPRMFSLMQTSTAPRR

SEQ ID NO: 98249 - protein, 17 aa, Artificial Sequence
  Description of Artificial Sequence: Synthetic peptide
  Seed: MDPRMCSLMQGSTLPRR
MDPRMFSLMQTSTCPRR

SEQ ID NO: 98250 - protein, 17 aa, Artificial Sequence
  Description of Artificial Sequence: Synthetic peptide
  Seed: MDPRMCSLMQGSTLPRR
MDPRMFSLMQTSTDPRR

SEQ ID NO: 98251 - protein, 17 aa, Artificial Sequence
  Description of Artificial Sequence: Synthetic peptide
  Seed: MDPRMCSLMQGSTLPRR
MDPRMFSLMQTSTEPRR

SEQ ID NO: 98252 - protein, 17 aa, Artificial Sequence
  Description of Artificial Sequence: Synthetic peptide
  Seed: MDPRMCSLMQGSTLPRR
MDPRMFSLMQTSTFPRR

SEQ ID NO: 98253 - protein, 17 aa, Artificial Sequence
  Description of Artificial Sequence: Synthetic peptide
  Seed: MDPRMCSLMQGSTLPRR
MDPRMFSLMQTSTGPRR

SEQ ID NO: 98254 - protein, 17 aa, Artificial Sequence
  Description of Artificial Sequence: Synthetic peptide
  Seed: MDPRMCSLMQGSTLPRR
MDPRMFSLMQTSTHPRR

SEQ ID NO: 98255 - protein, 17 aa, Artificial Sequence
  Description of Artificial Sequence: Synthetic peptide
  Seed: MDPRMCSLMQGSTLPRR
MDPRMFSLMQTSTIPRR

SEQ ID NO: 98256 - protein, 17 aa, Artificial Sequence
  Description of Artificial Sequence: Synthetic peptide
  Seed: MDPRMCSLMQGSTLPRR
MDPRMFSLMQTSTLPRR

SEQ ID NO: 98257 - protein, 17 aa, Artificial Sequence
  Description of Artificial Sequence: Synthetic peptide
  Seed: MDPRMCSLMQGSTLPRR
MDPRMFSLMQTSTMPRR

SEQ ID NO: 98258 - protein, 17 aa, Artificial Sequence
  Description of Artificial Sequence: Synthetic peptide
  Seed: MDPRMCSLMQGSTLPRR
MDPRMFSLMQTSTNPRR

SEQ ID NO: 98259 - protein, 17 aa, Artificial Sequence
  Description of Artificial Sequence: Synthetic peptide
  Seed: MDPRMCSLMQGSTLPRR
MDPRMFSLMQTSTPPRR

SEQ ID NO: 98260 - protein, 17 aa, Artificial Sequence
  Description of Artificial Sequence: Synthetic peptide
  Seed: MDPRMCSLMQGSTLPRR
MDPRMFSLMQTSTQPRR

SEQ ID NO: 98261 - protein, 17 aa, Artificial Sequence
  Description of Artificial Sequence: Synthetic peptide
  Seed: MDPRMCSLMQGSTLPRR
MDPRMFSLMQTSTSPRR

SEQ ID NO: 98262 - protein, 17 aa, Artificial Sequence
  Description of Artificial Sequence: Synthetic peptide
  Seed: MDPRMCSLMQGSTLPRR
MDPRMFSLMQTSTTPRR

SEQ ID NO: 98263 - protein, 17 aa, Artificial Sequence
  Description of Artificial Sequence: Synthetic peptide
  Seed: MDPRMCSLMQGSTLPRR
MDPRMFSLMQTSTVPRR

SEQ ID NO: 98264 - protein, 17 aa, Artificial Sequence
  Description of Artificial Sequence: Synthetic peptide
  Seed: MDPRMCSLMQGSTLPRR
MDPRMFSLMQTSTWPRR

SEQ ID NO: 98265 - protein, 17 aa, Artificial Sequence
  Description of Artificial Sequence: Synthetic peptide
  Seed: MDPRMCSLMQGSTLPRR
MDPRMFSLMQVSTAPRR

SEQ ID NO: 98266 - protein, 17 aa, Artificial Sequence
  Description of Artificial Sequence: Synthetic peptide
  Seed: MDPRMCSLMQGSTLPRR
MDPRMFSLMQVSTCPRR

SEQ ID NO: 98267 - protein, 17 aa, Artificial Sequence
  Description of Artificial Sequence: Synthetic peptide
  Seed: MDPRMCSLMQGSTLPRR
MDPRMFSLMQVSTDPRR

SEQ ID NO: 98268 - protein, 17 aa, Artificial Sequence
  Description of Artificial Sequence: Synthetic peptide
  Seed: MDPRMCSLMQGSTLPRR
MDPRMFSLMQVSTEPRR

SEQ ID NO: 98269 - protein, 17 aa, Artificial Sequence
  Description of Artificial Sequence: Synthetic peptide
  Seed: MDPRMCSLMQGSTLPRR
MDPRMFSLMQVSTFPRR

SEQ ID NO: 98270 - protein, 17 aa, Artificial Sequence
  Description of Artificial Sequence: Synthetic peptide
  Seed: MDPRMCSLMQGSTLPRR
MDPRMFSLMQVSTGPRR

SEQ ID NO: 98271 - protein, 17 aa, Artificial Sequence
  Description of Artificial Sequence: Synthetic peptide
  Seed: MDPRMCSLMQGSTLPRR
MDPRMFSLMQVSTHPRR

SEQ ID NO: 98272 - protein, 17 aa, Artificial Sequence
  Description of Artificial Sequence: Synthetic peptide
  Seed: MDPRMCSLMQGSTLPRR
MDPRMFSLMQVSTIPRR

SEQ ID NO: 98273 - protein, 17 aa, Artificial Sequence
  Description of Artificial Sequence: Synthetic peptide
  Seed: MDPRMCSLMQGSTLPRR
MDPRMFSLMQVSTKPRR

SEQ ID NO: 98274 - protein, 17 aa, Artificial Sequence
  Description of Artificial Sequence: Synthetic peptide
  Seed: MDPRMCSLMQGSTLPRR
MDPRMFSLMQVSTLPRR

SEQ ID NO: 98275 - protein, 17 aa, Artificial Sequence
  Description of Artificial Sequence: Synthetic peptide
  Seed: MDPRMCSLMQGSTLPRR
MDPRMFSLMQVSTMPRR

SEQ ID NO: 98276 - protein, 17 aa, Artificial Sequence
  Description of Artificial Sequence: Synthetic peptide
  Seed: MDPRMCSLMQGSTLPRR
MDPRMFSLMQVSTNPRR

SEQ ID NO: 98277 - protein, 17 aa, Artificial Sequence
  Description of Artificial Sequence: Synthetic peptide
  Seed: MDPRMCSLMQGSTLPRR
MDPRMFSLMQVSTPPRR

SEQ ID NO: 98278 - protein, 17 aa, Artificial Sequence
  Description of Artificial Sequence: Synthetic peptide
  Seed: MDPRMCSLMQGSTLPRR
MDPRMFSLMQVSTQPRR

SEQ ID NO: 98279 - protein, 17 aa, Artificial Sequence
  Description of Artificial Sequence: Synthetic peptide
  Seed: MDPRMCSLMQGSTLPRR
MDPRMFSLMQVSTSPRR

SEQ ID NO: 98280 - protein, 17 aa, Artificial Sequence
  Description of Artificial Sequence: Synthetic peptide
  Seed: MDPRMCSLMQGSTLPRR
MDPRMFSLMQVSTTPRR

SEQ ID NO: 98281 - protein, 17 aa, Artificial Sequence
  Description of Artificial Sequence: Synthetic peptide
  Seed: MDPRMCSLMQGSTLPRR
MDPRMFSLMQVSTVPRR

SEQ ID NO: 98282 - protein, 17 aa, Artificial Sequence
  Description of Artificial Sequence: Synthetic peptide
  Seed: MDPRMCSLMQGSTLPRR
MDPRMFSLNQASTAPRR

SEQ ID NO: 98283 - protein, 17 aa, Artificial Sequence
  Description of Artificial Sequence: Synthetic peptide
  Seed: MDPRMCSLMQGSTLPRR
MDPRMFSLNQASTIPRR

SEQ ID NO: 98284 - protein, 17 aa, Artificial Sequence
  Description of Artificial Sequence: Synthetic peptide
  Seed: MDPRMCSLMQGSTLPRR
MDPRMFSLNQASTLPRR

SEQ ID NO: 98285 - protein, 17 aa, Artificial Sequence
  Description of Artificial Sequence: Synthetic peptide
  Seed: MDPRMCSLMQGSTLPRR
MDPRMFSLNQASTVPRR

SEQ ID NO: 98286 - protein, 17 aa, Artificial Sequence
  Description of Artificial Sequence: Synthetic peptide
  Seed: MDPRMCSLMQGSTLPRR
MDPRMFSLNQGSTLPRR

SEQ ID NO: 98287 - protein, 17 aa, Artificial Sequence
  Description of Artificial Sequence: Synthetic peptide
  Seed: MDPRMCSLMQGSTLPRR
MDPRMFSLNQGSTVPRR

SEQ ID NO: 98288 - protein, 17 aa, Artificial Sequence
  Description of Artificial Sequence: Synthetic peptide
  Seed: MDPRMCSLMQGSTLPRR
MDPRMFSLQQASTAPRR

SEQ ID NO: 98289 - protein, 17 aa, Artificial Sequence
  Description of Artificial Sequence: Synthetic peptide
  Seed: MDPRMCSLMQGSTLPRR
MDPRMFSLQQASTFPRR

SEQ ID NO: 98290 - protein, 17 aa, Artificial Sequence
  Description of Artificial Sequence: Synthetic peptide
  Seed: MDPRMCSLMQGSTLPRR
MDPRMFSLQQASTGPRR

SEQ ID NO: 98291 - protein, 17 aa, Artificial Sequence
  Description of Artificial Sequence: Synthetic peptide
  Seed: MDPRMCSLMQGSTLPRR
MDPRMFSLQQASTIPRR

SEQ ID NO: 98292 - protein, 17 aa, Artificial Sequence
  Description of Artificial Sequence: Synthetic peptide
  Seed: MDPRMCSLMQGSTLPRR
MDPRMFSLQQASTLPRR

SEQ ID NO: 98293 - protein, 17 aa, Artificial Sequence
  Description of Artificial Sequence: Synthetic peptide
  Seed: MDPRMCSLMQGSTLPRR
MDPRMFSLQQASTMPRR

SEQ ID NO: 98294 - protein, 17 aa, Artificial Sequence
  Description of Artificial Sequence: Synthetic peptide
  Seed: MDPRMCSLMQGSTLPRR
MDPRMFSLQQASTNPRR

SEQ ID NO: 98295 - protein, 17 aa, Artificial Sequence
  Description of Artificial Sequence: Synthetic peptide
  Seed: MDPRMCSLMQGSTLPRR
MDPRMFSLQQASTSPRR

SEQ ID NO: 98296 - protein, 17 aa, Artificial Sequence
  Description of Artificial Sequence: Synthetic peptide
  Seed: MDPRMCSLMQGSTLPRR
MDPRMFSLQQASTTPRR

SEQ ID NO: 98297 - protein, 17 aa, Artificial Sequence
  Description of Artificial Sequence: Synthetic peptide
  Seed: MDPRMCSLMQGSTLPRR
MDPRMFSLQQASTVPRR

SEQ ID NO: 98298 - protein, 17 aa, Artificial Sequence
  Description of Artificial Sequence: Synthetic peptide
  Seed: MDPRMCSLMQGSTLPRR
MDPRMFSLQQGSTAPRR

SEQ ID NO: 98299 - protein, 17 aa, Artificial Sequence
  Description of Artificial Sequence: Synthetic peptide
  Seed: MDPRMCSLMQGSTLPRR
MDPRMFSLQQGSTIPRR

SEQ ID NO: 98300 - protein, 17 aa, Artificial Sequence
  Description of Artificial Sequence: Synthetic peptide
  Seed: MDPRMCSLMQGSTLPRR
MDPRMFSLQQGSTLPRR

SEQ ID NO: 98301 - protein, 17 aa, Artificial Sequence
  Description of Artificial Sequence: Synthetic peptide
  Seed: MDPRMCSLMQGSTLPRR
MDPRMFSLQQGSTMPRR

SEQ ID NO: 98302 - protein, 17 aa, Artificial Sequence
  Description of Artificial Sequence: Synthetic peptide
  Seed: MDPRMCSLMQGSTLPRR
MDPRMFSLQQGSTSPRR

SEQ ID NO: 98303 - protein, 17 aa, Artificial Sequence
  Description of Artificial Sequence: Synthetic peptide
  Seed: MDPRMCSLMQGSTLPRR
MDPRMFSLQQGSTTPRR

SEQ ID NO: 98304 - protein, 17 aa, Artificial Sequence
  Description of Artificial Sequence: Synthetic peptide
  Seed: MDPRMCSLMQGSTLPRR
MDPRMFSLQQGSTVPRR

SEQ ID NO: 98305 - protein, 17 aa, Artificial Sequence
  Description of Artificial Sequence: Synthetic peptide
  Seed: MDPRMCSLMQGSTLPRR
MDPRMFSLQQISTAPRR

SEQ ID NO: 98306 - protein, 17 aa, Artificial Sequence
  Description of Artificial Sequence: Synthetic peptide
  Seed: MDPRMCSLMQGSTLPRR
MDPRMFSLQQISTNPRR

SEQ ID NO: 98307 - protein, 17 aa, Artificial Sequence
  Description of Artificial Sequence: Synthetic peptide
  Seed: MDPRMCSLMQGSTLPRR
MDPRMFSLQQISTSPRR

SEQ ID NO: 98308 - protein, 17 aa, Artificial Sequence
  Description of Artificial Sequence: Synthetic peptide
  Seed: MDPRMCSLMQGSTLPRR
MDPRMFSLQQISTVPRR

SEQ ID NO: 98309 - protein, 17 aa, Artificial Sequence
  Description of Artificial Sequence: Synthetic peptide
  Seed: MDPRMCSLMQGSTLPRR
MDPRMFSLQQNSTAPRR

SEQ ID NO: 98310 - protein, 17 aa, Artificial Sequence
  Description of Artificial Sequence: Synthetic peptide
  Seed: MDPRMCSLMQGSTLPRR
MDPRMFSLQQNSTIPRR

SEQ ID NO: 98311 - protein, 17 aa, Artificial Sequence
  Description of Artificial Sequence: Synthetic peptide
  Seed: MDPRMCSLMQGSTLPRR
MDPRMFSLQQNSTLPRR

SEQ ID NO: 98312 - protein, 17 aa, Artificial Sequence
  Description of Artificial Sequence: Synthetic peptide
  Seed: MDPRMCSLMQGSTLPRR
MDPRMFSLQQNSTVPRR

SEQ ID NO: 98313 - protein, 17 aa, Artificial Sequence
  Description of Artificial Sequence: Synthetic peptide
  Seed: MDPRMCSLMQGSTLPRR
MDPRMFSLQQPSTAPRR

SEQ ID NO: 98314 - protein, 17 aa, Artificial Sequence
  Description of Artificial Sequence: Synthetic peptide
  Seed: MDPRMCSLMQGSTLPRR
MDPRMFSLQQPSTIPRR

SEQ ID NO: 98315 - protein, 17 aa, Artificial Sequence
  Description of Artificial Sequence: Synthetic peptide
  Seed: MDPRMCSLMQGSTLPRR
MDPRMFSLQQPSTLPRR

SEQ ID NO: 98316 - protein, 17 aa, Artificial Sequence
  Description of Artificial Sequence: Synthetic peptide
  Seed: MDPRMCSLMQGSTLPRR
MDPRMFSLQQPSTMPRR

SEQ ID NO: 98317 - protein, 17 aa, Artificial Sequence
  Description of Artificial Sequence: Synthetic peptide
  Seed: MDPRMCSLMQGSTLPRR
MDPRMFSLQQPSTNPRR

SEQ ID NO: 98318 - protein, 17 aa, Artificial Sequence
  Description of Artificial Sequence: Synthetic peptide
  Seed: MDPRMCSLMQGSTLPRR
MDPRMFSLQQPSTSPRR

SEQ ID NO: 98319 - protein, 17 aa, Artificial Sequence
  Description of Artificial Sequence: Synthetic peptide
  Seed: MDPRMCSLMQGSTLPRR
MDPRMFSLQQPSTVPRR

SEQ ID NO: 98320 - protein, 17 aa, Artificial Sequence
  Description of Artificial Sequence: Synthetic peptide
  Seed: MDPRMCSLMQGSTLPRR
MDPRMFSLQQSSTAPRR

SEQ ID NO: 98321 - protein, 17 aa, Artificial Sequence
  Description of Artificial Sequence: Synthetic peptide
  Seed: MDPRMCSLMQGSTLPRR
MDPRMFSLQQSSTIPRR

SEQ ID NO: 98322 - protein, 17 aa, Artificial Sequence
  Description of Artificial Sequence: Synthetic peptide
  Seed: MDPRMCSLMQGSTLPRR
MDPRMFSLQQSSTLPRR

SEQ ID NO: 98323 - protein, 17 aa, Artificial Sequence
  Description of Artificial Sequence: Synthetic peptide
  Seed: MDPRMCSLMQGSTLPRR
MDPRMFSLQQSSTMPRR

SEQ ID NO: 98324 - protein, 17 aa, Artificial Sequence
  Description of Artificial Sequence: Synthetic peptide
  Seed: MDPRMCSLMQGSTLPRR
MDPRMFSLQQSSTNPRR

SEQ ID NO: 98325 - protein, 17 aa, Artificial Sequence
  Description of Artificial Sequence: Synthetic peptide
  Seed: MDPRMCSLMQGSTLPRR
MDPRMFSLQQSSTSPRR

SEQ ID NO: 98326 - protein, 17 aa, Artificial Sequence
  Description of Artificial Sequence: Synthetic peptide
  Seed: MDPRMCSLMQGSTLPRR
MDPRMFSLQQSSTTPRR

SEQ ID NO: 98327 - protein, 17 aa, Artificial Sequence
  Description of Artificial Sequence: Synthetic peptide
  Seed: MDPRMCSLMQGSTLPRR
MDPRMFSLQQSSTVPRR

SEQ ID NO: 98328 - protein, 17 aa, Artificial Sequence
  Description of Artificial Sequence: Synthetic peptide
  Seed: MDPRMCSLMQGSTLPRR
MDPRMFSLQQTSTAPRR

SEQ ID NO: 98329 - protein, 17 aa, Artificial Sequence
  Description of Artificial Sequence: Synthetic peptide
  Seed: MDPRMCSLMQGSTLPRR
MDPRMFSLQQTSTIPRR

SEQ ID NO: 98330 - protein, 17 aa, Artificial Sequence
  Description of Artificial Sequence: Synthetic peptide
  Seed: MDPRMCSLMQGSTLPRR
MDPRMFSLQQTSTLPRR

SEQ ID NO: 98331 - protein, 17 aa, Artificial Sequence
  Description of Artificial Sequence: Synthetic peptide
  Seed: MDPRMCSLMQGSTLPRR
MDPRMFSLQQTSTNPRR

SEQ ID NO: 98332 - protein, 17 aa, Artificial Sequence
  Description of Artificial Sequence: Synthetic peptide
  Seed: MDPRMCSLMQGSTLPRR
MDPRMFSLQQTSTSPRR

SEQ ID NO: 98333 - protein, 17 aa, Artificial Sequence
  Description of Artificial Sequence: Synthetic peptide
  Seed: MDPRMCSLMQGSTLPRR
MDPRMFSLQQTSTTPRR

SEQ ID NO: 98334 - protein, 17 aa, Artificial Sequence
  Description of Artificial Sequence: Synthetic peptide
  Seed: MDPRMCSLMQGSTLPRR
MDPRMFSLQQTSTVPRR

SEQ ID NO: 98335 - protein, 17 aa, Artificial Sequence
  Description of Artificial Sequence: Synthetic peptide
  Seed: MDPRMCSLMQGSTLPRR
MDPRMFSLQQVSTAPRR

SEQ ID NO: 98336 - protein, 17 aa, Artificial Sequence
  Description of Artificial Sequence: Synthetic peptide
  Seed: MDPRMCSLMQGSTLPRR
MDPRMFSLQQVSTIPRR

SEQ ID NO: 98337 - protein, 17 aa, Artificial Sequence
  Description of Artificial Sequence: Synthetic peptide
  Seed: MDPRMCSLMQGSTLPRR
MDPRMFSLQQVSTLPRR

SEQ ID NO: 98338 - protein, 17 aa, Artificial Sequence
  Description of Artificial Sequence: Synthetic peptide
  Seed: MDPRMCSLMQGSTLPRR
MDPRMFSLQQVSTMPRR

SEQ ID NO: 98339 - protein, 17 aa, Artificial Sequence
  Description of Artificial Sequence: Synthetic peptide
  Seed: MDPRMCSLMQGSTLPRR
MDPRMFSLQQVSTNPRR

SEQ ID NO: 98340 - protein, 17 aa, Artificial Sequence
  Description of Artificial Sequence: Synthetic peptide
  Seed: MDPRMCSLMQGSTLPRR
MDPRMFSLQQVSTSPRR

SEQ ID NO: 98341 - protein, 17 aa, Artificial Sequence
  Description of Artificial Sequence: Synthetic peptide
  Seed: MDPRMCSLMQGSTLPRR
MDPRMFSLQQVSTTPRR

SEQ ID NO: 98342 - protein, 17 aa, Artificial Sequence
  Description of Artificial Sequence: Synthetic peptide
  Seed: MDPRMCSLMQGSTLPRR
MDPRMFSLQQVSTVPRR

SEQ ID NO: 98343 - protein, 17 aa, Artificial Sequence
  Description of Artificial Sequence: Synthetic peptide
  Seed: MDPRMCSLMQGSTLPRR
MDPRMFSLSQASTAPRR

SEQ ID NO: 98344 - protein, 17 aa, Artificial Sequence
  Description of Artificial Sequence: Synthetic peptide
  Seed: MDPRMCSLMQGSTLPRR
MDPRMFSLSQASTIPRR

SEQ ID NO: 98345 - protein, 17 aa, Artificial Sequence
  Description of Artificial Sequence: Synthetic peptide
  Seed: MDPRMCSLMQGSTLPRR
MDPRMFSLSQASTLPRR

SEQ ID NO: 98346 - protein, 17 aa, Artificial Sequence
  Description of Artificial Sequence: Synthetic peptide
  Seed: MDPRMCSLMQGSTLPRR
MDPRMFSLSQASTMPRR

SEQ ID NO: 98347 - protein, 17 aa, Artificial Sequence
  Description of Artificial Sequence: Synthetic peptide
  Seed: MDPRMCSLMQGSTLPRR
MDPRMFSLSQASTNPRR

SEQ ID NO: 98348 - protein, 17 aa, Artificial Sequence
  Description of Artificial Sequence: Synthetic peptide
  Seed: MDPRMCSLMQGSTLPRR
MDPRMFSLSQASTSPRR

SEQ ID NO: 98349 - protein, 17 aa, Artificial Sequence
  Description of Artificial Sequence: Synthetic peptide
  Seed: MDPRMCSLMQGSTLPRR
MDPRMFSLSQASTTPRR

SEQ ID NO: 98350 - protein, 17 aa, Artificial Sequence
  Description of Artificial Sequence: Synthetic peptide
  Seed: MDPRMCSLMQGSTLPRR
MDPRMFSLSQASTVPRR

SEQ ID NO: 98351 - protein, 17 aa, Artificial Sequence
  Description of Artificial Sequence: Synthetic peptide
  Seed: MDPRMCSLMQGSTLPRR
MDPRMFSLSQFSTLPRR

SEQ ID NO: 98352 - protein, 17 aa, Artificial Sequence
  Description of Artificial Sequence: Synthetic peptide
  Seed: MDPRMCSLMQGSTLPRR
MDPRMFSLSQGSTAPRR

SEQ ID NO: 98353 - protein, 17 aa, Artificial Sequence
  Description of Artificial Sequence: Synthetic peptide
  Seed: MDPRMCSLMQGSTLPRR
MDPRMFSLSQGSTIPRR

SEQ ID NO: 98354 - protein, 17 aa, Artificial Sequence
  Description of Artificial Sequence: Synthetic peptide
  Seed: MDPRMCSLMQGSTLPRR
MDPRMFSLSQGSTLPRR

SEQ ID NO: 98355 - protein, 17 aa, Artificial Sequence
  Description of Artificial Sequence: Synthetic peptide
  Seed: MDPRMCSLMQGSTLPRR
MDPRMFSLSQGSTMPRR

SEQ ID NO: 98356 - protein, 17 aa, Artificial Sequence
  Description of Artificial Sequence: Synthetic peptide
  Seed: MDPRMCSLMQGSTLPRR
MDPRMFSLSQGSTVPRR

SEQ ID NO: 98357 - protein, 17 aa, Artificial Sequence
  Description of Artificial Sequence: Synthetic peptide
  Seed: MDPRMCSLMQGSTLPRR
MDPRMFSLSQISTAPRR

SEQ ID NO: 98358 - protein, 17 aa, Artificial Sequence
  Description of Artificial Sequence: Synthetic peptide
  Seed: MDPRMCSLMQGSTLPRR
MDPRMFSLSQPSTAPRR

SEQ ID NO: 98359 - protein, 17 aa, Artificial Sequence
  Description of Artificial Sequence: Synthetic peptide
  Seed: MDPRMCSLMQGSTLPRR
MDPRMFSLSQPSTIPRR

SEQ ID NO: 98360 - protein, 17 aa, Artificial Sequence
  Description of Artificial Sequence: Synthetic peptide
  Seed: MDPRMCSLMQGSTLPRR
MDPRMFSLSQPSTLPRR

SEQ ID NO: 98361 - protein, 17 aa, Artificial Sequence
  Description of Artificial Sequence: Synthetic peptide
  Seed: MDPRMCSLMQGSTLPRR
MDPRMFSLSQPSTSPRR

SEQ ID NO: 98362 - protein, 17 aa, Artificial Sequence
  Description of Artificial Sequence: Synthetic peptide
  Seed: MDPRMCSLMQGSTLPRR
MDPRMFSLSQPSTVPRR

SEQ ID NO: 98363 - protein, 17 aa, Artificial Sequence
  Description of Artificial Sequence: Synthetic peptide
  Seed: MDPRMCSLMQGSTLPRR
MDPRMFSLSQSSTAPRR

SEQ ID NO: 98364 - protein, 17 aa, Artificial Sequence
  Description of Artificial Sequence: Synthetic peptide
  Seed: MDPRMCSLMQGSTLPRR
MDPRMFSLSQSSTIPRR

SEQ ID NO: 98365 - protein, 17 aa, Artificial Sequence
  Description of Artificial Sequence: Synthetic peptide
  Seed: MDPRMCSLMQGSTLPRR
MDPRMFSLSQSSTLPRR

SEQ ID NO: 98366 - protein, 17 aa, Artificial Sequence
  Description of Artificial Sequence: Synthetic peptide
  Seed: MDPRMCSLMQGSTLPRR
MDPRMFSLSQSSTMPRR

SEQ ID NO: 98367 - protein, 17 aa, Artificial Sequence
  Description of Artificial Sequence: Synthetic peptide
  Seed: MDPRMCSLMQGSTLPRR
MDPRMFSLSQSSTSPRR

SEQ ID NO: 98368 - protein, 17 aa, Artificial Sequence
  Description of Artificial Sequence: Synthetic peptide
  Seed: MDPRMCSLMQGSTLPRR
MDPRMFSLSQSSTVPRR

SEQ ID NO: 98369 - protein, 17 aa, Artificial Sequence
  Description of Artificial Sequence: Synthetic peptide
  Seed: MDPRMCSLMQGSTLPRR
MDPRMFSLSQTSTAPRR

SEQ ID NO: 98370 - protein, 17 aa, Artificial Sequence
  Description of Artificial Sequence: Synthetic peptide
  Seed: MDPRMCSLMQGSTLPRR
MDPRMFSLSQVSTAPRR

SEQ ID NO: 98371 - protein, 17 aa, Artificial Sequence
  Description of Artificial Sequence: Synthetic peptide
  Seed: MDPRMCSLMQGSTLPRR
MDPRMFSLSQVSTNPRR

SEQ ID NO: 98372 - protein, 17 aa, Artificial Sequence
  Description of Artificial Sequence: Synthetic peptide
  Seed: MDPRMCSLMQGSTLPRR
MDPRMFSLSQVSTSPRR

SEQ ID NO: 98373 - protein, 17 aa, Artificial Sequence
  Description of Artificial Sequence: Synthetic peptide
  Seed: MDPRMCSLMQGSTLPRR
MDPRMFSLTQASTAPRR

SEQ ID NO: 98374 - protein, 17 aa, Artificial Sequence
  Description of Artificial Sequence: Synthetic peptide
  Seed: MDPRMCSLMQGSTLPRR
MDPRMFSLTQASTIPRR

SEQ ID NO: 98375 - protein, 17 aa, Artificial Sequence
  Description of Artificial Sequence: Synthetic peptide
  Seed: MDPRMCSLMQGSTLPRR
MDPRMFSLTQASTLPRR

SEQ ID NO: 98376 - protein, 17 aa, Artificial Sequence
  Description of Artificial Sequence: Synthetic peptide
  Seed: MDPRMCSLMQGSTLPRR
MDPRMFSLTQASTMPRR

SEQ ID NO: 98377 - protein, 17 aa, Artificial Sequence
  Description of Artificial Sequence: Synthetic peptide
  Seed: MDPRMCSLMQGSTLPRR
MDPRMFSLTQASTNPRR

SEQ ID NO: 98378 - protein, 17 aa, Artificial Sequence
  Description of Artificial Sequence: Synthetic peptide
  Seed: MDPRMCSLMQGSTLPRR
MDPRMFSLTQASTSPRR

SEQ ID NO: 98379 - protein, 17 aa, Artificial Sequence
  Description of Artificial Sequence: Synthetic peptide
  Seed: MDPRMCSLMQGSTLPRR
MDPRMFSLTQASTTPRR

SEQ ID NO: 98380 - protein, 17 aa, Artificial Sequence
  Description of Artificial Sequence: Synthetic peptide
  Seed: MDPRMCSLMQGSTLPRR
MDPRMFSLTQASTVPRR

SEQ ID NO: 98381 - protein, 17 aa, Artificial Sequence
  Description of Artificial Sequence: Synthetic peptide
  Seed: MDPRMCSLMQGSTLPRR
MDPRMFSLTQFSTIPRR

SEQ ID NO: 98382 - protein, 17 aa, Artificial Sequence
  Description of Artificial Sequence: Synthetic peptide
  Seed: MDPRMCSLMQGSTLPRR
MDPRMFSLTQFSTLPRR

SEQ ID NO: 98383 - protein, 17 aa, Artificial Sequence
  Description of Artificial Sequence: Synthetic peptide
  Seed: MDPRMCSLMQGSTLPRR
MDPRMFSLTQFSTVPRR

SEQ ID NO: 98384 - protein, 17 aa, Artificial Sequence
  Description of Artificial Sequence: Synthetic peptide
  Seed: MDPRMCSLMQGSTLPRR
MDPRMFSLTQGSTAPRR

SEQ ID NO: 98385 - protein, 17 aa, Artificial Sequence
  Description of Artificial Sequence: Synthetic peptide
  Seed: MDPRMCSLMQGSTLPRR
MDPRMFSLTQGSTIPRR

SEQ ID NO: 98386 - protein, 17 aa, Artificial Sequence
  Description of Artificial Sequence: Synthetic peptide
  Seed: MDPRMCSLMQGSTLPRR
MDPRMFSLTQGSTLPRR

SEQ ID NO: 98387 - protein, 17 aa, Artificial Sequence
  Description of Artificial Sequence: Synthetic peptide
  Seed: MDPRMCSLMQGSTLPRR
MDPRMFSLTQGSTVPRR

SEQ ID NO: 98388 - protein, 17 aa, Artificial Sequence
  Description of Artificial Sequence: Synthetic peptide
  Seed: MDPRMCSLMQGSTLPRR
MDPRMFSLTQPSTAPRR

SEQ ID NO: 98389 - protein, 17 aa, Artificial Sequence
  Description of Artificial Sequence: Synthetic peptide
  Seed: MDPRMCSLMQGSTLPRR
MDPRMFSLTQPSTLPRR

SEQ ID NO: 98390 - protein, 17 aa, Artificial Sequence
  Description of Artificial Sequence: Synthetic peptide
  Seed: MDPRMCSLMQGSTLPRR
MDPRMFSLTQPSTSPRR

SEQ ID NO: 98391 - protein, 17 aa, Artificial Sequence
  Description of Artificial Sequence: Synthetic peptide
  Seed: MDPRMCSLMQGSTLPRR
MDPRMFSLTQPSTVPRR

SEQ ID NO: 98392 - protein, 17 aa, Artificial Sequence
  Description of Artificial Sequence: Synthetic peptide
  Seed: MDPRMCSLMQGSTLPRR
MDPRMFSLTQSSTAPRR

SEQ ID NO: 98393 - protein, 17 aa, Artificial Sequence
  Description of Artificial Sequence: Synthetic peptide
  Seed: MDPRMCSLMQGSTLPRR
MDPRMFSLTQSSTIPRR

SEQ ID NO: 98394 - protein, 17 aa, Artificial Sequence
  Description of Artificial Sequence: Synthetic peptide
  Seed: MDPRMCSLMQGSTLPRR
MDPRMFSLTQSSTLPRR

SEQ ID NO: 98395 - protein, 17 aa, Artificial Sequence
  Description of Artificial Sequence: Synthetic peptide
  Seed: MDPRMCSLMQGSTLPRR
MDPRMFSLTQSSTVPRR

SEQ ID NO: 98396 - protein, 17 aa, Artificial Sequence
  Description of Artificial Sequence: Synthetic peptide
  Seed: MDPRMCSLMQGSTLPRR
MDPRMFSLTQVSTAPRR

SEQ ID NO: 98397 - protein, 17 aa, Artificial Sequence
  Description of Artificial Sequence: Synthetic peptide
  Seed: MDPRMCSLMQGSTLPRR
MDPRMFSLVQASTAPRR

SEQ ID NO: 98398 - protein, 17 aa, Artificial Sequence
  Description of Artificial Sequence: Synthetic peptide
  Seed: MDPRMCSLMQGSTLPRR
MDPRMFSLVQASTCPRR

SEQ ID NO: 98399 - protein, 17 aa, Artificial Sequence
  Description of Artificial Sequence: Synthetic peptide
  Seed: MDPRMCSLMQGSTLPRR
MDPRMFSLVQASTFPRR

SEQ ID NO: 98400 - protein, 17 aa, Artificial Sequence
  Description of Artificial Sequence: Synthetic peptide
  Seed: MDPRMCSLMQGSTLPRR
MDPRMFSLVQASTGPRR

SEQ ID NO: 98401 - protein, 17 aa, Artificial Sequence
  Description of Artificial Sequence: Synthetic peptide
  Seed: MDPRMCSLMQGSTLPRR
MDPRMFSLVQASTHPRR

SEQ ID NO: 98402 - protein, 17 aa, Artificial Sequence
  Description of Artificial Sequence: Synthetic peptide
  Seed: MDPRMCSLMQGSTLPRR
MDPRMFSLVQASTIPRR

SEQ ID NO: 98403 - protein, 17 aa, Artificial Sequence
  Description of Artificial Sequence: Synthetic peptide
  Seed: MDPRMCSLMQGSTLPRR
MDPRMFSLVQASTLPRR

SEQ ID NO: 98404 - protein, 17 aa, Artificial Sequence
  Description of Artificial Sequence: Synthetic peptide
  Seed: MDPRMCSLMQGSTLPRR
MDPRMFSLVQASTMPRR

SEQ ID NO: 98405 - protein, 17 aa, Artificial Sequence
  Description of Artificial Sequence: Synthetic peptide
  Seed: MDPRMCSLMQGSTLPRR
MDPRMFSLVQASTNPRR

SEQ ID NO: 98406 - protein, 17 aa, Artificial Sequence
  Description of Artificial Sequence: Synthetic peptide
  Seed: MDPRMCSLMQGSTLPRR
MDPRMFSLVQASTPPRR

SEQ ID NO: 98407 - protein, 17 aa, Artificial Sequence
  Description of Artificial Sequence: Synthetic peptide
  Seed: MDPRMCSLMQGSTLPRR
MDPRMFSLVQASTQPRR

SEQ ID NO: 98408 - protein, 17 aa, Artificial Sequence
  Description of Artificial Sequence: Synthetic peptide
  Seed: MDPRMCSLMQGSTLPRR
MDPRMFSLVQASTSPRR

SEQ ID NO: 98409 - protein, 17 aa, Artificial Sequence
  Description of Artificial Sequence: Synthetic peptide
  Seed: MDPRMCSLMQGSTLPRR
MDPRMFSLVQASTTPRR

SEQ ID NO: 98410 - protein, 17 aa, Artificial Sequence
  Description of Artificial Sequence: Synthetic peptide
  Seed: MDPRMCSLMQGSTLPRR
MDPRMFSLVQASTVPRR

SEQ ID NO: 98411 - protein, 17 aa, Artificial Sequence
  Description of Artificial Sequence: Synthetic peptide
  Seed: MDPRMCSLMQGSTLPRR
MDPRMFSLVQFSTFPRR

SEQ ID NO: 98412 - protein, 17 aa, Artificial Sequence
  Description of Artificial Sequence: Synthetic peptide
  Seed: MDPRMCSLMQGSTLPRR
MDPRMFSLVQFSTIPRR

SEQ ID NO: 98413 - protein, 17 aa, Artificial Sequence
  Description of Artificial Sequence: Synthetic peptide
  Seed: MDPRMCSLMQGSTLPRR
MDPRMFSLVQFSTLPRR

SEQ ID NO: 98414 - protein, 17 aa, Artificial Sequence
  Description of Artificial Sequence: Synthetic peptide
  Seed: MDPRMCSLMQGSTLPRR
MDPRMFSLVQFSTMPRR

SEQ ID NO: 98415 - protein, 17 aa, Artificial Sequence
  Description of Artificial Sequence: Synthetic peptide
  Seed: MDPRMCSLMQGSTLPRR
MDPRMFSLVQFSTVPRR

SEQ ID NO: 98416 - protein, 17 aa, Artificial Sequence
  Description of Artificial Sequence: Synthetic peptide
  Seed: MDPRMCSLMQGSTLPRR
MDPRMFSLVQGSTAPRR

SEQ ID NO: 98417 - protein, 17 aa, Artificial Sequence
  Description of Artificial Sequence: Synthetic peptide
  Seed: MDPRMCSLMQGSTLPRR
MDPRMFSLVQGSTGPRR

SEQ ID NO: 98418 - protein, 17 aa, Artificial Sequence
  Description of Artificial Sequence: Synthetic peptide
  Seed: MDPRMCSLMQGSTLPRR
MDPRMFSLVQGSTIPRR

SEQ ID NO: 98419 - protein, 17 aa, Artificial Sequence
  Description of Artificial Sequence: Synthetic peptide
  Seed: MDPRMCSLMQGSTLPRR
MDPRMFSLVQGSTLPRR

SEQ ID NO: 98420 - protein, 17 aa, Artificial Sequence
  Description of Artificial Sequence: Synthetic peptide
  Seed: MDPRMCSLMQGSTLPRR
MDPRMFSLVQGSTMPRR

SEQ ID NO: 98421 - protein, 17 aa, Artificial Sequence
  Description of Artificial Sequence: Synthetic peptide
  Seed: MDPRMCSLMQGSTLPRR
MDPRMFSLVQGSTNPRR

SEQ ID NO: 98422 - protein, 17 aa, Artificial Sequence
  Description of Artificial Sequence: Synthetic peptide
  Seed: MDPRMCSLMQGSTLPRR
MDPRMFSLVQGSTSPRR

SEQ ID NO: 98423 - protein, 17 aa, Artificial Sequence
  Description of Artificial Sequence: Synthetic peptide
  Seed: MDPRMCSLMQGSTLPRR
MDPRMFSLVQGSTTPRR

SEQ ID NO: 98424 - protein, 17 aa, Artificial Sequence
  Description of Artificial Sequence: Synthetic peptide
  Seed: MDPRMCSLMQGSTLPRR
MDPRMFSLVQGSTVPRR

SEQ ID NO: 98425 - protein, 17 aa, Artificial Sequence
  Description of Artificial Sequence: Synthetic peptide
  Seed: MDPRMCSLMQGSTLPRR
MDPRMFSLVQISTAPRR

SEQ ID NO: 98426 - protein, 17 aa, Artificial Sequence
  Description of Artificial Sequence: Synthetic peptide
  Seed: MDPRMCSLMQGSTLPRR
MDPRMFSLVQISTGPRR

SEQ ID NO: 98427 - protein, 17 aa, Artificial Sequence
  Description of Artificial Sequence: Synthetic peptide
  Seed: MDPRMCSLMQGSTLPRR
MDPRMFSLVQISTIPRR

SEQ ID NO: 98428 - protein, 17 aa, Artificial Sequence
  Description of Artificial Sequence: Synthetic peptide
  Seed: MDPRMCSLMQGSTLPRR
MDPRMFSLVQISTLPRR

SEQ ID NO: 98429 - protein, 17 aa, Artificial Sequence
  Description of Artificial Sequence: Synthetic peptide
  Seed: MDPRMCSLMQGSTLPRR
MDPRMFSLVQISTMPRR

SEQ ID NO: 98430 - protein, 17 aa, Artificial Sequence
  Description of Artificial Sequence: Synthetic peptide
  Seed: MDPRMCSLMQGSTLPRR
MDPRMFSLVQISTNPRR

SEQ ID NO: 98431 - protein, 17 aa, Artificial Sequence
  Description of Artificial Sequence: Synthetic peptide
  Seed: MDPRMCSLMQGSTLPRR
MDPRMFSLVQISTSPRR

SEQ ID NO: 98432 - protein, 17 aa, Artificial Sequence
  Description of Artificial Sequence: Synthetic peptide
  Seed: MDPRMCSLMQGSTLPRR
MDPRMFSLVQISTTPRR

SEQ ID NO: 98433 - protein, 17 aa, Artificial Sequence
  Description of Artificial Sequence: Synthetic peptide
  Seed: MDPRMCSLMQGSTLPRR
MDPRMFSLVQISTVPRR

SEQ ID NO: 98434 - protein, 17 aa, Artificial Sequence
  Description of Artificial Sequence: Synthetic peptide
  Seed: MDPRMCSLMQGSTLPRR
MDPRMFSLVQLSTAPRR

SEQ ID NO: 98435 - protein, 17 aa, Artificial Sequence
  Description of Artificial Sequence: Synthetic peptide
  Seed: MDPRMCSLMQGSTLPRR
MDPRMFSLVQLSTNPRR

SEQ ID NO: 98436 - protein, 17 aa, Artificial Sequence
  Description of Artificial Sequence: Synthetic peptide
  Seed: MDPRMCSLMQGSTLPRR
MDPRMFSLVQLSTSPRR

SEQ ID NO: 98437 - protein, 17 aa, Artificial Sequence
  Description of Artificial Sequence: Synthetic peptide
  Seed: MDPRMCSLMQGSTLPRR
MDPRMFSLVQMSTAPRR

SEQ ID NO: 98438 - protein, 17 aa, Artificial Sequence
  Description of Artificial Sequence: Synthetic peptide
  Seed: MDPRMCSLMQGSTLPRR
MDPRMFSLVQMSTSPRR

SEQ ID NO: 98439 - protein, 17 aa, Artificial Sequence
  Description of Artificial Sequence: Synthetic peptide
  Seed: MDPRMCSLMQGSTLPRR
MDPRMFSLVQNSTAPRR

SEQ ID NO: 98440 - protein, 17 aa, Artificial Sequence
  Description of Artificial Sequence: Synthetic peptide
  Seed: MDPRMCSLMQGSTLPRR
MDPRMFSLVQNSTIPRR

SEQ ID NO: 98441 - protein, 17 aa, Artificial Sequence
  Description of Artificial Sequence: Synthetic peptide
  Seed: MDPRMCSLMQGSTLPRR
MDPRMFSLVQNSTLPRR

SEQ ID NO: 98442 - protein, 17 aa, Artificial Sequence
  Description of Artificial Sequence: Synthetic peptide
  Seed: MDPRMCSLMQGSTLPRR
MDPRMFSLVQNSTNPRR

SEQ ID NO: 98443 - protein, 17 aa, Artificial Sequence
  Description of Artificial Sequence: Synthetic peptide
  Seed: MDPRMCSLMQGSTLPRR
MDPRMFSLVQNSTSPRR

SEQ ID NO: 98444 - protein, 17 aa, Artificial Sequence
  Description of Artificial Sequence: Synthetic peptide
  Seed: MDPRMCSLMQGSTLPRR
MDPRMFSLVQNSTTPRR

SEQ ID NO: 98445 - protein, 17 aa, Artificial Sequence
  Description of Artificial Sequence: Synthetic peptide
  Seed: MDPRMCSLMQGSTLPRR
MDPRMFSLVQNSTVPRR

SEQ ID NO: 98446 - protein, 17 aa, Artificial Sequence
  Description of Artificial Sequence: Synthetic peptide
  Seed: MDPRMCSLMQGSTLPRR
MDPRMFSLVQPSTAPRR

SEQ ID NO: 98447 - protein, 17 aa, Artificial Sequence
  Description of Artificial Sequence: Synthetic peptide
  Seed: MDPRMCSLMQGSTLPRR
MDPRMFSLVQPSTGPRR

SEQ ID NO: 98448 - protein, 17 aa, Artificial Sequence
  Description of Artificial Sequence: Synthetic peptide
  Seed: MDPRMCSLMQGSTLPRR
MDPRMFSLVQPSTHPRR

SEQ ID NO: 98449 - protein, 17 aa, Artificial Sequence
  Description of Artificial Sequence: Synthetic peptide
  Seed: MDPRMCSLMQGSTLPRR
MDPRMFSLVQPSTIPRR

SEQ ID NO: 98450 - protein, 17 aa, Artificial Sequence
  Description of Artificial Sequence: Synthetic peptide
  Seed: MDPRMCSLMQGSTLPRR
MDPRMFSLVQPSTLPRR

SEQ ID NO: 98451 - protein, 17 aa, Artificial Sequence
  Description of Artificial Sequence: Synthetic peptide
  Seed: MDPRMCSLMQGSTLPRR
MDPRMFSLVQPSTMPRR

SEQ ID NO: 98452 - protein, 17 aa, Artificial Sequence
  Description of Artificial Sequence: Synthetic peptide
  Seed: MDPRMCSLMQGSTLPRR
MDPRMFSLVQPSTNPRR

SEQ ID NO: 98453 - protein, 17 aa, Artificial Sequence
  Description of Artificial Sequence: Synthetic peptide
  Seed: MDPRMCSLMQGSTLPRR
MDPRMFSLVQPSTQPRR

SEQ ID NO: 98454 - protein, 17 aa, Artificial Sequence
  Description of Artificial Sequence: Synthetic peptide
  Seed: MDPRMCSLMQGSTLPRR
MDPRMFSLVQPSTSPRR

SEQ ID NO: 98455 - protein, 17 aa, Artificial Sequence
  Description of Artificial Sequence: Synthetic peptide
  Seed: MDPRMCSLMQGSTLPRR
MDPRMFSLVQPSTTPRR

SEQ ID NO: 98456 - protein, 17 aa, Artificial Sequence
  Description of Artificial Sequence: Synthetic peptide
  Seed: MDPRMCSLMQGSTLPRR
MDPRMFSLVQPSTVPRR

SEQ ID NO: 98457 - protein, 17 aa, Artificial Sequence
  Description of Artificial Sequence: Synthetic peptide
  Seed: MDPRMCSLMQGSTLPRR
MDPRMFSLVQSSTAPRR

SEQ ID NO: 98458 - protein, 17 aa, Artificial Sequence
  Description of Artificial Sequence: Synthetic peptide
  Seed: MDPRMCSLMQGSTLPRR
MDPRMFSLVQSSTGPRR

SEQ ID NO: 98459 - protein, 17 aa, Artificial Sequence
  Description of Artificial Sequence: Synthetic peptide
  Seed: MDPRMCSLMQGSTLPRR
MDPRMFSLVQSSTHPRR

SEQ ID NO: 98460 - protein, 17 aa, Artificial Sequence
  Description of Artificial Sequence: Synthetic peptide
  Seed: MDPRMCSLMQGSTLPRR
MDPRMFSLVQSSTIPRR

SEQ ID NO: 98461 - protein, 17 aa, Artificial Sequence
  Description of Artificial Sequence: Synthetic peptide
  Seed: MDPRMCSLMQGSTLPRR
MDPRMFSLVQSSTLPRR

SEQ ID NO: 98462 - protein, 17 aa, Artificial Sequence
  Description of Artificial Sequence: Synthetic peptide
  Seed: MDPRMCSLMQGSTLPRR
MDPRMFSLVQSSTMPRR

SEQ ID NO: 98463 - protein, 17 aa, Artificial Sequence
  Description of Artificial Sequence: Synthetic peptide
  Seed: MDPRMCSLMQGSTLPRR
MDPRMFSLVQSSTNPRR

SEQ ID NO: 98464 - protein, 17 aa, Artificial Sequence
  Description of Artificial Sequence: Synthetic peptide
  Seed: MDPRMCSLMQGSTLPRR
MDPRMFSLVQSSTSPRR

SEQ ID NO: 98465 - protein, 17 aa, Artificial Sequence
  Description of Artificial Sequence: Synthetic peptide
  Seed: MDPRMCSLMQGSTLPRR
MDPRMFSLVQSSTTPRR

SEQ ID NO: 98466 - protein, 17 aa, Artificial Sequence
  Description of Artificial Sequence: Synthetic peptide
  Seed: MDPRMCSLMQGSTLPRR
MDPRMFSLVQSSTVPRR

SEQ ID NO: 98467 - protein, 17 aa, Artificial Sequence
  Description of Artificial Sequence: Synthetic peptide
  Seed: MDPRMCSLMQGSTLPRR
MDPRMFSLVQTSTAPRR

SEQ ID NO: 98468 - protein, 17 aa, Artificial Sequence
  Description of Artificial Sequence: Synthetic peptide
  Seed: MDPRMCSLMQGSTLPRR
MDPRMFSLVQTSTGPRR

SEQ ID NO: 98469 - protein, 17 aa, Artificial Sequence
  Description of Artificial Sequence: Synthetic peptide
  Seed: MDPRMCSLMQGSTLPRR
MDPRMFSLVQTSTHPRR

SEQ ID NO: 98470 - protein, 17 aa, Artificial Sequence
  Description of Artificial Sequence: Synthetic peptide
  Seed: MDPRMCSLMQGSTLPRR
MDPRMFSLVQTSTIPRR

SEQ ID NO: 98471 - protein, 17 aa, Artificial Sequence
  Description of Artificial Sequence: Synthetic peptide
  Seed: MDPRMCSLMQGSTLPRR
MDPRMFSLVQTSTLPRR

SEQ ID NO: 98472 - protein, 17 aa, Artificial Sequence
  Description of Artificial Sequence: Synthetic peptide
  Seed: MDPRMCSLMQGSTLPRR
MDPRMFSLVQTSTMPRR

SEQ ID NO: 98473 - protein, 17 aa, Artificial Sequence
  Description of Artificial Sequence: Synthetic peptide
  Seed: MDPRMCSLMQGSTLPRR
MDPRMFSLVQTSTNPRR

SEQ ID NO: 98474 - protein, 17 aa, Artificial Sequence
  Description of Artificial Sequence: Synthetic peptide
  Seed: MDPRMCSLMQGSTLPRR
MDPRMFSLVQTSTSPRR

SEQ ID NO: 98475 - protein, 17 aa, Artificial Sequence
  Description of Artificial Sequence: Synthetic peptide
  Seed: MDPRMCSLMQGSTLPRR
MDPRMFSLVQTSTTPRR

SEQ ID NO: 98476 - protein, 17 aa, Artificial Sequence
  Description of Artificial Sequence: Synthetic peptide
  Seed: MDPRMCSLMQGSTLPRR
MDPRMFSLVQTSTVPRR

SEQ ID NO: 98477 - protein, 17 aa, Artificial Sequence
  Description of Artificial Sequence: Synthetic peptide
  Seed: MDPRMCSLMQGSTLPRR
MDPRMFSLVQVSTAPRR

SEQ ID NO: 98478 - protein, 17 aa, Artificial Sequence
  Description of Artificial Sequence: Synthetic peptide
  Seed: MDPRMCSLMQGSTLPRR
MDPRMFSLVQVSTGPRR

SEQ ID NO: 98479 - protein, 17 aa, Artificial Sequence
  Description of Artificial Sequence: Synthetic peptide
  Seed: MDPRMCSLMQGSTLPRR
MDPRMFSLVQVSTHPRR

SEQ ID NO: 98480 - protein, 17 aa, Artificial Sequence
  Description of Artificial Sequence: Synthetic peptide
  Seed: MDPRMCSLMQGSTLPRR
MDPRMFSLVQVSTIPRR

SEQ ID NO: 98481 - protein, 17 aa, Artificial Sequence
  Description of Artificial Sequence: Synthetic peptide
  Seed: MDPRMCSLMQGSTLPRR
MDPRMFSLVQVSTLPRR

SEQ ID NO: 98482 - protein, 17 aa, Artificial Sequence
  Description of Artificial Sequence: Synthetic peptide
  Seed: MDPRMCSLMQGSTLPRR
MDPRMFSLVQVSTMPRR

SEQ ID NO: 98483 - protein, 17 aa, Artificial Sequence
  Description of Artificial Sequence: Synthetic peptide
  Seed: MDPRMCSLMQGSTLPRR
MDPRMFSLVQVSTNPRR

SEQ ID NO: 98484 - protein, 17 aa, Artificial Sequence
  Description of Artificial Sequence: Synthetic peptide
  Seed: MDPRMCSLMQGSTLPRR
MDPRMFSLVQVSTSPRR

SEQ ID NO: 98485 - protein, 17 aa, Artificial Sequence
  Description of Artificial Sequence: Synthetic peptide
  Seed: MDPRMCSLMQGSTLPRR
MDPRMFSLVQVSTTPRR

SEQ ID NO: 98486 - protein, 17 aa, Artificial Sequence
  Description of Artificial Sequence: Synthetic peptide
  Seed: MDPRMCSLMQGSTLPRR
MDPRMFSLVQVSTVPRR

SEQ ID NO: 98487 - protein, 17 aa, Artificial Sequence
  Description of Artificial Sequence: Synthetic peptide
  Seed: MDPRMCSLMQGSTLPRR
MDPRMISLAQASTAPRR

SEQ ID NO: 98488 - protein, 17 aa, Artificial Sequence
  Description of Artificial Sequence: Synthetic peptide
  Seed: MDPRMCSLMQGSTLPRR
MDPRMISLAQASTIPRR

SEQ ID NO: 98489 - protein, 17 aa, Artificial Sequence
  Description of Artificial Sequence: Synthetic peptide
  Seed: MDPRMCSLMQGSTLPRR
MDPRMISLAQASTLPRR

SEQ ID NO: 98490 - protein, 17 aa, Artificial Sequence
  Description of Artificial Sequence: Synthetic peptide
  Seed: MDPRMCSLMQGSTLPRR
MDPRMISLAQASTMPRR

SEQ ID NO: 98491 - protein, 17 aa, Artificial Sequence
  Description of Artificial Sequence: Synthetic peptide
  Seed: MDPRMCSLMQGSTLPRR
MDPRMISLAQASTVPRR

SEQ ID NO: 98492 - protein, 17 aa, Artificial Sequence
  Description of Artificial Sequence: Synthetic peptide
  Seed: MDPRMCSLMQGSTLPRR
MDPRMISLAQGSTAPRR

SEQ ID NO: 98493 - protein, 17 aa, Artificial Sequence
  Description of Artificial Sequence: Synthetic peptide
  Seed: MDPRMCSLMQGSTLPRR
MDPRMISLAQGSTIPRR

SEQ ID NO: 98494 - protein, 17 aa, Artificial Sequence
  Description of Artificial Sequence: Synthetic peptide
  Seed: MDPRMCSLMQGSTLPRR
MDPRMISLAQGSTLPRR

SEQ ID NO: 98495 - protein, 17 aa, Artificial Sequence
  Description of Artificial Sequence: Synthetic peptide
  Seed: MDPRMCSLMQGSTLPRR
MDPRMISLAQGSTVPRR

SEQ ID NO: 98496 - protein, 17 aa, Artificial Sequence
  Description of Artificial Sequence: Synthetic peptide
  Seed: MDPRMCSLMQGSTLPRR
MDPRMISLAQPSTLPRR

SEQ ID NO: 98497 - protein, 17 aa, Artificial Sequence
  Description of Artificial Sequence: Synthetic peptide
  Seed: MDPRMCSLMQGSTLPRR
MDPRMISLAQSSTAPRR

SEQ ID NO: 98498 - protein, 17 aa, Artificial Sequence
  Description of Artificial Sequence: Synthetic peptide
  Seed: MDPRMCSLMQGSTLPRR
MDPRMISLAQSSTIPRR

SEQ ID NO: 98499 - protein, 17 aa, Artificial Sequence
  Description of Artificial Sequence: Synthetic peptide
  Seed: MDPRMCSLMQGSTLPRR
MDPRMISLAQSSTLPRR

SEQ ID NO: 98500 - protein, 17 aa, Artificial Sequence
  Description of Artificial Sequence: Synthetic peptide
  Seed: MDPRMCSLMQGSTLPRR
MDPRMISLAQSSTVPRR

SEQ ID NO: 98501 - protein, 17 aa, Artificial Sequence
  Description of Artificial Sequence: Synthetic peptide
  Seed: MDPRMCSLMQGSTLPRR
MDPRMISLIQASTAPRR

SEQ ID NO: 98502 - protein, 17 aa, Artificial Sequence
  Description of Artificial Sequence: Synthetic peptide
  Seed: MDPRMCSLMQGSTLPRR
MDPRMISLIQASTIPRR

SEQ ID NO: 98503 - protein, 17 aa, Artificial Sequence
  Description of Artificial Sequence: Synthetic peptide
  Seed: MDPRMCSLMQGSTLPRR
MDPRMISLIQASTLPRR

SEQ ID NO: 98504 - protein, 17 aa, Artificial Sequence
  Description of Artificial Sequence: Synthetic peptide
  Seed: MDPRMCSLMQGSTLPRR
MDPRMISLIQASTMPRR

SEQ ID NO: 98505 - protein, 17 aa, Artificial Sequence
  Description of Artificial Sequence: Synthetic peptide
  Seed: MDPRMCSLMQGSTLPRR
MDPRMISLIQASTNPRR

SEQ ID NO: 98506 - protein, 17 aa, Artificial Sequence
  Description of Artificial Sequence: Synthetic peptide
  Seed: MDPRMCSLMQGSTLPRR
MDPRMISLIQASTSPRR

SEQ ID NO: 98507 - protein, 17 aa, Artificial Sequence
  Description of Artificial Sequence: Synthetic peptide
  Seed: MDPRMCSLMQGSTLPRR
MDPRMISLIQASTTPRR

SEQ ID NO: 98508 - protein, 17 aa, Artificial Sequence
  Description of Artificial Sequence: Synthetic peptide
  Seed: MDPRMCSLMQGSTLPRR
MDPRMISLIQASTVPRR

SEQ ID NO: 98509 - protein, 17 aa, Artificial Sequence
  Description of Artificial Sequence: Synthetic peptide
  Seed: MDPRMCSLMQGSTLPRR
MDPRMISLIQFSTLPRR

SEQ ID NO: 98510 - protein, 17 aa, Artificial Sequence
  Description of Artificial Sequence: Synthetic peptide
  Seed: MDPRMCSLMQGSTLPRR
MDPRMISLIQGSTAPRR

SEQ ID NO: 98511 - protein, 17 aa, Artificial Sequence
  Description of Artificial Sequence: Synthetic peptide
  Seed: MDPRMCSLMQGSTLPRR
MDPRMISLIQGSTIPRR

SEQ ID NO: 98512 - protein, 17 aa, Artificial Sequence
  Description of Artificial Sequence: Synthetic peptide
  Seed: MDPRMCSLMQGSTLPRR
MDPRMISLIQGSTLPRR

SEQ ID NO: 98513 - protein, 17 aa, Artificial Sequence
  Description of Artificial Sequence: Synthetic peptide
  Seed: MDPRMCSLMQGSTLPRR
MDPRMISLIQGSTMPRR

SEQ ID NO: 98514 - protein, 17 aa, Artificial Sequence
  Description of Artificial Sequence: Synthetic peptide
  Seed: MDPRMCSLMQGSTLPRR
MDPRMISLIQGSTTPRR

SEQ ID NO: 98515 - protein, 17 aa, Artificial Sequence
  Description of Artificial Sequence: Synthetic peptide
  Seed: MDPRMCSLMQGSTLPRR
MDPRMISLIQGSTVPRR

SEQ ID NO: 98516 - protein, 17 aa, Artificial Sequence
  Description of Artificial Sequence: Synthetic peptide
  Seed: MDPRMCSLMQGSTLPRR
MDPRMISLIQPSTAPRR

SEQ ID NO: 98517 - protein, 17 aa, Artificial Sequence
  Description of Artificial Sequence: Synthetic peptide
  Seed: MDPRMCSLMQGSTLPRR
MDPRMISLIQPSTIPRR

SEQ ID NO: 98518 - protein, 17 aa, Artificial Sequence
  Description of Artificial Sequence: Synthetic peptide
  Seed: MDPRMCSLMQGSTLPRR
MDPRMISLIQPSTLPRR

SEQ ID NO: 98519 - protein, 17 aa, Artificial Sequence
  Description of Artificial Sequence: Synthetic peptide
  Seed: MDPRMCSLMQGSTLPRR
MDPRMISLIQPSTNPRR

SEQ ID NO: 98520 - protein, 17 aa, Artificial Sequence
  Description of Artificial Sequence: Synthetic peptide
  Seed: MDPRMCSLMQGSTLPRR
MDPRMISLIQPSTSPRR

SEQ ID NO: 98521 - protein, 17 aa, Artificial Sequence
  Description of Artificial Sequence: Synthetic peptide
  Seed: MDPRMCSLMQGSTLPRR
MDPRMISLIQPSTVPRR

SEQ ID NO: 98522 - protein, 17 aa, Artificial Sequence
  Description of Artificial Sequence: Synthetic peptide
  Seed: MDPRMCSLMQGSTLPRR
MDPRMISLIQSSTAPRR

SEQ ID NO: 98523 - protein, 17 aa, Artificial Sequence
  Description of Artificial Sequence: Synthetic peptide
  Seed: MDPRMCSLMQGSTLPRR
MDPRMISLIQSSTIPRR

SEQ ID NO: 98524 - protein, 17 aa, Artificial Sequence
  Description of Artificial Sequence: Synthetic peptide
  Seed: MDPRMCSLMQGSTLPRR
MDPRMISLIQSSTLPRR

SEQ ID NO: 98525 - protein, 17 aa, Artificial Sequence
  Description of Artificial Sequence: Synthetic peptide
  Seed: MDPRMCSLMQGSTLPRR
MDPRMISLIQSSTVPRR

SEQ ID NO: 98526 - protein, 17 aa, Artificial Sequence
  Description of Artificial Sequence: Synthetic peptide
  Seed: MDPRMCSLMQGSTLPRR
MDPRMISLIQTSTAPRR

SEQ ID NO: 98527 - protein, 17 aa, Artificial Sequence
  Description of Artificial Sequence: Synthetic peptide
  Seed: MDPRMCSLMQGSTLPRR
MDPRMISLIQVSTAPRR

SEQ ID NO: 98528 - protein, 17 aa, Artificial Sequence
  Description of Artificial Sequence: Synthetic peptide
  Seed: MDPRMCSLMQGSTLPRR
MDPRMISLLQASTAPRR

SEQ ID NO: 98529 - protein, 17 aa, Artificial Sequence
  Description of Artificial Sequence: Synthetic peptide
  Seed: MDPRMCSLMQGSTLPRR
MDPRMISLLQASTCPRR

SEQ ID NO: 98530 - protein, 17 aa, Artificial Sequence
  Description of Artificial Sequence: Synthetic peptide
  Seed: MDPRMCSLMQGSTLPRR
MDPRMISLLQASTGPRR

SEQ ID NO: 98531 - protein, 17 aa, Artificial Sequence
  Description of Artificial Sequence: Synthetic peptide
  Seed: MDPRMCSLMQGSTLPRR
MDPRMISLLQASTIPRR

SEQ ID NO: 98532 - protein, 17 aa, Artificial Sequence
  Description of Artificial Sequence: Synthetic peptide
  Seed: MDPRMCSLMQGSTLPRR
MDPRMISLLQASTLPRR

SEQ ID NO: 98533 - protein, 17 aa, Artificial Sequence
  Description of Artificial Sequence: Synthetic peptide
  Seed: MDPRMCSLMQGSTLPRR
MDPRMISLLQASTMPRR

SEQ ID NO: 98534 - protein, 17 aa, Artificial Sequence
  Description of Artificial Sequence: Synthetic peptide
  Seed: MDPRMCSLMQGSTLPRR
MDPRMISLLQASTNPRR

SEQ ID NO: 98535 - protein, 17 aa, Artificial Sequence
  Description of Artificial Sequence: Synthetic peptide
  Seed: MDPRMCSLMQGSTLPRR
MDPRMISLLQASTSPRR

SEQ ID NO: 98536 - protein, 17 aa, Artificial Sequence
  Description of Artificial Sequence: Synthetic peptide
  Seed: MDPRMCSLMQGSTLPRR
MDPRMISLLQASTTPRR

SEQ ID NO: 98537 - protein, 17 aa, Artificial Sequence
  Description of Artificial Sequence: Synthetic peptide
  Seed: MDPRMCSLMQGSTLPRR
MDPRMISLLQASTVPRR

SEQ ID NO: 98538 - protein, 17 aa, Artificial Sequence
  Description of Artificial Sequence: Synthetic peptide
  Seed: MDPRMCSLMQGSTLPRR
MDPRMISLLQFSTLPRR

SEQ ID NO: 98539 - protein, 17 aa, Artificial Sequence
  Description of Artificial Sequence: Synthetic peptide
  Seed: MDPRMCSLMQGSTLPRR
MDPRMISLLQGSTAPRR

SEQ ID NO: 98540 - protein, 17 aa, Artificial Sequence
  Description of Artificial Sequence: Synthetic peptide
  Seed: MDPRMCSLMQGSTLPRR
MDPRMISLLQGSTGPRR

SEQ ID NO: 98541 - protein, 17 aa, Artificial Sequence
  Description of Artificial Sequence: Synthetic peptide
  Seed: MDPRMCSLMQGSTLPRR
MDPRMISLLQGSTIPRR

SEQ ID NO: 98542 - protein, 17 aa, Artificial Sequence
  Description of Artificial Sequence: Synthetic peptide
  Seed: MDPRMCSLMQGSTLPRR
MDPRMISLLQGSTLPRR

SEQ ID NO: 98543 - protein, 17 aa, Artificial Sequence
  Description of Artificial Sequence: Synthetic peptide
  Seed: MDPRMCSLMQGSTLPRR
MDPRMISLLQGSTMPRR

SEQ ID NO: 98544 - protein, 17 aa, Artificial Sequence
  Description of Artificial Sequence: Synthetic peptide
  Seed: MDPRMCSLMQGSTLPRR
MDPRMISLLQGSTSPRR

SEQ ID NO: 98545 - protein, 17 aa, Artificial Sequence
  Description of Artificial Sequence: Synthetic peptide
  Seed: MDPRMCSLMQGSTLPRR
MDPRMISLLQGSTTPRR

SEQ ID NO: 98546 - protein, 17 aa, Artificial Sequence
  Description of Artificial Sequence: Synthetic peptide
  Seed: MDPRMCSLMQGSTLPRR
MDPRMISLLQGSTVPRR

SEQ ID NO: 98547 - protein, 17 aa, Artificial Sequence
  Description of Artificial Sequence: Synthetic peptide
  Seed: MDPRMCSLMQGSTLPRR
MDPRMISLLQISTAPRR

SEQ ID NO: 98548 - protein, 17 aa, Artificial Sequence
  Description of Artificial Sequence: Synthetic peptide
  Seed: MDPRMCSLMQGSTLPRR
MDPRMISLLQISTNPRR

SEQ ID NO: 98549 - protein, 17 aa, Artificial Sequence
  Description of Artificial Sequence: Synthetic peptide
  Seed: MDPRMCSLMQGSTLPRR
MDPRMISLLQISTSPRR

SEQ ID NO: 98550 - protein, 17 aa, Artificial Sequence
  Description of Artificial Sequence: Synthetic peptide
  Seed: MDPRMCSLMQGSTLPRR
MDPRMISLLQNSTAPRR

SEQ ID NO: 98551 - protein, 17 aa, Artificial Sequence
  Description of Artificial Sequence: Synthetic peptide
  Seed: MDPRMCSLMQGSTLPRR
MDPRMISLLQNSTIPRR

SEQ ID NO: 98552 - protein, 17 aa, Artificial Sequence
  Description of Artificial Sequence: Synthetic peptide
  Seed: MDPRMCSLMQGSTLPRR
MDPRMISLLQNSTLPRR

SEQ ID NO: 98553 - protein, 17 aa, Artificial Sequence
  Description of Artificial Sequence: Synthetic peptide
  Seed: MDPRMCSLMQGSTLPRR
MDPRMISLLQNSTTPRR

SEQ ID NO: 98554 - protein, 17 aa, Artificial Sequence
  Description of Artificial Sequence: Synthetic peptide
  Seed: MDPRMCSLMQGSTLPRR
MDPRMISLLQNSTVPRR

SEQ ID NO: 98555 - protein, 17 aa, Artificial Sequence
  Description of Artificial Sequence: Synthetic peptide
  Seed: MDPRMCSLMQGSTLPRR
MDPRMISLLQPSTAPRR

SEQ ID NO: 98556 - protein, 17 aa, Artificial Sequence
  Description of Artificial Sequence: Synthetic peptide
  Seed: MDPRMCSLMQGSTLPRR
MDPRMISLLQPSTIPRR

SEQ ID NO: 98557 - protein, 17 aa, Artificial Sequence
  Description of Artificial Sequence: Synthetic peptide
  Seed: MDPRMCSLMQGSTLPRR
MDPRMISLLQPSTLPRR

SEQ ID NO: 98558 - protein, 17 aa, Artificial Sequence
  Description of Artificial Sequence: Synthetic peptide
  Seed: MDPRMCSLMQGSTLPRR
MDPRMISLLQPSTMPRR

SEQ ID NO: 98559 - protein, 17 aa, Artificial Sequence
  Description of Artificial Sequence: Synthetic peptide
  Seed: MDPRMCSLMQGSTLPRR
MDPRMISLLQPSTNPRR

SEQ ID NO: 98560 - protein, 17 aa, Artificial Sequence
  Description of Artificial Sequence: Synthetic peptide
  Seed: MDPRMCSLMQGSTLPRR
MDPRMISLLQPSTSPRR

SEQ ID NO: 98561 - protein, 17 aa, Artificial Sequence
  Description of Artificial Sequence: Synthetic peptide
  Seed: MDPRMCSLMQGSTLPRR
MDPRMISLLQPSTTPRR

SEQ ID NO: 98562 - protein, 17 aa, Artificial Sequence
  Description of Artificial Sequence: Synthetic peptide
  Seed: MDPRMCSLMQGSTLPRR
MDPRMISLLQPSTVPRR

SEQ ID NO: 98563 - protein, 17 aa, Artificial Sequence
  Description of Artificial Sequence: Synthetic peptide
  Seed: MDPRMCSLMQGSTLPRR
MDPRMISLLQSSTAPRR

SEQ ID NO: 98564 - protein, 17 aa, Artificial Sequence
  Description of Artificial Sequence: Synthetic peptide
  Seed: MDPRMCSLMQGSTLPRR
MDPRMISLLQSSTGPRR

SEQ ID NO: 98565 - protein, 17 aa, Artificial Sequence
  Description of Artificial Sequence: Synthetic peptide
  Seed: MDPRMCSLMQGSTLPRR
MDPRMISLLQSSTIPRR

SEQ ID NO: 98566 - protein, 17 aa, Artificial Sequence
  Description of Artificial Sequence: Synthetic peptide
  Seed: MDPRMCSLMQGSTLPRR
MDPRMISLLQSSTLPRR

SEQ ID NO: 98567 - protein, 17 aa, Artificial Sequence
  Description of Artificial Sequence: Synthetic peptide
  Seed: MDPRMCSLMQGSTLPRR
MDPRMISLLQSSTMPRR

SEQ ID NO: 98568 - protein, 17 aa, Artificial Sequence
  Description of Artificial Sequence: Synthetic peptide
  Seed: MDPRMCSLMQGSTLPRR
MDPRMISLLQSSTNPRR

SEQ ID NO: 98569 - protein, 17 aa, Artificial Sequence
  Description of Artificial Sequence: Synthetic peptide
  Seed: MDPRMCSLMQGSTLPRR
MDPRMISLLQSSTSPRR

SEQ ID NO: 98570 - protein, 17 aa, Artificial Sequence
  Description of Artificial Sequence: Synthetic peptide
  Seed: MDPRMCSLMQGSTLPRR
MDPRMISLLQSSTTPRR

SEQ ID NO: 98571 - protein, 17 aa, Artificial Sequence
  Description of Artificial Sequence: Synthetic peptide
  Seed: MDPRMCSLMQGSTLPRR
MDPRMISLLQSSTVPRR

SEQ ID NO: 98572 - protein, 17 aa, Artificial Sequence
  Description of Artificial Sequence: Synthetic peptide
  Seed: MDPRMCSLMQGSTLPRR
MDPRMISLLQTSTAPRR

SEQ ID NO: 98573 - protein, 17 aa, Artificial Sequence
  Description of Artificial Sequence: Synthetic peptide
  Seed: MDPRMCSLMQGSTLPRR
MDPRMISLLQTSTIPRR

SEQ ID NO: 98574 - protein, 17 aa, Artificial Sequence
  Description of Artificial Sequence: Synthetic peptide
  Seed: MDPRMCSLMQGSTLPRR
MDPRMISLLQTSTLPRR

SEQ ID NO: 98575 - protein, 17 aa, Artificial Sequence
  Description of Artificial Sequence: Synthetic peptide
  Seed: MDPRMCSLMQGSTLPRR
MDPRMISLLQTSTMPRR

SEQ ID NO: 98576 - protein, 17 aa, Artificial Sequence
  Description of Artificial Sequence: Synthetic peptide
  Seed: MDPRMCSLMQGSTLPRR
MDPRMISLLQTSTNPRR

SEQ ID NO: 98577 - protein, 17 aa, Artificial Sequence
  Description of Artificial Sequence: Synthetic peptide
  Seed: MDPRMCSLMQGSTLPRR
MDPRMISLLQTSTSPRR

SEQ ID NO: 98578 - protein, 17 aa, Artificial Sequence
  Description of Artificial Sequence: Synthetic peptide
  Seed: MDPRMCSLMQGSTLPRR
MDPRMISLLQTSTTPRR

SEQ ID NO: 98579 - protein, 17 aa, Artificial Sequence
  Description of Artificial Sequence: Synthetic peptide
  Seed: MDPRMCSLMQGSTLPRR
MDPRMISLLQTSTVPRR

SEQ ID NO: 98580 - protein, 17 aa, Artificial Sequence
  Description of Artificial Sequence: Synthetic peptide
  Seed: MDPRMCSLMQGSTLPRR
MDPRMISLLQVSTAPRR

SEQ ID NO: 98581 - protein, 17 aa, Artificial Sequence
  Description of Artificial Sequence: Synthetic peptide
  Seed: MDPRMCSLMQGSTLPRR
MDPRMISLLQVSTIPRR

SEQ ID NO: 98582 - protein, 17 aa, Artificial Sequence
  Description of Artificial Sequence: Synthetic peptide
  Seed: MDPRMCSLMQGSTLPRR
MDPRMISLLQVSTLPRR

SEQ ID NO: 98583 - protein, 17 aa, Artificial Sequence
  Description of Artificial Sequence: Synthetic peptide
  Seed: MDPRMCSLMQGSTLPRR
MDPRMISLLQVSTNPRR

SEQ ID NO: 98584 - protein, 17 aa, Artificial Sequence
  Description of Artificial Sequence: Synthetic peptide
  Seed: MDPRMCSLMQGSTLPRR
MDPRMISLLQVSTSPRR

SEQ ID NO: 98585 - protein, 17 aa, Artificial Sequence
  Description of Artificial Sequence: Synthetic peptide
  Seed: MDPRMCSLMQGSTLPRR
MDPRMISLLQVSTTPRR

SEQ ID NO: 98586 - protein, 17 aa, Artificial Sequence
  Description of Artificial Sequence: Synthetic peptide
  Seed: MDPRMCSLMQGSTLPRR
MDPRMISLLQVSTVPRR

SEQ ID NO: 98587 - protein, 17 aa, Artificial Sequence
  Description of Artificial Sequence: Synthetic peptide
  Seed: MDPRMCSLMQGSTLPRR
MDPRMISLMQASTAPRR

SEQ ID NO: 98588 - protein, 17 aa, Artificial Sequence
  Description of Artificial Sequence: Synthetic peptide
  Seed: MDPRMCSLMQGSTLPRR
MDPRMISLMQASTCPRR

SEQ ID NO: 98589 - protein, 17 aa, Artificial Sequence
  Description of Artificial Sequence: Synthetic peptide
  Seed: MDPRMCSLMQGSTLPRR
MDPRMISLMQASTGPRR

SEQ ID NO: 98590 - protein, 17 aa, Artificial Sequence
  Description of Artificial Sequence: Synthetic peptide
  Seed: MDPRMCSLMQGSTLPRR
MDPRMISLMQASTHPRR

SEQ ID NO: 98591 - protein, 17 aa, Artificial Sequence
  Description of Artificial Sequence: Synthetic peptide
  Seed: MDPRMCSLMQGSTLPRR
MDPRMISLMQASTIPRR

SEQ ID NO: 98592 - protein, 17 aa, Artificial Sequence
  Description of Artificial Sequence: Synthetic peptide
  Seed: MDPRMCSLMQGSTLPRR
MDPRMISLMQASTLPRR

SEQ ID NO: 98593 - protein, 17 aa, Artificial Sequence
  Description of Artificial Sequence: Synthetic peptide
  Seed: MDPRMCSLMQGSTLPRR
MDPRMISLMQASTMPRR

SEQ ID NO: 98594 - protein, 17 aa, Artificial Sequence
  Description of Artificial Sequence: Synthetic peptide
  Seed: MDPRMCSLMQGSTLPRR
MDPRMISLMQASTNPRR

SEQ ID NO: 98595 - protein, 17 aa, Artificial Sequence
  Description of Artificial Sequence: Synthetic peptide
  Seed: MDPRMCSLMQGSTLPRR
MDPRMISLMQASTSPRR

SEQ ID NO: 98596 - protein, 17 aa, Artificial Sequence
  Description of Artificial Sequence: Synthetic peptide
  Seed: MDPRMCSLMQGSTLPRR
MDPRMISLMQASTTPRR

SEQ ID NO: 98597 - protein, 17 aa, Artificial Sequence
  Description of Artificial Sequence: Synthetic peptide
  Seed: MDPRMCSLMQGSTLPRR
MDPRMISLMQASTVPRR

SEQ ID NO: 98598 - protein, 17 aa, Artificial Sequence
  Description of Artificial Sequence: Synthetic peptide
  Seed: MDPRMCSLMQGSTLPRR
MDPRMISLMQGSTAPRR

SEQ ID NO: 98599 - protein, 17 aa, Artificial Sequence
  Description of Artificial Sequence: Synthetic peptide
  Seed: MDPRMCSLMQGSTLPRR
MDPRMISLMQGSTGPRR

SEQ ID NO: 98600 - protein, 17 aa, Artificial Sequence
  Description of Artificial Sequence: Synthetic peptide
  Seed: MDPRMCSLMQGSTLPRR
MDPRMISLMQGSTIPRR

SEQ ID NO: 98601 - protein, 17 aa, Artificial Sequence
  Description of Artificial Sequence: Synthetic peptide
  Seed: MDPRMCSLMQGSTLPRR
MDPRMISLMQGSTLPRR

SEQ ID NO: 98602 - protein, 17 aa, Artificial Sequence
  Description of Artificial Sequence: Synthetic peptide
  Seed: MDPRMCSLMQGSTLPRR
MDPRMISLMQGSTMPRR

SEQ ID NO: 98603 - protein, 17 aa, Artificial Sequence
  Description of Artificial Sequence: Synthetic peptide
  Seed: MDPRMCSLMQGSTLPRR
MDPRMISLMQGSTSPRR

SEQ ID NO: 98604 - protein, 17 aa, Artificial Sequence
  Description of Artificial Sequence: Synthetic peptide
  Seed: MDPRMCSLMQGSTLPRR
MDPRMISLMQGSTTPRR

SEQ ID NO: 98605 - protein, 17 aa, Artificial Sequence
  Description of Artificial Sequence: Synthetic peptide
  Seed: MDPRMCSLMQGSTLPRR
MDPRMISLMQGSTVPRR

SEQ ID NO: 98606 - protein, 17 aa, Artificial Sequence
  Description of Artificial Sequence: Synthetic peptide
  Seed: MDPRMCSLMQGSTLPRR
MDPRMISLMQISTAPRR

SEQ ID NO: 98607 - protein, 17 aa, Artificial Sequence
  Description of Artificial Sequence: Synthetic peptide
  Seed: MDPRMCSLMQGSTLPRR
MDPRMISLMQISTNPRR

SEQ ID NO: 98608 - protein, 17 aa, Artificial Sequence
  Description of Artificial Sequence: Synthetic peptide
  Seed: MDPRMCSLMQGSTLPRR
MDPRMISLMQISTSPRR

SEQ ID NO: 98609 - protein, 17 aa, Artificial Sequence
  Description of Artificial Sequence: Synthetic peptide
  Seed: MDPRMCSLMQGSTLPRR
MDPRMISLMQISTTPRR

SEQ ID NO: 98610 - protein, 17 aa, Artificial Sequence
  Description of Artificial Sequence: Synthetic peptide
  Seed: MDPRMCSLMQGSTLPRR
MDPRMISLMQLSTAPRR

SEQ ID NO: 98611 - protein, 17 aa, Artificial Sequence
  Description of Artificial Sequence: Synthetic peptide
  Seed: MDPRMCSLMQGSTLPRR
MDPRMISLMQMSTAPRR

SEQ ID NO: 98612 - protein, 17 aa, Artificial Sequence
  Description of Artificial Sequence: Synthetic peptide
  Seed: MDPRMCSLMQGSTLPRR
MDPRMISLMQNSTAPRR

SEQ ID NO: 98613 - protein, 17 aa, Artificial Sequence
  Description of Artificial Sequence: Synthetic peptide
  Seed: MDPRMCSLMQGSTLPRR
MDPRMISLMQNSTIPRR

SEQ ID NO: 98614 - protein, 17 aa, Artificial Sequence
  Description of Artificial Sequence: Synthetic peptide
  Seed: MDPRMCSLMQGSTLPRR
MDPRMISLMQNSTLPRR

SEQ ID NO: 98615 - protein, 17 aa, Artificial Sequence
  Description of Artificial Sequence: Synthetic peptide
  Seed: MDPRMCSLMQGSTLPRR
MDPRMISLMQNSTVPRR

SEQ ID NO: 98616 - protein, 17 aa, Artificial Sequence
  Description of Artificial Sequence: Synthetic peptide
  Seed: MDPRMCSLMQGSTLPRR
MDPRMISLMQPSTAPRR

SEQ ID NO: 98617 - protein, 17 aa, Artificial Sequence
  Description of Artificial Sequence: Synthetic peptide
  Seed: MDPRMCSLMQGSTLPRR
MDPRMISLMQPSTIPRR

SEQ ID NO: 98618 - protein, 17 aa, Artificial Sequence
  Description of Artificial Sequence: Synthetic peptide
  Seed: MDPRMCSLMQGSTLPRR
MDPRMISLMQPSTLPRR

SEQ ID NO: 98619 - protein, 17 aa, Artificial Sequence
  Description of Artificial Sequence: Synthetic peptide
  Seed: MDPRMCSLMQGSTLPRR
MDPRMISLMQPSTMPRR

SEQ ID NO: 98620 - protein, 17 aa, Artificial Sequence
  Description of Artificial Sequence: Synthetic peptide
  Seed: MDPRMCSLMQGSTLPRR
MDPRMISLMQPSTNPRR

SEQ ID NO: 98621 - protein, 17 aa, Artificial Sequence
  Description of Artificial Sequence: Synthetic peptide
  Seed: MDPRMCSLMQGSTLPRR
MDPRMISLMQPSTSPRR

SEQ ID NO: 98622 - protein, 17 aa, Artificial Sequence
  Description of Artificial Sequence: Synthetic peptide
  Seed: MDPRMCSLMQGSTLPRR
MDPRMISLMQPSTTPRR

SEQ ID NO: 98623 - protein, 17 aa, Artificial Sequence
  Description of Artificial Sequence: Synthetic peptide
  Seed: MDPRMCSLMQGSTLPRR
MDPRMISLMQPSTVPRR

SEQ ID NO: 98624 - protein, 17 aa, Artificial Sequence
  Description of Artificial Sequence: Synthetic peptide
  Seed: MDPRMCSLMQGSTLPRR
MDPRMISLMQSSTAPRR

SEQ ID NO: 98625 - protein, 17 aa, Artificial Sequence
  Description of Artificial Sequence: Synthetic peptide
  Seed: MDPRMCSLMQGSTLPRR
MDPRMISLMQSSTIPRR

SEQ ID NO: 98626 - protein, 17 aa, Artificial Sequence
  Description of Artificial Sequence: Synthetic peptide
  Seed: MDPRMCSLMQGSTLPRR
MDPRMISLMQSSTLPRR

SEQ ID NO: 98627 - protein, 17 aa, Artificial Sequence
  Description of Artificial Sequence: Synthetic peptide
  Seed: MDPRMCSLMQGSTLPRR
MDPRMISLMQSSTMPRR

SEQ ID NO: 98628 - protein, 17 aa, Artificial Sequence
  Description of Artificial Sequence: Synthetic peptide
  Seed: MDPRMCSLMQGSTLPRR
MDPRMISLMQSSTNPRR

SEQ ID NO: 98629 - protein, 17 aa, Artificial Sequence
  Description of Artificial Sequence: Synthetic peptide
  Seed: MDPRMCSLMQGSTLPRR
MDPRMISLMQSSTSPRR

SEQ ID NO: 98630 - protein, 17 aa, Artificial Sequence
  Description of Artificial Sequence: Synthetic peptide
  Seed: MDPRMCSLMQGSTLPRR
MDPRMISLMQSSTTPRR

SEQ ID NO: 98631 - protein, 17 aa, Artificial Sequence
  Description of Artificial Sequence: Synthetic peptide
  Seed: MDPRMCSLMQGSTLPRR
MDPRMISLMQSSTVPRR

SEQ ID NO: 98632 - protein, 17 aa, Artificial Sequence
  Description of Artificial Sequence: Synthetic peptide
  Seed: MDPRMCSLMQGSTLPRR
MDPRMISLMQTSTAPRR

SEQ ID NO: 98633 - protein, 17 aa, Artificial Sequence
  Description of Artificial Sequence: Synthetic peptide
  Seed: MDPRMCSLMQGSTLPRR
MDPRMISLMQTSTIPRR

SEQ ID NO: 98634 - protein, 17 aa, Artificial Sequence
  Description of Artificial Sequence: Synthetic peptide
  Seed: MDPRMCSLMQGSTLPRR
MDPRMISLMQTSTLPRR

SEQ ID NO: 98635 - protein, 17 aa, Artificial Sequence
  Description of Artificial Sequence: Synthetic peptide
  Seed: MDPRMCSLMQGSTLPRR
MDPRMISLMQTSTNPRR

SEQ ID NO: 98636 - protein, 17 aa, Artificial Sequence
  Description of Artificial Sequence: Synthetic peptide
  Seed: MDPRMCSLMQGSTLPRR
MDPRMISLMQTSTSPRR

SEQ ID NO: 98637 - protein, 17 aa, Artificial Sequence
  Description of Artificial Sequence: Synthetic peptide
  Seed: MDPRMCSLMQGSTLPRR
MDPRMISLMQTSTTPRR

SEQ ID NO: 98638 - protein, 17 aa, Artificial Sequence
  Description of Artificial Sequence: Synthetic peptide
  Seed: MDPRMCSLMQGSTLPRR
MDPRMISLMQTSTVPRR

SEQ ID NO: 98639 - protein, 17 aa, Artificial Sequence
  Description of Artificial Sequence: Synthetic peptide
  Seed: MDPRMCSLMQGSTLPRR
MDPRMISLMQVSTAPRR

SEQ ID NO: 98640 - protein, 17 aa, Artificial Sequence
  Description of Artificial Sequence: Synthetic peptide
  Seed: MDPRMCSLMQGSTLPRR
MDPRMISLMQVSTIPRR

SEQ ID NO: 98641 - protein, 17 aa, Artificial Sequence
  Description of Artificial Sequence: Synthetic peptide
  Seed: MDPRMCSLMQGSTLPRR
MDPRMISLMQVSTLPRR

SEQ ID NO: 98642 - protein, 17 aa, Artificial Sequence
  Description of Artificial Sequence: Synthetic peptide
  Seed: MDPRMCSLMQGSTLPRR
MDPRMISLMQVSTMPRR

SEQ ID NO: 98643 - protein, 17 aa, Artificial Sequence
  Description of Artificial Sequence: Synthetic peptide
  Seed: MDPRMCSLMQGSTLPRR
MDPRMISLMQVSTNPRR

SEQ ID NO: 98644 - protein, 17 aa, Artificial Sequence
  Description of Artificial Sequence: Synthetic peptide
  Seed: MDPRMCSLMQGSTLPRR
MDPRMISLMQVSTSPRR

SEQ ID NO: 98645 - protein, 17 aa, Artificial Sequence
  Description of Artificial Sequence: Synthetic peptide
  Seed: MDPRMCSLMQGSTLPRR
MDPRMISLMQVSTTPRR

SEQ ID NO: 98646 - protein, 17 aa, Artificial Sequence
  Description of Artificial Sequence: Synthetic peptide
  Seed: MDPRMCSLMQGSTLPRR
MDPRMISLMQVSTVPRR

SEQ ID NO: 98647 - protein, 17 aa, Artificial Sequence
  Description of Artificial Sequence: Synthetic peptide
  Seed: MDPRMCSLMQGSTLPRR
MDPRMISLQQASTAPRR

SEQ ID NO: 98648 - protein, 17 aa, Artificial Sequence
  Description of Artificial Sequence: Synthetic peptide
  Seed: MDPRMCSLMQGSTLPRR
MDPRMISLQQASTIPRR

SEQ ID NO: 98649 - protein, 17 aa, Artificial Sequence
  Description of Artificial Sequence: Synthetic peptide
  Seed: MDPRMCSLMQGSTLPRR
MDPRMISLQQASTLPRR

SEQ ID NO: 98650 - protein, 17 aa, Artificial Sequence
  Description of Artificial Sequence: Synthetic peptide
  Seed: MDPRMCSLMQGSTLPRR
MDPRMISLQQASTVPRR

SEQ ID NO: 98651 - protein, 17 aa, Artificial Sequence
  Description of Artificial Sequence: Synthetic peptide
  Seed: MDPRMCSLMQGSTLPRR
MDPRMISLQQGSTAPRR

SEQ ID NO: 98652 - protein, 17 aa, Artificial Sequence
  Description of Artificial Sequence: Synthetic peptide
  Seed: MDPRMCSLMQGSTLPRR
MDPRMISLQQGSTIPRR

SEQ ID NO: 98653 - protein, 17 aa, Artificial Sequence
  Description of Artificial Sequence: Synthetic peptide
  Seed: MDPRMCSLMQGSTLPRR
MDPRMISLQQGSTLPRR

SEQ ID NO: 98654 - protein, 17 aa, Artificial Sequence
  Description of Artificial Sequence: Synthetic peptide
  Seed: MDPRMCSLMQGSTLPRR
MDPRMISLQQGSTVPRR

SEQ ID NO: 98655 - protein, 17 aa, Artificial Sequence
  Description of Artificial Sequence: Synthetic peptide
  Seed: MDPRMCSLMQGSTLPRR
MDPRMISLQQSSTLPRR

SEQ ID NO: 98656 - protein, 17 aa, Artificial Sequence
  Description of Artificial Sequence: Synthetic peptide
  Seed: MDPRMCSLMQGSTLPRR
MDPRMISLQQSSTVPRR

SEQ ID NO: 98657 - protein, 17 aa, Artificial Sequence
  Description of Artificial Sequence: Synthetic peptide
  Seed: MDPRMCSLMQGSTLPRR
MDPRMISLSQASTLPRR

SEQ ID NO: 98658 - protein, 17 aa, Artificial Sequence
  Description of Artificial Sequence: Synthetic peptide
  Seed: MDPRMCSLMQGSTLPRR
MDPRMISLVQASTAPRR

SEQ ID NO: 98659 - protein, 17 aa, Artificial Sequence
  Description of Artificial Sequence: Synthetic peptide
  Seed: MDPRMCSLMQGSTLPRR
MDPRMISLVQASTIPRR

SEQ ID NO: 98660 - protein, 17 aa, Artificial Sequence
  Description of Artificial Sequence: Synthetic peptide
  Seed: MDPRMCSLMQGSTLPRR
MDPRMISLVQASTLPRR

SEQ ID NO: 98661 - protein, 17 aa, Artificial Sequence
  Description of Artificial Sequence: Synthetic peptide
  Seed: MDPRMCSLMQGSTLPRR
MDPRMISLVQASTVPRR

SEQ ID NO: 98662 - protein, 17 aa, Artificial Sequence
  Description of Artificial Sequence: Synthetic peptide
  Seed: MDPRMCSLMQGSTLPRR
MDPRMISLVQGSTAPRR

SEQ ID NO: 98663 - protein, 17 aa, Artificial Sequence
  Description of Artificial Sequence: Synthetic peptide
  Seed: MDPRMCSLMQGSTLPRR
MDPRMISLVQGSTIPRR

SEQ ID NO: 98664 - protein, 17 aa, Artificial Sequence
  Description of Artificial Sequence: Synthetic peptide
  Seed: MDPRMCSLMQGSTLPRR
MDPRMISLVQGSTLPRR

SEQ ID NO: 98665 - protein, 17 aa, Artificial Sequence
  Description of Artificial Sequence: Synthetic peptide
  Seed: MDPRMCSLMQGSTLPRR
MDPRMISLVQGSTVPRR

SEQ ID NO: 98666 - protein, 17 aa, Artificial Sequence
  Description of Artificial Sequence: Synthetic peptide
  Seed: MDPRMCSLMQGSTLPRR
MDPRMISLVQSSTLPRR

SEQ ID NO: 98667 - protein, 17 aa, Artificial Sequence
  Description of Artificial Sequence: Synthetic peptide
  Seed: MDPRMCSLMQGSTLPRR
MDPRMISLVQSSTVPRR

SEQ ID NO: 98668 - protein, 17 aa, Artificial Sequence
  Description of Artificial Sequence: Synthetic peptide
  Seed: MDPRMCSLMQGSTLPRR
MDPRMLSLAQASTAPRR

SEQ ID NO: 98669 - protein, 17 aa, Artificial Sequence
  Description of Artificial Sequence: Synthetic peptide
  Seed: MDPRMCSLMQGSTLPRR
MDPRMLSLAQASTIPRR

SEQ ID NO: 98670 - protein, 17 aa, Artificial Sequence
  Description of Artificial Sequence: Synthetic peptide
  Seed: MDPRMCSLMQGSTLPRR
MDPRMLSLAQASTLPRR

SEQ ID NO: 98671 - protein, 17 aa, Artificial Sequence
  Description of Artificial Sequence: Synthetic peptide
  Seed: MDPRMCSLMQGSTLPRR
MDPRMLSLAQASTMPRR

SEQ ID NO: 98672 - protein, 17 aa, Artificial Sequence
  Description of Artificial Sequence: Synthetic peptide
  Seed: MDPRMCSLMQGSTLPRR
MDPRMLSLAQASTSPRR

SEQ ID NO: 98673 - protein, 17 aa, Artificial Sequence
  Description of Artificial Sequence: Synthetic peptide
  Seed: MDPRMCSLMQGSTLPRR
MDPRMLSLAQASTVPRR

SEQ ID NO: 98674 - protein, 17 aa, Artificial Sequence
  Description of Artificial Sequence: Synthetic peptide
  Seed: MDPRMCSLMQGSTLPRR
MDPRMLSLAQGSTAPRR

SEQ ID NO: 98675 - protein, 17 aa, Artificial Sequence
  Description of Artificial Sequence: Synthetic peptide
  Seed: MDPRMCSLMQGSTLPRR
MDPRMLSLAQGSTIPRR

SEQ ID NO: 98676 - protein, 17 aa, Artificial Sequence
  Description of Artificial Sequence: Synthetic peptide
  Seed: MDPRMCSLMQGSTLPRR
MDPRMLSLAQGSTLPRR

SEQ ID NO: 98677 - protein, 17 aa, Artificial Sequence
  Description of Artificial Sequence: Synthetic peptide
  Seed: MDPRMCSLMQGSTLPRR
MDPRMLSLAQGSTVPRR

SEQ ID NO: 98678 - protein, 17 aa, Artificial Sequence
  Description of Artificial Sequence: Synthetic peptide
  Seed: MDPRMCSLMQGSTLPRR
MDPRMLSLAQSSTLPRR

SEQ ID NO: 98679 - protein, 17 aa, Artificial Sequence
  Description of Artificial Sequence: Synthetic peptide
  Seed: MDPRMCSLMQGSTLPRR
MDPRMLSLAQSSTVPRR

SEQ ID NO: 98680 - protein, 17 aa, Artificial Sequence
  Description of Artificial Sequence: Synthetic peptide
  Seed: MDPRMCSLMQGSTLPRR
MDPRMLSLIQASTAPRR

SEQ ID NO: 98681 - protein, 17 aa, Artificial Sequence
  Description of Artificial Sequence: Synthetic peptide
  Seed: MDPRMCSLMQGSTLPRR
MDPRMLSLIQASTIPRR

SEQ ID NO: 98682 - protein, 17 aa, Artificial Sequence
  Description of Artificial Sequence: Synthetic peptide
  Seed: MDPRMCSLMQGSTLPRR
MDPRMLSLIQASTLPRR

SEQ ID NO: 98683 - protein, 17 aa, Artificial Sequence
  Description of Artificial Sequence: Synthetic peptide
  Seed: MDPRMCSLMQGSTLPRR
MDPRMLSLIQASTMPRR

SEQ ID NO: 98684 - protein, 17 aa, Artificial Sequence
  Description of Artificial Sequence: Synthetic peptide
  Seed: MDPRMCSLMQGSTLPRR
MDPRMLSLIQASTNPRR

SEQ ID NO: 98685 - protein, 17 aa, Artificial Sequence
  Description of Artificial Sequence: Synthetic peptide
  Seed: MDPRMCSLMQGSTLPRR
MDPRMLSLIQASTSPRR

SEQ ID NO: 98686 - protein, 17 aa, Artificial Sequence
  Description of Artificial Sequence: Synthetic peptide
  Seed: MDPRMCSLMQGSTLPRR
MDPRMLSLIQASTTPRR

SEQ ID NO: 98687 - protein, 17 aa, Artificial Sequence
  Description of Artificial Sequence: Synthetic peptide
  Seed: MDPRMCSLMQGSTLPRR
MDPRMLSLIQASTVPRR

SEQ ID NO: 98688 - protein, 17 aa, Artificial Sequence
  Description of Artificial Sequence: Synthetic peptide
  Seed: MDPRMCSLMQGSTLPRR
MDPRMLSLIQFSTLPRR

SEQ ID NO: 98689 - protein, 17 aa, Artificial Sequence
  Description of Artificial Sequence: Synthetic peptide
  Seed: MDPRMCSLMQGSTLPRR
MDPRMLSLIQGSTAPRR

SEQ ID NO: 98690 - protein, 17 aa, Artificial Sequence
  Description of Artificial Sequence: Synthetic peptide
  Seed: MDPRMCSLMQGSTLPRR
MDPRMLSLIQGSTIPRR

SEQ ID NO: 98691 - protein, 17 aa, Artificial Sequence
  Description of Artificial Sequence: Synthetic peptide
  Seed: MDPRMCSLMQGSTLPRR
MDPRMLSLIQGSTLPRR

SEQ ID NO: 98692 - protein, 17 aa, Artificial Sequence
  Description of Artificial Sequence: Synthetic peptide
  Seed: MDPRMCSLMQGSTLPRR
MDPRMLSLIQGSTVPRR

SEQ ID NO: 98693 - protein, 17 aa, Artificial Sequence
  Description of Artificial Sequence: Synthetic peptide
  Seed: MDPRMCSLMQGSTLPRR
MDPRMLSLIQPSTAPRR

SEQ ID NO: 98694 - protein, 17 aa, Artificial Sequence
  Description of Artificial Sequence: Synthetic peptide
  Seed: MDPRMCSLMQGSTLPRR
MDPRMLSLIQPSTIPRR

SEQ ID NO: 98695 - protein, 17 aa, Artificial Sequence
  Description of Artificial Sequence: Synthetic peptide
  Seed: MDPRMCSLMQGSTLPRR
MDPRMLSLIQPSTLPRR

SEQ ID NO: 98696 - protein, 17 aa, Artificial Sequence
  Description of Artificial Sequence: Synthetic peptide
  Seed: MDPRMCSLMQGSTLPRR
MDPRMLSLIQPSTNPRR

SEQ ID NO: 98697 - protein, 17 aa, Artificial Sequence
  Description of Artificial Sequence: Synthetic peptide
  Seed: MDPRMCSLMQGSTLPRR
MDPRMLSLIQPSTSPRR

SEQ ID NO: 98698 - protein, 17 aa, Artificial Sequence
  Description of Artificial Sequence: Synthetic peptide
  Seed: MDPRMCSLMQGSTLPRR
MDPRMLSLIQPSTVPRR

SEQ ID NO: 98699 - protein, 17 aa, Artificial Sequence
  Description of Artificial Sequence: Synthetic peptide
  Seed: MDPRMCSLMQGSTLPRR
MDPRMLSLIQSSTAPRR

SEQ ID NO: 98700 - protein, 17 aa, Artificial Sequence
  Description of Artificial Sequence: Synthetic peptide
  Seed: MDPRMCSLMQGSTLPRR
MDPRMLSLIQSSTIPRR

SEQ ID NO: 98701 - protein, 17 aa, Artificial Sequence
  Description of Artificial Sequence: Synthetic peptide
  Seed: MDPRMCSLMQGSTLPRR
MDPRMLSLIQSSTLPRR

SEQ ID NO: 98702 - protein, 17 aa, Artificial Sequence
  Description of Artificial Sequence: Synthetic peptide
  Seed: MDPRMCSLMQGSTLPRR
MDPRMLSLIQSSTSPRR

SEQ ID NO: 98703 - protein, 17 aa, Artificial Sequence
  Description of Artificial Sequence: Synthetic peptide
  Seed: MDPRMCSLMQGSTLPRR
MDPRMLSLIQSSTVPRR

SEQ ID NO: 98704 - protein, 17 aa, Artificial Sequence
  Description of Artificial Sequence: Synthetic peptide
  Seed: MDPRMCSLMQGSTLPRR
MDPRMLSLIQTSTAPRR

SEQ ID NO: 98705 - protein, 17 aa, Artificial Sequence
  Description of Artificial Sequence: Synthetic peptide
  Seed: MDPRMCSLMQGSTLPRR
MDPRMLSLIQVSTAPRR

SEQ ID NO: 98706 - protein, 17 aa, Artificial Sequence
  Description of Artificial Sequence: Synthetic peptide
  Seed: MDPRMCSLMQGSTLPRR
MDPRMLSLIQVSTSPRR

SEQ ID NO: 98707 - protein, 17 aa, Artificial Sequence
  Description of Artificial Sequence: Synthetic peptide
  Seed: MDPRMCSLMQGSTLPRR
MDPRMLSLLQASTAPRR

SEQ ID NO: 98708 - protein, 17 aa, Artificial Sequence
  Description of Artificial Sequence: Synthetic peptide
  Seed: MDPRMCSLMQGSTLPRR
MDPRMLSLLQASTGPRR

SEQ ID NO: 98709 - protein, 17 aa, Artificial Sequence
  Description of Artificial Sequence: Synthetic peptide
  Seed: MDPRMCSLMQGSTLPRR
MDPRMLSLLQASTIPRR

SEQ ID NO: 98710 - protein, 17 aa, Artificial Sequence
  Description of Artificial Sequence: Synthetic peptide
  Seed: MDPRMCSLMQGSTLPRR
MDPRMLSLLQASTLPRR

SEQ ID NO: 98711 - protein, 17 aa, Artificial Sequence
  Description of Artificial Sequence: Synthetic peptide
  Seed: MDPRMCSLMQGSTLPRR
MDPRMLSLLQASTMPRR

SEQ ID NO: 98712 - protein, 17 aa, Artificial Sequence
  Description of Artificial Sequence: Synthetic peptide
  Seed: MDPRMCSLMQGSTLPRR
MDPRMLSLLQASTNPRR

SEQ ID NO: 98713 - protein, 17 aa, Artificial Sequence
  Description of Artificial Sequence: Synthetic peptide
  Seed: MDPRMCSLMQGSTLPRR
MDPRMLSLLQASTSPRR

SEQ ID NO: 98714 - protein, 17 aa, Artificial Sequence
  Description of Artificial Sequence: Synthetic peptide
  Seed: MDPRMCSLMQGSTLPRR
MDPRMLSLLQASTTPRR

SEQ ID NO: 98715 - protein, 17 aa, Artificial Sequence
  Description of Artificial Sequence: Synthetic peptide
  Seed: MDPRMCSLMQGSTLPRR
MDPRMLSLLQASTVPRR

SEQ ID NO: 98716 - protein, 17 aa, Artificial Sequence
  Description of Artificial Sequence: Synthetic peptide
  Seed: MDPRMCSLMQGSTLPRR
MDPRMLSLLQFSTLPRR

SEQ ID NO: 98717 - protein, 17 aa, Artificial Sequence
  Description of Artificial Sequence: Synthetic peptide
  Seed: MDPRMCSLMQGSTLPRR
MDPRMLSLLQGSTAPRR

SEQ ID NO: 98718 - protein, 17 aa, Artificial Sequence
  Description of Artificial Sequence: Synthetic peptide
  Seed: MDPRMCSLMQGSTLPRR
MDPRMLSLLQGSTGPRR

SEQ ID NO: 98719 - protein, 17 aa, Artificial Sequence
  Description of Artificial Sequence: Synthetic peptide
  Seed: MDPRMCSLMQGSTLPRR
MDPRMLSLLQGSTIPRR

SEQ ID NO: 98720 - protein, 17 aa, Artificial Sequence
  Description of Artificial Sequence: Synthetic peptide
  Seed: MDPRMCSLMQGSTLPRR
MDPRMLSLLQGSTLPRR

SEQ ID NO: 98721 - protein, 17 aa, Artificial Sequence
  Description of Artificial Sequence: Synthetic peptide
  Seed: MDPRMCSLMQGSTLPRR
MDPRMLSLLQGSTMPRR

SEQ ID NO: 98722 - protein, 17 aa, Artificial Sequence
  Description of Artificial Sequence: Synthetic peptide
  Seed: MDPRMCSLMQGSTLPRR
MDPRMLSLLQGSTSPRR

SEQ ID NO: 98723 - protein, 17 aa, Artificial Sequence
  Description of Artificial Sequence: Synthetic peptide
  Seed: MDPRMCSLMQGSTLPRR
MDPRMLSLLQGSTTPRR

SEQ ID NO: 98724 - protein, 17 aa, Artificial Sequence
  Description of Artificial Sequence: Synthetic peptide
  Seed: MDPRMCSLMQGSTLPRR
MDPRMLSLLQGSTVPRR

SEQ ID NO: 98725 - protein, 17 aa, Artificial Sequence
  Description of Artificial Sequence: Synthetic peptide
  Seed: MDPRMCSLMQGSTLPRR
MDPRMLSLLQISTAPRR

SEQ ID NO: 98726 - protein, 17 aa, Artificial Sequence
  Description of Artificial Sequence: Synthetic peptide
  Seed: MDPRMCSLMQGSTLPRR
MDPRMLSLLQISTNPRR

SEQ ID NO: 98727 - protein, 17 aa, Artificial Sequence
  Description of Artificial Sequence: Synthetic peptide
  Seed: MDPRMCSLMQGSTLPRR
MDPRMLSLLQISTSPRR

SEQ ID NO: 98728 - protein, 17 aa, Artificial Sequence
  Description of Artificial Sequence: Synthetic peptide
  Seed: MDPRMCSLMQGSTLPRR
MDPRMLSLLQNSTAPRR

SEQ ID NO: 98729 - protein, 17 aa, Artificial Sequence
  Description of Artificial Sequence: Synthetic peptide
  Seed: MDPRMCSLMQGSTLPRR
MDPRMLSLLQNSTIPRR

SEQ ID NO: 98730 - protein, 17 aa, Artificial Sequence
  Description of Artificial Sequence: Synthetic peptide
  Seed: MDPRMCSLMQGSTLPRR
MDPRMLSLLQNSTLPRR

SEQ ID NO: 98731 - protein, 17 aa, Artificial Sequence
  Description of Artificial Sequence: Synthetic peptide
  Seed: MDPRMCSLMQGSTLPRR
MDPRMLSLLQNSTVPRR

SEQ ID NO: 98732 - protein, 17 aa, Artificial Sequence
  Description of Artificial Sequence: Synthetic peptide
  Seed: MDPRMCSLMQGSTLPRR
MDPRMLSLLQPSTAPRR

SEQ ID NO: 98733 - protein, 17 aa, Artificial Sequence
  Description of Artificial Sequence: Synthetic peptide
  Seed: MDPRMCSLMQGSTLPRR
MDPRMLSLLQPSTIPRR

SEQ ID NO: 98734 - protein, 17 aa, Artificial Sequence
  Description of Artificial Sequence: Synthetic peptide
  Seed: MDPRMCSLMQGSTLPRR
MDPRMLSLLQPSTLPRR

SEQ ID NO: 98735 - protein, 17 aa, Artificial Sequence
  Description of Artificial Sequence: Synthetic peptide
  Seed: MDPRMCSLMQGSTLPRR
MDPRMLSLLQPSTMPRR

SEQ ID NO: 98736 - protein, 17 aa, Artificial Sequence
  Description of Artificial Sequence: Synthetic peptide
  Seed: MDPRMCSLMQGSTLPRR
MDPRMLSLLQPSTNPRR

SEQ ID NO: 98737 - protein, 17 aa, Artificial Sequence
  Description of Artificial Sequence: Synthetic peptide
  Seed: MDPRMCSLMQGSTLPRR
MDPRMLSLLQPSTSPRR

SEQ ID NO: 98738 - protein, 17 aa, Artificial Sequence
  Description of Artificial Sequence: Synthetic peptide
  Seed: MDPRMCSLMQGSTLPRR
MDPRMLSLLQPSTTPRR

SEQ ID NO: 98739 - protein, 17 aa, Artificial Sequence
  Description of Artificial Sequence: Synthetic peptide
  Seed: MDPRMCSLMQGSTLPRR
MDPRMLSLLQPSTVPRR

SEQ ID NO: 98740 - protein, 17 aa, Artificial Sequence
  Description of Artificial Sequence: Synthetic peptide
  Seed: MDPRMCSLMQGSTLPRR
MDPRMLSLLQSSTAPRR

SEQ ID NO: 98741 - protein, 17 aa, Artificial Sequence
  Description of Artificial Sequence: Synthetic peptide
  Seed: MDPRMCSLMQGSTLPRR
MDPRMLSLLQSSTIPRR

SEQ ID NO: 98742 - protein, 17 aa, Artificial Sequence
  Description of Artificial Sequence: Synthetic peptide
  Seed: MDPRMCSLMQGSTLPRR
MDPRMLSLLQSSTLPRR

SEQ ID NO: 98743 - protein, 17 aa, Artificial Sequence
  Description of Artificial Sequence: Synthetic peptide
  Seed: MDPRMCSLMQGSTLPRR
MDPRMLSLLQSSTMPRR

SEQ ID NO: 98744 - protein, 17 aa, Artificial Sequence
  Description of Artificial Sequence: Synthetic peptide
  Seed: MDPRMCSLMQGSTLPRR
MDPRMLSLLQSSTNPRR

SEQ ID NO: 98745 - protein, 17 aa, Artificial Sequence
  Description of Artificial Sequence: Synthetic peptide
  Seed: MDPRMCSLMQGSTLPRR
MDPRMLSLLQSSTSPRR

SEQ ID NO: 98746 - protein, 17 aa, Artificial Sequence
  Description of Artificial Sequence: Synthetic peptide
  Seed: MDPRMCSLMQGSTLPRR
MDPRMLSLLQSSTTPRR

SEQ ID NO: 98747 - protein, 17 aa, Artificial Sequence
  Description of Artificial Sequence: Synthetic peptide
  Seed: MDPRMCSLMQGSTLPRR
MDPRMLSLLQSSTVPRR

SEQ ID NO: 98748 - protein, 17 aa, Artificial Sequence
  Description of Artificial Sequence: Synthetic peptide
  Seed: MDPRMCSLMQGSTLPRR
MDPRMLSLLQTSTAPRR

SEQ ID NO: 98749 - protein, 17 aa, Artificial Sequence
  Description of Artificial Sequence: Synthetic peptide
  Seed: MDPRMCSLMQGSTLPRR
MDPRMLSLLQTSTIPRR

SEQ ID NO: 98750 - protein, 17 aa, Artificial Sequence
  Description of Artificial Sequence: Synthetic peptide
  Seed: MDPRMCSLMQGSTLPRR
MDPRMLSLLQTSTLPRR

SEQ ID NO: 98751 - protein, 17 aa, Artificial Sequence
  Description of Artificial Sequence: Synthetic peptide
  Seed: MDPRMCSLMQGSTLPRR
MDPRMLSLLQTSTNPRR

SEQ ID NO: 98752 - protein, 17 aa, Artificial Sequence
  Description of Artificial Sequence: Synthetic peptide
  Seed: MDPRMCSLMQGSTLPRR
MDPRMLSLLQTSTSPRR

SEQ ID NO: 98753 - protein, 17 aa, Artificial Sequence
  Description of Artificial Sequence: Synthetic peptide
  Seed: MDPRMCSLMQGSTLPRR
MDPRMLSLLQTSTTPRR

SEQ ID NO: 98754 - protein, 17 aa, Artificial Sequence
  Description of Artificial Sequence: Synthetic peptide
  Seed: MDPRMCSLMQGSTLPRR
MDPRMLSLLQTSTVPRR

SEQ ID NO: 98755 - protein, 17 aa, Artificial Sequence
  Description of Artificial Sequence: Synthetic peptide
  Seed: MDPRMCSLMQGSTLPRR
MDPRMLSLLQVSTAPRR

SEQ ID NO: 98756 - protein, 17 aa, Artificial Sequence
  Description of Artificial Sequence: Synthetic peptide
  Seed: MDPRMCSLMQGSTLPRR
MDPRMLSLLQVSTLPRR

SEQ ID NO: 98757 - protein, 17 aa, Artificial Sequence
  Description of Artificial Sequence: Synthetic peptide
  Seed: MDPRMCSLMQGSTLPRR
MDPRMLSLLQVSTNPRR

SEQ ID NO: 98758 - protein, 17 aa, Artificial Sequence
  Description of Artificial Sequence: Synthetic peptide
  Seed: MDPRMCSLMQGSTLPRR
MDPRMLSLLQVSTSPRR

SEQ ID NO: 98759 - protein, 17 aa, Artificial Sequence
  Description of Artificial Sequence: Synthetic peptide
  Seed: MDPRMCSLMQGSTLPRR
MDPRMLSLLQVSTTPRR

SEQ ID NO: 98760 - protein, 17 aa, Artificial Sequence
  Description of Artificial Sequence: Synthetic peptide
  Seed: MDPRMCSLMQGSTLPRR
MDPRMLSLLQVSTVPRR

SEQ ID NO: 98761 - protein, 17 aa, Artificial Sequence
  Description of Artificial Sequence: Synthetic peptide
  Seed: MDPRMCSLMQGSTLPRR
MDPRMLSLMQASTAPRR

SEQ ID NO: 98762 - protein, 17 aa, Artificial Sequence
  Description of Artificial Sequence: Synthetic peptide
  Seed: MDPRMCSLMQGSTLPRR
MDPRMLSLMQASTGPRR

SEQ ID NO: 98763 - protein, 17 aa, Artificial Sequence
  Description of Artificial Sequence: Synthetic peptide
  Seed: MDPRMCSLMQGSTLPRR
MDPRMLSLMQASTHPRR

SEQ ID NO: 98764 - protein, 17 aa, Artificial Sequence
  Description of Artificial Sequence: Synthetic peptide
  Seed: MDPRMCSLMQGSTLPRR
MDPRMLSLMQASTIPRR

SEQ ID NO: 98765 - protein, 17 aa, Artificial Sequence
  Description of Artificial Sequence: Synthetic peptide
  Seed: MDPRMCSLMQGSTLPRR
MDPRMLSLMQASTLPRR

SEQ ID NO: 98766 - protein, 17 aa, Artificial Sequence
  Description of Artificial Sequence: Synthetic peptide
  Seed: MDPRMCSLMQGSTLPRR
MDPRMLSLMQASTMPRR

SEQ ID NO: 98767 - protein, 17 aa, Artificial Sequence
  Description of Artificial Sequence: Synthetic peptide
  Seed: MDPRMCSLMQGSTLPRR
MDPRMLSLMQASTNPRR

SEQ ID NO: 98768 - protein, 17 aa, Artificial Sequence
  Description of Artificial Sequence: Synthetic peptide
  Seed: MDPRMCSLMQGSTLPRR
MDPRMLSLMQASTSPRR

SEQ ID NO: 98769 - protein, 17 aa, Artificial Sequence
  Description of Artificial Sequence: Synthetic peptide
  Seed: MDPRMCSLMQGSTLPRR
MDPRMLSLMQASTTPRR

SEQ ID NO: 98770 - protein, 17 aa, Artificial Sequence
  Description of Artificial Sequence: Synthetic peptide
  Seed: MDPRMCSLMQGSTLPRR
MDPRMLSLMQASTVPRR

SEQ ID NO: 98771 - protein, 17 aa, Artificial Sequence
  Description of Artificial Sequence: Synthetic peptide
  Seed: MDPRMCSLMQGSTLPRR
MDPRMLSLMQGSTAPRR

SEQ ID NO: 98772 - protein, 17 aa, Artificial Sequence
  Description of Artificial Sequence: Synthetic peptide
  Seed: MDPRMCSLMQGSTLPRR
MDPRMLSLMQGSTIPRR

SEQ ID NO: 98773 - protein, 17 aa, Artificial Sequence
  Description of Artificial Sequence: Synthetic peptide
  Seed: MDPRMCSLMQGSTLPRR
MDPRMLSLMQGSTLPRR

SEQ ID NO: 98774 - protein, 17 aa, Artificial Sequence
  Description of Artificial Sequence: Synthetic peptide
  Seed: MDPRMCSLMQGSTLPRR
MDPRMLSLMQGSTMPRR

SEQ ID NO: 98775 - protein, 17 aa, Artificial Sequence
  Description of Artificial Sequence: Synthetic peptide
  Seed: MDPRMCSLMQGSTLPRR
MDPRMLSLMQGSTSPRR

SEQ ID NO: 98776 - protein, 17 aa, Artificial Sequence
  Description of Artificial Sequence: Synthetic peptide
  Seed: MDPRMCSLMQGSTLPRR
MDPRMLSLMQGSTTPRR

SEQ ID NO: 98777 - protein, 17 aa, Artificial Sequence
  Description of Artificial Sequence: Synthetic peptide
  Seed: MDPRMCSLMQGSTLPRR
MDPRMLSLMQGSTVPRR

SEQ ID NO: 98778 - protein, 17 aa, Artificial Sequence
  Description of Artificial Sequence: Synthetic peptide
  Seed: MDPRMCSLMQGSTLPRR
MDPRMLSLMQISTAPRR

SEQ ID NO: 98779 - protein, 17 aa, Artificial Sequence
  Description of Artificial Sequence: Synthetic peptide
  Seed: MDPRMCSLMQGSTLPRR
MDPRMLSLMQISTNPRR

SEQ ID NO: 98780 - protein, 17 aa, Artificial Sequence
  Description of Artificial Sequence: Synthetic peptide
  Seed: MDPRMCSLMQGSTLPRR
MDPRMLSLMQISTSPRR

SEQ ID NO: 98781 - protein, 17 aa, Artificial Sequence
  Description of Artificial Sequence: Synthetic peptide
  Seed: MDPRMCSLMQGSTLPRR
MDPRMLSLMQISTTPRR

SEQ ID NO: 98782 - protein, 17 aa, Artificial Sequence
  Description of Artificial Sequence: Synthetic peptide
  Seed: MDPRMCSLMQGSTLPRR
MDPRMLSLMQLSTAPRR

SEQ ID NO: 98783 - protein, 17 aa, Artificial Sequence
  Description of Artificial Sequence: Synthetic peptide
  Seed: MDPRMCSLMQGSTLPRR
MDPRMLSLMQMSTAPRR

SEQ ID NO: 98784 - protein, 17 aa, Artificial Sequence
  Description of Artificial Sequence: Synthetic peptide
  Seed: MDPRMCSLMQGSTLPRR
MDPRMLSLMQNSTAPRR

SEQ ID NO: 98785 - protein, 17 aa, Artificial Sequence
  Description of Artificial Sequence: Synthetic peptide
  Seed: MDPRMCSLMQGSTLPRR
MDPRMLSLMQNSTIPRR

SEQ ID NO: 98786 - protein, 17 aa, Artificial Sequence
  Description of Artificial Sequence: Synthetic peptide
  Seed: MDPRMCSLMQGSTLPRR
MDPRMLSLMQNSTLPRR

SEQ ID NO: 98787 - protein, 17 aa, Artificial Sequence
  Description of Artificial Sequence: Synthetic peptide
  Seed: MDPRMCSLMQGSTLPRR
MDPRMLSLMQNSTVPRR

SEQ ID NO: 98788 - protein, 17 aa, Artificial Sequence
  Description of Artificial Sequence: Synthetic peptide
  Seed: MDPRMCSLMQGSTLPRR
MDPRMLSLMQPSTAPRR

SEQ ID NO: 98789 - protein, 17 aa, Artificial Sequence
  Description of Artificial Sequence: Synthetic peptide
  Seed: MDPRMCSLMQGSTLPRR
MDPRMLSLMQPSTIPRR

SEQ ID NO: 98790 - protein, 17 aa, Artificial Sequence
  Description of Artificial Sequence: Synthetic peptide
  Seed: MDPRMCSLMQGSTLPRR
MDPRMLSLMQPSTLPRR

SEQ ID NO: 98791 - protein, 17 aa, Artificial Sequence
  Description of Artificial Sequence: Synthetic peptide
  Seed: MDPRMCSLMQGSTLPRR
MDPRMLSLMQPSTMPRR

SEQ ID NO: 98792 - protein, 17 aa, Artificial Sequence
  Description of Artificial Sequence: Synthetic peptide
  Seed: MDPRMCSLMQGSTLPRR
MDPRMLSLMQPSTNPRR

SEQ ID NO: 98793 - protein, 17 aa, Artificial Sequence
  Description of Artificial Sequence: Synthetic peptide
  Seed: MDPRMCSLMQGSTLPRR
MDPRMLSLMQPSTSPRR

SEQ ID NO: 98794 - protein, 17 aa, Artificial Sequence
  Description of Artificial Sequence: Synthetic peptide
  Seed: MDPRMCSLMQGSTLPRR
MDPRMLSLMQPSTTPRR

SEQ ID NO: 98795 - protein, 17 aa, Artificial Sequence
  Description of Artificial Sequence: Synthetic peptide
  Seed: MDPRMCSLMQGSTLPRR
MDPRMLSLMQPSTVPRR

SEQ ID NO: 98796 - protein, 17 aa, Artificial Sequence
  Description of Artificial Sequence: Synthetic peptide
  Seed: MDPRMCSLMQGSTLPRR
MDPRMLSLMQSSTAPRR

SEQ ID NO: 98797 - protein, 17 aa, Artificial Sequence
  Description of Artificial Sequence: Synthetic peptide
  Seed: MDPRMCSLMQGSTLPRR
MDPRMLSLMQSSTIPRR

SEQ ID NO: 98798 - protein, 17 aa, Artificial Sequence
  Description of Artificial Sequence: Synthetic peptide
  Seed: MDPRMCSLMQGSTLPRR
MDPRMLSLMQSSTLPRR

SEQ ID NO: 98799 - protein, 17 aa, Artificial Sequence
  Description of Artificial Sequence: Synthetic peptide
  Seed: MDPRMCSLMQGSTLPRR
MDPRMLSLMQSSTMPRR

SEQ ID NO: 98800 - protein, 17 aa, Artificial Sequence
  Description of Artificial Sequence: Synthetic peptide
  Seed: MDPRMCSLMQGSTLPRR
MDPRMLSLMQSSTNPRR

SEQ ID NO: 98801 - protein, 17 aa, Artificial Sequence
  Description of Artificial Sequence: Synthetic peptide
  Seed: MDPRMCSLMQGSTLPRR
MDPRMLSLMQSSTSPRR

SEQ ID NO: 98802 - protein, 17 aa, Artificial Sequence
  Description of Artificial Sequence: Synthetic peptide
  Seed: MDPRMCSLMQGSTLPRR
MDPRMLSLMQSSTTPRR

SEQ ID NO: 98803 - protein, 17 aa, Artificial Sequence
  Description of Artificial Sequence: Synthetic peptide
  Seed: MDPRMCSLMQGSTLPRR
MDPRMLSLMQSSTVPRR

SEQ ID NO: 98804 - protein, 17 aa, Artificial Sequence
  Description of Artificial Sequence: Synthetic peptide
  Seed: MDPRMCSLMQGSTLPRR
MDPRMLSLMQTSTAPRR

SEQ ID NO: 98805 - protein, 17 aa, Artificial Sequence
  Description of Artificial Sequence: Synthetic peptide
  Seed: MDPRMCSLMQGSTLPRR
MDPRMLSLMQTSTIPRR

SEQ ID NO: 98806 - protein, 17 aa, Artificial Sequence
  Description of Artificial Sequence: Synthetic peptide
  Seed: MDPRMCSLMQGSTLPRR
MDPRMLSLMQTSTLPRR

SEQ ID NO: 98807 - protein, 17 aa, Artificial Sequence
  Description of Artificial Sequence: Synthetic peptide
  Seed: MDPRMCSLMQGSTLPRR
MDPRMLSLMQTSTNPRR

SEQ ID NO: 98808 - protein, 17 aa, Artificial Sequence
  Description of Artificial Sequence: Synthetic peptide
  Seed: MDPRMCSLMQGSTLPRR
MDPRMLSLMQTSTSPRR

SEQ ID NO: 98809 - protein, 17 aa, Artificial Sequence
  Description of Artificial Sequence: Synthetic peptide
  Seed: MDPRMCSLMQGSTLPRR
MDPRMLSLMQTSTTPRR

SEQ ID NO: 98810 - protein, 17 aa, Artificial Sequence
  Description of Artificial Sequence: Synthetic peptide
  Seed: MDPRMCSLMQGSTLPRR
MDPRMLSLMQTSTVPRR

SEQ ID NO: 98811 - protein, 17 aa, Artificial Sequence
  Description of Artificial Sequence: Synthetic peptide
  Seed: MDPRMCSLMQGSTLPRR
MDPRMLSLMQVSTAPRR

SEQ ID NO: 98812 - protein, 17 aa, Artificial Sequence
  Description of Artificial Sequence: Synthetic peptide
  Seed: MDPRMCSLMQGSTLPRR
MDPRMLSLMQVSTLPRR

SEQ ID NO: 98813 - protein, 17 aa, Artificial Sequence
  Description of Artificial Sequence: Synthetic peptide
  Seed: MDPRMCSLMQGSTLPRR
MDPRMLSLMQVSTMPRR

SEQ ID NO: 98814 - protein, 17 aa, Artificial Sequence
  Description of Artificial Sequence: Synthetic peptide
  Seed: MDPRMCSLMQGSTLPRR
MDPRMLSLMQVSTNPRR

SEQ ID NO: 98815 - protein, 17 aa, Artificial Sequence
  Description of Artificial Sequence: Synthetic peptide
  Seed: MDPRMCSLMQGSTLPRR
MDPRMLSLMQVSTSPRR

SEQ ID NO: 98816 - protein, 17 aa, Artificial Sequence
  Description of Artificial Sequence: Synthetic peptide
  Seed: MDPRMCSLMQGSTLPRR
MDPRMLSLMQVSTTPRR

SEQ ID NO: 98817 - protein, 17 aa, Artificial Sequence
  Description of Artificial Sequence: Synthetic peptide
  Seed: MDPRMCSLMQGSTLPRR
MDPRMLSLMQVSTVPRR

SEQ ID NO: 98818 - protein, 17 aa, Artificial Sequence
  Description of Artificial Sequence: Synthetic peptide
  Seed: MDPRMCSLMQGSTLPRR
MDPRMLSLQQASTAPRR

SEQ ID NO: 98819 - protein, 17 aa, Artificial Sequence
  Description of Artificial Sequence: Synthetic peptide
  Seed: MDPRMCSLMQGSTLPRR
MDPRMLSLQQASTIPRR

SEQ ID NO: 98820 - protein, 17 aa, Artificial Sequence
  Description of Artificial Sequence: Synthetic peptide
  Seed: MDPRMCSLMQGSTLPRR
MDPRMLSLQQASTLPRR

SEQ ID NO: 98821 - protein, 17 aa, Artificial Sequence
  Description of Artificial Sequence: Synthetic peptide
  Seed: MDPRMCSLMQGSTLPRR
MDPRMLSLQQASTVPRR

SEQ ID NO: 98822 - protein, 17 aa, Artificial Sequence
  Description of Artificial Sequence: Synthetic peptide
  Seed: MDPRMCSLMQGSTLPRR
MDPRMLSLQQGSTIPRR

SEQ ID NO: 98823 - protein, 17 aa, Artificial Sequence
  Description of Artificial Sequence: Synthetic peptide
  Seed: MDPRMCSLMQGSTLPRR
MDPRMLSLQQGSTLPRR

SEQ ID NO: 98824 - protein, 17 aa, Artificial Sequence
  Description of Artificial Sequence: Synthetic peptide
  Seed: MDPRMCSLMQGSTLPRR
MDPRMLSLQQGSTVPRR

SEQ ID NO: 98825 - protein, 17 aa, Artificial Sequence
  Description of Artificial Sequence: Synthetic peptide
  Seed: MDPRMCSLMQGSTLPRR
MDPRMLSLVQASTAPRR

SEQ ID NO: 98826 - protein, 17 aa, Artificial Sequence
  Description of Artificial Sequence: Synthetic peptide
  Seed: MDPRMCSLMQGSTLPRR
MDPRMLSLVQASTIPRR

SEQ ID NO: 98827 - protein, 17 aa, Artificial Sequence
  Description of Artificial Sequence: Synthetic peptide
  Seed: MDPRMCSLMQGSTLPRR
MDPRMLSLVQASTLPRR

SEQ ID NO: 98828 - protein, 17 aa, Artificial Sequence
  Description of Artificial Sequence: Synthetic peptide
  Seed: MDPRMCSLMQGSTLPRR
MDPRMLSLVQASTVPRR

SEQ ID NO: 98829 - protein, 17 aa, Artificial Sequence
  Description of Artificial Sequence: Synthetic peptide
  Seed: MDPRMCSLMQGSTLPRR
MDPRMLSLVQGSTLPRR

SEQ ID NO: 98830 - protein, 17 aa, Artificial Sequence
  Description of Artificial Sequence: Synthetic peptide
  Seed: MDPRMCSLMQGSTLPRR
MDPRMLSLVQGSTVPRR

SEQ ID NO: 98831 - protein, 17 aa, Artificial Sequence
  Description of Artificial Sequence: Synthetic peptide
  Seed: MDPRMCSLMQGSTLPRR
MDPRMMSLAQASTIPRR

SEQ ID NO: 98832 - protein, 17 aa, Artificial Sequence
  Description of Artificial Sequence: Synthetic peptide
  Seed: MDPRMCSLMQGSTLPRR
MDPRMMSLAQASTLPRR

SEQ ID NO: 98833 - protein, 17 aa, Artificial Sequence
  Description of Artificial Sequence: Synthetic peptide
  Seed: MDPRMCSLMQGSTLPRR
MDPRMMSLAQASTVPRR

SEQ ID NO: 98834 - protein, 17 aa, Artificial Sequence
  Description of Artificial Sequence: Synthetic peptide
  Seed: MDPRMCSLMQGSTLPRR
MDPRMMSLIQASTAPRR

SEQ ID NO: 98835 - protein, 17 aa, Artificial Sequence
  Description of Artificial Sequence: Synthetic peptide
  Seed: MDPRMCSLMQGSTLPRR
MDPRMMSLIQASTIPRR

SEQ ID NO: 98836 - protein, 17 aa, Artificial Sequence
  Description of Artificial Sequence: Synthetic peptide
  Seed: MDPRMCSLMQGSTLPRR
MDPRMMSLIQASTLPRR

SEQ ID NO: 98837 - protein, 17 aa, Artificial Sequence
  Description of Artificial Sequence: Synthetic peptide
  Seed: MDPRMCSLMQGSTLPRR
MDPRMMSLIQASTNPRR

SEQ ID NO: 98838 - protein, 17 aa, Artificial Sequence
  Description of Artificial Sequence: Synthetic peptide
  Seed: MDPRMCSLMQGSTLPRR
MDPRMMSLIQASTSPRR

SEQ ID NO: 98839 - protein, 17 aa, Artificial Sequence
  Description of Artificial Sequence: Synthetic peptide
  Seed: MDPRMCSLMQGSTLPRR
MDPRMMSLIQASTVPRR

SEQ ID NO: 98840 - protein, 17 aa, Artificial Sequence
  Description of Artificial Sequence: Synthetic peptide
  Seed: MDPRMCSLMQGSTLPRR
MDPRMMSLIQGSTAPRR

SEQ ID NO: 98841 - protein, 17 aa, Artificial Sequence
  Description of Artificial Sequence: Synthetic peptide
  Seed: MDPRMCSLMQGSTLPRR
MDPRMMSLIQGSTIPRR

SEQ ID NO: 98842 - protein, 17 aa, Artificial Sequence
  Description of Artificial Sequence: Synthetic peptide
  Seed: MDPRMCSLMQGSTLPRR
MDPRMMSLIQGSTLPRR

SEQ ID NO: 98843 - protein, 17 aa, Artificial Sequence
  Description of Artificial Sequence: Synthetic peptide
  Seed: MDPRMCSLMQGSTLPRR
MDPRMMSLIQGSTVPRR

SEQ ID NO: 98844 - protein, 17 aa, Artificial Sequence
  Description of Artificial Sequence: Synthetic peptide
  Seed: MDPRMCSLMQGSTLPRR
MDPRMMSLIQVSTAPRR

SEQ ID NO: 98845 - protein, 17 aa, Artificial Sequence
  Description of Artificial Sequence: Synthetic peptide
  Seed: MDPRMCSLMQGSTLPRR
MDPRMMSLLQASTAPRR

SEQ ID NO: 98846 - protein, 17 aa, Artificial Sequence
  Description of Artificial Sequence: Synthetic peptide
  Seed: MDPRMCSLMQGSTLPRR
MDPRMMSLLQASTIPRR

SEQ ID NO: 98847 - protein, 17 aa, Artificial Sequence
  Description of Artificial Sequence: Synthetic peptide
  Seed: MDPRMCSLMQGSTLPRR
MDPRMMSLLQASTLPRR

SEQ ID NO: 98848 - protein, 17 aa, Artificial Sequence
  Description of Artificial Sequence: Synthetic peptide
  Seed: MDPRMCSLMQGSTLPRR
MDPRMMSLLQASTMPRR

SEQ ID NO: 98849 - protein, 17 aa, Artificial Sequence
  Description of Artificial Sequence: Synthetic peptide
  Seed: MDPRMCSLMQGSTLPRR
MDPRMMSLLQASTNPRR

SEQ ID NO: 98850 - protein, 17 aa, Artificial Sequence
  Description of Artificial Sequence: Synthetic peptide
  Seed: MDPRMCSLMQGSTLPRR
MDPRMMSLLQASTSPRR

SEQ ID NO: 98851 - protein, 17 aa, Artificial Sequence
  Description of Artificial Sequence: Synthetic peptide
  Seed: MDPRMCSLMQGSTLPRR
MDPRMMSLLQASTTPRR

SEQ ID NO: 98852 - protein, 17 aa, Artificial Sequence
  Description of Artificial Sequence: Synthetic peptide
  Seed: MDPRMCSLMQGSTLPRR
MDPRMMSLLQASTVPRR

SEQ ID NO: 98853 - protein, 17 aa, Artificial Sequence
  Description of Artificial Sequence: Synthetic peptide
  Seed: MDPRMCSLMQGSTLPRR
MDPRMMSLLQGSTAPRR

SEQ ID NO: 98854 - protein, 17 aa, Artificial Sequence
  Description of Artificial Sequence: Synthetic peptide
  Seed: MDPRMCSLMQGSTLPRR
MDPRMMSLLQGSTIPRR

SEQ ID NO: 98855 - protein, 17 aa, Artificial Sequence
  Description of Artificial Sequence: Synthetic peptide
  Seed: MDPRMCSLMQGSTLPRR
MDPRMMSLLQGSTLPRR

SEQ ID NO: 98856 - protein, 17 aa, Artificial Sequence
  Description of Artificial Sequence: Synthetic peptide
  Seed: MDPRMCSLMQGSTLPRR
MDPRMMSLLQGSTMPRR

SEQ ID NO: 98857 - protein, 17 aa, Artificial Sequence
  Description of Artificial Sequence: Synthetic peptide
  Seed: MDPRMCSLMQGSTLPRR
MDPRMMSLLQGSTSPRR

SEQ ID NO: 98858 - protein, 17 aa, Artificial Sequence
  Description of Artificial Sequence: Synthetic peptide
  Seed: MDPRMCSLMQGSTLPRR
MDPRMMSLLQGSTTPRR

SEQ ID NO: 98859 - protein, 17 aa, Artificial Sequence
  Description of Artificial Sequence: Synthetic peptide
  Seed: MDPRMCSLMQGSTLPRR
MDPRMMSLLQGSTVPRR

SEQ ID NO: 98860 - protein, 17 aa, Artificial Sequence
  Description of Artificial Sequence: Synthetic peptide
  Seed: MDPRMCSLMQGSTLPRR
MDPRMMSLLQISTAPRR

SEQ ID NO: 98861 - protein, 17 aa, Artificial Sequence
  Description of Artificial Sequence: Synthetic peptide
  Seed: MDPRMCSLMQGSTLPRR
MDPRMMSLLQISTSPRR

SEQ ID NO: 98862 - protein, 17 aa, Artificial Sequence
  Description of Artificial Sequence: Synthetic peptide
  Seed: MDPRMCSLMQGSTLPRR
MDPRMMSLLQPSTAPRR

SEQ ID NO: 98863 - protein, 17 aa, Artificial Sequence
  Description of Artificial Sequence: Synthetic peptide
  Seed: MDPRMCSLMQGSTLPRR
MDPRMMSLLQPSTIPRR

SEQ ID NO: 98864 - protein, 17 aa, Artificial Sequence
  Description of Artificial Sequence: Synthetic peptide
  Seed: MDPRMCSLMQGSTLPRR
MDPRMMSLLQPSTLPRR

SEQ ID NO: 98865 - protein, 17 aa, Artificial Sequence
  Description of Artificial Sequence: Synthetic peptide
  Seed: MDPRMCSLMQGSTLPRR
MDPRMMSLLQPSTSPRR

SEQ ID NO: 98866 - protein, 17 aa, Artificial Sequence
  Description of Artificial Sequence: Synthetic peptide
  Seed: MDPRMCSLMQGSTLPRR
MDPRMMSLLQPSTVPRR

SEQ ID NO: 98867 - protein, 17 aa, Artificial Sequence
  Description of Artificial Sequence: Synthetic peptide
  Seed: MDPRMCSLMQGSTLPRR
MDPRMMSLLQSSTAPRR

SEQ ID NO: 98868 - protein, 17 aa, Artificial Sequence
  Description of Artificial Sequence: Synthetic peptide
  Seed: MDPRMCSLMQGSTLPRR
MDPRMMSLLQSSTIPRR

SEQ ID NO: 98869 - protein, 17 aa, Artificial Sequence
  Description of Artificial Sequence: Synthetic peptide
  Seed: MDPRMCSLMQGSTLPRR
MDPRMMSLLQSSTLPRR

SEQ ID NO: 98870 - protein, 17 aa, Artificial Sequence
  Description of Artificial Sequence: Synthetic peptide
  Seed: MDPRMCSLMQGSTLPRR
MDPRMMSLLQSSTMPRR

SEQ ID NO: 98871 - protein, 17 aa, Artificial Sequence
  Description of Artificial Sequence: Synthetic peptide
  Seed: MDPRMCSLMQGSTLPRR
MDPRMMSLLQSSTNPRR

SEQ ID NO: 98872 - protein, 17 aa, Artificial Sequence
  Description of Artificial Sequence: Synthetic peptide
  Seed: MDPRMCSLMQGSTLPRR
MDPRMMSLLQSSTSPRR

SEQ ID NO: 98873 - protein, 17 aa, Artificial Sequence
  Description of Artificial Sequence: Synthetic peptide
  Seed: MDPRMCSLMQGSTLPRR
MDPRMMSLLQSSTTPRR

SEQ ID NO: 98874 - protein, 17 aa, Artificial Sequence
  Description of Artificial Sequence: Synthetic peptide
  Seed: MDPRMCSLMQGSTLPRR
MDPRMMSLLQSSTVPRR

SEQ ID NO: 98875 - protein, 17 aa, Artificial Sequence
  Description of Artificial Sequence: Synthetic peptide
  Seed: MDPRMCSLMQGSTLPRR
MDPRMMSLLQTSTAPRR

SEQ ID NO: 98876 - protein, 17 aa, Artificial Sequence
  Description of Artificial Sequence: Synthetic peptide
  Seed: MDPRMCSLMQGSTLPRR
MDPRMMSLLQTSTLPRR

SEQ ID NO: 98877 - protein, 17 aa, Artificial Sequence
  Description of Artificial Sequence: Synthetic peptide
  Seed: MDPRMCSLMQGSTLPRR
MDPRMMSLLQTSTNPRR

SEQ ID NO: 98878 - protein, 17 aa, Artificial Sequence
  Description of Artificial Sequence: Synthetic peptide
  Seed: MDPRMCSLMQGSTLPRR
MDPRMMSLLQTSTSPRR

SEQ ID NO: 98879 - protein, 17 aa, Artificial Sequence
  Description of Artificial Sequence: Synthetic peptide
  Seed: MDPRMCSLMQGSTLPRR
MDPRMMSLLQTSTVPRR

SEQ ID NO: 98880 - protein, 17 aa, Artificial Sequence
  Description of Artificial Sequence: Synthetic peptide
  Seed: MDPRMCSLMQGSTLPRR
MDPRMMSLLQVSTAPRR

SEQ ID NO: 98881 - protein, 17 aa, Artificial Sequence
  Description of Artificial Sequence: Synthetic peptide
  Seed: MDPRMCSLMQGSTLPRR
MDPRMMSLLQVSTNPRR

SEQ ID NO: 98882 - protein, 17 aa, Artificial Sequence
  Description of Artificial Sequence: Synthetic peptide
  Seed: MDPRMCSLMQGSTLPRR
MDPRMMSLLQVSTSPRR

SEQ ID NO: 98883 - protein, 17 aa, Artificial Sequence
  Description of Artificial Sequence: Synthetic peptide
  Seed: MDPRMCSLMQGSTLPRR
MDPRMMSLMQASTAPRR

SEQ ID NO: 98884 - protein, 17 aa, Artificial Sequence
  Description of Artificial Sequence: Synthetic peptide
  Seed: MDPRMCSLMQGSTLPRR
MDPRMMSLMQASTIPRR

SEQ ID NO: 98885 - protein, 17 aa, Artificial Sequence
  Description of Artificial Sequence: Synthetic peptide
  Seed: MDPRMCSLMQGSTLPRR
MDPRMMSLMQASTLPRR

SEQ ID NO: 98886 - protein, 17 aa, Artificial Sequence
  Description of Artificial Sequence: Synthetic peptide
  Seed: MDPRMCSLMQGSTLPRR
MDPRMMSLMQASTMPRR

SEQ ID NO: 98887 - protein, 17 aa, Artificial Sequence
  Description of Artificial Sequence: Synthetic peptide
  Seed: MDPRMCSLMQGSTLPRR
MDPRMMSLMQASTNPRR

SEQ ID NO: 98888 - protein, 17 aa, Artificial Sequence
  Description of Artificial Sequence: Synthetic peptide
  Seed: MDPRMCSLMQGSTLPRR
MDPRMMSLMQASTSPRR

SEQ ID NO: 98889 - protein, 17 aa, Artificial Sequence
  Description of Artificial Sequence: Synthetic peptide
  Seed: MDPRMCSLMQGSTLPRR
MDPRMMSLMQASTTPRR

SEQ ID NO: 98890 - protein, 17 aa, Artificial Sequence
  Description of Artificial Sequence: Synthetic peptide
  Seed: MDPRMCSLMQGSTLPRR
MDPRMMSLMQASTVPRR

SEQ ID NO: 98891 - protein, 17 aa, Artificial Sequence
  Description of Artificial Sequence: Synthetic peptide
  Seed: MDPRMCSLMQGSTLPRR
MDPRMMSLMQGSTAPRR

SEQ ID NO: 98892 - protein, 17 aa, Artificial Sequence
  Description of Artificial Sequence: Synthetic peptide
  Seed: MDPRMCSLMQGSTLPRR
MDPRMMSLMQGSTIPRR

SEQ ID NO: 98893 - protein, 17 aa, Artificial Sequence
  Description of Artificial Sequence: Synthetic peptide
  Seed: MDPRMCSLMQGSTLPRR
MDPRMMSLMQGSTLPRR

SEQ ID NO: 98894 - protein, 17 aa, Artificial Sequence
  Description of Artificial Sequence: Synthetic peptide
  Seed: MDPRMCSLMQGSTLPRR
MDPRMMSLMQGSTMPRR

SEQ ID NO: 98895 - protein, 17 aa, Artificial Sequence
  Description of Artificial Sequence: Synthetic peptide
  Seed: MDPRMCSLMQGSTLPRR
MDPRMMSLMQGSTTPRR

SEQ ID NO: 98896 - protein, 17 aa, Artificial Sequence
  Description of Artificial Sequence: Synthetic peptide
  Seed: MDPRMCSLMQGSTLPRR
MDPRMMSLMQGSTVPRR

SEQ ID NO: 98897 - protein, 17 aa, Artificial Sequence
  Description of Artificial Sequence: Synthetic peptide
  Seed: MDPRMCSLMQGSTLPRR
MDPRMMSLMQISTAPRR

SEQ ID NO: 98898 - protein, 17 aa, Artificial Sequence
  Description of Artificial Sequence: Synthetic peptide
  Seed: MDPRMCSLMQGSTLPRR
MDPRMMSLMQISTNPRR

SEQ ID NO: 98899 - protein, 17 aa, Artificial Sequence
  Description of Artificial Sequence: Synthetic peptide
  Seed: MDPRMCSLMQGSTLPRR
MDPRMMSLMQISTSPRR

SEQ ID NO: 98900 - protein, 17 aa, Artificial Sequence
  Description of Artificial Sequence: Synthetic peptide
  Seed: MDPRMCSLMQGSTLPRR
MDPRMMSLMQLSTAPRR

SEQ ID NO: 98901 - protein, 17 aa, Artificial Sequence
  Description of Artificial Sequence: Synthetic peptide
  Seed: MDPRMCSLMQGSTLPRR
MDPRMMSLMQPSTAPRR

SEQ ID NO: 98902 - protein, 17 aa, Artificial Sequence
  Description of Artificial Sequence: Synthetic peptide
  Seed: MDPRMCSLMQGSTLPRR
MDPRMMSLMQPSTIPRR

SEQ ID NO: 98903 - protein, 17 aa, Artificial Sequence
  Description of Artificial Sequence: Synthetic peptide
  Seed: MDPRMCSLMQGSTLPRR
MDPRMMSLMQPSTLPRR

SEQ ID NO: 98904 - protein, 17 aa, Artificial Sequence
  Description of Artificial Sequence: Synthetic peptide
  Seed: MDPRMCSLMQGSTLPRR
MDPRMMSLMQPSTSPRR

SEQ ID NO: 98905 - protein, 17 aa, Artificial Sequence
  Description of Artificial Sequence: Synthetic peptide
  Seed: MDPRMCSLMQGSTLPRR
MDPRMMSLMQPSTVPRR

SEQ ID NO: 98906 - protein, 17 aa, Artificial Sequence
  Description of Artificial Sequence: Synthetic peptide
  Seed: MDPRMCSLMQGSTLPRR
MDPRMMSLMQSSTAPRR

SEQ ID NO: 98907 - protein, 17 aa, Artificial Sequence
  Description of Artificial Sequence: Synthetic peptide
  Seed: MDPRMCSLMQGSTLPRR
MDPRMMSLMQSSTIPRR

SEQ ID NO: 98908 - protein, 17 aa, Artificial Sequence
  Description of Artificial Sequence: Synthetic peptide
  Seed: MDPRMCSLMQGSTLPRR
MDPRMMSLMQSSTLPRR

SEQ ID NO: 98909 - protein, 17 aa, Artificial Sequence
  Description of Artificial Sequence: Synthetic peptide
  Seed: MDPRMCSLMQGSTLPRR
MDPRMMSLMQSSTMPRR

SEQ ID NO: 98910 - protein, 17 aa, Artificial Sequence
  Description of Artificial Sequence: Synthetic peptide
  Seed: MDPRMCSLMQGSTLPRR
MDPRMMSLMQSSTNPRR

SEQ ID NO: 98911 - protein, 17 aa, Artificial Sequence
  Description of Artificial Sequence: Synthetic peptide
  Seed: MDPRMCSLMQGSTLPRR
MDPRMMSLMQSSTSPRR

SEQ ID NO: 98912 - protein, 17 aa, Artificial Sequence
  Description of Artificial Sequence: Synthetic peptide
  Seed: MDPRMCSLMQGSTLPRR
MDPRMMSLMQSSTTPRR

SEQ ID NO: 98913 - protein, 17 aa, Artificial Sequence
  Description of Artificial Sequence: Synthetic peptide
  Seed: MDPRMCSLMQGSTLPRR
MDPRMMSLMQSSTVPRR

SEQ ID NO: 98914 - protein, 17 aa, Artificial Sequence
  Description of Artificial Sequence: Synthetic peptide
  Seed: MDPRMCSLMQGSTLPRR
MDPRMMSLMQTSTAPRR

SEQ ID NO: 98915 - protein, 17 aa, Artificial Sequence
  Description of Artificial Sequence: Synthetic peptide
  Seed: MDPRMCSLMQGSTLPRR
MDPRMMSLMQTSTLPRR

SEQ ID NO: 98916 - protein, 17 aa, Artificial Sequence
  Description of Artificial Sequence: Synthetic peptide
  Seed: MDPRMCSLMQGSTLPRR
MDPRMMSLMQTSTVPRR

SEQ ID NO: 98917 - protein, 17 aa, Artificial Sequence
  Description of Artificial Sequence: Synthetic peptide
  Seed: MDPRMCSLMQGSTLPRR
MDPRMMSLMQVSTAPRR

SEQ ID NO: 98918 - protein, 17 aa, Artificial Sequence
  Description of Artificial Sequence: Synthetic peptide
  Seed: MDPRMCSLMQGSTLPRR
MDPRMMSLMQVSTNPRR

SEQ ID NO: 98919 - protein, 17 aa, Artificial Sequence
  Description of Artificial Sequence: Synthetic peptide
  Seed: MDPRMCSLMQGSTLPRR
MDPRMMSLMQVSTSPRR

SEQ ID NO: 98920 - protein, 17 aa, Artificial Sequence
  Description of Artificial Sequence: Synthetic peptide
  Seed: MDPRMCSLMQGSTLPRR
MDPRMMSLMQVSTTPRR

SEQ ID NO: 98921 - protein, 17 aa, Artificial Sequence
  Description of Artificial Sequence: Synthetic peptide
  Seed: MDPRMCSLMQGSTLPRR
MDPRMMSLMQVSTVPRR

SEQ ID NO: 98922 - protein, 17 aa, Artificial Sequence
  Description of Artificial Sequence: Synthetic peptide
  Seed: MDPRMCSLMQGSTLPRR
MDPRMMSLQQASTLPRR

SEQ ID NO: 98923 - protein, 17 aa, Artificial Sequence
  Description of Artificial Sequence: Synthetic peptide
  Seed: MDPRMCSLMQGSTLPRR
MDPRMVSLAQASTLPRR

SEQ ID NO: 98924 - protein, 17 aa, Artificial Sequence
  Description of Artificial Sequence: Synthetic peptide
  Seed: MDPRMCSLMQGSTLPRR
MDPRMVSLIQASTAPRR

SEQ ID NO: 98925 - protein, 17 aa, Artificial Sequence
  Description of Artificial Sequence: Synthetic peptide
  Seed: MDPRMCSLMQGSTLPRR
MDPRMVSLIQASTIPRR

SEQ ID NO: 98926 - protein, 17 aa, Artificial Sequence
  Description of Artificial Sequence: Synthetic peptide
  Seed: MDPRMCSLMQGSTLPRR
MDPRMVSLIQASTLPRR

SEQ ID NO: 98927 - protein, 17 aa, Artificial Sequence
  Description of Artificial Sequence: Synthetic peptide
  Seed: MDPRMCSLMQGSTLPRR
MDPRMVSLIQASTVPRR

SEQ ID NO: 98928 - protein, 17 aa, Artificial Sequence
  Description of Artificial Sequence: Synthetic peptide
  Seed: MDPRMCSLMQGSTLPRR
MDPRMVSLIQGSTLPRR

SEQ ID NO: 98929 - protein, 17 aa, Artificial Sequence
  Description of Artificial Sequence: Synthetic peptide
  Seed: MDPRMCSLMQGSTLPRR
MDPRMVSLIQGSTVPRR

SEQ ID NO: 98930 - protein, 17 aa, Artificial Sequence
  Description of Artificial Sequence: Synthetic peptide
  Seed: MDPRMCSLMQGSTLPRR
MDPRMVSLLQASTAPRR

SEQ ID NO: 98931 - protein, 17 aa, Artificial Sequence
  Description of Artificial Sequence: Synthetic peptide
  Seed: MDPRMCSLMQGSTLPRR
MDPRMVSLLQASTIPRR

SEQ ID NO: 98932 - protein, 17 aa, Artificial Sequence
  Description of Artificial Sequence: Synthetic peptide
  Seed: MDPRMCSLMQGSTLPRR
MDPRMVSLLQASTLPRR

SEQ ID NO: 98933 - protein, 17 aa, Artificial Sequence
  Description of Artificial Sequence: Synthetic peptide
  Seed: MDPRMCSLMQGSTLPRR
MDPRMVSLLQASTMPRR

SEQ ID NO: 98934 - protein, 17 aa, Artificial Sequence
  Description of Artificial Sequence: Synthetic peptide
  Seed: MDPRMCSLMQGSTLPRR
MDPRMVSLLQASTTPRR

SEQ ID NO: 98935 - protein, 17 aa, Artificial Sequence
  Description of Artificial Sequence: Synthetic peptide
  Seed: MDPRMCSLMQGSTLPRR
MDPRMVSLLQASTVPRR

SEQ ID NO: 98936 - protein, 17 aa, Artificial Sequence
  Description of Artificial Sequence: Synthetic peptide
  Seed: MDPRMCSLMQGSTLPRR
MDPRMVSLLQGSTAPRR

SEQ ID NO: 98937 - protein, 17 aa, Artificial Sequence
  Description of Artificial Sequence: Synthetic peptide
  Seed: MDPRMCSLMQGSTLPRR
MDPRMVSLLQGSTIPRR

SEQ ID NO: 98938 - protein, 17 aa, Artificial Sequence
  Description of Artificial Sequence: Synthetic peptide
  Seed: MDPRMCSLMQGSTLPRR
MDPRMVSLLQGSTLPRR

SEQ ID NO: 98939 - protein, 17 aa, Artificial Sequence
  Description of Artificial Sequence: Synthetic peptide
  Seed: MDPRMCSLMQGSTLPRR
MDPRMVSLLQGSTMPRR

SEQ ID NO: 98940 - protein, 17 aa, Artificial Sequence
  Description of Artificial Sequence: Synthetic peptide
  Seed: MDPRMCSLMQGSTLPRR
MDPRMVSLLQGSTTPRR

SEQ ID NO: 98941 - protein, 17 aa, Artificial Sequence
  Description of Artificial Sequence: Synthetic peptide
  Seed: MDPRMCSLMQGSTLPRR
MDPRMVSLLQGSTVPRR

SEQ ID NO: 98942 - protein, 17 aa, Artificial Sequence
  Description of Artificial Sequence: Synthetic peptide
  Seed: MDPRMCSLMQGSTLPRR
MDPRMVSLLQPSTAPRR

SEQ ID NO: 98943 - protein, 17 aa, Artificial Sequence
  Description of Artificial Sequence: Synthetic peptide
  Seed: MDPRMCSLMQGSTLPRR
MDPRMVSLLQPSTIPRR

SEQ ID NO: 98944 - protein, 17 aa, Artificial Sequence
  Description of Artificial Sequence: Synthetic peptide
  Seed: MDPRMCSLMQGSTLPRR
MDPRMVSLLQPSTLPRR

SEQ ID NO: 98945 - protein, 17 aa, Artificial Sequence
  Description of Artificial Sequence: Synthetic peptide
  Seed: MDPRMCSLMQGSTLPRR
MDPRMVSLLQPSTVPRR

SEQ ID NO: 98946 - protein, 17 aa, Artificial Sequence
  Description of Artificial Sequence: Synthetic peptide
  Seed: MDPRMCSLMQGSTLPRR
MDPRMVSLLQSSTAPRR

SEQ ID NO: 98947 - protein, 17 aa, Artificial Sequence
  Description of Artificial Sequence: Synthetic peptide
  Seed: MDPRMCSLMQGSTLPRR
MDPRMVSLLQSSTIPRR

SEQ ID NO: 98948 - protein, 17 aa, Artificial Sequence
  Description of Artificial Sequence: Synthetic peptide
  Seed: MDPRMCSLMQGSTLPRR
MDPRMVSLLQSSTLPRR

SEQ ID NO: 98949 - protein, 17 aa, Artificial Sequence
  Description of Artificial Sequence: Synthetic peptide
  Seed: MDPRMCSLMQGSTLPRR
MDPRMVSLLQSSTTPRR

SEQ ID NO: 98950 - protein, 17 aa, Artificial Sequence
  Description of Artificial Sequence: Synthetic peptide
  Seed: MDPRMCSLMQGSTLPRR
MDPRMVSLLQSSTVPRR

SEQ ID NO: 98951 - protein, 17 aa, Artificial Sequence
  Description of Artificial Sequence: Synthetic peptide
  Seed: MDPRMCSLMQGSTLPRR
MDPRMVSLLQTSTVPRR

SEQ ID NO: 98952 - protein, 17 aa, Artificial Sequence
  Description of Artificial Sequence: Synthetic peptide
  Seed: MDPRMCSLMQGSTLPRR
MDPRMVSLMQASTAPRR

SEQ ID NO: 98953 - protein, 17 aa, Artificial Sequence
  Description of Artificial Sequence: Synthetic peptide
  Seed: MDPRMCSLMQGSTLPRR
MDPRMVSLMQASTIPRR

SEQ ID NO: 98954 - protein, 17 aa, Artificial Sequence
  Description of Artificial Sequence: Synthetic peptide
  Seed: MDPRMCSLMQGSTLPRR
MDPRMVSLMQASTLPRR

SEQ ID NO: 98955 - protein, 17 aa, Artificial Sequence
  Description of Artificial Sequence: Synthetic peptide
  Seed: MDPRMCSLMQGSTLPRR
MDPRMVSLMQASTMPRR

SEQ ID NO: 98956 - protein, 17 aa, Artificial Sequence
  Description of Artificial Sequence: Synthetic peptide
  Seed: MDPRMCSLMQGSTLPRR
MDPRMVSLMQASTTPRR

SEQ ID NO: 98957 - protein, 17 aa, Artificial Sequence
  Description of Artificial Sequence: Synthetic peptide
  Seed: MDPRMCSLMQGSTLPRR
MDPRMVSLMQASTVPRR

SEQ ID NO: 98958 - protein, 17 aa, Artificial Sequence
  Description of Artificial Sequence: Synthetic peptide
  Seed: MDPRMCSLMQGSTLPRR
MDPRMVSLMQGSTAPRR

SEQ ID NO: 98959 - protein, 17 aa, Artificial Sequence
  Description of Artificial Sequence: Synthetic peptide
  Seed: MDPRMCSLMQGSTLPRR
MDPRMVSLMQGSTIPRR

SEQ ID NO: 98960 - protein, 17 aa, Artificial Sequence
  Description of Artificial Sequence: Synthetic peptide
  Seed: MDPRMCSLMQGSTLPRR
MDPRMVSLMQGSTLPRR

SEQ ID NO: 98961 - protein, 17 aa, Artificial Sequence
  Description of Artificial Sequence: Synthetic peptide
  Seed: MDPRMCSLMQGSTLPRR
MDPRMVSLMQGSTMPRR

SEQ ID NO: 98962 - protein, 17 aa, Artificial Sequence
  Description of Artificial Sequence: Synthetic peptide
  Seed: MDPRMCSLMQGSTLPRR
MDPRMVSLMQGSTTPRR

SEQ ID NO: 98963 - protein, 17 aa, Artificial Sequence
  Description of Artificial Sequence: Synthetic peptide
  Seed: MDPRMCSLMQGSTLPRR
MDPRMVSLMQGSTVPRR

SEQ ID NO: 98964 - protein, 17 aa, Artificial Sequence
  Description of Artificial Sequence: Synthetic peptide
  Seed: MDPRMCSLMQGSTLPRR
MDPRMVSLMQPSTIPRR

SEQ ID NO: 98965 - protein, 17 aa, Artificial Sequence
  Description of Artificial Sequence: Synthetic peptide
  Seed: MDPRMCSLMQGSTLPRR
MDPRMVSLMQPSTLPRR

SEQ ID NO: 98966 - protein, 17 aa, Artificial Sequence
  Description of Artificial Sequence: Synthetic peptide
  Seed: MDPRMCSLMQGSTLPRR
MDPRMVSLMQPSTVPRR

SEQ ID NO: 98967 - protein, 17 aa, Artificial Sequence
  Description of Artificial Sequence: Synthetic peptide
  Seed: MDPRMCSLMQGSTLPRR
MDPRMVSLMQSSTAPRR

SEQ ID NO: 98968 - protein, 17 aa, Artificial Sequence
  Description of Artificial Sequence: Synthetic peptide
  Seed: MDPRMCSLMQGSTLPRR
MDPRMVSLMQSSTIPRR

SEQ ID NO: 98969 - protein, 17 aa, Artificial Sequence
  Description of Artificial Sequence: Synthetic peptide
  Seed: MDPRMCSLMQGSTLPRR
MDPRMVSLMQSSTLPRR

SEQ ID NO: 98970 - protein, 17 aa, Artificial Sequence
  Description of Artificial Sequence: Synthetic peptide
  Seed: MDPRMCSLMQGSTLPRR
MDPRMVSLMQSSTVPRR

SEQ ID NO: 98971 - protein, 17 aa, Artificial Sequence
  Description of Artificial Sequence: Synthetic peptide
  Seed: MDPRMCSLMQGSTLPRR
MDPRMVSLMQVSTAPRR

SEQ ID NO: 98972 - protein, 17 aa, Artificial Sequence
  Description of Artificial Sequence: Synthetic peptide
  Seed: MDPRMCSLMQGSTLPRR
MDPRMWSLAQASTAPRR

SEQ ID NO: 98973 - protein, 17 aa, Artificial Sequence
  Description of Artificial Sequence: Synthetic peptide
  Seed: MDPRMCSLMQGSTLPRR
MDPRMWSLAQASTIPRR

SEQ ID NO: 98974 - protein, 17 aa, Artificial Sequence
  Description of Artificial Sequence: Synthetic peptide
  Seed: MDPRMCSLMQGSTLPRR
MDPRMWSLAQASTLPRR

SEQ ID NO: 98975 - protein, 17 aa, Artificial Sequence
  Description of Artificial Sequence: Synthetic peptide
  Seed: MDPRMCSLMQGSTLPRR
MDPRMWSLAQASTMPRR

SEQ ID NO: 98976 - protein, 17 aa, Artificial Sequence
  Description of Artificial Sequence: Synthetic peptide
  Seed: MDPRMCSLMQGSTLPRR
MDPRMWSLAQASTNPRR

SEQ ID NO: 98977 - protein, 17 aa, Artificial Sequence
  Description of Artificial Sequence: Synthetic peptide
  Seed: MDPRMCSLMQGSTLPRR
MDPRMWSLAQASTSPRR

SEQ ID NO: 98978 - protein, 17 aa, Artificial Sequence
  Description of Artificial Sequence: Synthetic peptide
  Seed: MDPRMCSLMQGSTLPRR
MDPRMWSLAQASTTPRR

SEQ ID NO: 98979 - protein, 17 aa, Artificial Sequence
  Description of Artificial Sequence: Synthetic peptide
  Seed: MDPRMCSLMQGSTLPRR
MDPRMWSLAQASTVPRR

SEQ ID NO: 98980 - protein, 17 aa, Artificial Sequence
  Description of Artificial Sequence: Synthetic peptide
  Seed: MDPRMCSLMQGSTLPRR
MDPRMWSLAQGSTAPRR

SEQ ID NO: 98981 - protein, 17 aa, Artificial Sequence
  Description of Artificial Sequence: Synthetic peptide
  Seed: MDPRMCSLMQGSTLPRR
MDPRMWSLAQGSTIPRR

SEQ ID NO: 98982 - protein, 17 aa, Artificial Sequence
  Description of Artificial Sequence: Synthetic peptide
  Seed: MDPRMCSLMQGSTLPRR
MDPRMWSLAQGSTLPRR

SEQ ID NO: 98983 - protein, 17 aa, Artificial Sequence
  Description of Artificial Sequence: Synthetic peptide
  Seed: MDPRMCSLMQGSTLPRR
MDPRMWSLAQGSTMPRR

SEQ ID NO: 98984 - protein, 17 aa, Artificial Sequence
  Description of Artificial Sequence: Synthetic peptide
  Seed: MDPRMCSLMQGSTLPRR
MDPRMWSLAQGSTVPRR

SEQ ID NO: 98985 - protein, 17 aa, Artificial Sequence
  Description of Artificial Sequence: Synthetic peptide
  Seed: MDPRMCSLMQGSTLPRR
MDPRMWSLAQISTAPRR

SEQ ID NO: 98986 - protein, 17 aa, Artificial Sequence
  Description of Artificial Sequence: Synthetic peptide
  Seed: MDPRMCSLMQGSTLPRR
MDPRMWSLAQISTSPRR

SEQ ID NO: 98987 - protein, 17 aa, Artificial Sequence
  Description of Artificial Sequence: Synthetic peptide
  Seed: MDPRMCSLMQGSTLPRR
MDPRMWSLAQPSTAPRR

SEQ ID NO: 98988 - protein, 17 aa, Artificial Sequence
  Description of Artificial Sequence: Synthetic peptide
  Seed: MDPRMCSLMQGSTLPRR
MDPRMWSLAQPSTIPRR

SEQ ID NO: 98989 - protein, 17 aa, Artificial Sequence
  Description of Artificial Sequence: Synthetic peptide
  Seed: MDPRMCSLMQGSTLPRR
MDPRMWSLAQPSTLPRR

SEQ ID NO: 98990 - protein, 17 aa, Artificial Sequence
  Description of Artificial Sequence: Synthetic peptide
  Seed: MDPRMCSLMQGSTLPRR
MDPRMWSLAQPSTVPRR

SEQ ID NO: 98991 - protein, 17 aa, Artificial Sequence
  Description of Artificial Sequence: Synthetic peptide
  Seed: MDPRMCSLMQGSTLPRR
MDPRMWSLAQSSTAPRR

SEQ ID NO: 98992 - protein, 17 aa, Artificial Sequence
  Description of Artificial Sequence: Synthetic peptide
  Seed: MDPRMCSLMQGSTLPRR
MDPRMWSLAQSSTIPRR

SEQ ID NO: 98993 - protein, 17 aa, Artificial Sequence
  Description of Artificial Sequence: Synthetic peptide
  Seed: MDPRMCSLMQGSTLPRR
MDPRMWSLAQSSTLPRR

SEQ ID NO: 98994 - protein, 17 aa, Artificial Sequence
  Description of Artificial Sequence: Synthetic peptide
  Seed: MDPRMCSLMQGSTLPRR
MDPRMWSLAQSSTMPRR

SEQ ID NO: 98995 - protein, 17 aa, Artificial Sequence
  Description of Artificial Sequence: Synthetic peptide
  Seed: MDPRMCSLMQGSTLPRR
MDPRMWSLAQSSTSPRR

SEQ ID NO: 98996 - protein, 17 aa, Artificial Sequence
  Description of Artificial Sequence: Synthetic peptide
  Seed: MDPRMCSLMQGSTLPRR
MDPRMWSLAQSSTVPRR

SEQ ID NO: 98997 - protein, 17 aa, Artificial Sequence
  Description of Artificial Sequence: Synthetic peptide
  Seed: MDPRMCSLMQGSTLPRR
MDPRMWSLAQTSTAPRR

SEQ ID NO: 98998 - protein, 17 aa, Artificial Sequence
  Description of Artificial Sequence: Synthetic peptide
  Seed: MDPRMCSLMQGSTLPRR
MDPRMWSLAQTSTSPRR

SEQ ID NO: 98999 - protein, 17 aa, Artificial Sequence
  Description of Artificial Sequence: Synthetic peptide
  Seed: MDPRMCSLMQGSTLPRR
MDPRMWSLAQVSTAPRR

SEQ ID NO: 99000 - protein, 17 aa, Artificial Sequence
  Description of Artificial Sequence: Synthetic peptide
  Seed: MDPRMCSLMQGSTLPRR
MDPRMWSLAQVSTNPRR

SEQ ID NO: 99001 - protein, 17 aa, Artificial Sequence
  Description of Artificial Sequence: Synthetic peptide
  Seed: MDPRMCSLMQGSTLPRR
MDPRMWSLAQVSTSPRR

SEQ ID NO: 99002 - protein, 17 aa, Artificial Sequence
  Description of Artificial Sequence: Synthetic peptide
  Seed: MDPRMCSLMQGSTLPRR
MDPRMWSLFQASTAPRR

SEQ ID NO: 99003 - protein, 17 aa, Artificial Sequence
  Description of Artificial Sequence: Synthetic peptide
  Seed: MDPRMCSLMQGSTLPRR
MDPRMWSLGQASTLPRR

SEQ ID NO: 99004 - protein, 17 aa, Artificial Sequence
  Description of Artificial Sequence: Synthetic peptide
  Seed: MDPRMCSLMQGSTLPRR
MDPRMWSLIQASTAPRR

SEQ ID NO: 99005 - protein, 17 aa, Artificial Sequence
  Description of Artificial Sequence: Synthetic peptide
  Seed: MDPRMCSLMQGSTLPRR
MDPRMWSLIQASTGPRR

SEQ ID NO: 99006 - protein, 17 aa, Artificial Sequence
  Description of Artificial Sequence: Synthetic peptide
  Seed: MDPRMCSLMQGSTLPRR
MDPRMWSLIQASTHPRR

SEQ ID NO: 99007 - protein, 17 aa, Artificial Sequence
  Description of Artificial Sequence: Synthetic peptide
  Seed: MDPRMCSLMQGSTLPRR
MDPRMWSLIQASTIPRR

SEQ ID NO: 99008 - protein, 17 aa, Artificial Sequence
  Description of Artificial Sequence: Synthetic peptide
  Seed: MDPRMCSLMQGSTLPRR
MDPRMWSLIQASTLPRR

SEQ ID NO: 99009 - protein, 17 aa, Artificial Sequence
  Description of Artificial Sequence: Synthetic peptide
  Seed: MDPRMCSLMQGSTLPRR
MDPRMWSLIQASTMPRR

SEQ ID NO: 99010 - protein, 17 aa, Artificial Sequence
  Description of Artificial Sequence: Synthetic peptide
  Seed: MDPRMCSLMQGSTLPRR
MDPRMWSLIQASTNPRR

SEQ ID NO: 99011 - protein, 17 aa, Artificial Sequence
  Description of Artificial Sequence: Synthetic peptide
  Seed: MDPRMCSLMQGSTLPRR
MDPRMWSLIQASTSPRR

SEQ ID NO: 99012 - protein, 17 aa, Artificial Sequence
  Description of Artificial Sequence: Synthetic peptide
  Seed: MDPRMCSLMQGSTLPRR
MDPRMWSLIQASTTPRR

SEQ ID NO: 99013 - protein, 17 aa, Artificial Sequence
  Description of Artificial Sequence: Synthetic peptide
  Seed: MDPRMCSLMQGSTLPRR
MDPRMWSLIQASTVPRR

SEQ ID NO: 99014 - protein, 17 aa, Artificial Sequence
  Description of Artificial Sequence: Synthetic peptide
  Seed: MDPRMCSLMQGSTLPRR
MDPRMWSLIQGSTAPRR

SEQ ID NO: 99015 - protein, 17 aa, Artificial Sequence
  Description of Artificial Sequence: Synthetic peptide
  Seed: MDPRMCSLMQGSTLPRR
MDPRMWSLIQGSTIPRR

SEQ ID NO: 99016 - protein, 17 aa, Artificial Sequence
  Description of Artificial Sequence: Synthetic peptide
  Seed: MDPRMCSLMQGSTLPRR
MDPRMWSLIQGSTLPRR

SEQ ID NO: 99017 - protein, 17 aa, Artificial Sequence
  Description of Artificial Sequence: Synthetic peptide
  Seed: MDPRMCSLMQGSTLPRR
MDPRMWSLIQGSTMPRR

SEQ ID NO: 99018 - protein, 17 aa, Artificial Sequence
  Description of Artificial Sequence: Synthetic peptide
  Seed: MDPRMCSLMQGSTLPRR
MDPRMWSLIQGSTSPRR

SEQ ID NO: 99019 - protein, 17 aa, Artificial Sequence
  Description of Artificial Sequence: Synthetic peptide
  Seed: MDPRMCSLMQGSTLPRR
MDPRMWSLIQGSTTPRR

SEQ ID NO: 99020 - protein, 17 aa, Artificial Sequence
  Description of Artificial Sequence: Synthetic peptide
  Seed: MDPRMCSLMQGSTLPRR
MDPRMWSLIQGSTVPRR

SEQ ID NO: 99021 - protein, 17 aa, Artificial Sequence
  Description of Artificial Sequence: Synthetic peptide
  Seed: MDPRMCSLMQGSTLPRR
MDPRMWSLIQISTAPRR

SEQ ID NO: 99022 - protein, 17 aa, Artificial Sequence
  Description of Artificial Sequence: Synthetic peptide
  Seed: MDPRMCSLMQGSTLPRR
MDPRMWSLIQISTNPRR

SEQ ID NO: 99023 - protein, 17 aa, Artificial Sequence
  Description of Artificial Sequence: Synthetic peptide
  Seed: MDPRMCSLMQGSTLPRR
MDPRMWSLIQISTSPRR

SEQ ID NO: 99024 - protein, 17 aa, Artificial Sequence
  Description of Artificial Sequence: Synthetic peptide
  Seed: MDPRMCSLMQGSTLPRR
MDPRMWSLIQNSTAPRR

SEQ ID NO: 99025 - protein, 17 aa, Artificial Sequence
  Description of Artificial Sequence: Synthetic peptide
  Seed: MDPRMCSLMQGSTLPRR
MDPRMWSLIQNSTIPRR

SEQ ID NO: 99026 - protein, 17 aa, Artificial Sequence
  Description of Artificial Sequence: Synthetic peptide
  Seed: MDPRMCSLMQGSTLPRR
MDPRMWSLIQNSTLPRR

SEQ ID NO: 99027 - protein, 17 aa, Artificial Sequence
  Description of Artificial Sequence: Synthetic peptide
  Seed: MDPRMCSLMQGSTLPRR
MDPRMWSLIQNSTVPRR

SEQ ID NO: 99028 - protein, 17 aa, Artificial Sequence
  Description of Artificial Sequence: Synthetic peptide
  Seed: MDPRMCSLMQGSTLPRR
MDPRMWSLIQPSTAPRR

SEQ ID NO: 99029 - protein, 17 aa, Artificial Sequence
  Description of Artificial Sequence: Synthetic peptide
  Seed: MDPRMCSLMQGSTLPRR
MDPRMWSLIQPSTIPRR

SEQ ID NO: 99030 - protein, 17 aa, Artificial Sequence
  Description of Artificial Sequence: Synthetic peptide
  Seed: MDPRMCSLMQGSTLPRR
MDPRMWSLIQPSTLPRR

SEQ ID NO: 99031 - protein, 17 aa, Artificial Sequence
  Description of Artificial Sequence: Synthetic peptide
  Seed: MDPRMCSLMQGSTLPRR
MDPRMWSLIQPSTNPRR

SEQ ID NO: 99032 - protein, 17 aa, Artificial Sequence
  Description of Artificial Sequence: Synthetic peptide
  Seed: MDPRMCSLMQGSTLPRR
MDPRMWSLIQPSTSPRR

SEQ ID NO: 99033 - protein, 17 aa, Artificial Sequence
  Description of Artificial Sequence: Synthetic peptide
  Seed: MDPRMCSLMQGSTLPRR
MDPRMWSLIQPSTTPRR

SEQ ID NO: 99034 - protein, 17 aa, Artificial Sequence
  Description of Artificial Sequence: Synthetic peptide
  Seed: MDPRMCSLMQGSTLPRR
MDPRMWSLIQPSTVPRR

SEQ ID NO: 99035 - protein, 17 aa, Artificial Sequence
  Description of Artificial Sequence: Synthetic peptide
  Seed: MDPRMCSLMQGSTLPRR
MDPRMWSLIQSSTAPRR

SEQ ID NO: 99036 - protein, 17 aa, Artificial Sequence
  Description of Artificial Sequence: Synthetic peptide
  Seed: MDPRMCSLMQGSTLPRR
MDPRMWSLIQSSTIPRR

SEQ ID NO: 99037 - protein, 17 aa, Artificial Sequence
  Description of Artificial Sequence: Synthetic peptide
  Seed: MDPRMCSLMQGSTLPRR
MDPRMWSLIQSSTLPRR

SEQ ID NO: 99038 - protein, 17 aa, Artificial Sequence
  Description of Artificial Sequence: Synthetic peptide
  Seed: MDPRMCSLMQGSTLPRR
MDPRMWSLIQSSTMPRR

SEQ ID NO: 99039 - protein, 17 aa, Artificial Sequence
  Description of Artificial Sequence: Synthetic peptide
  Seed: MDPRMCSLMQGSTLPRR
MDPRMWSLIQSSTNPRR

SEQ ID NO: 99040 - protein, 17 aa, Artificial Sequence
  Description of Artificial Sequence: Synthetic peptide
  Seed: MDPRMCSLMQGSTLPRR
MDPRMWSLIQSSTSPRR

SEQ ID NO: 99041 - protein, 17 aa, Artificial Sequence
  Description of Artificial Sequence: Synthetic peptide
  Seed: MDPRMCSLMQGSTLPRR
MDPRMWSLIQSSTTPRR

SEQ ID NO: 99042 - protein, 17 aa, Artificial Sequence
  Description of Artificial Sequence: Synthetic peptide
  Seed: MDPRMCSLMQGSTLPRR
MDPRMWSLIQSSTVPRR

SEQ ID NO: 99043 - protein, 17 aa, Artificial Sequence
  Description of Artificial Sequence: Synthetic peptide
  Seed: MDPRMCSLMQGSTLPRR
MDPRMWSLIQTSTAPRR

SEQ ID NO: 99044 - protein, 17 aa, Artificial Sequence
  Description of Artificial Sequence: Synthetic peptide
  Seed: MDPRMCSLMQGSTLPRR
MDPRMWSLIQTSTIPRR

SEQ ID NO: 99045 - protein, 17 aa, Artificial Sequence
  Description of Artificial Sequence: Synthetic peptide
  Seed: MDPRMCSLMQGSTLPRR
MDPRMWSLIQTSTLPRR

SEQ ID NO: 99046 - protein, 17 aa, Artificial Sequence
  Description of Artificial Sequence: Synthetic peptide
  Seed: MDPRMCSLMQGSTLPRR
MDPRMWSLIQTSTNPRR

SEQ ID NO: 99047 - protein, 17 aa, Artificial Sequence
  Description of Artificial Sequence: Synthetic peptide
  Seed: MDPRMCSLMQGSTLPRR
MDPRMWSLIQTSTSPRR

SEQ ID NO: 99048 - protein, 17 aa, Artificial Sequence
  Description of Artificial Sequence: Synthetic peptide
  Seed: MDPRMCSLMQGSTLPRR
MDPRMWSLIQTSTTPRR

SEQ ID NO: 99049 - protein, 17 aa, Artificial Sequence
  Description of Artificial Sequence: Synthetic peptide
  Seed: MDPRMCSLMQGSTLPRR
MDPRMWSLIQTSTVPRR

SEQ ID NO: 99050 - protein, 17 aa, Artificial Sequence
  Description of Artificial Sequence: Synthetic peptide
  Seed: MDPRMCSLMQGSTLPRR
MDPRMWSLIQVSTAPRR

SEQ ID NO: 99051 - protein, 17 aa, Artificial Sequence
  Description of Artificial Sequence: Synthetic peptide
  Seed: MDPRMCSLMQGSTLPRR
MDPRMWSLIQVSTNPRR

SEQ ID NO: 99052 - protein, 17 aa, Artificial Sequence
  Description of Artificial Sequence: Synthetic peptide
  Seed: MDPRMCSLMQGSTLPRR
MDPRMWSLIQVSTSPRR

SEQ ID NO: 99053 - protein, 17 aa, Artificial Sequence
  Description of Artificial Sequence: Synthetic peptide
  Seed: MDPRMCSLMQGSTLPRR
MDPRMWSLIQVSTTPRR

SEQ ID NO: 99054 - protein, 17 aa, Artificial Sequence
  Description of Artificial Sequence: Synthetic peptide
  Seed: MDPRMCSLMQGSTLPRR
MDPRMWSLIQVSTVPRR

SEQ ID NO: 99055 - protein, 17 aa, Artificial Sequence
  Description of Artificial Sequence: Synthetic peptide
  Seed: MDPRMCSLMQGSTLPRR
MDPRMWSLLQASTAPRR

SEQ ID NO: 99056 - protein, 17 aa, Artificial Sequence
  Description of Artificial Sequence: Synthetic peptide
  Seed: MDPRMCSLMQGSTLPRR
MDPRMWSLLQASTFPRR

SEQ ID NO: 99057 - protein, 17 aa, Artificial Sequence
  Description of Artificial Sequence: Synthetic peptide
  Seed: MDPRMCSLMQGSTLPRR
MDPRMWSLLQASTGPRR

SEQ ID NO: 99058 - protein, 17 aa, Artificial Sequence
  Description of Artificial Sequence: Synthetic peptide
  Seed: MDPRMCSLMQGSTLPRR
MDPRMWSLLQASTHPRR

SEQ ID NO: 99059 - protein, 17 aa, Artificial Sequence
  Description of Artificial Sequence: Synthetic peptide
  Seed: MDPRMCSLMQGSTLPRR
MDPRMWSLLQASTIPRR

SEQ ID NO: 99060 - protein, 17 aa, Artificial Sequence
  Description of Artificial Sequence: Synthetic peptide
  Seed: MDPRMCSLMQGSTLPRR
MDPRMWSLLQASTLPRR

SEQ ID NO: 99061 - protein, 17 aa, Artificial Sequence
  Description of Artificial Sequence: Synthetic peptide
  Seed: MDPRMCSLMQGSTLPRR
MDPRMWSLLQASTMPRR

SEQ ID NO: 99062 - protein, 17 aa, Artificial Sequence
  Description of Artificial Sequence: Synthetic peptide
  Seed: MDPRMCSLMQGSTLPRR
MDPRMWSLLQASTNPRR

SEQ ID NO: 99063 - protein, 17 aa, Artificial Sequence
  Description of Artificial Sequence: Synthetic peptide
  Seed: MDPRMCSLMQGSTLPRR
MDPRMWSLLQASTQPRR

SEQ ID NO: 99064 - protein, 17 aa, Artificial Sequence
  Description of Artificial Sequence: Synthetic peptide
  Seed: MDPRMCSLMQGSTLPRR
MDPRMWSLLQASTSPRR

SEQ ID NO: 99065 - protein, 17 aa, Artificial Sequence
  Description of Artificial Sequence: Synthetic peptide
  Seed: MDPRMCSLMQGSTLPRR
MDPRMWSLLQASTTPRR

SEQ ID NO: 99066 - protein, 17 aa, Artificial Sequence
  Description of Artificial Sequence: Synthetic peptide
  Seed: MDPRMCSLMQGSTLPRR
MDPRMWSLLQASTVPRR

SEQ ID NO: 99067 - protein, 17 aa, Artificial Sequence
  Description of Artificial Sequence: Synthetic peptide
  Seed: MDPRMCSLMQGSTLPRR
MDPRMWSLLQGSTAPRR

SEQ ID NO: 99068 - protein, 17 aa, Artificial Sequence
  Description of Artificial Sequence: Synthetic peptide
  Seed: MDPRMCSLMQGSTLPRR
MDPRMWSLLQGSTGPRR

SEQ ID NO: 99069 - protein, 17 aa, Artificial Sequence
  Description of Artificial Sequence: Synthetic peptide
  Seed: MDPRMCSLMQGSTLPRR
MDPRMWSLLQGSTIPRR

SEQ ID NO: 99070 - protein, 17 aa, Artificial Sequence
  Description of Artificial Sequence: Synthetic peptide
  Seed: MDPRMCSLMQGSTLPRR
MDPRMWSLLQGSTLPRR

SEQ ID NO: 99071 - protein, 17 aa, Artificial Sequence
  Description of Artificial Sequence: Synthetic peptide
  Seed: MDPRMCSLMQGSTLPRR
MDPRMWSLLQGSTMPRR

SEQ ID NO: 99072 - protein, 17 aa, Artificial Sequence
  Description of Artificial Sequence: Synthetic peptide
  Seed: MDPRMCSLMQGSTLPRR
MDPRMWSLLQGSTNPRR

SEQ ID NO: 99073 - protein, 17 aa, Artificial Sequence
  Description of Artificial Sequence: Synthetic peptide
  Seed: MDPRMCSLMQGSTLPRR
MDPRMWSLLQGSTSPRR

SEQ ID NO: 99074 - protein, 17 aa, Artificial Sequence
  Description of Artificial Sequence: Synthetic peptide
  Seed: MDPRMCSLMQGSTLPRR
MDPRMWSLLQGSTTPRR

SEQ ID NO: 99075 - protein, 17 aa, Artificial Sequence
  Description of Artificial Sequence: Synthetic peptide
  Seed: MDPRMCSLMQGSTLPRR
MDPRMWSLLQGSTVPRR

SEQ ID NO: 99076 - protein, 17 aa, Artificial Sequence
  Description of Artificial Sequence: Synthetic peptide
  Seed: MDPRMCSLMQGSTLPRR
MDPRMWSLLQISTAPRR

SEQ ID NO: 99077 - protein, 17 aa, Artificial Sequence
  Description of Artificial Sequence: Synthetic peptide
  Seed: MDPRMCSLMQGSTLPRR
MDPRMWSLLQISTNPRR

SEQ ID NO: 99078 - protein, 17 aa, Artificial Sequence
  Description of Artificial Sequence: Synthetic peptide
  Seed: MDPRMCSLMQGSTLPRR
MDPRMWSLLQISTSPRR

SEQ ID NO: 99079 - protein, 17 aa, Artificial Sequence
  Description of Artificial Sequence: Synthetic peptide
  Seed: MDPRMCSLMQGSTLPRR
MDPRMWSLLQISTTPRR

SEQ ID NO: 99080 - protein, 17 aa, Artificial Sequence
  Description of Artificial Sequence: Synthetic peptide
  Seed: MDPRMCSLMQGSTLPRR
MDPRMWSLLQISTVPRR

SEQ ID NO: 99081 - protein, 17 aa, Artificial Sequence
  Description of Artificial Sequence: Synthetic peptide
  Seed: MDPRMCSLMQGSTLPRR
MDPRMWSLLQLSTAPRR

SEQ ID NO: 99082 - protein, 17 aa, Artificial Sequence
  Description of Artificial Sequence: Synthetic peptide
  Seed: MDPRMCSLMQGSTLPRR
MDPRMWSLLQMSTAPRR

SEQ ID NO: 99083 - protein, 17 aa, Artificial Sequence
  Description of Artificial Sequence: Synthetic peptide
  Seed: MDPRMCSLMQGSTLPRR
MDPRMWSLLQNSTAPRR

SEQ ID NO: 99084 - protein, 17 aa, Artificial Sequence
  Description of Artificial Sequence: Synthetic peptide
  Seed: MDPRMCSLMQGSTLPRR
MDPRMWSLLQNSTIPRR

SEQ ID NO: 99085 - protein, 17 aa, Artificial Sequence
  Description of Artificial Sequence: Synthetic peptide
  Seed: MDPRMCSLMQGSTLPRR
MDPRMWSLLQNSTLPRR

SEQ ID NO: 99086 - protein, 17 aa, Artificial Sequence
  Description of Artificial Sequence: Synthetic peptide
  Seed: MDPRMCSLMQGSTLPRR
MDPRMWSLLQNSTMPRR

SEQ ID NO: 99087 - protein, 17 aa, Artificial Sequence
  Description of Artificial Sequence: Synthetic peptide
  Seed: MDPRMCSLMQGSTLPRR
MDPRMWSLLQNSTNPRR

SEQ ID NO: 99088 - protein, 17 aa, Artificial Sequence
  Description of Artificial Sequence: Synthetic peptide
  Seed: MDPRMCSLMQGSTLPRR
MDPRMWSLLQNSTSPRR

SEQ ID NO: 99089 - protein, 17 aa, Artificial Sequence
  Description of Artificial Sequence: Synthetic peptide
  Seed: MDPRMCSLMQGSTLPRR
MDPRMWSLLQNSTTPRR

SEQ ID NO: 99090 - protein, 17 aa, Artificial Sequence
  Description of Artificial Sequence: Synthetic peptide
  Seed: MDPRMCSLMQGSTLPRR
MDPRMWSLLQNSTVPRR

SEQ ID NO: 99091 - protein, 17 aa, Artificial Sequence
  Description of Artificial Sequence: Synthetic peptide
  Seed: MDPRMCSLMQGSTLPRR
MDPRMWSLLQPSTAPRR

SEQ ID NO: 99092 - protein, 17 aa, Artificial Sequence
  Description of Artificial Sequence: Synthetic peptide
  Seed: MDPRMCSLMQGSTLPRR
MDPRMWSLLQPSTIPRR

SEQ ID NO: 99093 - protein, 17 aa, Artificial Sequence
  Description of Artificial Sequence: Synthetic peptide
  Seed: MDPRMCSLMQGSTLPRR
MDPRMWSLLQPSTLPRR

SEQ ID NO: 99094 - protein, 17 aa, Artificial Sequence
  Description of Artificial Sequence: Synthetic peptide
  Seed: MDPRMCSLMQGSTLPRR
MDPRMWSLLQPSTMPRR

SEQ ID NO: 99095 - protein, 17 aa, Artificial Sequence
  Description of Artificial Sequence: Synthetic peptide
  Seed: MDPRMCSLMQGSTLPRR
MDPRMWSLLQPSTNPRR

SEQ ID NO: 99096 - protein, 17 aa, Artificial Sequence
  Description of Artificial Sequence: Synthetic peptide
  Seed: MDPRMCSLMQGSTLPRR
MDPRMWSLLQPSTSPRR

SEQ ID NO: 99097 - protein, 17 aa, Artificial Sequence
  Description of Artificial Sequence: Synthetic peptide
  Seed: MDPRMCSLMQGSTLPRR
MDPRMWSLLQPSTTPRR

SEQ ID NO: 99098 - protein, 17 aa, Artificial Sequence
  Description of Artificial Sequence: Synthetic peptide
  Seed: MDPRMCSLMQGSTLPRR
MDPRMWSLLQPSTVPRR

SEQ ID NO: 99099 - protein, 17 aa, Artificial Sequence
  Description of Artificial Sequence: Synthetic peptide
  Seed: MDPRMCSLMQGSTLPRR
MDPRMWSLLQSSTAPRR

SEQ ID NO: 99100 - protein, 17 aa, Artificial Sequence
  Description of Artificial Sequence: Synthetic peptide
  Seed: MDPRMCSLMQGSTLPRR
MDPRMWSLLQSSTGPRR

SEQ ID NO: 99101 - protein, 17 aa, Artificial Sequence
  Description of Artificial Sequence: Synthetic peptide
  Seed: MDPRMCSLMQGSTLPRR
MDPRMWSLLQSSTIPRR

SEQ ID NO: 99102 - protein, 17 aa, Artificial Sequence
  Description of Artificial Sequence: Synthetic peptide
  Seed: MDPRMCSLMQGSTLPRR
MDPRMWSLLQSSTLPRR

SEQ ID NO: 99103 - protein, 17 aa, Artificial Sequence
  Description of Artificial Sequence: Synthetic peptide
  Seed: MDPRMCSLMQGSTLPRR
MDPRMWSLLQSSTMPRR

SEQ ID NO: 99104 - protein, 17 aa, Artificial Sequence
  Description of Artificial Sequence: Synthetic peptide
  Seed: MDPRMCSLMQGSTLPRR
MDPRMWSLLQSSTNPRR

SEQ ID NO: 99105 - protein, 17 aa, Artificial Sequence
  Description of Artificial Sequence: Synthetic peptide
  Seed: MDPRMCSLMQGSTLPRR
MDPRMWSLLQSSTSPRR

SEQ ID NO: 99106 - protein, 17 aa, Artificial Sequence
  Description of Artificial Sequence: Synthetic peptide
  Seed: MDPRMCSLMQGSTLPRR
MDPRMWSLLQSSTTPRR

SEQ ID NO: 99107 - protein, 17 aa, Artificial Sequence
  Description of Artificial Sequence: Synthetic peptide
  Seed: MDPRMCSLMQGSTLPRR
MDPRMWSLLQSSTVPRR

SEQ ID NO: 99108 - protein, 17 aa, Artificial Sequence
  Description of Artificial Sequence: Synthetic peptide
  Seed: MDPRMCSLMQGSTLPRR
MDPRMWSLLQTSTAPRR

SEQ ID NO: 99109 - protein, 17 aa, Artificial Sequence
  Description of Artificial Sequence: Synthetic peptide
  Seed: MDPRMCSLMQGSTLPRR
MDPRMWSLLQTSTIPRR

SEQ ID NO: 99110 - protein, 17 aa, Artificial Sequence
  Description of Artificial Sequence: Synthetic peptide
  Seed: MDPRMCSLMQGSTLPRR
MDPRMWSLLQTSTLPRR

SEQ ID NO: 99111 - protein, 17 aa, Artificial Sequence
  Description of Artificial Sequence: Synthetic peptide
  Seed: MDPRMCSLMQGSTLPRR
MDPRMWSLLQTSTMPRR

SEQ ID NO: 99112 - protein, 17 aa, Artificial Sequence
  Description of Artificial Sequence: Synthetic peptide
  Seed: MDPRMCSLMQGSTLPRR
MDPRMWSLLQTSTNPRR

SEQ ID NO: 99113 - protein, 17 aa, Artificial Sequence
  Description of Artificial Sequence: Synthetic peptide
  Seed: MDPRMCSLMQGSTLPRR
MDPRMWSLLQTSTSPRR

SEQ ID NO: 99114 - protein, 17 aa, Artificial Sequence
  Description of Artificial Sequence: Synthetic peptide
  Seed: MDPRMCSLMQGSTLPRR
MDPRMWSLLQTSTTPRR

SEQ ID NO: 99115 - protein, 17 aa, Artificial Sequence
  Description of Artificial Sequence: Synthetic peptide
  Seed: MDPRMCSLMQGSTLPRR
MDPRMWSLLQTSTVPRR

SEQ ID NO: 99116 - protein, 17 aa, Artificial Sequence
  Description of Artificial Sequence: Synthetic peptide
  Seed: MDPRMCSLMQGSTLPRR
MDPRMWSLLQVSTAPRR

SEQ ID NO: 99117 - protein, 17 aa, Artificial Sequence
  Description of Artificial Sequence: Synthetic peptide
  Seed: MDPRMCSLMQGSTLPRR
MDPRMWSLLQVSTGPRR

SEQ ID NO: 99118 - protein, 17 aa, Artificial Sequence
  Description of Artificial Sequence: Synthetic peptide
  Seed: MDPRMCSLMQGSTLPRR
MDPRMWSLLQVSTHPRR

SEQ ID NO: 99119 - protein, 17 aa, Artificial Sequence
  Description of Artificial Sequence: Synthetic peptide
  Seed: MDPRMCSLMQGSTLPRR
MDPRMWSLLQVSTIPRR

SEQ ID NO: 99120 - protein, 17 aa, Artificial Sequence
  Description of Artificial Sequence: Synthetic peptide
  Seed: MDPRMCSLMQGSTLPRR
MDPRMWSLLQVSTLPRR

SEQ ID NO: 99121 - protein, 17 aa, Artificial Sequence
  Description of Artificial Sequence: Synthetic peptide
  Seed: MDPRMCSLMQGSTLPRR
MDPRMWSLLQVSTMPRR

SEQ ID NO: 99122 - protein, 17 aa, Artificial Sequence
  Description of Artificial Sequence: Synthetic peptide
  Seed: MDPRMCSLMQGSTLPRR
MDPRMWSLLQVSTNPRR

SEQ ID NO: 99123 - protein, 17 aa, Artificial Sequence
  Description of Artificial Sequence: Synthetic peptide
  Seed: MDPRMCSLMQGSTLPRR
MDPRMWSLLQVSTSPRR

SEQ ID NO: 99124 - protein, 17 aa, Artificial Sequence
  Description of Artificial Sequence: Synthetic peptide
  Seed: MDPRMCSLMQGSTLPRR
MDPRMWSLLQVSTTPRR

SEQ ID NO: 99125 - protein, 17 aa, Artificial Sequence
  Description of Artificial Sequence: Synthetic peptide
  Seed: MDPRMCSLMQGSTLPRR
MDPRMWSLLQVSTVPRR

SEQ ID NO: 99126 - protein, 17 aa, Artificial Sequence
  Description of Artificial Sequence: Synthetic peptide
  Seed: MDPRMCSLMQGSTLPRR
MDPRMWSLMQASTAPRR

SEQ ID NO: 99127 - protein, 17 aa, Artificial Sequence
  Description of Artificial Sequence: Synthetic peptide
  Seed: MDPRMCSLMQGSTLPRR
MDPRMWSLMQASTFPRR

SEQ ID NO: 99128 - protein, 17 aa, Artificial Sequence
  Description of Artificial Sequence: Synthetic peptide
  Seed: MDPRMCSLMQGSTLPRR
MDPRMWSLMQASTGPRR

SEQ ID NO: 99129 - protein, 17 aa, Artificial Sequence
  Description of Artificial Sequence: Synthetic peptide
  Seed: MDPRMCSLMQGSTLPRR
MDPRMWSLMQASTHPRR

SEQ ID NO: 99130 - protein, 17 aa, Artificial Sequence
  Description of Artificial Sequence: Synthetic peptide
  Seed: MDPRMCSLMQGSTLPRR
MDPRMWSLMQASTIPRR

SEQ ID NO: 99131 - protein, 17 aa, Artificial Sequence
  Description of Artificial Sequence: Synthetic peptide
  Seed: MDPRMCSLMQGSTLPRR
MDPRMWSLMQASTLPRR

SEQ ID NO: 99132 - protein, 17 aa, Artificial Sequence
  Description of Artificial Sequence: Synthetic peptide
  Seed: MDPRMCSLMQGSTLPRR
MDPRMWSLMQASTMPRR

SEQ ID NO: 99133 - protein, 17 aa, Artificial Sequence
  Description of Artificial Sequence: Synthetic peptide
  Seed: MDPRMCSLMQGSTLPRR
MDPRMWSLMQASTNPRR

SEQ ID NO: 99134 - protein, 17 aa, Artificial Sequence
  Description of Artificial Sequence: Synthetic peptide
  Seed: MDPRMCSLMQGSTLPRR
MDPRMWSLMQASTQPRR

SEQ ID NO: 99135 - protein, 17 aa, Artificial Sequence
  Description of Artificial Sequence: Synthetic peptide
  Seed: MDPRMCSLMQGSTLPRR
MDPRMWSLMQASTSPRR

SEQ ID NO: 99136 - protein, 17 aa, Artificial Sequence
  Description of Artificial Sequence: Synthetic peptide
  Seed: MDPRMCSLMQGSTLPRR
MDPRMWSLMQASTTPRR

SEQ ID NO: 99137 - protein, 17 aa, Artificial Sequence
  Description of Artificial Sequence: Synthetic peptide
  Seed: MDPRMCSLMQGSTLPRR
MDPRMWSLMQASTVPRR

SEQ ID NO: 99138 - protein, 17 aa, Artificial Sequence
  Description of Artificial Sequence: Synthetic peptide
  Seed: MDPRMCSLMQGSTLPRR
MDPRMWSLMQGSTAPRR

SEQ ID NO: 99139 - protein, 17 aa, Artificial Sequence
  Description of Artificial Sequence: Synthetic peptide
  Seed: MDPRMCSLMQGSTLPRR
MDPRMWSLMQGSTGPRR

SEQ ID NO: 99140 - protein, 17 aa, Artificial Sequence
  Description of Artificial Sequence: Synthetic peptide
  Seed: MDPRMCSLMQGSTLPRR
MDPRMWSLMQGSTIPRR

SEQ ID NO: 99141 - protein, 17 aa, Artificial Sequence
  Description of Artificial Sequence: Synthetic peptide
  Seed: MDPRMCSLMQGSTLPRR
MDPRMWSLMQGSTLPRR

SEQ ID NO: 99142 - protein, 17 aa, Artificial Sequence
  Description of Artificial Sequence: Synthetic peptide
  Seed: MDPRMCSLMQGSTLPRR
MDPRMWSLMQGSTMPRR

SEQ ID NO: 99143 - protein, 17 aa, Artificial Sequence
  Description of Artificial Sequence: Synthetic peptide
  Seed: MDPRMCSLMQGSTLPRR
MDPRMWSLMQGSTNPRR

SEQ ID NO: 99144 - protein, 17 aa, Artificial Sequence
  Description of Artificial Sequence: Synthetic peptide
  Seed: MDPRMCSLMQGSTLPRR
MDPRMWSLMQGSTSPRR

SEQ ID NO: 99145 - protein, 17 aa, Artificial Sequence
  Description of Artificial Sequence: Synthetic peptide
  Seed: MDPRMCSLMQGSTLPRR
MDPRMWSLMQGSTTPRR

SEQ ID NO: 99146 - protein, 17 aa, Artificial Sequence
  Description of Artificial Sequence: Synthetic peptide
  Seed: MDPRMCSLMQGSTLPRR
MDPRMWSLMQGSTVPRR

SEQ ID NO: 99147 - protein, 17 aa, Artificial Sequence
  Description of Artificial Sequence: Synthetic peptide
  Seed: MDPRMCSLMQGSTLPRR
MDPRMWSLMQISTAPRR

SEQ ID NO: 99148 - protein, 17 aa, Artificial Sequence
  Description of Artificial Sequence: Synthetic peptide
  Seed: MDPRMCSLMQGSTLPRR
MDPRMWSLMQISTIPRR

SEQ ID NO: 99149 - protein, 17 aa, Artificial Sequence
  Description of Artificial Sequence: Synthetic peptide
  Seed: MDPRMCSLMQGSTLPRR
MDPRMWSLMQISTLPRR

SEQ ID NO: 99150 - protein, 17 aa, Artificial Sequence
  Description of Artificial Sequence: Synthetic peptide
  Seed: MDPRMCSLMQGSTLPRR
MDPRMWSLMQISTMPRR

SEQ ID NO: 99151 - protein, 17 aa, Artificial Sequence
  Description of Artificial Sequence: Synthetic peptide
  Seed: MDPRMCSLMQGSTLPRR
MDPRMWSLMQISTNPRR

SEQ ID NO: 99152 - protein, 17 aa, Artificial Sequence
  Description of Artificial Sequence: Synthetic peptide
  Seed: MDPRMCSLMQGSTLPRR
MDPRMWSLMQISTSPRR

SEQ ID NO: 99153 - protein, 17 aa, Artificial Sequence
  Description of Artificial Sequence: Synthetic peptide
  Seed: MDPRMCSLMQGSTLPRR
MDPRMWSLMQISTTPRR

SEQ ID NO: 99154 - protein, 17 aa, Artificial Sequence
  Description of Artificial Sequence: Synthetic peptide
  Seed: MDPRMCSLMQGSTLPRR
MDPRMWSLMQISTVPRR

SEQ ID NO: 99155 - protein, 17 aa, Artificial Sequence
  Description of Artificial Sequence: Synthetic peptide
  Seed: MDPRMCSLMQGSTLPRR
MDPRMWSLMQLSTAPRR

SEQ ID NO: 99156 - protein, 17 aa, Artificial Sequence
  Description of Artificial Sequence: Synthetic peptide
  Seed: MDPRMCSLMQGSTLPRR
MDPRMWSLMQLSTSPRR

SEQ ID NO: 99157 - protein, 17 aa, Artificial Sequence
  Description of Artificial Sequence: Synthetic peptide
  Seed: MDPRMCSLMQGSTLPRR
MDPRMWSLMQMSTAPRR

SEQ ID NO: 99158 - protein, 17 aa, Artificial Sequence
  Description of Artificial Sequence: Synthetic peptide
  Seed: MDPRMCSLMQGSTLPRR
MDPRMWSLMQMSTSPRR

SEQ ID NO: 99159 - protein, 17 aa, Artificial Sequence
  Description of Artificial Sequence: Synthetic peptide
  Seed: MDPRMCSLMQGSTLPRR
MDPRMWSLMQNSTAPRR

SEQ ID NO: 99160 - protein, 17 aa, Artificial Sequence
  Description of Artificial Sequence: Synthetic peptide
  Seed: MDPRMCSLMQGSTLPRR
MDPRMWSLMQNSTIPRR

SEQ ID NO: 99161 - protein, 17 aa, Artificial Sequence
  Description of Artificial Sequence: Synthetic peptide
  Seed: MDPRMCSLMQGSTLPRR
MDPRMWSLMQNSTLPRR

SEQ ID NO: 99162 - protein, 17 aa, Artificial Sequence
  Description of Artificial Sequence: Synthetic peptide
  Seed: MDPRMCSLMQGSTLPRR
MDPRMWSLMQNSTMPRR

SEQ ID NO: 99163 - protein, 17 aa, Artificial Sequence
  Description of Artificial Sequence: Synthetic peptide
  Seed: MDPRMCSLMQGSTLPRR
MDPRMWSLMQNSTNPRR

SEQ ID NO: 99164 - protein, 17 aa, Artificial Sequence
  Description of Artificial Sequence: Synthetic peptide
  Seed: MDPRMCSLMQGSTLPRR
MDPRMWSLMQNSTSPRR

SEQ ID NO: 99165 - protein, 17 aa, Artificial Sequence
  Description of Artificial Sequence: Synthetic peptide
  Seed: MDPRMCSLMQGSTLPRR
MDPRMWSLMQNSTTPRR

SEQ ID NO: 99166 - protein, 17 aa, Artificial Sequence
  Description of Artificial Sequence: Synthetic peptide
  Seed: MDPRMCSLMQGSTLPRR
MDPRMWSLMQNSTVPRR

SEQ ID NO: 99167 - protein, 17 aa, Artificial Sequence
  Description of Artificial Sequence: Synthetic peptide
  Seed: MDPRMCSLMQGSTLPRR
MDPRMWSLMQPSTAPRR

SEQ ID NO: 99168 - protein, 17 aa, Artificial Sequence
  Description of Artificial Sequence: Synthetic peptide
  Seed: MDPRMCSLMQGSTLPRR
MDPRMWSLMQPSTIPRR

SEQ ID NO: 99169 - protein, 17 aa, Artificial Sequence
  Description of Artificial Sequence: Synthetic peptide
  Seed: MDPRMCSLMQGSTLPRR
MDPRMWSLMQPSTLPRR

SEQ ID NO: 99170 - protein, 17 aa, Artificial Sequence
  Description of Artificial Sequence: Synthetic peptide
  Seed: MDPRMCSLMQGSTLPRR
MDPRMWSLMQPSTMPRR

SEQ ID NO: 99171 - protein, 17 aa, Artificial Sequence
  Description of Artificial Sequence: Synthetic peptide
  Seed: MDPRMCSLMQGSTLPRR
MDPRMWSLMQPSTNPRR

SEQ ID NO: 99172 - protein, 17 aa, Artificial Sequence
  Description of Artificial Sequence: Synthetic peptide
  Seed: MDPRMCSLMQGSTLPRR
MDPRMWSLMQPSTSPRR

SEQ ID NO: 99173 - protein, 17 aa, Artificial Sequence
  Description of Artificial Sequence: Synthetic peptide
  Seed: MDPRMCSLMQGSTLPRR
MDPRMWSLMQPSTTPRR

SEQ ID NO: 99174 - protein, 17 aa, Artificial Sequence
  Description of Artificial Sequence: Synthetic peptide
  Seed: MDPRMCSLMQGSTLPRR
MDPRMWSLMQPSTVPRR

SEQ ID NO: 99175 - protein, 17 aa, Artificial Sequence
  Description of Artificial Sequence: Synthetic peptide
  Seed: MDPRMCSLMQGSTLPRR
MDPRMWSLMQSSTAPRR

SEQ ID NO: 99176 - protein, 17 aa, Artificial Sequence
  Description of Artificial Sequence: Synthetic peptide
  Seed: MDPRMCSLMQGSTLPRR
MDPRMWSLMQSSTGPRR

SEQ ID NO: 99177 - protein, 17 aa, Artificial Sequence
  Description of Artificial Sequence: Synthetic peptide
  Seed: MDPRMCSLMQGSTLPRR
MDPRMWSLMQSSTHPRR

SEQ ID NO: 99178 - protein, 17 aa, Artificial Sequence
  Description of Artificial Sequence: Synthetic peptide
  Seed: MDPRMCSLMQGSTLPRR
MDPRMWSLMQSSTIPRR

SEQ ID NO: 99179 - protein, 17 aa, Artificial Sequence
  Description of Artificial Sequence: Synthetic peptide
  Seed: MDPRMCSLMQGSTLPRR
MDPRMWSLMQSSTLPRR

SEQ ID NO: 99180 - protein, 17 aa, Artificial Sequence
  Description of Artificial Sequence: Synthetic peptide
  Seed: MDPRMCSLMQGSTLPRR
MDPRMWSLMQSSTMPRR

SEQ ID NO: 99181 - protein, 17 aa, Artificial Sequence
  Description of Artificial Sequence: Synthetic peptide
  Seed: MDPRMCSLMQGSTLPRR
MDPRMWSLMQSSTNPRR

SEQ ID NO: 99182 - protein, 17 aa, Artificial Sequence
  Description of Artificial Sequence: Synthetic peptide
  Seed: MDPRMCSLMQGSTLPRR
MDPRMWSLMQSSTSPRR

SEQ ID NO: 99183 - protein, 17 aa, Artificial Sequence
  Description of Artificial Sequence: Synthetic peptide
  Seed: MDPRMCSLMQGSTLPRR
MDPRMWSLMQSSTTPRR

SEQ ID NO: 99184 - protein, 17 aa, Artificial Sequence
  Description of Artificial Sequence: Synthetic peptide
  Seed: MDPRMCSLMQGSTLPRR
MDPRMWSLMQSSTVPRR

SEQ ID NO: 99185 - protein, 17 aa, Artificial Sequence
  Description of Artificial Sequence: Synthetic peptide
  Seed: MDPRMCSLMQGSTLPRR
MDPRMWSLMQTSTAPRR

SEQ ID NO: 99186 - protein, 17 aa, Artificial Sequence
  Description of Artificial Sequence: Synthetic peptide
  Seed: MDPRMCSLMQGSTLPRR
MDPRMWSLMQTSTIPRR

SEQ ID NO: 99187 - protein, 17 aa, Artificial Sequence
  Description of Artificial Sequence: Synthetic peptide
  Seed: MDPRMCSLMQGSTLPRR
MDPRMWSLMQTSTLPRR

SEQ ID NO: 99188 - protein, 17 aa, Artificial Sequence
  Description of Artificial Sequence: Synthetic peptide
  Seed: MDPRMCSLMQGSTLPRR
MDPRMWSLMQTSTMPRR

SEQ ID NO: 99189 - protein, 17 aa, Artificial Sequence
  Description of Artificial Sequence: Synthetic peptide
  Seed: MDPRMCSLMQGSTLPRR
MDPRMWSLMQTSTNPRR

SEQ ID NO: 99190 - protein, 17 aa, Artificial Sequence
  Description of Artificial Sequence: Synthetic peptide
  Seed: MDPRMCSLMQGSTLPRR
MDPRMWSLMQTSTSPRR

SEQ ID NO: 99191 - protein, 17 aa, Artificial Sequence
  Description of Artificial Sequence: Synthetic peptide
  Seed: MDPRMCSLMQGSTLPRR
MDPRMWSLMQTSTTPRR

SEQ ID NO: 99192 - protein, 17 aa, Artificial Sequence
  Description of Artificial Sequence: Synthetic peptide
  Seed: MDPRMCSLMQGSTLPRR
MDPRMWSLMQTSTVPRR

SEQ ID NO: 99193 - protein, 17 aa, Artificial Sequence
  Description of Artificial Sequence: Synthetic peptide
  Seed: MDPRMCSLMQGSTLPRR
MDPRMWSLMQVSTAPRR

SEQ ID NO: 99194 - protein, 17 aa, Artificial Sequence
  Description of Artificial Sequence: Synthetic peptide
  Seed: MDPRMCSLMQGSTLPRR
MDPRMWSLMQVSTGPRR

SEQ ID NO: 99195 - protein, 17 aa, Artificial Sequence
  Description of Artificial Sequence: Synthetic peptide
  Seed: MDPRMCSLMQGSTLPRR
MDPRMWSLMQVSTHPRR

SEQ ID NO: 99196 - protein, 17 aa, Artificial Sequence
  Description of Artificial Sequence: Synthetic peptide
  Seed: MDPRMCSLMQGSTLPRR
MDPRMWSLMQVSTIPRR

SEQ ID NO: 99197 - protein, 17 aa, Artificial Sequence
  Description of Artificial Sequence: Synthetic peptide
  Seed: MDPRMCSLMQGSTLPRR
MDPRMWSLMQVSTLPRR

SEQ ID NO: 99198 - protein, 17 aa, Artificial Sequence
  Description of Artificial Sequence: Synthetic peptide
  Seed: MDPRMCSLMQGSTLPRR
MDPRMWSLMQVSTMPRR

SEQ ID NO: 99199 - protein, 17 aa, Artificial Sequence
  Description of Artificial Sequence: Synthetic peptide
  Seed: MDPRMCSLMQGSTLPRR
MDPRMWSLMQVSTNPRR

SEQ ID NO: 99200 - protein, 17 aa, Artificial Sequence
  Description of Artificial Sequence: Synthetic peptide
  Seed: MDPRMCSLMQGSTLPRR
MDPRMWSLMQVSTSPRR

SEQ ID NO: 99201 - protein, 17 aa, Artificial Sequence
  Description of Artificial Sequence: Synthetic peptide
  Seed: MDPRMCSLMQGSTLPRR
MDPRMWSLMQVSTTPRR

SEQ ID NO: 99202 - protein, 17 aa, Artificial Sequence
  Description of Artificial Sequence: Synthetic peptide
  Seed: MDPRMCSLMQGSTLPRR
MDPRMWSLMQVSTVPRR

SEQ ID NO: 99203 - protein, 17 aa, Artificial Sequence
  Description of Artificial Sequence: Synthetic peptide
  Seed: MDPRMCSLMQGSTLPRR
MDPRMWSLQQASTAPRR

SEQ ID NO: 99204 - protein, 17 aa, Artificial Sequence
  Description of Artificial Sequence: Synthetic peptide
  Seed: MDPRMCSLMQGSTLPRR
MDPRMWSLQQASTIPRR

SEQ ID NO: 99205 - protein, 17 aa, Artificial Sequence
  Description of Artificial Sequence: Synthetic peptide
  Seed: MDPRMCSLMQGSTLPRR
MDPRMWSLQQASTLPRR

SEQ ID NO: 99206 - protein, 17 aa, Artificial Sequence
  Description of Artificial Sequence: Synthetic peptide
  Seed: MDPRMCSLMQGSTLPRR
MDPRMWSLQQASTVPRR

SEQ ID NO: 99207 - protein, 17 aa, Artificial Sequence
  Description of Artificial Sequence: Synthetic peptide
  Seed: MDPRMCSLMQGSTLPRR
MDPRMWSLQQGSTAPRR

SEQ ID NO: 99208 - protein, 17 aa, Artificial Sequence
  Description of Artificial Sequence: Synthetic peptide
  Seed: MDPRMCSLMQGSTLPRR
MDPRMWSLQQGSTIPRR

SEQ ID NO: 99209 - protein, 17 aa, Artificial Sequence
  Description of Artificial Sequence: Synthetic peptide
  Seed: MDPRMCSLMQGSTLPRR
MDPRMWSLQQGSTLPRR

SEQ ID NO: 99210 - protein, 17 aa, Artificial Sequence
  Description of Artificial Sequence: Synthetic peptide
  Seed: MDPRMCSLMQGSTLPRR
MDPRMWSLQQGSTVPRR

SEQ ID NO: 99211 - protein, 17 aa, Artificial Sequence
  Description of Artificial Sequence: Synthetic peptide
  Seed: MDPRMCSLMQGSTLPRR
MDPRMWSLQQSSTAPRR

SEQ ID NO: 99212 - protein, 17 aa, Artificial Sequence
  Description of Artificial Sequence: Synthetic peptide
  Seed: MDPRMCSLMQGSTLPRR
MDPRMWSLQQSSTIPRR

SEQ ID NO: 99213 - protein, 17 aa, Artificial Sequence
  Description of Artificial Sequence: Synthetic peptide
  Seed: MDPRMCSLMQGSTLPRR
MDPRMWSLQQSSTLPRR

SEQ ID NO: 99214 - protein, 17 aa, Artificial Sequence
  Description of Artificial Sequence: Synthetic peptide
  Seed: MDPRMCSLMQGSTLPRR
MDPRMWSLQQSSTVPRR

SEQ ID NO: 99215 - protein, 17 aa, Artificial Sequence
  Description of Artificial Sequence: Synthetic peptide
  Seed: MDPRMCSLMQGSTLPRR
MDPRMWSLSQASTIPRR

SEQ ID NO: 99216 - protein, 17 aa, Artificial Sequence
  Description of Artificial Sequence: Synthetic peptide
  Seed: MDPRMCSLMQGSTLPRR
MDPRMWSLSQASTLPRR

SEQ ID NO: 99217 - protein, 17 aa, Artificial Sequence
  Description of Artificial Sequence: Synthetic peptide
  Seed: MDPRMCSLMQGSTLPRR
MDPRMWSLSQASTVPRR

SEQ ID NO: 99218 - protein, 17 aa, Artificial Sequence
  Description of Artificial Sequence: Synthetic peptide
  Seed: MDPRMCSLMQGSTLPRR
MDPRMWSLVQASTAPRR

SEQ ID NO: 99219 - protein, 17 aa, Artificial Sequence
  Description of Artificial Sequence: Synthetic peptide
  Seed: MDPRMCSLMQGSTLPRR
MDPRMWSLVQASTIPRR

SEQ ID NO: 99220 - protein, 17 aa, Artificial Sequence
  Description of Artificial Sequence: Synthetic peptide
  Seed: MDPRMCSLMQGSTLPRR
MDPRMWSLVQASTLPRR

SEQ ID NO: 99221 - protein, 17 aa, Artificial Sequence
  Description of Artificial Sequence: Synthetic peptide
  Seed: MDPRMCSLMQGSTLPRR
MDPRMWSLVQASTMPRR

SEQ ID NO: 99222 - protein, 17 aa, Artificial Sequence
  Description of Artificial Sequence: Synthetic peptide
  Seed: MDPRMCSLMQGSTLPRR
MDPRMWSLVQASTNPRR

SEQ ID NO: 99223 - protein, 17 aa, Artificial Sequence
  Description of Artificial Sequence: Synthetic peptide
  Seed: MDPRMCSLMQGSTLPRR
MDPRMWSLVQASTSPRR

SEQ ID NO: 99224 - protein, 17 aa, Artificial Sequence
  Description of Artificial Sequence: Synthetic peptide
  Seed: MDPRMCSLMQGSTLPRR
MDPRMWSLVQASTTPRR

SEQ ID NO: 99225 - protein, 17 aa, Artificial Sequence
  Description of Artificial Sequence: Synthetic peptide
  Seed: MDPRMCSLMQGSTLPRR
MDPRMWSLVQASTVPRR

SEQ ID NO: 99226 - protein, 17 aa, Artificial Sequence
  Description of Artificial Sequence: Synthetic peptide
  Seed: MDPRMCSLMQGSTLPRR
MDPRMWSLVQGSTAPRR

SEQ ID NO: 99227 - protein, 17 aa, Artificial Sequence
  Description of Artificial Sequence: Synthetic peptide
  Seed: MDPRMCSLMQGSTLPRR
MDPRMWSLVQGSTIPRR

SEQ ID NO: 99228 - protein, 17 aa, Artificial Sequence
  Description of Artificial Sequence: Synthetic peptide
  Seed: MDPRMCSLMQGSTLPRR
MDPRMWSLVQGSTLPRR

SEQ ID NO: 99229 - protein, 17 aa, Artificial Sequence
  Description of Artificial Sequence: Synthetic peptide
  Seed: MDPRMCSLMQGSTLPRR
MDPRMWSLVQGSTVPRR

SEQ ID NO: 99230 - protein, 17 aa, Artificial Sequence
  Description of Artificial Sequence: Synthetic peptide
  Seed: MDPRMCSLMQGSTLPRR
MDPRMWSLVQISTAPRR

SEQ ID NO: 99231 - protein, 17 aa, Artificial Sequence
  Description of Artificial Sequence: Synthetic peptide
  Seed: MDPRMCSLMQGSTLPRR
MDPRMWSLVQPSTAPRR

SEQ ID NO: 99232 - protein, 17 aa, Artificial Sequence
  Description of Artificial Sequence: Synthetic peptide
  Seed: MDPRMCSLMQGSTLPRR
MDPRMWSLVQPSTLPRR

SEQ ID NO: 99233 - protein, 17 aa, Artificial Sequence
  Description of Artificial Sequence: Synthetic peptide
  Seed: MDPRMCSLMQGSTLPRR
MDPRMWSLVQPSTSPRR

SEQ ID NO: 99234 - protein, 17 aa, Artificial Sequence
  Description of Artificial Sequence: Synthetic peptide
  Seed: MDPRMCSLMQGSTLPRR
MDPRMWSLVQPSTVPRR

SEQ ID NO: 99235 - protein, 17 aa, Artificial Sequence
  Description of Artificial Sequence: Synthetic peptide
  Seed: MDPRMCSLMQGSTLPRR
MDPRMWSLVQSSTAPRR

SEQ ID NO: 99236 - protein, 17 aa, Artificial Sequence
  Description of Artificial Sequence: Synthetic peptide
  Seed: MDPRMCSLMQGSTLPRR
MDPRMWSLVQSSTIPRR

SEQ ID NO: 99237 - protein, 17 aa, Artificial Sequence
  Description of Artificial Sequence: Synthetic peptide
  Seed: MDPRMCSLMQGSTLPRR
MDPRMWSLVQSSTLPRR

SEQ ID NO: 99238 - protein, 17 aa, Artificial Sequence
  Description of Artificial Sequence: Synthetic peptide
  Seed: MDPRMCSLMQGSTLPRR
MDPRMWSLVQSSTSPRR

SEQ ID NO: 99239 - protein, 17 aa, Artificial Sequence
  Description of Artificial Sequence: Synthetic peptide
  Seed: MDPRMCSLMQGSTLPRR
MDPRMWSLVQSSTVPRR

SEQ ID NO: 99240 - protein, 17 aa, Artificial Sequence
  Description of Artificial Sequence: Synthetic peptide
  Seed: MDPRMCSLMQGSTLPRR
MDPRMWSLVQTSTAPRR

SEQ ID NO: 99241 - protein, 17 aa, Artificial Sequence
  Description of Artificial Sequence: Synthetic peptide
  Seed: MDPRMCSLMQGSTLPRR
MDPRMWSLVQTSTSPRR

SEQ ID NO: 99242 - protein, 17 aa, Artificial Sequence
  Description of Artificial Sequence: Synthetic peptide
  Seed: MDPRMCSLMQGSTLPRR
MDPRMWSLVQVSTAPRR

SEQ ID NO: 99243 - protein, 17 aa, Artificial Sequence
  Description of Artificial Sequence: Synthetic peptide
  Seed: MDPRMCSLMQGSTLPRR
MDPRMWSLVQVSTSPRR

SEQ ID NO: 99244 - protein, 17 aa, Artificial Sequence
  Description of Artificial Sequence: Synthetic peptide
  Seed: MDPRMCSLMQGSTLPRR
MDPRMYSLAQASTAPRR

SEQ ID NO: 99245 - protein, 17 aa, Artificial Sequence
  Description of Artificial Sequence: Synthetic peptide
  Seed: MDPRMCSLMQGSTLPRR
MDPRMYSLAQASTFPRR

SEQ ID NO: 99246 - protein, 17 aa, Artificial Sequence
  Description of Artificial Sequence: Synthetic peptide
  Seed: MDPRMCSLMQGSTLPRR
MDPRMYSLAQASTGPRR

SEQ ID NO: 99247 - protein, 17 aa, Artificial Sequence
  Description of Artificial Sequence: Synthetic peptide
  Seed: MDPRMCSLMQGSTLPRR
MDPRMYSLAQASTHPRR

SEQ ID NO: 99248 - protein, 17 aa, Artificial Sequence
  Description of Artificial Sequence: Synthetic peptide
  Seed: MDPRMCSLMQGSTLPRR
MDPRMYSLAQASTIPRR

SEQ ID NO: 99249 - protein, 17 aa, Artificial Sequence
  Description of Artificial Sequence: Synthetic peptide
  Seed: MDPRMCSLMQGSTLPRR
MDPRMYSLAQASTLPRR

SEQ ID NO: 99250 - protein, 17 aa, Artificial Sequence
  Description of Artificial Sequence: Synthetic peptide
  Seed: MDPRMCSLMQGSTLPRR
MDPRMYSLAQASTMPRR

SEQ ID NO: 99251 - protein, 17 aa, Artificial Sequence
  Description of Artificial Sequence: Synthetic peptide
  Seed: MDPRMCSLMQGSTLPRR
MDPRMYSLAQASTNPRR

SEQ ID NO: 99252 - protein, 17 aa, Artificial Sequence
  Description of Artificial Sequence: Synthetic peptide
  Seed: MDPRMCSLMQGSTLPRR
MDPRMYSLAQASTQPRR

SEQ ID NO: 99253 - protein, 17 aa, Artificial Sequence
  Description of Artificial Sequence: Synthetic peptide
  Seed: MDPRMCSLMQGSTLPRR
MDPRMYSLAQASTSPRR

SEQ ID NO: 99254 - protein, 17 aa, Artificial Sequence
  Description of Artificial Sequence: Synthetic peptide
  Seed: MDPRMCSLMQGSTLPRR
MDPRMYSLAQASTTPRR

SEQ ID NO: 99255 - protein, 17 aa, Artificial Sequence
  Description of Artificial Sequence: Synthetic peptide
  Seed: MDPRMCSLMQGSTLPRR
MDPRMYSLAQASTVPRR

SEQ ID NO: 99256 - protein, 17 aa, Artificial Sequence
  Description of Artificial Sequence: Synthetic peptide
  Seed: MDPRMCSLMQGSTLPRR
MDPRMYSLAQGSTAPRR

SEQ ID NO: 99257 - protein, 17 aa, Artificial Sequence
  Description of Artificial Sequence: Synthetic peptide
  Seed: MDPRMCSLMQGSTLPRR
MDPRMYSLAQGSTIPRR

SEQ ID NO: 99258 - protein, 17 aa, Artificial Sequence
  Description of Artificial Sequence: Synthetic peptide
  Seed: MDPRMCSLMQGSTLPRR
MDPRMYSLAQGSTLPRR

SEQ ID NO: 99259 - protein, 17 aa, Artificial Sequence
  Description of Artificial Sequence: Synthetic peptide
  Seed: MDPRMCSLMQGSTLPRR
MDPRMYSLAQGSTMPRR

SEQ ID NO: 99260 - protein, 17 aa, Artificial Sequence
  Description of Artificial Sequence: Synthetic peptide
  Seed: MDPRMCSLMQGSTLPRR
MDPRMYSLAQGSTSPRR

SEQ ID NO: 99261 - protein, 17 aa, Artificial Sequence
  Description of Artificial Sequence: Synthetic peptide
  Seed: MDPRMCSLMQGSTLPRR
MDPRMYSLAQGSTTPRR

SEQ ID NO: 99262 - protein, 17 aa, Artificial Sequence
  Description of Artificial Sequence: Synthetic peptide
  Seed: MDPRMCSLMQGSTLPRR
MDPRMYSLAQGSTVPRR

SEQ ID NO: 99263 - protein, 17 aa, Artificial Sequence
  Description of Artificial Sequence: Synthetic peptide
  Seed: MDPRMCSLMQGSTLPRR
MDPRMYSLAQISTAPRR

SEQ ID NO: 99264 - protein, 17 aa, Artificial Sequence
  Description of Artificial Sequence: Synthetic peptide
  Seed: MDPRMCSLMQGSTLPRR
MDPRMYSLAQISTIPRR

SEQ ID NO: 99265 - protein, 17 aa, Artificial Sequence
  Description of Artificial Sequence: Synthetic peptide
  Seed: MDPRMCSLMQGSTLPRR
MDPRMYSLAQISTLPRR

SEQ ID NO: 99266 - protein, 17 aa, Artificial Sequence
  Description of Artificial Sequence: Synthetic peptide
  Seed: MDPRMCSLMQGSTLPRR
MDPRMYSLAQISTMPRR

SEQ ID NO: 99267 - protein, 17 aa, Artificial Sequence
  Description of Artificial Sequence: Synthetic peptide
  Seed: MDPRMCSLMQGSTLPRR
MDPRMYSLAQISTNPRR

SEQ ID NO: 99268 - protein, 17 aa, Artificial Sequence
  Description of Artificial Sequence: Synthetic peptide
  Seed: MDPRMCSLMQGSTLPRR
MDPRMYSLAQISTSPRR

SEQ ID NO: 99269 - protein, 17 aa, Artificial Sequence
  Description of Artificial Sequence: Synthetic peptide
  Seed: MDPRMCSLMQGSTLPRR
MDPRMYSLAQISTTPRR

SEQ ID NO: 99270 - protein, 17 aa, Artificial Sequence
  Description of Artificial Sequence: Synthetic peptide
  Seed: MDPRMCSLMQGSTLPRR
MDPRMYSLAQISTVPRR

SEQ ID NO: 99271 - protein, 17 aa, Artificial Sequence
  Description of Artificial Sequence: Synthetic peptide
  Seed: MDPRMCSLMQGSTLPRR
MDPRMYSLAQLSTAPRR

SEQ ID NO: 99272 - protein, 17 aa, Artificial Sequence
  Description of Artificial Sequence: Synthetic peptide
  Seed: MDPRMCSLMQGSTLPRR
MDPRMYSLAQMSTAPRR

SEQ ID NO: 99273 - protein, 17 aa, Artificial Sequence
  Description of Artificial Sequence: Synthetic peptide
  Seed: MDPRMCSLMQGSTLPRR
MDPRMYSLAQNSTAPRR

SEQ ID NO: 99274 - protein, 17 aa, Artificial Sequence
  Description of Artificial Sequence: Synthetic peptide
  Seed: MDPRMCSLMQGSTLPRR
MDPRMYSLAQNSTIPRR

SEQ ID NO: 99275 - protein, 17 aa, Artificial Sequence
  Description of Artificial Sequence: Synthetic peptide
  Seed: MDPRMCSLMQGSTLPRR
MDPRMYSLAQNSTLPRR

SEQ ID NO: 99276 - protein, 17 aa, Artificial Sequence
  Description of Artificial Sequence: Synthetic peptide
  Seed: MDPRMCSLMQGSTLPRR
MDPRMYSLAQNSTVPRR

SEQ ID NO: 99277 - protein, 17 aa, Artificial Sequence
  Description of Artificial Sequence: Synthetic peptide
  Seed: MDPRMCSLMQGSTLPRR
MDPRMYSLAQPSTAPRR

SEQ ID NO: 99278 - protein, 17 aa, Artificial Sequence
  Description of Artificial Sequence: Synthetic peptide
  Seed: MDPRMCSLMQGSTLPRR
MDPRMYSLAQPSTIPRR

SEQ ID NO: 99279 - protein, 17 aa, Artificial Sequence
  Description of Artificial Sequence: Synthetic peptide
  Seed: MDPRMCSLMQGSTLPRR
MDPRMYSLAQPSTLPRR

SEQ ID NO: 99280 - protein, 17 aa, Artificial Sequence
  Description of Artificial Sequence: Synthetic peptide
  Seed: MDPRMCSLMQGSTLPRR
MDPRMYSLAQPSTMPRR

SEQ ID NO: 99281 - protein, 17 aa, Artificial Sequence
  Description of Artificial Sequence: Synthetic peptide
  Seed: MDPRMCSLMQGSTLPRR
MDPRMYSLAQPSTNPRR

SEQ ID NO: 99282 - protein, 17 aa, Artificial Sequence
  Description of Artificial Sequence: Synthetic peptide
  Seed: MDPRMCSLMQGSTLPRR
MDPRMYSLAQPSTSPRR

SEQ ID NO: 99283 - protein, 17 aa, Artificial Sequence
  Description of Artificial Sequence: Synthetic peptide
  Seed: MDPRMCSLMQGSTLPRR
MDPRMYSLAQPSTTPRR

SEQ ID NO: 99284 - protein, 17 aa, Artificial Sequence
  Description of Artificial Sequence: Synthetic peptide
  Seed: MDPRMCSLMQGSTLPRR
MDPRMYSLAQPSTVPRR

SEQ ID NO: 99285 - protein, 17 aa, Artificial Sequence
  Description of Artificial Sequence: Synthetic peptide
  Seed: MDPRMCSLMQGSTLPRR
MDPRMYSLAQSSTAPRR

SEQ ID NO: 99286 - protein, 17 aa, Artificial Sequence
  Description of Artificial Sequence: Synthetic peptide
  Seed: MDPRMCSLMQGSTLPRR
MDPRMYSLAQSSTIPRR

SEQ ID NO: 99287 - protein, 17 aa, Artificial Sequence
  Description of Artificial Sequence: Synthetic peptide
  Seed: MDPRMCSLMQGSTLPRR
MDPRMYSLAQSSTLPRR

SEQ ID NO: 99288 - protein, 17 aa, Artificial Sequence
  Description of Artificial Sequence: Synthetic peptide
  Seed: MDPRMCSLMQGSTLPRR
MDPRMYSLAQSSTMPRR

SEQ ID NO: 99289 - protein, 17 aa, Artificial Sequence
  Description of Artificial Sequence: Synthetic peptide
  Seed: MDPRMCSLMQGSTLPRR
MDPRMYSLAQSSTNPRR

SEQ ID NO: 99290 - protein, 17 aa, Artificial Sequence
  Description of Artificial Sequence: Synthetic peptide
  Seed: MDPRMCSLMQGSTLPRR
MDPRMYSLAQSSTSPRR

SEQ ID NO: 99291 - protein, 17 aa, Artificial Sequence
  Description of Artificial Sequence: Synthetic peptide
  Seed: MDPRMCSLMQGSTLPRR
MDPRMYSLAQSSTTPRR

SEQ ID NO: 99292 - protein, 17 aa, Artificial Sequence
  Description of Artificial Sequence: Synthetic peptide
  Seed: MDPRMCSLMQGSTLPRR
MDPRMYSLAQSSTVPRR

SEQ ID NO: 99293 - protein, 17 aa, Artificial Sequence
  Description of Artificial Sequence: Synthetic peptide
  Seed: MDPRMCSLMQGSTLPRR
MDPRMYSLAQTSTAPRR

SEQ ID NO: 99294 - protein, 17 aa, Artificial Sequence
  Description of Artificial Sequence: Synthetic peptide
  Seed: MDPRMCSLMQGSTLPRR
MDPRMYSLAQTSTIPRR

SEQ ID NO: 99295 - protein, 17 aa, Artificial Sequence
  Description of Artificial Sequence: Synthetic peptide
  Seed: MDPRMCSLMQGSTLPRR
MDPRMYSLAQTSTLPRR

SEQ ID NO: 99296 - protein, 17 aa, Artificial Sequence
  Description of Artificial Sequence: Synthetic peptide
  Seed: MDPRMCSLMQGSTLPRR
MDPRMYSLAQTSTMPRR

SEQ ID NO: 99297 - protein, 17 aa, Artificial Sequence
  Description of Artificial Sequence: Synthetic peptide
  Seed: MDPRMCSLMQGSTLPRR
MDPRMYSLAQTSTNPRR

SEQ ID NO: 99298 - protein, 17 aa, Artificial Sequence
  Description of Artificial Sequence: Synthetic peptide
  Seed: MDPRMCSLMQGSTLPRR
MDPRMYSLAQTSTSPRR

SEQ ID NO: 99299 - protein, 17 aa, Artificial Sequence
  Description of Artificial Sequence: Synthetic peptide
  Seed: MDPRMCSLMQGSTLPRR
MDPRMYSLAQTSTTPRR

SEQ ID NO: 99300 - protein, 17 aa, Artificial Sequence
  Description of Artificial Sequence: Synthetic peptide
  Seed: MDPRMCSLMQGSTLPRR
MDPRMYSLAQTSTVPRR

SEQ ID NO: 99301 - protein, 17 aa, Artificial Sequence
  Description of Artificial Sequence: Synthetic peptide
  Seed: MDPRMCSLMQGSTLPRR
MDPRMYSLAQVSTAPRR

SEQ ID NO: 99302 - protein, 17 aa, Artificial Sequence
  Description of Artificial Sequence: Synthetic peptide
  Seed: MDPRMCSLMQGSTLPRR
MDPRMYSLAQVSTIPRR

SEQ ID NO: 99303 - protein, 17 aa, Artificial Sequence
  Description of Artificial Sequence: Synthetic peptide
  Seed: MDPRMCSLMQGSTLPRR
MDPRMYSLAQVSTLPRR

SEQ ID NO: 99304 - protein, 17 aa, Artificial Sequence
  Description of Artificial Sequence: Synthetic peptide
  Seed: MDPRMCSLMQGSTLPRR
MDPRMYSLAQVSTMPRR

SEQ ID NO: 99305 - protein, 17 aa, Artificial Sequence
  Description of Artificial Sequence: Synthetic peptide
  Seed: MDPRMCSLMQGSTLPRR
MDPRMYSLAQVSTNPRR

SEQ ID NO: 99306 - protein, 17 aa, Artificial Sequence
  Description of Artificial Sequence: Synthetic peptide
  Seed: MDPRMCSLMQGSTLPRR
MDPRMYSLAQVSTSPRR

SEQ ID NO: 99307 - protein, 17 aa, Artificial Sequence
  Description of Artificial Sequence: Synthetic peptide
  Seed: MDPRMCSLMQGSTLPRR
MDPRMYSLAQVSTTPRR

SEQ ID NO: 99308 - protein, 17 aa, Artificial Sequence
  Description of Artificial Sequence: Synthetic peptide
  Seed: MDPRMCSLMQGSTLPRR
MDPRMYSLAQVSTVPRR

SEQ ID NO: 99309 - protein, 17 aa, Artificial Sequence
  Description of Artificial Sequence: Synthetic peptide
  Seed: MDPRMCSLMQGSTLPRR
MDPRMYSLEQASTAPRR

SEQ ID NO: 99310 - protein, 17 aa, Artificial Sequence
  Description of Artificial Sequence: Synthetic peptide
  Seed: MDPRMCSLMQGSTLPRR
MDPRMYSLEQASTIPRR

SEQ ID NO: 99311 - protein, 17 aa, Artificial Sequence
  Description of Artificial Sequence: Synthetic peptide
  Seed: MDPRMCSLMQGSTLPRR
MDPRMYSLEQASTLPRR

SEQ ID NO: 99312 - protein, 17 aa, Artificial Sequence
  Description of Artificial Sequence: Synthetic peptide
  Seed: MDPRMCSLMQGSTLPRR
MDPRMYSLEQASTVPRR

SEQ ID NO: 99313 - protein, 17 aa, Artificial Sequence
  Description of Artificial Sequence: Synthetic peptide
  Seed: MDPRMCSLMQGSTLPRR
MDPRMYSLEQGSTLPRR

SEQ ID NO: 99314 - protein, 17 aa, Artificial Sequence
  Description of Artificial Sequence: Synthetic peptide
  Seed: MDPRMCSLMQGSTLPRR
MDPRMYSLEQGSTVPRR

SEQ ID NO: 99315 - protein, 17 aa, Artificial Sequence
  Description of Artificial Sequence: Synthetic peptide
  Seed: MDPRMCSLMQGSTLPRR
MDPRMYSLEQSSTLPRR

SEQ ID NO: 99316 - protein, 17 aa, Artificial Sequence
  Description of Artificial Sequence: Synthetic peptide
  Seed: MDPRMCSLMQGSTLPRR
MDPRMYSLEQSSTVPRR

SEQ ID NO: 99317 - protein, 17 aa, Artificial Sequence
  Description of Artificial Sequence: Synthetic peptide
  Seed: MDPRMCSLMQGSTLPRR
MDPRMYSLFQASTAPRR

SEQ ID NO: 99318 - protein, 17 aa, Artificial Sequence
  Description of Artificial Sequence: Synthetic peptide
  Seed: MDPRMCSLMQGSTLPRR
MDPRMYSLFQASTIPRR

SEQ ID NO: 99319 - protein, 17 aa, Artificial Sequence
  Description of Artificial Sequence: Synthetic peptide
  Seed: MDPRMCSLMQGSTLPRR
MDPRMYSLFQASTLPRR

SEQ ID NO: 99320 - protein, 17 aa, Artificial Sequence
  Description of Artificial Sequence: Synthetic peptide
  Seed: MDPRMCSLMQGSTLPRR
MDPRMYSLFQASTMPRR

SEQ ID NO: 99321 - protein, 17 aa, Artificial Sequence
  Description of Artificial Sequence: Synthetic peptide
  Seed: MDPRMCSLMQGSTLPRR
MDPRMYSLFQASTNPRR

SEQ ID NO: 99322 - protein, 17 aa, Artificial Sequence
  Description of Artificial Sequence: Synthetic peptide
  Seed: MDPRMCSLMQGSTLPRR
MDPRMYSLFQASTSPRR

SEQ ID NO: 99323 - protein, 17 aa, Artificial Sequence
  Description of Artificial Sequence: Synthetic peptide
  Seed: MDPRMCSLMQGSTLPRR
MDPRMYSLFQASTVPRR

SEQ ID NO: 99324 - protein, 17 aa, Artificial Sequence
  Description of Artificial Sequence: Synthetic peptide
  Seed: MDPRMCSLMQGSTLPRR
MDPRMYSLFQGSTAPRR

SEQ ID NO: 99325 - protein, 17 aa, Artificial Sequence
  Description of Artificial Sequence: Synthetic peptide
  Seed: MDPRMCSLMQGSTLPRR
MDPRMYSLFQGSTIPRR

SEQ ID NO: 99326 - protein, 17 aa, Artificial Sequence
  Description of Artificial Sequence: Synthetic peptide
  Seed: MDPRMCSLMQGSTLPRR
MDPRMYSLFQGSTLPRR

SEQ ID NO: 99327 - protein, 17 aa, Artificial Sequence
  Description of Artificial Sequence: Synthetic peptide
  Seed: MDPRMCSLMQGSTLPRR
MDPRMYSLFQGSTVPRR

SEQ ID NO: 99328 - protein, 17 aa, Artificial Sequence
  Description of Artificial Sequence: Synthetic peptide
  Seed: MDPRMCSLMQGSTLPRR
MDPRMYSLFQISTAPRR

SEQ ID NO: 99329 - protein, 17 aa, Artificial Sequence
  Description of Artificial Sequence: Synthetic peptide
  Seed: MDPRMCSLMQGSTLPRR
MDPRMYSLFQPSTAPRR

SEQ ID NO: 99330 - protein, 17 aa, Artificial Sequence
  Description of Artificial Sequence: Synthetic peptide
  Seed: MDPRMCSLMQGSTLPRR
MDPRMYSLFQPSTLPRR

SEQ ID NO: 99331 - protein, 17 aa, Artificial Sequence
  Description of Artificial Sequence: Synthetic peptide
  Seed: MDPRMCSLMQGSTLPRR
MDPRMYSLFQPSTSPRR

SEQ ID NO: 99332 - protein, 17 aa, Artificial Sequence
  Description of Artificial Sequence: Synthetic peptide
  Seed: MDPRMCSLMQGSTLPRR
MDPRMYSLFQPSTVPRR

SEQ ID NO: 99333 - protein, 17 aa, Artificial Sequence
  Description of Artificial Sequence: Synthetic peptide
  Seed: MDPRMCSLMQGSTLPRR
MDPRMYSLFQSSTAPRR

SEQ ID NO: 99334 - protein, 17 aa, Artificial Sequence
  Description of Artificial Sequence: Synthetic peptide
  Seed: MDPRMCSLMQGSTLPRR
MDPRMYSLFQSSTLPRR

SEQ ID NO: 99335 - protein, 17 aa, Artificial Sequence
  Description of Artificial Sequence: Synthetic peptide
  Seed: MDPRMCSLMQGSTLPRR
MDPRMYSLFQSSTVPRR

SEQ ID NO: 99336 - protein, 17 aa, Artificial Sequence
  Description of Artificial Sequence: Synthetic peptide
  Seed: MDPRMCSLMQGSTLPRR
MDPRMYSLFQTSTAPRR

SEQ ID NO: 99337 - protein, 17 aa, Artificial Sequence
  Description of Artificial Sequence: Synthetic peptide
  Seed: MDPRMCSLMQGSTLPRR
MDPRMYSLFQVSTAPRR

SEQ ID NO: 99338 - protein, 17 aa, Artificial Sequence
  Description of Artificial Sequence: Synthetic peptide
  Seed: MDPRMCSLMQGSTLPRR
MDPRMYSLGQASTIPRR

SEQ ID NO: 99339 - protein, 17 aa, Artificial Sequence
  Description of Artificial Sequence: Synthetic peptide
  Seed: MDPRMCSLMQGSTLPRR
MDPRMYSLGQASTLPRR

SEQ ID NO: 99340 - protein, 17 aa, Artificial Sequence
  Description of Artificial Sequence: Synthetic peptide
  Seed: MDPRMCSLMQGSTLPRR
MDPRMYSLGQASTVPRR

SEQ ID NO: 99341 - protein, 17 aa, Artificial Sequence
  Description of Artificial Sequence: Synthetic peptide
  Seed: MDPRMCSLMQGSTLPRR
MDPRMYSLGQGSTLPRR

SEQ ID NO: 99342 - protein, 17 aa, Artificial Sequence
  Description of Artificial Sequence: Synthetic peptide
  Seed: MDPRMCSLMQGSTLPRR
MDPRMYSLGQSSTIPRR

SEQ ID NO: 99343 - protein, 17 aa, Artificial Sequence
  Description of Artificial Sequence: Synthetic peptide
  Seed: MDPRMCSLMQGSTLPRR
MDPRMYSLGQSSTLPRR

SEQ ID NO: 99344 - protein, 17 aa, Artificial Sequence
  Description of Artificial Sequence: Synthetic peptide
  Seed: MDPRMCSLMQGSTLPRR
MDPRMYSLGQSSTVPRR

SEQ ID NO: 99345 - protein, 17 aa, Artificial Sequence
  Description of Artificial Sequence: Synthetic peptide
  Seed: MDPRMCSLMQGSTLPRR
MDPRMYSLIQASTAPRR

SEQ ID NO: 99346 - protein, 17 aa, Artificial Sequence
  Description of Artificial Sequence: Synthetic peptide
  Seed: MDPRMCSLMQGSTLPRR
MDPRMYSLIQASTCPRR

SEQ ID NO: 99347 - protein, 17 aa, Artificial Sequence
  Description of Artificial Sequence: Synthetic peptide
  Seed: MDPRMCSLMQGSTLPRR
MDPRMYSLIQASTFPRR

SEQ ID NO: 99348 - protein, 17 aa, Artificial Sequence
  Description of Artificial Sequence: Synthetic peptide
  Seed: MDPRMCSLMQGSTLPRR
MDPRMYSLIQASTGPRR

SEQ ID NO: 99349 - protein, 17 aa, Artificial Sequence
  Description of Artificial Sequence: Synthetic peptide
  Seed: MDPRMCSLMQGSTLPRR
MDPRMYSLIQASTHPRR

SEQ ID NO: 99350 - protein, 17 aa, Artificial Sequence
  Description of Artificial Sequence: Synthetic peptide
  Seed: MDPRMCSLMQGSTLPRR
MDPRMYSLIQASTIPRR

SEQ ID NO: 99351 - protein, 17 aa, Artificial Sequence
  Description of Artificial Sequence: Synthetic peptide
  Seed: MDPRMCSLMQGSTLPRR
MDPRMYSLIQASTLPRR

SEQ ID NO: 99352 - protein, 17 aa, Artificial Sequence
  Description of Artificial Sequence: Synthetic peptide
  Seed: MDPRMCSLMQGSTLPRR
MDPRMYSLIQASTMPRR

SEQ ID NO: 99353 - protein, 17 aa, Artificial Sequence
  Description of Artificial Sequence: Synthetic peptide
  Seed: MDPRMCSLMQGSTLPRR
MDPRMYSLIQASTNPRR

SEQ ID NO: 99354 - protein, 17 aa, Artificial Sequence
  Description of Artificial Sequence: Synthetic peptide
  Seed: MDPRMCSLMQGSTLPRR
MDPRMYSLIQASTPPRR

SEQ ID NO: 99355 - protein, 17 aa, Artificial Sequence
  Description of Artificial Sequence: Synthetic peptide
  Seed: MDPRMCSLMQGSTLPRR
MDPRMYSLIQASTQPRR

SEQ ID NO: 99356 - protein, 17 aa, Artificial Sequence
  Description of Artificial Sequence: Synthetic peptide
  Seed: MDPRMCSLMQGSTLPRR
MDPRMYSLIQASTSPRR

SEQ ID NO: 99357 - protein, 17 aa, Artificial Sequence
  Description of Artificial Sequence: Synthetic peptide
  Seed: MDPRMCSLMQGSTLPRR
MDPRMYSLIQASTTPRR

SEQ ID NO: 99358 - protein, 17 aa, Artificial Sequence
  Description of Artificial Sequence: Synthetic peptide
  Seed: MDPRMCSLMQGSTLPRR
MDPRMYSLIQASTVPRR

SEQ ID NO: 99359 - protein, 17 aa, Artificial Sequence
  Description of Artificial Sequence: Synthetic peptide
  Seed: MDPRMCSLMQGSTLPRR
MDPRMYSLIQGSTAPRR

SEQ ID NO: 99360 - protein, 17 aa, Artificial Sequence
  Description of Artificial Sequence: Synthetic peptide
  Seed: MDPRMCSLMQGSTLPRR
MDPRMYSLIQGSTCPRR

SEQ ID NO: 99361 - protein, 17 aa, Artificial Sequence
  Description of Artificial Sequence: Synthetic peptide
  Seed: MDPRMCSLMQGSTLPRR
MDPRMYSLIQGSTGPRR

SEQ ID NO: 99362 - protein, 17 aa, Artificial Sequence
  Description of Artificial Sequence: Synthetic peptide
  Seed: MDPRMCSLMQGSTLPRR
MDPRMYSLIQGSTIPRR

SEQ ID NO: 99363 - protein, 17 aa, Artificial Sequence
  Description of Artificial Sequence: Synthetic peptide
  Seed: MDPRMCSLMQGSTLPRR
MDPRMYSLIQGSTLPRR

SEQ ID NO: 99364 - protein, 17 aa, Artificial Sequence
  Description of Artificial Sequence: Synthetic peptide
  Seed: MDPRMCSLMQGSTLPRR
MDPRMYSLIQGSTMPRR

SEQ ID NO: 99365 - protein, 17 aa, Artificial Sequence
  Description of Artificial Sequence: Synthetic peptide
  Seed: MDPRMCSLMQGSTLPRR
MDPRMYSLIQGSTNPRR

SEQ ID NO: 99366 - protein, 17 aa, Artificial Sequence
  Description of Artificial Sequence: Synthetic peptide
  Seed: MDPRMCSLMQGSTLPRR
MDPRMYSLIQGSTSPRR

SEQ ID NO: 99367 - protein, 17 aa, Artificial Sequence
  Description of Artificial Sequence: Synthetic peptide
  Seed: MDPRMCSLMQGSTLPRR
MDPRMYSLIQGSTTPRR

SEQ ID NO: 99368 - protein, 17 aa, Artificial Sequence
  Description of Artificial Sequence: Synthetic peptide
  Seed: MDPRMCSLMQGSTLPRR
MDPRMYSLIQGSTVPRR

SEQ ID NO: 99369 - protein, 17 aa, Artificial Sequence
  Description of Artificial Sequence: Synthetic peptide
  Seed: MDPRMCSLMQGSTLPRR
MDPRMYSLIQISTAPRR

SEQ ID NO: 99370 - protein, 17 aa, Artificial Sequence
  Description of Artificial Sequence: Synthetic peptide
  Seed: MDPRMCSLMQGSTLPRR
MDPRMYSLIQISTGPRR

SEQ ID NO: 99371 - protein, 17 aa, Artificial Sequence
  Description of Artificial Sequence: Synthetic peptide
  Seed: MDPRMCSLMQGSTLPRR
MDPRMYSLIQISTHPRR

SEQ ID NO: 99372 - protein, 17 aa, Artificial Sequence
  Description of Artificial Sequence: Synthetic peptide
  Seed: MDPRMCSLMQGSTLPRR
MDPRMYSLIQISTIPRR

SEQ ID NO: 99373 - protein, 17 aa, Artificial Sequence
  Description of Artificial Sequence: Synthetic peptide
  Seed: MDPRMCSLMQGSTLPRR
MDPRMYSLIQISTLPRR

SEQ ID NO: 99374 - protein, 17 aa, Artificial Sequence
  Description of Artificial Sequence: Synthetic peptide
  Seed: MDPRMCSLMQGSTLPRR
MDPRMYSLIQISTMPRR

SEQ ID NO: 99375 - protein, 17 aa, Artificial Sequence
  Description of Artificial Sequence: Synthetic peptide
  Seed: MDPRMCSLMQGSTLPRR
MDPRMYSLIQISTNPRR

SEQ ID NO: 99376 - protein, 17 aa, Artificial Sequence
  Description of Artificial Sequence: Synthetic peptide
  Seed: MDPRMCSLMQGSTLPRR
MDPRMYSLIQISTSPRR

SEQ ID NO: 99377 - protein, 17 aa, Artificial Sequence
  Description of Artificial Sequence: Synthetic peptide
  Seed: MDPRMCSLMQGSTLPRR
MDPRMYSLIQISTTPRR

SEQ ID NO: 99378 - protein, 17 aa, Artificial Sequence
  Description of Artificial Sequence: Synthetic peptide
  Seed: MDPRMCSLMQGSTLPRR
MDPRMYSLIQISTVPRR

SEQ ID NO: 99379 - protein, 17 aa, Artificial Sequence
  Description of Artificial Sequence: Synthetic peptide
  Seed: MDPRMCSLMQGSTLPRR
MDPRMYSLIQLSTAPRR

SEQ ID NO: 99380 - protein, 17 aa, Artificial Sequence
  Description of Artificial Sequence: Synthetic peptide
  Seed: MDPRMCSLMQGSTLPRR
MDPRMYSLIQLSTLPRR

SEQ ID NO: 99381 - protein, 17 aa, Artificial Sequence
  Description of Artificial Sequence: Synthetic peptide
  Seed: MDPRMCSLMQGSTLPRR
MDPRMYSLIQLSTNPRR

SEQ ID NO: 99382 - protein, 17 aa, Artificial Sequence
  Description of Artificial Sequence: Synthetic peptide
  Seed: MDPRMCSLMQGSTLPRR
MDPRMYSLIQLSTSPRR

SEQ ID NO: 99383 - protein, 17 aa, Artificial Sequence
  Description of Artificial Sequence: Synthetic peptide
  Seed: MDPRMCSLMQGSTLPRR
MDPRMYSLIQLSTTPRR

SEQ ID NO: 99384 - protein, 17 aa, Artificial Sequence
  Description of Artificial Sequence: Synthetic peptide
  Seed: MDPRMCSLMQGSTLPRR
MDPRMYSLIQLSTVPRR

SEQ ID NO: 99385 - protein, 17 aa, Artificial Sequence
  Description of Artificial Sequence: Synthetic peptide
  Seed: MDPRMCSLMQGSTLPRR
MDPRMYSLIQMSTAPRR

SEQ ID NO: 99386 - protein, 17 aa, Artificial Sequence
  Description of Artificial Sequence: Synthetic peptide
  Seed: MDPRMCSLMQGSTLPRR
MDPRMYSLIQMSTIPRR

SEQ ID NO: 99387 - protein, 17 aa, Artificial Sequence
  Description of Artificial Sequence: Synthetic peptide
  Seed: MDPRMCSLMQGSTLPRR
MDPRMYSLIQMSTLPRR

SEQ ID NO: 99388 - protein, 17 aa, Artificial Sequence
  Description of Artificial Sequence: Synthetic peptide
  Seed: MDPRMCSLMQGSTLPRR
MDPRMYSLIQMSTNPRR

SEQ ID NO: 99389 - protein, 17 aa, Artificial Sequence
  Description of Artificial Sequence: Synthetic peptide
  Seed: MDPRMCSLMQGSTLPRR
MDPRMYSLIQMSTSPRR

SEQ ID NO: 99390 - protein, 17 aa, Artificial Sequence
  Description of Artificial Sequence: Synthetic peptide
  Seed: MDPRMCSLMQGSTLPRR
MDPRMYSLIQMSTTPRR

SEQ ID NO: 99391 - protein, 17 aa, Artificial Sequence
  Description of Artificial Sequence: Synthetic peptide
  Seed: MDPRMCSLMQGSTLPRR
MDPRMYSLIQMSTVPRR

SEQ ID NO: 99392 - protein, 17 aa, Artificial Sequence
  Description of Artificial Sequence: Synthetic peptide
  Seed: MDPRMCSLMQGSTLPRR
MDPRMYSLIQNSTAPRR

SEQ ID NO: 99393 - protein, 17 aa, Artificial Sequence
  Description of Artificial Sequence: Synthetic peptide
  Seed: MDPRMCSLMQGSTLPRR
MDPRMYSLIQNSTIPRR

SEQ ID NO: 99394 - protein, 17 aa, Artificial Sequence
  Description of Artificial Sequence: Synthetic peptide
  Seed: MDPRMCSLMQGSTLPRR
MDPRMYSLIQNSTLPRR

SEQ ID NO: 99395 - protein, 17 aa, Artificial Sequence
  Description of Artificial Sequence: Synthetic peptide
  Seed: MDPRMCSLMQGSTLPRR
MDPRMYSLIQNSTMPRR

SEQ ID NO: 99396 - protein, 17 aa, Artificial Sequence
  Description of Artificial Sequence: Synthetic peptide
  Seed: MDPRMCSLMQGSTLPRR
MDPRMYSLIQNSTNPRR

SEQ ID NO: 99397 - protein, 17 aa, Artificial Sequence
  Description of Artificial Sequence: Synthetic peptide
  Seed: MDPRMCSLMQGSTLPRR
MDPRMYSLIQNSTSPRR

SEQ ID NO: 99398 - protein, 17 aa, Artificial Sequence
  Description of Artificial Sequence: Synthetic peptide
  Seed: MDPRMCSLMQGSTLPRR
MDPRMYSLIQNSTTPRR

SEQ ID NO: 99399 - protein, 17 aa, Artificial Sequence
  Description of Artificial Sequence: Synthetic peptide
  Seed: MDPRMCSLMQGSTLPRR
MDPRMYSLIQNSTVPRR

SEQ ID NO: 99400 - protein, 17 aa, Artificial Sequence
  Description of Artificial Sequence: Synthetic peptide
  Seed: MDPRMCSLMQGSTLPRR
MDPRMYSLIQPSTAPRR

SEQ ID NO: 99401 - protein, 17 aa, Artificial Sequence
  Description of Artificial Sequence: Synthetic peptide
  Seed: MDPRMCSLMQGSTLPRR
MDPRMYSLIQPSTGPRR

SEQ ID NO: 99402 - protein, 17 aa, Artificial Sequence
  Description of Artificial Sequence: Synthetic peptide
  Seed: MDPRMCSLMQGSTLPRR
MDPRMYSLIQPSTHPRR

SEQ ID NO: 99403 - protein, 17 aa, Artificial Sequence
  Description of Artificial Sequence: Synthetic peptide
  Seed: MDPRMCSLMQGSTLPRR
MDPRMYSLIQPSTIPRR

SEQ ID NO: 99404 - protein, 17 aa, Artificial Sequence
  Description of Artificial Sequence: Synthetic peptide
  Seed: MDPRMCSLMQGSTLPRR
MDPRMYSLIQPSTLPRR

SEQ ID NO: 99405 - protein, 17 aa, Artificial Sequence
  Description of Artificial Sequence: Synthetic peptide
  Seed: MDPRMCSLMQGSTLPRR
MDPRMYSLIQPSTMPRR

SEQ ID NO: 99406 - protein, 17 aa, Artificial Sequence
  Description of Artificial Sequence: Synthetic peptide
  Seed: MDPRMCSLMQGSTLPRR
MDPRMYSLIQPSTNPRR

SEQ ID NO: 99407 - protein, 17 aa, Artificial Sequence
  Description of Artificial Sequence: Synthetic peptide
  Seed: MDPRMCSLMQGSTLPRR
MDPRMYSLIQPSTPPRR

SEQ ID NO: 99408 - protein, 17 aa, Artificial Sequence
  Description of Artificial Sequence: Synthetic peptide
  Seed: MDPRMCSLMQGSTLPRR
MDPRMYSLIQPSTQPRR

SEQ ID NO: 99409 - protein, 17 aa, Artificial Sequence
  Description of Artificial Sequence: Synthetic peptide
  Seed: MDPRMCSLMQGSTLPRR
MDPRMYSLIQPSTSPRR

SEQ ID NO: 99410 - protein, 17 aa, Artificial Sequence
  Description of Artificial Sequence: Synthetic peptide
  Seed: MDPRMCSLMQGSTLPRR
MDPRMYSLIQPSTTPRR

SEQ ID NO: 99411 - protein, 17 aa, Artificial Sequence
  Description of Artificial Sequence: Synthetic peptide
  Seed: MDPRMCSLMQGSTLPRR
MDPRMYSLIQPSTVPRR

SEQ ID NO: 99412 - protein, 17 aa, Artificial Sequence
  Description of Artificial Sequence: Synthetic peptide
  Seed: MDPRMCSLMQGSTLPRR
MDPRMYSLIQSSTAPRR

SEQ ID NO: 99413 - protein, 17 aa, Artificial Sequence
  Description of Artificial Sequence: Synthetic peptide
  Seed: MDPRMCSLMQGSTLPRR
MDPRMYSLIQSSTGPRR

SEQ ID NO: 99414 - protein, 17 aa, Artificial Sequence
  Description of Artificial Sequence: Synthetic peptide
  Seed: MDPRMCSLMQGSTLPRR
MDPRMYSLIQSSTHPRR

SEQ ID NO: 99415 - protein, 17 aa, Artificial Sequence
  Description of Artificial Sequence: Synthetic peptide
  Seed: MDPRMCSLMQGSTLPRR
MDPRMYSLIQSSTIPRR

SEQ ID NO: 99416 - protein, 17 aa, Artificial Sequence
  Description of Artificial Sequence: Synthetic peptide
  Seed: MDPRMCSLMQGSTLPRR
MDPRMYSLIQSSTLPRR

SEQ ID NO: 99417 - protein, 17 aa, Artificial Sequence
  Description of Artificial Sequence: Synthetic peptide
  Seed: MDPRMCSLMQGSTLPRR
MDPRMYSLIQSSTMPRR

SEQ ID NO: 99418 - protein, 17 aa, Artificial Sequence
  Description of Artificial Sequence: Synthetic peptide
  Seed: MDPRMCSLMQGSTLPRR
MDPRMYSLIQSSTNPRR

SEQ ID NO: 99419 - protein, 17 aa, Artificial Sequence
  Description of Artificial Sequence: Synthetic peptide
  Seed: MDPRMCSLMQGSTLPRR
MDPRMYSLIQSSTQPRR

SEQ ID NO: 99420 - protein, 17 aa, Artificial Sequence
  Description of Artificial Sequence: Synthetic peptide
  Seed: MDPRMCSLMQGSTLPRR
MDPRMYSLIQSSTSPRR

SEQ ID NO: 99421 - protein, 17 aa, Artificial Sequence
  Description of Artificial Sequence: Synthetic peptide
  Seed: MDPRMCSLMQGSTLPRR
MDPRMYSLIQSSTTPRR

SEQ ID NO: 99422 - protein, 17 aa, Artificial Sequence
  Description of Artificial Sequence: Synthetic peptide
  Seed: MDPRMCSLMQGSTLPRR
MDPRMYSLIQSSTVPRR

SEQ ID NO: 99423 - protein, 17 aa, Artificial Sequence
  Description of Artificial Sequence: Synthetic peptide
  Seed: MDPRMCSLMQGSTLPRR
MDPRMYSLIQTSTAPRR

SEQ ID NO: 99424 - protein, 17 aa, Artificial Sequence
  Description of Artificial Sequence: Synthetic peptide
  Seed: MDPRMCSLMQGSTLPRR
MDPRMYSLIQTSTGPRR

SEQ ID NO: 99425 - protein, 17 aa, Artificial Sequence
  Description of Artificial Sequence: Synthetic peptide
  Seed: MDPRMCSLMQGSTLPRR
MDPRMYSLIQTSTHPRR

SEQ ID NO: 99426 - protein, 17 aa, Artificial Sequence
  Description of Artificial Sequence: Synthetic peptide
  Seed: MDPRMCSLMQGSTLPRR
MDPRMYSLIQTSTIPRR

SEQ ID NO: 99427 - protein, 17 aa, Artificial Sequence
  Description of Artificial Sequence: Synthetic peptide
  Seed: MDPRMCSLMQGSTLPRR
MDPRMYSLIQTSTLPRR

SEQ ID NO: 99428 - protein, 17 aa, Artificial Sequence
  Description of Artificial Sequence: Synthetic peptide
  Seed: MDPRMCSLMQGSTLPRR
MDPRMYSLIQTSTMPRR

SEQ ID NO: 99429 - protein, 17 aa, Artificial Sequence
  Description of Artificial Sequence: Synthetic peptide
  Seed: MDPRMCSLMQGSTLPRR
MDPRMYSLIQTSTNPRR

SEQ ID NO: 99430 - protein, 17 aa, Artificial Sequence
  Description of Artificial Sequence: Synthetic peptide
  Seed: MDPRMCSLMQGSTLPRR
MDPRMYSLIQTSTSPRR

SEQ ID NO: 99431 - protein, 17 aa, Artificial Sequence
  Description of Artificial Sequence: Synthetic peptide
  Seed: MDPRMCSLMQGSTLPRR
MDPRMYSLIQTSTTPRR

SEQ ID NO: 99432 - protein, 17 aa, Artificial Sequence
  Description of Artificial Sequence: Synthetic peptide
  Seed: MDPRMCSLMQGSTLPRR
MDPRMYSLIQTSTVPRR

SEQ ID NO: 99433 - protein, 17 aa, Artificial Sequence
  Description of Artificial Sequence: Synthetic peptide
  Seed: MDPRMCSLMQGSTLPRR
MDPRMYSLIQVSTAPRR

SEQ ID NO: 99434 - protein, 17 aa, Artificial Sequence
  Description of Artificial Sequence: Synthetic peptide
  Seed: MDPRMCSLMQGSTLPRR
MDPRMYSLIQVSTGPRR

SEQ ID NO: 99435 - protein, 17 aa, Artificial Sequence
  Description of Artificial Sequence: Synthetic peptide
  Seed: MDPRMCSLMQGSTLPRR
MDPRMYSLIQVSTHPRR

SEQ ID NO: 99436 - protein, 17 aa, Artificial Sequence
  Description of Artificial Sequence: Synthetic peptide
  Seed: MDPRMCSLMQGSTLPRR
MDPRMYSLIQVSTIPRR

SEQ ID NO: 99437 - protein, 17 aa, Artificial Sequence
  Description of Artificial Sequence: Synthetic peptide
  Seed: MDPRMCSLMQGSTLPRR
MDPRMYSLIQVSTLPRR

SEQ ID NO: 99438 - protein, 17 aa, Artificial Sequence
  Description of Artificial Sequence: Synthetic peptide
  Seed: MDPRMCSLMQGSTLPRR
MDPRMYSLIQVSTMPRR

SEQ ID NO: 99439 - protein, 17 aa, Artificial Sequence
  Description of Artificial Sequence: Synthetic peptide
  Seed: MDPRMCSLMQGSTLPRR
MDPRMYSLIQVSTNPRR

SEQ ID NO: 99440 - protein, 17 aa, Artificial Sequence
  Description of Artificial Sequence: Synthetic peptide
  Seed: MDPRMCSLMQGSTLPRR
MDPRMYSLIQVSTQPRR

SEQ ID NO: 99441 - protein, 17 aa, Artificial Sequence
  Description of Artificial Sequence: Synthetic peptide
  Seed: MDPRMCSLMQGSTLPRR
MDPRMYSLIQVSTSPRR

SEQ ID NO: 99442 - protein, 17 aa, Artificial Sequence
  Description of Artificial Sequence: Synthetic peptide
  Seed: MDPRMCSLMQGSTLPRR
MDPRMYSLIQVSTTPRR

SEQ ID NO: 99443 - protein, 17 aa, Artificial Sequence
  Description of Artificial Sequence: Synthetic peptide
  Seed: MDPRMCSLMQGSTLPRR
MDPRMYSLIQVSTVPRR

SEQ ID NO: 99444 - protein, 17 aa, Artificial Sequence
  Description of Artificial Sequence: Synthetic peptide
  Seed: MDPRMCSLMQGSTLPRR
MDPRMYSLLQASTAPRR

SEQ ID NO: 99445 - protein, 17 aa, Artificial Sequence
  Description of Artificial Sequence: Synthetic peptide
  Seed: MDPRMCSLMQGSTLPRR
MDPRMYSLLQASTCPRR

SEQ ID NO: 99446 - protein, 17 aa, Artificial Sequence
  Description of Artificial Sequence: Synthetic peptide
  Seed: MDPRMCSLMQGSTLPRR
MDPRMYSLLQASTDPRR

SEQ ID NO: 99447 - protein, 17 aa, Artificial Sequence
  Description of Artificial Sequence: Synthetic peptide
  Seed: MDPRMCSLMQGSTLPRR
MDPRMYSLLQASTEPRR

SEQ ID NO: 99448 - protein, 17 aa, Artificial Sequence
  Description of Artificial Sequence: Synthetic peptide
  Seed: MDPRMCSLMQGSTLPRR
MDPRMYSLLQASTFPRR

SEQ ID NO: 99449 - protein, 17 aa, Artificial Sequence
  Description of Artificial Sequence: Synthetic peptide
  Seed: MDPRMCSLMQGSTLPRR
MDPRMYSLLQASTGPRR

SEQ ID NO: 99450 - protein, 17 aa, Artificial Sequence
  Description of Artificial Sequence: Synthetic peptide
  Seed: MDPRMCSLMQGSTLPRR
MDPRMYSLLQASTHPRR

SEQ ID NO: 99451 - protein, 17 aa, Artificial Sequence
  Description of Artificial Sequence: Synthetic peptide
  Seed: MDPRMCSLMQGSTLPRR
MDPRMYSLLQASTIPRR

SEQ ID NO: 99452 - protein, 17 aa, Artificial Sequence
  Description of Artificial Sequence: Synthetic peptide
  Seed: MDPRMCSLMQGSTLPRR
MDPRMYSLLQASTLPRR

SEQ ID NO: 99453 - protein, 17 aa, Artificial Sequence
  Description of Artificial Sequence: Synthetic peptide
  Seed: MDPRMCSLMQGSTLPRR
MDPRMYSLLQASTMPRR

SEQ ID NO: 99454 - protein, 17 aa, Artificial Sequence
  Description of Artificial Sequence: Synthetic peptide
  Seed: MDPRMCSLMQGSTLPRR
MDPRMYSLLQASTNPRR

SEQ ID NO: 99455 - protein, 17 aa, Artificial Sequence
  Description of Artificial Sequence: Synthetic peptide
  Seed: MDPRMCSLMQGSTLPRR
MDPRMYSLLQASTPPRR

SEQ ID NO: 99456 - protein, 17 aa, Artificial Sequence
  Description of Artificial Sequence: Synthetic peptide
  Seed: MDPRMCSLMQGSTLPRR
MDPRMYSLLQASTQPRR

SEQ ID NO: 99457 - protein, 17 aa, Artificial Sequence
  Description of Artificial Sequence: Synthetic peptide
  Seed: MDPRMCSLMQGSTLPRR
MDPRMYSLLQASTSPRR

SEQ ID NO: 99458 - protein, 17 aa, Artificial Sequence
  Description of Artificial Sequence: Synthetic peptide
  Seed: MDPRMCSLMQGSTLPRR
MDPRMYSLLQASTTPRR

SEQ ID NO: 99459 - protein, 17 aa, Artificial Sequence
  Description of Artificial Sequence: Synthetic peptide
  Seed: MDPRMCSLMQGSTLPRR
MDPRMYSLLQASTVPRR

SEQ ID NO: 99460 - protein, 17 aa, Artificial Sequence
  Description of Artificial Sequence: Synthetic peptide
  Seed: MDPRMCSLMQGSTLPRR
MDPRMYSLLQASTWPRR

SEQ ID NO: 99461 - protein, 17 aa, Artificial Sequence
  Description of Artificial Sequence: Synthetic peptide
  Seed: MDPRMCSLMQGSTLPRR
MDPRMYSLLQASTYPRR

SEQ ID NO: 99462 - protein, 17 aa, Artificial Sequence
  Description of Artificial Sequence: Synthetic peptide
  Seed: MDPRMCSLMQGSTLPRR
MDPRMYSLLQGSTAPRR

SEQ ID NO: 99463 - protein, 17 aa, Artificial Sequence
  Description of Artificial Sequence: Synthetic peptide
  Seed: MDPRMCSLMQGSTLPRR
MDPRMYSLLQGSTCPRR

SEQ ID NO: 99464 - protein, 17 aa, Artificial Sequence
  Description of Artificial Sequence: Synthetic peptide
  Seed: MDPRMCSLMQGSTLPRR
MDPRMYSLLQGSTFPRR

SEQ ID NO: 99465 - protein, 17 aa, Artificial Sequence
  Description of Artificial Sequence: Synthetic peptide
  Seed: MDPRMCSLMQGSTLPRR
MDPRMYSLLQGSTGPRR

SEQ ID NO: 99466 - protein, 17 aa, Artificial Sequence
  Description of Artificial Sequence: Synthetic peptide
  Seed: MDPRMCSLMQGSTLPRR
MDPRMYSLLQGSTIPRR

SEQ ID NO: 99467 - protein, 17 aa, Artificial Sequence
  Description of Artificial Sequence: Synthetic peptide
  Seed: MDPRMCSLMQGSTLPRR
MDPRMYSLLQGSTLPRR

SEQ ID NO: 99468 - protein, 17 aa, Artificial Sequence
  Description of Artificial Sequence: Synthetic peptide
  Seed: MDPRMCSLMQGSTLPRR
MDPRMYSLLQGSTMPRR

SEQ ID NO: 99469 - protein, 17 aa, Artificial Sequence
  Description of Artificial Sequence: Synthetic peptide
  Seed: MDPRMCSLMQGSTLPRR
MDPRMYSLLQGSTNPRR

SEQ ID NO: 99470 - protein, 17 aa, Artificial Sequence
  Description of Artificial Sequence: Synthetic peptide
  Seed: MDPRMCSLMQGSTLPRR
MDPRMYSLLQGSTPPRR

SEQ ID NO: 99471 - protein, 17 aa, Artificial Sequence
  Description of Artificial Sequence: Synthetic peptide
  Seed: MDPRMCSLMQGSTLPRR
MDPRMYSLLQGSTSPRR

SEQ ID NO: 99472 - protein, 17 aa, Artificial Sequence
  Description of Artificial Sequence: Synthetic peptide
  Seed: MDPRMCSLMQGSTLPRR
MDPRMYSLLQGSTTPRR

SEQ ID NO: 99473 - protein, 17 aa, Artificial Sequence
  Description of Artificial Sequence: Synthetic peptide
  Seed: MDPRMCSLMQGSTLPRR
MDPRMYSLLQGSTVPRR

SEQ ID NO: 99474 - protein, 17 aa, Artificial Sequence
  Description of Artificial Sequence: Synthetic peptide
  Seed: MDPRMCSLMQGSTLPRR
MDPRMYSLLQISTAPRR

SEQ ID NO: 99475 - protein, 17 aa, Artificial Sequence
  Description of Artificial Sequence: Synthetic peptide
  Seed: MDPRMCSLMQGSTLPRR
MDPRMYSLLQISTGPRR

SEQ ID NO: 99476 - protein, 17 aa, Artificial Sequence
  Description of Artificial Sequence: Synthetic peptide
  Seed: MDPRMCSLMQGSTLPRR
MDPRMYSLLQISTHPRR

SEQ ID NO: 99477 - protein, 17 aa, Artificial Sequence
  Description of Artificial Sequence: Synthetic peptide
  Seed: MDPRMCSLMQGSTLPRR
MDPRMYSLLQISTIPRR

SEQ ID NO: 99478 - protein, 17 aa, Artificial Sequence
  Description of Artificial Sequence: Synthetic peptide
  Seed: MDPRMCSLMQGSTLPRR
MDPRMYSLLQISTLPRR

SEQ ID NO: 99479 - protein, 17 aa, Artificial Sequence
  Description of Artificial Sequence: Synthetic peptide
  Seed: MDPRMCSLMQGSTLPRR
MDPRMYSLLQISTMPRR

SEQ ID NO: 99480 - protein, 17 aa, Artificial Sequence
  Description of Artificial Sequence: Synthetic peptide
  Seed: MDPRMCSLMQGSTLPRR
MDPRMYSLLQISTNPRR

SEQ ID NO: 99481 - protein, 17 aa, Artificial Sequence
  Description of Artificial Sequence: Synthetic peptide
  Seed: MDPRMCSLMQGSTLPRR
MDPRMYSLLQISTPPRR

SEQ ID NO: 99482 - protein, 17 aa, Artificial Sequence
  Description of Artificial Sequence: Synthetic peptide
  Seed: MDPRMCSLMQGSTLPRR
MDPRMYSLLQISTQPRR

SEQ ID NO: 99483 - protein, 17 aa, Artificial Sequence
  Description of Artificial Sequence: Synthetic peptide
  Seed: MDPRMCSLMQGSTLPRR
MDPRMYSLLQISTSPRR

SEQ ID NO: 99484 - protein, 17 aa, Artificial Sequence
  Description of Artificial Sequence: Synthetic peptide
  Seed: MDPRMCSLMQGSTLPRR
MDPRMYSLLQISTTPRR

SEQ ID NO: 99485 - protein, 17 aa, Artificial Sequence
  Description of Artificial Sequence: Synthetic peptide
  Seed: MDPRMCSLMQGSTLPRR
MDPRMYSLLQISTVPRR

SEQ ID NO: 99486 - protein, 17 aa, Artificial Sequence
  Description of Artificial Sequence: Synthetic peptide
  Seed: MDPRMCSLMQGSTLPRR
MDPRMYSLLQLSTAPRR

SEQ ID NO: 99487 - protein, 17 aa, Artificial Sequence
  Description of Artificial Sequence: Synthetic peptide
  Seed: MDPRMCSLMQGSTLPRR
MDPRMYSLLQLSTIPRR

SEQ ID NO: 99488 - protein, 17 aa, Artificial Sequence
  Description of Artificial Sequence: Synthetic peptide
  Seed: MDPRMCSLMQGSTLPRR
MDPRMYSLLQLSTLPRR

SEQ ID NO: 99489 - protein, 17 aa, Artificial Sequence
  Description of Artificial Sequence: Synthetic peptide
  Seed: MDPRMCSLMQGSTLPRR
MDPRMYSLLQLSTMPRR

SEQ ID NO: 99490 - protein, 17 aa, Artificial Sequence
  Description of Artificial Sequence: Synthetic peptide
  Seed: MDPRMCSLMQGSTLPRR
MDPRMYSLLQLSTNPRR

SEQ ID NO: 99491 - protein, 17 aa, Artificial Sequence
  Description of Artificial Sequence: Synthetic peptide
  Seed: MDPRMCSLMQGSTLPRR
MDPRMYSLLQLSTSPRR

SEQ ID NO: 99492 - protein, 17 aa, Artificial Sequence
  Description of Artificial Sequence: Synthetic peptide
  Seed: MDPRMCSLMQGSTLPRR
MDPRMYSLLQLSTTPRR

SEQ ID NO: 99493 - protein, 17 aa, Artificial Sequence
  Description of Artificial Sequence: Synthetic peptide
  Seed: MDPRMCSLMQGSTLPRR
MDPRMYSLLQLSTVPRR

SEQ ID NO: 99494 - protein, 17 aa, Artificial Sequence
  Description of Artificial Sequence: Synthetic peptide
  Seed: MDPRMCSLMQGSTLPRR
MDPRMYSLLQMSTAPRR

SEQ ID NO: 99495 - protein, 17 aa, Artificial Sequence
  Description of Artificial Sequence: Synthetic peptide
  Seed: MDPRMCSLMQGSTLPRR
MDPRMYSLLQMSTIPRR

SEQ ID NO: 99496 - protein, 17 aa, Artificial Sequence
  Description of Artificial Sequence: Synthetic peptide
  Seed: MDPRMCSLMQGSTLPRR
MDPRMYSLLQMSTLPRR

SEQ ID NO: 99497 - protein, 17 aa, Artificial Sequence
  Description of Artificial Sequence: Synthetic peptide
  Seed: MDPRMCSLMQGSTLPRR
MDPRMYSLLQMSTMPRR

SEQ ID NO: 99498 - protein, 17 aa, Artificial Sequence
  Description of Artificial Sequence: Synthetic peptide
  Seed: MDPRMCSLMQGSTLPRR
MDPRMYSLLQMSTNPRR

SEQ ID NO: 99499 - protein, 17 aa, Artificial Sequence
  Description of Artificial Sequence: Synthetic peptide
  Seed: MDPRMCSLMQGSTLPRR
MDPRMYSLLQMSTSPRR

SEQ ID NO: 99500 - protein, 17 aa, Artificial Sequence
  Description of Artificial Sequence: Synthetic peptide
  Seed: MDPRMCSLMQGSTLPRR
MDPRMYSLLQMSTTPRR

SEQ ID NO: 99501 - protein, 17 aa, Artificial Sequence
  Description of Artificial Sequence: Synthetic peptide
  Seed: MDPRMCSLMQGSTLPRR
MDPRMYSLLQMSTVPRR

SEQ ID NO: 99502 - protein, 17 aa, Artificial Sequence
  Description of Artificial Sequence: Synthetic peptide
  Seed: MDPRMCSLMQGSTLPRR
MDPRMYSLLQNSTAPRR

SEQ ID NO: 99503 - protein, 17 aa, Artificial Sequence
  Description of Artificial Sequence: Synthetic peptide
  Seed: MDPRMCSLMQGSTLPRR
MDPRMYSLLQNSTIPRR

SEQ ID NO: 99504 - protein, 17 aa, Artificial Sequence
  Description of Artificial Sequence: Synthetic peptide
  Seed: MDPRMCSLMQGSTLPRR
MDPRMYSLLQNSTLPRR

SEQ ID NO: 99505 - protein, 17 aa, Artificial Sequence
  Description of Artificial Sequence: Synthetic peptide
  Seed: MDPRMCSLMQGSTLPRR
MDPRMYSLLQNSTMPRR

SEQ ID NO: 99506 - protein, 17 aa, Artificial Sequence
  Description of Artificial Sequence: Synthetic peptide
  Seed: MDPRMCSLMQGSTLPRR
MDPRMYSLLQNSTNPRR

SEQ ID NO: 99507 - protein, 17 aa, Artificial Sequence
  Description of Artificial Sequence: Synthetic peptide
  Seed: MDPRMCSLMQGSTLPRR
MDPRMYSLLQNSTSPRR

SEQ ID NO: 99508 - protein, 17 aa, Artificial Sequence
  Description of Artificial Sequence: Synthetic peptide
  Seed: MDPRMCSLMQGSTLPRR
MDPRMYSLLQNSTTPRR

SEQ ID NO: 99509 - protein, 17 aa, Artificial Sequence
  Description of Artificial Sequence: Synthetic peptide
  Seed: MDPRMCSLMQGSTLPRR
MDPRMYSLLQNSTVPRR

SEQ ID NO: 99510 - protein, 17 aa, Artificial Sequence
  Description of Artificial Sequence: Synthetic peptide
  Seed: MDPRMCSLMQGSTLPRR
MDPRMYSLLQPSTAPRR

SEQ ID NO: 99511 - protein, 17 aa, Artificial Sequence
  Description of Artificial Sequence: Synthetic peptide
  Seed: MDPRMCSLMQGSTLPRR
MDPRMYSLLQPSTFPRR

SEQ ID NO: 99512 - protein, 17 aa, Artificial Sequence
  Description of Artificial Sequence: Synthetic peptide
  Seed: MDPRMCSLMQGSTLPRR
MDPRMYSLLQPSTGPRR

SEQ ID NO: 99513 - protein, 17 aa, Artificial Sequence
  Description of Artificial Sequence: Synthetic peptide
  Seed: MDPRMCSLMQGSTLPRR
MDPRMYSLLQPSTHPRR

SEQ ID NO: 99514 - protein, 17 aa, Artificial Sequence
  Description of Artificial Sequence: Synthetic peptide
  Seed: MDPRMCSLMQGSTLPRR
MDPRMYSLLQPSTIPRR

SEQ ID NO: 99515 - protein, 17 aa, Artificial Sequence
  Description of Artificial Sequence: Synthetic peptide
  Seed: MDPRMCSLMQGSTLPRR
MDPRMYSLLQPSTLPRR

SEQ ID NO: 99516 - protein, 17 aa, Artificial Sequence
  Description of Artificial Sequence: Synthetic peptide
  Seed: MDPRMCSLMQGSTLPRR
MDPRMYSLLQPSTMPRR

SEQ ID NO: 99517 - protein, 17 aa, Artificial Sequence
  Description of Artificial Sequence: Synthetic peptide
  Seed: MDPRMCSLMQGSTLPRR
MDPRMYSLLQPSTNPRR

SEQ ID NO: 99518 - protein, 17 aa, Artificial Sequence
  Description of Artificial Sequence: Synthetic peptide
  Seed: MDPRMCSLMQGSTLPRR
MDPRMYSLLQPSTPPRR

SEQ ID NO: 99519 - protein, 17 aa, Artificial Sequence
  Description of Artificial Sequence: Synthetic peptide
  Seed: MDPRMCSLMQGSTLPRR
MDPRMYSLLQPSTQPRR

SEQ ID NO: 99520 - protein, 17 aa, Artificial Sequence
  Description of Artificial Sequence: Synthetic peptide
  Seed: MDPRMCSLMQGSTLPRR
MDPRMYSLLQPSTSPRR

SEQ ID NO: 99521 - protein, 17 aa, Artificial Sequence
  Description of Artificial Sequence: Synthetic peptide
  Seed: MDPRMCSLMQGSTLPRR
MDPRMYSLLQPSTTPRR

SEQ ID NO: 99522 - protein, 17 aa, Artificial Sequence
  Description of Artificial Sequence: Synthetic peptide
  Seed: MDPRMCSLMQGSTLPRR
MDPRMYSLLQPSTVPRR

SEQ ID NO: 99523 - protein, 17 aa, Artificial Sequence
  Description of Artificial Sequence: Synthetic peptide
  Seed: MDPRMCSLMQGSTLPRR
MDPRMYSLLQSSTAPRR

SEQ ID NO: 99524 - protein, 17 aa, Artificial Sequence
  Description of Artificial Sequence: Synthetic peptide
  Seed: MDPRMCSLMQGSTLPRR
MDPRMYSLLQSSTCPRR

SEQ ID NO: 99525 - protein, 17 aa, Artificial Sequence
  Description of Artificial Sequence: Synthetic peptide
  Seed: MDPRMCSLMQGSTLPRR
MDPRMYSLLQSSTFPRR

SEQ ID NO: 99526 - protein, 17 aa, Artificial Sequence
  Description of Artificial Sequence: Synthetic peptide
  Seed: MDPRMCSLMQGSTLPRR
MDPRMYSLLQSSTGPRR

SEQ ID NO: 99527 - protein, 17 aa, Artificial Sequence
  Description of Artificial Sequence: Synthetic peptide
  Seed: MDPRMCSLMQGSTLPRR
MDPRMYSLLQSSTHPRR

SEQ ID NO: 99528 - protein, 17 aa, Artificial Sequence
  Description of Artificial Sequence: Synthetic peptide
  Seed: MDPRMCSLMQGSTLPRR
MDPRMYSLLQSSTIPRR

SEQ ID NO: 99529 - protein, 17 aa, Artificial Sequence
  Description of Artificial Sequence: Synthetic peptide
  Seed: MDPRMCSLMQGSTLPRR
MDPRMYSLLQSSTLPRR

SEQ ID NO: 99530 - protein, 17 aa, Artificial Sequence
  Description of Artificial Sequence: Synthetic peptide
  Seed: MDPRMCSLMQGSTLPRR
MDPRMYSLLQSSTMPRR

SEQ ID NO: 99531 - protein, 17 aa, Artificial Sequence
  Description of Artificial Sequence: Synthetic peptide
  Seed: MDPRMCSLMQGSTLPRR
MDPRMYSLLQSSTNPRR

SEQ ID NO: 99532 - protein, 17 aa, Artificial Sequence
  Description of Artificial Sequence: Synthetic peptide
  Seed: MDPRMCSLMQGSTLPRR
MDPRMYSLLQSSTPPRR

SEQ ID NO: 99533 - protein, 17 aa, Artificial Sequence
  Description of Artificial Sequence: Synthetic peptide
  Seed: MDPRMCSLMQGSTLPRR
MDPRMYSLLQSSTQPRR

SEQ ID NO: 99534 - protein, 17 aa, Artificial Sequence
  Description of Artificial Sequence: Synthetic peptide
  Seed: MDPRMCSLMQGSTLPRR
MDPRMYSLLQSSTSPRR

SEQ ID NO: 99535 - protein, 17 aa, Artificial Sequence
  Description of Artificial Sequence: Synthetic peptide
  Seed: MDPRMCSLMQGSTLPRR
MDPRMYSLLQSSTTPRR

SEQ ID NO: 99536 - protein, 17 aa, Artificial Sequence
  Description of Artificial Sequence: Synthetic peptide
  Seed: MDPRMCSLMQGSTLPRR
MDPRMYSLLQSSTVPRR

SEQ ID NO: 99537 - protein, 17 aa, Artificial Sequence
  Description of Artificial Sequence: Synthetic peptide
  Seed: MDPRMCSLMQGSTLPRR
MDPRMYSLLQTSTAPRR

SEQ ID NO: 99538 - protein, 17 aa, Artificial Sequence
  Description of Artificial Sequence: Synthetic peptide
  Seed: MDPRMCSLMQGSTLPRR
MDPRMYSLLQTSTGPRR

SEQ ID NO: 99539 - protein, 17 aa, Artificial Sequence
  Description of Artificial Sequence: Synthetic peptide
  Seed: MDPRMCSLMQGSTLPRR
MDPRMYSLLQTSTHPRR

SEQ ID NO: 99540 - protein, 17 aa, Artificial Sequence
  Description of Artificial Sequence: Synthetic peptide
  Seed: MDPRMCSLMQGSTLPRR
MDPRMYSLLQTSTIPRR

SEQ ID NO: 99541 - protein, 17 aa, Artificial Sequence
  Description of Artificial Sequence: Synthetic peptide
  Seed: MDPRMCSLMQGSTLPRR
MDPRMYSLLQTSTLPRR

SEQ ID NO: 99542 - protein, 17 aa, Artificial Sequence
  Description of Artificial Sequence: Synthetic peptide
  Seed: MDPRMCSLMQGSTLPRR
MDPRMYSLLQTSTMPRR

SEQ ID NO: 99543 - protein, 17 aa, Artificial Sequence
  Description of Artificial Sequence: Synthetic peptide
  Seed: MDPRMCSLMQGSTLPRR
MDPRMYSLLQTSTNPRR

SEQ ID NO: 99544 - protein, 17 aa, Artificial Sequence
  Description of Artificial Sequence: Synthetic peptide
  Seed: MDPRMCSLMQGSTLPRR
MDPRMYSLLQTSTPPRR

SEQ ID NO: 99545 - protein, 17 aa, Artificial Sequence
  Description of Artificial Sequence: Synthetic peptide
  Seed: MDPRMCSLMQGSTLPRR
MDPRMYSLLQTSTQPRR

SEQ ID NO: 99546 - protein, 17 aa, Artificial Sequence
  Description of Artificial Sequence: Synthetic peptide
  Seed: MDPRMCSLMQGSTLPRR
MDPRMYSLLQTSTSPRR

SEQ ID NO: 99547 - protein, 17 aa, Artificial Sequence
  Description of Artificial Sequence: Synthetic peptide
  Seed: MDPRMCSLMQGSTLPRR
MDPRMYSLLQTSTTPRR

SEQ ID NO: 99548 - protein, 17 aa, Artificial Sequence
  Description of Artificial Sequence: Synthetic peptide
  Seed: MDPRMCSLMQGSTLPRR
MDPRMYSLLQTSTVPRR

SEQ ID NO: 99549 - protein, 17 aa, Artificial Sequence
  Description of Artificial Sequence: Synthetic peptide
  Seed: MDPRMCSLMQGSTLPRR
MDPRMYSLLQVSTAPRR

SEQ ID NO: 99550 - protein, 17 aa, Artificial Sequence
  Description of Artificial Sequence: Synthetic peptide
  Seed: MDPRMCSLMQGSTLPRR
MDPRMYSLLQVSTGPRR

SEQ ID NO: 99551 - protein, 17 aa, Artificial Sequence
  Description of Artificial Sequence: Synthetic peptide
  Seed: MDPRMCSLMQGSTLPRR
MDPRMYSLLQVSTHPRR

SEQ ID NO: 99552 - protein, 17 aa, Artificial Sequence
  Description of Artificial Sequence: Synthetic peptide
  Seed: MDPRMCSLMQGSTLPRR
MDPRMYSLLQVSTIPRR

SEQ ID NO: 99553 - protein, 17 aa, Artificial Sequence
  Description of Artificial Sequence: Synthetic peptide
  Seed: MDPRMCSLMQGSTLPRR
MDPRMYSLLQVSTLPRR

SEQ ID NO: 99554 - protein, 17 aa, Artificial Sequence
  Description of Artificial Sequence: Synthetic peptide
  Seed: MDPRMCSLMQGSTLPRR
MDPRMYSLLQVSTMPRR

SEQ ID NO: 99555 - protein, 17 aa, Artificial Sequence
  Description of Artificial Sequence: Synthetic peptide
  Seed: MDPRMCSLMQGSTLPRR
MDPRMYSLLQVSTNPRR

SEQ ID NO: 99556 - protein, 17 aa, Artificial Sequence
  Description of Artificial Sequence: Synthetic peptide
  Seed: MDPRMCSLMQGSTLPRR
MDPRMYSLLQVSTPPRR

SEQ ID NO: 99557 - protein, 17 aa, Artificial Sequence
  Description of Artificial Sequence: Synthetic peptide
  Seed: MDPRMCSLMQGSTLPRR
MDPRMYSLLQVSTQPRR

SEQ ID NO: 99558 - protein, 17 aa, Artificial Sequence
  Description of Artificial Sequence: Synthetic peptide
  Seed: MDPRMCSLMQGSTLPRR
MDPRMYSLLQVSTSPRR

SEQ ID NO: 99559 - protein, 17 aa, Artificial Sequence
  Description of Artificial Sequence: Synthetic peptide
  Seed: MDPRMCSLMQGSTLPRR
MDPRMYSLLQVSTTPRR

SEQ ID NO: 99560 - protein, 17 aa, Artificial Sequence
  Description of Artificial Sequence: Synthetic peptide
  Seed: MDPRMCSLMQGSTLPRR
MDPRMYSLLQVSTVPRR

SEQ ID NO: 99561 - protein, 17 aa, Artificial Sequence
  Description of Artificial Sequence: Synthetic peptide
  Seed: MDPRMCSLMQGSTLPRR
MDPRMYSLMQASTAPRR

SEQ ID NO: 99562 - protein, 17 aa, Artificial Sequence
  Description of Artificial Sequence: Synthetic peptide
  Seed: MDPRMCSLMQGSTLPRR
MDPRMYSLMQASTCPRR

SEQ ID NO: 99563 - protein, 17 aa, Artificial Sequence
  Description of Artificial Sequence: Synthetic peptide
  Seed: MDPRMCSLMQGSTLPRR
MDPRMYSLMQASTEPRR

SEQ ID NO: 99564 - protein, 17 aa, Artificial Sequence
  Description of Artificial Sequence: Synthetic peptide
  Seed: MDPRMCSLMQGSTLPRR
MDPRMYSLMQASTFPRR

SEQ ID NO: 99565 - protein, 17 aa, Artificial Sequence
  Description of Artificial Sequence: Synthetic peptide
  Seed: MDPRMCSLMQGSTLPRR
MDPRMYSLMQASTGPRR

SEQ ID NO: 99566 - protein, 17 aa, Artificial Sequence
  Description of Artificial Sequence: Synthetic peptide
  Seed: MDPRMCSLMQGSTLPRR
MDPRMYSLMQASTHPRR

SEQ ID NO: 99567 - protein, 17 aa, Artificial Sequence
  Description of Artificial Sequence: Synthetic peptide
  Seed: MDPRMCSLMQGSTLPRR
MDPRMYSLMQASTIPRR

SEQ ID NO: 99568 - protein, 17 aa, Artificial Sequence
  Description of Artificial Sequence: Synthetic peptide
  Seed: MDPRMCSLMQGSTLPRR
MDPRMYSLMQASTLPRR

SEQ ID NO: 99569 - protein, 17 aa, Artificial Sequence
  Description of Artificial Sequence: Synthetic peptide
  Seed: MDPRMCSLMQGSTLPRR
MDPRMYSLMQASTMPRR

SEQ ID NO: 99570 - protein, 17 aa, Artificial Sequence
  Description of Artificial Sequence: Synthetic peptide
  Seed: MDPRMCSLMQGSTLPRR
MDPRMYSLMQASTNPRR

SEQ ID NO: 99571 - protein, 17 aa, Artificial Sequence
  Description of Artificial Sequence: Synthetic peptide
  Seed: MDPRMCSLMQGSTLPRR
MDPRMYSLMQASTPPRR

SEQ ID NO: 99572 - protein, 17 aa, Artificial Sequence
  Description of Artificial Sequence: Synthetic peptide
  Seed: MDPRMCSLMQGSTLPRR
MDPRMYSLMQASTQPRR

SEQ ID NO: 99573 - protein, 17 aa, Artificial Sequence
  Description of Artificial Sequence: Synthetic peptide
  Seed: MDPRMCSLMQGSTLPRR
MDPRMYSLMQASTSPRR

SEQ ID NO: 99574 - protein, 17 aa, Artificial Sequence
  Description of Artificial Sequence: Synthetic peptide
  Seed: MDPRMCSLMQGSTLPRR
MDPRMYSLMQASTTPRR

SEQ ID NO: 99575 - protein, 17 aa, Artificial Sequence
  Description of Artificial Sequence: Synthetic peptide
  Seed: MDPRMCSLMQGSTLPRR
MDPRMYSLMQASTVPRR

SEQ ID NO: 99576 - protein, 17 aa, Artificial Sequence
  Description of Artificial Sequence: Synthetic peptide
  Seed: MDPRMCSLMQGSTLPRR
MDPRMYSLMQASTWPRR

SEQ ID NO: 99577 - protein, 17 aa, Artificial Sequence
  Description of Artificial Sequence: Synthetic peptide
  Seed: MDPRMCSLMQGSTLPRR
MDPRMYSLMQASTYPRR

SEQ ID NO: 99578 - protein, 17 aa, Artificial Sequence
  Description of Artificial Sequence: Synthetic peptide
  Seed: MDPRMCSLMQGSTLPRR
MDPRMYSLMQGSTAPRR

SEQ ID NO: 99579 - protein, 17 aa, Artificial Sequence
  Description of Artificial Sequence: Synthetic peptide
  Seed: MDPRMCSLMQGSTLPRR
MDPRMYSLMQGSTCPRR

SEQ ID NO: 99580 - protein, 17 aa, Artificial Sequence
  Description of Artificial Sequence: Synthetic peptide
  Seed: MDPRMCSLMQGSTLPRR
MDPRMYSLMQGSTFPRR

SEQ ID NO: 99581 - protein, 17 aa, Artificial Sequence
  Description of Artificial Sequence: Synthetic peptide
  Seed: MDPRMCSLMQGSTLPRR
MDPRMYSLMQGSTGPRR

SEQ ID NO: 99582 - protein, 17 aa, Artificial Sequence
  Description of Artificial Sequence: Synthetic peptide
  Seed: MDPRMCSLMQGSTLPRR
MDPRMYSLMQGSTIPRR

SEQ ID NO: 99583 - protein, 17 aa, Artificial Sequence
  Description of Artificial Sequence: Synthetic peptide
  Seed: MDPRMCSLMQGSTLPRR
MDPRMYSLMQGSTLPRR

SEQ ID NO: 99584 - protein, 17 aa, Artificial Sequence
  Description of Artificial Sequence: Synthetic peptide
  Seed: MDPRMCSLMQGSTLPRR
MDPRMYSLMQGSTMPRR

SEQ ID NO: 99585 - protein, 17 aa, Artificial Sequence
  Description of Artificial Sequence: Synthetic peptide
  Seed: MDPRMCSLMQGSTLPRR
MDPRMYSLMQGSTNPRR

SEQ ID NO: 99586 - protein, 17 aa, Artificial Sequence
  Description of Artificial Sequence: Synthetic peptide
  Seed: MDPRMCSLMQGSTLPRR
MDPRMYSLMQGSTSPRR

SEQ ID NO: 99587 - protein, 17 aa, Artificial Sequence
  Description of Artificial Sequence: Synthetic peptide
  Seed: MDPRMCSLMQGSTLPRR
MDPRMYSLMQGSTTPRR

SEQ ID NO: 99588 - protein, 17 aa, Artificial Sequence
  Description of Artificial Sequence: Synthetic peptide
  Seed: MDPRMCSLMQGSTLPRR
MDPRMYSLMQGSTVPRR

SEQ ID NO: 99589 - protein, 17 aa, Artificial Sequence
  Description of Artificial Sequence: Synthetic peptide
  Seed: MDPRMCSLMQGSTLPRR
MDPRMYSLMQISTAPRR

SEQ ID NO: 99590 - protein, 17 aa, Artificial Sequence
  Description of Artificial Sequence: Synthetic peptide
  Seed: MDPRMCSLMQGSTLPRR
MDPRMYSLMQISTGPRR

SEQ ID NO: 99591 - protein, 17 aa, Artificial Sequence
  Description of Artificial Sequence: Synthetic peptide
  Seed: MDPRMCSLMQGSTLPRR
MDPRMYSLMQISTHPRR

SEQ ID NO: 99592 - protein, 17 aa, Artificial Sequence
  Description of Artificial Sequence: Synthetic peptide
  Seed: MDPRMCSLMQGSTLPRR
MDPRMYSLMQISTIPRR

SEQ ID NO: 99593 - protein, 17 aa, Artificial Sequence
  Description of Artificial Sequence: Synthetic peptide
  Seed: MDPRMCSLMQGSTLPRR
MDPRMYSLMQISTLPRR

SEQ ID NO: 99594 - protein, 17 aa, Artificial Sequence
  Description of Artificial Sequence: Synthetic peptide
  Seed: MDPRMCSLMQGSTLPRR
MDPRMYSLMQISTMPRR

SEQ ID NO: 99595 - protein, 17 aa, Artificial Sequence
  Description of Artificial Sequence: Synthetic peptide
  Seed: MDPRMCSLMQGSTLPRR
MDPRMYSLMQISTNPRR

SEQ ID NO: 99596 - protein, 17 aa, Artificial Sequence
  Description of Artificial Sequence: Synthetic peptide
  Seed: MDPRMCSLMQGSTLPRR
MDPRMYSLMQISTPPRR

SEQ ID NO: 99597 - protein, 17 aa, Artificial Sequence
  Description of Artificial Sequence: Synthetic peptide
  Seed: MDPRMCSLMQGSTLPRR
MDPRMYSLMQISTQPRR

SEQ ID NO: 99598 - protein, 17 aa, Artificial Sequence
  Description of Artificial Sequence: Synthetic peptide
  Seed: MDPRMCSLMQGSTLPRR
MDPRMYSLMQISTSPRR

SEQ ID NO: 99599 - protein, 17 aa, Artificial Sequence
  Description of Artificial Sequence: Synthetic peptide
  Seed: MDPRMCSLMQGSTLPRR
MDPRMYSLMQISTTPRR

SEQ ID NO: 99600 - protein, 17 aa, Artificial Sequence
  Description of Artificial Sequence: Synthetic peptide
  Seed: MDPRMCSLMQGSTLPRR
MDPRMYSLMQISTVPRR

SEQ ID NO: 99601 - protein, 17 aa, Artificial Sequence
  Description of Artificial Sequence: Synthetic peptide
  Seed: MDPRMCSLMQGSTLPRR
MDPRMYSLMQLSTAPRR

SEQ ID NO: 99602 - protein, 17 aa, Artificial Sequence
  Description of Artificial Sequence: Synthetic peptide
  Seed: MDPRMCSLMQGSTLPRR
MDPRMYSLMQLSTIPRR

SEQ ID NO: 99603 - protein, 17 aa, Artificial Sequence
  Description of Artificial Sequence: Synthetic peptide
  Seed: MDPRMCSLMQGSTLPRR
MDPRMYSLMQLSTLPRR

SEQ ID NO: 99604 - protein, 17 aa, Artificial Sequence
  Description of Artificial Sequence: Synthetic peptide
  Seed: MDPRMCSLMQGSTLPRR
MDPRMYSLMQLSTMPRR

SEQ ID NO: 99605 - protein, 17 aa, Artificial Sequence
  Description of Artificial Sequence: Synthetic peptide
  Seed: MDPRMCSLMQGSTLPRR
MDPRMYSLMQLSTNPRR

SEQ ID NO: 99606 - protein, 17 aa, Artificial Sequence
  Description of Artificial Sequence: Synthetic peptide
  Seed: MDPRMCSLMQGSTLPRR
MDPRMYSLMQLSTSPRR

SEQ ID NO: 99607 - protein, 17 aa, Artificial Sequence
  Description of Artificial Sequence: Synthetic peptide
  Seed: MDPRMCSLMQGSTLPRR
MDPRMYSLMQLSTTPRR

SEQ ID NO: 99608 - protein, 17 aa, Artificial Sequence
  Description of Artificial Sequence: Synthetic peptide
  Seed: MDPRMCSLMQGSTLPRR
MDPRMYSLMQLSTVPRR

SEQ ID NO: 99609 - protein, 17 aa, Artificial Sequence
  Description of Artificial Sequence: Synthetic peptide
  Seed: MDPRMCSLMQGSTLPRR
MDPRMYSLMQMSTAPRR

SEQ ID NO: 99610 - protein, 17 aa, Artificial Sequence
  Description of Artificial Sequence: Synthetic peptide
  Seed: MDPRMCSLMQGSTLPRR
MDPRMYSLMQMSTIPRR

SEQ ID NO: 99611 - protein, 17 aa, Artificial Sequence
  Description of Artificial Sequence: Synthetic peptide
  Seed: MDPRMCSLMQGSTLPRR
MDPRMYSLMQMSTLPRR

SEQ ID NO: 99612 - protein, 17 aa, Artificial Sequence
  Description of Artificial Sequence: Synthetic peptide
  Seed: MDPRMCSLMQGSTLPRR
MDPRMYSLMQMSTMPRR

SEQ ID NO: 99613 - protein, 17 aa, Artificial Sequence
  Description of Artificial Sequence: Synthetic peptide
  Seed: MDPRMCSLMQGSTLPRR
MDPRMYSLMQMSTNPRR

SEQ ID NO: 99614 - protein, 17 aa, Artificial Sequence
  Description of Artificial Sequence: Synthetic peptide
  Seed: MDPRMCSLMQGSTLPRR
MDPRMYSLMQMSTSPRR

SEQ ID NO: 99615 - protein, 17 aa, Artificial Sequence
  Description of Artificial Sequence: Synthetic peptide
  Seed: MDPRMCSLMQGSTLPRR
MDPRMYSLMQMSTTPRR

SEQ ID NO: 99616 - protein, 17 aa, Artificial Sequence
  Description of Artificial Sequence: Synthetic peptide
  Seed: MDPRMCSLMQGSTLPRR
MDPRMYSLMQMSTVPRR

SEQ ID NO: 99617 - protein, 17 aa, Artificial Sequence
  Description of Artificial Sequence: Synthetic peptide
  Seed: MDPRMCSLMQGSTLPRR
MDPRMYSLMQNSTAPRR

SEQ ID NO: 99618 - protein, 17 aa, Artificial Sequence
  Description of Artificial Sequence: Synthetic peptide
  Seed: MDPRMCSLMQGSTLPRR
MDPRMYSLMQNSTIPRR

SEQ ID NO: 99619 - protein, 17 aa, Artificial Sequence
  Description of Artificial Sequence: Synthetic peptide
  Seed: MDPRMCSLMQGSTLPRR
MDPRMYSLMQNSTLPRR

SEQ ID NO: 99620 - protein, 17 aa, Artificial Sequence
  Description of Artificial Sequence: Synthetic peptide
  Seed: MDPRMCSLMQGSTLPRR
MDPRMYSLMQNSTMPRR

SEQ ID NO: 99621 - protein, 17 aa, Artificial Sequence
  Description of Artificial Sequence: Synthetic peptide
  Seed: MDPRMCSLMQGSTLPRR
MDPRMYSLMQNSTNPRR

SEQ ID NO: 99622 - protein, 17 aa, Artificial Sequence
  Description of Artificial Sequence: Synthetic peptide
  Seed: MDPRMCSLMQGSTLPRR
MDPRMYSLMQNSTSPRR

SEQ ID NO: 99623 - protein, 17 aa, Artificial Sequence
  Description of Artificial Sequence: Synthetic peptide
  Seed: MDPRMCSLMQGSTLPRR
MDPRMYSLMQNSTTPRR

SEQ ID NO: 99624 - protein, 17 aa, Artificial Sequence
  Description of Artificial Sequence: Synthetic peptide
  Seed: MDPRMCSLMQGSTLPRR
MDPRMYSLMQNSTVPRR

SEQ ID NO: 99625 - protein, 17 aa, Artificial Sequence
  Description of Artificial Sequence: Synthetic peptide
  Seed: MDPRMCSLMQGSTLPRR
MDPRMYSLMQPSTAPRR

SEQ ID NO: 99626 - protein, 17 aa, Artificial Sequence
  Description of Artificial Sequence: Synthetic peptide
  Seed: MDPRMCSLMQGSTLPRR
MDPRMYSLMQPSTFPRR

SEQ ID NO: 99627 - protein, 17 aa, Artificial Sequence
  Description of Artificial Sequence: Synthetic peptide
  Seed: MDPRMCSLMQGSTLPRR
MDPRMYSLMQPSTGPRR

SEQ ID NO: 99628 - protein, 17 aa, Artificial Sequence
  Description of Artificial Sequence: Synthetic peptide
  Seed: MDPRMCSLMQGSTLPRR
MDPRMYSLMQPSTHPRR

SEQ ID NO: 99629 - protein, 17 aa, Artificial Sequence
  Description of Artificial Sequence: Synthetic peptide
  Seed: MDPRMCSLMQGSTLPRR
MDPRMYSLMQPSTIPRR

SEQ ID NO: 99630 - protein, 17 aa, Artificial Sequence
  Description of Artificial Sequence: Synthetic peptide
  Seed: MDPRMCSLMQGSTLPRR
MDPRMYSLMQPSTLPRR

SEQ ID NO: 99631 - protein, 17 aa, Artificial Sequence
  Description of Artificial Sequence: Synthetic peptide
  Seed: MDPRMCSLMQGSTLPRR
MDPRMYSLMQPSTMPRR

SEQ ID NO: 99632 - protein, 17 aa, Artificial Sequence
  Description of Artificial Sequence: Synthetic peptide
  Seed: MDPRMCSLMQGSTLPRR
MDPRMYSLMQPSTNPRR

SEQ ID NO: 99633 - protein, 17 aa, Artificial Sequence
  Description of Artificial Sequence: Synthetic peptide
  Seed: MDPRMCSLMQGSTLPRR
MDPRMYSLMQPSTPPRR

SEQ ID NO: 99634 - protein, 17 aa, Artificial Sequence
  Description of Artificial Sequence: Synthetic peptide
  Seed: MDPRMCSLMQGSTLPRR
MDPRMYSLMQPSTQPRR

SEQ ID NO: 99635 - protein, 17 aa, Artificial Sequence
  Description of Artificial Sequence: Synthetic peptide
  Seed: MDPRMCSLMQGSTLPRR
MDPRMYSLMQPSTSPRR

SEQ ID NO: 99636 - protein, 17 aa, Artificial Sequence
  Description of Artificial Sequence: Synthetic peptide
  Seed: MDPRMCSLMQGSTLPRR
MDPRMYSLMQPSTTPRR

SEQ ID NO: 99637 - protein, 17 aa, Artificial Sequence
  Description of Artificial Sequence: Synthetic peptide
  Seed: MDPRMCSLMQGSTLPRR
MDPRMYSLMQPSTVPRR

SEQ ID NO: 99638 - protein, 17 aa, Artificial Sequence
  Description of Artificial Sequence: Synthetic peptide
  Seed: MDPRMCSLMQGSTLPRR
MDPRMYSLMQSSTAPRR

SEQ ID NO: 99639 - protein, 17 aa, Artificial Sequence
  Description of Artificial Sequence: Synthetic peptide
  Seed: MDPRMCSLMQGSTLPRR
MDPRMYSLMQSSTCPRR

SEQ ID NO: 99640 - protein, 17 aa, Artificial Sequence
  Description of Artificial Sequence: Synthetic peptide
  Seed: MDPRMCSLMQGSTLPRR
MDPRMYSLMQSSTFPRR

SEQ ID NO: 99641 - protein, 17 aa, Artificial Sequence
  Description of Artificial Sequence: Synthetic peptide
  Seed: MDPRMCSLMQGSTLPRR
MDPRMYSLMQSSTGPRR

SEQ ID NO: 99642 - protein, 17 aa, Artificial Sequence
  Description of Artificial Sequence: Synthetic peptide
  Seed: MDPRMCSLMQGSTLPRR
MDPRMYSLMQSSTHPRR

SEQ ID NO: 99643 - protein, 17 aa, Artificial Sequence
  Description of Artificial Sequence: Synthetic peptide
  Seed: MDPRMCSLMQGSTLPRR
MDPRMYSLMQSSTIPRR

SEQ ID NO: 99644 - protein, 17 aa, Artificial Sequence
  Description of Artificial Sequence: Synthetic peptide
  Seed: MDPRMCSLMQGSTLPRR
MDPRMYSLMQSSTLPRR

SEQ ID NO: 99645 - protein, 17 aa, Artificial Sequence
  Description of Artificial Sequence: Synthetic peptide
  Seed: MDPRMCSLMQGSTLPRR
MDPRMYSLMQSSTMPRR

SEQ ID NO: 99646 - protein, 17 aa, Artificial Sequence
  Description of Artificial Sequence: Synthetic peptide
  Seed: MDPRMCSLMQGSTLPRR
MDPRMYSLMQSSTNPRR

SEQ ID NO: 99647 - protein, 17 aa, Artificial Sequence
  Description of Artificial Sequence: Synthetic peptide
  Seed: MDPRMCSLMQGSTLPRR
MDPRMYSLMQSSTPPRR

SEQ ID NO: 99648 - protein, 17 aa, Artificial Sequence
  Description of Artificial Sequence: Synthetic peptide
  Seed: MDPRMCSLMQGSTLPRR
MDPRMYSLMQSSTQPRR

SEQ ID NO: 99649 - protein, 17 aa, Artificial Sequence
  Description of Artificial Sequence: Synthetic peptide
  Seed: MDPRMCSLMQGSTLPRR
MDPRMYSLMQSSTSPRR

SEQ ID NO: 99650 - protein, 17 aa, Artificial Sequence
  Description of Artificial Sequence: Synthetic peptide
  Seed: MDPRMCSLMQGSTLPRR
MDPRMYSLMQSSTTPRR

SEQ ID NO: 99651 - protein, 17 aa, Artificial Sequence
  Description of Artificial Sequence: Synthetic peptide
  Seed: MDPRMCSLMQGSTLPRR
MDPRMYSLMQSSTVPRR

SEQ ID NO: 99652 - protein, 17 aa, Artificial Sequence
  Description of Artificial Sequence: Synthetic peptide
  Seed: MDPRMCSLMQGSTLPRR
MDPRMYSLMQTSTAPRR

SEQ ID NO: 99653 - protein, 17 aa, Artificial Sequence
  Description of Artificial Sequence: Synthetic peptide
  Seed: MDPRMCSLMQGSTLPRR
MDPRMYSLMQTSTGPRR

SEQ ID NO: 99654 - protein, 17 aa, Artificial Sequence
  Description of Artificial Sequence: Synthetic peptide
  Seed: MDPRMCSLMQGSTLPRR
MDPRMYSLMQTSTHPRR

SEQ ID NO: 99655 - protein, 17 aa, Artificial Sequence
  Description of Artificial Sequence: Synthetic peptide
  Seed: MDPRMCSLMQGSTLPRR
MDPRMYSLMQTSTIPRR

SEQ ID NO: 99656 - protein, 17 aa, Artificial Sequence
  Description of Artificial Sequence: Synthetic peptide
  Seed: MDPRMCSLMQGSTLPRR
MDPRMYSLMQTSTLPRR

SEQ ID NO: 99657 - protein, 17 aa, Artificial Sequence
  Description of Artificial Sequence: Synthetic peptide
  Seed: MDPRMCSLMQGSTLPRR
MDPRMYSLMQTSTMPRR

SEQ ID NO: 99658 - protein, 17 aa, Artificial Sequence
  Description of Artificial Sequence: Synthetic peptide
  Seed: MDPRMCSLMQGSTLPRR
MDPRMYSLMQTSTNPRR

SEQ ID NO: 99659 - protein, 17 aa, Artificial Sequence
  Description of Artificial Sequence: Synthetic peptide
  Seed: MDPRMCSLMQGSTLPRR
MDPRMYSLMQTSTPPRR

SEQ ID NO: 99660 - protein, 17 aa, Artificial Sequence
  Description of Artificial Sequence: Synthetic peptide
  Seed: MDPRMCSLMQGSTLPRR
MDPRMYSLMQTSTQPRR

SEQ ID NO: 99661 - protein, 17 aa, Artificial Sequence
  Description of Artificial Sequence: Synthetic peptide
  Seed: MDPRMCSLMQGSTLPRR
MDPRMYSLMQTSTSPRR

SEQ ID NO: 99662 - protein, 17 aa, Artificial Sequence
  Description of Artificial Sequence: Synthetic peptide
  Seed: MDPRMCSLMQGSTLPRR
MDPRMYSLMQTSTTPRR

SEQ ID NO: 99663 - protein, 17 aa, Artificial Sequence
  Description of Artificial Sequence: Synthetic peptide
  Seed: MDPRMCSLMQGSTLPRR
MDPRMYSLMQTSTVPRR

SEQ ID NO: 99664 - protein, 17 aa, Artificial Sequence
  Description of Artificial Sequence: Synthetic peptide
  Seed: MDPRMCSLMQGSTLPRR
MDPRMYSLMQVSTAPRR

SEQ ID NO: 99665 - protein, 17 aa, Artificial Sequence
  Description of Artificial Sequence: Synthetic peptide
  Seed: MDPRMCSLMQGSTLPRR
MDPRMYSLMQVSTGPRR

SEQ ID NO: 99666 - protein, 17 aa, Artificial Sequence
  Description of Artificial Sequence: Synthetic peptide
  Seed: MDPRMCSLMQGSTLPRR
MDPRMYSLMQVSTHPRR

SEQ ID NO: 99667 - protein, 17 aa, Artificial Sequence
  Description of Artificial Sequence: Synthetic peptide
  Seed: MDPRMCSLMQGSTLPRR
MDPRMYSLMQVSTIPRR

SEQ ID NO: 99668 - protein, 17 aa, Artificial Sequence
  Description of Artificial Sequence: Synthetic peptide
  Seed: MDPRMCSLMQGSTLPRR
MDPRMYSLMQVSTLPRR

SEQ ID NO: 99669 - protein, 17 aa, Artificial Sequence
  Description of Artificial Sequence: Synthetic peptide
  Seed: MDPRMCSLMQGSTLPRR
MDPRMYSLMQVSTMPRR

SEQ ID NO: 99670 - protein, 17 aa, Artificial Sequence
  Description of Artificial Sequence: Synthetic peptide
  Seed: MDPRMCSLMQGSTLPRR
MDPRMYSLMQVSTNPRR

SEQ ID NO: 99671 - protein, 17 aa, Artificial Sequence
  Description of Artificial Sequence: Synthetic peptide
  Seed: MDPRMCSLMQGSTLPRR
MDPRMYSLMQVSTPPRR

SEQ ID NO: 99672 - protein, 17 aa, Artificial Sequence
  Description of Artificial Sequence: Synthetic peptide
  Seed: MDPRMCSLMQGSTLPRR
MDPRMYSLMQVSTQPRR

SEQ ID NO: 99673 - protein, 17 aa, Artificial Sequence
  Description of Artificial Sequence: Synthetic peptide
  Seed: MDPRMCSLMQGSTLPRR
MDPRMYSLMQVSTSPRR

SEQ ID NO: 99674 - protein, 17 aa, Artificial Sequence
  Description of Artificial Sequence: Synthetic peptide
  Seed: MDPRMCSLMQGSTLPRR
MDPRMYSLMQVSTTPRR

SEQ ID NO: 99675 - protein, 17 aa, Artificial Sequence
  Description of Artificial Sequence: Synthetic peptide
  Seed: MDPRMCSLMQGSTLPRR
MDPRMYSLMQVSTVPRR

SEQ ID NO: 99676 - protein, 17 aa, Artificial Sequence
  Description of Artificial Sequence: Synthetic peptide
  Seed: MDPRMCSLMQGSTLPRR
MDPRMYSLNQASTIPRR

SEQ ID NO: 99677 - protein, 17 aa, Artificial Sequence
  Description of Artificial Sequence: Synthetic peptide
  Seed: MDPRMCSLMQGSTLPRR
MDPRMYSLNQASTLPRR

SEQ ID NO: 99678 - protein, 17 aa, Artificial Sequence
  Description of Artificial Sequence: Synthetic peptide
  Seed: MDPRMCSLMQGSTLPRR
MDPRMYSLNQASTVPRR

SEQ ID NO: 99679 - protein, 17 aa, Artificial Sequence
  Description of Artificial Sequence: Synthetic peptide
  Seed: MDPRMCSLMQGSTLPRR
MDPRMYSLQQASTAPRR

SEQ ID NO: 99680 - protein, 17 aa, Artificial Sequence
  Description of Artificial Sequence: Synthetic peptide
  Seed: MDPRMCSLMQGSTLPRR
MDPRMYSLQQASTIPRR

SEQ ID NO: 99681 - protein, 17 aa, Artificial Sequence
  Description of Artificial Sequence: Synthetic peptide
  Seed: MDPRMCSLMQGSTLPRR
MDPRMYSLQQASTLPRR

SEQ ID NO: 99682 - protein, 17 aa, Artificial Sequence
  Description of Artificial Sequence: Synthetic peptide
  Seed: MDPRMCSLMQGSTLPRR
MDPRMYSLQQASTMPRR

SEQ ID NO: 99683 - protein, 17 aa, Artificial Sequence
  Description of Artificial Sequence: Synthetic peptide
  Seed: MDPRMCSLMQGSTLPRR
MDPRMYSLQQASTNPRR

SEQ ID NO: 99684 - protein, 17 aa, Artificial Sequence
  Description of Artificial Sequence: Synthetic peptide
  Seed: MDPRMCSLMQGSTLPRR
MDPRMYSLQQASTSPRR

SEQ ID NO: 99685 - protein, 17 aa, Artificial Sequence
  Description of Artificial Sequence: Synthetic peptide
  Seed: MDPRMCSLMQGSTLPRR
MDPRMYSLQQASTTPRR

SEQ ID NO: 99686 - protein, 17 aa, Artificial Sequence
  Description of Artificial Sequence: Synthetic peptide
  Seed: MDPRMCSLMQGSTLPRR
MDPRMYSLQQASTVPRR

SEQ ID NO: 99687 - protein, 17 aa, Artificial Sequence
  Description of Artificial Sequence: Synthetic peptide
  Seed: MDPRMCSLMQGSTLPRR
MDPRMYSLQQGSTAPRR

SEQ ID NO: 99688 - protein, 17 aa, Artificial Sequence
  Description of Artificial Sequence: Synthetic peptide
  Seed: MDPRMCSLMQGSTLPRR
MDPRMYSLQQGSTIPRR

SEQ ID NO: 99689 - protein, 17 aa, Artificial Sequence
  Description of Artificial Sequence: Synthetic peptide
  Seed: MDPRMCSLMQGSTLPRR
MDPRMYSLQQGSTLPRR

SEQ ID NO: 99690 - protein, 17 aa, Artificial Sequence
  Description of Artificial Sequence: Synthetic peptide
  Seed: MDPRMCSLMQGSTLPRR
MDPRMYSLQQGSTMPRR

SEQ ID NO: 99691 - protein, 17 aa, Artificial Sequence
  Description of Artificial Sequence: Synthetic peptide
  Seed: MDPRMCSLMQGSTLPRR
MDPRMYSLQQGSTTPRR

SEQ ID NO: 99692 - protein, 17 aa, Artificial Sequence
  Description of Artificial Sequence: Synthetic peptide
  Seed: MDPRMCSLMQGSTLPRR
MDPRMYSLQQGSTVPRR

SEQ ID NO: 99693 - protein, 17 aa, Artificial Sequence
  Description of Artificial Sequence: Synthetic peptide
  Seed: MDPRMCSLMQGSTLPRR
MDPRMYSLQQISTAPRR

SEQ ID NO: 99694 - protein, 17 aa, Artificial Sequence
  Description of Artificial Sequence: Synthetic peptide
  Seed: MDPRMCSLMQGSTLPRR
MDPRMYSLQQNSTIPRR

SEQ ID NO: 99695 - protein, 17 aa, Artificial Sequence
  Description of Artificial Sequence: Synthetic peptide
  Seed: MDPRMCSLMQGSTLPRR
MDPRMYSLQQNSTLPRR

SEQ ID NO: 99696 - protein, 17 aa, Artificial Sequence
  Description of Artificial Sequence: Synthetic peptide
  Seed: MDPRMCSLMQGSTLPRR
MDPRMYSLQQNSTVPRR

SEQ ID NO: 99697 - protein, 17 aa, Artificial Sequence
  Description of Artificial Sequence: Synthetic peptide
  Seed: MDPRMCSLMQGSTLPRR
MDPRMYSLQQPSTAPRR

SEQ ID NO: 99698 - protein, 17 aa, Artificial Sequence
  Description of Artificial Sequence: Synthetic peptide
  Seed: MDPRMCSLMQGSTLPRR
MDPRMYSLQQPSTIPRR

SEQ ID NO: 99699 - protein, 17 aa, Artificial Sequence
  Description of Artificial Sequence: Synthetic peptide
  Seed: MDPRMCSLMQGSTLPRR
MDPRMYSLQQPSTLPRR

SEQ ID NO: 99700 - protein, 17 aa, Artificial Sequence
  Description of Artificial Sequence: Synthetic peptide
  Seed: MDPRMCSLMQGSTLPRR
MDPRMYSLQQPSTVPRR

SEQ ID NO: 99701 - protein, 17 aa, Artificial Sequence
  Description of Artificial Sequence: Synthetic peptide
  Seed: MDPRMCSLMQGSTLPRR
MDPRMYSLQQSSTAPRR

SEQ ID NO: 99702 - protein, 17 aa, Artificial Sequence
  Description of Artificial Sequence: Synthetic peptide
  Seed: MDPRMCSLMQGSTLPRR
MDPRMYSLQQSSTIPRR

SEQ ID NO: 99703 - protein, 17 aa, Artificial Sequence
  Description of Artificial Sequence: Synthetic peptide
  Seed: MDPRMCSLMQGSTLPRR
MDPRMYSLQQSSTLPRR

SEQ ID NO: 99704 - protein, 17 aa, Artificial Sequence
  Description of Artificial Sequence: Synthetic peptide
  Seed: MDPRMCSLMQGSTLPRR
MDPRMYSLQQSSTMPRR

SEQ ID NO: 99705 - protein, 17 aa, Artificial Sequence
  Description of Artificial Sequence: Synthetic peptide
  Seed: MDPRMCSLMQGSTLPRR
MDPRMYSLQQSSTTPRR

SEQ ID NO: 99706 - protein, 17 aa, Artificial Sequence
  Description of Artificial Sequence: Synthetic peptide
  Seed: MDPRMCSLMQGSTLPRR
MDPRMYSLQQSSTVPRR

SEQ ID NO: 99707 - protein, 17 aa, Artificial Sequence
  Description of Artificial Sequence: Synthetic peptide
  Seed: MDPRMCSLMQGSTLPRR
MDPRMYSLQQTSTIPRR

SEQ ID NO: 99708 - protein, 17 aa, Artificial Sequence
  Description of Artificial Sequence: Synthetic peptide
  Seed: MDPRMCSLMQGSTLPRR
MDPRMYSLQQTSTLPRR

SEQ ID NO: 99709 - protein, 17 aa, Artificial Sequence
  Description of Artificial Sequence: Synthetic peptide
  Seed: MDPRMCSLMQGSTLPRR
MDPRMYSLQQTSTVPRR

SEQ ID NO: 99710 - protein, 17 aa, Artificial Sequence
  Description of Artificial Sequence: Synthetic peptide
  Seed: MDPRMCSLMQGSTLPRR
MDPRMYSLQQVSTAPRR

SEQ ID NO: 99711 - protein, 17 aa, Artificial Sequence
  Description of Artificial Sequence: Synthetic peptide
  Seed: MDPRMCSLMQGSTLPRR
MDPRMYSLSQASTAPRR

SEQ ID NO: 99712 - protein, 17 aa, Artificial Sequence
  Description of Artificial Sequence: Synthetic peptide
  Seed: MDPRMCSLMQGSTLPRR
MDPRMYSLSQASTIPRR

SEQ ID NO: 99713 - protein, 17 aa, Artificial Sequence
  Description of Artificial Sequence: Synthetic peptide
  Seed: MDPRMCSLMQGSTLPRR
MDPRMYSLSQASTLPRR

SEQ ID NO: 99714 - protein, 17 aa, Artificial Sequence
  Description of Artificial Sequence: Synthetic peptide
  Seed: MDPRMCSLMQGSTLPRR
MDPRMYSLSQASTMPRR

SEQ ID NO: 99715 - protein, 17 aa, Artificial Sequence
  Description of Artificial Sequence: Synthetic peptide
  Seed: MDPRMCSLMQGSTLPRR
MDPRMYSLSQASTSPRR

SEQ ID NO: 99716 - protein, 17 aa, Artificial Sequence
  Description of Artificial Sequence: Synthetic peptide
  Seed: MDPRMCSLMQGSTLPRR
MDPRMYSLSQASTVPRR

SEQ ID NO: 99717 - protein, 17 aa, Artificial Sequence
  Description of Artificial Sequence: Synthetic peptide
  Seed: MDPRMCSLMQGSTLPRR
MDPRMYSLSQGSTAPRR

SEQ ID NO: 99718 - protein, 17 aa, Artificial Sequence
  Description of Artificial Sequence: Synthetic peptide
  Seed: MDPRMCSLMQGSTLPRR
MDPRMYSLSQGSTIPRR

SEQ ID NO: 99719 - protein, 17 aa, Artificial Sequence
  Description of Artificial Sequence: Synthetic peptide
  Seed: MDPRMCSLMQGSTLPRR
MDPRMYSLSQGSTLPRR

SEQ ID NO: 99720 - protein, 17 aa, Artificial Sequence
  Description of Artificial Sequence: Synthetic peptide
  Seed: MDPRMCSLMQGSTLPRR
MDPRMYSLSQGSTVPRR

SEQ ID NO: 99721 - protein, 17 aa, Artificial Sequence
  Description of Artificial Sequence: Synthetic peptide
  Seed: MDPRMCSLMQGSTLPRR
MDPRMYSLSQPSTLPRR

SEQ ID NO: 99722 - protein, 17 aa, Artificial Sequence
  Description of Artificial Sequence: Synthetic peptide
  Seed: MDPRMCSLMQGSTLPRR
MDPRMYSLSQSSTAPRR

SEQ ID NO: 99723 - protein, 17 aa, Artificial Sequence
  Description of Artificial Sequence: Synthetic peptide
  Seed: MDPRMCSLMQGSTLPRR
MDPRMYSLSQSSTIPRR

SEQ ID NO: 99724 - protein, 17 aa, Artificial Sequence
  Description of Artificial Sequence: Synthetic peptide
  Seed: MDPRMCSLMQGSTLPRR
MDPRMYSLSQSSTLPRR

SEQ ID NO: 99725 - protein, 17 aa, Artificial Sequence
  Description of Artificial Sequence: Synthetic peptide
  Seed: MDPRMCSLMQGSTLPRR
MDPRMYSLSQSSTVPRR

SEQ ID NO: 99726 - protein, 17 aa, Artificial Sequence
  Description of Artificial Sequence: Synthetic peptide
  Seed: MDPRMCSLMQGSTLPRR
MDPRMYSLSQVSTAPRR

SEQ ID NO: 99727 - protein, 17 aa, Artificial Sequence
  Description of Artificial Sequence: Synthetic peptide
  Seed: MDPRMCSLMQGSTLPRR
MDPRMYSLTQASTAPRR

SEQ ID NO: 99728 - protein, 17 aa, Artificial Sequence
  Description of Artificial Sequence: Synthetic peptide
  Seed: MDPRMCSLMQGSTLPRR
MDPRMYSLTQASTIPRR

SEQ ID NO: 99729 - protein, 17 aa, Artificial Sequence
  Description of Artificial Sequence: Synthetic peptide
  Seed: MDPRMCSLMQGSTLPRR
MDPRMYSLTQASTLPRR

SEQ ID NO: 99730 - protein, 17 aa, Artificial Sequence
  Description of Artificial Sequence: Synthetic peptide
  Seed: MDPRMCSLMQGSTLPRR
MDPRMYSLTQASTVPRR

SEQ ID NO: 99731 - protein, 17 aa, Artificial Sequence
  Description of Artificial Sequence: Synthetic peptide
  Seed: MDPRMCSLMQGSTLPRR
MDPRMYSLTQGSTLPRR

SEQ ID NO: 99732 - protein, 17 aa, Artificial Sequence
  Description of Artificial Sequence: Synthetic peptide
  Seed: MDPRMCSLMQGSTLPRR
MDPRMYSLVQASTAPRR

SEQ ID NO: 99733 - protein, 17 aa, Artificial Sequence
  Description of Artificial Sequence: Synthetic peptide
  Seed: MDPRMCSLMQGSTLPRR
MDPRMYSLVQASTGPRR

SEQ ID NO: 99734 - protein, 17 aa, Artificial Sequence
  Description of Artificial Sequence: Synthetic peptide
  Seed: MDPRMCSLMQGSTLPRR
MDPRMYSLVQASTHPRR

SEQ ID NO: 99735 - protein, 17 aa, Artificial Sequence
  Description of Artificial Sequence: Synthetic peptide
  Seed: MDPRMCSLMQGSTLPRR
MDPRMYSLVQASTIPRR

SEQ ID NO: 99736 - protein, 17 aa, Artificial Sequence
  Description of Artificial Sequence: Synthetic peptide
  Seed: MDPRMCSLMQGSTLPRR
MDPRMYSLVQASTLPRR

SEQ ID NO: 99737 - protein, 17 aa, Artificial Sequence
  Description of Artificial Sequence: Synthetic peptide
  Seed: MDPRMCSLMQGSTLPRR
MDPRMYSLVQASTMPRR

SEQ ID NO: 99738 - protein, 17 aa, Artificial Sequence
  Description of Artificial Sequence: Synthetic peptide
  Seed: MDPRMCSLMQGSTLPRR
MDPRMYSLVQASTNPRR

SEQ ID NO: 99739 - protein, 17 aa, Artificial Sequence
  Description of Artificial Sequence: Synthetic peptide
  Seed: MDPRMCSLMQGSTLPRR
MDPRMYSLVQASTSPRR

SEQ ID NO: 99740 - protein, 17 aa, Artificial Sequence
  Description of Artificial Sequence: Synthetic peptide
  Seed: MDPRMCSLMQGSTLPRR
MDPRMYSLVQASTTPRR

SEQ ID NO: 99741 - protein, 17 aa, Artificial Sequence
  Description of Artificial Sequence: Synthetic peptide
  Seed: MDPRMCSLMQGSTLPRR
MDPRMYSLVQASTVPRR

SEQ ID NO: 99742 - protein, 17 aa, Artificial Sequence
  Description of Artificial Sequence: Synthetic peptide
  Seed: MDPRMCSLMQGSTLPRR
MDPRMYSLVQGSTAPRR

SEQ ID NO: 99743 - protein, 17 aa, Artificial Sequence
  Description of Artificial Sequence: Synthetic peptide
  Seed: MDPRMCSLMQGSTLPRR
MDPRMYSLVQGSTIPRR

SEQ ID NO: 99744 - protein, 17 aa, Artificial Sequence
  Description of Artificial Sequence: Synthetic peptide
  Seed: MDPRMCSLMQGSTLPRR
MDPRMYSLVQGSTLPRR

SEQ ID NO: 99745 - protein, 17 aa, Artificial Sequence
  Description of Artificial Sequence: Synthetic peptide
  Seed: MDPRMCSLMQGSTLPRR
MDPRMYSLVQGSTMPRR

SEQ ID NO: 99746 - protein, 17 aa, Artificial Sequence
  Description of Artificial Sequence: Synthetic peptide
  Seed: MDPRMCSLMQGSTLPRR
MDPRMYSLVQGSTSPRR

SEQ ID NO: 99747 - protein, 17 aa, Artificial Sequence
  Description of Artificial Sequence: Synthetic peptide
  Seed: MDPRMCSLMQGSTLPRR
MDPRMYSLVQGSTTPRR

SEQ ID NO: 99748 - protein, 17 aa, Artificial Sequence
  Description of Artificial Sequence: Synthetic peptide
  Seed: MDPRMCSLMQGSTLPRR
MDPRMYSLVQGSTVPRR

SEQ ID NO: 99749 - protein, 17 aa, Artificial Sequence
  Description of Artificial Sequence: Synthetic peptide
  Seed: MDPRMCSLMQGSTLPRR
MDPRMYSLVQISTAPRR

SEQ ID NO: 99750 - protein, 17 aa, Artificial Sequence
  Description of Artificial Sequence: Synthetic peptide
  Seed: MDPRMCSLMQGSTLPRR
MDPRMYSLVQISTIPRR

SEQ ID NO: 99751 - protein, 17 aa, Artificial Sequence
  Description of Artificial Sequence: Synthetic peptide
  Seed: MDPRMCSLMQGSTLPRR
MDPRMYSLVQISTLPRR

SEQ ID NO: 99752 - protein, 17 aa, Artificial Sequence
  Description of Artificial Sequence: Synthetic peptide
  Seed: MDPRMCSLMQGSTLPRR
MDPRMYSLVQISTNPRR

SEQ ID NO: 99753 - protein, 17 aa, Artificial Sequence
  Description of Artificial Sequence: Synthetic peptide
  Seed: MDPRMCSLMQGSTLPRR
MDPRMYSLVQISTSPRR

SEQ ID NO: 99754 - protein, 17 aa, Artificial Sequence
  Description of Artificial Sequence: Synthetic peptide
  Seed: MDPRMCSLMQGSTLPRR
MDPRMYSLVQISTTPRR

SEQ ID NO: 99755 - protein, 17 aa, Artificial Sequence
  Description of Artificial Sequence: Synthetic peptide
  Seed: MDPRMCSLMQGSTLPRR
MDPRMYSLVQISTVPRR

SEQ ID NO: 99756 - protein, 17 aa, Artificial Sequence
  Description of Artificial Sequence: Synthetic peptide
  Seed: MDPRMCSLMQGSTLPRR
MDPRMYSLVQLSTAPRR

SEQ ID NO: 99757 - protein, 17 aa, Artificial Sequence
  Description of Artificial Sequence: Synthetic peptide
  Seed: MDPRMCSLMQGSTLPRR
MDPRMYSLVQMSTAPRR

SEQ ID NO: 99758 - protein, 17 aa, Artificial Sequence
  Description of Artificial Sequence: Synthetic peptide
  Seed: MDPRMCSLMQGSTLPRR
MDPRMYSLVQNSTAPRR

SEQ ID NO: 99759 - protein, 17 aa, Artificial Sequence
  Description of Artificial Sequence: Synthetic peptide
  Seed: MDPRMCSLMQGSTLPRR
MDPRMYSLVQNSTIPRR

SEQ ID NO: 99760 - protein, 17 aa, Artificial Sequence
  Description of Artificial Sequence: Synthetic peptide
  Seed: MDPRMCSLMQGSTLPRR
MDPRMYSLVQNSTLPRR

SEQ ID NO: 99761 - protein, 17 aa, Artificial Sequence
  Description of Artificial Sequence: Synthetic peptide
  Seed: MDPRMCSLMQGSTLPRR
MDPRMYSLVQNSTVPRR

SEQ ID NO: 99762 - protein, 17 aa, Artificial Sequence
  Description of Artificial Sequence: Synthetic peptide
  Seed: MDPRMCSLMQGSTLPRR
MDPRMYSLVQPSTAPRR

SEQ ID NO: 99763 - protein, 17 aa, Artificial Sequence
  Description of Artificial Sequence: Synthetic peptide
  Seed: MDPRMCSLMQGSTLPRR
MDPRMYSLVQPSTIPRR

SEQ ID NO: 99764 - protein, 17 aa, Artificial Sequence
  Description of Artificial Sequence: Synthetic peptide
  Seed: MDPRMCSLMQGSTLPRR
MDPRMYSLVQPSTLPRR

SEQ ID NO: 99765 - protein, 17 aa, Artificial Sequence
  Description of Artificial Sequence: Synthetic peptide
  Seed: MDPRMCSLMQGSTLPRR
MDPRMYSLVQPSTMPRR

SEQ ID NO: 99766 - protein, 17 aa, Artificial Sequence
  Description of Artificial Sequence: Synthetic peptide
  Seed: MDPRMCSLMQGSTLPRR
MDPRMYSLVQPSTNPRR

SEQ ID NO: 99767 - protein, 17 aa, Artificial Sequence
  Description of Artificial Sequence: Synthetic peptide
  Seed: MDPRMCSLMQGSTLPRR
MDPRMYSLVQPSTSPRR

SEQ ID NO: 99768 - protein, 17 aa, Artificial Sequence
  Description of Artificial Sequence: Synthetic peptide
  Seed: MDPRMCSLMQGSTLPRR
MDPRMYSLVQPSTTPRR

SEQ ID NO: 99769 - protein, 17 aa, Artificial Sequence
  Description of Artificial Sequence: Synthetic peptide
  Seed: MDPRMCSLMQGSTLPRR
MDPRMYSLVQPSTVPRR

SEQ ID NO: 99770 - protein, 17 aa, Artificial Sequence
  Description of Artificial Sequence: Synthetic peptide
  Seed: MDPRMCSLMQGSTLPRR
MDPRMYSLVQSSTAPRR

SEQ ID NO: 99771 - protein, 17 aa, Artificial Sequence
  Description of Artificial Sequence: Synthetic peptide
  Seed: MDPRMCSLMQGSTLPRR
MDPRMYSLVQSSTIPRR

SEQ ID NO: 99772 - protein, 17 aa, Artificial Sequence
  Description of Artificial Sequence: Synthetic peptide
  Seed: MDPRMCSLMQGSTLPRR
MDPRMYSLVQSSTLPRR

SEQ ID NO: 99773 - protein, 17 aa, Artificial Sequence
  Description of Artificial Sequence: Synthetic peptide
  Seed: MDPRMCSLMQGSTLPRR
MDPRMYSLVQSSTMPRR

SEQ ID NO: 99774 - protein, 17 aa, Artificial Sequence
  Description of Artificial Sequence: Synthetic peptide
  Seed: MDPRMCSLMQGSTLPRR
MDPRMYSLVQSSTNPRR

SEQ ID NO: 99775 - protein, 17 aa, Artificial Sequence
  Description of Artificial Sequence: Synthetic peptide
  Seed: MDPRMCSLMQGSTLPRR
MDPRMYSLVQSSTSPRR

SEQ ID NO: 99776 - protein, 17 aa, Artificial Sequence
  Description of Artificial Sequence: Synthetic peptide
  Seed: MDPRMCSLMQGSTLPRR
MDPRMYSLVQSSTTPRR

SEQ ID NO: 99777 - protein, 17 aa, Artificial Sequence
  Description of Artificial Sequence: Synthetic peptide
  Seed: MDPRMCSLMQGSTLPRR
MDPRMYSLVQSSTVPRR

SEQ ID NO: 99778 - protein, 17 aa, Artificial Sequence
  Description of Artificial Sequence: Synthetic peptide
  Seed: MDPRMCSLMQGSTLPRR
MDPRMYSLVQTSTAPRR

SEQ ID NO: 99779 - protein, 17 aa, Artificial Sequence
  Description of Artificial Sequence: Synthetic peptide
  Seed: MDPRMCSLMQGSTLPRR
MDPRMYSLVQTSTIPRR

SEQ ID NO: 99780 - protein, 17 aa, Artificial Sequence
  Description of Artificial Sequence: Synthetic peptide
  Seed: MDPRMCSLMQGSTLPRR
MDPRMYSLVQTSTLPRR

SEQ ID NO: 99781 - protein, 17 aa, Artificial Sequence
  Description of Artificial Sequence: Synthetic peptide
  Seed: MDPRMCSLMQGSTLPRR
MDPRMYSLVQTSTMPRR

SEQ ID NO: 99782 - protein, 17 aa, Artificial Sequence
  Description of Artificial Sequence: Synthetic peptide
  Seed: MDPRMCSLMQGSTLPRR
MDPRMYSLVQTSTNPRR

SEQ ID NO: 99783 - protein, 17 aa, Artificial Sequence
  Description of Artificial Sequence: Synthetic peptide
  Seed: MDPRMCSLMQGSTLPRR
MDPRMYSLVQTSTSPRR

SEQ ID NO: 99784 - protein, 17 aa, Artificial Sequence
  Description of Artificial Sequence: Synthetic peptide
  Seed: MDPRMCSLMQGSTLPRR
MDPRMYSLVQTSTTPRR

SEQ ID NO: 99785 - protein, 17 aa, Artificial Sequence
  Description of Artificial Sequence: Synthetic peptide
  Seed: MDPRMCSLMQGSTLPRR
MDPRMYSLVQTSTVPRR

SEQ ID NO: 99786 - protein, 17 aa, Artificial Sequence
  Description of Artificial Sequence: Synthetic peptide
  Seed: MDPRMCSLMQGSTLPRR
MDPRMYSLVQVSTAPRR

SEQ ID NO: 99787 - protein, 17 aa, Artificial Sequence
  Description of Artificial Sequence: Synthetic peptide
  Seed: MDPRMCSLMQGSTLPRR
MDPRMYSLVQVSTIPRR

SEQ ID NO: 99788 - protein, 17 aa, Artificial Sequence
  Description of Artificial Sequence: Synthetic peptide
  Seed: MDPRMCSLMQGSTLPRR
MDPRMYSLVQVSTLPRR

SEQ ID NO: 99789 - protein, 17 aa, Artificial Sequence
  Description of Artificial Sequence: Synthetic peptide
  Seed: MDPRMCSLMQGSTLPRR
MDPRMYSLVQVSTMPRR

SEQ ID NO: 99790 - protein, 17 aa, Artificial Sequence
  Description of Artificial Sequence: Synthetic peptide
  Seed: MDPRMCSLMQGSTLPRR
MDPRMYSLVQVSTNPRR

SEQ ID NO: 99791 - protein, 17 aa, Artificial Sequence
  Description of Artificial Sequence: Synthetic peptide
  Seed: MDPRMCSLMQGSTLPRR
MDPRMYSLVQVSTSPRR

SEQ ID NO: 99792 - protein, 17 aa, Artificial Sequence
  Description of Artificial Sequence: Synthetic peptide
  Seed: MDPRMCSLMQGSTLPRR
MDPRMYSLVQVSTTPRR

SEQ ID NO: 99793 - protein, 17 aa, Artificial Sequence
  Description of Artificial Sequence: Synthetic peptide
  Seed: MDPRMCSLMQGSTLPRR
MDPRMYSLVQVSTVPRR

SEQ ID NO: 99794 - protein, 18 aa, Artificial Sequence
  Description of Artificial Sequence: Synthetic peptide
  Seed: MDPRMCSLMQGSTLPRRS
MDPRMFSLAQASTAPRRS

SEQ ID NO: 99795 - protein, 18 aa, Artificial Sequence
  Description of Artificial Sequence: Synthetic peptide
  Seed: MDPRMCSLMQGSTLPRRS
MDPRMFSLAQASTIPRRS

SEQ ID NO: 99796 - protein, 18 aa, Artificial Sequence
  Description of Artificial Sequence: Synthetic peptide
  Seed: MDPRMCSLMQGSTLPRRS
MDPRMFSLAQASTLPRRS

SEQ ID NO: 99797 - protein, 18 aa, Artificial Sequence
  Description of Artificial Sequence: Synthetic peptide
  Seed: MDPRMCSLMQGSTLPRRS
MDPRMFSLAQASTVPRRS

SEQ ID NO: 99798 - protein, 18 aa, Artificial Sequence
  Description of Artificial Sequence: Synthetic peptide
  Seed: MDPRMCSLMQGSTLPRRS
MDPRMFSLAQGSTLPRRS

SEQ ID NO: 99799 - protein, 18 aa, Artificial Sequence
  Description of Artificial Sequence: Synthetic peptide
  Seed: MDPRMCSLMQGSTLPRRS
MDPRMFSLAQSSTLPRRS

SEQ ID NO: 99800 - protein, 18 aa, Artificial Sequence
  Description of Artificial Sequence: Synthetic peptide
  Seed: MDPRMCSLMQGSTLPRRS
MDPRMFSLIQASTAPRRS

SEQ ID NO: 99801 - protein, 18 aa, Artificial Sequence
  Description of Artificial Sequence: Synthetic peptide
  Seed: MDPRMCSLMQGSTLPRRS
MDPRMFSLIQASTIPRRS

SEQ ID NO: 99802 - protein, 18 aa, Artificial Sequence
  Description of Artificial Sequence: Synthetic peptide
  Seed: MDPRMCSLMQGSTLPRRS
MDPRMFSLIQASTLPRRS

SEQ ID NO: 99803 - protein, 18 aa, Artificial Sequence
  Description of Artificial Sequence: Synthetic peptide
  Seed: MDPRMCSLMQGSTLPRRS
MDPRMFSLIQASTVPRRS

SEQ ID NO: 99804 - protein, 18 aa, Artificial Sequence
  Description of Artificial Sequence: Synthetic peptide
  Seed: MDPRMCSLMQGSTLPRRS
MDPRMFSLIQGSTAPRRS

SEQ ID NO: 99805 - protein, 18 aa, Artificial Sequence
  Description of Artificial Sequence: Synthetic peptide
  Seed: MDPRMCSLMQGSTLPRRS
MDPRMFSLIQGSTIPRRS

SEQ ID NO: 99806 - protein, 18 aa, Artificial Sequence
  Description of Artificial Sequence: Synthetic peptide
  Seed: MDPRMCSLMQGSTLPRRS
MDPRMFSLIQGSTLPRRS

SEQ ID NO: 99807 - protein, 18 aa, Artificial Sequence
  Description of Artificial Sequence: Synthetic peptide
  Seed: MDPRMCSLMQGSTLPRRS
MDPRMFSLIQGSTVPRRS

SEQ ID NO: 99808 - protein, 18 aa, Artificial Sequence
  Description of Artificial Sequence: Synthetic peptide
  Seed: MDPRMCSLMQGSTLPRRS
MDPRMFSLIQPSTLPRRS

SEQ ID NO: 99809 - protein, 18 aa, Artificial Sequence
  Description of Artificial Sequence: Synthetic peptide
  Seed: MDPRMCSLMQGSTLPRRS
MDPRMFSLIQPSTVPRRS

SEQ ID NO: 99810 - protein, 18 aa, Artificial Sequence
  Description of Artificial Sequence: Synthetic peptide
  Seed: MDPRMCSLMQGSTLPRRS
MDPRMFSLIQSSTAPRRS

SEQ ID NO: 99811 - protein, 18 aa, Artificial Sequence
  Description of Artificial Sequence: Synthetic peptide
  Seed: MDPRMCSLMQGSTLPRRS
MDPRMFSLIQSSTIPRRS

SEQ ID NO: 99812 - protein, 18 aa, Artificial Sequence
  Description of Artificial Sequence: Synthetic peptide
  Seed: MDPRMCSLMQGSTLPRRS
MDPRMFSLIQSSTLPRRS

SEQ ID NO: 99813 - protein, 18 aa, Artificial Sequence
  Description of Artificial Sequence: Synthetic peptide
  Seed: MDPRMCSLMQGSTLPRRS
MDPRMFSLIQSSTVPRRS

SEQ ID NO: 99814 - protein, 18 aa, Artificial Sequence
  Description of Artificial Sequence: Synthetic peptide
  Seed: MDPRMCSLMQGSTLPRRS
MDPRMFSLLQASTAPRRS

SEQ ID NO: 99815 - protein, 18 aa, Artificial Sequence
  Description of Artificial Sequence: Synthetic peptide
  Seed: MDPRMCSLMQGSTLPRRS
MDPRMFSLLQASTIPRRS

SEQ ID NO: 99816 - protein, 18 aa, Artificial Sequence
  Description of Artificial Sequence: Synthetic peptide
  Seed: MDPRMCSLMQGSTLPRRS
MDPRMFSLLQASTLPRRS

SEQ ID NO: 99817 - protein, 18 aa, Artificial Sequence
  Description of Artificial Sequence: Synthetic peptide
  Seed: MDPRMCSLMQGSTLPRRS
MDPRMFSLLQASTMPRRS

SEQ ID NO: 99818 - protein, 18 aa, Artificial Sequence
  Description of Artificial Sequence: Synthetic peptide
  Seed: MDPRMCSLMQGSTLPRRS
MDPRMFSLLQASTSPRRS

SEQ ID NO: 99819 - protein, 18 aa, Artificial Sequence
  Description of Artificial Sequence: Synthetic peptide
  Seed: MDPRMCSLMQGSTLPRRS
MDPRMFSLLQASTTPRRS

SEQ ID NO: 99820 - protein, 18 aa, Artificial Sequence
  Description of Artificial Sequence: Synthetic peptide
  Seed: MDPRMCSLMQGSTLPRRS
MDPRMFSLLQASTVPRRS

SEQ ID NO: 99821 - protein, 18 aa, Artificial Sequence
  Description of Artificial Sequence: Synthetic peptide
  Seed: MDPRMCSLMQGSTLPRRS
MDPRMFSLLQGSTAPRRS

SEQ ID NO: 99822 - protein, 18 aa, Artificial Sequence
  Description of Artificial Sequence: Synthetic peptide
  Seed: MDPRMCSLMQGSTLPRRS
MDPRMFSLLQGSTIPRRS

SEQ ID NO: 99823 - protein, 18 aa, Artificial Sequence
  Description of Artificial Sequence: Synthetic peptide
  Seed: MDPRMCSLMQGSTLPRRS
MDPRMFSLLQGSTLPRRS

SEQ ID NO: 99824 - protein, 18 aa, Artificial Sequence
  Description of Artificial Sequence: Synthetic peptide
  Seed: MDPRMCSLMQGSTLPRRS
MDPRMFSLLQGSTMPRRS

SEQ ID NO: 99825 - protein, 18 aa, Artificial Sequence
  Description of Artificial Sequence: Synthetic peptide
  Seed: MDPRMCSLMQGSTLPRRS
MDPRMFSLLQGSTSPRRS

SEQ ID NO: 99826 - protein, 18 aa, Artificial Sequence
  Description of Artificial Sequence: Synthetic peptide
  Seed: MDPRMCSLMQGSTLPRRS
MDPRMFSLLQGSTTPRRS

SEQ ID NO: 99827 - protein, 18 aa, Artificial Sequence
  Description of Artificial Sequence: Synthetic peptide
  Seed: MDPRMCSLMQGSTLPRRS
MDPRMFSLLQGSTVPRRS

SEQ ID NO: 99828 - protein, 18 aa, Artificial Sequence
  Description of Artificial Sequence: Synthetic peptide
  Seed: MDPRMCSLMQGSTLPRRS
MDPRMFSLLQNSTAPRRS

SEQ ID NO: 99829 - protein, 18 aa, Artificial Sequence
  Description of Artificial Sequence: Synthetic peptide
  Seed: MDPRMCSLMQGSTLPRRS
MDPRMFSLLQNSTIPRRS

SEQ ID NO: 99830 - protein, 18 aa, Artificial Sequence
  Description of Artificial Sequence: Synthetic peptide
  Seed: MDPRMCSLMQGSTLPRRS
MDPRMFSLLQNSTLPRRS

SEQ ID NO: 99831 - protein, 18 aa, Artificial Sequence
  Description of Artificial Sequence: Synthetic peptide
  Seed: MDPRMCSLMQGSTLPRRS
MDPRMFSLLQNSTVPRRS

SEQ ID NO: 99832 - protein, 18 aa, Artificial Sequence
  Description of Artificial Sequence: Synthetic peptide
  Seed: MDPRMCSLMQGSTLPRRS
MDPRMFSLLQPSTAPRRS

SEQ ID NO: 99833 - protein, 18 aa, Artificial Sequence
  Description of Artificial Sequence: Synthetic peptide
  Seed: MDPRMCSLMQGSTLPRRS
MDPRMFSLLQPSTIPRRS

SEQ ID NO: 99834 - protein, 18 aa, Artificial Sequence
  Description of Artificial Sequence: Synthetic peptide
  Seed: MDPRMCSLMQGSTLPRRS
MDPRMFSLLQPSTLPRRS

SEQ ID NO: 99835 - protein, 18 aa, Artificial Sequence
  Description of Artificial Sequence: Synthetic peptide
  Seed: MDPRMCSLMQGSTLPRRS
MDPRMFSLLQPSTMPRRS

SEQ ID NO: 99836 - protein, 18 aa, Artificial Sequence
  Description of Artificial Sequence: Synthetic peptide
  Seed: MDPRMCSLMQGSTLPRRS
MDPRMFSLLQPSTVPRRS

SEQ ID NO: 99837 - protein, 18 aa, Artificial Sequence
  Description of Artificial Sequence: Synthetic peptide
  Seed: MDPRMCSLMQGSTLPRRS
MDPRMFSLLQSSTAPRRS

SEQ ID NO: 99838 - protein, 18 aa, Artificial Sequence
  Description of Artificial Sequence: Synthetic peptide
  Seed: MDPRMCSLMQGSTLPRRS
MDPRMFSLLQSSTIPRRS

SEQ ID NO: 99839 - protein, 18 aa, Artificial Sequence
  Description of Artificial Sequence: Synthetic peptide
  Seed: MDPRMCSLMQGSTLPRRS
MDPRMFSLLQSSTLPRRS

SEQ ID NO: 99840 - protein, 18 aa, Artificial Sequence
  Description of Artificial Sequence: Synthetic peptide
  Seed: MDPRMCSLMQGSTLPRRS
MDPRMFSLLQSSTMPRRS

SEQ ID NO: 99841 - protein, 18 aa, Artificial Sequence
  Description of Artificial Sequence: Synthetic peptide
  Seed: MDPRMCSLMQGSTLPRRS
MDPRMFSLLQSSTSPRRS

SEQ ID NO: 99842 - protein, 18 aa, Artificial Sequence
  Description of Artificial Sequence: Synthetic peptide
  Seed: MDPRMCSLMQGSTLPRRS
MDPRMFSLLQSSTTPRRS

SEQ ID NO: 99843 - protein, 18 aa, Artificial Sequence
  Description of Artificial Sequence: Synthetic peptide
  Seed: MDPRMCSLMQGSTLPRRS
MDPRMFSLLQSSTVPRRS

SEQ ID NO: 99844 - protein, 18 aa, Artificial Sequence
  Description of Artificial Sequence: Synthetic peptide
  Seed: MDPRMCSLMQGSTLPRRS
MDPRMFSLLQTSTAPRRS

SEQ ID NO: 99845 - protein, 18 aa, Artificial Sequence
  Description of Artificial Sequence: Synthetic peptide
  Seed: MDPRMCSLMQGSTLPRRS
MDPRMFSLLQTSTIPRRS

SEQ ID NO: 99846 - protein, 18 aa, Artificial Sequence
  Description of Artificial Sequence: Synthetic peptide
  Seed: MDPRMCSLMQGSTLPRRS
MDPRMFSLLQTSTLPRRS

SEQ ID NO: 99847 - protein, 18 aa, Artificial Sequence
  Description of Artificial Sequence: Synthetic peptide
  Seed: MDPRMCSLMQGSTLPRRS
MDPRMFSLLQTSTVPRRS

SEQ ID NO: 99848 - protein, 18 aa, Artificial Sequence
  Description of Artificial Sequence: Synthetic peptide
  Seed: MDPRMCSLMQGSTLPRRS
MDPRMFSLMQASTAPRRS

SEQ ID NO: 99849 - protein, 18 aa, Artificial Sequence
  Description of Artificial Sequence: Synthetic peptide
  Seed: MDPRMCSLMQGSTLPRRS
MDPRMFSLMQASTIPRRS

SEQ ID NO: 99850 - protein, 18 aa, Artificial Sequence
  Description of Artificial Sequence: Synthetic peptide
  Seed: MDPRMCSLMQGSTLPRRS
MDPRMFSLMQASTLPRRS

SEQ ID NO: 99851 - protein, 18 aa, Artificial Sequence
  Description of Artificial Sequence: Synthetic peptide
  Seed: MDPRMCSLMQGSTLPRRS
MDPRMFSLMQASTMPRRS

SEQ ID NO: 99852 - protein, 18 aa, Artificial Sequence
  Description of Artificial Sequence: Synthetic peptide
  Seed: MDPRMCSLMQGSTLPRRS
MDPRMFSLMQASTSPRRS

SEQ ID NO: 99853 - protein, 18 aa, Artificial Sequence
  Description of Artificial Sequence: Synthetic peptide
  Seed: MDPRMCSLMQGSTLPRRS
MDPRMFSLMQASTTPRRS

SEQ ID NO: 99854 - protein, 18 aa, Artificial Sequence
  Description of Artificial Sequence: Synthetic peptide
  Seed: MDPRMCSLMQGSTLPRRS
MDPRMFSLMQASTVPRRS

SEQ ID NO: 99855 - protein, 18 aa, Artificial Sequence
  Description of Artificial Sequence: Synthetic peptide
  Seed: MDPRMCSLMQGSTLPRRS
MDPRMFSLMQGSTAPRRS

SEQ ID NO: 99856 - protein, 18 aa, Artificial Sequence
  Description of Artificial Sequence: Synthetic peptide
  Seed: MDPRMCSLMQGSTLPRRS
MDPRMFSLMQGSTIPRRS

SEQ ID NO: 99857 - protein, 18 aa, Artificial Sequence
  Description of Artificial Sequence: Synthetic peptide
  Seed: MDPRMCSLMQGSTLPRRS
MDPRMFSLMQGSTLPRRS

SEQ ID NO: 99858 - protein, 18 aa, Artificial Sequence
  Description of Artificial Sequence: Synthetic peptide
  Seed: MDPRMCSLMQGSTLPRRS
MDPRMFSLMQGSTMPRRS

SEQ ID NO: 99859 - protein, 18 aa, Artificial Sequence
  Description of Artificial Sequence: Synthetic peptide
  Seed: MDPRMCSLMQGSTLPRRS
MDPRMFSLMQGSTSPRRS

SEQ ID NO: 99860 - protein, 18 aa, Artificial Sequence
  Description of Artificial Sequence: Synthetic peptide
  Seed: MDPRMCSLMQGSTLPRRS
MDPRMFSLMQGSTTPRRS

SEQ ID NO: 99861 - protein, 18 aa, Artificial Sequence
  Description of Artificial Sequence: Synthetic peptide
  Seed: MDPRMCSLMQGSTLPRRS
MDPRMFSLMQGSTVPRRS

SEQ ID NO: 99862 - protein, 18 aa, Artificial Sequence
  Description of Artificial Sequence: Synthetic peptide
  Seed: MDPRMCSLMQGSTLPRRS
MDPRMFSLMQNSTIPRRS

SEQ ID NO: 99863 - protein, 18 aa, Artificial Sequence
  Description of Artificial Sequence: Synthetic peptide
  Seed: MDPRMCSLMQGSTLPRRS
MDPRMFSLMQNSTLPRRS

SEQ ID NO: 99864 - protein, 18 aa, Artificial Sequence
  Description of Artificial Sequence: Synthetic peptide
  Seed: MDPRMCSLMQGSTLPRRS
MDPRMFSLMQNSTVPRRS

SEQ ID NO: 99865 - protein, 18 aa, Artificial Sequence
  Description of Artificial Sequence: Synthetic peptide
  Seed: MDPRMCSLMQGSTLPRRS
MDPRMFSLMQPSTAPRRS

SEQ ID NO: 99866 - protein, 18 aa, Artificial Sequence
  Description of Artificial Sequence: Synthetic peptide
  Seed: MDPRMCSLMQGSTLPRRS
MDPRMFSLMQPSTIPRRS

SEQ ID NO: 99867 - protein, 18 aa, Artificial Sequence
  Description of Artificial Sequence: Synthetic peptide
  Seed: MDPRMCSLMQGSTLPRRS
MDPRMFSLMQPSTLPRRS

SEQ ID NO: 99868 - protein, 18 aa, Artificial Sequence
  Description of Artificial Sequence: Synthetic peptide
  Seed: MDPRMCSLMQGSTLPRRS
MDPRMFSLMQPSTVPRRS

SEQ ID NO: 99869 - protein, 18 aa, Artificial Sequence
  Description of Artificial Sequence: Synthetic peptide
  Seed: MDPRMCSLMQGSTLPRRS
MDPRMFSLMQSSTAPRRS

SEQ ID NO: 99870 - protein, 18 aa, Artificial Sequence
  Description of Artificial Sequence: Synthetic peptide
  Seed: MDPRMCSLMQGSTLPRRS
MDPRMFSLMQSSTIPRRS

SEQ ID NO: 99871 - protein, 18 aa, Artificial Sequence
  Description of Artificial Sequence: Synthetic peptide
  Seed: MDPRMCSLMQGSTLPRRS
MDPRMFSLMQSSTLPRRS

SEQ ID NO: 99872 - protein, 18 aa, Artificial Sequence
  Description of Artificial Sequence: Synthetic peptide
  Seed: MDPRMCSLMQGSTLPRRS
MDPRMFSLMQSSTMPRRS

SEQ ID NO: 99873 - protein, 18 aa, Artificial Sequence
  Description of Artificial Sequence: Synthetic peptide
  Seed: MDPRMCSLMQGSTLPRRS
MDPRMFSLMQSSTTPRRS

SEQ ID NO: 99874 - protein, 18 aa, Artificial Sequence
  Description of Artificial Sequence: Synthetic peptide
  Seed: MDPRMCSLMQGSTLPRRS
MDPRMFSLMQSSTVPRRS

SEQ ID NO: 99875 - protein, 18 aa, Artificial Sequence
  Description of Artificial Sequence: Synthetic peptide
  Seed: MDPRMCSLMQGSTLPRRS
MDPRMFSLMQTSTAPRRS

SEQ ID NO: 99876 - protein, 18 aa, Artificial Sequence
  Description of Artificial Sequence: Synthetic peptide
  Seed: MDPRMCSLMQGSTLPRRS
MDPRMFSLMQTSTIPRRS

SEQ ID NO: 99877 - protein, 18 aa, Artificial Sequence
  Description of Artificial Sequence: Synthetic peptide
  Seed: MDPRMCSLMQGSTLPRRS
MDPRMFSLMQTSTLPRRS

SEQ ID NO: 99878 - protein, 18 aa, Artificial Sequence
  Description of Artificial Sequence: Synthetic peptide
  Seed: MDPRMCSLMQGSTLPRRS
MDPRMFSLMQTSTVPRRS

SEQ ID NO: 99879 - protein, 18 aa, Artificial Sequence
  Description of Artificial Sequence: Synthetic peptide
  Seed: MDPRMCSLMQGSTLPRRS
MDPRMFSLQQASTLPRRS

SEQ ID NO: 99880 - protein, 18 aa, Artificial Sequence
  Description of Artificial Sequence: Synthetic peptide
  Seed: MDPRMCSLMQGSTLPRRS
MDPRMFSLQQASTVPRRS

SEQ ID NO: 99881 - protein, 18 aa, Artificial Sequence
  Description of Artificial Sequence: Synthetic peptide
  Seed: MDPRMCSLMQGSTLPRRS
MDPRMFSLVQASTLPRRS

SEQ ID NO: 99882 - protein, 18 aa, Artificial Sequence
  Description of Artificial Sequence: Synthetic peptide
  Seed: MDPRMCSLMQGSTLPRRS
MDPRMFSLVQASTVPRRS

SEQ ID NO: 99883 - protein, 18 aa, Artificial Sequence
  Description of Artificial Sequence: Synthetic peptide
  Seed: MDPRMCSLMQGSTLPRRS
MDPRMFSLVQGSTLPRRS

SEQ ID NO: 99884 - protein, 18 aa, Artificial Sequence
  Description of Artificial Sequence: Synthetic peptide
  Seed: MDPRMCSLMQGSTLPRRS
MDPRMISLLQASTLPRRS

SEQ ID NO: 99885 - protein, 18 aa, Artificial Sequence
  Description of Artificial Sequence: Synthetic peptide
  Seed: MDPRMCSLMQGSTLPRRS
MDPRMISLLQGSTLPRRS

SEQ ID NO: 99886 - protein, 18 aa, Artificial Sequence
  Description of Artificial Sequence: Synthetic peptide
  Seed: MDPRMCSLMQGSTLPRRS
MDPRMISLMQASTLPRRS

SEQ ID NO: 99887 - protein, 18 aa, Artificial Sequence
  Description of Artificial Sequence: Synthetic peptide
  Seed: MDPRMCSLMQGSTLPRRS
MDPRMISLMQASTVPRRS

SEQ ID NO: 99888 - protein, 18 aa, Artificial Sequence
  Description of Artificial Sequence: Synthetic peptide
  Seed: MDPRMCSLMQGSTLPRRS
MDPRMISLMQGSTLPRRS

SEQ ID NO: 99889 - protein, 18 aa, Artificial Sequence
  Description of Artificial Sequence: Synthetic peptide
  Seed: MDPRMCSLMQGSTLPRRS
MDPRMLSLMQASTLPRRS

SEQ ID NO: 99890 - protein, 18 aa, Artificial Sequence
  Description of Artificial Sequence: Synthetic peptide
  Seed: MDPRMCSLMQGSTLPRRS
MDPRMWSLLQASTAPRRS

SEQ ID NO: 99891 - protein, 18 aa, Artificial Sequence
  Description of Artificial Sequence: Synthetic peptide
  Seed: MDPRMCSLMQGSTLPRRS
MDPRMWSLLQASTLPRRS

SEQ ID NO: 99892 - protein, 18 aa, Artificial Sequence
  Description of Artificial Sequence: Synthetic peptide
  Seed: MDPRMCSLMQGSTLPRRS
MDPRMWSLLQASTVPRRS

SEQ ID NO: 99893 - protein, 18 aa, Artificial Sequence
  Description of Artificial Sequence: Synthetic peptide
  Seed: MDPRMCSLMQGSTLPRRS
MDPRMWSLLQGSTAPRRS

SEQ ID NO: 99894 - protein, 18 aa, Artificial Sequence
  Description of Artificial Sequence: Synthetic peptide
  Seed: MDPRMCSLMQGSTLPRRS
MDPRMWSLLQGSTIPRRS

SEQ ID NO: 99895 - protein, 18 aa, Artificial Sequence
  Description of Artificial Sequence: Synthetic peptide
  Seed: MDPRMCSLMQGSTLPRRS
MDPRMWSLLQGSTLPRRS

SEQ ID NO: 99896 - protein, 18 aa, Artificial Sequence
  Description of Artificial Sequence: Synthetic peptide
  Seed: MDPRMCSLMQGSTLPRRS
MDPRMWSLLQGSTVPRRS

SEQ ID NO: 99897 - protein, 18 aa, Artificial Sequence
  Description of Artificial Sequence: Synthetic peptide
  Seed: MDPRMCSLMQGSTLPRRS
MDPRMWSLLQSSTLPRRS

SEQ ID NO: 99898 - protein, 18 aa, Artificial Sequence
  Description of Artificial Sequence: Synthetic peptide
  Seed: MDPRMCSLMQGSTLPRRS
MDPRMWSLLQSSTVPRRS

SEQ ID NO: 99899 - protein, 18 aa, Artificial Sequence
  Description of Artificial Sequence: Synthetic peptide
  Seed: MDPRMCSLMQGSTLPRRS
MDPRMWSLMQASTAPRRS

SEQ ID NO: 99900 - protein, 18 aa, Artificial Sequence
  Description of Artificial Sequence: Synthetic peptide
  Seed: MDPRMCSLMQGSTLPRRS
MDPRMWSLMQASTIPRRS

SEQ ID NO: 99901 - protein, 18 aa, Artificial Sequence
  Description of Artificial Sequence: Synthetic peptide
  Seed: MDPRMCSLMQGSTLPRRS
MDPRMWSLMQASTLPRRS

SEQ ID NO: 99902 - protein, 18 aa, Artificial Sequence
  Description of Artificial Sequence: Synthetic peptide
  Seed: MDPRMCSLMQGSTLPRRS
MDPRMWSLMQASTVPRRS

SEQ ID NO: 99903 - protein, 18 aa, Artificial Sequence
  Description of Artificial Sequence: Synthetic peptide
  Seed: MDPRMCSLMQGSTLPRRS
MDPRMWSLMQGSTAPRRS

SEQ ID NO: 99904 - protein, 18 aa, Artificial Sequence
  Description of Artificial Sequence: Synthetic peptide
  Seed: MDPRMCSLMQGSTLPRRS
MDPRMWSLMQGSTIPRRS

SEQ ID NO: 99905 - protein, 18 aa, Artificial Sequence
  Description of Artificial Sequence: Synthetic peptide
  Seed: MDPRMCSLMQGSTLPRRS
MDPRMWSLMQGSTLPRRS

SEQ ID NO: 99906 - protein, 18 aa, Artificial Sequence
  Description of Artificial Sequence: Synthetic peptide
  Seed: MDPRMCSLMQGSTLPRRS
MDPRMWSLMQGSTVPRRS

SEQ ID NO: 99907 - protein, 18 aa, Artificial Sequence
  Description of Artificial Sequence: Synthetic peptide
  Seed: MDPRMCSLMQGSTLPRRS
MDPRMWSLMQSSTLPRRS

SEQ ID NO: 99908 - protein, 18 aa, Artificial Sequence
  Description of Artificial Sequence: Synthetic peptide
  Seed: MDPRMCSLMQGSTLPRRS
MDPRMWSLMQSSTVPRRS

SEQ ID NO: 99909 - protein, 18 aa, Artificial Sequence
  Description of Artificial Sequence: Synthetic peptide
  Seed: MDPRMCSLMQGSTLPRRS
MDPRMYSLIQASTAPRRS

SEQ ID NO: 99910 - protein, 18 aa, Artificial Sequence
  Description of Artificial Sequence: Synthetic peptide
  Seed: MDPRMCSLMQGSTLPRRS
MDPRMYSLIQASTIPRRS

SEQ ID NO: 99911 - protein, 18 aa, Artificial Sequence
  Description of Artificial Sequence: Synthetic peptide
  Seed: MDPRMCSLMQGSTLPRRS
MDPRMYSLIQASTLPRRS

SEQ ID NO: 99912 - protein, 18 aa, Artificial Sequence
  Description of Artificial Sequence: Synthetic peptide
  Seed: MDPRMCSLMQGSTLPRRS
MDPRMYSLIQASTVPRRS

SEQ ID NO: 99913 - protein, 18 aa, Artificial Sequence
  Description of Artificial Sequence: Synthetic peptide
  Seed: MDPRMCSLMQGSTLPRRS
MDPRMYSLIQGSTLPRRS

SEQ ID NO: 99914 - protein, 18 aa, Artificial Sequence
  Description of Artificial Sequence: Synthetic peptide
  Seed: MDPRMCSLMQGSTLPRRS
MDPRMYSLIQGSTVPRRS

SEQ ID NO: 99915 - protein, 18 aa, Artificial Sequence
  Description of Artificial Sequence: Synthetic peptide
  Seed: MDPRMCSLMQGSTLPRRS
MDPRMYSLIQSSTLPRRS

SEQ ID NO: 99916 - protein, 18 aa, Artificial Sequence
  Description of Artificial Sequence: Synthetic peptide
  Seed: MDPRMCSLMQGSTLPRRS
MDPRMYSLLQASTAPRRS

SEQ ID NO: 99917 - protein, 18 aa, Artificial Sequence
  Description of Artificial Sequence: Synthetic peptide
  Seed: MDPRMCSLMQGSTLPRRS
MDPRMYSLLQASTIPRRS

SEQ ID NO: 99918 - protein, 18 aa, Artificial Sequence
  Description of Artificial Sequence: Synthetic peptide
  Seed: MDPRMCSLMQGSTLPRRS
MDPRMYSLLQASTLPRRS

SEQ ID NO: 99919 - protein, 18 aa, Artificial Sequence
  Description of Artificial Sequence: Synthetic peptide
  Seed: MDPRMCSLMQGSTLPRRS
MDPRMYSLLQASTMPRRS

SEQ ID NO: 99920 - protein, 18 aa, Artificial Sequence
  Description of Artificial Sequence: Synthetic peptide
  Seed: MDPRMCSLMQGSTLPRRS
MDPRMYSLLQASTTPRRS

SEQ ID NO: 99921 - protein, 18 aa, Artificial Sequence
  Description of Artificial Sequence: Synthetic peptide
  Seed: MDPRMCSLMQGSTLPRRS
MDPRMYSLLQASTVPRRS

SEQ ID NO: 99922 - protein, 18 aa, Artificial Sequence
  Description of Artificial Sequence: Synthetic peptide
  Seed: MDPRMCSLMQGSTLPRRS
MDPRMYSLLQGSTAPRRS

SEQ ID NO: 99923 - protein, 18 aa, Artificial Sequence
  Description of Artificial Sequence: Synthetic peptide
  Seed: MDPRMCSLMQGSTLPRRS
MDPRMYSLLQGSTIPRRS

SEQ ID NO: 99924 - protein, 18 aa, Artificial Sequence
  Description of Artificial Sequence: Synthetic peptide
  Seed: MDPRMCSLMQGSTLPRRS
MDPRMYSLLQGSTLPRRS

SEQ ID NO: 99925 - protein, 18 aa, Artificial Sequence
  Description of Artificial Sequence: Synthetic peptide
  Seed: MDPRMCSLMQGSTLPRRS
MDPRMYSLLQGSTMPRRS

SEQ ID NO: 99926 - protein, 18 aa, Artificial Sequence
  Description of Artificial Sequence: Synthetic peptide
  Seed: MDPRMCSLMQGSTLPRRS
MDPRMYSLLQGSTVPRRS

SEQ ID NO: 99927 - protein, 18 aa, Artificial Sequence
  Description of Artificial Sequence: Synthetic peptide
  Seed: MDPRMCSLMQGSTLPRRS
MDPRMYSLLQPSTIPRRS

SEQ ID NO: 99928 - protein, 18 aa, Artificial Sequence
  Description of Artificial Sequence: Synthetic peptide
  Seed: MDPRMCSLMQGSTLPRRS
MDPRMYSLLQPSTLPRRS

SEQ ID NO: 99929 - protein, 18 aa, Artificial Sequence
  Description of Artificial Sequence: Synthetic peptide
  Seed: MDPRMCSLMQGSTLPRRS
MDPRMYSLLQPSTVPRRS

SEQ ID NO: 99930 - protein, 18 aa, Artificial Sequence
  Description of Artificial Sequence: Synthetic peptide
  Seed: MDPRMCSLMQGSTLPRRS
MDPRMYSLLQSSTAPRRS

SEQ ID NO: 99931 - protein, 18 aa, Artificial Sequence
  Description of Artificial Sequence: Synthetic peptide
  Seed: MDPRMCSLMQGSTLPRRS
MDPRMYSLLQSSTIPRRS

SEQ ID NO: 99932 - protein, 18 aa, Artificial Sequence
  Description of Artificial Sequence: Synthetic peptide
  Seed: MDPRMCSLMQGSTLPRRS
MDPRMYSLLQSSTLPRRS

SEQ ID NO: 99933 - protein, 18 aa, Artificial Sequence
  Description of Artificial Sequence: Synthetic peptide
  Seed: MDPRMCSLMQGSTLPRRS
MDPRMYSLLQSSTVPRRS

SEQ ID NO: 99934 - protein, 18 aa, Artificial Sequence
  Description of Artificial Sequence: Synthetic peptide
  Seed: MDPRMCSLMQGSTLPRRS
MDPRMYSLLQTSTLPRRS

SEQ ID NO: 99935 - protein, 18 aa, Artificial Sequence
  Description of Artificial Sequence: Synthetic peptide
  Seed: MDPRMCSLMQGSTLPRRS
MDPRMYSLMQASTAPRRS

SEQ ID NO: 99936 - protein, 18 aa, Artificial Sequence
  Description of Artificial Sequence: Synthetic peptide
  Seed: MDPRMCSLMQGSTLPRRS
MDPRMYSLMQASTIPRRS

SEQ ID NO: 99937 - protein, 18 aa, Artificial Sequence
  Description of Artificial Sequence: Synthetic peptide
  Seed: MDPRMCSLMQGSTLPRRS
MDPRMYSLMQASTLPRRS

SEQ ID NO: 99938 - protein, 18 aa, Artificial Sequence
  Description of Artificial Sequence: Synthetic peptide
  Seed: MDPRMCSLMQGSTLPRRS
MDPRMYSLMQASTMPRRS

SEQ ID NO: 99939 - protein, 18 aa, Artificial Sequence
  Description of Artificial Sequence: Synthetic peptide
  Seed: MDPRMCSLMQGSTLPRRS
MDPRMYSLMQASTVPRRS

SEQ ID NO: 99940 - protein, 18 aa, Artificial Sequence
  Description of Artificial Sequence: Synthetic peptide
  Seed: MDPRMCSLMQGSTLPRRS
MDPRMYSLMQGSTAPRRS

SEQ ID NO: 99941 - protein, 18 aa, Artificial Sequence
  Description of Artificial Sequence: Synthetic peptide
  Seed: MDPRMCSLMQGSTLPRRS
MDPRMYSLMQGSTIPRRS

SEQ ID NO: 99942 - protein, 18 aa, Artificial Sequence
  Description of Artificial Sequence: Synthetic peptide
  Seed: MDPRMCSLMQGSTLPRRS
MDPRMYSLMQGSTLPRRS

SEQ ID NO: 99943 - protein, 18 aa, Artificial Sequence
  Description of Artificial Sequence: Synthetic peptide
  Seed: MDPRMCSLMQGSTLPRRS
MDPRMYSLMQGSTMPRRS

SEQ ID NO: 99944 - protein, 18 aa, Artificial Sequence
  Description of Artificial Sequence: Synthetic peptide
  Seed: MDPRMCSLMQGSTLPRRS
MDPRMYSLMQGSTVPRRS

SEQ ID NO: 99945 - protein, 18 aa, Artificial Sequence
  Description of Artificial Sequence: Synthetic peptide
  Seed: MDPRMCSLMQGSTLPRRS
MDPRMYSLMQPSTIPRRS

SEQ ID NO: 99946 - protein, 18 aa, Artificial Sequence
  Description of Artificial Sequence: Synthetic peptide
  Seed: MDPRMCSLMQGSTLPRRS
MDPRMYSLMQPSTLPRRS

SEQ ID NO: 99947 - protein, 18 aa, Artificial Sequence
  Description of Artificial Sequence: Synthetic peptide
  Seed: MDPRMCSLMQGSTLPRRS
MDPRMYSLMQPSTVPRRS

SEQ ID NO: 99948 - protein, 18 aa, Artificial Sequence
  Description of Artificial Sequence: Synthetic peptide
  Seed: MDPRMCSLMQGSTLPRRS
MDPRMYSLMQSSTAPRRS

SEQ ID NO: 99949 - protein, 18 aa, Artificial Sequence
  Description of Artificial Sequence: Synthetic peptide
  Seed: MDPRMCSLMQGSTLPRRS
MDPRMYSLMQSSTIPRRS

SEQ ID NO: 99950 - protein, 18 aa, Artificial Sequence
  Description of Artificial Sequence: Synthetic peptide
  Seed: MDPRMCSLMQGSTLPRRS
MDPRMYSLMQSSTLPRRS

SEQ ID NO: 99951 - protein, 18 aa, Artificial Sequence
  Description of Artificial Sequence: Synthetic peptide
  Seed: MDPRMCSLMQGSTLPRRS
MDPRMYSLMQSSTVPRRS

SEQ ID NO: 99952 - protein, 19 aa, Artificial Sequence
  Description of Artificial Sequence: Synthetic peptide
  Seed: MDPRMCSLMQGSTLPRRSG
MDPRMFSLAQASTAPRRSG

SEQ ID NO: 99953 - protein, 19 aa, Artificial Sequence
  Description of Artificial Sequence: Synthetic peptide
  Seed: MDPRMCSLMQGSTLPRRSG
MDPRMFSLAQASTFPRRSG

SEQ ID NO: 99954 - protein, 19 aa, Artificial Sequence
  Description of Artificial Sequence: Synthetic peptide
  Seed: MDPRMCSLMQGSTLPRRSG
MDPRMFSLAQASTGPRRSG

SEQ ID NO: 99955 - protein, 19 aa, Artificial Sequence
  Description of Artificial Sequence: Synthetic peptide
  Seed: MDPRMCSLMQGSTLPRRSG
MDPRMFSLAQASTHPRRSG

SEQ ID NO: 99956 - protein, 19 aa, Artificial Sequence
  Description of Artificial Sequence: Synthetic peptide
  Seed: MDPRMCSLMQGSTLPRRSG
MDPRMFSLAQASTIPRRSG

SEQ ID NO: 99957 - protein, 19 aa, Artificial Sequence
  Description of Artificial Sequence: Synthetic peptide
  Seed: MDPRMCSLMQGSTLPRRSG
MDPRMFSLAQASTLPRRSG

SEQ ID NO: 99958 - protein, 19 aa, Artificial Sequence
  Description of Artificial Sequence: Synthetic peptide
  Seed: MDPRMCSLMQGSTLPRRSG
MDPRMFSLAQASTMPRRSG

SEQ ID NO: 99959 - protein, 19 aa, Artificial Sequence
  Description of Artificial Sequence: Synthetic peptide
  Seed: MDPRMCSLMQGSTLPRRSG
MDPRMFSLAQASTNPRRSG

SEQ ID NO: 99960 - protein, 19 aa, Artificial Sequence
  Description of Artificial Sequence: Synthetic peptide
  Seed: MDPRMCSLMQGSTLPRRSG
MDPRMFSLAQASTQPRRSG

SEQ ID NO: 99961 - protein, 19 aa, Artificial Sequence
  Description of Artificial Sequence: Synthetic peptide
  Seed: MDPRMCSLMQGSTLPRRSG
MDPRMFSLAQASTSPRRSG

SEQ ID NO: 99962 - protein, 19 aa, Artificial Sequence
  Description of Artificial Sequence: Synthetic peptide
  Seed: MDPRMCSLMQGSTLPRRSG
MDPRMFSLAQASTTPRRSG

SEQ ID NO: 99963 - protein, 19 aa, Artificial Sequence
  Description of Artificial Sequence: Synthetic peptide
  Seed: MDPRMCSLMQGSTLPRRSG
MDPRMFSLAQASTVPRRSG

SEQ ID NO: 99964 - protein, 19 aa, Artificial Sequence
  Description of Artificial Sequence: Synthetic peptide
  Seed: MDPRMCSLMQGSTLPRRSG
MDPRMFSLAQGSTAPRRSG

SEQ ID NO: 99965 - protein, 19 aa, Artificial Sequence
  Description of Artificial Sequence: Synthetic peptide
  Seed: MDPRMCSLMQGSTLPRRSG
MDPRMFSLAQGSTIPRRSG

SEQ ID NO: 99966 - protein, 19 aa, Artificial Sequence
  Description of Artificial Sequence: Synthetic peptide
  Seed: MDPRMCSLMQGSTLPRRSG
MDPRMFSLAQGSTLPRRSG

SEQ ID NO: 99967 - protein, 19 aa, Artificial Sequence
  Description of Artificial Sequence: Synthetic peptide
  Seed: MDPRMCSLMQGSTLPRRSG
MDPRMFSLAQGSTMPRRSG

SEQ ID NO: 99968 - protein, 19 aa, Artificial Sequence
  Description of Artificial Sequence: Synthetic peptide
  Seed: MDPRMCSLMQGSTLPRRSG
MDPRMFSLAQGSTNPRRSG

SEQ ID NO: 99969 - protein, 19 aa, Artificial Sequence
  Description of Artificial Sequence: Synthetic peptide
  Seed: MDPRMCSLMQGSTLPRRSG
MDPRMFSLAQGSTSPRRSG

SEQ ID NO: 99970 - protein, 19 aa, Artificial Sequence
  Description of Artificial Sequence: Synthetic peptide
  Seed: MDPRMCSLMQGSTLPRRSG
MDPRMFSLAQGSTTPRRSG

SEQ ID NO: 99971 - protein, 19 aa, Artificial Sequence
  Description of Artificial Sequence: Synthetic peptide
  Seed: MDPRMCSLMQGSTLPRRSG
MDPRMFSLAQGSTVPRRSG

SEQ ID NO: 99972 - protein, 19 aa, Artificial Sequence
  Description of Artificial Sequence: Synthetic peptide
  Seed: MDPRMCSLMQGSTLPRRSG
MDPRMFSLAQISTAPRRSG

SEQ ID NO: 99973 - protein, 19 aa, Artificial Sequence
  Description of Artificial Sequence: Synthetic peptide
  Seed: MDPRMCSLMQGSTLPRRSG
MDPRMFSLAQISTIPRRSG

SEQ ID NO: 99974 - protein, 19 aa, Artificial Sequence
  Description of Artificial Sequence: Synthetic peptide
  Seed: MDPRMCSLMQGSTLPRRSG
MDPRMFSLAQISTLPRRSG

SEQ ID NO: 99975 - protein, 19 aa, Artificial Sequence
  Description of Artificial Sequence: Synthetic peptide
  Seed: MDPRMCSLMQGSTLPRRSG
MDPRMFSLAQISTMPRRSG

SEQ ID NO: 99976 - protein, 19 aa, Artificial Sequence
  Description of Artificial Sequence: Synthetic peptide
  Seed: MDPRMCSLMQGSTLPRRSG
MDPRMFSLAQISTNPRRSG

SEQ ID NO: 99977 - protein, 19 aa, Artificial Sequence
  Description of Artificial Sequence: Synthetic peptide
  Seed: MDPRMCSLMQGSTLPRRSG
MDPRMFSLAQISTSPRRSG

SEQ ID NO: 99978 - protein, 19 aa, Artificial Sequence
  Description of Artificial Sequence: Synthetic peptide
  Seed: MDPRMCSLMQGSTLPRRSG
MDPRMFSLAQISTTPRRSG

SEQ ID NO: 99979 - protein, 19 aa, Artificial Sequence
  Description of Artificial Sequence: Synthetic peptide
  Seed: MDPRMCSLMQGSTLPRRSG
MDPRMFSLAQISTVPRRSG

SEQ ID NO: 99980 - protein, 19 aa, Artificial Sequence
  Description of Artificial Sequence: Synthetic peptide
  Seed: MDPRMCSLMQGSTLPRRSG
MDPRMFSLAQLSTAPRRSG

SEQ ID NO: 99981 - protein, 19 aa, Artificial Sequence
  Description of Artificial Sequence: Synthetic peptide
  Seed: MDPRMCSLMQGSTLPRRSG
MDPRMFSLAQMSTAPRRSG

SEQ ID NO: 99982 - protein, 19 aa, Artificial Sequence
  Description of Artificial Sequence: Synthetic peptide
  Seed: MDPRMCSLMQGSTLPRRSG
MDPRMFSLAQNSTAPRRSG

SEQ ID NO: 99983 - protein, 19 aa, Artificial Sequence
  Description of Artificial Sequence: Synthetic peptide
  Seed: MDPRMCSLMQGSTLPRRSG
MDPRMFSLAQNSTIPRRSG

SEQ ID NO: 99984 - protein, 19 aa, Artificial Sequence
  Description of Artificial Sequence: Synthetic peptide
  Seed: MDPRMCSLMQGSTLPRRSG
MDPRMFSLAQNSTLPRRSG

SEQ ID NO: 99985 - protein, 19 aa, Artificial Sequence
  Description of Artificial Sequence: Synthetic peptide
  Seed: MDPRMCSLMQGSTLPRRSG
MDPRMFSLAQNSTNPRRSG

SEQ ID NO: 99986 - protein, 19 aa, Artificial Sequence
  Description of Artificial Sequence: Synthetic peptide
  Seed: MDPRMCSLMQGSTLPRRSG
MDPRMFSLAQNSTSPRRSG

SEQ ID NO: 99987 - protein, 19 aa, Artificial Sequence
  Description of Artificial Sequence: Synthetic peptide
  Seed: MDPRMCSLMQGSTLPRRSG
MDPRMFSLAQNSTVPRRSG

SEQ ID NO: 99988 - protein, 19 aa, Artificial Sequence
  Description of Artificial Sequence: Synthetic peptide
  Seed: MDPRMCSLMQGSTLPRRSG
MDPRMFSLAQPSTAPRRSG

SEQ ID NO: 99989 - protein, 19 aa, Artificial Sequence
  Description of Artificial Sequence: Synthetic peptide
  Seed: MDPRMCSLMQGSTLPRRSG
MDPRMFSLAQPSTIPRRSG

SEQ ID NO: 99990 - protein, 19 aa, Artificial Sequence
  Description of Artificial Sequence: Synthetic peptide
  Seed: MDPRMCSLMQGSTLPRRSG
MDPRMFSLAQPSTLPRRSG

SEQ ID NO: 99991 - protein, 19 aa, Artificial Sequence
  Description of Artificial Sequence: Synthetic peptide
  Seed: MDPRMCSLMQGSTLPRRSG
MDPRMFSLAQPSTMPRRSG

SEQ ID NO: 99992 - protein, 19 aa, Artificial Sequence
  Description of Artificial Sequence: Synthetic peptide
  Seed: MDPRMCSLMQGSTLPRRSG
MDPRMFSLAQPSTNPRRSG

SEQ ID NO: 99993 - protein, 19 aa, Artificial Sequence
  Description of Artificial Sequence: Synthetic peptide
  Seed: MDPRMCSLMQGSTLPRRSG
MDPRMFSLAQPSTQPRRSG

SEQ ID NO: 99994 - protein, 19 aa, Artificial Sequence
  Description of Artificial Sequence: Synthetic peptide
  Seed: MDPRMCSLMQGSTLPRRSG
MDPRMFSLAQPSTSPRRSG

SEQ ID NO: 99995 - protein, 19 aa, Artificial Sequence
  Description of Artificial Sequence: Synthetic peptide
  Seed: MDPRMCSLMQGSTLPRRSG
MDPRMFSLAQPSTTPRRSG

SEQ ID NO: 99996 - protein, 19 aa, Artificial Sequence
  Description of Artificial Sequence: Synthetic peptide
  Seed: MDPRMCSLMQGSTLPRRSG
MDPRMFSLAQPSTVPRRSG

SEQ ID NO: 99997 - protein, 19 aa, Artificial Sequence
  Description of Artificial Sequence: Synthetic peptide
  Seed: MDPRMCSLMQGSTLPRRSG
MDPRMFSLAQSSTAPRRSG

SEQ ID NO: 99998 - protein, 19 aa, Artificial Sequence
  Description of Artificial Sequence: Synthetic peptide
  Seed: MDPRMCSLMQGSTLPRRSG
MDPRMFSLAQSSTIPRRSG

SEQ ID NO: 99999 - protein, 19 aa, Artificial Sequence
  Description of Artificial Sequence: Synthetic peptide
  Seed: MDPRMCSLMQGSTLPRRSG
MDPRMFSLAQSSTLPRRSG

SEQ ID NO: 100000 - protein, 19 aa, Artificial Sequence
  Description of Artificial Sequence: Synthetic peptide
  Seed: MDPRMCSLMQGSTLPRRSG
MDPRMFSLAQSSTMPRRSG

SEQ ID NO: 100001 - protein, 19 aa, Artificial Sequence
  Description of Artificial Sequence: Synthetic peptide
  Seed: MDPRMCSLMQGSTLPRRSG
MDPRMFSLAQSSTNPRRSG

SEQ ID NO: 100002 - protein, 19 aa, Artificial Sequence
  Description of Artificial Sequence: Synthetic peptide
  Seed: MDPRMCSLMQGSTLPRRSG
MDPRMFSLAQSSTSPRRSG

SEQ ID NO: 100003 - protein, 19 aa, Artificial Sequence
  Description of Artificial Sequence: Synthetic peptide
  Seed: MDPRMCSLMQGSTLPRRSG
MDPRMFSLAQSSTTPRRSG

SEQ ID NO: 100004 - protein, 19 aa, Artificial Sequence
  Description of Artificial Sequence: Synthetic peptide
  Seed: MDPRMCSLMQGSTLPRRSG
MDPRMFSLAQSSTVPRRSG

SEQ ID NO: 100005 - protein, 19 aa, Artificial Sequence
  Description of Artificial Sequence: Synthetic peptide
  Seed: MDPRMCSLMQGSTLPRRSG
MDPRMFSLAQTSTAPRRSG

SEQ ID NO: 100006 - protein, 19 aa, Artificial Sequence
  Description of Artificial Sequence: Synthetic peptide
  Seed: MDPRMCSLMQGSTLPRRSG
MDPRMFSLAQTSTIPRRSG

SEQ ID NO: 100007 - protein, 19 aa, Artificial Sequence
  Description of Artificial Sequence: Synthetic peptide
  Seed: MDPRMCSLMQGSTLPRRSG
MDPRMFSLAQTSTLPRRSG

SEQ ID NO: 100008 - protein, 19 aa, Artificial Sequence
  Description of Artificial Sequence: Synthetic peptide
  Seed: MDPRMCSLMQGSTLPRRSG
MDPRMFSLAQTSTMPRRSG

SEQ ID NO: 100009 - protein, 19 aa, Artificial Sequence
  Description of Artificial Sequence: Synthetic peptide
  Seed: MDPRMCSLMQGSTLPRRSG
MDPRMFSLAQTSTNPRRSG

SEQ ID NO: 100010 - protein, 19 aa, Artificial Sequence
  Description of Artificial Sequence: Synthetic peptide
  Seed: MDPRMCSLMQGSTLPRRSG
MDPRMFSLAQTSTSPRRSG

SEQ ID NO: 100011 - protein, 19 aa, Artificial Sequence
  Description of Artificial Sequence: Synthetic peptide
  Seed: MDPRMCSLMQGSTLPRRSG
MDPRMFSLAQTSTTPRRSG

SEQ ID NO: 100012 - protein, 19 aa, Artificial Sequence
  Description of Artificial Sequence: Synthetic peptide
  Seed: MDPRMCSLMQGSTLPRRSG
MDPRMFSLAQTSTVPRRSG

SEQ ID NO: 100013 - protein, 19 aa, Artificial Sequence
  Description of Artificial Sequence: Synthetic peptide
  Seed: MDPRMCSLMQGSTLPRRSG
MDPRMFSLAQVSTAPRRSG

SEQ ID NO: 100014 - protein, 19 aa, Artificial Sequence
  Description of Artificial Sequence: Synthetic peptide
  Seed: MDPRMCSLMQGSTLPRRSG
MDPRMFSLAQVSTGPRRSG

SEQ ID NO: 100015 - protein, 19 aa, Artificial Sequence
  Description of Artificial Sequence: Synthetic peptide
  Seed: MDPRMCSLMQGSTLPRRSG
MDPRMFSLAQVSTHPRRSG

SEQ ID NO: 100016 - protein, 19 aa, Artificial Sequence
  Description of Artificial Sequence: Synthetic peptide
  Seed: MDPRMCSLMQGSTLPRRSG
MDPRMFSLAQVSTIPRRSG

SEQ ID NO: 100017 - protein, 19 aa, Artificial Sequence
  Description of Artificial Sequence: Synthetic peptide
  Seed: MDPRMCSLMQGSTLPRRSG
MDPRMFSLAQVSTLPRRSG

SEQ ID NO: 100018 - protein, 19 aa, Artificial Sequence
  Description of Artificial Sequence: Synthetic peptide
  Seed: MDPRMCSLMQGSTLPRRSG
MDPRMFSLAQVSTMPRRSG

SEQ ID NO: 100019 - protein, 19 aa, Artificial Sequence
  Description of Artificial Sequence: Synthetic peptide
  Seed: MDPRMCSLMQGSTLPRRSG
MDPRMFSLAQVSTNPRRSG

SEQ ID NO: 100020 - protein, 19 aa, Artificial Sequence
  Description of Artificial Sequence: Synthetic peptide
  Seed: MDPRMCSLMQGSTLPRRSG
MDPRMFSLAQVSTSPRRSG

SEQ ID NO: 100021 - protein, 19 aa, Artificial Sequence
  Description of Artificial Sequence: Synthetic peptide
  Seed: MDPRMCSLMQGSTLPRRSG
MDPRMFSLAQVSTTPRRSG

SEQ ID NO: 100022 - protein, 19 aa, Artificial Sequence
  Description of Artificial Sequence: Synthetic peptide
  Seed: MDPRMCSLMQGSTLPRRSG
MDPRMFSLAQVSTVPRRSG

SEQ ID NO: 100023 - protein, 19 aa, Artificial Sequence
  Description of Artificial Sequence: Synthetic peptide
  Seed: MDPRMCSLMQGSTLPRRSG
MDPRMFSLCQASTIPRRSG

SEQ ID NO: 100024 - protein, 19 aa, Artificial Sequence
  Description of Artificial Sequence: Synthetic peptide
  Seed: MDPRMCSLMQGSTLPRRSG
MDPRMFSLCQASTLPRRSG

SEQ ID NO: 100025 - protein, 19 aa, Artificial Sequence
  Description of Artificial Sequence: Synthetic peptide
  Seed: MDPRMCSLMQGSTLPRRSG
MDPRMFSLCQASTVPRRSG

SEQ ID NO: 100026 - protein, 19 aa, Artificial Sequence
  Description of Artificial Sequence: Synthetic peptide
  Seed: MDPRMCSLMQGSTLPRRSG
MDPRMFSLEQASTAPRRSG

SEQ ID NO: 100027 - protein, 19 aa, Artificial Sequence
  Description of Artificial Sequence: Synthetic peptide
  Seed: MDPRMCSLMQGSTLPRRSG
MDPRMFSLEQASTIPRRSG

SEQ ID NO: 100028 - protein, 19 aa, Artificial Sequence
  Description of Artificial Sequence: Synthetic peptide
  Seed: MDPRMCSLMQGSTLPRRSG
MDPRMFSLEQASTLPRRSG

SEQ ID NO: 100029 - protein, 19 aa, Artificial Sequence
  Description of Artificial Sequence: Synthetic peptide
  Seed: MDPRMCSLMQGSTLPRRSG
MDPRMFSLEQASTVPRRSG

SEQ ID NO: 100030 - protein, 19 aa, Artificial Sequence
  Description of Artificial Sequence: Synthetic peptide
  Seed: MDPRMCSLMQGSTLPRRSG
MDPRMFSLEQGSTAPRRSG

SEQ ID NO: 100031 - protein, 19 aa, Artificial Sequence
  Description of Artificial Sequence: Synthetic peptide
  Seed: MDPRMCSLMQGSTLPRRSG
MDPRMFSLEQGSTIPRRSG

SEQ ID NO: 100032 - protein, 19 aa, Artificial Sequence
  Description of Artificial Sequence: Synthetic peptide
  Seed: MDPRMCSLMQGSTLPRRSG
MDPRMFSLEQGSTLPRRSG

SEQ ID NO: 100033 - protein, 19 aa, Artificial Sequence
  Description of Artificial Sequence: Synthetic peptide
  Seed: MDPRMCSLMQGSTLPRRSG
MDPRMFSLEQGSTVPRRSG

SEQ ID NO: 100034 - protein, 19 aa, Artificial Sequence
  Description of Artificial Sequence: Synthetic peptide
  Seed: MDPRMCSLMQGSTLPRRSG
MDPRMFSLEQSSTIPRRSG

SEQ ID NO: 100035 - protein, 19 aa, Artificial Sequence
  Description of Artificial Sequence: Synthetic peptide
  Seed: MDPRMCSLMQGSTLPRRSG
MDPRMFSLEQSSTLPRRSG

SEQ ID NO: 100036 - protein, 19 aa, Artificial Sequence
  Description of Artificial Sequence: Synthetic peptide
  Seed: MDPRMCSLMQGSTLPRRSG
MDPRMFSLEQSSTVPRRSG

SEQ ID NO: 100037 - protein, 19 aa, Artificial Sequence
  Description of Artificial Sequence: Synthetic peptide
  Seed: MDPRMCSLMQGSTLPRRSG
MDPRMFSLFQASTAPRRSG

SEQ ID NO: 100038 - protein, 19 aa, Artificial Sequence
  Description of Artificial Sequence: Synthetic peptide
  Seed: MDPRMCSLMQGSTLPRRSG
MDPRMFSLFQASTIPRRSG

SEQ ID NO: 100039 - protein, 19 aa, Artificial Sequence
  Description of Artificial Sequence: Synthetic peptide
  Seed: MDPRMCSLMQGSTLPRRSG
MDPRMFSLFQASTLPRRSG

SEQ ID NO: 100040 - protein, 19 aa, Artificial Sequence
  Description of Artificial Sequence: Synthetic peptide
  Seed: MDPRMCSLMQGSTLPRRSG
MDPRMFSLFQASTNPRRSG

SEQ ID NO: 100041 - protein, 19 aa, Artificial Sequence
  Description of Artificial Sequence: Synthetic peptide
  Seed: MDPRMCSLMQGSTLPRRSG
MDPRMFSLFQASTSPRRSG

SEQ ID NO: 100042 - protein, 19 aa, Artificial Sequence
  Description of Artificial Sequence: Synthetic peptide
  Seed: MDPRMCSLMQGSTLPRRSG
MDPRMFSLFQASTTPRRSG

SEQ ID NO: 100043 - protein, 19 aa, Artificial Sequence
  Description of Artificial Sequence: Synthetic peptide
  Seed: MDPRMCSLMQGSTLPRRSG
MDPRMFSLFQASTVPRRSG

SEQ ID NO: 100044 - protein, 19 aa, Artificial Sequence
  Description of Artificial Sequence: Synthetic peptide
  Seed: MDPRMCSLMQGSTLPRRSG
MDPRMFSLFQGSTAPRRSG

SEQ ID NO: 100045 - protein, 19 aa, Artificial Sequence
  Description of Artificial Sequence: Synthetic peptide
  Seed: MDPRMCSLMQGSTLPRRSG
MDPRMFSLFQGSTIPRRSG

SEQ ID NO: 100046 - protein, 19 aa, Artificial Sequence
  Description of Artificial Sequence: Synthetic peptide
  Seed: MDPRMCSLMQGSTLPRRSG
MDPRMFSLFQGSTLPRRSG

SEQ ID NO: 100047 - protein, 19 aa, Artificial Sequence
  Description of Artificial Sequence: Synthetic peptide
  Seed: MDPRMCSLMQGSTLPRRSG
MDPRMFSLFQGSTVPRRSG

SEQ ID NO: 100048 - protein, 19 aa, Artificial Sequence
  Description of Artificial Sequence: Synthetic peptide
  Seed: MDPRMCSLMQGSTLPRRSG
MDPRMFSLFQPSTAPRRSG

SEQ ID NO: 100049 - protein, 19 aa, Artificial Sequence
  Description of Artificial Sequence: Synthetic peptide
  Seed: MDPRMCSLMQGSTLPRRSG
MDPRMFSLFQPSTNPRRSG

SEQ ID NO: 100050 - protein, 19 aa, Artificial Sequence
  Description of Artificial Sequence: Synthetic peptide
  Seed: MDPRMCSLMQGSTLPRRSG
MDPRMFSLFQPSTSPRRSG

SEQ ID NO: 100051 - protein, 19 aa, Artificial Sequence
  Description of Artificial Sequence: Synthetic peptide
  Seed: MDPRMCSLMQGSTLPRRSG
MDPRMFSLFQSSTAPRRSG

SEQ ID NO: 100052 - protein, 19 aa, Artificial Sequence
  Description of Artificial Sequence: Synthetic peptide
  Seed: MDPRMCSLMQGSTLPRRSG
MDPRMFSLFQSSTVPRRSG

SEQ ID NO: 100053 - protein, 19 aa, Artificial Sequence
  Description of Artificial Sequence: Synthetic peptide
  Seed: MDPRMCSLMQGSTLPRRSG
MDPRMFSLFQTSTAPRRSG

SEQ ID NO: 100054 - protein, 19 aa, Artificial Sequence
  Description of Artificial Sequence: Synthetic peptide
  Seed: MDPRMCSLMQGSTLPRRSG
MDPRMFSLFQVSTAPRRSG

SEQ ID NO: 100055 - protein, 19 aa, Artificial Sequence
  Description of Artificial Sequence: Synthetic peptide
  Seed: MDPRMCSLMQGSTLPRRSG
MDPRMFSLFQVSTNPRRSG

SEQ ID NO: 100056 - protein, 19 aa, Artificial Sequence
  Description of Artificial Sequence: Synthetic peptide
  Seed: MDPRMCSLMQGSTLPRRSG
MDPRMFSLFQVSTSPRRSG

SEQ ID NO: 100057 - protein, 19 aa, Artificial Sequence
  Description of Artificial Sequence: Synthetic peptide
  Seed: MDPRMCSLMQGSTLPRRSG
MDPRMFSLGQASTAPRRSG

SEQ ID NO: 100058 - protein, 19 aa, Artificial Sequence
  Description of Artificial Sequence: Synthetic peptide
  Seed: MDPRMCSLMQGSTLPRRSG
MDPRMFSLGQASTIPRRSG

SEQ ID NO: 100059 - protein, 19 aa, Artificial Sequence
  Description of Artificial Sequence: Synthetic peptide
  Seed: MDPRMCSLMQGSTLPRRSG
MDPRMFSLGQASTLPRRSG

SEQ ID NO: 100060 - protein, 19 aa, Artificial Sequence
  Description of Artificial Sequence: Synthetic peptide
  Seed: MDPRMCSLMQGSTLPRRSG
MDPRMFSLGQASTVPRRSG

SEQ ID NO: 100061 - protein, 19 aa, Artificial Sequence
  Description of Artificial Sequence: Synthetic peptide
  Seed: MDPRMCSLMQGSTLPRRSG
MDPRMFSLGQGSTLPRRSG

SEQ ID NO: 100062 - protein, 19 aa, Artificial Sequence
  Description of Artificial Sequence: Synthetic peptide
  Seed: MDPRMCSLMQGSTLPRRSG
MDPRMFSLGQSSTIPRRSG

SEQ ID NO: 100063 - protein, 19 aa, Artificial Sequence
  Description of Artificial Sequence: Synthetic peptide
  Seed: MDPRMCSLMQGSTLPRRSG
MDPRMFSLGQSSTLPRRSG

SEQ ID NO: 100064 - protein, 19 aa, Artificial Sequence
  Description of Artificial Sequence: Synthetic peptide
  Seed: MDPRMCSLMQGSTLPRRSG
MDPRMFSLGQSSTVPRRSG

SEQ ID NO: 100065 - protein, 19 aa, Artificial Sequence
  Description of Artificial Sequence: Synthetic peptide
  Seed: MDPRMCSLMQGSTLPRRSG
MDPRMFSLHQASTLPRRSG

SEQ ID NO: 100066 - protein, 19 aa, Artificial Sequence
  Description of Artificial Sequence: Synthetic peptide
  Seed: MDPRMCSLMQGSTLPRRSG
MDPRMFSLIQASTAPRRSG

SEQ ID NO: 100067 - protein, 19 aa, Artificial Sequence
  Description of Artificial Sequence: Synthetic peptide
  Seed: MDPRMCSLMQGSTLPRRSG
MDPRMFSLIQASTCPRRSG

SEQ ID NO: 100068 - protein, 19 aa, Artificial Sequence
  Description of Artificial Sequence: Synthetic peptide
  Seed: MDPRMCSLMQGSTLPRRSG
MDPRMFSLIQASTDPRRSG

SEQ ID NO: 100069 - protein, 19 aa, Artificial Sequence
  Description of Artificial Sequence: Synthetic peptide
  Seed: MDPRMCSLMQGSTLPRRSG
MDPRMFSLIQASTEPRRSG

SEQ ID NO: 100070 - protein, 19 aa, Artificial Sequence
  Description of Artificial Sequence: Synthetic peptide
  Seed: MDPRMCSLMQGSTLPRRSG
MDPRMFSLIQASTFPRRSG

SEQ ID NO: 100071 - protein, 19 aa, Artificial Sequence
  Description of Artificial Sequence: Synthetic peptide
  Seed: MDPRMCSLMQGSTLPRRSG
MDPRMFSLIQASTGPRRSG

SEQ ID NO: 100072 - protein, 19 aa, Artificial Sequence
  Description of Artificial Sequence: Synthetic peptide
  Seed: MDPRMCSLMQGSTLPRRSG
MDPRMFSLIQASTHPRRSG

SEQ ID NO: 100073 - protein, 19 aa, Artificial Sequence
  Description of Artificial Sequence: Synthetic peptide
  Seed: MDPRMCSLMQGSTLPRRSG
MDPRMFSLIQASTIPRRSG

SEQ ID NO: 100074 - protein, 19 aa, Artificial Sequence
  Description of Artificial Sequence: Synthetic peptide
  Seed: MDPRMCSLMQGSTLPRRSG
MDPRMFSLIQASTLPRRSG

SEQ ID NO: 100075 - protein, 19 aa, Artificial Sequence
  Description of Artificial Sequence: Synthetic peptide
  Seed: MDPRMCSLMQGSTLPRRSG
MDPRMFSLIQASTMPRRSG

SEQ ID NO: 100076 - protein, 19 aa, Artificial Sequence
  Description of Artificial Sequence: Synthetic peptide
  Seed: MDPRMCSLMQGSTLPRRSG
MDPRMFSLIQASTNPRRSG

SEQ ID NO: 100077 - protein, 19 aa, Artificial Sequence
  Description of Artificial Sequence: Synthetic peptide
  Seed: MDPRMCSLMQGSTLPRRSG
MDPRMFSLIQASTPPRRSG

SEQ ID NO: 100078 - protein, 19 aa, Artificial Sequence
  Description of Artificial Sequence: Synthetic peptide
  Seed: MDPRMCSLMQGSTLPRRSG
MDPRMFSLIQASTQPRRSG

SEQ ID NO: 100079 - protein, 19 aa, Artificial Sequence
  Description of Artificial Sequence: Synthetic peptide
  Seed: MDPRMCSLMQGSTLPRRSG
MDPRMFSLIQASTSPRRSG

SEQ ID NO: 100080 - protein, 19 aa, Artificial Sequence
  Description of Artificial Sequence: Synthetic peptide
  Seed: MDPRMCSLMQGSTLPRRSG
MDPRMFSLIQASTTPRRSG

SEQ ID NO: 100081 - protein, 19 aa, Artificial Sequence
  Description of Artificial Sequence: Synthetic peptide
  Seed: MDPRMCSLMQGSTLPRRSG
MDPRMFSLIQASTVPRRSG

SEQ ID NO: 100082 - protein, 19 aa, Artificial Sequence
  Description of Artificial Sequence: Synthetic peptide
  Seed: MDPRMCSLMQGSTLPRRSG
MDPRMFSLIQGSTAPRRSG

SEQ ID NO: 100083 - protein, 19 aa, Artificial Sequence
  Description of Artificial Sequence: Synthetic peptide
  Seed: MDPRMCSLMQGSTLPRRSG
MDPRMFSLIQGSTCPRRSG

SEQ ID NO: 100084 - protein, 19 aa, Artificial Sequence
  Description of Artificial Sequence: Synthetic peptide
  Seed: MDPRMCSLMQGSTLPRRSG
MDPRMFSLIQGSTGPRRSG

SEQ ID NO: 100085 - protein, 19 aa, Artificial Sequence
  Description of Artificial Sequence: Synthetic peptide
  Seed: MDPRMCSLMQGSTLPRRSG
MDPRMFSLIQGSTIPRRSG

SEQ ID NO: 100086 - protein, 19 aa, Artificial Sequence
  Description of Artificial Sequence: Synthetic peptide
  Seed: MDPRMCSLMQGSTLPRRSG
MDPRMFSLIQGSTLPRRSG

SEQ ID NO: 100087 - protein, 19 aa, Artificial Sequence
  Description of Artificial Sequence: Synthetic peptide
  Seed: MDPRMCSLMQGSTLPRRSG
MDPRMFSLIQGSTMPRRSG

SEQ ID NO: 100088 - protein, 19 aa, Artificial Sequence
  Description of Artificial Sequence: Synthetic peptide
  Seed: MDPRMCSLMQGSTLPRRSG
MDPRMFSLIQGSTNPRRSG

SEQ ID NO: 100089 - protein, 19 aa, Artificial Sequence
  Description of Artificial Sequence: Synthetic peptide
  Seed: MDPRMCSLMQGSTLPRRSG
MDPRMFSLIQGSTSPRRSG

SEQ ID NO: 100090 - protein, 19 aa, Artificial Sequence
  Description of Artificial Sequence: Synthetic peptide
  Seed: MDPRMCSLMQGSTLPRRSG
MDPRMFSLIQGSTTPRRSG

SEQ ID NO: 100091 - protein, 19 aa, Artificial Sequence
  Description of Artificial Sequence: Synthetic peptide
  Seed: MDPRMCSLMQGSTLPRRSG
MDPRMFSLIQGSTVPRRSG

SEQ ID NO: 100092 - protein, 19 aa, Artificial Sequence
  Description of Artificial Sequence: Synthetic peptide
  Seed: MDPRMCSLMQGSTLPRRSG
MDPRMFSLIQISTAPRRSG

SEQ ID NO: 100093 - protein, 19 aa, Artificial Sequence
  Description of Artificial Sequence: Synthetic peptide
  Seed: MDPRMCSLMQGSTLPRRSG
MDPRMFSLIQISTGPRRSG

SEQ ID NO: 100094 - protein, 19 aa, Artificial Sequence
  Description of Artificial Sequence: Synthetic peptide
  Seed: MDPRMCSLMQGSTLPRRSG
MDPRMFSLIQISTIPRRSG

SEQ ID NO: 100095 - protein, 19 aa, Artificial Sequence
  Description of Artificial Sequence: Synthetic peptide
  Seed: MDPRMCSLMQGSTLPRRSG
MDPRMFSLIQISTLPRRSG

SEQ ID NO: 100096 - protein, 19 aa, Artificial Sequence
  Description of Artificial Sequence: Synthetic peptide
  Seed: MDPRMCSLMQGSTLPRRSG
MDPRMFSLIQISTMPRRSG

SEQ ID NO: 100097 - protein, 19 aa, Artificial Sequence
  Description of Artificial Sequence: Synthetic peptide
  Seed: MDPRMCSLMQGSTLPRRSG
MDPRMFSLIQISTNPRRSG

SEQ ID NO: 100098 - protein, 19 aa, Artificial Sequence
  Description of Artificial Sequence: Synthetic peptide
  Seed: MDPRMCSLMQGSTLPRRSG
MDPRMFSLIQISTSPRRSG

SEQ ID NO: 100099 - protein, 19 aa, Artificial Sequence
  Description of Artificial Sequence: Synthetic peptide
  Seed: MDPRMCSLMQGSTLPRRSG
MDPRMFSLIQISTTPRRSG

SEQ ID NO: 100100 - protein, 19 aa, Artificial Sequence
  Description of Artificial Sequence: Synthetic peptide
  Seed: MDPRMCSLMQGSTLPRRSG
MDPRMFSLIQISTVPRRSG

SEQ ID NO: 100101 - protein, 19 aa, Artificial Sequence
  Description of Artificial Sequence: Synthetic peptide
  Seed: MDPRMCSLMQGSTLPRRSG
MDPRMFSLIQLSTAPRRSG

SEQ ID NO: 100102 - protein, 19 aa, Artificial Sequence
  Description of Artificial Sequence: Synthetic peptide
  Seed: MDPRMCSLMQGSTLPRRSG
MDPRMFSLIQLSTNPRRSG

SEQ ID NO: 100103 - protein, 19 aa, Artificial Sequence
  Description of Artificial Sequence: Synthetic peptide
  Seed: MDPRMCSLMQGSTLPRRSG
MDPRMFSLIQLSTSPRRSG

SEQ ID NO: 100104 - protein, 19 aa, Artificial Sequence
  Description of Artificial Sequence: Synthetic peptide
  Seed: MDPRMCSLMQGSTLPRRSG
MDPRMFSLIQMSTAPRRSG

SEQ ID NO: 100105 - protein, 19 aa, Artificial Sequence
  Description of Artificial Sequence: Synthetic peptide
  Seed: MDPRMCSLMQGSTLPRRSG
MDPRMFSLIQMSTNPRRSG

SEQ ID NO: 100106 - protein, 19 aa, Artificial Sequence
  Description of Artificial Sequence: Synthetic peptide
  Seed: MDPRMCSLMQGSTLPRRSG
MDPRMFSLIQMSTSPRRSG

SEQ ID NO: 100107 - protein, 19 aa, Artificial Sequence
  Description of Artificial Sequence: Synthetic peptide
  Seed: MDPRMCSLMQGSTLPRRSG
MDPRMFSLIQNSTAPRRSG

SEQ ID NO: 100108 - protein, 19 aa, Artificial Sequence
  Description of Artificial Sequence: Synthetic peptide
  Seed: MDPRMCSLMQGSTLPRRSG
MDPRMFSLIQNSTGPRRSG

SEQ ID NO: 100109 - protein, 19 aa, Artificial Sequence
  Description of Artificial Sequence: Synthetic peptide
  Seed: MDPRMCSLMQGSTLPRRSG
MDPRMFSLIQNSTIPRRSG

SEQ ID NO: 100110 - protein, 19 aa, Artificial Sequence
  Description of Artificial Sequence: Synthetic peptide
  Seed: MDPRMCSLMQGSTLPRRSG
MDPRMFSLIQNSTLPRRSG

SEQ ID NO: 100111 - protein, 19 aa, Artificial Sequence
  Description of Artificial Sequence: Synthetic peptide
  Seed: MDPRMCSLMQGSTLPRRSG
MDPRMFSLIQNSTMPRRSG

SEQ ID NO: 100112 - protein, 19 aa, Artificial Sequence
  Description of Artificial Sequence: Synthetic peptide
  Seed: MDPRMCSLMQGSTLPRRSG
MDPRMFSLIQNSTNPRRSG

SEQ ID NO: 100113 - protein, 19 aa, Artificial Sequence
  Description of Artificial Sequence: Synthetic peptide
  Seed: MDPRMCSLMQGSTLPRRSG
MDPRMFSLIQNSTSPRRSG

SEQ ID NO: 100114 - protein, 19 aa, Artificial Sequence
  Description of Artificial Sequence: Synthetic peptide
  Seed: MDPRMCSLMQGSTLPRRSG
MDPRMFSLIQNSTTPRRSG

SEQ ID NO: 100115 - protein, 19 aa, Artificial Sequence
  Description of Artificial Sequence: Synthetic peptide
  Seed: MDPRMCSLMQGSTLPRRSG
MDPRMFSLIQNSTVPRRSG

SEQ ID NO: 100116 - protein, 19 aa, Artificial Sequence
  Description of Artificial Sequence: Synthetic peptide
  Seed: MDPRMCSLMQGSTLPRRSG
MDPRMFSLIQPSTAPRRSG

SEQ ID NO: 100117 - protein, 19 aa, Artificial Sequence
  Description of Artificial Sequence: Synthetic peptide
  Seed: MDPRMCSLMQGSTLPRRSG
MDPRMFSLIQPSTGPRRSG

SEQ ID NO: 100118 - protein, 19 aa, Artificial Sequence
  Description of Artificial Sequence: Synthetic peptide
  Seed: MDPRMCSLMQGSTLPRRSG
MDPRMFSLIQPSTHPRRSG

SEQ ID NO: 100119 - protein, 19 aa, Artificial Sequence
  Description of Artificial Sequence: Synthetic peptide
  Seed: MDPRMCSLMQGSTLPRRSG
MDPRMFSLIQPSTIPRRSG

SEQ ID NO: 100120 - protein, 19 aa, Artificial Sequence
  Description of Artificial Sequence: Synthetic peptide
  Seed: MDPRMCSLMQGSTLPRRSG
MDPRMFSLIQPSTLPRRSG

SEQ ID NO: 100121 - protein, 19 aa, Artificial Sequence
  Description of Artificial Sequence: Synthetic peptide
  Seed: MDPRMCSLMQGSTLPRRSG
MDPRMFSLIQPSTMPRRSG

SEQ ID NO: 100122 - protein, 19 aa, Artificial Sequence
  Description of Artificial Sequence: Synthetic peptide
  Seed: MDPRMCSLMQGSTLPRRSG
MDPRMFSLIQPSTNPRRSG

SEQ ID NO: 100123 - protein, 19 aa, Artificial Sequence
  Description of Artificial Sequence: Synthetic peptide
  Seed: MDPRMCSLMQGSTLPRRSG
MDPRMFSLIQPSTPPRRSG

SEQ ID NO: 100124 - protein, 19 aa, Artificial Sequence
  Description of Artificial Sequence: Synthetic peptide
  Seed: MDPRMCSLMQGSTLPRRSG
MDPRMFSLIQPSTQPRRSG

SEQ ID NO: 100125 - protein, 19 aa, Artificial Sequence
  Description of Artificial Sequence: Synthetic peptide
  Seed: MDPRMCSLMQGSTLPRRSG
MDPRMFSLIQPSTSPRRSG

SEQ ID NO: 100126 - protein, 19 aa, Artificial Sequence
  Description of Artificial Sequence: Synthetic peptide
  Seed: MDPRMCSLMQGSTLPRRSG
MDPRMFSLIQPSTTPRRSG

SEQ ID NO: 100127 - protein, 19 aa, Artificial Sequence
  Description of Artificial Sequence: Synthetic peptide
  Seed: MDPRMCSLMQGSTLPRRSG
MDPRMFSLIQPSTVPRRSG

SEQ ID NO: 100128 - protein, 19 aa, Artificial Sequence
  Description of Artificial Sequence: Synthetic peptide
  Seed: MDPRMCSLMQGSTLPRRSG
MDPRMFSLIQSSTAPRRSG

SEQ ID NO: 100129 - protein, 19 aa, Artificial Sequence
  Description of Artificial Sequence: Synthetic peptide
  Seed: MDPRMCSLMQGSTLPRRSG
MDPRMFSLIQSSTGPRRSG

SEQ ID NO: 100130 - protein, 19 aa, Artificial Sequence
  Description of Artificial Sequence: Synthetic peptide
  Seed: MDPRMCSLMQGSTLPRRSG
MDPRMFSLIQSSTHPRRSG

SEQ ID NO: 100131 - protein, 19 aa, Artificial Sequence
  Description of Artificial Sequence: Synthetic peptide
  Seed: MDPRMCSLMQGSTLPRRSG
MDPRMFSLIQSSTIPRRSG

SEQ ID NO: 100132 - protein, 19 aa, Artificial Sequence
  Description of Artificial Sequence: Synthetic peptide
  Seed: MDPRMCSLMQGSTLPRRSG
MDPRMFSLIQSSTLPRRSG

SEQ ID NO: 100133 - protein, 19 aa, Artificial Sequence
  Description of Artificial Sequence: Synthetic peptide
  Seed: MDPRMCSLMQGSTLPRRSG
MDPRMFSLIQSSTMPRRSG

SEQ ID NO: 100134 - protein, 19 aa, Artificial Sequence
  Description of Artificial Sequence: Synthetic peptide
  Seed: MDPRMCSLMQGSTLPRRSG
MDPRMFSLIQSSTNPRRSG

SEQ ID NO: 100135 - protein, 19 aa, Artificial Sequence
  Description of Artificial Sequence: Synthetic peptide
  Seed: MDPRMCSLMQGSTLPRRSG
MDPRMFSLIQSSTQPRRSG

SEQ ID NO: 100136 - protein, 19 aa, Artificial Sequence
  Description of Artificial Sequence: Synthetic peptide
  Seed: MDPRMCSLMQGSTLPRRSG
MDPRMFSLIQSSTSPRRSG

SEQ ID NO: 100137 - protein, 19 aa, Artificial Sequence
  Description of Artificial Sequence: Synthetic peptide
  Seed: MDPRMCSLMQGSTLPRRSG
MDPRMFSLIQSSTTPRRSG

SEQ ID NO: 100138 - protein, 19 aa, Artificial Sequence
  Description of Artificial Sequence: Synthetic peptide
  Seed: MDPRMCSLMQGSTLPRRSG
MDPRMFSLIQSSTVPRRSG

SEQ ID NO: 100139 - protein, 19 aa, Artificial Sequence
  Description of Artificial Sequence: Synthetic peptide
  Seed: MDPRMCSLMQGSTLPRRSG
MDPRMFSLIQTSTAPRRSG

SEQ ID NO: 100140 - protein, 19 aa, Artificial Sequence
  Description of Artificial Sequence: Synthetic peptide
  Seed: MDPRMCSLMQGSTLPRRSG
MDPRMFSLIQTSTGPRRSG

SEQ ID NO: 100141 - protein, 19 aa, Artificial Sequence
  Description of Artificial Sequence: Synthetic peptide
  Seed: MDPRMCSLMQGSTLPRRSG
MDPRMFSLIQTSTHPRRSG

SEQ ID NO: 100142 - protein, 19 aa, Artificial Sequence
  Description of Artificial Sequence: Synthetic peptide
  Seed: MDPRMCSLMQGSTLPRRSG
MDPRMFSLIQTSTIPRRSG

SEQ ID NO: 100143 - protein, 19 aa, Artificial Sequence
  Description of Artificial Sequence: Synthetic peptide
  Seed: MDPRMCSLMQGSTLPRRSG
MDPRMFSLIQTSTLPRRSG

SEQ ID NO: 100144 - protein, 19 aa, Artificial Sequence
  Description of Artificial Sequence: Synthetic peptide
  Seed: MDPRMCSLMQGSTLPRRSG
MDPRMFSLIQTSTMPRRSG

SEQ ID NO: 100145 - protein, 19 aa, Artificial Sequence
  Description of Artificial Sequence: Synthetic peptide
  Seed: MDPRMCSLMQGSTLPRRSG
MDPRMFSLIQTSTNPRRSG

SEQ ID NO: 100146 - protein, 19 aa, Artificial Sequence
  Description of Artificial Sequence: Synthetic peptide
  Seed: MDPRMCSLMQGSTLPRRSG
MDPRMFSLIQTSTQPRRSG

SEQ ID NO: 100147 - protein, 19 aa, Artificial Sequence
  Description of Artificial Sequence: Synthetic peptide
  Seed: MDPRMCSLMQGSTLPRRSG
MDPRMFSLIQTSTSPRRSG

SEQ ID NO: 100148 - protein, 19 aa, Artificial Sequence
  Description of Artificial Sequence: Synthetic peptide
  Seed: MDPRMCSLMQGSTLPRRSG
MDPRMFSLIQTSTTPRRSG

SEQ ID NO: 100149 - protein, 19 aa, Artificial Sequence
  Description of Artificial Sequence: Synthetic peptide
  Seed: MDPRMCSLMQGSTLPRRSG
MDPRMFSLIQTSTVPRRSG

SEQ ID NO: 100150 - protein, 19 aa, Artificial Sequence
  Description of Artificial Sequence: Synthetic peptide
  Seed: MDPRMCSLMQGSTLPRRSG
MDPRMFSLIQVSTAPRRSG

SEQ ID NO: 100151 - protein, 19 aa, Artificial Sequence
  Description of Artificial Sequence: Synthetic peptide
  Seed: MDPRMCSLMQGSTLPRRSG
MDPRMFSLIQVSTGPRRSG

SEQ ID NO: 100152 - protein, 19 aa, Artificial Sequence
  Description of Artificial Sequence: Synthetic peptide
  Seed: MDPRMCSLMQGSTLPRRSG
MDPRMFSLIQVSTHPRRSG

SEQ ID NO: 100153 - protein, 19 aa, Artificial Sequence
  Description of Artificial Sequence: Synthetic peptide
  Seed: MDPRMCSLMQGSTLPRRSG
MDPRMFSLIQVSTIPRRSG

SEQ ID NO: 100154 - protein, 19 aa, Artificial Sequence
  Description of Artificial Sequence: Synthetic peptide
  Seed: MDPRMCSLMQGSTLPRRSG
MDPRMFSLIQVSTLPRRSG

SEQ ID NO: 100155 - protein, 19 aa, Artificial Sequence
  Description of Artificial Sequence: Synthetic peptide
  Seed: MDPRMCSLMQGSTLPRRSG
MDPRMFSLIQVSTMPRRSG

SEQ ID NO: 100156 - protein, 19 aa, Artificial Sequence
  Description of Artificial Sequence: Synthetic peptide
  Seed: MDPRMCSLMQGSTLPRRSG
MDPRMFSLIQVSTNPRRSG

SEQ ID NO: 100157 - protein, 19 aa, Artificial Sequence
  Description of Artificial Sequence: Synthetic peptide
  Seed: MDPRMCSLMQGSTLPRRSG
MDPRMFSLIQVSTQPRRSG

SEQ ID NO: 100158 - protein, 19 aa, Artificial Sequence
  Description of Artificial Sequence: Synthetic peptide
  Seed: MDPRMCSLMQGSTLPRRSG
MDPRMFSLIQVSTSPRRSG

SEQ ID NO: 100159 - protein, 19 aa, Artificial Sequence
  Description of Artificial Sequence: Synthetic peptide
  Seed: MDPRMCSLMQGSTLPRRSG
MDPRMFSLIQVSTTPRRSG

SEQ ID NO: 100160 - protein, 19 aa, Artificial Sequence
  Description of Artificial Sequence: Synthetic peptide
  Seed: MDPRMCSLMQGSTLPRRSG
MDPRMFSLIQVSTVPRRSG

SEQ ID NO: 100161 - protein, 19 aa, Artificial Sequence
  Description of Artificial Sequence: Synthetic peptide
  Seed: MDPRMCSLMQGSTLPRRSG
MDPRMFSLLQASTAPRRSG

SEQ ID NO: 100162 - protein, 19 aa, Artificial Sequence
  Description of Artificial Sequence: Synthetic peptide
  Seed: MDPRMCSLMQGSTLPRRSG
MDPRMFSLLQASTCPRRSG

SEQ ID NO: 100163 - protein, 19 aa, Artificial Sequence
  Description of Artificial Sequence: Synthetic peptide
  Seed: MDPRMCSLMQGSTLPRRSG
MDPRMFSLLQASTDPRRSG

SEQ ID NO: 100164 - protein, 19 aa, Artificial Sequence
  Description of Artificial Sequence: Synthetic peptide
  Seed: MDPRMCSLMQGSTLPRRSG
MDPRMFSLLQASTEPRRSG

SEQ ID NO: 100165 - protein, 19 aa, Artificial Sequence
  Description of Artificial Sequence: Synthetic peptide
  Seed: MDPRMCSLMQGSTLPRRSG
MDPRMFSLLQASTFPRRSG

SEQ ID NO: 100166 - protein, 19 aa, Artificial Sequence
  Description of Artificial Sequence: Synthetic peptide
  Seed: MDPRMCSLMQGSTLPRRSG
MDPRMFSLLQASTGPRRSG

SEQ ID NO: 100167 - protein, 19 aa, Artificial Sequence
  Description of Artificial Sequence: Synthetic peptide
  Seed: MDPRMCSLMQGSTLPRRSG
MDPRMFSLLQASTHPRRSG

SEQ ID NO: 100168 - protein, 19 aa, Artificial Sequence
  Description of Artificial Sequence: Synthetic peptide
  Seed: MDPRMCSLMQGSTLPRRSG
MDPRMFSLLQASTIPRRSG

SEQ ID NO: 100169 - protein, 19 aa, Artificial Sequence
  Description of Artificial Sequence: Synthetic peptide
  Seed: MDPRMCSLMQGSTLPRRSG
MDPRMFSLLQASTLPRRSG

SEQ ID NO: 100170 - protein, 19 aa, Artificial Sequence
  Description of Artificial Sequence: Synthetic peptide
  Seed: MDPRMCSLMQGSTLPRRSG
MDPRMFSLLQASTMPRRSG

SEQ ID NO: 100171 - protein, 19 aa, Artificial Sequence
  Description of Artificial Sequence: Synthetic peptide
  Seed: MDPRMCSLMQGSTLPRRSG
MDPRMFSLLQASTNPRRSG

SEQ ID NO: 100172 - protein, 19 aa, Artificial Sequence
  Description of Artificial Sequence: Synthetic peptide
  Seed: MDPRMCSLMQGSTLPRRSG
MDPRMFSLLQASTPPRRSG

SEQ ID NO: 100173 - protein, 19 aa, Artificial Sequence
  Description of Artificial Sequence: Synthetic peptide
  Seed: MDPRMCSLMQGSTLPRRSG
MDPRMFSLLQASTQPRRSG

SEQ ID NO: 100174 - protein, 19 aa, Artificial Sequence
  Description of Artificial Sequence: Synthetic peptide
  Seed: MDPRMCSLMQGSTLPRRSG
MDPRMFSLLQASTSPRRSG

SEQ ID NO: 100175 - protein, 19 aa, Artificial Sequence
  Description of Artificial Sequence: Synthetic peptide
  Seed: MDPRMCSLMQGSTLPRRSG
MDPRMFSLLQASTTPRRSG

SEQ ID NO: 100176 - protein, 19 aa, Artificial Sequence
  Description of Artificial Sequence: Synthetic peptide
  Seed: MDPRMCSLMQGSTLPRRSG
MDPRMFSLLQASTVPRRSG

SEQ ID NO: 100177 - protein, 19 aa, Artificial Sequence
  Description of Artificial Sequence: Synthetic peptide
  Seed: MDPRMCSLMQGSTLPRRSG
MDPRMFSLLQASTYPRRSG

SEQ ID NO: 100178 - protein, 19 aa, Artificial Sequence
  Description of Artificial Sequence: Synthetic peptide
  Seed: MDPRMCSLMQGSTLPRRSG
MDPRMFSLLQGSTAPRRSG

SEQ ID NO: 100179 - protein, 19 aa, Artificial Sequence
  Description of Artificial Sequence: Synthetic peptide
  Seed: MDPRMCSLMQGSTLPRRSG
MDPRMFSLLQGSTCPRRSG

SEQ ID NO: 100180 - protein, 19 aa, Artificial Sequence
  Description of Artificial Sequence: Synthetic peptide
  Seed: MDPRMCSLMQGSTLPRRSG
MDPRMFSLLQGSTFPRRSG

SEQ ID NO: 100181 - protein, 19 aa, Artificial Sequence
  Description of Artificial Sequence: Synthetic peptide
  Seed: MDPRMCSLMQGSTLPRRSG
MDPRMFSLLQGSTGPRRSG

SEQ ID NO: 100182 - protein, 19 aa, Artificial Sequence
  Description of Artificial Sequence: Synthetic peptide
  Seed: MDPRMCSLMQGSTLPRRSG
MDPRMFSLLQGSTIPRRSG

SEQ ID NO: 100183 - protein, 19 aa, Artificial Sequence
  Description of Artificial Sequence: Synthetic peptide
  Seed: MDPRMCSLMQGSTLPRRSG
MDPRMFSLLQGSTLPRRSG

SEQ ID NO: 100184 - protein, 19 aa, Artificial Sequence
  Description of Artificial Sequence: Synthetic peptide
  Seed: MDPRMCSLMQGSTLPRRSG
MDPRMFSLLQGSTMPRRSG

SEQ ID NO: 100185 - protein, 19 aa, Artificial Sequence
  Description of Artificial Sequence: Synthetic peptide
  Seed: MDPRMCSLMQGSTLPRRSG
MDPRMFSLLQGSTNPRRSG

SEQ ID NO: 100186 - protein, 19 aa, Artificial Sequence
  Description of Artificial Sequence: Synthetic peptide
  Seed: MDPRMCSLMQGSTLPRRSG
MDPRMFSLLQGSTPPRRSG

SEQ ID NO: 100187 - protein, 19 aa, Artificial Sequence
  Description of Artificial Sequence: Synthetic peptide
  Seed: MDPRMCSLMQGSTLPRRSG
MDPRMFSLLQGSTSPRRSG

SEQ ID NO: 100188 - protein, 19 aa, Artificial Sequence
  Description of Artificial Sequence: Synthetic peptide
  Seed: MDPRMCSLMQGSTLPRRSG
MDPRMFSLLQGSTTPRRSG

SEQ ID NO: 100189 - protein, 19 aa, Artificial Sequence
  Description of Artificial Sequence: Synthetic peptide
  Seed: MDPRMCSLMQGSTLPRRSG
MDPRMFSLLQGSTVPRRSG

SEQ ID NO: 100190 - protein, 19 aa, Artificial Sequence
  Description of Artificial Sequence: Synthetic peptide
  Seed: MDPRMCSLMQGSTLPRRSG
MDPRMFSLLQISTAPRRSG

SEQ ID NO: 100191 - protein, 19 aa, Artificial Sequence
  Description of Artificial Sequence: Synthetic peptide
  Seed: MDPRMCSLMQGSTLPRRSG
MDPRMFSLLQISTGPRRSG

SEQ ID NO: 100192 - protein, 19 aa, Artificial Sequence
  Description of Artificial Sequence: Synthetic peptide
  Seed: MDPRMCSLMQGSTLPRRSG
MDPRMFSLLQISTHPRRSG

SEQ ID NO: 100193 - protein, 19 aa, Artificial Sequence
  Description of Artificial Sequence: Synthetic peptide
  Seed: MDPRMCSLMQGSTLPRRSG
MDPRMFSLLQISTIPRRSG

SEQ ID NO: 100194 - protein, 19 aa, Artificial Sequence
  Description of Artificial Sequence: Synthetic peptide
  Seed: MDPRMCSLMQGSTLPRRSG
MDPRMFSLLQISTLPRRSG

SEQ ID NO: 100195 - protein, 19 aa, Artificial Sequence
  Description of Artificial Sequence: Synthetic peptide
  Seed: MDPRMCSLMQGSTLPRRSG
MDPRMFSLLQISTMPRRSG

SEQ ID NO: 100196 - protein, 19 aa, Artificial Sequence
  Description of Artificial Sequence: Synthetic peptide
  Seed: MDPRMCSLMQGSTLPRRSG
MDPRMFSLLQISTNPRRSG

SEQ ID NO: 100197 - protein, 19 aa, Artificial Sequence
  Description of Artificial Sequence: Synthetic peptide
  Seed: MDPRMCSLMQGSTLPRRSG
MDPRMFSLLQISTQPRRSG

SEQ ID NO: 100198 - protein, 19 aa, Artificial Sequence
  Description of Artificial Sequence: Synthetic peptide
  Seed: MDPRMCSLMQGSTLPRRSG
MDPRMFSLLQISTSPRRSG

SEQ ID NO: 100199 - protein, 19 aa, Artificial Sequence
  Description of Artificial Sequence: Synthetic peptide
  Seed: MDPRMCSLMQGSTLPRRSG
MDPRMFSLLQISTTPRRSG

SEQ ID NO: 100200 - protein, 19 aa, Artificial Sequence
  Description of Artificial Sequence: Synthetic peptide
  Seed: MDPRMCSLMQGSTLPRRSG
MDPRMFSLLQISTVPRRSG

SEQ ID NO: 100201 - protein, 19 aa, Artificial Sequence
  Description of Artificial Sequence: Synthetic peptide
  Seed: MDPRMCSLMQGSTLPRRSG
MDPRMFSLLQLSTAPRRSG

SEQ ID NO: 100202 - protein, 19 aa, Artificial Sequence
  Description of Artificial Sequence: Synthetic peptide
  Seed: MDPRMCSLMQGSTLPRRSG
MDPRMFSLLQLSTNPRRSG

SEQ ID NO: 100203 - protein, 19 aa, Artificial Sequence
  Description of Artificial Sequence: Synthetic peptide
  Seed: MDPRMCSLMQGSTLPRRSG
MDPRMFSLLQLSTSPRRSG

SEQ ID NO: 100204 - protein, 19 aa, Artificial Sequence
  Description of Artificial Sequence: Synthetic peptide
  Seed: MDPRMCSLMQGSTLPRRSG
MDPRMFSLLQLSTTPRRSG

SEQ ID NO: 100205 - protein, 19 aa, Artificial Sequence
  Description of Artificial Sequence: Synthetic peptide
  Seed: MDPRMCSLMQGSTLPRRSG
MDPRMFSLLQLSTVPRRSG

SEQ ID NO: 100206 - protein, 19 aa, Artificial Sequence
  Description of Artificial Sequence: Synthetic peptide
  Seed: MDPRMCSLMQGSTLPRRSG
MDPRMFSLLQMSTAPRRSG

SEQ ID NO: 100207 - protein, 19 aa, Artificial Sequence
  Description of Artificial Sequence: Synthetic peptide
  Seed: MDPRMCSLMQGSTLPRRSG
MDPRMFSLLQMSTNPRRSG

SEQ ID NO: 100208 - protein, 19 aa, Artificial Sequence
  Description of Artificial Sequence: Synthetic peptide
  Seed: MDPRMCSLMQGSTLPRRSG
MDPRMFSLLQMSTSPRRSG

SEQ ID NO: 100209 - protein, 19 aa, Artificial Sequence
  Description of Artificial Sequence: Synthetic peptide
  Seed: MDPRMCSLMQGSTLPRRSG
MDPRMFSLLQMSTTPRRSG

SEQ ID NO: 100210 - protein, 19 aa, Artificial Sequence
  Description of Artificial Sequence: Synthetic peptide
  Seed: MDPRMCSLMQGSTLPRRSG
MDPRMFSLLQMSTVPRRSG

SEQ ID NO: 100211 - protein, 19 aa, Artificial Sequence
  Description of Artificial Sequence: Synthetic peptide
  Seed: MDPRMCSLMQGSTLPRRSG
MDPRMFSLLQNSTAPRRSG

SEQ ID NO: 100212 - protein, 19 aa, Artificial Sequence
  Description of Artificial Sequence: Synthetic peptide
  Seed: MDPRMCSLMQGSTLPRRSG
MDPRMFSLLQNSTGPRRSG

SEQ ID NO: 100213 - protein, 19 aa, Artificial Sequence
  Description of Artificial Sequence: Synthetic peptide
  Seed: MDPRMCSLMQGSTLPRRSG
MDPRMFSLLQNSTIPRRSG

SEQ ID NO: 100214 - protein, 19 aa, Artificial Sequence
  Description of Artificial Sequence: Synthetic peptide
  Seed: MDPRMCSLMQGSTLPRRSG
MDPRMFSLLQNSTLPRRSG

SEQ ID NO: 100215 - protein, 19 aa, Artificial Sequence
  Description of Artificial Sequence: Synthetic peptide
  Seed: MDPRMCSLMQGSTLPRRSG
MDPRMFSLLQNSTMPRRSG

SEQ ID NO: 100216 - protein, 19 aa, Artificial Sequence
  Description of Artificial Sequence: Synthetic peptide
  Seed: MDPRMCSLMQGSTLPRRSG
MDPRMFSLLQNSTNPRRSG

SEQ ID NO: 100217 - protein, 19 aa, Artificial Sequence
  Description of Artificial Sequence: Synthetic peptide
  Seed: MDPRMCSLMQGSTLPRRSG
MDPRMFSLLQNSTSPRRSG

SEQ ID NO: 100218 - protein, 19 aa, Artificial Sequence
  Description of Artificial Sequence: Synthetic peptide
  Seed: MDPRMCSLMQGSTLPRRSG
MDPRMFSLLQNSTTPRRSG

SEQ ID NO: 100219 - protein, 19 aa, Artificial Sequence
  Description of Artificial Sequence: Synthetic peptide
  Seed: MDPRMCSLMQGSTLPRRSG
MDPRMFSLLQNSTVPRRSG

SEQ ID NO: 100220 - protein, 19 aa, Artificial Sequence
  Description of Artificial Sequence: Synthetic peptide
  Seed: MDPRMCSLMQGSTLPRRSG
MDPRMFSLLQPSTAPRRSG

SEQ ID NO: 100221 - protein, 19 aa, Artificial Sequence
  Description of Artificial Sequence: Synthetic peptide
  Seed: MDPRMCSLMQGSTLPRRSG
MDPRMFSLLQPSTCPRRSG

SEQ ID NO: 100222 - protein, 19 aa, Artificial Sequence
  Description of Artificial Sequence: Synthetic peptide
  Seed: MDPRMCSLMQGSTLPRRSG
MDPRMFSLLQPSTDPRRSG

SEQ ID NO: 100223 - protein, 19 aa, Artificial Sequence
  Description of Artificial Sequence: Synthetic peptide
  Seed: MDPRMCSLMQGSTLPRRSG
MDPRMFSLLQPSTEPRRSG

SEQ ID NO: 100224 - protein, 19 aa, Artificial Sequence
  Description of Artificial Sequence: Synthetic peptide
  Seed: MDPRMCSLMQGSTLPRRSG
MDPRMFSLLQPSTFPRRSG

SEQ ID NO: 100225 - protein, 19 aa, Artificial Sequence
  Description of Artificial Sequence: Synthetic peptide
  Seed: MDPRMCSLMQGSTLPRRSG
MDPRMFSLLQPSTGPRRSG

SEQ ID NO: 100226 - protein, 19 aa, Artificial Sequence
  Description of Artificial Sequence: Synthetic peptide
  Seed: MDPRMCSLMQGSTLPRRSG
MDPRMFSLLQPSTHPRRSG

SEQ ID NO: 100227 - protein, 19 aa, Artificial Sequence
  Description of Artificial Sequence: Synthetic peptide
  Seed: MDPRMCSLMQGSTLPRRSG
MDPRMFSLLQPSTIPRRSG

SEQ ID NO: 100228 - protein, 19 aa, Artificial Sequence
  Description of Artificial Sequence: Synthetic peptide
  Seed: MDPRMCSLMQGSTLPRRSG
MDPRMFSLLQPSTLPRRSG

SEQ ID NO: 100229 - protein, 19 aa, Artificial Sequence
  Description of Artificial Sequence: Synthetic peptide
  Seed: MDPRMCSLMQGSTLPRRSG
MDPRMFSLLQPSTMPRRSG

SEQ ID NO: 100230 - protein, 19 aa, Artificial Sequence
  Description of Artificial Sequence: Synthetic peptide
  Seed: MDPRMCSLMQGSTLPRRSG
MDPRMFSLLQPSTNPRRSG

SEQ ID NO: 100231 - protein, 19 aa, Artificial Sequence
  Description of Artificial Sequence: Synthetic peptide
  Seed: MDPRMCSLMQGSTLPRRSG
MDPRMFSLLQPSTPPRRSG

SEQ ID NO: 100232 - protein, 19 aa, Artificial Sequence
  Description of Artificial Sequence: Synthetic peptide
  Seed: MDPRMCSLMQGSTLPRRSG
MDPRMFSLLQPSTQPRRSG

SEQ ID NO: 100233 - protein, 19 aa, Artificial Sequence
  Description of Artificial Sequence: Synthetic peptide
  Seed: MDPRMCSLMQGSTLPRRSG
MDPRMFSLLQPSTSPRRSG

SEQ ID NO: 100234 - protein, 19 aa, Artificial Sequence
  Description of Artificial Sequence: Synthetic peptide
  Seed: MDPRMCSLMQGSTLPRRSG
MDPRMFSLLQPSTTPRRSG

SEQ ID NO: 100235 - protein, 19 aa, Artificial Sequence
  Description of Artificial Sequence: Synthetic peptide
  Seed: MDPRMCSLMQGSTLPRRSG
MDPRMFSLLQPSTVPRRSG

SEQ ID NO: 100236 - protein, 19 aa, Artificial Sequence
  Description of Artificial Sequence: Synthetic peptide
  Seed: MDPRMCSLMQGSTLPRRSG
MDPRMFSLLQSSTAPRRSG

SEQ ID NO: 100237 - protein, 19 aa, Artificial Sequence
  Description of Artificial Sequence: Synthetic peptide
  Seed: MDPRMCSLMQGSTLPRRSG
MDPRMFSLLQSSTCPRRSG

SEQ ID NO: 100238 - protein, 19 aa, Artificial Sequence
  Description of Artificial Sequence: Synthetic peptide
  Seed: MDPRMCSLMQGSTLPRRSG
MDPRMFSLLQSSTFPRRSG

SEQ ID NO: 100239 - protein, 19 aa, Artificial Sequence
  Description of Artificial Sequence: Synthetic peptide
  Seed: MDPRMCSLMQGSTLPRRSG
MDPRMFSLLQSSTGPRRSG

SEQ ID NO: 100240 - protein, 19 aa, Artificial Sequence
  Description of Artificial Sequence: Synthetic peptide
  Seed: MDPRMCSLMQGSTLPRRSG
MDPRMFSLLQSSTHPRRSG

SEQ ID NO: 100241 - protein, 19 aa, Artificial Sequence
  Description of Artificial Sequence: Synthetic peptide
  Seed: MDPRMCSLMQGSTLPRRSG
MDPRMFSLLQSSTIPRRSG

SEQ ID NO: 100242 - protein, 19 aa, Artificial Sequence
  Description of Artificial Sequence: Synthetic peptide
  Seed: MDPRMCSLMQGSTLPRRSG
MDPRMFSLLQSSTLPRRSG

SEQ ID NO: 100243 - protein, 19 aa, Artificial Sequence
  Description of Artificial Sequence: Synthetic peptide
  Seed: MDPRMCSLMQGSTLPRRSG
MDPRMFSLLQSSTMPRRSG

SEQ ID NO: 100244 - protein, 19 aa, Artificial Sequence
  Description of Artificial Sequence: Synthetic peptide
  Seed: MDPRMCSLMQGSTLPRRSG
MDPRMFSLLQSSTNPRRSG

SEQ ID NO: 100245 - protein, 19 aa, Artificial Sequence
  Description of Artificial Sequence: Synthetic peptide
  Seed: MDPRMCSLMQGSTLPRRSG
MDPRMFSLLQSSTPPRRSG

SEQ ID NO: 100246 - protein, 19 aa, Artificial Sequence
  Description of Artificial Sequence: Synthetic peptide
  Seed: MDPRMCSLMQGSTLPRRSG
MDPRMFSLLQSSTQPRRSG

SEQ ID NO: 100247 - protein, 19 aa, Artificial Sequence
  Description of Artificial Sequence: Synthetic peptide
  Seed: MDPRMCSLMQGSTLPRRSG
MDPRMFSLLQSSTSPRRSG

SEQ ID NO: 100248 - protein, 19 aa, Artificial Sequence
  Description of Artificial Sequence: Synthetic peptide
  Seed: MDPRMCSLMQGSTLPRRSG
MDPRMFSLLQSSTTPRRSG

SEQ ID NO: 100249 - protein, 19 aa, Artificial Sequence
  Description of Artificial Sequence: Synthetic peptide
  Seed: MDPRMCSLMQGSTLPRRSG
MDPRMFSLLQSSTVPRRSG

SEQ ID NO: 100250 - protein, 19 aa, Artificial Sequence
  Description of Artificial Sequence: Synthetic peptide
  Seed: MDPRMCSLMQGSTLPRRSG
MDPRMFSLLQTSTAPRRSG

SEQ ID NO: 100251 - protein, 19 aa, Artificial Sequence
  Description of Artificial Sequence: Synthetic peptide
  Seed: MDPRMCSLMQGSTLPRRSG
MDPRMFSLLQTSTGPRRSG

SEQ ID NO: 100252 - protein, 19 aa, Artificial Sequence
  Description of Artificial Sequence: Synthetic peptide
  Seed: MDPRMCSLMQGSTLPRRSG
MDPRMFSLLQTSTHPRRSG

SEQ ID NO: 100253 - protein, 19 aa, Artificial Sequence
  Description of Artificial Sequence: Synthetic peptide
  Seed: MDPRMCSLMQGSTLPRRSG
MDPRMFSLLQTSTIPRRSG

SEQ ID NO: 100254 - protein, 19 aa, Artificial Sequence
  Description of Artificial Sequence: Synthetic peptide
  Seed: MDPRMCSLMQGSTLPRRSG
MDPRMFSLLQTSTLPRRSG

SEQ ID NO: 100255 - protein, 19 aa, Artificial Sequence
  Description of Artificial Sequence: Synthetic peptide
  Seed: MDPRMCSLMQGSTLPRRSG
MDPRMFSLLQTSTMPRRSG

SEQ ID NO: 100256 - protein, 19 aa, Artificial Sequence
  Description of Artificial Sequence: Synthetic peptide
  Seed: MDPRMCSLMQGSTLPRRSG
MDPRMFSLLQTSTNPRRSG

SEQ ID NO: 100257 - protein, 19 aa, Artificial Sequence
  Description of Artificial Sequence: Synthetic peptide
  Seed: MDPRMCSLMQGSTLPRRSG
MDPRMFSLLQTSTPPRRSG

SEQ ID NO: 100258 - protein, 19 aa, Artificial Sequence
  Description of Artificial Sequence: Synthetic peptide
  Seed: MDPRMCSLMQGSTLPRRSG
MDPRMFSLLQTSTQPRRSG

SEQ ID NO: 100259 - protein, 19 aa, Artificial Sequence
  Description of Artificial Sequence: Synthetic peptide
  Seed: MDPRMCSLMQGSTLPRRSG
MDPRMFSLLQTSTSPRRSG

SEQ ID NO: 100260 - protein, 19 aa, Artificial Sequence
  Description of Artificial Sequence: Synthetic peptide
  Seed: MDPRMCSLMQGSTLPRRSG
MDPRMFSLLQTSTTPRRSG

SEQ ID NO: 100261 - protein, 19 aa, Artificial Sequence
  Description of Artificial Sequence: Synthetic peptide
  Seed: MDPRMCSLMQGSTLPRRSG
MDPRMFSLLQTSTVPRRSG

SEQ ID NO: 100262 - protein, 19 aa, Artificial Sequence
  Description of Artificial Sequence: Synthetic peptide
  Seed: MDPRMCSLMQGSTLPRRSG
MDPRMFSLLQVSTAPRRSG

SEQ ID NO: 100263 - protein, 19 aa, Artificial Sequence
  Description of Artificial Sequence: Synthetic peptide
  Seed: MDPRMCSLMQGSTLPRRSG
MDPRMFSLLQVSTDPRRSG

SEQ ID NO: 100264 - protein, 19 aa, Artificial Sequence
  Description of Artificial Sequence: Synthetic peptide
  Seed: MDPRMCSLMQGSTLPRRSG
MDPRMFSLLQVSTGPRRSG

SEQ ID NO: 100265 - protein, 19 aa, Artificial Sequence
  Description of Artificial Sequence: Synthetic peptide
  Seed: MDPRMCSLMQGSTLPRRSG
MDPRMFSLLQVSTHPRRSG

SEQ ID NO: 100266 - protein, 19 aa, Artificial Sequence
  Description of Artificial Sequence: Synthetic peptide
  Seed: MDPRMCSLMQGSTLPRRSG
MDPRMFSLLQVSTIPRRSG

SEQ ID NO: 100267 - protein, 19 aa, Artificial Sequence
  Description of Artificial Sequence: Synthetic peptide
  Seed: MDPRMCSLMQGSTLPRRSG
MDPRMFSLLQVSTLPRRSG

SEQ ID NO: 100268 - protein, 19 aa, Artificial Sequence
  Description of Artificial Sequence: Synthetic peptide
  Seed: MDPRMCSLMQGSTLPRRSG
MDPRMFSLLQVSTMPRRSG

SEQ ID NO: 100269 - protein, 19 aa, Artificial Sequence
  Description of Artificial Sequence: Synthetic peptide
  Seed: MDPRMCSLMQGSTLPRRSG
MDPRMFSLLQVSTNPRRSG

SEQ ID NO: 100270 - protein, 19 aa, Artificial Sequence
  Description of Artificial Sequence: Synthetic peptide
  Seed: MDPRMCSLMQGSTLPRRSG
MDPRMFSLLQVSTPPRRSG

SEQ ID NO: 100271 - protein, 19 aa, Artificial Sequence
  Description of Artificial Sequence: Synthetic peptide
  Seed: MDPRMCSLMQGSTLPRRSG
MDPRMFSLLQVSTQPRRSG

SEQ ID NO: 100272 - protein, 19 aa, Artificial Sequence
  Description of Artificial Sequence: Synthetic peptide
  Seed: MDPRMCSLMQGSTLPRRSG
MDPRMFSLLQVSTSPRRSG

SEQ ID NO: 100273 - protein, 19 aa, Artificial Sequence
  Description of Artificial Sequence: Synthetic peptide
  Seed: MDPRMCSLMQGSTLPRRSG
MDPRMFSLLQVSTTPRRSG

SEQ ID NO: 100274 - protein, 19 aa, Artificial Sequence
  Description of Artificial Sequence: Synthetic peptide
  Seed: MDPRMCSLMQGSTLPRRSG
MDPRMFSLLQVSTVPRRSG

SEQ ID NO: 100275 - protein, 19 aa, Artificial Sequence
  Description of Artificial Sequence: Synthetic peptide
  Seed: MDPRMCSLMQGSTLPRRSG
MDPRMFSLMQASTAPRRSG

SEQ ID NO: 100276 - protein, 19 aa, Artificial Sequence
  Description of Artificial Sequence: Synthetic peptide
  Seed: MDPRMCSLMQGSTLPRRSG
MDPRMFSLMQASTCPRRSG

SEQ ID NO: 100277 - protein, 19 aa, Artificial Sequence
  Description of Artificial Sequence: Synthetic peptide
  Seed: MDPRMCSLMQGSTLPRRSG
MDPRMFSLMQASTDPRRSG

SEQ ID NO: 100278 - protein, 19 aa, Artificial Sequence
  Description of Artificial Sequence: Synthetic peptide
  Seed: MDPRMCSLMQGSTLPRRSG
MDPRMFSLMQASTEPRRSG

SEQ ID NO: 100279 - protein, 19 aa, Artificial Sequence
  Description of Artificial Sequence: Synthetic peptide
  Seed: MDPRMCSLMQGSTLPRRSG
MDPRMFSLMQASTFPRRSG

SEQ ID NO: 100280 - protein, 19 aa, Artificial Sequence
  Description of Artificial Sequence: Synthetic peptide
  Seed: MDPRMCSLMQGSTLPRRSG
MDPRMFSLMQASTGPRRSG

SEQ ID NO: 100281 - protein, 19 aa, Artificial Sequence
  Description of Artificial Sequence: Synthetic peptide
  Seed: MDPRMCSLMQGSTLPRRSG
MDPRMFSLMQASTHPRRSG

SEQ ID NO: 100282 - protein, 19 aa, Artificial Sequence
  Description of Artificial Sequence: Synthetic peptide
  Seed: MDPRMCSLMQGSTLPRRSG
MDPRMFSLMQASTIPRRSG

SEQ ID NO: 100283 - protein, 19 aa, Artificial Sequence
  Description of Artificial Sequence: Synthetic peptide
  Seed: MDPRMCSLMQGSTLPRRSG
MDPRMFSLMQASTLPRRSG

SEQ ID NO: 100284 - protein, 19 aa, Artificial Sequence
  Description of Artificial Sequence: Synthetic peptide
  Seed: MDPRMCSLMQGSTLPRRSG
MDPRMFSLMQASTMPRRSG

SEQ ID NO: 100285 - protein, 19 aa, Artificial Sequence
  Description of Artificial Sequence: Synthetic peptide
  Seed: MDPRMCSLMQGSTLPRRSG
MDPRMFSLMQASTNPRRSG

SEQ ID NO: 100286 - protein, 19 aa, Artificial Sequence
  Description of Artificial Sequence: Synthetic peptide
  Seed: MDPRMCSLMQGSTLPRRSG
MDPRMFSLMQASTPPRRSG

SEQ ID NO: 100287 - protein, 19 aa, Artificial Sequence
  Description of Artificial Sequence: Synthetic peptide
  Seed: MDPRMCSLMQGSTLPRRSG
MDPRMFSLMQASTQPRRSG

SEQ ID NO: 100288 - protein, 19 aa, Artificial Sequence
  Description of Artificial Sequence: Synthetic peptide
  Seed: MDPRMCSLMQGSTLPRRSG
MDPRMFSLMQASTSPRRSG

SEQ ID NO: 100289 - protein, 19 aa, Artificial Sequence
  Description of Artificial Sequence: Synthetic peptide
  Seed: MDPRMCSLMQGSTLPRRSG
MDPRMFSLMQASTTPRRSG

SEQ ID NO: 100290 - protein, 19 aa, Artificial Sequence
  Description of Artificial Sequence: Synthetic peptide
  Seed: MDPRMCSLMQGSTLPRRSG
MDPRMFSLMQASTVPRRSG

SEQ ID NO: 100291 - protein, 19 aa, Artificial Sequence
  Description of Artificial Sequence: Synthetic peptide
  Seed: MDPRMCSLMQGSTLPRRSG
MDPRMFSLMQASTWPRRSG

SEQ ID NO: 100292 - protein, 19 aa, Artificial Sequence
  Description of Artificial Sequence: Synthetic peptide
  Seed: MDPRMCSLMQGSTLPRRSG
MDPRMFSLMQASTYPRRSG

SEQ ID NO: 100293 - protein, 19 aa, Artificial Sequence
  Description of Artificial Sequence: Synthetic peptide
  Seed: MDPRMCSLMQGSTLPRRSG
MDPRMFSLMQGSTAPRRSG

SEQ ID NO: 100294 - protein, 19 aa, Artificial Sequence
  Description of Artificial Sequence: Synthetic peptide
  Seed: MDPRMCSLMQGSTLPRRSG
MDPRMFSLMQGSTCPRRSG

SEQ ID NO: 100295 - protein, 19 aa, Artificial Sequence
  Description of Artificial Sequence: Synthetic peptide
  Seed: MDPRMCSLMQGSTLPRRSG
MDPRMFSLMQGSTFPRRSG

SEQ ID NO: 100296 - protein, 19 aa, Artificial Sequence
  Description of Artificial Sequence: Synthetic peptide
  Seed: MDPRMCSLMQGSTLPRRSG
MDPRMFSLMQGSTGPRRSG

SEQ ID NO: 100297 - protein, 19 aa, Artificial Sequence
  Description of Artificial Sequence: Synthetic peptide
  Seed: MDPRMCSLMQGSTLPRRSG
MDPRMFSLMQGSTHPRRSG

SEQ ID NO: 100298 - protein, 19 aa, Artificial Sequence
  Description of Artificial Sequence: Synthetic peptide
  Seed: MDPRMCSLMQGSTLPRRSG
MDPRMFSLMQGSTIPRRSG

SEQ ID NO: 100299 - protein, 19 aa, Artificial Sequence
  Description of Artificial Sequence: Synthetic peptide
  Seed: MDPRMCSLMQGSTLPRRSG
MDPRMFSLMQGSTLPRRSG

SEQ ID NO: 100300 - protein, 19 aa, Artificial Sequence
  Description of Artificial Sequence: Synthetic peptide
  Seed: MDPRMCSLMQGSTLPRRSG
MDPRMFSLMQGSTMPRRSG

SEQ ID NO: 100301 - protein, 19 aa, Artificial Sequence
  Description of Artificial Sequence: Synthetic peptide
  Seed: MDPRMCSLMQGSTLPRRSG
MDPRMFSLMQGSTNPRRSG

SEQ ID NO: 100302 - protein, 19 aa, Artificial Sequence
  Description of Artificial Sequence: Synthetic peptide
  Seed: MDPRMCSLMQGSTLPRRSG
MDPRMFSLMQGSTQPRRSG

SEQ ID NO: 100303 - protein, 19 aa, Artificial Sequence
  Description of Artificial Sequence: Synthetic peptide
  Seed: MDPRMCSLMQGSTLPRRSG
MDPRMFSLMQGSTSPRRSG

SEQ ID NO: 100304 - protein, 19 aa, Artificial Sequence
  Description of Artificial Sequence: Synthetic peptide
  Seed: MDPRMCSLMQGSTLPRRSG
MDPRMFSLMQGSTTPRRSG

SEQ ID NO: 100305 - protein, 19 aa, Artificial Sequence
  Description of Artificial Sequence: Synthetic peptide
  Seed: MDPRMCSLMQGSTLPRRSG
MDPRMFSLMQGSTVPRRSG

SEQ ID NO: 100306 - protein, 19 aa, Artificial Sequence
  Description of Artificial Sequence: Synthetic peptide
  Seed: MDPRMCSLMQGSTLPRRSG
MDPRMFSLMQHSTLPRRSG

SEQ ID NO: 100307 - protein, 19 aa, Artificial Sequence
  Description of Artificial Sequence: Synthetic peptide
  Seed: MDPRMCSLMQGSTLPRRSG
MDPRMFSLMQHSTVPRRSG

SEQ ID NO: 100308 - protein, 19 aa, Artificial Sequence
  Description of Artificial Sequence: Synthetic peptide
  Seed: MDPRMCSLMQGSTLPRRSG
MDPRMFSLMQISTAPRRSG

SEQ ID NO: 100309 - protein, 19 aa, Artificial Sequence
  Description of Artificial Sequence: Synthetic peptide
  Seed: MDPRMCSLMQGSTLPRRSG
MDPRMFSLMQISTDPRRSG

SEQ ID NO: 100310 - protein, 19 aa, Artificial Sequence
  Description of Artificial Sequence: Synthetic peptide
  Seed: MDPRMCSLMQGSTLPRRSG
MDPRMFSLMQISTGPRRSG

SEQ ID NO: 100311 - protein, 19 aa, Artificial Sequence
  Description of Artificial Sequence: Synthetic peptide
  Seed: MDPRMCSLMQGSTLPRRSG
MDPRMFSLMQISTHPRRSG

SEQ ID NO: 100312 - protein, 19 aa, Artificial Sequence
  Description of Artificial Sequence: Synthetic peptide
  Seed: MDPRMCSLMQGSTLPRRSG
MDPRMFSLMQISTIPRRSG

SEQ ID NO: 100313 - protein, 19 aa, Artificial Sequence
  Description of Artificial Sequence: Synthetic peptide
  Seed: MDPRMCSLMQGSTLPRRSG
MDPRMFSLMQISTLPRRSG

SEQ ID NO: 100314 - protein, 19 aa, Artificial Sequence
  Description of Artificial Sequence: Synthetic peptide
  Seed: MDPRMCSLMQGSTLPRRSG
MDPRMFSLMQISTMPRRSG

SEQ ID NO: 100315 - protein, 19 aa, Artificial Sequence
  Description of Artificial Sequence: Synthetic peptide
  Seed: MDPRMCSLMQGSTLPRRSG
MDPRMFSLMQISTNPRRSG

SEQ ID NO: 100316 - protein, 19 aa, Artificial Sequence
  Description of Artificial Sequence: Synthetic peptide
  Seed: MDPRMCSLMQGSTLPRRSG
MDPRMFSLMQISTQPRRSG

SEQ ID NO: 100317 - protein, 19 aa, Artificial Sequence
  Description of Artificial Sequence: Synthetic peptide
  Seed: MDPRMCSLMQGSTLPRRSG
MDPRMFSLMQISTSPRRSG

SEQ ID NO: 100318 - protein, 19 aa, Artificial Sequence
  Description of Artificial Sequence: Synthetic peptide
  Seed: MDPRMCSLMQGSTLPRRSG
MDPRMFSLMQISTTPRRSG

SEQ ID NO: 100319 - protein, 19 aa, Artificial Sequence
  Description of Artificial Sequence: Synthetic peptide
  Seed: MDPRMCSLMQGSTLPRRSG
MDPRMFSLMQISTVPRRSG

SEQ ID NO: 100320 - protein, 19 aa, Artificial Sequence
  Description of Artificial Sequence: Synthetic peptide
  Seed: MDPRMCSLMQGSTLPRRSG
MDPRMFSLMQLSTAPRRSG

SEQ ID NO: 100321 - protein, 19 aa, Artificial Sequence
  Description of Artificial Sequence: Synthetic peptide
  Seed: MDPRMCSLMQGSTLPRRSG
MDPRMFSLMQLSTIPRRSG

SEQ ID NO: 100322 - protein, 19 aa, Artificial Sequence
  Description of Artificial Sequence: Synthetic peptide
  Seed: MDPRMCSLMQGSTLPRRSG
MDPRMFSLMQLSTLPRRSG

SEQ ID NO: 100323 - protein, 19 aa, Artificial Sequence
  Description of Artificial Sequence: Synthetic peptide
  Seed: MDPRMCSLMQGSTLPRRSG
MDPRMFSLMQLSTMPRRSG

SEQ ID NO: 100324 - protein, 19 aa, Artificial Sequence
  Description of Artificial Sequence: Synthetic peptide
  Seed: MDPRMCSLMQGSTLPRRSG
MDPRMFSLMQLSTNPRRSG

SEQ ID NO: 100325 - protein, 19 aa, Artificial Sequence
  Description of Artificial Sequence: Synthetic peptide
  Seed: MDPRMCSLMQGSTLPRRSG
MDPRMFSLMQLSTSPRRSG

SEQ ID NO: 100326 - protein, 19 aa, Artificial Sequence
  Description of Artificial Sequence: Synthetic peptide
  Seed: MDPRMCSLMQGSTLPRRSG
MDPRMFSLMQLSTTPRRSG

SEQ ID NO: 100327 - protein, 19 aa, Artificial Sequence
  Description of Artificial Sequence: Synthetic peptide
  Seed: MDPRMCSLMQGSTLPRRSG
MDPRMFSLMQLSTVPRRSG

SEQ ID NO: 100328 - protein, 19 aa, Artificial Sequence
  Description of Artificial Sequence: Synthetic peptide
  Seed: MDPRMCSLMQGSTLPRRSG
MDPRMFSLMQMSTAPRRSG

SEQ ID NO: 100329 - protein, 19 aa, Artificial Sequence
  Description of Artificial Sequence: Synthetic peptide
  Seed: MDPRMCSLMQGSTLPRRSG
MDPRMFSLMQMSTIPRRSG

SEQ ID NO: 100330 - protein, 19 aa, Artificial Sequence
  Description of Artificial Sequence: Synthetic peptide
  Seed: MDPRMCSLMQGSTLPRRSG
MDPRMFSLMQMSTLPRRSG

SEQ ID NO: 100331 - protein, 19 aa, Artificial Sequence
  Description of Artificial Sequence: Synthetic peptide
  Seed: MDPRMCSLMQGSTLPRRSG
MDPRMFSLMQMSTMPRRSG

SEQ ID NO: 100332 - protein, 19 aa, Artificial Sequence
  Description of Artificial Sequence: Synthetic peptide
  Seed: MDPRMCSLMQGSTLPRRSG
MDPRMFSLMQMSTNPRRSG

SEQ ID NO: 100333 - protein, 19 aa, Artificial Sequence
  Description of Artificial Sequence: Synthetic peptide
  Seed: MDPRMCSLMQGSTLPRRSG
MDPRMFSLMQMSTSPRRSG

SEQ ID NO: 100334 - protein, 19 aa, Artificial Sequence
  Description of Artificial Sequence: Synthetic peptide
  Seed: MDPRMCSLMQGSTLPRRSG
MDPRMFSLMQMSTTPRRSG

SEQ ID NO: 100335 - protein, 19 aa, Artificial Sequence
  Description of Artificial Sequence: Synthetic peptide
  Seed: MDPRMCSLMQGSTLPRRSG
MDPRMFSLMQMSTVPRRSG

SEQ ID NO: 100336 - protein, 19 aa, Artificial Sequence
  Description of Artificial Sequence: Synthetic peptide
  Seed: MDPRMCSLMQGSTLPRRSG
MDPRMFSLMQNSTAPRRSG

SEQ ID NO: 100337 - protein, 19 aa, Artificial Sequence
  Description of Artificial Sequence: Synthetic peptide
  Seed: MDPRMCSLMQGSTLPRRSG
MDPRMFSLMQNSTGPRRSG

SEQ ID NO: 100338 - protein, 19 aa, Artificial Sequence
  Description of Artificial Sequence: Synthetic peptide
  Seed: MDPRMCSLMQGSTLPRRSG
MDPRMFSLMQNSTIPRRSG

SEQ ID NO: 100339 - protein, 19 aa, Artificial Sequence
  Description of Artificial Sequence: Synthetic peptide
  Seed: MDPRMCSLMQGSTLPRRSG
MDPRMFSLMQNSTLPRRSG

SEQ ID NO: 100340 - protein, 19 aa, Artificial Sequence
  Description of Artificial Sequence: Synthetic peptide
  Seed: MDPRMCSLMQGSTLPRRSG
MDPRMFSLMQNSTMPRRSG

SEQ ID NO: 100341 - protein, 19 aa, Artificial Sequence
  Description of Artificial Sequence: Synthetic peptide
  Seed: MDPRMCSLMQGSTLPRRSG
MDPRMFSLMQNSTNPRRSG

SEQ ID NO: 100342 - protein, 19 aa, Artificial Sequence
  Description of Artificial Sequence: Synthetic peptide
  Seed: MDPRMCSLMQGSTLPRRSG
MDPRMFSLMQNSTSPRRSG

SEQ ID NO: 100343 - protein, 19 aa, Artificial Sequence
  Description of Artificial Sequence: Synthetic peptide
  Seed: MDPRMCSLMQGSTLPRRSG
MDPRMFSLMQNSTTPRRSG

SEQ ID NO: 100344 - protein, 19 aa, Artificial Sequence
  Description of Artificial Sequence: Synthetic peptide
  Seed: MDPRMCSLMQGSTLPRRSG
MDPRMFSLMQNSTVPRRSG

SEQ ID NO: 100345 - protein, 19 aa, Artificial Sequence
  Description of Artificial Sequence: Synthetic peptide
  Seed: MDPRMCSLMQGSTLPRRSG
MDPRMFSLMQPSTAPRRSG

SEQ ID NO: 100346 - protein, 19 aa, Artificial Sequence
  Description of Artificial Sequence: Synthetic peptide
  Seed: MDPRMCSLMQGSTLPRRSG
MDPRMFSLMQPSTDPRRSG

SEQ ID NO: 100347 - protein, 19 aa, Artificial Sequence
  Description of Artificial Sequence: Synthetic peptide
  Seed: MDPRMCSLMQGSTLPRRSG
MDPRMFSLMQPSTEPRRSG

SEQ ID NO: 100348 - protein, 19 aa, Artificial Sequence
  Description of Artificial Sequence: Synthetic peptide
  Seed: MDPRMCSLMQGSTLPRRSG
MDPRMFSLMQPSTFPRRSG

SEQ ID NO: 100349 - protein, 19 aa, Artificial Sequence
  Description of Artificial Sequence: Synthetic peptide
  Seed: MDPRMCSLMQGSTLPRRSG
MDPRMFSLMQPSTGPRRSG

SEQ ID NO: 100350 - protein, 19 aa, Artificial Sequence
  Description of Artificial Sequence: Synthetic peptide
  Seed: MDPRMCSLMQGSTLPRRSG
MDPRMFSLMQPSTHPRRSG

SEQ ID NO: 100351 - protein, 19 aa, Artificial Sequence
  Description of Artificial Sequence: Synthetic peptide
  Seed: MDPRMCSLMQGSTLPRRSG
MDPRMFSLMQPSTIPRRSG

SEQ ID NO: 100352 - protein, 19 aa, Artificial Sequence
  Description of Artificial Sequence: Synthetic peptide
  Seed: MDPRMCSLMQGSTLPRRSG
MDPRMFSLMQPSTLPRRSG

SEQ ID NO: 100353 - protein, 19 aa, Artificial Sequence
  Description of Artificial Sequence: Synthetic peptide
  Seed: MDPRMCSLMQGSTLPRRSG
MDPRMFSLMQPSTMPRRSG

SEQ ID NO: 100354 - protein, 19 aa, Artificial Sequence
  Description of Artificial Sequence: Synthetic peptide
  Seed: MDPRMCSLMQGSTLPRRSG
MDPRMFSLMQPSTNPRRSG

SEQ ID NO: 100355 - protein, 19 aa, Artificial Sequence
  Description of Artificial Sequence: Synthetic peptide
  Seed: MDPRMCSLMQGSTLPRRSG
MDPRMFSLMQPSTPPRRSG

SEQ ID NO: 100356 - protein, 19 aa, Artificial Sequence
  Description of Artificial Sequence: Synthetic peptide
  Seed: MDPRMCSLMQGSTLPRRSG
MDPRMFSLMQPSTQPRRSG

SEQ ID NO: 100357 - protein, 19 aa, Artificial Sequence
  Description of Artificial Sequence: Synthetic peptide
  Seed: MDPRMCSLMQGSTLPRRSG
MDPRMFSLMQPSTSPRRSG

SEQ ID NO: 100358 - protein, 19 aa, Artificial Sequence
  Description of Artificial Sequence: Synthetic peptide
  Seed: MDPRMCSLMQGSTLPRRSG
MDPRMFSLMQPSTTPRRSG

SEQ ID NO: 100359 - protein, 19 aa, Artificial Sequence
  Description of Artificial Sequence: Synthetic peptide
  Seed: MDPRMCSLMQGSTLPRRSG
MDPRMFSLMQPSTVPRRSG

SEQ ID NO: 100360 - protein, 19 aa, Artificial Sequence
  Description of Artificial Sequence: Synthetic peptide
  Seed: MDPRMCSLMQGSTLPRRSG
MDPRMFSLMQSSTAPRRSG

SEQ ID NO: 100361 - protein, 19 aa, Artificial Sequence
  Description of Artificial Sequence: Synthetic peptide
  Seed: MDPRMCSLMQGSTLPRRSG
MDPRMFSLMQSSTCPRRSG

SEQ ID NO: 100362 - protein, 19 aa, Artificial Sequence
  Description of Artificial Sequence: Synthetic peptide
  Seed: MDPRMCSLMQGSTLPRRSG
MDPRMFSLMQSSTDPRRSG

SEQ ID NO: 100363 - protein, 19 aa, Artificial Sequence
  Description of Artificial Sequence: Synthetic peptide
  Seed: MDPRMCSLMQGSTLPRRSG
MDPRMFSLMQSSTFPRRSG

SEQ ID NO: 100364 - protein, 19 aa, Artificial Sequence
  Description of Artificial Sequence: Synthetic peptide
  Seed: MDPRMCSLMQGSTLPRRSG
MDPRMFSLMQSSTGPRRSG

SEQ ID NO: 100365 - protein, 19 aa, Artificial Sequence
  Description of Artificial Sequence: Synthetic peptide
  Seed: MDPRMCSLMQGSTLPRRSG
MDPRMFSLMQSSTHPRRSG

SEQ ID NO: 100366 - protein, 19 aa, Artificial Sequence
  Description of Artificial Sequence: Synthetic peptide
  Seed: MDPRMCSLMQGSTLPRRSG
MDPRMFSLMQSSTIPRRSG

SEQ ID NO: 100367 - protein, 19 aa, Artificial Sequence
  Description of Artificial Sequence: Synthetic peptide
  Seed: MDPRMCSLMQGSTLPRRSG
MDPRMFSLMQSSTLPRRSG

SEQ ID NO: 100368 - protein, 19 aa, Artificial Sequence
  Description of Artificial Sequence: Synthetic peptide
  Seed: MDPRMCSLMQGSTLPRRSG
MDPRMFSLMQSSTMPRRSG

SEQ ID NO: 100369 - protein, 19 aa, Artificial Sequence
  Description of Artificial Sequence: Synthetic peptide
  Seed: MDPRMCSLMQGSTLPRRSG
MDPRMFSLMQSSTNPRRSG

SEQ ID NO: 100370 - protein, 19 aa, Artificial Sequence
  Description of Artificial Sequence: Synthetic peptide
  Seed: MDPRMCSLMQGSTLPRRSG
MDPRMFSLMQSSTPPRRSG

SEQ ID NO: 100371 - protein, 19 aa, Artificial Sequence
  Description of Artificial Sequence: Synthetic peptide
  Seed: MDPRMCSLMQGSTLPRRSG
MDPRMFSLMQSSTQPRRSG

SEQ ID NO: 100372 - protein, 19 aa, Artificial Sequence
  Description of Artificial Sequence: Synthetic peptide
  Seed: MDPRMCSLMQGSTLPRRSG
MDPRMFSLMQSSTSPRRSG

SEQ ID NO: 100373 - protein, 19 aa, Artificial Sequence
  Description of Artificial Sequence: Synthetic peptide
  Seed: MDPRMCSLMQGSTLPRRSG
MDPRMFSLMQSSTTPRRSG

SEQ ID NO: 100374 - protein, 19 aa, Artificial Sequence
  Description of Artificial Sequence: Synthetic peptide
  Seed: MDPRMCSLMQGSTLPRRSG
MDPRMFSLMQSSTVPRRSG

SEQ ID NO: 100375 - protein, 19 aa, Artificial Sequence
  Description of Artificial Sequence: Synthetic peptide
  Seed: MDPRMCSLMQGSTLPRRSG
MDPRMFSLMQTSTAPRRSG

SEQ ID NO: 100376 - protein, 19 aa, Artificial Sequence
  Description of Artificial Sequence: Synthetic peptide
  Seed: MDPRMCSLMQGSTLPRRSG
MDPRMFSLMQTSTGPRRSG

SEQ ID NO: 100377 - protein, 19 aa, Artificial Sequence
  Description of Artificial Sequence: Synthetic peptide
  Seed: MDPRMCSLMQGSTLPRRSG
MDPRMFSLMQTSTHPRRSG

SEQ ID NO: 100378 - protein, 19 aa, Artificial Sequence
  Description of Artificial Sequence: Synthetic peptide
  Seed: MDPRMCSLMQGSTLPRRSG
MDPRMFSLMQTSTIPRRSG

SEQ ID NO: 100379 - protein, 19 aa, Artificial Sequence
  Description of Artificial Sequence: Synthetic peptide
  Seed: MDPRMCSLMQGSTLPRRSG
MDPRMFSLMQTSTLPRRSG

SEQ ID NO: 100380 - protein, 19 aa, Artificial Sequence
  Description of Artificial Sequence: Synthetic peptide
  Seed: MDPRMCSLMQGSTLPRRSG
MDPRMFSLMQTSTMPRRSG

SEQ ID NO: 100381 - protein, 19 aa, Artificial Sequence
  Description of Artificial Sequence: Synthetic peptide
  Seed: MDPRMCSLMQGSTLPRRSG
MDPRMFSLMQTSTNPRRSG

SEQ ID NO: 100382 - protein, 19 aa, Artificial Sequence
  Description of Artificial Sequence: Synthetic peptide
  Seed: MDPRMCSLMQGSTLPRRSG
MDPRMFSLMQTSTPPRRSG

SEQ ID NO: 100383 - protein, 19 aa, Artificial Sequence
  Description of Artificial Sequence: Synthetic peptide
  Seed: MDPRMCSLMQGSTLPRRSG
MDPRMFSLMQTSTQPRRSG

SEQ ID NO: 100384 - protein, 19 aa, Artificial Sequence
  Description of Artificial Sequence: Synthetic peptide
  Seed: MDPRMCSLMQGSTLPRRSG
MDPRMFSLMQTSTSPRRSG

SEQ ID NO: 100385 - protein, 19 aa, Artificial Sequence
  Description of Artificial Sequence: Synthetic peptide
  Seed: MDPRMCSLMQGSTLPRRSG
MDPRMFSLMQTSTTPRRSG

SEQ ID NO: 100386 - protein, 19 aa, Artificial Sequence
  Description of Artificial Sequence: Synthetic peptide
  Seed: MDPRMCSLMQGSTLPRRSG
MDPRMFSLMQTSTVPRRSG

SEQ ID NO: 100387 - protein, 19 aa, Artificial Sequence
  Description of Artificial Sequence: Synthetic peptide
  Seed: MDPRMCSLMQGSTLPRRSG
MDPRMFSLMQVSTAPRRSG

SEQ ID NO: 100388 - protein, 19 aa, Artificial Sequence
  Description of Artificial Sequence: Synthetic peptide
  Seed: MDPRMCSLMQGSTLPRRSG
MDPRMFSLMQVSTCPRRSG

SEQ ID NO: 100389 - protein, 19 aa, Artificial Sequence
  Description of Artificial Sequence: Synthetic peptide
  Seed: MDPRMCSLMQGSTLPRRSG
MDPRMFSLMQVSTDPRRSG

SEQ ID NO: 100390 - protein, 19 aa, Artificial Sequence
  Description of Artificial Sequence: Synthetic peptide
  Seed: MDPRMCSLMQGSTLPRRSG
MDPRMFSLMQVSTEPRRSG

SEQ ID NO: 100391 - protein, 19 aa, Artificial Sequence
  Description of Artificial Sequence: Synthetic peptide
  Seed: MDPRMCSLMQGSTLPRRSG
MDPRMFSLMQVSTGPRRSG

SEQ ID NO: 100392 - protein, 19 aa, Artificial Sequence
  Description of Artificial Sequence: Synthetic peptide
  Seed: MDPRMCSLMQGSTLPRRSG
MDPRMFSLMQVSTHPRRSG

SEQ ID NO: 100393 - protein, 19 aa, Artificial Sequence
  Description of Artificial Sequence: Synthetic peptide
  Seed: MDPRMCSLMQGSTLPRRSG
MDPRMFSLMQVSTIPRRSG

SEQ ID NO: 100394 - protein, 19 aa, Artificial Sequence
  Description of Artificial Sequence: Synthetic peptide
  Seed: MDPRMCSLMQGSTLPRRSG
MDPRMFSLMQVSTLPRRSG

SEQ ID NO: 100395 - protein, 19 aa, Artificial Sequence
  Description of Artificial Sequence: Synthetic peptide
  Seed: MDPRMCSLMQGSTLPRRSG
MDPRMFSLMQVSTMPRRSG

SEQ ID NO: 100396 - protein, 19 aa, Artificial Sequence
  Description of Artificial Sequence: Synthetic peptide
  Seed: MDPRMCSLMQGSTLPRRSG
MDPRMFSLMQVSTNPRRSG

SEQ ID NO: 100397 - protein, 19 aa, Artificial Sequence
  Description of Artificial Sequence: Synthetic peptide
  Seed: MDPRMCSLMQGSTLPRRSG
MDPRMFSLMQVSTPPRRSG

SEQ ID NO: 100398 - protein, 19 aa, Artificial Sequence
  Description of Artificial Sequence: Synthetic peptide
  Seed: MDPRMCSLMQGSTLPRRSG
MDPRMFSLMQVSTQPRRSG

SEQ ID NO: 100399 - protein, 19 aa, Artificial Sequence
  Description of Artificial Sequence: Synthetic peptide
  Seed: MDPRMCSLMQGSTLPRRSG
MDPRMFSLMQVSTSPRRSG

SEQ ID NO: 100400 - protein, 19 aa, Artificial Sequence
  Description of Artificial Sequence: Synthetic peptide
  Seed: MDPRMCSLMQGSTLPRRSG
MDPRMFSLMQVSTTPRRSG

SEQ ID NO: 100401 - protein, 19 aa, Artificial Sequence
  Description of Artificial Sequence: Synthetic peptide
  Seed: MDPRMCSLMQGSTLPRRSG
MDPRMFSLMQVSTVPRRSG

SEQ ID NO: 100402 - protein, 19 aa, Artificial Sequence
  Description of Artificial Sequence: Synthetic peptide
  Seed: MDPRMCSLMQGSTLPRRSG
MDPRMFSLNQASTIPRRSG

SEQ ID NO: 100403 - protein, 19 aa, Artificial Sequence
  Description of Artificial Sequence: Synthetic peptide
  Seed: MDPRMCSLMQGSTLPRRSG
MDPRMFSLNQASTLPRRSG

SEQ ID NO: 100404 - protein, 19 aa, Artificial Sequence
  Description of Artificial Sequence: Synthetic peptide
  Seed: MDPRMCSLMQGSTLPRRSG
MDPRMFSLNQASTVPRRSG

SEQ ID NO: 100405 - protein, 19 aa, Artificial Sequence
  Description of Artificial Sequence: Synthetic peptide
  Seed: MDPRMCSLMQGSTLPRRSG
MDPRMFSLQQASTAPRRSG

SEQ ID NO: 100406 - protein, 19 aa, Artificial Sequence
  Description of Artificial Sequence: Synthetic peptide
  Seed: MDPRMCSLMQGSTLPRRSG
MDPRMFSLQQASTIPRRSG

SEQ ID NO: 100407 - protein, 19 aa, Artificial Sequence
  Description of Artificial Sequence: Synthetic peptide
  Seed: MDPRMCSLMQGSTLPRRSG
MDPRMFSLQQASTLPRRSG

SEQ ID NO: 100408 - protein, 19 aa, Artificial Sequence
  Description of Artificial Sequence: Synthetic peptide
  Seed: MDPRMCSLMQGSTLPRRSG
MDPRMFSLQQASTMPRRSG

SEQ ID NO: 100409 - protein, 19 aa, Artificial Sequence
  Description of Artificial Sequence: Synthetic peptide
  Seed: MDPRMCSLMQGSTLPRRSG
MDPRMFSLQQASTNPRRSG

SEQ ID NO: 100410 - protein, 19 aa, Artificial Sequence
  Description of Artificial Sequence: Synthetic peptide
  Seed: MDPRMCSLMQGSTLPRRSG
MDPRMFSLQQASTSPRRSG

SEQ ID NO: 100411 - protein, 19 aa, Artificial Sequence
  Description of Artificial Sequence: Synthetic peptide
  Seed: MDPRMCSLMQGSTLPRRSG
MDPRMFSLQQASTTPRRSG

SEQ ID NO: 100412 - protein, 19 aa, Artificial Sequence
  Description of Artificial Sequence: Synthetic peptide
  Seed: MDPRMCSLMQGSTLPRRSG
MDPRMFSLQQASTVPRRSG

SEQ ID NO: 100413 - protein, 19 aa, Artificial Sequence
  Description of Artificial Sequence: Synthetic peptide
  Seed: MDPRMCSLMQGSTLPRRSG
MDPRMFSLQQGSTAPRRSG

SEQ ID NO: 100414 - protein, 19 aa, Artificial Sequence
  Description of Artificial Sequence: Synthetic peptide
  Seed: MDPRMCSLMQGSTLPRRSG
MDPRMFSLQQGSTIPRRSG

SEQ ID NO: 100415 - protein, 19 aa, Artificial Sequence
  Description of Artificial Sequence: Synthetic peptide
  Seed: MDPRMCSLMQGSTLPRRSG
MDPRMFSLQQGSTLPRRSG

SEQ ID NO: 100416 - protein, 19 aa, Artificial Sequence
  Description of Artificial Sequence: Synthetic peptide
  Seed: MDPRMCSLMQGSTLPRRSG
MDPRMFSLQQGSTMPRRSG

SEQ ID NO: 100417 - protein, 19 aa, Artificial Sequence
  Description of Artificial Sequence: Synthetic peptide
  Seed: MDPRMCSLMQGSTLPRRSG
MDPRMFSLQQGSTTPRRSG

SEQ ID NO: 100418 - protein, 19 aa, Artificial Sequence
  Description of Artificial Sequence: Synthetic peptide
  Seed: MDPRMCSLMQGSTLPRRSG
MDPRMFSLQQGSTVPRRSG

SEQ ID NO: 100419 - protein, 19 aa, Artificial Sequence
  Description of Artificial Sequence: Synthetic peptide
  Seed: MDPRMCSLMQGSTLPRRSG
MDPRMFSLQQISTAPRRSG

SEQ ID NO: 100420 - protein, 19 aa, Artificial Sequence
  Description of Artificial Sequence: Synthetic peptide
  Seed: MDPRMCSLMQGSTLPRRSG
MDPRMFSLQQISTNPRRSG

SEQ ID NO: 100421 - protein, 19 aa, Artificial Sequence
  Description of Artificial Sequence: Synthetic peptide
  Seed: MDPRMCSLMQGSTLPRRSG
MDPRMFSLQQISTSPRRSG

SEQ ID NO: 100422 - protein, 19 aa, Artificial Sequence
  Description of Artificial Sequence: Synthetic peptide
  Seed: MDPRMCSLMQGSTLPRRSG
MDPRMFSLQQNSTIPRRSG

SEQ ID NO: 100423 - protein, 19 aa, Artificial Sequence
  Description of Artificial Sequence: Synthetic peptide
  Seed: MDPRMCSLMQGSTLPRRSG
MDPRMFSLQQNSTLPRRSG

SEQ ID NO: 100424 - protein, 19 aa, Artificial Sequence
  Description of Artificial Sequence: Synthetic peptide
  Seed: MDPRMCSLMQGSTLPRRSG
MDPRMFSLQQNSTVPRRSG

SEQ ID NO: 100425 - protein, 19 aa, Artificial Sequence
  Description of Artificial Sequence: Synthetic peptide
  Seed: MDPRMCSLMQGSTLPRRSG
MDPRMFSLQQPSTAPRRSG

SEQ ID NO: 100426 - protein, 19 aa, Artificial Sequence
  Description of Artificial Sequence: Synthetic peptide
  Seed: MDPRMCSLMQGSTLPRRSG
MDPRMFSLQQPSTIPRRSG

SEQ ID NO: 100427 - protein, 19 aa, Artificial Sequence
  Description of Artificial Sequence: Synthetic peptide
  Seed: MDPRMCSLMQGSTLPRRSG
MDPRMFSLQQPSTLPRRSG

SEQ ID NO: 100428 - protein, 19 aa, Artificial Sequence
  Description of Artificial Sequence: Synthetic peptide
  Seed: MDPRMCSLMQGSTLPRRSG
MDPRMFSLQQPSTSPRRSG

SEQ ID NO: 100429 - protein, 19 aa, Artificial Sequence
  Description of Artificial Sequence: Synthetic peptide
  Seed: MDPRMCSLMQGSTLPRRSG
MDPRMFSLQQPSTVPRRSG

SEQ ID NO: 100430 - protein, 19 aa, Artificial Sequence
  Description of Artificial Sequence: Synthetic peptide
  Seed: MDPRMCSLMQGSTLPRRSG
MDPRMFSLQQSSTAPRRSG

SEQ ID NO: 100431 - protein, 19 aa, Artificial Sequence
  Description of Artificial Sequence: Synthetic peptide
  Seed: MDPRMCSLMQGSTLPRRSG
MDPRMFSLQQSSTIPRRSG

SEQ ID NO: 100432 - protein, 19 aa, Artificial Sequence
  Description of Artificial Sequence: Synthetic peptide
  Seed: MDPRMCSLMQGSTLPRRSG
MDPRMFSLQQSSTLPRRSG

SEQ ID NO: 100433 - protein, 19 aa, Artificial Sequence
  Description of Artificial Sequence: Synthetic peptide
  Seed: MDPRMCSLMQGSTLPRRSG
MDPRMFSLQQSSTMPRRSG

SEQ ID NO: 100434 - protein, 19 aa, Artificial Sequence
  Description of Artificial Sequence: Synthetic peptide
  Seed: MDPRMCSLMQGSTLPRRSG
MDPRMFSLQQSSTNPRRSG

SEQ ID NO: 100435 - protein, 19 aa, Artificial Sequence
  Description of Artificial Sequence: Synthetic peptide
  Seed: MDPRMCSLMQGSTLPRRSG
MDPRMFSLQQSSTSPRRSG

SEQ ID NO: 100436 - protein, 19 aa, Artificial Sequence
  Description of Artificial Sequence: Synthetic peptide
  Seed: MDPRMCSLMQGSTLPRRSG
MDPRMFSLQQSSTTPRRSG

SEQ ID NO: 100437 - protein, 19 aa, Artificial Sequence
  Description of Artificial Sequence: Synthetic peptide
  Seed: MDPRMCSLMQGSTLPRRSG
MDPRMFSLQQSSTVPRRSG

SEQ ID NO: 100438 - protein, 19 aa, Artificial Sequence
  Description of Artificial Sequence: Synthetic peptide
  Seed: MDPRMCSLMQGSTLPRRSG
MDPRMFSLQQTSTAPRRSG

SEQ ID NO: 100439 - protein, 19 aa, Artificial Sequence
  Description of Artificial Sequence: Synthetic peptide
  Seed: MDPRMCSLMQGSTLPRRSG
MDPRMFSLQQTSTIPRRSG

SEQ ID NO: 100440 - protein, 19 aa, Artificial Sequence
  Description of Artificial Sequence: Synthetic peptide
  Seed: MDPRMCSLMQGSTLPRRSG
MDPRMFSLQQTSTLPRRSG

SEQ ID NO: 100441 - protein, 19 aa, Artificial Sequence
  Description of Artificial Sequence: Synthetic peptide
  Seed: MDPRMCSLMQGSTLPRRSG
MDPRMFSLQQTSTNPRRSG

SEQ ID NO: 100442 - protein, 19 aa, Artificial Sequence
  Description of Artificial Sequence: Synthetic peptide
  Seed: MDPRMCSLMQGSTLPRRSG
MDPRMFSLQQTSTSPRRSG

SEQ ID NO: 100443 - protein, 19 aa, Artificial Sequence
  Description of Artificial Sequence: Synthetic peptide
  Seed: MDPRMCSLMQGSTLPRRSG
MDPRMFSLQQTSTVPRRSG

SEQ ID NO: 100444 - protein, 19 aa, Artificial Sequence
  Description of Artificial Sequence: Synthetic peptide
  Seed: MDPRMCSLMQGSTLPRRSG
MDPRMFSLQQVSTAPRRSG

SEQ ID NO: 100445 - protein, 19 aa, Artificial Sequence
  Description of Artificial Sequence: Synthetic peptide
  Seed: MDPRMCSLMQGSTLPRRSG
MDPRMFSLQQVSTNPRRSG

SEQ ID NO: 100446 - protein, 19 aa, Artificial Sequence
  Description of Artificial Sequence: Synthetic peptide
  Seed: MDPRMCSLMQGSTLPRRSG
MDPRMFSLQQVSTSPRRSG

SEQ ID NO: 100447 - protein, 19 aa, Artificial Sequence
  Description of Artificial Sequence: Synthetic peptide
  Seed: MDPRMCSLMQGSTLPRRSG
MDPRMFSLQQVSTVPRRSG

SEQ ID NO: 100448 - protein, 19 aa, Artificial Sequence
  Description of Artificial Sequence: Synthetic peptide
  Seed: MDPRMCSLMQGSTLPRRSG
MDPRMFSLSQASTAPRRSG

SEQ ID NO: 100449 - protein, 19 aa, Artificial Sequence
  Description of Artificial Sequence: Synthetic peptide
  Seed: MDPRMCSLMQGSTLPRRSG
MDPRMFSLSQASTIPRRSG

SEQ ID NO: 100450 - protein, 19 aa, Artificial Sequence
  Description of Artificial Sequence: Synthetic peptide
  Seed: MDPRMCSLMQGSTLPRRSG
MDPRMFSLSQASTLPRRSG

SEQ ID NO: 100451 - protein, 19 aa, Artificial Sequence
  Description of Artificial Sequence: Synthetic peptide
  Seed: MDPRMCSLMQGSTLPRRSG
MDPRMFSLSQASTMPRRSG

SEQ ID NO: 100452 - protein, 19 aa, Artificial Sequence
  Description of Artificial Sequence: Synthetic peptide
  Seed: MDPRMCSLMQGSTLPRRSG
MDPRMFSLSQASTNPRRSG

SEQ ID NO: 100453 - protein, 19 aa, Artificial Sequence
  Description of Artificial Sequence: Synthetic peptide
  Seed: MDPRMCSLMQGSTLPRRSG
MDPRMFSLSQASTSPRRSG

SEQ ID NO: 100454 - protein, 19 aa, Artificial Sequence
  Description of Artificial Sequence: Synthetic peptide
  Seed: MDPRMCSLMQGSTLPRRSG
MDPRMFSLSQASTVPRRSG

SEQ ID NO: 100455 - protein, 19 aa, Artificial Sequence
  Description of Artificial Sequence: Synthetic peptide
  Seed: MDPRMCSLMQGSTLPRRSG
MDPRMFSLSQGSTIPRRSG

SEQ ID NO: 100456 - protein, 19 aa, Artificial Sequence
  Description of Artificial Sequence: Synthetic peptide
  Seed: MDPRMCSLMQGSTLPRRSG
MDPRMFSLSQGSTLPRRSG

SEQ ID NO: 100457 - protein, 19 aa, Artificial Sequence
  Description of Artificial Sequence: Synthetic peptide
  Seed: MDPRMCSLMQGSTLPRRSG
MDPRMFSLSQGSTVPRRSG

SEQ ID NO: 100458 - protein, 19 aa, Artificial Sequence
  Description of Artificial Sequence: Synthetic peptide
  Seed: MDPRMCSLMQGSTLPRRSG
MDPRMFSLSQPSTIPRRSG

SEQ ID NO: 100459 - protein, 19 aa, Artificial Sequence
  Description of Artificial Sequence: Synthetic peptide
  Seed: MDPRMCSLMQGSTLPRRSG
MDPRMFSLSQPSTLPRRSG

SEQ ID NO: 100460 - protein, 19 aa, Artificial Sequence
  Description of Artificial Sequence: Synthetic peptide
  Seed: MDPRMCSLMQGSTLPRRSG
MDPRMFSLSQPSTVPRRSG

SEQ ID NO: 100461 - protein, 19 aa, Artificial Sequence
  Description of Artificial Sequence: Synthetic peptide
  Seed: MDPRMCSLMQGSTLPRRSG
MDPRMFSLSQSSTIPRRSG

SEQ ID NO: 100462 - protein, 19 aa, Artificial Sequence
  Description of Artificial Sequence: Synthetic peptide
  Seed: MDPRMCSLMQGSTLPRRSG
MDPRMFSLSQSSTLPRRSG

SEQ ID NO: 100463 - protein, 19 aa, Artificial Sequence
  Description of Artificial Sequence: Synthetic peptide
  Seed: MDPRMCSLMQGSTLPRRSG
MDPRMFSLSQSSTVPRRSG

SEQ ID NO: 100464 - protein, 19 aa, Artificial Sequence
  Description of Artificial Sequence: Synthetic peptide
  Seed: MDPRMCSLMQGSTLPRRSG
MDPRMFSLTQASTAPRRSG

SEQ ID NO: 100465 - protein, 19 aa, Artificial Sequence
  Description of Artificial Sequence: Synthetic peptide
  Seed: MDPRMCSLMQGSTLPRRSG
MDPRMFSLTQASTIPRRSG

SEQ ID NO: 100466 - protein, 19 aa, Artificial Sequence
  Description of Artificial Sequence: Synthetic peptide
  Seed: MDPRMCSLMQGSTLPRRSG
MDPRMFSLTQASTLPRRSG

SEQ ID NO: 100467 - protein, 19 aa, Artificial Sequence
  Description of Artificial Sequence: Synthetic peptide
  Seed: MDPRMCSLMQGSTLPRRSG
MDPRMFSLTQASTSPRRSG

SEQ ID NO: 100468 - protein, 19 aa, Artificial Sequence
  Description of Artificial Sequence: Synthetic peptide
  Seed: MDPRMCSLMQGSTLPRRSG
MDPRMFSLTQASTVPRRSG

SEQ ID NO: 100469 - protein, 19 aa, Artificial Sequence
  Description of Artificial Sequence: Synthetic peptide
  Seed: MDPRMCSLMQGSTLPRRSG
MDPRMFSLTQGSTLPRRSG

SEQ ID NO: 100470 - protein, 19 aa, Artificial Sequence
  Description of Artificial Sequence: Synthetic peptide
  Seed: MDPRMCSLMQGSTLPRRSG
MDPRMFSLVQASTAPRRSG

SEQ ID NO: 100471 - protein, 19 aa, Artificial Sequence
  Description of Artificial Sequence: Synthetic peptide
  Seed: MDPRMCSLMQGSTLPRRSG
MDPRMFSLVQASTGPRRSG

SEQ ID NO: 100472 - protein, 19 aa, Artificial Sequence
  Description of Artificial Sequence: Synthetic peptide
  Seed: MDPRMCSLMQGSTLPRRSG
MDPRMFSLVQASTHPRRSG

SEQ ID NO: 100473 - protein, 19 aa, Artificial Sequence
  Description of Artificial Sequence: Synthetic peptide
  Seed: MDPRMCSLMQGSTLPRRSG
MDPRMFSLVQASTIPRRSG

SEQ ID NO: 100474 - protein, 19 aa, Artificial Sequence
  Description of Artificial Sequence: Synthetic peptide
  Seed: MDPRMCSLMQGSTLPRRSG
MDPRMFSLVQASTLPRRSG

SEQ ID NO: 100475 - protein, 19 aa, Artificial Sequence
  Description of Artificial Sequence: Synthetic peptide
  Seed: MDPRMCSLMQGSTLPRRSG
MDPRMFSLVQASTMPRRSG

SEQ ID NO: 100476 - protein, 19 aa, Artificial Sequence
  Description of Artificial Sequence: Synthetic peptide
  Seed: MDPRMCSLMQGSTLPRRSG
MDPRMFSLVQASTNPRRSG

SEQ ID NO: 100477 - protein, 19 aa, Artificial Sequence
  Description of Artificial Sequence: Synthetic peptide
  Seed: MDPRMCSLMQGSTLPRRSG
MDPRMFSLVQASTQPRRSG

SEQ ID NO: 100478 - protein, 19 aa, Artificial Sequence
  Description of Artificial Sequence: Synthetic peptide
  Seed: MDPRMCSLMQGSTLPRRSG
MDPRMFSLVQASTSPRRSG

SEQ ID NO: 100479 - protein, 19 aa, Artificial Sequence
  Description of Artificial Sequence: Synthetic peptide
  Seed: MDPRMCSLMQGSTLPRRSG
MDPRMFSLVQASTTPRRSG

SEQ ID NO: 100480 - protein, 19 aa, Artificial Sequence
  Description of Artificial Sequence: Synthetic peptide
  Seed: MDPRMCSLMQGSTLPRRSG
MDPRMFSLVQASTVPRRSG

SEQ ID NO: 100481 - protein, 19 aa, Artificial Sequence
  Description of Artificial Sequence: Synthetic peptide
  Seed: MDPRMCSLMQGSTLPRRSG
MDPRMFSLVQGSTAPRRSG

SEQ ID NO: 100482 - protein, 19 aa, Artificial Sequence
  Description of Artificial Sequence: Synthetic peptide
  Seed: MDPRMCSLMQGSTLPRRSG
MDPRMFSLVQGSTIPRRSG

SEQ ID NO: 100483 - protein, 19 aa, Artificial Sequence
  Description of Artificial Sequence: Synthetic peptide
  Seed: MDPRMCSLMQGSTLPRRSG
MDPRMFSLVQGSTLPRRSG

SEQ ID NO: 100484 - protein, 19 aa, Artificial Sequence
  Description of Artificial Sequence: Synthetic peptide
  Seed: MDPRMCSLMQGSTLPRRSG
MDPRMFSLVQGSTMPRRSG

SEQ ID NO: 100485 - protein, 19 aa, Artificial Sequence
  Description of Artificial Sequence: Synthetic peptide
  Seed: MDPRMCSLMQGSTLPRRSG
MDPRMFSLVQGSTNPRRSG

SEQ ID NO: 100486 - protein, 19 aa, Artificial Sequence
  Description of Artificial Sequence: Synthetic peptide
  Seed: MDPRMCSLMQGSTLPRRSG
MDPRMFSLVQGSTSPRRSG

SEQ ID NO: 100487 - protein, 19 aa, Artificial Sequence
  Description of Artificial Sequence: Synthetic peptide
  Seed: MDPRMCSLMQGSTLPRRSG
MDPRMFSLVQGSTTPRRSG

SEQ ID NO: 100488 - protein, 19 aa, Artificial Sequence
  Description of Artificial Sequence: Synthetic peptide
  Seed: MDPRMCSLMQGSTLPRRSG
MDPRMFSLVQGSTVPRRSG

SEQ ID NO: 100489 - protein, 19 aa, Artificial Sequence
  Description of Artificial Sequence: Synthetic peptide
  Seed: MDPRMCSLMQGSTLPRRSG
MDPRMFSLVQISTAPRRSG

SEQ ID NO: 100490 - protein, 19 aa, Artificial Sequence
  Description of Artificial Sequence: Synthetic peptide
  Seed: MDPRMCSLMQGSTLPRRSG
MDPRMFSLVQISTNPRRSG

SEQ ID NO: 100491 - protein, 19 aa, Artificial Sequence
  Description of Artificial Sequence: Synthetic peptide
  Seed: MDPRMCSLMQGSTLPRRSG
MDPRMFSLVQISTSPRRSG

SEQ ID NO: 100492 - protein, 19 aa, Artificial Sequence
  Description of Artificial Sequence: Synthetic peptide
  Seed: MDPRMCSLMQGSTLPRRSG
MDPRMFSLVQISTTPRRSG

SEQ ID NO: 100493 - protein, 19 aa, Artificial Sequence
  Description of Artificial Sequence: Synthetic peptide
  Seed: MDPRMCSLMQGSTLPRRSG
MDPRMFSLVQISTVPRRSG

SEQ ID NO: 100494 - protein, 19 aa, Artificial Sequence
  Description of Artificial Sequence: Synthetic peptide
  Seed: MDPRMCSLMQGSTLPRRSG
MDPRMFSLVQNSTAPRRSG

SEQ ID NO: 100495 - protein, 19 aa, Artificial Sequence
  Description of Artificial Sequence: Synthetic peptide
  Seed: MDPRMCSLMQGSTLPRRSG
MDPRMFSLVQNSTIPRRSG

SEQ ID NO: 100496 - protein, 19 aa, Artificial Sequence
  Description of Artificial Sequence: Synthetic peptide
  Seed: MDPRMCSLMQGSTLPRRSG
MDPRMFSLVQNSTLPRRSG

SEQ ID NO: 100497 - protein, 19 aa, Artificial Sequence
  Description of Artificial Sequence: Synthetic peptide
  Seed: MDPRMCSLMQGSTLPRRSG
MDPRMFSLVQNSTSPRRSG

SEQ ID NO: 100498 - protein, 19 aa, Artificial Sequence
  Description of Artificial Sequence: Synthetic peptide
  Seed: MDPRMCSLMQGSTLPRRSG
MDPRMFSLVQNSTVPRRSG

SEQ ID NO: 100499 - protein, 19 aa, Artificial Sequence
  Description of Artificial Sequence: Synthetic peptide
  Seed: MDPRMCSLMQGSTLPRRSG
MDPRMFSLVQPSTAPRRSG

SEQ ID NO: 100500 - protein, 19 aa, Artificial Sequence
  Description of Artificial Sequence: Synthetic peptide
  Seed: MDPRMCSLMQGSTLPRRSG
MDPRMFSLVQPSTGPRRSG

SEQ ID NO: 100501 - protein, 19 aa, Artificial Sequence
  Description of Artificial Sequence: Synthetic peptide
  Seed: MDPRMCSLMQGSTLPRRSG
MDPRMFSLVQPSTIPRRSG

SEQ ID NO: 100502 - protein, 19 aa, Artificial Sequence
  Description of Artificial Sequence: Synthetic peptide
  Seed: MDPRMCSLMQGSTLPRRSG
MDPRMFSLVQPSTLPRRSG

SEQ ID NO: 100503 - protein, 19 aa, Artificial Sequence
  Description of Artificial Sequence: Synthetic peptide
  Seed: MDPRMCSLMQGSTLPRRSG
MDPRMFSLVQPSTMPRRSG

SEQ ID NO: 100504 - protein, 19 aa, Artificial Sequence
  Description of Artificial Sequence: Synthetic peptide
  Seed: MDPRMCSLMQGSTLPRRSG
MDPRMFSLVQPSTNPRRSG

SEQ ID NO: 100505 - protein, 19 aa, Artificial Sequence
  Description of Artificial Sequence: Synthetic peptide
  Seed: MDPRMCSLMQGSTLPRRSG
MDPRMFSLVQPSTSPRRSG

SEQ ID NO: 100506 - protein, 19 aa, Artificial Sequence
  Description of Artificial Sequence: Synthetic peptide
  Seed: MDPRMCSLMQGSTLPRRSG
MDPRMFSLVQPSTTPRRSG

SEQ ID NO: 100507 - protein, 19 aa, Artificial Sequence
  Description of Artificial Sequence: Synthetic peptide
  Seed: MDPRMCSLMQGSTLPRRSG
MDPRMFSLVQPSTVPRRSG

SEQ ID NO: 100508 - protein, 19 aa, Artificial Sequence
  Description of Artificial Sequence: Synthetic peptide
  Seed: MDPRMCSLMQGSTLPRRSG
MDPRMFSLVQSSTAPRRSG

SEQ ID NO: 100509 - protein, 19 aa, Artificial Sequence
  Description of Artificial Sequence: Synthetic peptide
  Seed: MDPRMCSLMQGSTLPRRSG
MDPRMFSLVQSSTIPRRSG

SEQ ID NO: 100510 - protein, 19 aa, Artificial Sequence
  Description of Artificial Sequence: Synthetic peptide
  Seed: MDPRMCSLMQGSTLPRRSG
MDPRMFSLVQSSTLPRRSG

SEQ ID NO: 100511 - protein, 19 aa, Artificial Sequence
  Description of Artificial Sequence: Synthetic peptide
  Seed: MDPRMCSLMQGSTLPRRSG
MDPRMFSLVQSSTMPRRSG

SEQ ID NO: 100512 - protein, 19 aa, Artificial Sequence
  Description of Artificial Sequence: Synthetic peptide
  Seed: MDPRMCSLMQGSTLPRRSG
MDPRMFSLVQSSTNPRRSG

SEQ ID NO: 100513 - protein, 19 aa, Artificial Sequence
  Description of Artificial Sequence: Synthetic peptide
  Seed: MDPRMCSLMQGSTLPRRSG
MDPRMFSLVQSSTSPRRSG

SEQ ID NO: 100514 - protein, 19 aa, Artificial Sequence
  Description of Artificial Sequence: Synthetic peptide
  Seed: MDPRMCSLMQGSTLPRRSG
MDPRMFSLVQSSTTPRRSG

SEQ ID NO: 100515 - protein, 19 aa, Artificial Sequence
  Description of Artificial Sequence: Synthetic peptide
  Seed: MDPRMCSLMQGSTLPRRSG
MDPRMFSLVQSSTVPRRSG

SEQ ID NO: 100516 - protein, 19 aa, Artificial Sequence
  Description of Artificial Sequence: Synthetic peptide
  Seed: MDPRMCSLMQGSTLPRRSG
MDPRMFSLVQTSTAPRRSG

SEQ ID NO: 100517 - protein, 19 aa, Artificial Sequence
  Description of Artificial Sequence: Synthetic peptide
  Seed: MDPRMCSLMQGSTLPRRSG
MDPRMFSLVQTSTIPRRSG

SEQ ID NO: 100518 - protein, 19 aa, Artificial Sequence
  Description of Artificial Sequence: Synthetic peptide
  Seed: MDPRMCSLMQGSTLPRRSG
MDPRMFSLVQTSTLPRRSG

SEQ ID NO: 100519 - protein, 19 aa, Artificial Sequence
  Description of Artificial Sequence: Synthetic peptide
  Seed: MDPRMCSLMQGSTLPRRSG
MDPRMFSLVQTSTMPRRSG

SEQ ID NO: 100520 - protein, 19 aa, Artificial Sequence
  Description of Artificial Sequence: Synthetic peptide
  Seed: MDPRMCSLMQGSTLPRRSG
MDPRMFSLVQTSTNPRRSG

SEQ ID NO: 100521 - protein, 19 aa, Artificial Sequence
  Description of Artificial Sequence: Synthetic peptide
  Seed: MDPRMCSLMQGSTLPRRSG
MDPRMFSLVQTSTSPRRSG

SEQ ID NO: 100522 - protein, 19 aa, Artificial Sequence
  Description of Artificial Sequence: Synthetic peptide
  Seed: MDPRMCSLMQGSTLPRRSG
MDPRMFSLVQTSTTPRRSG

SEQ ID NO: 100523 - protein, 19 aa, Artificial Sequence
  Description of Artificial Sequence: Synthetic peptide
  Seed: MDPRMCSLMQGSTLPRRSG
MDPRMFSLVQTSTVPRRSG

SEQ ID NO: 100524 - protein, 19 aa, Artificial Sequence
  Description of Artificial Sequence: Synthetic peptide
  Seed: MDPRMCSLMQGSTLPRRSG
MDPRMFSLVQVSTAPRRSG

SEQ ID NO: 100525 - protein, 19 aa, Artificial Sequence
  Description of Artificial Sequence: Synthetic peptide
  Seed: MDPRMCSLMQGSTLPRRSG
MDPRMFSLVQVSTIPRRSG

SEQ ID NO: 100526 - protein, 19 aa, Artificial Sequence
  Description of Artificial Sequence: Synthetic peptide
  Seed: MDPRMCSLMQGSTLPRRSG
MDPRMFSLVQVSTLPRRSG

SEQ ID NO: 100527 - protein, 19 aa, Artificial Sequence
  Description of Artificial Sequence: Synthetic peptide
  Seed: MDPRMCSLMQGSTLPRRSG
MDPRMFSLVQVSTMPRRSG

SEQ ID NO: 100528 - protein, 19 aa, Artificial Sequence
  Description of Artificial Sequence: Synthetic peptide
  Seed: MDPRMCSLMQGSTLPRRSG
MDPRMFSLVQVSTNPRRSG

SEQ ID NO: 100529 - protein, 19 aa, Artificial Sequence
  Description of Artificial Sequence: Synthetic peptide
  Seed: MDPRMCSLMQGSTLPRRSG
MDPRMFSLVQVSTSPRRSG

SEQ ID NO: 100530 - protein, 19 aa, Artificial Sequence
  Description of Artificial Sequence: Synthetic peptide
  Seed: MDPRMCSLMQGSTLPRRSG
MDPRMFSLVQVSTTPRRSG

SEQ ID NO: 100531 - protein, 19 aa, Artificial Sequence
  Description of Artificial Sequence: Synthetic peptide
  Seed: MDPRMCSLMQGSTLPRRSG
MDPRMFSLVQVSTVPRRSG

SEQ ID NO: 100532 - protein, 19 aa, Artificial Sequence
  Description of Artificial Sequence: Synthetic peptide
  Seed: MDPRMCSLMQGSTLPRRSG
MDPRMISLAQASTAPRRSG

SEQ ID NO: 100533 - protein, 19 aa, Artificial Sequence
  Description of Artificial Sequence: Synthetic peptide
  Seed: MDPRMCSLMQGSTLPRRSG
MDPRMISLAQASTIPRRSG

SEQ ID NO: 100534 - protein, 19 aa, Artificial Sequence
  Description of Artificial Sequence: Synthetic peptide
  Seed: MDPRMCSLMQGSTLPRRSG
MDPRMISLAQASTLPRRSG

SEQ ID NO: 100535 - protein, 19 aa, Artificial Sequence
  Description of Artificial Sequence: Synthetic peptide
  Seed: MDPRMCSLMQGSTLPRRSG
MDPRMISLAQASTVPRRSG

SEQ ID NO: 100536 - protein, 19 aa, Artificial Sequence
  Description of Artificial Sequence: Synthetic peptide
  Seed: MDPRMCSLMQGSTLPRRSG
MDPRMISLAQGSTIPRRSG

SEQ ID NO: 100537 - protein, 19 aa, Artificial Sequence
  Description of Artificial Sequence: Synthetic peptide
  Seed: MDPRMCSLMQGSTLPRRSG
MDPRMISLAQGSTLPRRSG

SEQ ID NO: 100538 - protein, 19 aa, Artificial Sequence
  Description of Artificial Sequence: Synthetic peptide
  Seed: MDPRMCSLMQGSTLPRRSG
MDPRMISLAQGSTVPRRSG

SEQ ID NO: 100539 - protein, 19 aa, Artificial Sequence
  Description of Artificial Sequence: Synthetic peptide
  Seed: MDPRMCSLMQGSTLPRRSG
MDPRMISLIQASTAPRRSG

SEQ ID NO: 100540 - protein, 19 aa, Artificial Sequence
  Description of Artificial Sequence: Synthetic peptide
  Seed: MDPRMCSLMQGSTLPRRSG
MDPRMISLIQASTIPRRSG

SEQ ID NO: 100541 - protein, 19 aa, Artificial Sequence
  Description of Artificial Sequence: Synthetic peptide
  Seed: MDPRMCSLMQGSTLPRRSG
MDPRMISLIQASTLPRRSG

SEQ ID NO: 100542 - protein, 19 aa, Artificial Sequence
  Description of Artificial Sequence: Synthetic peptide
  Seed: MDPRMCSLMQGSTLPRRSG
MDPRMISLIQASTSPRRSG

SEQ ID NO: 100543 - protein, 19 aa, Artificial Sequence
  Description of Artificial Sequence: Synthetic peptide
  Seed: MDPRMCSLMQGSTLPRRSG
MDPRMISLIQASTVPRRSG

SEQ ID NO: 100544 - protein, 19 aa, Artificial Sequence
  Description of Artificial Sequence: Synthetic peptide
  Seed: MDPRMCSLMQGSTLPRRSG
MDPRMISLIQGSTAPRRSG

SEQ ID NO: 100545 - protein, 19 aa, Artificial Sequence
  Description of Artificial Sequence: Synthetic peptide
  Seed: MDPRMCSLMQGSTLPRRSG
MDPRMISLIQGSTIPRRSG

SEQ ID NO: 100546 - protein, 19 aa, Artificial Sequence
  Description of Artificial Sequence: Synthetic peptide
  Seed: MDPRMCSLMQGSTLPRRSG
MDPRMISLIQGSTLPRRSG

SEQ ID NO: 100547 - protein, 19 aa, Artificial Sequence
  Description of Artificial Sequence: Synthetic peptide
  Seed: MDPRMCSLMQGSTLPRRSG
MDPRMISLIQGSTVPRRSG

SEQ ID NO: 100548 - protein, 19 aa, Artificial Sequence
  Description of Artificial Sequence: Synthetic peptide
  Seed: MDPRMCSLMQGSTLPRRSG
MDPRMISLIQPSTVPRRSG

SEQ ID NO: 100549 - protein, 19 aa, Artificial Sequence
  Description of Artificial Sequence: Synthetic peptide
  Seed: MDPRMCSLMQGSTLPRRSG
MDPRMISLIQSSTAPRRSG

SEQ ID NO: 100550 - protein, 19 aa, Artificial Sequence
  Description of Artificial Sequence: Synthetic peptide
  Seed: MDPRMCSLMQGSTLPRRSG
MDPRMISLIQSSTIPRRSG

SEQ ID NO: 100551 - protein, 19 aa, Artificial Sequence
  Description of Artificial Sequence: Synthetic peptide
  Seed: MDPRMCSLMQGSTLPRRSG
MDPRMISLIQSSTLPRRSG

SEQ ID NO: 100552 - protein, 19 aa, Artificial Sequence
  Description of Artificial Sequence: Synthetic peptide
  Seed: MDPRMCSLMQGSTLPRRSG
MDPRMISLIQSSTVPRRSG

SEQ ID NO: 100553 - protein, 19 aa, Artificial Sequence
  Description of Artificial Sequence: Synthetic peptide
  Seed: MDPRMCSLMQGSTLPRRSG
MDPRMISLLQASTAPRRSG

SEQ ID NO: 100554 - protein, 19 aa, Artificial Sequence
  Description of Artificial Sequence: Synthetic peptide
  Seed: MDPRMCSLMQGSTLPRRSG
MDPRMISLLQASTIPRRSG

SEQ ID NO: 100555 - protein, 19 aa, Artificial Sequence
  Description of Artificial Sequence: Synthetic peptide
  Seed: MDPRMCSLMQGSTLPRRSG
MDPRMISLLQASTLPRRSG

SEQ ID NO: 100556 - protein, 19 aa, Artificial Sequence
  Description of Artificial Sequence: Synthetic peptide
  Seed: MDPRMCSLMQGSTLPRRSG
MDPRMISLLQASTMPRRSG

SEQ ID NO: 100557 - protein, 19 aa, Artificial Sequence
  Description of Artificial Sequence: Synthetic peptide
  Seed: MDPRMCSLMQGSTLPRRSG
MDPRMISLLQASTNPRRSG

SEQ ID NO: 100558 - protein, 19 aa, Artificial Sequence
  Description of Artificial Sequence: Synthetic peptide
  Seed: MDPRMCSLMQGSTLPRRSG
MDPRMISLLQASTSPRRSG

SEQ ID NO: 100559 - protein, 19 aa, Artificial Sequence
  Description of Artificial Sequence: Synthetic peptide
  Seed: MDPRMCSLMQGSTLPRRSG
MDPRMISLLQASTTPRRSG

SEQ ID NO: 100560 - protein, 19 aa, Artificial Sequence
  Description of Artificial Sequence: Synthetic peptide
  Seed: MDPRMCSLMQGSTLPRRSG
MDPRMISLLQASTVPRRSG

SEQ ID NO: 100561 - protein, 19 aa, Artificial Sequence
  Description of Artificial Sequence: Synthetic peptide
  Seed: MDPRMCSLMQGSTLPRRSG
MDPRMISLLQGSTAPRRSG

SEQ ID NO: 100562 - protein, 19 aa, Artificial Sequence
  Description of Artificial Sequence: Synthetic peptide
  Seed: MDPRMCSLMQGSTLPRRSG
MDPRMISLLQGSTIPRRSG

SEQ ID NO: 100563 - protein, 19 aa, Artificial Sequence
  Description of Artificial Sequence: Synthetic peptide
  Seed: MDPRMCSLMQGSTLPRRSG
MDPRMISLLQGSTLPRRSG

SEQ ID NO: 100564 - protein, 19 aa, Artificial Sequence
  Description of Artificial Sequence: Synthetic peptide
  Seed: MDPRMCSLMQGSTLPRRSG
MDPRMISLLQGSTMPRRSG

SEQ ID NO: 100565 - protein, 19 aa, Artificial Sequence
  Description of Artificial Sequence: Synthetic peptide
  Seed: MDPRMCSLMQGSTLPRRSG
MDPRMISLLQGSTSPRRSG

SEQ ID NO: 100566 - protein, 19 aa, Artificial Sequence
  Description of Artificial Sequence: Synthetic peptide
  Seed: MDPRMCSLMQGSTLPRRSG
MDPRMISLLQGSTTPRRSG

SEQ ID NO: 100567 - protein, 19 aa, Artificial Sequence
  Description of Artificial Sequence: Synthetic peptide
  Seed: MDPRMCSLMQGSTLPRRSG
MDPRMISLLQGSTVPRRSG

SEQ ID NO: 100568 - protein, 19 aa, Artificial Sequence
  Description of Artificial Sequence: Synthetic peptide
  Seed: MDPRMCSLMQGSTLPRRSG
MDPRMISLLQNSTIPRRSG

SEQ ID NO: 100569 - protein, 19 aa, Artificial Sequence
  Description of Artificial Sequence: Synthetic peptide
  Seed: MDPRMCSLMQGSTLPRRSG
MDPRMISLLQNSTLPRRSG

SEQ ID NO: 100570 - protein, 19 aa, Artificial Sequence
  Description of Artificial Sequence: Synthetic peptide
  Seed: MDPRMCSLMQGSTLPRRSG
MDPRMISLLQNSTVPRRSG

SEQ ID NO: 100571 - protein, 19 aa, Artificial Sequence
  Description of Artificial Sequence: Synthetic peptide
  Seed: MDPRMCSLMQGSTLPRRSG
MDPRMISLLQPSTAPRRSG

SEQ ID NO: 100572 - protein, 19 aa, Artificial Sequence
  Description of Artificial Sequence: Synthetic peptide
  Seed: MDPRMCSLMQGSTLPRRSG
MDPRMISLLQPSTIPRRSG

SEQ ID NO: 100573 - protein, 19 aa, Artificial Sequence
  Description of Artificial Sequence: Synthetic peptide
  Seed: MDPRMCSLMQGSTLPRRSG
MDPRMISLLQPSTLPRRSG

SEQ ID NO: 100574 - protein, 19 aa, Artificial Sequence
  Description of Artificial Sequence: Synthetic peptide
  Seed: MDPRMCSLMQGSTLPRRSG
MDPRMISLLQPSTMPRRSG

SEQ ID NO: 100575 - protein, 19 aa, Artificial Sequence
  Description of Artificial Sequence: Synthetic peptide
  Seed: MDPRMCSLMQGSTLPRRSG
MDPRMISLLQPSTNPRRSG

SEQ ID NO: 100576 - protein, 19 aa, Artificial Sequence
  Description of Artificial Sequence: Synthetic peptide
  Seed: MDPRMCSLMQGSTLPRRSG
MDPRMISLLQPSTSPRRSG

SEQ ID NO: 100577 - protein, 19 aa, Artificial Sequence
  Description of Artificial Sequence: Synthetic peptide
  Seed: MDPRMCSLMQGSTLPRRSG
MDPRMISLLQPSTTPRRSG

SEQ ID NO: 100578 - protein, 19 aa, Artificial Sequence
  Description of Artificial Sequence: Synthetic peptide
  Seed: MDPRMCSLMQGSTLPRRSG
MDPRMISLLQPSTVPRRSG

SEQ ID NO: 100579 - protein, 19 aa, Artificial Sequence
  Description of Artificial Sequence: Synthetic peptide
  Seed: MDPRMCSLMQGSTLPRRSG
MDPRMISLLQSSTAPRRSG

SEQ ID NO: 100580 - protein, 19 aa, Artificial Sequence
  Description of Artificial Sequence: Synthetic peptide
  Seed: MDPRMCSLMQGSTLPRRSG
MDPRMISLLQSSTIPRRSG

SEQ ID NO: 100581 - protein, 19 aa, Artificial Sequence
  Description of Artificial Sequence: Synthetic peptide
  Seed: MDPRMCSLMQGSTLPRRSG
MDPRMISLLQSSTLPRRSG

SEQ ID NO: 100582 - protein, 19 aa, Artificial Sequence
  Description of Artificial Sequence: Synthetic peptide
  Seed: MDPRMCSLMQGSTLPRRSG
MDPRMISLLQSSTMPRRSG

SEQ ID NO: 100583 - protein, 19 aa, Artificial Sequence
  Description of Artificial Sequence: Synthetic peptide
  Seed: MDPRMCSLMQGSTLPRRSG
MDPRMISLLQSSTSPRRSG

SEQ ID NO: 100584 - protein, 19 aa, Artificial Sequence
  Description of Artificial Sequence: Synthetic peptide
  Seed: MDPRMCSLMQGSTLPRRSG
MDPRMISLLQSSTTPRRSG

SEQ ID NO: 100585 - protein, 19 aa, Artificial Sequence
  Description of Artificial Sequence: Synthetic peptide
  Seed: MDPRMCSLMQGSTLPRRSG
MDPRMISLLQSSTVPRRSG

SEQ ID NO: 100586 - protein, 19 aa, Artificial Sequence
  Description of Artificial Sequence: Synthetic peptide
  Seed: MDPRMCSLMQGSTLPRRSG
MDPRMISLLQTSTAPRRSG

SEQ ID NO: 100587 - protein, 19 aa, Artificial Sequence
  Description of Artificial Sequence: Synthetic peptide
  Seed: MDPRMCSLMQGSTLPRRSG
MDPRMISLLQTSTIPRRSG

SEQ ID NO: 100588 - protein, 19 aa, Artificial Sequence
  Description of Artificial Sequence: Synthetic peptide
  Seed: MDPRMCSLMQGSTLPRRSG
MDPRMISLLQTSTLPRRSG

SEQ ID NO: 100589 - protein, 19 aa, Artificial Sequence
  Description of Artificial Sequence: Synthetic peptide
  Seed: MDPRMCSLMQGSTLPRRSG
MDPRMISLLQTSTVPRRSG

SEQ ID NO: 100590 - protein, 19 aa, Artificial Sequence
  Description of Artificial Sequence: Synthetic peptide
  Seed: MDPRMCSLMQGSTLPRRSG
MDPRMISLLQVSTAPRRSG

SEQ ID NO: 100591 - protein, 19 aa, Artificial Sequence
  Description of Artificial Sequence: Synthetic peptide
  Seed: MDPRMCSLMQGSTLPRRSG
MDPRMISLLQVSTNPRRSG

SEQ ID NO: 100592 - protein, 19 aa, Artificial Sequence
  Description of Artificial Sequence: Synthetic peptide
  Seed: MDPRMCSLMQGSTLPRRSG
MDPRMISLLQVSTSPRRSG

SEQ ID NO: 100593 - protein, 19 aa, Artificial Sequence
  Description of Artificial Sequence: Synthetic peptide
  Seed: MDPRMCSLMQGSTLPRRSG
MDPRMISLMQASTAPRRSG

SEQ ID NO: 100594 - protein, 19 aa, Artificial Sequence
  Description of Artificial Sequence: Synthetic peptide
  Seed: MDPRMCSLMQGSTLPRRSG
MDPRMISLMQASTIPRRSG

SEQ ID NO: 100595 - protein, 19 aa, Artificial Sequence
  Description of Artificial Sequence: Synthetic peptide
  Seed: MDPRMCSLMQGSTLPRRSG
MDPRMISLMQASTLPRRSG

SEQ ID NO: 100596 - protein, 19 aa, Artificial Sequence
  Description of Artificial Sequence: Synthetic peptide
  Seed: MDPRMCSLMQGSTLPRRSG
MDPRMISLMQASTMPRRSG

SEQ ID NO: 100597 - protein, 19 aa, Artificial Sequence
  Description of Artificial Sequence: Synthetic peptide
  Seed: MDPRMCSLMQGSTLPRRSG
MDPRMISLMQASTNPRRSG

SEQ ID NO: 100598 - protein, 19 aa, Artificial Sequence
  Description of Artificial Sequence: Synthetic peptide
  Seed: MDPRMCSLMQGSTLPRRSG
MDPRMISLMQASTSPRRSG

SEQ ID NO: 100599 - protein, 19 aa, Artificial Sequence
  Description of Artificial Sequence: Synthetic peptide
  Seed: MDPRMCSLMQGSTLPRRSG
MDPRMISLMQASTTPRRSG

SEQ ID NO: 100600 - protein, 19 aa, Artificial Sequence
  Description of Artificial Sequence: Synthetic peptide
  Seed: MDPRMCSLMQGSTLPRRSG
MDPRMISLMQASTVPRRSG

SEQ ID NO: 100601 - protein, 19 aa, Artificial Sequence
  Description of Artificial Sequence: Synthetic peptide
  Seed: MDPRMCSLMQGSTLPRRSG
MDPRMISLMQGSTAPRRSG

SEQ ID NO: 100602 - protein, 19 aa, Artificial Sequence
  Description of Artificial Sequence: Synthetic peptide
  Seed: MDPRMCSLMQGSTLPRRSG
MDPRMISLMQGSTIPRRSG

SEQ ID NO: 100603 - protein, 19 aa, Artificial Sequence
  Description of Artificial Sequence: Synthetic peptide
  Seed: MDPRMCSLMQGSTLPRRSG
MDPRMISLMQGSTLPRRSG

SEQ ID NO: 100604 - protein, 19 aa, Artificial Sequence
  Description of Artificial Sequence: Synthetic peptide
  Seed: MDPRMCSLMQGSTLPRRSG
MDPRMISLMQGSTMPRRSG

SEQ ID NO: 100605 - protein, 19 aa, Artificial Sequence
  Description of Artificial Sequence: Synthetic peptide
  Seed: MDPRMCSLMQGSTLPRRSG
MDPRMISLMQGSTSPRRSG

SEQ ID NO: 100606 - protein, 19 aa, Artificial Sequence
  Description of Artificial Sequence: Synthetic peptide
  Seed: MDPRMCSLMQGSTLPRRSG
MDPRMISLMQGSTTPRRSG

SEQ ID NO: 100607 - protein, 19 aa, Artificial Sequence
  Description of Artificial Sequence: Synthetic peptide
  Seed: MDPRMCSLMQGSTLPRRSG
MDPRMISLMQGSTVPRRSG

SEQ ID NO: 100608 - protein, 19 aa, Artificial Sequence
  Description of Artificial Sequence: Synthetic peptide
  Seed: MDPRMCSLMQGSTLPRRSG
MDPRMISLMQISTAPRRSG

SEQ ID NO: 100609 - protein, 19 aa, Artificial Sequence
  Description of Artificial Sequence: Synthetic peptide
  Seed: MDPRMCSLMQGSTLPRRSG
MDPRMISLMQNSTIPRRSG

SEQ ID NO: 100610 - protein, 19 aa, Artificial Sequence
  Description of Artificial Sequence: Synthetic peptide
  Seed: MDPRMCSLMQGSTLPRRSG
MDPRMISLMQNSTLPRRSG

SEQ ID NO: 100611 - protein, 19 aa, Artificial Sequence
  Description of Artificial Sequence: Synthetic peptide
  Seed: MDPRMCSLMQGSTLPRRSG
MDPRMISLMQNSTVPRRSG

SEQ ID NO: 100612 - protein, 19 aa, Artificial Sequence
  Description of Artificial Sequence: Synthetic peptide
  Seed: MDPRMCSLMQGSTLPRRSG
MDPRMISLMQPSTAPRRSG

SEQ ID NO: 100613 - protein, 19 aa, Artificial Sequence
  Description of Artificial Sequence: Synthetic peptide
  Seed: MDPRMCSLMQGSTLPRRSG
MDPRMISLMQPSTIPRRSG

SEQ ID NO: 100614 - protein, 19 aa, Artificial Sequence
  Description of Artificial Sequence: Synthetic peptide
  Seed: MDPRMCSLMQGSTLPRRSG
MDPRMISLMQPSTLPRRSG

SEQ ID NO: 100615 - protein, 19 aa, Artificial Sequence
  Description of Artificial Sequence: Synthetic peptide
  Seed: MDPRMCSLMQGSTLPRRSG
MDPRMISLMQPSTMPRRSG

SEQ ID NO: 100616 - protein, 19 aa, Artificial Sequence
  Description of Artificial Sequence: Synthetic peptide
  Seed: MDPRMCSLMQGSTLPRRSG
MDPRMISLMQPSTNPRRSG

SEQ ID NO: 100617 - protein, 19 aa, Artificial Sequence
  Description of Artificial Sequence: Synthetic peptide
  Seed: MDPRMCSLMQGSTLPRRSG
MDPRMISLMQPSTSPRRSG

SEQ ID NO: 100618 - protein, 19 aa, Artificial Sequence
  Description of Artificial Sequence: Synthetic peptide
  Seed: MDPRMCSLMQGSTLPRRSG
MDPRMISLMQPSTVPRRSG

SEQ ID NO: 100619 - protein, 19 aa, Artificial Sequence
  Description of Artificial Sequence: Synthetic peptide
  Seed: MDPRMCSLMQGSTLPRRSG
MDPRMISLMQSSTAPRRSG

SEQ ID NO: 100620 - protein, 19 aa, Artificial Sequence
  Description of Artificial Sequence: Synthetic peptide
  Seed: MDPRMCSLMQGSTLPRRSG
MDPRMISLMQSSTIPRRSG

SEQ ID NO: 100621 - protein, 19 aa, Artificial Sequence
  Description of Artificial Sequence: Synthetic peptide
  Seed: MDPRMCSLMQGSTLPRRSG
MDPRMISLMQSSTLPRRSG

SEQ ID NO: 100622 - protein, 19 aa, Artificial Sequence
  Description of Artificial Sequence: Synthetic peptide
  Seed: MDPRMCSLMQGSTLPRRSG
MDPRMISLMQSSTMPRRSG

SEQ ID NO: 100623 - protein, 19 aa, Artificial Sequence
  Description of Artificial Sequence: Synthetic peptide
  Seed: MDPRMCSLMQGSTLPRRSG
MDPRMISLMQSSTSPRRSG

SEQ ID NO: 100624 - protein, 19 aa, Artificial Sequence
  Description of Artificial Sequence: Synthetic peptide
  Seed: MDPRMCSLMQGSTLPRRSG
MDPRMISLMQSSTTPRRSG

SEQ ID NO: 100625 - protein, 19 aa, Artificial Sequence
  Description of Artificial Sequence: Synthetic peptide
  Seed: MDPRMCSLMQGSTLPRRSG
MDPRMISLMQSSTVPRRSG

SEQ ID NO: 100626 - protein, 19 aa, Artificial Sequence
  Description of Artificial Sequence: Synthetic peptide
  Seed: MDPRMCSLMQGSTLPRRSG
MDPRMISLMQTSTAPRRSG

SEQ ID NO: 100627 - protein, 19 aa, Artificial Sequence
  Description of Artificial Sequence: Synthetic peptide
  Seed: MDPRMCSLMQGSTLPRRSG
MDPRMISLMQTSTIPRRSG

SEQ ID NO: 100628 - protein, 19 aa, Artificial Sequence
  Description of Artificial Sequence: Synthetic peptide
  Seed: MDPRMCSLMQGSTLPRRSG
MDPRMISLMQTSTLPRRSG

SEQ ID NO: 100629 - protein, 19 aa, Artificial Sequence
  Description of Artificial Sequence: Synthetic peptide
  Seed: MDPRMCSLMQGSTLPRRSG
MDPRMISLMQTSTVPRRSG

SEQ ID NO: 100630 - protein, 19 aa, Artificial Sequence
  Description of Artificial Sequence: Synthetic peptide
  Seed: MDPRMCSLMQGSTLPRRSG
MDPRMISLMQVSTAPRRSG

SEQ ID NO: 100631 - protein, 19 aa, Artificial Sequence
  Description of Artificial Sequence: Synthetic peptide
  Seed: MDPRMCSLMQGSTLPRRSG
MDPRMISLMQVSTNPRRSG

SEQ ID NO: 100632 - protein, 19 aa, Artificial Sequence
  Description of Artificial Sequence: Synthetic peptide
  Seed: MDPRMCSLMQGSTLPRRSG
MDPRMISLMQVSTSPRRSG

SEQ ID NO: 100633 - protein, 19 aa, Artificial Sequence
  Description of Artificial Sequence: Synthetic peptide
  Seed: MDPRMCSLMQGSTLPRRSG
MDPRMISLQQASTIPRRSG

SEQ ID NO: 100634 - protein, 19 aa, Artificial Sequence
  Description of Artificial Sequence: Synthetic peptide
  Seed: MDPRMCSLMQGSTLPRRSG
MDPRMISLQQASTLPRRSG

SEQ ID NO: 100635 - protein, 19 aa, Artificial Sequence
  Description of Artificial Sequence: Synthetic peptide
  Seed: MDPRMCSLMQGSTLPRRSG
MDPRMISLQQASTVPRRSG

SEQ ID NO: 100636 - protein, 19 aa, Artificial Sequence
  Description of Artificial Sequence: Synthetic peptide
  Seed: MDPRMCSLMQGSTLPRRSG
MDPRMISLQQGSTLPRRSG

SEQ ID NO: 100637 - protein, 19 aa, Artificial Sequence
  Description of Artificial Sequence: Synthetic peptide
  Seed: MDPRMCSLMQGSTLPRRSG
MDPRMISLQQGSTVPRRSG

SEQ ID NO: 100638 - protein, 19 aa, Artificial Sequence
  Description of Artificial Sequence: Synthetic peptide
  Seed: MDPRMCSLMQGSTLPRRSG
MDPRMISLVQASTLPRRSG

SEQ ID NO: 100639 - protein, 19 aa, Artificial Sequence
  Description of Artificial Sequence: Synthetic peptide
  Seed: MDPRMCSLMQGSTLPRRSG
MDPRMISLVQASTVPRRSG

SEQ ID NO: 100640 - protein, 19 aa, Artificial Sequence
  Description of Artificial Sequence: Synthetic peptide
  Seed: MDPRMCSLMQGSTLPRRSG
MDPRMLSLAQASTIPRRSG

SEQ ID NO: 100641 - protein, 19 aa, Artificial Sequence
  Description of Artificial Sequence: Synthetic peptide
  Seed: MDPRMCSLMQGSTLPRRSG
MDPRMLSLAQASTLPRRSG

SEQ ID NO: 100642 - protein, 19 aa, Artificial Sequence
  Description of Artificial Sequence: Synthetic peptide
  Seed: MDPRMCSLMQGSTLPRRSG
MDPRMLSLAQASTVPRRSG

SEQ ID NO: 100643 - protein, 19 aa, Artificial Sequence
  Description of Artificial Sequence: Synthetic peptide
  Seed: MDPRMCSLMQGSTLPRRSG
MDPRMLSLIQASTAPRRSG

SEQ ID NO: 100644 - protein, 19 aa, Artificial Sequence
  Description of Artificial Sequence: Synthetic peptide
  Seed: MDPRMCSLMQGSTLPRRSG
MDPRMLSLIQASTIPRRSG

SEQ ID NO: 100645 - protein, 19 aa, Artificial Sequence
  Description of Artificial Sequence: Synthetic peptide
  Seed: MDPRMCSLMQGSTLPRRSG
MDPRMLSLIQASTLPRRSG

SEQ ID NO: 100646 - protein, 19 aa, Artificial Sequence
  Description of Artificial Sequence: Synthetic peptide
  Seed: MDPRMCSLMQGSTLPRRSG
MDPRMLSLIQASTSPRRSG

SEQ ID NO: 100647 - protein, 19 aa, Artificial Sequence
  Description of Artificial Sequence: Synthetic peptide
  Seed: MDPRMCSLMQGSTLPRRSG
MDPRMLSLIQASTVPRRSG

SEQ ID NO: 100648 - protein, 19 aa, Artificial Sequence
  Description of Artificial Sequence: Synthetic peptide
  Seed: MDPRMCSLMQGSTLPRRSG
MDPRMLSLIQGSTAPRRSG

SEQ ID NO: 100649 - protein, 19 aa, Artificial Sequence
  Description of Artificial Sequence: Synthetic peptide
  Seed: MDPRMCSLMQGSTLPRRSG
MDPRMLSLIQGSTIPRRSG

SEQ ID NO: 100650 - protein, 19 aa, Artificial Sequence
  Description of Artificial Sequence: Synthetic peptide
  Seed: MDPRMCSLMQGSTLPRRSG
MDPRMLSLIQGSTLPRRSG

SEQ ID NO: 100651 - protein, 19 aa, Artificial Sequence
  Description of Artificial Sequence: Synthetic peptide
  Seed: MDPRMCSLMQGSTLPRRSG
MDPRMLSLIQGSTVPRRSG

SEQ ID NO: 100652 - protein, 19 aa, Artificial Sequence
  Description of Artificial Sequence: Synthetic peptide
  Seed: MDPRMCSLMQGSTLPRRSG
MDPRMLSLIQSSTVPRRSG

SEQ ID NO: 100653 - protein, 19 aa, Artificial Sequence
  Description of Artificial Sequence: Synthetic peptide
  Seed: MDPRMCSLMQGSTLPRRSG
MDPRMLSLLQASTAPRRSG

SEQ ID NO: 100654 - protein, 19 aa, Artificial Sequence
  Description of Artificial Sequence: Synthetic peptide
  Seed: MDPRMCSLMQGSTLPRRSG
MDPRMLSLLQASTIPRRSG

SEQ ID NO: 100655 - protein, 19 aa, Artificial Sequence
  Description of Artificial Sequence: Synthetic peptide
  Seed: MDPRMCSLMQGSTLPRRSG
MDPRMLSLLQASTLPRRSG

SEQ ID NO: 100656 - protein, 19 aa, Artificial Sequence
  Description of Artificial Sequence: Synthetic peptide
  Seed: MDPRMCSLMQGSTLPRRSG
MDPRMLSLLQASTMPRRSG

SEQ ID NO: 100657 - protein, 19 aa, Artificial Sequence
  Description of Artificial Sequence: Synthetic peptide
  Seed: MDPRMCSLMQGSTLPRRSG
MDPRMLSLLQASTNPRRSG

SEQ ID NO: 100658 - protein, 19 aa, Artificial Sequence
  Description of Artificial Sequence: Synthetic peptide
  Seed: MDPRMCSLMQGSTLPRRSG
MDPRMLSLLQASTSPRRSG

SEQ ID NO: 100659 - protein, 19 aa, Artificial Sequence
  Description of Artificial Sequence: Synthetic peptide
  Seed: MDPRMCSLMQGSTLPRRSG
MDPRMLSLLQASTTPRRSG

SEQ ID NO: 100660 - protein, 19 aa, Artificial Sequence
  Description of Artificial Sequence: Synthetic peptide
  Seed: MDPRMCSLMQGSTLPRRSG
MDPRMLSLLQASTVPRRSG

SEQ ID NO: 100661 - protein, 19 aa, Artificial Sequence
  Description of Artificial Sequence: Synthetic peptide
  Seed: MDPRMCSLMQGSTLPRRSG
MDPRMLSLLQGSTAPRRSG

SEQ ID NO: 100662 - protein, 19 aa, Artificial Sequence
  Description of Artificial Sequence: Synthetic peptide
  Seed: MDPRMCSLMQGSTLPRRSG
MDPRMLSLLQGSTIPRRSG

SEQ ID NO: 100663 - protein, 19 aa, Artificial Sequence
  Description of Artificial Sequence: Synthetic peptide
  Seed: MDPRMCSLMQGSTLPRRSG
MDPRMLSLLQGSTLPRRSG

SEQ ID NO: 100664 - protein, 19 aa, Artificial Sequence
  Description of Artificial Sequence: Synthetic peptide
  Seed: MDPRMCSLMQGSTLPRRSG
MDPRMLSLLQGSTMPRRSG

SEQ ID NO: 100665 - protein, 19 aa, Artificial Sequence
  Description of Artificial Sequence: Synthetic peptide
  Seed: MDPRMCSLMQGSTLPRRSG
MDPRMLSLLQGSTSPRRSG

SEQ ID NO: 100666 - protein, 19 aa, Artificial Sequence
  Description of Artificial Sequence: Synthetic peptide
  Seed: MDPRMCSLMQGSTLPRRSG
MDPRMLSLLQGSTTPRRSG

SEQ ID NO: 100667 - protein, 19 aa, Artificial Sequence
  Description of Artificial Sequence: Synthetic peptide
  Seed: MDPRMCSLMQGSTLPRRSG
MDPRMLSLLQGSTVPRRSG

SEQ ID NO: 100668 - protein, 19 aa, Artificial Sequence
  Description of Artificial Sequence: Synthetic peptide
  Seed: MDPRMCSLMQGSTLPRRSG
MDPRMLSLLQNSTVPRRSG

SEQ ID NO: 100669 - protein, 19 aa, Artificial Sequence
  Description of Artificial Sequence: Synthetic peptide
  Seed: MDPRMCSLMQGSTLPRRSG
MDPRMLSLLQPSTAPRRSG

SEQ ID NO: 100670 - protein, 19 aa, Artificial Sequence
  Description of Artificial Sequence: Synthetic peptide
  Seed: MDPRMCSLMQGSTLPRRSG
MDPRMLSLLQPSTIPRRSG

SEQ ID NO: 100671 - protein, 19 aa, Artificial Sequence
  Description of Artificial Sequence: Synthetic peptide
  Seed: MDPRMCSLMQGSTLPRRSG
MDPRMLSLLQPSTLPRRSG

SEQ ID NO: 100672 - protein, 19 aa, Artificial Sequence
  Description of Artificial Sequence: Synthetic peptide
  Seed: MDPRMCSLMQGSTLPRRSG
MDPRMLSLLQPSTNPRRSG

SEQ ID NO: 100673 - protein, 19 aa, Artificial Sequence
  Description of Artificial Sequence: Synthetic peptide
  Seed: MDPRMCSLMQGSTLPRRSG
MDPRMLSLLQPSTSPRRSG

SEQ ID NO: 100674 - protein, 19 aa, Artificial Sequence
  Description of Artificial Sequence: Synthetic peptide
  Seed: MDPRMCSLMQGSTLPRRSG
MDPRMLSLLQPSTVPRRSG

SEQ ID NO: 100675 - protein, 19 aa, Artificial Sequence
  Description of Artificial Sequence: Synthetic peptide
  Seed: MDPRMCSLMQGSTLPRRSG
MDPRMLSLLQSSTAPRRSG

SEQ ID NO: 100676 - protein, 19 aa, Artificial Sequence
  Description of Artificial Sequence: Synthetic peptide
  Seed: MDPRMCSLMQGSTLPRRSG
MDPRMLSLLQSSTIPRRSG

SEQ ID NO: 100677 - protein, 19 aa, Artificial Sequence
  Description of Artificial Sequence: Synthetic peptide
  Seed: MDPRMCSLMQGSTLPRRSG
MDPRMLSLLQSSTLPRRSG

SEQ ID NO: 100678 - protein, 19 aa, Artificial Sequence
  Description of Artificial Sequence: Synthetic peptide
  Seed: MDPRMCSLMQGSTLPRRSG
MDPRMLSLLQSSTSPRRSG

SEQ ID NO: 100679 - protein, 19 aa, Artificial Sequence
  Description of Artificial Sequence: Synthetic peptide
  Seed: MDPRMCSLMQGSTLPRRSG
MDPRMLSLLQSSTTPRRSG

SEQ ID NO: 100680 - protein, 19 aa, Artificial Sequence
  Description of Artificial Sequence: Synthetic peptide
  Seed: MDPRMCSLMQGSTLPRRSG
MDPRMLSLLQSSTVPRRSG

SEQ ID NO: 100681 - protein, 19 aa, Artificial Sequence
  Description of Artificial Sequence: Synthetic peptide
  Seed: MDPRMCSLMQGSTLPRRSG
MDPRMLSLLQTSTAPRRSG

SEQ ID NO: 100682 - protein, 19 aa, Artificial Sequence
  Description of Artificial Sequence: Synthetic peptide
  Seed: MDPRMCSLMQGSTLPRRSG
MDPRMLSLLQTSTLPRRSG

SEQ ID NO: 100683 - protein, 19 aa, Artificial Sequence
  Description of Artificial Sequence: Synthetic peptide
  Seed: MDPRMCSLMQGSTLPRRSG
MDPRMLSLLQTSTSPRRSG

SEQ ID NO: 100684 - protein, 19 aa, Artificial Sequence
  Description of Artificial Sequence: Synthetic peptide
  Seed: MDPRMCSLMQGSTLPRRSG
MDPRMLSLLQTSTVPRRSG

SEQ ID NO: 100685 - protein, 19 aa, Artificial Sequence
  Description of Artificial Sequence: Synthetic peptide
  Seed: MDPRMCSLMQGSTLPRRSG
MDPRMLSLLQVSTAPRRSG

SEQ ID NO: 100686 - protein, 19 aa, Artificial Sequence
  Description of Artificial Sequence: Synthetic peptide
  Seed: MDPRMCSLMQGSTLPRRSG
MDPRMLSLLQVSTNPRRSG

SEQ ID NO: 100687 - protein, 19 aa, Artificial Sequence
  Description of Artificial Sequence: Synthetic peptide
  Seed: MDPRMCSLMQGSTLPRRSG
MDPRMLSLLQVSTSPRRSG

SEQ ID NO: 100688 - protein, 19 aa, Artificial Sequence
  Description of Artificial Sequence: Synthetic peptide
  Seed: MDPRMCSLMQGSTLPRRSG
MDPRMLSLMQASTAPRRSG

SEQ ID NO: 100689 - protein, 19 aa, Artificial Sequence
  Description of Artificial Sequence: Synthetic peptide
  Seed: MDPRMCSLMQGSTLPRRSG
MDPRMLSLMQASTIPRRSG

SEQ ID NO: 100690 - protein, 19 aa, Artificial Sequence
  Description of Artificial Sequence: Synthetic peptide
  Seed: MDPRMCSLMQGSTLPRRSG
MDPRMLSLMQASTLPRRSG

SEQ ID NO: 100691 - protein, 19 aa, Artificial Sequence
  Description of Artificial Sequence: Synthetic peptide
  Seed: MDPRMCSLMQGSTLPRRSG
MDPRMLSLMQASTMPRRSG

SEQ ID NO: 100692 - protein, 19 aa, Artificial Sequence
  Description of Artificial Sequence: Synthetic peptide
  Seed: MDPRMCSLMQGSTLPRRSG
MDPRMLSLMQASTNPRRSG

SEQ ID NO: 100693 - protein, 19 aa, Artificial Sequence
  Description of Artificial Sequence: Synthetic peptide
  Seed: MDPRMCSLMQGSTLPRRSG
MDPRMLSLMQASTSPRRSG

SEQ ID NO: 100694 - protein, 19 aa, Artificial Sequence
  Description of Artificial Sequence: Synthetic peptide
  Seed: MDPRMCSLMQGSTLPRRSG
MDPRMLSLMQASTTPRRSG

SEQ ID NO: 100695 - protein, 19 aa, Artificial Sequence
  Description of Artificial Sequence: Synthetic peptide
  Seed: MDPRMCSLMQGSTLPRRSG
MDPRMLSLMQASTVPRRSG

SEQ ID NO: 100696 - protein, 19 aa, Artificial Sequence
  Description of Artificial Sequence: Synthetic peptide
  Seed: MDPRMCSLMQGSTLPRRSG
MDPRMLSLMQGSTAPRRSG

SEQ ID NO: 100697 - protein, 19 aa, Artificial Sequence
  Description of Artificial Sequence: Synthetic peptide
  Seed: MDPRMCSLMQGSTLPRRSG
MDPRMLSLMQGSTIPRRSG

SEQ ID NO: 100698 - protein, 19 aa, Artificial Sequence
  Description of Artificial Sequence: Synthetic peptide
  Seed: MDPRMCSLMQGSTLPRRSG
MDPRMLSLMQGSTLPRRSG

SEQ ID NO: 100699 - protein, 19 aa, Artificial Sequence
  Description of Artificial Sequence: Synthetic peptide
  Seed: MDPRMCSLMQGSTLPRRSG
MDPRMLSLMQGSTMPRRSG

SEQ ID NO: 100700 - protein, 19 aa, Artificial Sequence
  Description of Artificial Sequence: Synthetic peptide
  Seed: MDPRMCSLMQGSTLPRRSG
MDPRMLSLMQGSTSPRRSG

SEQ ID NO: 100701 - protein, 19 aa, Artificial Sequence
  Description of Artificial Sequence: Synthetic peptide
  Seed: MDPRMCSLMQGSTLPRRSG
MDPRMLSLMQGSTTPRRSG

SEQ ID NO: 100702 - protein, 19 aa, Artificial Sequence
  Description of Artificial Sequence: Synthetic peptide
  Seed: MDPRMCSLMQGSTLPRRSG
MDPRMLSLMQGSTVPRRSG

SEQ ID NO: 100703 - protein, 19 aa, Artificial Sequence
  Description of Artificial Sequence: Synthetic peptide
  Seed: MDPRMCSLMQGSTLPRRSG
MDPRMLSLMQISTAPRRSG

SEQ ID NO: 100704 - protein, 19 aa, Artificial Sequence
  Description of Artificial Sequence: Synthetic peptide
  Seed: MDPRMCSLMQGSTLPRRSG
MDPRMLSLMQNSTVPRRSG

SEQ ID NO: 100705 - protein, 19 aa, Artificial Sequence
  Description of Artificial Sequence: Synthetic peptide
  Seed: MDPRMCSLMQGSTLPRRSG
MDPRMLSLMQPSTAPRRSG

SEQ ID NO: 100706 - protein, 19 aa, Artificial Sequence
  Description of Artificial Sequence: Synthetic peptide
  Seed: MDPRMCSLMQGSTLPRRSG
MDPRMLSLMQPSTIPRRSG

SEQ ID NO: 100707 - protein, 19 aa, Artificial Sequence
  Description of Artificial Sequence: Synthetic peptide
  Seed: MDPRMCSLMQGSTLPRRSG
MDPRMLSLMQPSTLPRRSG

SEQ ID NO: 100708 - protein, 19 aa, Artificial Sequence
  Description of Artificial Sequence: Synthetic peptide
  Seed: MDPRMCSLMQGSTLPRRSG
MDPRMLSLMQPSTNPRRSG

SEQ ID NO: 100709 - protein, 19 aa, Artificial Sequence
  Description of Artificial Sequence: Synthetic peptide
  Seed: MDPRMCSLMQGSTLPRRSG
MDPRMLSLMQPSTSPRRSG

SEQ ID NO: 100710 - protein, 19 aa, Artificial Sequence
  Description of Artificial Sequence: Synthetic peptide
  Seed: MDPRMCSLMQGSTLPRRSG
MDPRMLSLMQPSTVPRRSG

SEQ ID NO: 100711 - protein, 19 aa, Artificial Sequence
  Description of Artificial Sequence: Synthetic peptide
  Seed: MDPRMCSLMQGSTLPRRSG
MDPRMLSLMQSSTAPRRSG

SEQ ID NO: 100712 - protein, 19 aa, Artificial Sequence
  Description of Artificial Sequence: Synthetic peptide
  Seed: MDPRMCSLMQGSTLPRRSG
MDPRMLSLMQSSTIPRRSG

SEQ ID NO: 100713 - protein, 19 aa, Artificial Sequence
  Description of Artificial Sequence: Synthetic peptide
  Seed: MDPRMCSLMQGSTLPRRSG
MDPRMLSLMQSSTLPRRSG

SEQ ID NO: 100714 - protein, 19 aa, Artificial Sequence
  Description of Artificial Sequence: Synthetic peptide
  Seed: MDPRMCSLMQGSTLPRRSG
MDPRMLSLMQSSTMPRRSG

SEQ ID NO: 100715 - protein, 19 aa, Artificial Sequence
  Description of Artificial Sequence: Synthetic peptide
  Seed: MDPRMCSLMQGSTLPRRSG
MDPRMLSLMQSSTSPRRSG

SEQ ID NO: 100716 - protein, 19 aa, Artificial Sequence
  Description of Artificial Sequence: Synthetic peptide
  Seed: MDPRMCSLMQGSTLPRRSG
MDPRMLSLMQSSTTPRRSG

SEQ ID NO: 100717 - protein, 19 aa, Artificial Sequence
  Description of Artificial Sequence: Synthetic peptide
  Seed: MDPRMCSLMQGSTLPRRSG
MDPRMLSLMQSSTVPRRSG

SEQ ID NO: 100718 - protein, 19 aa, Artificial Sequence
  Description of Artificial Sequence: Synthetic peptide
  Seed: MDPRMCSLMQGSTLPRRSG
MDPRMLSLMQTSTAPRRSG

SEQ ID NO: 100719 - protein, 19 aa, Artificial Sequence
  Description of Artificial Sequence: Synthetic peptide
  Seed: MDPRMCSLMQGSTLPRRSG
MDPRMLSLMQTSTVPRRSG

SEQ ID NO: 100720 - protein, 19 aa, Artificial Sequence
  Description of Artificial Sequence: Synthetic peptide
  Seed: MDPRMCSLMQGSTLPRRSG
MDPRMLSLMQVSTAPRRSG

SEQ ID NO: 100721 - protein, 19 aa, Artificial Sequence
  Description of Artificial Sequence: Synthetic peptide
  Seed: MDPRMCSLMQGSTLPRRSG
MDPRMLSLMQVSTNPRRSG

SEQ ID NO: 100722 - protein, 19 aa, Artificial Sequence
  Description of Artificial Sequence: Synthetic peptide
  Seed: MDPRMCSLMQGSTLPRRSG
MDPRMLSLMQVSTSPRRSG

SEQ ID NO: 100723 - protein, 19 aa, Artificial Sequence
  Description of Artificial Sequence: Synthetic peptide
  Seed: MDPRMCSLMQGSTLPRRSG
MDPRMLSLQQASTLPRRSG

SEQ ID NO: 100724 - protein, 19 aa, Artificial Sequence
  Description of Artificial Sequence: Synthetic peptide
  Seed: MDPRMCSLMQGSTLPRRSG
MDPRMLSLQQASTVPRRSG

SEQ ID NO: 100725 - protein, 19 aa, Artificial Sequence
  Description of Artificial Sequence: Synthetic peptide
  Seed: MDPRMCSLMQGSTLPRRSG
MDPRMMSLLQASTAPRRSG

SEQ ID NO: 100726 - protein, 19 aa, Artificial Sequence
  Description of Artificial Sequence: Synthetic peptide
  Seed: MDPRMCSLMQGSTLPRRSG
MDPRMMSLLQASTIPRRSG

SEQ ID NO: 100727 - protein, 19 aa, Artificial Sequence
  Description of Artificial Sequence: Synthetic peptide
  Seed: MDPRMCSLMQGSTLPRRSG
MDPRMMSLLQASTLPRRSG

SEQ ID NO: 100728 - protein, 19 aa, Artificial Sequence
  Description of Artificial Sequence: Synthetic peptide
  Seed: MDPRMCSLMQGSTLPRRSG
MDPRMMSLLQASTSPRRSG

SEQ ID NO: 100729 - protein, 19 aa, Artificial Sequence
  Description of Artificial Sequence: Synthetic peptide
  Seed: MDPRMCSLMQGSTLPRRSG
MDPRMMSLLQASTVPRRSG

SEQ ID NO: 100730 - protein, 19 aa, Artificial Sequence
  Description of Artificial Sequence: Synthetic peptide
  Seed: MDPRMCSLMQGSTLPRRSG
MDPRMMSLLQGSTAPRRSG

SEQ ID NO: 100731 - protein, 19 aa, Artificial Sequence
  Description of Artificial Sequence: Synthetic peptide
  Seed: MDPRMCSLMQGSTLPRRSG
MDPRMMSLLQGSTIPRRSG

SEQ ID NO: 100732 - protein, 19 aa, Artificial Sequence
  Description of Artificial Sequence: Synthetic peptide
  Seed: MDPRMCSLMQGSTLPRRSG
MDPRMMSLLQGSTLPRRSG

SEQ ID NO: 100733 - protein, 19 aa, Artificial Sequence
  Description of Artificial Sequence: Synthetic peptide
  Seed: MDPRMCSLMQGSTLPRRSG
MDPRMMSLLQGSTVPRRSG

SEQ ID NO: 100734 - protein, 19 aa, Artificial Sequence
  Description of Artificial Sequence: Synthetic peptide
  Seed: MDPRMCSLMQGSTLPRRSG
MDPRMMSLLQPSTLPRRSG

SEQ ID NO: 100735 - protein, 19 aa, Artificial Sequence
  Description of Artificial Sequence: Synthetic peptide
  Seed: MDPRMCSLMQGSTLPRRSG
MDPRMMSLLQPSTVPRRSG

SEQ ID NO: 100736 - protein, 19 aa, Artificial Sequence
  Description of Artificial Sequence: Synthetic peptide
  Seed: MDPRMCSLMQGSTLPRRSG
MDPRMMSLLQSSTAPRRSG

SEQ ID NO: 100737 - protein, 19 aa, Artificial Sequence
  Description of Artificial Sequence: Synthetic peptide
  Seed: MDPRMCSLMQGSTLPRRSG
MDPRMMSLLQSSTIPRRSG

SEQ ID NO: 100738 - protein, 19 aa, Artificial Sequence
  Description of Artificial Sequence: Synthetic peptide
  Seed: MDPRMCSLMQGSTLPRRSG
MDPRMMSLLQSSTLPRRSG

SEQ ID NO: 100739 - protein, 19 aa, Artificial Sequence
  Description of Artificial Sequence: Synthetic peptide
  Seed: MDPRMCSLMQGSTLPRRSG
MDPRMMSLLQSSTVPRRSG

SEQ ID NO: 100740 - protein, 19 aa, Artificial Sequence
  Description of Artificial Sequence: Synthetic peptide
  Seed: MDPRMCSLMQGSTLPRRSG
MDPRMMSLMQASTAPRRSG

SEQ ID NO: 100741 - protein, 19 aa, Artificial Sequence
  Description of Artificial Sequence: Synthetic peptide
  Seed: MDPRMCSLMQGSTLPRRSG
MDPRMMSLMQASTIPRRSG

SEQ ID NO: 100742 - protein, 19 aa, Artificial Sequence
  Description of Artificial Sequence: Synthetic peptide
  Seed: MDPRMCSLMQGSTLPRRSG
MDPRMMSLMQASTLPRRSG

SEQ ID NO: 100743 - protein, 19 aa, Artificial Sequence
  Description of Artificial Sequence: Synthetic peptide
  Seed: MDPRMCSLMQGSTLPRRSG
MDPRMMSLMQASTMPRRSG

SEQ ID NO: 100744 - protein, 19 aa, Artificial Sequence
  Description of Artificial Sequence: Synthetic peptide
  Seed: MDPRMCSLMQGSTLPRRSG
MDPRMMSLMQASTNPRRSG

SEQ ID NO: 100745 - protein, 19 aa, Artificial Sequence
  Description of Artificial Sequence: Synthetic peptide
  Seed: MDPRMCSLMQGSTLPRRSG
MDPRMMSLMQASTSPRRSG

SEQ ID NO: 100746 - protein, 19 aa, Artificial Sequence
  Description of Artificial Sequence: Synthetic peptide
  Seed: MDPRMCSLMQGSTLPRRSG
MDPRMMSLMQASTVPRRSG

SEQ ID NO: 100747 - protein, 19 aa, Artificial Sequence
  Description of Artificial Sequence: Synthetic peptide
  Seed: MDPRMCSLMQGSTLPRRSG
MDPRMMSLMQGSTAPRRSG

SEQ ID NO: 100748 - protein, 19 aa, Artificial Sequence
  Description of Artificial Sequence: Synthetic peptide
  Seed: MDPRMCSLMQGSTLPRRSG
MDPRMMSLMQGSTIPRRSG

SEQ ID NO: 100749 - protein, 19 aa, Artificial Sequence
  Description of Artificial Sequence: Synthetic peptide
  Seed: MDPRMCSLMQGSTLPRRSG
MDPRMMSLMQGSTLPRRSG

SEQ ID NO: 100750 - protein, 19 aa, Artificial Sequence
  Description of Artificial Sequence: Synthetic peptide
  Seed: MDPRMCSLMQGSTLPRRSG
MDPRMMSLMQGSTVPRRSG

SEQ ID NO: 100751 - protein, 19 aa, Artificial Sequence
  Description of Artificial Sequence: Synthetic peptide
  Seed: MDPRMCSLMQGSTLPRRSG
MDPRMMSLMQPSTAPRRSG

SEQ ID NO: 100752 - protein, 19 aa, Artificial Sequence
  Description of Artificial Sequence: Synthetic peptide
  Seed: MDPRMCSLMQGSTLPRRSG
MDPRMMSLMQPSTVPRRSG

SEQ ID NO: 100753 - protein, 19 aa, Artificial Sequence
  Description of Artificial Sequence: Synthetic peptide
  Seed: MDPRMCSLMQGSTLPRRSG
MDPRMMSLMQSSTAPRRSG

SEQ ID NO: 100754 - protein, 19 aa, Artificial Sequence
  Description of Artificial Sequence: Synthetic peptide
  Seed: MDPRMCSLMQGSTLPRRSG
MDPRMMSLMQSSTIPRRSG

SEQ ID NO: 100755 - protein, 19 aa, Artificial Sequence
  Description of Artificial Sequence: Synthetic peptide
  Seed: MDPRMCSLMQGSTLPRRSG
MDPRMMSLMQSSTLPRRSG

SEQ ID NO: 100756 - protein, 19 aa, Artificial Sequence
  Description of Artificial Sequence: Synthetic peptide
  Seed: MDPRMCSLMQGSTLPRRSG
MDPRMMSLMQSSTVPRRSG

SEQ ID NO: 100757 - protein, 19 aa, Artificial Sequence
  Description of Artificial Sequence: Synthetic peptide
  Seed: MDPRMCSLMQGSTLPRRSG
MDPRMMSLMQVSTAPRRSG

SEQ ID NO: 100758 - protein, 19 aa, Artificial Sequence
  Description of Artificial Sequence: Synthetic peptide
  Seed: MDPRMCSLMQGSTLPRRSG
MDPRMVSLLQASTAPRRSG

SEQ ID NO: 100759 - protein, 19 aa, Artificial Sequence
  Description of Artificial Sequence: Synthetic peptide
  Seed: MDPRMCSLMQGSTLPRRSG
MDPRMVSLLQASTIPRRSG

SEQ ID NO: 100760 - protein, 19 aa, Artificial Sequence
  Description of Artificial Sequence: Synthetic peptide
  Seed: MDPRMCSLMQGSTLPRRSG
MDPRMVSLLQASTLPRRSG

SEQ ID NO: 100761 - protein, 19 aa, Artificial Sequence
  Description of Artificial Sequence: Synthetic peptide
  Seed: MDPRMCSLMQGSTLPRRSG
MDPRMVSLLQASTVPRRSG

SEQ ID NO: 100762 - protein, 19 aa, Artificial Sequence
  Description of Artificial Sequence: Synthetic peptide
  Seed: MDPRMCSLMQGSTLPRRSG
MDPRMVSLLQGSTAPRRSG

SEQ ID NO: 100763 - protein, 19 aa, Artificial Sequence
  Description of Artificial Sequence: Synthetic peptide
  Seed: MDPRMCSLMQGSTLPRRSG
MDPRMVSLLQGSTIPRRSG

SEQ ID NO: 100764 - protein, 19 aa, Artificial Sequence
  Description of Artificial Sequence: Synthetic peptide
  Seed: MDPRMCSLMQGSTLPRRSG
MDPRMVSLLQGSTLPRRSG

SEQ ID NO: 100765 - protein, 19 aa, Artificial Sequence
  Description of Artificial Sequence: Synthetic peptide
  Seed: MDPRMCSLMQGSTLPRRSG
MDPRMVSLLQGSTVPRRSG

SEQ ID NO: 100766 - protein, 19 aa, Artificial Sequence
  Description of Artificial Sequence: Synthetic peptide
  Seed: MDPRMCSLMQGSTLPRRSG
MDPRMVSLLQPSTIPRRSG

SEQ ID NO: 100767 - protein, 19 aa, Artificial Sequence
  Description of Artificial Sequence: Synthetic peptide
  Seed: MDPRMCSLMQGSTLPRRSG
MDPRMVSLLQPSTLPRRSG

SEQ ID NO: 100768 - protein, 19 aa, Artificial Sequence
  Description of Artificial Sequence: Synthetic peptide
  Seed: MDPRMCSLMQGSTLPRRSG
MDPRMVSLLQPSTVPRRSG

SEQ ID NO: 100769 - protein, 19 aa, Artificial Sequence
  Description of Artificial Sequence: Synthetic peptide
  Seed: MDPRMCSLMQGSTLPRRSG
MDPRMVSLLQSSTAPRRSG

SEQ ID NO: 100770 - protein, 19 aa, Artificial Sequence
  Description of Artificial Sequence: Synthetic peptide
  Seed: MDPRMCSLMQGSTLPRRSG
MDPRMVSLLQSSTIPRRSG

SEQ ID NO: 100771 - protein, 19 aa, Artificial Sequence
  Description of Artificial Sequence: Synthetic peptide
  Seed: MDPRMCSLMQGSTLPRRSG
MDPRMVSLLQSSTLPRRSG

SEQ ID NO: 100772 - protein, 19 aa, Artificial Sequence
  Description of Artificial Sequence: Synthetic peptide
  Seed: MDPRMCSLMQGSTLPRRSG
MDPRMVSLLQSSTVPRRSG

SEQ ID NO: 100773 - protein, 19 aa, Artificial Sequence
  Description of Artificial Sequence: Synthetic peptide
  Seed: MDPRMCSLMQGSTLPRRSG
MDPRMVSLMQASTAPRRSG

SEQ ID NO: 100774 - protein, 19 aa, Artificial Sequence
  Description of Artificial Sequence: Synthetic peptide
  Seed: MDPRMCSLMQGSTLPRRSG
MDPRMVSLMQASTIPRRSG

SEQ ID NO: 100775 - protein, 19 aa, Artificial Sequence
  Description of Artificial Sequence: Synthetic peptide
  Seed: MDPRMCSLMQGSTLPRRSG
MDPRMVSLMQASTLPRRSG

SEQ ID NO: 100776 - protein, 19 aa, Artificial Sequence
  Description of Artificial Sequence: Synthetic peptide
  Seed: MDPRMCSLMQGSTLPRRSG
MDPRMVSLMQASTVPRRSG

SEQ ID NO: 100777 - protein, 19 aa, Artificial Sequence
  Description of Artificial Sequence: Synthetic peptide
  Seed: MDPRMCSLMQGSTLPRRSG
MDPRMVSLMQGSTAPRRSG

SEQ ID NO: 100778 - protein, 19 aa, Artificial Sequence
  Description of Artificial Sequence: Synthetic peptide
  Seed: MDPRMCSLMQGSTLPRRSG
MDPRMVSLMQGSTIPRRSG

SEQ ID NO: 100779 - protein, 19 aa, Artificial Sequence
  Description of Artificial Sequence: Synthetic peptide
  Seed: MDPRMCSLMQGSTLPRRSG
MDPRMVSLMQGSTLPRRSG

SEQ ID NO: 100780 - protein, 19 aa, Artificial Sequence
  Description of Artificial Sequence: Synthetic peptide
  Seed: MDPRMCSLMQGSTLPRRSG
MDPRMVSLMQGSTVPRRSG

SEQ ID NO: 100781 - protein, 19 aa, Artificial Sequence
  Description of Artificial Sequence: Synthetic peptide
  Seed: MDPRMCSLMQGSTLPRRSG
MDPRMVSLMQSSTIPRRSG

SEQ ID NO: 100782 - protein, 19 aa, Artificial Sequence
  Description of Artificial Sequence: Synthetic peptide
  Seed: MDPRMCSLMQGSTLPRRSG
MDPRMVSLMQSSTLPRRSG

SEQ ID NO: 100783 - protein, 19 aa, Artificial Sequence
  Description of Artificial Sequence: Synthetic peptide
  Seed: MDPRMCSLMQGSTLPRRSG
MDPRMVSLMQSSTVPRRSG

SEQ ID NO: 100784 - protein, 19 aa, Artificial Sequence
  Description of Artificial Sequence: Synthetic peptide
  Seed: MDPRMCSLMQGSTLPRRSG
MDPRMWSLAQASTAPRRSG

SEQ ID NO: 100785 - protein, 19 aa, Artificial Sequence
  Description of Artificial Sequence: Synthetic peptide
  Seed: MDPRMCSLMQGSTLPRRSG
MDPRMWSLAQASTIPRRSG

SEQ ID NO: 100786 - protein, 19 aa, Artificial Sequence
  Description of Artificial Sequence: Synthetic peptide
  Seed: MDPRMCSLMQGSTLPRRSG
MDPRMWSLAQASTLPRRSG

SEQ ID NO: 100787 - protein, 19 aa, Artificial Sequence
  Description of Artificial Sequence: Synthetic peptide
  Seed: MDPRMCSLMQGSTLPRRSG
MDPRMWSLAQASTMPRRSG

SEQ ID NO: 100788 - protein, 19 aa, Artificial Sequence
  Description of Artificial Sequence: Synthetic peptide
  Seed: MDPRMCSLMQGSTLPRRSG
MDPRMWSLAQASTSPRRSG

SEQ ID NO: 100789 - protein, 19 aa, Artificial Sequence
  Description of Artificial Sequence: Synthetic peptide
  Seed: MDPRMCSLMQGSTLPRRSG
MDPRMWSLAQASTVPRRSG

SEQ ID NO: 100790 - protein, 19 aa, Artificial Sequence
  Description of Artificial Sequence: Synthetic peptide
  Seed: MDPRMCSLMQGSTLPRRSG
MDPRMWSLAQGSTAPRRSG

SEQ ID NO: 100791 - protein, 19 aa, Artificial Sequence
  Description of Artificial Sequence: Synthetic peptide
  Seed: MDPRMCSLMQGSTLPRRSG
MDPRMWSLAQGSTIPRRSG

SEQ ID NO: 100792 - protein, 19 aa, Artificial Sequence
  Description of Artificial Sequence: Synthetic peptide
  Seed: MDPRMCSLMQGSTLPRRSG
MDPRMWSLAQGSTLPRRSG

SEQ ID NO: 100793 - protein, 19 aa, Artificial Sequence
  Description of Artificial Sequence: Synthetic peptide
  Seed: MDPRMCSLMQGSTLPRRSG
MDPRMWSLAQGSTVPRRSG

SEQ ID NO: 100794 - protein, 19 aa, Artificial Sequence
  Description of Artificial Sequence: Synthetic peptide
  Seed: MDPRMCSLMQGSTLPRRSG
MDPRMWSLAQSSTAPRRSG

SEQ ID NO: 100795 - protein, 19 aa, Artificial Sequence
  Description of Artificial Sequence: Synthetic peptide
  Seed: MDPRMCSLMQGSTLPRRSG
MDPRMWSLAQSSTIPRRSG

SEQ ID NO: 100796 - protein, 19 aa, Artificial Sequence
  Description of Artificial Sequence: Synthetic peptide
  Seed: MDPRMCSLMQGSTLPRRSG
MDPRMWSLAQSSTLPRRSG

SEQ ID NO: 100797 - protein, 19 aa, Artificial Sequence
  Description of Artificial Sequence: Synthetic peptide
  Seed: MDPRMCSLMQGSTLPRRSG
MDPRMWSLAQSSTVPRRSG

SEQ ID NO: 100798 - protein, 19 aa, Artificial Sequence
  Description of Artificial Sequence: Synthetic peptide
  Seed: MDPRMCSLMQGSTLPRRSG
MDPRMWSLAQVSTAPRRSG

SEQ ID NO: 100799 - protein, 19 aa, Artificial Sequence
  Description of Artificial Sequence: Synthetic peptide
  Seed: MDPRMCSLMQGSTLPRRSG
MDPRMWSLIQASTAPRRSG

SEQ ID NO: 100800 - protein, 19 aa, Artificial Sequence
  Description of Artificial Sequence: Synthetic peptide
  Seed: MDPRMCSLMQGSTLPRRSG
MDPRMWSLIQASTIPRRSG

SEQ ID NO: 100801 - protein, 19 aa, Artificial Sequence
  Description of Artificial Sequence: Synthetic peptide
  Seed: MDPRMCSLMQGSTLPRRSG
MDPRMWSLIQASTLPRRSG

SEQ ID NO: 100802 - protein, 19 aa, Artificial Sequence
  Description of Artificial Sequence: Synthetic peptide
  Seed: MDPRMCSLMQGSTLPRRSG
MDPRMWSLIQASTMPRRSG

SEQ ID NO: 100803 - protein, 19 aa, Artificial Sequence
  Description of Artificial Sequence: Synthetic peptide
  Seed: MDPRMCSLMQGSTLPRRSG
MDPRMWSLIQASTNPRRSG

SEQ ID NO: 100804 - protein, 19 aa, Artificial Sequence
  Description of Artificial Sequence: Synthetic peptide
  Seed: MDPRMCSLMQGSTLPRRSG
MDPRMWSLIQASTSPRRSG

SEQ ID NO: 100805 - protein, 19 aa, Artificial Sequence
  Description of Artificial Sequence: Synthetic peptide
  Seed: MDPRMCSLMQGSTLPRRSG
MDPRMWSLIQASTTPRRSG

SEQ ID NO: 100806 - protein, 19 aa, Artificial Sequence
  Description of Artificial Sequence: Synthetic peptide
  Seed: MDPRMCSLMQGSTLPRRSG
MDPRMWSLIQASTVPRRSG

SEQ ID NO: 100807 - protein, 19 aa, Artificial Sequence
  Description of Artificial Sequence: Synthetic peptide
  Seed: MDPRMCSLMQGSTLPRRSG
MDPRMWSLIQGSTAPRRSG

SEQ ID NO: 100808 - protein, 19 aa, Artificial Sequence
  Description of Artificial Sequence: Synthetic peptide
  Seed: MDPRMCSLMQGSTLPRRSG
MDPRMWSLIQGSTIPRRSG

SEQ ID NO: 100809 - protein, 19 aa, Artificial Sequence
  Description of Artificial Sequence: Synthetic peptide
  Seed: MDPRMCSLMQGSTLPRRSG
MDPRMWSLIQGSTLPRRSG

SEQ ID NO: 100810 - protein, 19 aa, Artificial Sequence
  Description of Artificial Sequence: Synthetic peptide
  Seed: MDPRMCSLMQGSTLPRRSG
MDPRMWSLIQGSTMPRRSG

SEQ ID NO: 100811 - protein, 19 aa, Artificial Sequence
  Description of Artificial Sequence: Synthetic peptide
  Seed: MDPRMCSLMQGSTLPRRSG
MDPRMWSLIQGSTTPRRSG

SEQ ID NO: 100812 - protein, 19 aa, Artificial Sequence
  Description of Artificial Sequence: Synthetic peptide
  Seed: MDPRMCSLMQGSTLPRRSG
MDPRMWSLIQGSTVPRRSG

SEQ ID NO: 100813 - protein, 19 aa, Artificial Sequence
  Description of Artificial Sequence: Synthetic peptide
  Seed: MDPRMCSLMQGSTLPRRSG
MDPRMWSLIQISTAPRRSG

SEQ ID NO: 100814 - protein, 19 aa, Artificial Sequence
  Description of Artificial Sequence: Synthetic peptide
  Seed: MDPRMCSLMQGSTLPRRSG
MDPRMWSLIQPSTAPRRSG

SEQ ID NO: 100815 - protein, 19 aa, Artificial Sequence
  Description of Artificial Sequence: Synthetic peptide
  Seed: MDPRMCSLMQGSTLPRRSG
MDPRMWSLIQPSTIPRRSG

SEQ ID NO: 100816 - protein, 19 aa, Artificial Sequence
  Description of Artificial Sequence: Synthetic peptide
  Seed: MDPRMCSLMQGSTLPRRSG
MDPRMWSLIQPSTLPRRSG

SEQ ID NO: 100817 - protein, 19 aa, Artificial Sequence
  Description of Artificial Sequence: Synthetic peptide
  Seed: MDPRMCSLMQGSTLPRRSG
MDPRMWSLIQPSTNPRRSG

SEQ ID NO: 100818 - protein, 19 aa, Artificial Sequence
  Description of Artificial Sequence: Synthetic peptide
  Seed: MDPRMCSLMQGSTLPRRSG
MDPRMWSLIQPSTSPRRSG

SEQ ID NO: 100819 - protein, 19 aa, Artificial Sequence
  Description of Artificial Sequence: Synthetic peptide
  Seed: MDPRMCSLMQGSTLPRRSG
MDPRMWSLIQPSTTPRRSG

SEQ ID NO: 100820 - protein, 19 aa, Artificial Sequence
  Description of Artificial Sequence: Synthetic peptide
  Seed: MDPRMCSLMQGSTLPRRSG
MDPRMWSLIQPSTVPRRSG

SEQ ID NO: 100821 - protein, 19 aa, Artificial Sequence
  Description of Artificial Sequence: Synthetic peptide
  Seed: MDPRMCSLMQGSTLPRRSG
MDPRMWSLIQSSTAPRRSG

SEQ ID NO: 100822 - protein, 19 aa, Artificial Sequence
  Description of Artificial Sequence: Synthetic peptide
  Seed: MDPRMCSLMQGSTLPRRSG
MDPRMWSLIQSSTIPRRSG

SEQ ID NO: 100823 - protein, 19 aa, Artificial Sequence
  Description of Artificial Sequence: Synthetic peptide
  Seed: MDPRMCSLMQGSTLPRRSG
MDPRMWSLIQSSTLPRRSG

SEQ ID NO: 100824 - protein, 19 aa, Artificial Sequence
  Description of Artificial Sequence: Synthetic peptide
  Seed: MDPRMCSLMQGSTLPRRSG
MDPRMWSLIQSSTNPRRSG

SEQ ID NO: 100825 - protein, 19 aa, Artificial Sequence
  Description of Artificial Sequence: Synthetic peptide
  Seed: MDPRMCSLMQGSTLPRRSG
MDPRMWSLIQSSTSPRRSG

SEQ ID NO: 100826 - protein, 19 aa, Artificial Sequence
  Description of Artificial Sequence: Synthetic peptide
  Seed: MDPRMCSLMQGSTLPRRSG
MDPRMWSLIQSSTTPRRSG

SEQ ID NO: 100827 - protein, 19 aa, Artificial Sequence
  Description of Artificial Sequence: Synthetic peptide
  Seed: MDPRMCSLMQGSTLPRRSG
MDPRMWSLIQSSTVPRRSG

SEQ ID NO: 100828 - protein, 19 aa, Artificial Sequence
  Description of Artificial Sequence: Synthetic peptide
  Seed: MDPRMCSLMQGSTLPRRSG
MDPRMWSLIQTSTAPRRSG

SEQ ID NO: 100829 - protein, 19 aa, Artificial Sequence
  Description of Artificial Sequence: Synthetic peptide
  Seed: MDPRMCSLMQGSTLPRRSG
MDPRMWSLIQTSTNPRRSG

SEQ ID NO: 100830 - protein, 19 aa, Artificial Sequence
  Description of Artificial Sequence: Synthetic peptide
  Seed: MDPRMCSLMQGSTLPRRSG
MDPRMWSLIQTSTSPRRSG

SEQ ID NO: 100831 - protein, 19 aa, Artificial Sequence
  Description of Artificial Sequence: Synthetic peptide
  Seed: MDPRMCSLMQGSTLPRRSG
MDPRMWSLIQTSTTPRRSG

SEQ ID NO: 100832 - protein, 19 aa, Artificial Sequence
  Description of Artificial Sequence: Synthetic peptide
  Seed: MDPRMCSLMQGSTLPRRSG
MDPRMWSLIQVSTAPRRSG

SEQ ID NO: 100833 - protein, 19 aa, Artificial Sequence
  Description of Artificial Sequence: Synthetic peptide
  Seed: MDPRMCSLMQGSTLPRRSG
MDPRMWSLIQVSTNPRRSG

SEQ ID NO: 100834 - protein, 19 aa, Artificial Sequence
  Description of Artificial Sequence: Synthetic peptide
  Seed: MDPRMCSLMQGSTLPRRSG
MDPRMWSLIQVSTSPRRSG

SEQ ID NO: 100835 - protein, 19 aa, Artificial Sequence
  Description of Artificial Sequence: Synthetic peptide
  Seed: MDPRMCSLMQGSTLPRRSG
MDPRMWSLLQASTAPRRSG

SEQ ID NO: 100836 - protein, 19 aa, Artificial Sequence
  Description of Artificial Sequence: Synthetic peptide
  Seed: MDPRMCSLMQGSTLPRRSG
MDPRMWSLLQASTGPRRSG

SEQ ID NO: 100837 - protein, 19 aa, Artificial Sequence
  Description of Artificial Sequence: Synthetic peptide
  Seed: MDPRMCSLMQGSTLPRRSG
MDPRMWSLLQASTIPRRSG

SEQ ID NO: 100838 - protein, 19 aa, Artificial Sequence
  Description of Artificial Sequence: Synthetic peptide
  Seed: MDPRMCSLMQGSTLPRRSG
MDPRMWSLLQASTLPRRSG

SEQ ID NO: 100839 - protein, 19 aa, Artificial Sequence
  Description of Artificial Sequence: Synthetic peptide
  Seed: MDPRMCSLMQGSTLPRRSG
MDPRMWSLLQASTMPRRSG

SEQ ID NO: 100840 - protein, 19 aa, Artificial Sequence
  Description of Artificial Sequence: Synthetic peptide
  Seed: MDPRMCSLMQGSTLPRRSG
MDPRMWSLLQASTNPRRSG

SEQ ID NO: 100841 - protein, 19 aa, Artificial Sequence
  Description of Artificial Sequence: Synthetic peptide
  Seed: MDPRMCSLMQGSTLPRRSG
MDPRMWSLLQASTSPRRSG

SEQ ID NO: 100842 - protein, 19 aa, Artificial Sequence
  Description of Artificial Sequence: Synthetic peptide
  Seed: MDPRMCSLMQGSTLPRRSG
MDPRMWSLLQASTTPRRSG

SEQ ID NO: 100843 - protein, 19 aa, Artificial Sequence
  Description of Artificial Sequence: Synthetic peptide
  Seed: MDPRMCSLMQGSTLPRRSG
MDPRMWSLLQASTVPRRSG

SEQ ID NO: 100844 - protein, 19 aa, Artificial Sequence
  Description of Artificial Sequence: Synthetic peptide
  Seed: MDPRMCSLMQGSTLPRRSG
MDPRMWSLLQGSTAPRRSG

SEQ ID NO: 100845 - protein, 19 aa, Artificial Sequence
  Description of Artificial Sequence: Synthetic peptide
  Seed: MDPRMCSLMQGSTLPRRSG
MDPRMWSLLQGSTGPRRSG

SEQ ID NO: 100846 - protein, 19 aa, Artificial Sequence
  Description of Artificial Sequence: Synthetic peptide
  Seed: MDPRMCSLMQGSTLPRRSG
MDPRMWSLLQGSTIPRRSG

SEQ ID NO: 100847 - protein, 19 aa, Artificial Sequence
  Description of Artificial Sequence: Synthetic peptide
  Seed: MDPRMCSLMQGSTLPRRSG
MDPRMWSLLQGSTLPRRSG

SEQ ID NO: 100848 - protein, 19 aa, Artificial Sequence
  Description of Artificial Sequence: Synthetic peptide
  Seed: MDPRMCSLMQGSTLPRRSG
MDPRMWSLLQGSTMPRRSG

SEQ ID NO: 100849 - protein, 19 aa, Artificial Sequence
  Description of Artificial Sequence: Synthetic peptide
  Seed: MDPRMCSLMQGSTLPRRSG
MDPRMWSLLQGSTSPRRSG

SEQ ID NO: 100850 - protein, 19 aa, Artificial Sequence
  Description of Artificial Sequence: Synthetic peptide
  Seed: MDPRMCSLMQGSTLPRRSG
MDPRMWSLLQGSTTPRRSG

SEQ ID NO: 100851 - protein, 19 aa, Artificial Sequence
  Description of Artificial Sequence: Synthetic peptide
  Seed: MDPRMCSLMQGSTLPRRSG
MDPRMWSLLQGSTVPRRSG

SEQ ID NO: 100852 - protein, 19 aa, Artificial Sequence
  Description of Artificial Sequence: Synthetic peptide
  Seed: MDPRMCSLMQGSTLPRRSG
MDPRMWSLLQISTAPRRSG

SEQ ID NO: 100853 - protein, 19 aa, Artificial Sequence
  Description of Artificial Sequence: Synthetic peptide
  Seed: MDPRMCSLMQGSTLPRRSG
MDPRMWSLLQISTNPRRSG

SEQ ID NO: 100854 - protein, 19 aa, Artificial Sequence
  Description of Artificial Sequence: Synthetic peptide
  Seed: MDPRMCSLMQGSTLPRRSG
MDPRMWSLLQISTSPRRSG

SEQ ID NO: 100855 - protein, 19 aa, Artificial Sequence
  Description of Artificial Sequence: Synthetic peptide
  Seed: MDPRMCSLMQGSTLPRRSG
MDPRMWSLLQNSTAPRRSG

SEQ ID NO: 100856 - protein, 19 aa, Artificial Sequence
  Description of Artificial Sequence: Synthetic peptide
  Seed: MDPRMCSLMQGSTLPRRSG
MDPRMWSLLQNSTIPRRSG

SEQ ID NO: 100857 - protein, 19 aa, Artificial Sequence
  Description of Artificial Sequence: Synthetic peptide
  Seed: MDPRMCSLMQGSTLPRRSG
MDPRMWSLLQNSTLPRRSG

SEQ ID NO: 100858 - protein, 19 aa, Artificial Sequence
  Description of Artificial Sequence: Synthetic peptide
  Seed: MDPRMCSLMQGSTLPRRSG
MDPRMWSLLQNSTVPRRSG

SEQ ID NO: 100859 - protein, 19 aa, Artificial Sequence
  Description of Artificial Sequence: Synthetic peptide
  Seed: MDPRMCSLMQGSTLPRRSG
MDPRMWSLLQPSTAPRRSG

SEQ ID NO: 100860 - protein, 19 aa, Artificial Sequence
  Description of Artificial Sequence: Synthetic peptide
  Seed: MDPRMCSLMQGSTLPRRSG
MDPRMWSLLQPSTIPRRSG

SEQ ID NO: 100861 - protein, 19 aa, Artificial Sequence
  Description of Artificial Sequence: Synthetic peptide
  Seed: MDPRMCSLMQGSTLPRRSG
MDPRMWSLLQPSTLPRRSG

SEQ ID NO: 100862 - protein, 19 aa, Artificial Sequence
  Description of Artificial Sequence: Synthetic peptide
  Seed: MDPRMCSLMQGSTLPRRSG
MDPRMWSLLQPSTMPRRSG

SEQ ID NO: 100863 - protein, 19 aa, Artificial Sequence
  Description of Artificial Sequence: Synthetic peptide
  Seed: MDPRMCSLMQGSTLPRRSG
MDPRMWSLLQPSTNPRRSG

SEQ ID NO: 100864 - protein, 19 aa, Artificial Sequence
  Description of Artificial Sequence: Synthetic peptide
  Seed: MDPRMCSLMQGSTLPRRSG
MDPRMWSLLQPSTSPRRSG

SEQ ID NO: 100865 - protein, 19 aa, Artificial Sequence
  Description of Artificial Sequence: Synthetic peptide
  Seed: MDPRMCSLMQGSTLPRRSG
MDPRMWSLLQPSTTPRRSG

SEQ ID NO: 100866 - protein, 19 aa, Artificial Sequence
  Description of Artificial Sequence: Synthetic peptide
  Seed: MDPRMCSLMQGSTLPRRSG
MDPRMWSLLQPSTVPRRSG

SEQ ID NO: 100867 - protein, 19 aa, Artificial Sequence
  Description of Artificial Sequence: Synthetic peptide
  Seed: MDPRMCSLMQGSTLPRRSG
MDPRMWSLLQSSTAPRRSG

SEQ ID NO: 100868 - protein, 19 aa, Artificial Sequence
  Description of Artificial Sequence: Synthetic peptide
  Seed: MDPRMCSLMQGSTLPRRSG
MDPRMWSLLQSSTIPRRSG

SEQ ID NO: 100869 - protein, 19 aa, Artificial Sequence
  Description of Artificial Sequence: Synthetic peptide
  Seed: MDPRMCSLMQGSTLPRRSG
MDPRMWSLLQSSTLPRRSG

SEQ ID NO: 100870 - protein, 19 aa, Artificial Sequence
  Description of Artificial Sequence: Synthetic peptide
  Seed: MDPRMCSLMQGSTLPRRSG
MDPRMWSLLQSSTMPRRSG

SEQ ID NO: 100871 - protein, 19 aa, Artificial Sequence
  Description of Artificial Sequence: Synthetic peptide
  Seed: MDPRMCSLMQGSTLPRRSG
MDPRMWSLLQSSTNPRRSG

SEQ ID NO: 100872 - protein, 19 aa, Artificial Sequence
  Description of Artificial Sequence: Synthetic peptide
  Seed: MDPRMCSLMQGSTLPRRSG
MDPRMWSLLQSSTSPRRSG

SEQ ID NO: 100873 - protein, 19 aa, Artificial Sequence
  Description of Artificial Sequence: Synthetic peptide
  Seed: MDPRMCSLMQGSTLPRRSG
MDPRMWSLLQSSTTPRRSG

SEQ ID NO: 100874 - protein, 19 aa, Artificial Sequence
  Description of Artificial Sequence: Synthetic peptide
  Seed: MDPRMCSLMQGSTLPRRSG
MDPRMWSLLQSSTVPRRSG

SEQ ID NO: 100875 - protein, 19 aa, Artificial Sequence
  Description of Artificial Sequence: Synthetic peptide
  Seed: MDPRMCSLMQGSTLPRRSG
MDPRMWSLLQTSTAPRRSG

SEQ ID NO: 100876 - protein, 19 aa, Artificial Sequence
  Description of Artificial Sequence: Synthetic peptide
  Seed: MDPRMCSLMQGSTLPRRSG
MDPRMWSLLQTSTIPRRSG

SEQ ID NO: 100877 - protein, 19 aa, Artificial Sequence
  Description of Artificial Sequence: Synthetic peptide
  Seed: MDPRMCSLMQGSTLPRRSG
MDPRMWSLLQTSTLPRRSG

SEQ ID NO: 100878 - protein, 19 aa, Artificial Sequence
  Description of Artificial Sequence: Synthetic peptide
  Seed: MDPRMCSLMQGSTLPRRSG
MDPRMWSLLQTSTNPRRSG

SEQ ID NO: 100879 - protein, 19 aa, Artificial Sequence
  Description of Artificial Sequence: Synthetic peptide
  Seed: MDPRMCSLMQGSTLPRRSG
MDPRMWSLLQTSTSPRRSG

SEQ ID NO: 100880 - protein, 19 aa, Artificial Sequence
  Description of Artificial Sequence: Synthetic peptide
  Seed: MDPRMCSLMQGSTLPRRSG
MDPRMWSLLQTSTTPRRSG

SEQ ID NO: 100881 - protein, 19 aa, Artificial Sequence
  Description of Artificial Sequence: Synthetic peptide
  Seed: MDPRMCSLMQGSTLPRRSG
MDPRMWSLLQTSTVPRRSG

SEQ ID NO: 100882 - protein, 19 aa, Artificial Sequence
  Description of Artificial Sequence: Synthetic peptide
  Seed: MDPRMCSLMQGSTLPRRSG
MDPRMWSLLQVSTAPRRSG

SEQ ID NO: 100883 - protein, 19 aa, Artificial Sequence
  Description of Artificial Sequence: Synthetic peptide
  Seed: MDPRMCSLMQGSTLPRRSG
MDPRMWSLLQVSTNPRRSG

SEQ ID NO: 100884 - protein, 19 aa, Artificial Sequence
  Description of Artificial Sequence: Synthetic peptide
  Seed: MDPRMCSLMQGSTLPRRSG
MDPRMWSLLQVSTSPRRSG

SEQ ID NO: 100885 - protein, 19 aa, Artificial Sequence
  Description of Artificial Sequence: Synthetic peptide
  Seed: MDPRMCSLMQGSTLPRRSG
MDPRMWSLLQVSTTPRRSG

SEQ ID NO: 100886 - protein, 19 aa, Artificial Sequence
  Description of Artificial Sequence: Synthetic peptide
  Seed: MDPRMCSLMQGSTLPRRSG
MDPRMWSLLQVSTVPRRSG

SEQ ID NO: 100887 - protein, 19 aa, Artificial Sequence
  Description of Artificial Sequence: Synthetic peptide
  Seed: MDPRMCSLMQGSTLPRRSG
MDPRMWSLMQASTAPRRSG

SEQ ID NO: 100888 - protein, 19 aa, Artificial Sequence
  Description of Artificial Sequence: Synthetic peptide
  Seed: MDPRMCSLMQGSTLPRRSG
MDPRMWSLMQASTGPRRSG

SEQ ID NO: 100889 - protein, 19 aa, Artificial Sequence
  Description of Artificial Sequence: Synthetic peptide
  Seed: MDPRMCSLMQGSTLPRRSG
MDPRMWSLMQASTIPRRSG

SEQ ID NO: 100890 - protein, 19 aa, Artificial Sequence
  Description of Artificial Sequence: Synthetic peptide
  Seed: MDPRMCSLMQGSTLPRRSG
MDPRMWSLMQASTLPRRSG

SEQ ID NO: 100891 - protein, 19 aa, Artificial Sequence
  Description of Artificial Sequence: Synthetic peptide
  Seed: MDPRMCSLMQGSTLPRRSG
MDPRMWSLMQASTMPRRSG

SEQ ID NO: 100892 - protein, 19 aa, Artificial Sequence
  Description of Artificial Sequence: Synthetic peptide
  Seed: MDPRMCSLMQGSTLPRRSG
MDPRMWSLMQASTNPRRSG

SEQ ID NO: 100893 - protein, 19 aa, Artificial Sequence
  Description of Artificial Sequence: Synthetic peptide
  Seed: MDPRMCSLMQGSTLPRRSG
MDPRMWSLMQASTSPRRSG

SEQ ID NO: 100894 - protein, 19 aa, Artificial Sequence
  Description of Artificial Sequence: Synthetic peptide
  Seed: MDPRMCSLMQGSTLPRRSG
MDPRMWSLMQASTTPRRSG

SEQ ID NO: 100895 - protein, 19 aa, Artificial Sequence
  Description of Artificial Sequence: Synthetic peptide
  Seed: MDPRMCSLMQGSTLPRRSG
MDPRMWSLMQASTVPRRSG

SEQ ID NO: 100896 - protein, 19 aa, Artificial Sequence
  Description of Artificial Sequence: Synthetic peptide
  Seed: MDPRMCSLMQGSTLPRRSG
MDPRMWSLMQGSTAPRRSG

SEQ ID NO: 100897 - protein, 19 aa, Artificial Sequence
  Description of Artificial Sequence: Synthetic peptide
  Seed: MDPRMCSLMQGSTLPRRSG
MDPRMWSLMQGSTIPRRSG

SEQ ID NO: 100898 - protein, 19 aa, Artificial Sequence
  Description of Artificial Sequence: Synthetic peptide
  Seed: MDPRMCSLMQGSTLPRRSG
MDPRMWSLMQGSTLPRRSG

SEQ ID NO: 100899 - protein, 19 aa, Artificial Sequence
  Description of Artificial Sequence: Synthetic peptide
  Seed: MDPRMCSLMQGSTLPRRSG
MDPRMWSLMQGSTMPRRSG

SEQ ID NO: 100900 - protein, 19 aa, Artificial Sequence
  Description of Artificial Sequence: Synthetic peptide
  Seed: MDPRMCSLMQGSTLPRRSG
MDPRMWSLMQGSTSPRRSG

SEQ ID NO: 100901 - protein, 19 aa, Artificial Sequence
  Description of Artificial Sequence: Synthetic peptide
  Seed: MDPRMCSLMQGSTLPRRSG
MDPRMWSLMQGSTTPRRSG

SEQ ID NO: 100902 - protein, 19 aa, Artificial Sequence
  Description of Artificial Sequence: Synthetic peptide
  Seed: MDPRMCSLMQGSTLPRRSG
MDPRMWSLMQGSTVPRRSG

SEQ ID NO: 100903 - protein, 19 aa, Artificial Sequence
  Description of Artificial Sequence: Synthetic peptide
  Seed: MDPRMCSLMQGSTLPRRSG
MDPRMWSLMQISTAPRRSG

SEQ ID NO: 100904 - protein, 19 aa, Artificial Sequence
  Description of Artificial Sequence: Synthetic peptide
  Seed: MDPRMCSLMQGSTLPRRSG
MDPRMWSLMQISTNPRRSG

SEQ ID NO: 100905 - protein, 19 aa, Artificial Sequence
  Description of Artificial Sequence: Synthetic peptide
  Seed: MDPRMCSLMQGSTLPRRSG
MDPRMWSLMQISTSPRRSG

SEQ ID NO: 100906 - protein, 19 aa, Artificial Sequence
  Description of Artificial Sequence: Synthetic peptide
  Seed: MDPRMCSLMQGSTLPRRSG
MDPRMWSLMQISTTPRRSG

SEQ ID NO: 100907 - protein, 19 aa, Artificial Sequence
  Description of Artificial Sequence: Synthetic peptide
  Seed: MDPRMCSLMQGSTLPRRSG
MDPRMWSLMQNSTAPRRSG

SEQ ID NO: 100908 - protein, 19 aa, Artificial Sequence
  Description of Artificial Sequence: Synthetic peptide
  Seed: MDPRMCSLMQGSTLPRRSG
MDPRMWSLMQNSTIPRRSG

SEQ ID NO: 100909 - protein, 19 aa, Artificial Sequence
  Description of Artificial Sequence: Synthetic peptide
  Seed: MDPRMCSLMQGSTLPRRSG
MDPRMWSLMQNSTLPRRSG

SEQ ID NO: 100910 - protein, 19 aa, Artificial Sequence
  Description of Artificial Sequence: Synthetic peptide
  Seed: MDPRMCSLMQGSTLPRRSG
MDPRMWSLMQNSTVPRRSG

SEQ ID NO: 100911 - protein, 19 aa, Artificial Sequence
  Description of Artificial Sequence: Synthetic peptide
  Seed: MDPRMCSLMQGSTLPRRSG
MDPRMWSLMQPSTAPRRSG

SEQ ID NO: 100912 - protein, 19 aa, Artificial Sequence
  Description of Artificial Sequence: Synthetic peptide
  Seed: MDPRMCSLMQGSTLPRRSG
MDPRMWSLMQPSTIPRRSG

SEQ ID NO: 100913 - protein, 19 aa, Artificial Sequence
  Description of Artificial Sequence: Synthetic peptide
  Seed: MDPRMCSLMQGSTLPRRSG
MDPRMWSLMQPSTLPRRSG

SEQ ID NO: 100914 - protein, 19 aa, Artificial Sequence
  Description of Artificial Sequence: Synthetic peptide
  Seed: MDPRMCSLMQGSTLPRRSG
MDPRMWSLMQPSTMPRRSG

SEQ ID NO: 100915 - protein, 19 aa, Artificial Sequence
  Description of Artificial Sequence: Synthetic peptide
  Seed: MDPRMCSLMQGSTLPRRSG
MDPRMWSLMQPSTNPRRSG

SEQ ID NO: 100916 - protein, 19 aa, Artificial Sequence
  Description of Artificial Sequence: Synthetic peptide
  Seed: MDPRMCSLMQGSTLPRRSG
MDPRMWSLMQPSTSPRRSG

SEQ ID NO: 100917 - protein, 19 aa, Artificial Sequence
  Description of Artificial Sequence: Synthetic peptide
  Seed: MDPRMCSLMQGSTLPRRSG
MDPRMWSLMQPSTTPRRSG

SEQ ID NO: 100918 - protein, 19 aa, Artificial Sequence
  Description of Artificial Sequence: Synthetic peptide
  Seed: MDPRMCSLMQGSTLPRRSG
MDPRMWSLMQPSTVPRRSG

SEQ ID NO: 100919 - protein, 19 aa, Artificial Sequence
  Description of Artificial Sequence: Synthetic peptide
  Seed: MDPRMCSLMQGSTLPRRSG
MDPRMWSLMQSSTAPRRSG

SEQ ID NO: 100920 - protein, 19 aa, Artificial Sequence
  Description of Artificial Sequence: Synthetic peptide
  Seed: MDPRMCSLMQGSTLPRRSG
MDPRMWSLMQSSTIPRRSG

SEQ ID NO: 100921 - protein, 19 aa, Artificial Sequence
  Description of Artificial Sequence: Synthetic peptide
  Seed: MDPRMCSLMQGSTLPRRSG
MDPRMWSLMQSSTLPRRSG

SEQ ID NO: 100922 - protein, 19 aa, Artificial Sequence
  Description of Artificial Sequence: Synthetic peptide
  Seed: MDPRMCSLMQGSTLPRRSG
MDPRMWSLMQSSTMPRRSG

SEQ ID NO: 100923 - protein, 19 aa, Artificial Sequence
  Description of Artificial Sequence: Synthetic peptide
  Seed: MDPRMCSLMQGSTLPRRSG
MDPRMWSLMQSSTNPRRSG

SEQ ID NO: 100924 - protein, 19 aa, Artificial Sequence
  Description of Artificial Sequence: Synthetic peptide
  Seed: MDPRMCSLMQGSTLPRRSG
MDPRMWSLMQSSTSPRRSG

SEQ ID NO: 100925 - protein, 19 aa, Artificial Sequence
  Description of Artificial Sequence: Synthetic peptide
  Seed: MDPRMCSLMQGSTLPRRSG
MDPRMWSLMQSSTTPRRSG

SEQ ID NO: 100926 - protein, 19 aa, Artificial Sequence
  Description of Artificial Sequence: Synthetic peptide
  Seed: MDPRMCSLMQGSTLPRRSG
MDPRMWSLMQSSTVPRRSG

SEQ ID NO: 100927 - protein, 19 aa, Artificial Sequence
  Description of Artificial Sequence: Synthetic peptide
  Seed: MDPRMCSLMQGSTLPRRSG
MDPRMWSLMQTSTAPRRSG

SEQ ID NO: 100928 - protein, 19 aa, Artificial Sequence
  Description of Artificial Sequence: Synthetic peptide
  Seed: MDPRMCSLMQGSTLPRRSG
MDPRMWSLMQTSTIPRRSG

SEQ ID NO: 100929 - protein, 19 aa, Artificial Sequence
  Description of Artificial Sequence: Synthetic peptide
  Seed: MDPRMCSLMQGSTLPRRSG
MDPRMWSLMQTSTLPRRSG

SEQ ID NO: 100930 - protein, 19 aa, Artificial Sequence
  Description of Artificial Sequence: Synthetic peptide
  Seed: MDPRMCSLMQGSTLPRRSG
MDPRMWSLMQTSTMPRRSG

SEQ ID NO: 100931 - protein, 19 aa, Artificial Sequence
  Description of Artificial Sequence: Synthetic peptide
  Seed: MDPRMCSLMQGSTLPRRSG
MDPRMWSLMQTSTNPRRSG

SEQ ID NO: 100932 - protein, 19 aa, Artificial Sequence
  Description of Artificial Sequence: Synthetic peptide
  Seed: MDPRMCSLMQGSTLPRRSG
MDPRMWSLMQTSTSPRRSG

SEQ ID NO: 100933 - protein, 19 aa, Artificial Sequence
  Description of Artificial Sequence: Synthetic peptide
  Seed: MDPRMCSLMQGSTLPRRSG
MDPRMWSLMQTSTTPRRSG

SEQ ID NO: 100934 - protein, 19 aa, Artificial Sequence
  Description of Artificial Sequence: Synthetic peptide
  Seed: MDPRMCSLMQGSTLPRRSG
MDPRMWSLMQTSTVPRRSG

SEQ ID NO: 100935 - protein, 19 aa, Artificial Sequence
  Description of Artificial Sequence: Synthetic peptide
  Seed: MDPRMCSLMQGSTLPRRSG
MDPRMWSLMQVSTAPRRSG

SEQ ID NO: 100936 - protein, 19 aa, Artificial Sequence
  Description of Artificial Sequence: Synthetic peptide
  Seed: MDPRMCSLMQGSTLPRRSG
MDPRMWSLMQVSTLPRRSG

SEQ ID NO: 100937 - protein, 19 aa, Artificial Sequence
  Description of Artificial Sequence: Synthetic peptide
  Seed: MDPRMCSLMQGSTLPRRSG
MDPRMWSLMQVSTNPRRSG

SEQ ID NO: 100938 - protein, 19 aa, Artificial Sequence
  Description of Artificial Sequence: Synthetic peptide
  Seed: MDPRMCSLMQGSTLPRRSG
MDPRMWSLMQVSTSPRRSG

SEQ ID NO: 100939 - protein, 19 aa, Artificial Sequence
  Description of Artificial Sequence: Synthetic peptide
  Seed: MDPRMCSLMQGSTLPRRSG
MDPRMWSLMQVSTTPRRSG

SEQ ID NO: 100940 - protein, 19 aa, Artificial Sequence
  Description of Artificial Sequence: Synthetic peptide
  Seed: MDPRMCSLMQGSTLPRRSG
MDPRMWSLMQVSTVPRRSG

SEQ ID NO: 100941 - protein, 19 aa, Artificial Sequence
  Description of Artificial Sequence: Synthetic peptide
  Seed: MDPRMCSLMQGSTLPRRSG
MDPRMWSLQQASTAPRRSG

SEQ ID NO: 100942 - protein, 19 aa, Artificial Sequence
  Description of Artificial Sequence: Synthetic peptide
  Seed: MDPRMCSLMQGSTLPRRSG
MDPRMWSLQQASTIPRRSG

SEQ ID NO: 100943 - protein, 19 aa, Artificial Sequence
  Description of Artificial Sequence: Synthetic peptide
  Seed: MDPRMCSLMQGSTLPRRSG
MDPRMWSLQQASTLPRRSG

SEQ ID NO: 100944 - protein, 19 aa, Artificial Sequence
  Description of Artificial Sequence: Synthetic peptide
  Seed: MDPRMCSLMQGSTLPRRSG
MDPRMWSLQQASTVPRRSG

SEQ ID NO: 100945 - protein, 19 aa, Artificial Sequence
  Description of Artificial Sequence: Synthetic peptide
  Seed: MDPRMCSLMQGSTLPRRSG
MDPRMWSLQQGSTIPRRSG

SEQ ID NO: 100946 - protein, 19 aa, Artificial Sequence
  Description of Artificial Sequence: Synthetic peptide
  Seed: MDPRMCSLMQGSTLPRRSG
MDPRMWSLQQGSTLPRRSG

SEQ ID NO: 100947 - protein, 19 aa, Artificial Sequence
  Description of Artificial Sequence: Synthetic peptide
  Seed: MDPRMCSLMQGSTLPRRSG
MDPRMWSLQQGSTVPRRSG

SEQ ID NO: 100948 - protein, 19 aa, Artificial Sequence
  Description of Artificial Sequence: Synthetic peptide
  Seed: MDPRMCSLMQGSTLPRRSG
MDPRMWSLQQSSTLPRRSG

SEQ ID NO: 100949 - protein, 19 aa, Artificial Sequence
  Description of Artificial Sequence: Synthetic peptide
  Seed: MDPRMCSLMQGSTLPRRSG
MDPRMWSLQQSSTVPRRSG

SEQ ID NO: 100950 - protein, 19 aa, Artificial Sequence
  Description of Artificial Sequence: Synthetic peptide
  Seed: MDPRMCSLMQGSTLPRRSG
MDPRMWSLVQASTAPRRSG

SEQ ID NO: 100951 - protein, 19 aa, Artificial Sequence
  Description of Artificial Sequence: Synthetic peptide
  Seed: MDPRMCSLMQGSTLPRRSG
MDPRMWSLVQASTIPRRSG

SEQ ID NO: 100952 - protein, 19 aa, Artificial Sequence
  Description of Artificial Sequence: Synthetic peptide
  Seed: MDPRMCSLMQGSTLPRRSG
MDPRMWSLVQASTLPRRSG

SEQ ID NO: 100953 - protein, 19 aa, Artificial Sequence
  Description of Artificial Sequence: Synthetic peptide
  Seed: MDPRMCSLMQGSTLPRRSG
MDPRMWSLVQASTSPRRSG

SEQ ID NO: 100954 - protein, 19 aa, Artificial Sequence
  Description of Artificial Sequence: Synthetic peptide
  Seed: MDPRMCSLMQGSTLPRRSG
MDPRMWSLVQASTVPRRSG

SEQ ID NO: 100955 - protein, 19 aa, Artificial Sequence
  Description of Artificial Sequence: Synthetic peptide
  Seed: MDPRMCSLMQGSTLPRRSG
MDPRMWSLVQGSTAPRRSG

SEQ ID NO: 100956 - protein, 19 aa, Artificial Sequence
  Description of Artificial Sequence: Synthetic peptide
  Seed: MDPRMCSLMQGSTLPRRSG
MDPRMWSLVQGSTIPRRSG

SEQ ID NO: 100957 - protein, 19 aa, Artificial Sequence
  Description of Artificial Sequence: Synthetic peptide
  Seed: MDPRMCSLMQGSTLPRRSG
MDPRMWSLVQGSTLPRRSG

SEQ ID NO: 100958 - protein, 19 aa, Artificial Sequence
  Description of Artificial Sequence: Synthetic peptide
  Seed: MDPRMCSLMQGSTLPRRSG
MDPRMWSLVQGSTVPRRSG

SEQ ID NO: 100959 - protein, 19 aa, Artificial Sequence
  Description of Artificial Sequence: Synthetic peptide
  Seed: MDPRMCSLMQGSTLPRRSG
MDPRMWSLVQSSTVPRRSG

SEQ ID NO: 100960 - protein, 19 aa, Artificial Sequence
  Description of Artificial Sequence: Synthetic peptide
  Seed: MDPRMCSLMQGSTLPRRSG
MDPRMYSLAQASTAPRRSG

SEQ ID NO: 100961 - protein, 19 aa, Artificial Sequence
  Description of Artificial Sequence: Synthetic peptide
  Seed: MDPRMCSLMQGSTLPRRSG
MDPRMYSLAQASTIPRRSG

SEQ ID NO: 100962 - protein, 19 aa, Artificial Sequence
  Description of Artificial Sequence: Synthetic peptide
  Seed: MDPRMCSLMQGSTLPRRSG
MDPRMYSLAQASTLPRRSG

SEQ ID NO: 100963 - protein, 19 aa, Artificial Sequence
  Description of Artificial Sequence: Synthetic peptide
  Seed: MDPRMCSLMQGSTLPRRSG
MDPRMYSLAQASTMPRRSG

SEQ ID NO: 100964 - protein, 19 aa, Artificial Sequence
  Description of Artificial Sequence: Synthetic peptide
  Seed: MDPRMCSLMQGSTLPRRSG
MDPRMYSLAQASTNPRRSG

SEQ ID NO: 100965 - protein, 19 aa, Artificial Sequence
  Description of Artificial Sequence: Synthetic peptide
  Seed: MDPRMCSLMQGSTLPRRSG
MDPRMYSLAQASTSPRRSG

SEQ ID NO: 100966 - protein, 19 aa, Artificial Sequence
  Description of Artificial Sequence: Synthetic peptide
  Seed: MDPRMCSLMQGSTLPRRSG
MDPRMYSLAQASTTPRRSG

SEQ ID NO: 100967 - protein, 19 aa, Artificial Sequence
  Description of Artificial Sequence: Synthetic peptide
  Seed: MDPRMCSLMQGSTLPRRSG
MDPRMYSLAQASTVPRRSG

SEQ ID NO: 100968 - protein, 19 aa, Artificial Sequence
  Description of Artificial Sequence: Synthetic peptide
  Seed: MDPRMCSLMQGSTLPRRSG
MDPRMYSLAQGSTAPRRSG

SEQ ID NO: 100969 - protein, 19 aa, Artificial Sequence
  Description of Artificial Sequence: Synthetic peptide
  Seed: MDPRMCSLMQGSTLPRRSG
MDPRMYSLAQGSTIPRRSG

SEQ ID NO: 100970 - protein, 19 aa, Artificial Sequence
  Description of Artificial Sequence: Synthetic peptide
  Seed: MDPRMCSLMQGSTLPRRSG
MDPRMYSLAQGSTLPRRSG

SEQ ID NO: 100971 - protein, 19 aa, Artificial Sequence
  Description of Artificial Sequence: Synthetic peptide
  Seed: MDPRMCSLMQGSTLPRRSG
MDPRMYSLAQGSTMPRRSG

SEQ ID NO: 100972 - protein, 19 aa, Artificial Sequence
  Description of Artificial Sequence: Synthetic peptide
  Seed: MDPRMCSLMQGSTLPRRSG
MDPRMYSLAQGSTTPRRSG

SEQ ID NO: 100973 - protein, 19 aa, Artificial Sequence
  Description of Artificial Sequence: Synthetic peptide
  Seed: MDPRMCSLMQGSTLPRRSG
MDPRMYSLAQGSTVPRRSG

SEQ ID NO: 100974 - protein, 19 aa, Artificial Sequence
  Description of Artificial Sequence: Synthetic peptide
  Seed: MDPRMCSLMQGSTLPRRSG
MDPRMYSLAQISTAPRRSG

SEQ ID NO: 100975 - protein, 19 aa, Artificial Sequence
  Description of Artificial Sequence: Synthetic peptide
  Seed: MDPRMCSLMQGSTLPRRSG
MDPRMYSLAQISTIPRRSG

SEQ ID NO: 100976 - protein, 19 aa, Artificial Sequence
  Description of Artificial Sequence: Synthetic peptide
  Seed: MDPRMCSLMQGSTLPRRSG
MDPRMYSLAQISTLPRRSG

SEQ ID NO: 100977 - protein, 19 aa, Artificial Sequence
  Description of Artificial Sequence: Synthetic peptide
  Seed: MDPRMCSLMQGSTLPRRSG
MDPRMYSLAQISTNPRRSG

SEQ ID NO: 100978 - protein, 19 aa, Artificial Sequence
  Description of Artificial Sequence: Synthetic peptide
  Seed: MDPRMCSLMQGSTLPRRSG
MDPRMYSLAQISTSPRRSG

SEQ ID NO: 100979 - protein, 19 aa, Artificial Sequence
  Description of Artificial Sequence: Synthetic peptide
  Seed: MDPRMCSLMQGSTLPRRSG
MDPRMYSLAQISTTPRRSG

SEQ ID NO: 100980 - protein, 19 aa, Artificial Sequence
  Description of Artificial Sequence: Synthetic peptide
  Seed: MDPRMCSLMQGSTLPRRSG
MDPRMYSLAQISTVPRRSG

SEQ ID NO: 100981 - protein, 19 aa, Artificial Sequence
  Description of Artificial Sequence: Synthetic peptide
  Seed: MDPRMCSLMQGSTLPRRSG
MDPRMYSLAQNSTIPRRSG

SEQ ID NO: 100982 - protein, 19 aa, Artificial Sequence
  Description of Artificial Sequence: Synthetic peptide
  Seed: MDPRMCSLMQGSTLPRRSG
MDPRMYSLAQNSTLPRRSG

SEQ ID NO: 100983 - protein, 19 aa, Artificial Sequence
  Description of Artificial Sequence: Synthetic peptide
  Seed: MDPRMCSLMQGSTLPRRSG
MDPRMYSLAQNSTVPRRSG

SEQ ID NO: 100984 - protein, 19 aa, Artificial Sequence
  Description of Artificial Sequence: Synthetic peptide
  Seed: MDPRMCSLMQGSTLPRRSG
MDPRMYSLAQPSTAPRRSG

SEQ ID NO: 100985 - protein, 19 aa, Artificial Sequence
  Description of Artificial Sequence: Synthetic peptide
  Seed: MDPRMCSLMQGSTLPRRSG
MDPRMYSLAQPSTIPRRSG

SEQ ID NO: 100986 - protein, 19 aa, Artificial Sequence
  Description of Artificial Sequence: Synthetic peptide
  Seed: MDPRMCSLMQGSTLPRRSG
MDPRMYSLAQPSTLPRRSG

SEQ ID NO: 100987 - protein, 19 aa, Artificial Sequence
  Description of Artificial Sequence: Synthetic peptide
  Seed: MDPRMCSLMQGSTLPRRSG
MDPRMYSLAQPSTMPRRSG

SEQ ID NO: 100988 - protein, 19 aa, Artificial Sequence
  Description of Artificial Sequence: Synthetic peptide
  Seed: MDPRMCSLMQGSTLPRRSG
MDPRMYSLAQPSTNPRRSG

SEQ ID NO: 100989 - protein, 19 aa, Artificial Sequence
  Description of Artificial Sequence: Synthetic peptide
  Seed: MDPRMCSLMQGSTLPRRSG
MDPRMYSLAQPSTSPRRSG

SEQ ID NO: 100990 - protein, 19 aa, Artificial Sequence
  Description of Artificial Sequence: Synthetic peptide
  Seed: MDPRMCSLMQGSTLPRRSG
MDPRMYSLAQPSTVPRRSG

SEQ ID NO: 100991 - protein, 19 aa, Artificial Sequence
  Description of Artificial Sequence: Synthetic peptide
  Seed: MDPRMCSLMQGSTLPRRSG
MDPRMYSLAQSSTAPRRSG

SEQ ID NO: 100992 - protein, 19 aa, Artificial Sequence
  Description of Artificial Sequence: Synthetic peptide
  Seed: MDPRMCSLMQGSTLPRRSG
MDPRMYSLAQSSTIPRRSG

SEQ ID NO: 100993 - protein, 19 aa, Artificial Sequence
  Description of Artificial Sequence: Synthetic peptide
  Seed: MDPRMCSLMQGSTLPRRSG
MDPRMYSLAQSSTLPRRSG

SEQ ID NO: 100994 - protein, 19 aa, Artificial Sequence
  Description of Artificial Sequence: Synthetic peptide
  Seed: MDPRMCSLMQGSTLPRRSG
MDPRMYSLAQSSTMPRRSG

SEQ ID NO: 100995 - protein, 19 aa, Artificial Sequence
  Description of Artificial Sequence: Synthetic peptide
  Seed: MDPRMCSLMQGSTLPRRSG
MDPRMYSLAQSSTNPRRSG

SEQ ID NO: 100996 - protein, 19 aa, Artificial Sequence
  Description of Artificial Sequence: Synthetic peptide
  Seed: MDPRMCSLMQGSTLPRRSG
MDPRMYSLAQSSTSPRRSG

SEQ ID NO: 100997 - protein, 19 aa, Artificial Sequence
  Description of Artificial Sequence: Synthetic peptide
  Seed: MDPRMCSLMQGSTLPRRSG
MDPRMYSLAQSSTTPRRSG

SEQ ID NO: 100998 - protein, 19 aa, Artificial Sequence
  Description of Artificial Sequence: Synthetic peptide
  Seed: MDPRMCSLMQGSTLPRRSG
MDPRMYSLAQSSTVPRRSG

SEQ ID NO: 100999 - protein, 19 aa, Artificial Sequence
  Description of Artificial Sequence: Synthetic peptide
  Seed: MDPRMCSLMQGSTLPRRSG
MDPRMYSLAQTSTAPRRSG

SEQ ID NO: 101000 - protein, 19 aa, Artificial Sequence
  Description of Artificial Sequence: Synthetic peptide
  Seed: MDPRMCSLMQGSTLPRRSG
MDPRMYSLAQTSTIPRRSG

SEQ ID NO: 101001 - protein, 19 aa, Artificial Sequence
  Description of Artificial Sequence: Synthetic peptide
  Seed: MDPRMCSLMQGSTLPRRSG
MDPRMYSLAQTSTLPRRSG

SEQ ID NO: 101002 - protein, 19 aa, Artificial Sequence
  Description of Artificial Sequence: Synthetic peptide
  Seed: MDPRMCSLMQGSTLPRRSG
MDPRMYSLAQTSTMPRRSG

SEQ ID NO: 101003 - protein, 19 aa, Artificial Sequence
  Description of Artificial Sequence: Synthetic peptide
  Seed: MDPRMCSLMQGSTLPRRSG
MDPRMYSLAQTSTNPRRSG

SEQ ID NO: 101004 - protein, 19 aa, Artificial Sequence
  Description of Artificial Sequence: Synthetic peptide
  Seed: MDPRMCSLMQGSTLPRRSG
MDPRMYSLAQTSTSPRRSG

SEQ ID NO: 101005 - protein, 19 aa, Artificial Sequence
  Description of Artificial Sequence: Synthetic peptide
  Seed: MDPRMCSLMQGSTLPRRSG
MDPRMYSLAQTSTVPRRSG

SEQ ID NO: 101006 - protein, 19 aa, Artificial Sequence
  Description of Artificial Sequence: Synthetic peptide
  Seed: MDPRMCSLMQGSTLPRRSG
MDPRMYSLAQVSTAPRRSG

SEQ ID NO: 101007 - protein, 19 aa, Artificial Sequence
  Description of Artificial Sequence: Synthetic peptide
  Seed: MDPRMCSLMQGSTLPRRSG
MDPRMYSLAQVSTIPRRSG

SEQ ID NO: 101008 - protein, 19 aa, Artificial Sequence
  Description of Artificial Sequence: Synthetic peptide
  Seed: MDPRMCSLMQGSTLPRRSG
MDPRMYSLAQVSTLPRRSG

SEQ ID NO: 101009 - protein, 19 aa, Artificial Sequence
  Description of Artificial Sequence: Synthetic peptide
  Seed: MDPRMCSLMQGSTLPRRSG
MDPRMYSLAQVSTMPRRSG

SEQ ID NO: 101010 - protein, 19 aa, Artificial Sequence
  Description of Artificial Sequence: Synthetic peptide
  Seed: MDPRMCSLMQGSTLPRRSG
MDPRMYSLAQVSTNPRRSG

SEQ ID NO: 101011 - protein, 19 aa, Artificial Sequence
  Description of Artificial Sequence: Synthetic peptide
  Seed: MDPRMCSLMQGSTLPRRSG
MDPRMYSLAQVSTSPRRSG

SEQ ID NO: 101012 - protein, 19 aa, Artificial Sequence
  Description of Artificial Sequence: Synthetic peptide
  Seed: MDPRMCSLMQGSTLPRRSG
MDPRMYSLAQVSTTPRRSG

SEQ ID NO: 101013 - protein, 19 aa, Artificial Sequence
  Description of Artificial Sequence: Synthetic peptide
  Seed: MDPRMCSLMQGSTLPRRSG
MDPRMYSLAQVSTVPRRSG

SEQ ID NO: 101014 - protein, 19 aa, Artificial Sequence
  Description of Artificial Sequence: Synthetic peptide
  Seed: MDPRMCSLMQGSTLPRRSG
MDPRMYSLEQASTIPRRSG

SEQ ID NO: 101015 - protein, 19 aa, Artificial Sequence
  Description of Artificial Sequence: Synthetic peptide
  Seed: MDPRMCSLMQGSTLPRRSG
MDPRMYSLEQASTLPRRSG

SEQ ID NO: 101016 - protein, 19 aa, Artificial Sequence
  Description of Artificial Sequence: Synthetic peptide
  Seed: MDPRMCSLMQGSTLPRRSG
MDPRMYSLEQASTVPRRSG

SEQ ID NO: 101017 - protein, 19 aa, Artificial Sequence
  Description of Artificial Sequence: Synthetic peptide
  Seed: MDPRMCSLMQGSTLPRRSG
MDPRMYSLFQASTAPRRSG

SEQ ID NO: 101018 - protein, 19 aa, Artificial Sequence
  Description of Artificial Sequence: Synthetic peptide
  Seed: MDPRMCSLMQGSTLPRRSG
MDPRMYSLFQASTIPRRSG

SEQ ID NO: 101019 - protein, 19 aa, Artificial Sequence
  Description of Artificial Sequence: Synthetic peptide
  Seed: MDPRMCSLMQGSTLPRRSG
MDPRMYSLFQASTLPRRSG

SEQ ID NO: 101020 - protein, 19 aa, Artificial Sequence
  Description of Artificial Sequence: Synthetic peptide
  Seed: MDPRMCSLMQGSTLPRRSG
MDPRMYSLFQASTSPRRSG

SEQ ID NO: 101021 - protein, 19 aa, Artificial Sequence
  Description of Artificial Sequence: Synthetic peptide
  Seed: MDPRMCSLMQGSTLPRRSG
MDPRMYSLFQASTVPRRSG

SEQ ID NO: 101022 - protein, 19 aa, Artificial Sequence
  Description of Artificial Sequence: Synthetic peptide
  Seed: MDPRMCSLMQGSTLPRRSG
MDPRMYSLFQPSTAPRRSG

SEQ ID NO: 101023 - protein, 19 aa, Artificial Sequence
  Description of Artificial Sequence: Synthetic peptide
  Seed: MDPRMCSLMQGSTLPRRSG
MDPRMYSLFQVSTAPRRSG

SEQ ID NO: 101024 - protein, 19 aa, Artificial Sequence
  Description of Artificial Sequence: Synthetic peptide
  Seed: MDPRMCSLMQGSTLPRRSG
MDPRMYSLGQASTIPRRSG

SEQ ID NO: 101025 - protein, 19 aa, Artificial Sequence
  Description of Artificial Sequence: Synthetic peptide
  Seed: MDPRMCSLMQGSTLPRRSG
MDPRMYSLGQASTLPRRSG

SEQ ID NO: 101026 - protein, 19 aa, Artificial Sequence
  Description of Artificial Sequence: Synthetic peptide
  Seed: MDPRMCSLMQGSTLPRRSG
MDPRMYSLGQASTVPRRSG

SEQ ID NO: 101027 - protein, 19 aa, Artificial Sequence
  Description of Artificial Sequence: Synthetic peptide
  Seed: MDPRMCSLMQGSTLPRRSG
MDPRMYSLIQASTAPRRSG

SEQ ID NO: 101028 - protein, 19 aa, Artificial Sequence
  Description of Artificial Sequence: Synthetic peptide
  Seed: MDPRMCSLMQGSTLPRRSG
MDPRMYSLIQASTGPRRSG

SEQ ID NO: 101029 - protein, 19 aa, Artificial Sequence
  Description of Artificial Sequence: Synthetic peptide
  Seed: MDPRMCSLMQGSTLPRRSG
MDPRMYSLIQASTHPRRSG

SEQ ID NO: 101030 - protein, 19 aa, Artificial Sequence
  Description of Artificial Sequence: Synthetic peptide
  Seed: MDPRMCSLMQGSTLPRRSG
MDPRMYSLIQASTIPRRSG

SEQ ID NO: 101031 - protein, 19 aa, Artificial Sequence
  Description of Artificial Sequence: Synthetic peptide
  Seed: MDPRMCSLMQGSTLPRRSG
MDPRMYSLIQASTLPRRSG

SEQ ID NO: 101032 - protein, 19 aa, Artificial Sequence
  Description of Artificial Sequence: Synthetic peptide
  Seed: MDPRMCSLMQGSTLPRRSG
MDPRMYSLIQASTMPRRSG

SEQ ID NO: 101033 - protein, 19 aa, Artificial Sequence
  Description of Artificial Sequence: Synthetic peptide
  Seed: MDPRMCSLMQGSTLPRRSG
MDPRMYSLIQASTNPRRSG

SEQ ID NO: 101034 - protein, 19 aa, Artificial Sequence
  Description of Artificial Sequence: Synthetic peptide
  Seed: MDPRMCSLMQGSTLPRRSG
MDPRMYSLIQASTPPRRSG

SEQ ID NO: 101035 - protein, 19 aa, Artificial Sequence
  Description of Artificial Sequence: Synthetic peptide
  Seed: MDPRMCSLMQGSTLPRRSG
MDPRMYSLIQASTQPRRSG

SEQ ID NO: 101036 - protein, 19 aa, Artificial Sequence
  Description of Artificial Sequence: Synthetic peptide
  Seed: MDPRMCSLMQGSTLPRRSG
MDPRMYSLIQASTSPRRSG

SEQ ID NO: 101037 - protein, 19 aa, Artificial Sequence
  Description of Artificial Sequence: Synthetic peptide
  Seed: MDPRMCSLMQGSTLPRRSG
MDPRMYSLIQASTTPRRSG

SEQ ID NO: 101038 - protein, 19 aa, Artificial Sequence
  Description of Artificial Sequence: Synthetic peptide
  Seed: MDPRMCSLMQGSTLPRRSG
MDPRMYSLIQASTVPRRSG

SEQ ID NO: 101039 - protein, 19 aa, Artificial Sequence
  Description of Artificial Sequence: Synthetic peptide
  Seed: MDPRMCSLMQGSTLPRRSG
MDPRMYSLIQGSTAPRRSG

SEQ ID NO: 101040 - protein, 19 aa, Artificial Sequence
  Description of Artificial Sequence: Synthetic peptide
  Seed: MDPRMCSLMQGSTLPRRSG
MDPRMYSLIQGSTIPRRSG

SEQ ID NO: 101041 - protein, 19 aa, Artificial Sequence
  Description of Artificial Sequence: Synthetic peptide
  Seed: MDPRMCSLMQGSTLPRRSG
MDPRMYSLIQGSTLPRRSG

SEQ ID NO: 101042 - protein, 19 aa, Artificial Sequence
  Description of Artificial Sequence: Synthetic peptide
  Seed: MDPRMCSLMQGSTLPRRSG
MDPRMYSLIQGSTMPRRSG

SEQ ID NO: 101043 - protein, 19 aa, Artificial Sequence
  Description of Artificial Sequence: Synthetic peptide
  Seed: MDPRMCSLMQGSTLPRRSG
MDPRMYSLIQGSTNPRRSG

SEQ ID NO: 101044 - protein, 19 aa, Artificial Sequence
  Description of Artificial Sequence: Synthetic peptide
  Seed: MDPRMCSLMQGSTLPRRSG
MDPRMYSLIQGSTSPRRSG

SEQ ID NO: 101045 - protein, 19 aa, Artificial Sequence
  Description of Artificial Sequence: Synthetic peptide
  Seed: MDPRMCSLMQGSTLPRRSG
MDPRMYSLIQGSTTPRRSG

SEQ ID NO: 101046 - protein, 19 aa, Artificial Sequence
  Description of Artificial Sequence: Synthetic peptide
  Seed: MDPRMCSLMQGSTLPRRSG
MDPRMYSLIQGSTVPRRSG

SEQ ID NO: 101047 - protein, 19 aa, Artificial Sequence
  Description of Artificial Sequence: Synthetic peptide
  Seed: MDPRMCSLMQGSTLPRRSG
MDPRMYSLIQISTAPRRSG

SEQ ID NO: 101048 - protein, 19 aa, Artificial Sequence
  Description of Artificial Sequence: Synthetic peptide
  Seed: MDPRMCSLMQGSTLPRRSG
MDPRMYSLIQISTGPRRSG

SEQ ID NO: 101049 - protein, 19 aa, Artificial Sequence
  Description of Artificial Sequence: Synthetic peptide
  Seed: MDPRMCSLMQGSTLPRRSG
MDPRMYSLIQISTIPRRSG

SEQ ID NO: 101050 - protein, 19 aa, Artificial Sequence
  Description of Artificial Sequence: Synthetic peptide
  Seed: MDPRMCSLMQGSTLPRRSG
MDPRMYSLIQISTLPRRSG

SEQ ID NO: 101051 - protein, 19 aa, Artificial Sequence
  Description of Artificial Sequence: Synthetic peptide
  Seed: MDPRMCSLMQGSTLPRRSG
MDPRMYSLIQISTMPRRSG

SEQ ID NO: 101052 - protein, 19 aa, Artificial Sequence
  Description of Artificial Sequence: Synthetic peptide
  Seed: MDPRMCSLMQGSTLPRRSG
MDPRMYSLIQISTNPRRSG

SEQ ID NO: 101053 - protein, 19 aa, Artificial Sequence
  Description of Artificial Sequence: Synthetic peptide
  Seed: MDPRMCSLMQGSTLPRRSG
MDPRMYSLIQISTSPRRSG

SEQ ID NO: 101054 - protein, 19 aa, Artificial Sequence
  Description of Artificial Sequence: Synthetic peptide
  Seed: MDPRMCSLMQGSTLPRRSG
MDPRMYSLIQISTTPRRSG

SEQ ID NO: 101055 - protein, 19 aa, Artificial Sequence
  Description of Artificial Sequence: Synthetic peptide
  Seed: MDPRMCSLMQGSTLPRRSG
MDPRMYSLIQISTVPRRSG

SEQ ID NO: 101056 - protein, 19 aa, Artificial Sequence
  Description of Artificial Sequence: Synthetic peptide
  Seed: MDPRMCSLMQGSTLPRRSG
MDPRMYSLIQLSTAPRRSG

SEQ ID NO: 101057 - protein, 19 aa, Artificial Sequence
  Description of Artificial Sequence: Synthetic peptide
  Seed: MDPRMCSLMQGSTLPRRSG
MDPRMYSLIQMSTAPRRSG

SEQ ID NO: 101058 - protein, 19 aa, Artificial Sequence
  Description of Artificial Sequence: Synthetic peptide
  Seed: MDPRMCSLMQGSTLPRRSG
MDPRMYSLIQNSTAPRRSG

SEQ ID NO: 101059 - protein, 19 aa, Artificial Sequence
  Description of Artificial Sequence: Synthetic peptide
  Seed: MDPRMCSLMQGSTLPRRSG
MDPRMYSLIQNSTIPRRSG

SEQ ID NO: 101060 - protein, 19 aa, Artificial Sequence
  Description of Artificial Sequence: Synthetic peptide
  Seed: MDPRMCSLMQGSTLPRRSG
MDPRMYSLIQNSTLPRRSG

SEQ ID NO: 101061 - protein, 19 aa, Artificial Sequence
  Description of Artificial Sequence: Synthetic peptide
  Seed: MDPRMCSLMQGSTLPRRSG
MDPRMYSLIQNSTNPRRSG

SEQ ID NO: 101062 - protein, 19 aa, Artificial Sequence
  Description of Artificial Sequence: Synthetic peptide
  Seed: MDPRMCSLMQGSTLPRRSG
MDPRMYSLIQNSTSPRRSG

SEQ ID NO: 101063 - protein, 19 aa, Artificial Sequence
  Description of Artificial Sequence: Synthetic peptide
  Seed: MDPRMCSLMQGSTLPRRSG
MDPRMYSLIQNSTTPRRSG

SEQ ID NO: 101064 - protein, 19 aa, Artificial Sequence
  Description of Artificial Sequence: Synthetic peptide
  Seed: MDPRMCSLMQGSTLPRRSG
MDPRMYSLIQNSTVPRRSG

SEQ ID NO: 101065 - protein, 19 aa, Artificial Sequence
  Description of Artificial Sequence: Synthetic peptide
  Seed: MDPRMCSLMQGSTLPRRSG
MDPRMYSLIQPSTAPRRSG

SEQ ID NO: 101066 - protein, 19 aa, Artificial Sequence
  Description of Artificial Sequence: Synthetic peptide
  Seed: MDPRMCSLMQGSTLPRRSG
MDPRMYSLIQPSTGPRRSG

SEQ ID NO: 101067 - protein, 19 aa, Artificial Sequence
  Description of Artificial Sequence: Synthetic peptide
  Seed: MDPRMCSLMQGSTLPRRSG
MDPRMYSLIQPSTIPRRSG

SEQ ID NO: 101068 - protein, 19 aa, Artificial Sequence
  Description of Artificial Sequence: Synthetic peptide
  Seed: MDPRMCSLMQGSTLPRRSG
MDPRMYSLIQPSTLPRRSG

SEQ ID NO: 101069 - protein, 19 aa, Artificial Sequence
  Description of Artificial Sequence: Synthetic peptide
  Seed: MDPRMCSLMQGSTLPRRSG
MDPRMYSLIQPSTMPRRSG

SEQ ID NO: 101070 - protein, 19 aa, Artificial Sequence
  Description of Artificial Sequence: Synthetic peptide
  Seed: MDPRMCSLMQGSTLPRRSG
MDPRMYSLIQPSTNPRRSG

SEQ ID NO: 101071 - protein, 19 aa, Artificial Sequence
  Description of Artificial Sequence: Synthetic peptide
  Seed: MDPRMCSLMQGSTLPRRSG
MDPRMYSLIQPSTQPRRSG

SEQ ID NO: 101072 - protein, 19 aa, Artificial Sequence
  Description of Artificial Sequence: Synthetic peptide
  Seed: MDPRMCSLMQGSTLPRRSG
MDPRMYSLIQPSTSPRRSG

SEQ ID NO: 101073 - protein, 19 aa, Artificial Sequence
  Description of Artificial Sequence: Synthetic peptide
  Seed: MDPRMCSLMQGSTLPRRSG
MDPRMYSLIQPSTTPRRSG

SEQ ID NO: 101074 - protein, 19 aa, Artificial Sequence
  Description of Artificial Sequence: Synthetic peptide
  Seed: MDPRMCSLMQGSTLPRRSG
MDPRMYSLIQPSTVPRRSG

SEQ ID NO: 101075 - protein, 19 aa, Artificial Sequence
  Description of Artificial Sequence: Synthetic peptide
  Seed: MDPRMCSLMQGSTLPRRSG
MDPRMYSLIQSSTAPRRSG

SEQ ID NO: 101076 - protein, 19 aa, Artificial Sequence
  Description of Artificial Sequence: Synthetic peptide
  Seed: MDPRMCSLMQGSTLPRRSG
MDPRMYSLIQSSTGPRRSG

SEQ ID NO: 101077 - protein, 19 aa, Artificial Sequence
  Description of Artificial Sequence: Synthetic peptide
  Seed: MDPRMCSLMQGSTLPRRSG
MDPRMYSLIQSSTIPRRSG

SEQ ID NO: 101078 - protein, 19 aa, Artificial Sequence
  Description of Artificial Sequence: Synthetic peptide
  Seed: MDPRMCSLMQGSTLPRRSG
MDPRMYSLIQSSTLPRRSG

SEQ ID NO: 101079 - protein, 19 aa, Artificial Sequence
  Description of Artificial Sequence: Synthetic peptide
  Seed: MDPRMCSLMQGSTLPRRSG
MDPRMYSLIQSSTMPRRSG

SEQ ID NO: 101080 - protein, 19 aa, Artificial Sequence
  Description of Artificial Sequence: Synthetic peptide
  Seed: MDPRMCSLMQGSTLPRRSG
MDPRMYSLIQSSTNPRRSG

SEQ ID NO: 101081 - protein, 19 aa, Artificial Sequence
  Description of Artificial Sequence: Synthetic peptide
  Seed: MDPRMCSLMQGSTLPRRSG
MDPRMYSLIQSSTSPRRSG

SEQ ID NO: 101082 - protein, 19 aa, Artificial Sequence
  Description of Artificial Sequence: Synthetic peptide
  Seed: MDPRMCSLMQGSTLPRRSG
MDPRMYSLIQSSTTPRRSG

SEQ ID NO: 101083 - protein, 19 aa, Artificial Sequence
  Description of Artificial Sequence: Synthetic peptide
  Seed: MDPRMCSLMQGSTLPRRSG
MDPRMYSLIQSSTVPRRSG

SEQ ID NO: 101084 - protein, 19 aa, Artificial Sequence
  Description of Artificial Sequence: Synthetic peptide
  Seed: MDPRMCSLMQGSTLPRRSG
MDPRMYSLIQTSTAPRRSG

SEQ ID NO: 101085 - protein, 19 aa, Artificial Sequence
  Description of Artificial Sequence: Synthetic peptide
  Seed: MDPRMCSLMQGSTLPRRSG
MDPRMYSLIQTSTIPRRSG

SEQ ID NO: 101086 - protein, 19 aa, Artificial Sequence
  Description of Artificial Sequence: Synthetic peptide
  Seed: MDPRMCSLMQGSTLPRRSG
MDPRMYSLIQTSTLPRRSG

SEQ ID NO: 101087 - protein, 19 aa, Artificial Sequence
  Description of Artificial Sequence: Synthetic peptide
  Seed: MDPRMCSLMQGSTLPRRSG
MDPRMYSLIQTSTMPRRSG

SEQ ID NO: 101088 - protein, 19 aa, Artificial Sequence
  Description of Artificial Sequence: Synthetic peptide
  Seed: MDPRMCSLMQGSTLPRRSG
MDPRMYSLIQTSTNPRRSG

SEQ ID NO: 101089 - protein, 19 aa, Artificial Sequence
  Description of Artificial Sequence: Synthetic peptide
  Seed: MDPRMCSLMQGSTLPRRSG
MDPRMYSLIQTSTSPRRSG

SEQ ID NO: 101090 - protein, 19 aa, Artificial Sequence
  Description of Artificial Sequence: Synthetic peptide
  Seed: MDPRMCSLMQGSTLPRRSG
MDPRMYSLIQTSTTPRRSG

SEQ ID NO: 101091 - protein, 19 aa, Artificial Sequence
  Description of Artificial Sequence: Synthetic peptide
  Seed: MDPRMCSLMQGSTLPRRSG
MDPRMYSLIQTSTVPRRSG

SEQ ID NO: 101092 - protein, 19 aa, Artificial Sequence
  Description of Artificial Sequence: Synthetic peptide
  Seed: MDPRMCSLMQGSTLPRRSG
MDPRMYSLIQVSTAPRRSG

SEQ ID NO: 101093 - protein, 19 aa, Artificial Sequence
  Description of Artificial Sequence: Synthetic peptide
  Seed: MDPRMCSLMQGSTLPRRSG
MDPRMYSLIQVSTGPRRSG

SEQ ID NO: 101094 - protein, 19 aa, Artificial Sequence
  Description of Artificial Sequence: Synthetic peptide
  Seed: MDPRMCSLMQGSTLPRRSG
MDPRMYSLIQVSTHPRRSG

SEQ ID NO: 101095 - protein, 19 aa, Artificial Sequence
  Description of Artificial Sequence: Synthetic peptide
  Seed: MDPRMCSLMQGSTLPRRSG
MDPRMYSLIQVSTIPRRSG

SEQ ID NO: 101096 - protein, 19 aa, Artificial Sequence
  Description of Artificial Sequence: Synthetic peptide
  Seed: MDPRMCSLMQGSTLPRRSG
MDPRMYSLIQVSTLPRRSG

SEQ ID NO: 101097 - protein, 19 aa, Artificial Sequence
  Description of Artificial Sequence: Synthetic peptide
  Seed: MDPRMCSLMQGSTLPRRSG
MDPRMYSLIQVSTMPRRSG

SEQ ID NO: 101098 - protein, 19 aa, Artificial Sequence
  Description of Artificial Sequence: Synthetic peptide
  Seed: MDPRMCSLMQGSTLPRRSG
MDPRMYSLIQVSTNPRRSG

SEQ ID NO: 101099 - protein, 19 aa, Artificial Sequence
  Description of Artificial Sequence: Synthetic peptide
  Seed: MDPRMCSLMQGSTLPRRSG
MDPRMYSLIQVSTSPRRSG

SEQ ID NO: 101100 - protein, 19 aa, Artificial Sequence
  Description of Artificial Sequence: Synthetic peptide
  Seed: MDPRMCSLMQGSTLPRRSG
MDPRMYSLIQVSTTPRRSG

SEQ ID NO: 101101 - protein, 19 aa, Artificial Sequence
  Description of Artificial Sequence: Synthetic peptide
  Seed: MDPRMCSLMQGSTLPRRSG
MDPRMYSLIQVSTVPRRSG

SEQ ID NO: 101102 - protein, 19 aa, Artificial Sequence
  Description of Artificial Sequence: Synthetic peptide
  Seed: MDPRMCSLMQGSTLPRRSG
MDPRMYSLLQASTAPRRSG

SEQ ID NO: 101103 - protein, 19 aa, Artificial Sequence
  Description of Artificial Sequence: Synthetic peptide
  Seed: MDPRMCSLMQGSTLPRRSG
MDPRMYSLLQASTCPRRSG

SEQ ID NO: 101104 - protein, 19 aa, Artificial Sequence
  Description of Artificial Sequence: Synthetic peptide
  Seed: MDPRMCSLMQGSTLPRRSG
MDPRMYSLLQASTFPRRSG

SEQ ID NO: 101105 - protein, 19 aa, Artificial Sequence
  Description of Artificial Sequence: Synthetic peptide
  Seed: MDPRMCSLMQGSTLPRRSG
MDPRMYSLLQASTGPRRSG

SEQ ID NO: 101106 - protein, 19 aa, Artificial Sequence
  Description of Artificial Sequence: Synthetic peptide
  Seed: MDPRMCSLMQGSTLPRRSG
MDPRMYSLLQASTHPRRSG

SEQ ID NO: 101107 - protein, 19 aa, Artificial Sequence
  Description of Artificial Sequence: Synthetic peptide
  Seed: MDPRMCSLMQGSTLPRRSG
MDPRMYSLLQASTIPRRSG

SEQ ID NO: 101108 - protein, 19 aa, Artificial Sequence
  Description of Artificial Sequence: Synthetic peptide
  Seed: MDPRMCSLMQGSTLPRRSG
MDPRMYSLLQASTLPRRSG

SEQ ID NO: 101109 - protein, 19 aa, Artificial Sequence
  Description of Artificial Sequence: Synthetic peptide
  Seed: MDPRMCSLMQGSTLPRRSG
MDPRMYSLLQASTMPRRSG

SEQ ID NO: 101110 - protein, 19 aa, Artificial Sequence
  Description of Artificial Sequence: Synthetic peptide
  Seed: MDPRMCSLMQGSTLPRRSG
MDPRMYSLLQASTNPRRSG

SEQ ID NO: 101111 - protein, 19 aa, Artificial Sequence
  Description of Artificial Sequence: Synthetic peptide
  Seed: MDPRMCSLMQGSTLPRRSG
MDPRMYSLLQASTPPRRSG

SEQ ID NO: 101112 - protein, 19 aa, Artificial Sequence
  Description of Artificial Sequence: Synthetic peptide
  Seed: MDPRMCSLMQGSTLPRRSG
MDPRMYSLLQASTQPRRSG

SEQ ID NO: 101113 - protein, 19 aa, Artificial Sequence
  Description of Artificial Sequence: Synthetic peptide
  Seed: MDPRMCSLMQGSTLPRRSG
MDPRMYSLLQASTSPRRSG

SEQ ID NO: 101114 - protein, 19 aa, Artificial Sequence
  Description of Artificial Sequence: Synthetic peptide
  Seed: MDPRMCSLMQGSTLPRRSG
MDPRMYSLLQASTTPRRSG

SEQ ID NO: 101115 - protein, 19 aa, Artificial Sequence
  Description of Artificial Sequence: Synthetic peptide
  Seed: MDPRMCSLMQGSTLPRRSG
MDPRMYSLLQASTVPRRSG

SEQ ID NO: 101116 - protein, 19 aa, Artificial Sequence
  Description of Artificial Sequence: Synthetic peptide
  Seed: MDPRMCSLMQGSTLPRRSG
MDPRMYSLLQGSTAPRRSG

SEQ ID NO: 101117 - protein, 19 aa, Artificial Sequence
  Description of Artificial Sequence: Synthetic peptide
  Seed: MDPRMCSLMQGSTLPRRSG
MDPRMYSLLQGSTCPRRSG

SEQ ID NO: 101118 - protein, 19 aa, Artificial Sequence
  Description of Artificial Sequence: Synthetic peptide
  Seed: MDPRMCSLMQGSTLPRRSG
MDPRMYSLLQGSTFPRRSG

SEQ ID NO: 101119 - protein, 19 aa, Artificial Sequence
  Description of Artificial Sequence: Synthetic peptide
  Seed: MDPRMCSLMQGSTLPRRSG
MDPRMYSLLQGSTGPRRSG

SEQ ID NO: 101120 - protein, 19 aa, Artificial Sequence
  Description of Artificial Sequence: Synthetic peptide
  Seed: MDPRMCSLMQGSTLPRRSG
MDPRMYSLLQGSTIPRRSG

SEQ ID NO: 101121 - protein, 19 aa, Artificial Sequence
  Description of Artificial Sequence: Synthetic peptide
  Seed: MDPRMCSLMQGSTLPRRSG
MDPRMYSLLQGSTLPRRSG

SEQ ID NO: 101122 - protein, 19 aa, Artificial Sequence
  Description of Artificial Sequence: Synthetic peptide
  Seed: MDPRMCSLMQGSTLPRRSG
MDPRMYSLLQGSTMPRRSG

SEQ ID NO: 101123 - protein, 19 aa, Artificial Sequence
  Description of Artificial Sequence: Synthetic peptide
  Seed: MDPRMCSLMQGSTLPRRSG
MDPRMYSLLQGSTNPRRSG

SEQ ID NO: 101124 - protein, 19 aa, Artificial Sequence
  Description of Artificial Sequence: Synthetic peptide
  Seed: MDPRMCSLMQGSTLPRRSG
MDPRMYSLLQGSTSPRRSG

SEQ ID NO: 101125 - protein, 19 aa, Artificial Sequence
  Description of Artificial Sequence: Synthetic peptide
  Seed: MDPRMCSLMQGSTLPRRSG
MDPRMYSLLQGSTTPRRSG

SEQ ID NO: 101126 - protein, 19 aa, Artificial Sequence
  Description of Artificial Sequence: Synthetic peptide
  Seed: MDPRMCSLMQGSTLPRRSG
MDPRMYSLLQGSTVPRRSG

SEQ ID NO: 101127 - protein, 19 aa, Artificial Sequence
  Description of Artificial Sequence: Synthetic peptide
  Seed: MDPRMCSLMQGSTLPRRSG
MDPRMYSLLQISTAPRRSG

SEQ ID NO: 101128 - protein, 19 aa, Artificial Sequence
  Description of Artificial Sequence: Synthetic peptide
  Seed: MDPRMCSLMQGSTLPRRSG
MDPRMYSLLQISTGPRRSG

SEQ ID NO: 101129 - protein, 19 aa, Artificial Sequence
  Description of Artificial Sequence: Synthetic peptide
  Seed: MDPRMCSLMQGSTLPRRSG
MDPRMYSLLQISTHPRRSG

SEQ ID NO: 101130 - protein, 19 aa, Artificial Sequence
  Description of Artificial Sequence: Synthetic peptide
  Seed: MDPRMCSLMQGSTLPRRSG
MDPRMYSLLQISTIPRRSG

SEQ ID NO: 101131 - protein, 19 aa, Artificial Sequence
  Description of Artificial Sequence: Synthetic peptide
  Seed: MDPRMCSLMQGSTLPRRSG
MDPRMYSLLQISTLPRRSG

SEQ ID NO: 101132 - protein, 19 aa, Artificial Sequence
  Description of Artificial Sequence: Synthetic peptide
  Seed: MDPRMCSLMQGSTLPRRSG
MDPRMYSLLQISTMPRRSG

SEQ ID NO: 101133 - protein, 19 aa, Artificial Sequence
  Description of Artificial Sequence: Synthetic peptide
  Seed: MDPRMCSLMQGSTLPRRSG
MDPRMYSLLQISTNPRRSG

SEQ ID NO: 101134 - protein, 19 aa, Artificial Sequence
  Description of Artificial Sequence: Synthetic peptide
  Seed: MDPRMCSLMQGSTLPRRSG
MDPRMYSLLQISTSPRRSG

SEQ ID NO: 101135 - protein, 19 aa, Artificial Sequence
  Description of Artificial Sequence: Synthetic peptide
  Seed: MDPRMCSLMQGSTLPRRSG
MDPRMYSLLQISTTPRRSG

SEQ ID NO: 101136 - protein, 19 aa, Artificial Sequence
  Description of Artificial Sequence: Synthetic peptide
  Seed: MDPRMCSLMQGSTLPRRSG
MDPRMYSLLQISTVPRRSG

SEQ ID NO: 101137 - protein, 19 aa, Artificial Sequence
  Description of Artificial Sequence: Synthetic peptide
  Seed: MDPRMCSLMQGSTLPRRSG
MDPRMYSLLQLSTAPRRSG

SEQ ID NO: 101138 - protein, 19 aa, Artificial Sequence
  Description of Artificial Sequence: Synthetic peptide
  Seed: MDPRMCSLMQGSTLPRRSG
MDPRMYSLLQLSTNPRRSG

SEQ ID NO: 101139 - protein, 19 aa, Artificial Sequence
  Description of Artificial Sequence: Synthetic peptide
  Seed: MDPRMCSLMQGSTLPRRSG
MDPRMYSLLQLSTSPRRSG

SEQ ID NO: 101140 - protein, 19 aa, Artificial Sequence
  Description of Artificial Sequence: Synthetic peptide
  Seed: MDPRMCSLMQGSTLPRRSG
MDPRMYSLLQLSTTPRRSG

SEQ ID NO: 101141 - protein, 19 aa, Artificial Sequence
  Description of Artificial Sequence: Synthetic peptide
  Seed: MDPRMCSLMQGSTLPRRSG
MDPRMYSLLQLSTVPRRSG

SEQ ID NO: 101142 - protein, 19 aa, Artificial Sequence
  Description of Artificial Sequence: Synthetic peptide
  Seed: MDPRMCSLMQGSTLPRRSG
MDPRMYSLLQMSTAPRRSG

SEQ ID NO: 101143 - protein, 19 aa, Artificial Sequence
  Description of Artificial Sequence: Synthetic peptide
  Seed: MDPRMCSLMQGSTLPRRSG
MDPRMYSLLQMSTSPRRSG

SEQ ID NO: 101144 - protein, 19 aa, Artificial Sequence
  Description of Artificial Sequence: Synthetic peptide
  Seed: MDPRMCSLMQGSTLPRRSG
MDPRMYSLLQNSTAPRRSG

SEQ ID NO: 101145 - protein, 19 aa, Artificial Sequence
  Description of Artificial Sequence: Synthetic peptide
  Seed: MDPRMCSLMQGSTLPRRSG
MDPRMYSLLQNSTIPRRSG

SEQ ID NO: 101146 - protein, 19 aa, Artificial Sequence
  Description of Artificial Sequence: Synthetic peptide
  Seed: MDPRMCSLMQGSTLPRRSG
MDPRMYSLLQNSTLPRRSG

SEQ ID NO: 101147 - protein, 19 aa, Artificial Sequence
  Description of Artificial Sequence: Synthetic peptide
  Seed: MDPRMCSLMQGSTLPRRSG
MDPRMYSLLQNSTMPRRSG

SEQ ID NO: 101148 - protein, 19 aa, Artificial Sequence
  Description of Artificial Sequence: Synthetic peptide
  Seed: MDPRMCSLMQGSTLPRRSG
MDPRMYSLLQNSTNPRRSG

SEQ ID NO: 101149 - protein, 19 aa, Artificial Sequence
  Description of Artificial Sequence: Synthetic peptide
  Seed: MDPRMCSLMQGSTLPRRSG
MDPRMYSLLQNSTSPRRSG

SEQ ID NO: 101150 - protein, 19 aa, Artificial Sequence
  Description of Artificial Sequence: Synthetic peptide
  Seed: MDPRMCSLMQGSTLPRRSG
MDPRMYSLLQNSTTPRRSG

SEQ ID NO: 101151 - protein, 19 aa, Artificial Sequence
  Description of Artificial Sequence: Synthetic peptide
  Seed: MDPRMCSLMQGSTLPRRSG
MDPRMYSLLQNSTVPRRSG

SEQ ID NO: 101152 - protein, 19 aa, Artificial Sequence
  Description of Artificial Sequence: Synthetic peptide
  Seed: MDPRMCSLMQGSTLPRRSG
MDPRMYSLLQPSTAPRRSG

SEQ ID NO: 101153 - protein, 19 aa, Artificial Sequence
  Description of Artificial Sequence: Synthetic peptide
  Seed: MDPRMCSLMQGSTLPRRSG
MDPRMYSLLQPSTGPRRSG

SEQ ID NO: 101154 - protein, 19 aa, Artificial Sequence
  Description of Artificial Sequence: Synthetic peptide
  Seed: MDPRMCSLMQGSTLPRRSG
MDPRMYSLLQPSTHPRRSG

SEQ ID NO: 101155 - protein, 19 aa, Artificial Sequence
  Description of Artificial Sequence: Synthetic peptide
  Seed: MDPRMCSLMQGSTLPRRSG
MDPRMYSLLQPSTIPRRSG

SEQ ID NO: 101156 - protein, 19 aa, Artificial Sequence
  Description of Artificial Sequence: Synthetic peptide
  Seed: MDPRMCSLMQGSTLPRRSG
MDPRMYSLLQPSTLPRRSG

SEQ ID NO: 101157 - protein, 19 aa, Artificial Sequence
  Description of Artificial Sequence: Synthetic peptide
  Seed: MDPRMCSLMQGSTLPRRSG
MDPRMYSLLQPSTMPRRSG

SEQ ID NO: 101158 - protein, 19 aa, Artificial Sequence
  Description of Artificial Sequence: Synthetic peptide
  Seed: MDPRMCSLMQGSTLPRRSG
MDPRMYSLLQPSTNPRRSG

SEQ ID NO: 101159 - protein, 19 aa, Artificial Sequence
  Description of Artificial Sequence: Synthetic peptide
  Seed: MDPRMCSLMQGSTLPRRSG
MDPRMYSLLQPSTPPRRSG

SEQ ID NO: 101160 - protein, 19 aa, Artificial Sequence
  Description of Artificial Sequence: Synthetic peptide
  Seed: MDPRMCSLMQGSTLPRRSG
MDPRMYSLLQPSTQPRRSG

SEQ ID NO: 101161 - protein, 19 aa, Artificial Sequence
  Description of Artificial Sequence: Synthetic peptide
  Seed: MDPRMCSLMQGSTLPRRSG
MDPRMYSLLQPSTSPRRSG

SEQ ID NO: 101162 - protein, 19 aa, Artificial Sequence
  Description of Artificial Sequence: Synthetic peptide
  Seed: MDPRMCSLMQGSTLPRRSG
MDPRMYSLLQPSTTPRRSG

SEQ ID NO: 101163 - protein, 19 aa, Artificial Sequence
  Description of Artificial Sequence: Synthetic peptide
  Seed: MDPRMCSLMQGSTLPRRSG
MDPRMYSLLQPSTVPRRSG

SEQ ID NO: 101164 - protein, 19 aa, Artificial Sequence
  Description of Artificial Sequence: Synthetic peptide
  Seed: MDPRMCSLMQGSTLPRRSG
MDPRMYSLLQSSTAPRRSG

SEQ ID NO: 101165 - protein, 19 aa, Artificial Sequence
  Description of Artificial Sequence: Synthetic peptide
  Seed: MDPRMCSLMQGSTLPRRSG
MDPRMYSLLQSSTCPRRSG

SEQ ID NO: 101166 - protein, 19 aa, Artificial Sequence
  Description of Artificial Sequence: Synthetic peptide
  Seed: MDPRMCSLMQGSTLPRRSG
MDPRMYSLLQSSTGPRRSG

SEQ ID NO: 101167 - protein, 19 aa, Artificial Sequence
  Description of Artificial Sequence: Synthetic peptide
  Seed: MDPRMCSLMQGSTLPRRSG
MDPRMYSLLQSSTHPRRSG

SEQ ID NO: 101168 - protein, 19 aa, Artificial Sequence
  Description of Artificial Sequence: Synthetic peptide
  Seed: MDPRMCSLMQGSTLPRRSG
MDPRMYSLLQSSTIPRRSG

SEQ ID NO: 101169 - protein, 19 aa, Artificial Sequence
  Description of Artificial Sequence: Synthetic peptide
  Seed: MDPRMCSLMQGSTLPRRSG
MDPRMYSLLQSSTLPRRSG

SEQ ID NO: 101170 - protein, 19 aa, Artificial Sequence
  Description of Artificial Sequence: Synthetic peptide
  Seed: MDPRMCSLMQGSTLPRRSG
MDPRMYSLLQSSTMPRRSG

SEQ ID NO: 101171 - protein, 19 aa, Artificial Sequence
  Description of Artificial Sequence: Synthetic peptide
  Seed: MDPRMCSLMQGSTLPRRSG
MDPRMYSLLQSSTNPRRSG

SEQ ID NO: 101172 - protein, 19 aa, Artificial Sequence
  Description of Artificial Sequence: Synthetic peptide
  Seed: MDPRMCSLMQGSTLPRRSG
MDPRMYSLLQSSTSPRRSG

SEQ ID NO: 101173 - protein, 19 aa, Artificial Sequence
  Description of Artificial Sequence: Synthetic peptide
  Seed: MDPRMCSLMQGSTLPRRSG
MDPRMYSLLQSSTTPRRSG

SEQ ID NO: 101174 - protein, 19 aa, Artificial Sequence
  Description of Artificial Sequence: Synthetic peptide
  Seed: MDPRMCSLMQGSTLPRRSG
MDPRMYSLLQSSTVPRRSG

SEQ ID NO: 101175 - protein, 19 aa, Artificial Sequence
  Description of Artificial Sequence: Synthetic peptide
  Seed: MDPRMCSLMQGSTLPRRSG
MDPRMYSLLQTSTAPRRSG

SEQ ID NO: 101176 - protein, 19 aa, Artificial Sequence
  Description of Artificial Sequence: Synthetic peptide
  Seed: MDPRMCSLMQGSTLPRRSG
MDPRMYSLLQTSTGPRRSG

SEQ ID NO: 101177 - protein, 19 aa, Artificial Sequence
  Description of Artificial Sequence: Synthetic peptide
  Seed: MDPRMCSLMQGSTLPRRSG
MDPRMYSLLQTSTHPRRSG

SEQ ID NO: 101178 - protein, 19 aa, Artificial Sequence
  Description of Artificial Sequence: Synthetic peptide
  Seed: MDPRMCSLMQGSTLPRRSG
MDPRMYSLLQTSTIPRRSG

SEQ ID NO: 101179 - protein, 19 aa, Artificial Sequence
  Description of Artificial Sequence: Synthetic peptide
  Seed: MDPRMCSLMQGSTLPRRSG
MDPRMYSLLQTSTLPRRSG

SEQ ID NO: 101180 - protein, 19 aa, Artificial Sequence
  Description of Artificial Sequence: Synthetic peptide
  Seed: MDPRMCSLMQGSTLPRRSG
MDPRMYSLLQTSTMPRRSG

SEQ ID NO: 101181 - protein, 19 aa, Artificial Sequence
  Description of Artificial Sequence: Synthetic peptide
  Seed: MDPRMCSLMQGSTLPRRSG
MDPRMYSLLQTSTNPRRSG

SEQ ID NO: 101182 - protein, 19 aa, Artificial Sequence
  Description of Artificial Sequence: Synthetic peptide
  Seed: MDPRMCSLMQGSTLPRRSG
MDPRMYSLLQTSTSPRRSG

SEQ ID NO: 101183 - protein, 19 aa, Artificial Sequence
  Description of Artificial Sequence: Synthetic peptide
  Seed: MDPRMCSLMQGSTLPRRSG
MDPRMYSLLQTSTTPRRSG

SEQ ID NO: 101184 - protein, 19 aa, Artificial Sequence
  Description of Artificial Sequence: Synthetic peptide
  Seed: MDPRMCSLMQGSTLPRRSG
MDPRMYSLLQTSTVPRRSG

SEQ ID NO: 101185 - protein, 19 aa, Artificial Sequence
  Description of Artificial Sequence: Synthetic peptide
  Seed: MDPRMCSLMQGSTLPRRSG
MDPRMYSLLQVSTAPRRSG

SEQ ID NO: 101186 - protein, 19 aa, Artificial Sequence
  Description of Artificial Sequence: Synthetic peptide
  Seed: MDPRMCSLMQGSTLPRRSG
MDPRMYSLLQVSTGPRRSG

SEQ ID NO: 101187 - protein, 19 aa, Artificial Sequence
  Description of Artificial Sequence: Synthetic peptide
  Seed: MDPRMCSLMQGSTLPRRSG
MDPRMYSLLQVSTHPRRSG

SEQ ID NO: 101188 - protein, 19 aa, Artificial Sequence
  Description of Artificial Sequence: Synthetic peptide
  Seed: MDPRMCSLMQGSTLPRRSG
MDPRMYSLLQVSTIPRRSG

SEQ ID NO: 101189 - protein, 19 aa, Artificial Sequence
  Description of Artificial Sequence: Synthetic peptide
  Seed: MDPRMCSLMQGSTLPRRSG
MDPRMYSLLQVSTLPRRSG

SEQ ID NO: 101190 - protein, 19 aa, Artificial Sequence
  Description of Artificial Sequence: Synthetic peptide
  Seed: MDPRMCSLMQGSTLPRRSG
MDPRMYSLLQVSTMPRRSG

SEQ ID NO: 101191 - protein, 19 aa, Artificial Sequence
  Description of Artificial Sequence: Synthetic peptide
  Seed: MDPRMCSLMQGSTLPRRSG
MDPRMYSLLQVSTNPRRSG

SEQ ID NO: 101192 - protein, 19 aa, Artificial Sequence
  Description of Artificial Sequence: Synthetic peptide
  Seed: MDPRMCSLMQGSTLPRRSG
MDPRMYSLLQVSTPPRRSG

SEQ ID NO: 101193 - protein, 19 aa, Artificial Sequence
  Description of Artificial Sequence: Synthetic peptide
  Seed: MDPRMCSLMQGSTLPRRSG
MDPRMYSLLQVSTQPRRSG

SEQ ID NO: 101194 - protein, 19 aa, Artificial Sequence
  Description of Artificial Sequence: Synthetic peptide
  Seed: MDPRMCSLMQGSTLPRRSG
MDPRMYSLLQVSTSPRRSG

SEQ ID NO: 101195 - protein, 19 aa, Artificial Sequence
  Description of Artificial Sequence: Synthetic peptide
  Seed: MDPRMCSLMQGSTLPRRSG
MDPRMYSLLQVSTTPRRSG

SEQ ID NO: 101196 - protein, 19 aa, Artificial Sequence
  Description of Artificial Sequence: Synthetic peptide
  Seed: MDPRMCSLMQGSTLPRRSG
MDPRMYSLLQVSTVPRRSG

SEQ ID NO: 101197 - protein, 19 aa, Artificial Sequence
  Description of Artificial Sequence: Synthetic peptide
  Seed: MDPRMCSLMQGSTLPRRSG
MDPRMYSLMQASTAPRRSG

SEQ ID NO: 101198 - protein, 19 aa, Artificial Sequence
  Description of Artificial Sequence: Synthetic peptide
  Seed: MDPRMCSLMQGSTLPRRSG
MDPRMYSLMQASTCPRRSG

SEQ ID NO: 101199 - protein, 19 aa, Artificial Sequence
  Description of Artificial Sequence: Synthetic peptide
  Seed: MDPRMCSLMQGSTLPRRSG
MDPRMYSLMQASTFPRRSG

SEQ ID NO: 101200 - protein, 19 aa, Artificial Sequence
  Description of Artificial Sequence: Synthetic peptide
  Seed: MDPRMCSLMQGSTLPRRSG
MDPRMYSLMQASTGPRRSG

SEQ ID NO: 101201 - protein, 19 aa, Artificial Sequence
  Description of Artificial Sequence: Synthetic peptide
  Seed: MDPRMCSLMQGSTLPRRSG
MDPRMYSLMQASTHPRRSG

SEQ ID NO: 101202 - protein, 19 aa, Artificial Sequence
  Description of Artificial Sequence: Synthetic peptide
  Seed: MDPRMCSLMQGSTLPRRSG
MDPRMYSLMQASTIPRRSG

SEQ ID NO: 101203 - protein, 19 aa, Artificial Sequence
  Description of Artificial Sequence: Synthetic peptide
  Seed: MDPRMCSLMQGSTLPRRSG
MDPRMYSLMQASTLPRRSG

SEQ ID NO: 101204 - protein, 19 aa, Artificial Sequence
  Description of Artificial Sequence: Synthetic peptide
  Seed: MDPRMCSLMQGSTLPRRSG
MDPRMYSLMQASTMPRRSG

SEQ ID NO: 101205 - protein, 19 aa, Artificial Sequence
  Description of Artificial Sequence: Synthetic peptide
  Seed: MDPRMCSLMQGSTLPRRSG
MDPRMYSLMQASTNPRRSG

SEQ ID NO: 101206 - protein, 19 aa, Artificial Sequence
  Description of Artificial Sequence: Synthetic peptide
  Seed: MDPRMCSLMQGSTLPRRSG
MDPRMYSLMQASTPPRRSG

SEQ ID NO: 101207 - protein, 19 aa, Artificial Sequence
  Description of Artificial Sequence: Synthetic peptide
  Seed: MDPRMCSLMQGSTLPRRSG
MDPRMYSLMQASTQPRRSG

SEQ ID NO: 101208 - protein, 19 aa, Artificial Sequence
  Description of Artificial Sequence: Synthetic peptide
  Seed: MDPRMCSLMQGSTLPRRSG
MDPRMYSLMQASTSPRRSG

SEQ ID NO: 101209 - protein, 19 aa, Artificial Sequence
  Description of Artificial Sequence: Synthetic peptide
  Seed: MDPRMCSLMQGSTLPRRSG
MDPRMYSLMQASTTPRRSG

SEQ ID NO: 101210 - protein, 19 aa, Artificial Sequence
  Description of Artificial Sequence: Synthetic peptide
  Seed: MDPRMCSLMQGSTLPRRSG
MDPRMYSLMQASTVPRRSG

SEQ ID NO: 101211 - protein, 19 aa, Artificial Sequence
  Description of Artificial Sequence: Synthetic peptide
  Seed: MDPRMCSLMQGSTLPRRSG
MDPRMYSLMQGSTAPRRSG

SEQ ID NO: 101212 - protein, 19 aa, Artificial Sequence
  Description of Artificial Sequence: Synthetic peptide
  Seed: MDPRMCSLMQGSTLPRRSG
MDPRMYSLMQGSTFPRRSG

SEQ ID NO: 101213 - protein, 19 aa, Artificial Sequence
  Description of Artificial Sequence: Synthetic peptide
  Seed: MDPRMCSLMQGSTLPRRSG
MDPRMYSLMQGSTGPRRSG

SEQ ID NO: 101214 - protein, 19 aa, Artificial Sequence
  Description of Artificial Sequence: Synthetic peptide
  Seed: MDPRMCSLMQGSTLPRRSG
MDPRMYSLMQGSTIPRRSG

SEQ ID NO: 101215 - protein, 19 aa, Artificial Sequence
  Description of Artificial Sequence: Synthetic peptide
  Seed: MDPRMCSLMQGSTLPRRSG
MDPRMYSLMQGSTLPRRSG

SEQ ID NO: 101216 - protein, 19 aa, Artificial Sequence
  Description of Artificial Sequence: Synthetic peptide
  Seed: MDPRMCSLMQGSTLPRRSG
MDPRMYSLMQGSTMPRRSG

SEQ ID NO: 101217 - protein, 19 aa, Artificial Sequence
  Description of Artificial Sequence: Synthetic peptide
  Seed: MDPRMCSLMQGSTLPRRSG
MDPRMYSLMQGSTNPRRSG

SEQ ID NO: 101218 - protein, 19 aa, Artificial Sequence
  Description of Artificial Sequence: Synthetic peptide
  Seed: MDPRMCSLMQGSTLPRRSG
MDPRMYSLMQGSTSPRRSG

SEQ ID NO: 101219 - protein, 19 aa, Artificial Sequence
  Description of Artificial Sequence: Synthetic peptide
  Seed: MDPRMCSLMQGSTLPRRSG
MDPRMYSLMQGSTTPRRSG

SEQ ID NO: 101220 - protein, 19 aa, Artificial Sequence
  Description of Artificial Sequence: Synthetic peptide
  Seed: MDPRMCSLMQGSTLPRRSG
MDPRMYSLMQGSTVPRRSG

SEQ ID NO: 101221 - protein, 19 aa, Artificial Sequence
  Description of Artificial Sequence: Synthetic peptide
  Seed: MDPRMCSLMQGSTLPRRSG
MDPRMYSLMQISTAPRRSG

SEQ ID NO: 101222 - protein, 19 aa, Artificial Sequence
  Description of Artificial Sequence: Synthetic peptide
  Seed: MDPRMCSLMQGSTLPRRSG
MDPRMYSLMQISTGPRRSG

SEQ ID NO: 101223 - protein, 19 aa, Artificial Sequence
  Description of Artificial Sequence: Synthetic peptide
  Seed: MDPRMCSLMQGSTLPRRSG
MDPRMYSLMQISTHPRRSG

SEQ ID NO: 101224 - protein, 19 aa, Artificial Sequence
  Description of Artificial Sequence: Synthetic peptide
  Seed: MDPRMCSLMQGSTLPRRSG
MDPRMYSLMQISTIPRRSG

SEQ ID NO: 101225 - protein, 19 aa, Artificial Sequence
  Description of Artificial Sequence: Synthetic peptide
  Seed: MDPRMCSLMQGSTLPRRSG
MDPRMYSLMQISTLPRRSG

SEQ ID NO: 101226 - protein, 19 aa, Artificial Sequence
  Description of Artificial Sequence: Synthetic peptide
  Seed: MDPRMCSLMQGSTLPRRSG
MDPRMYSLMQISTMPRRSG

SEQ ID NO: 101227 - protein, 19 aa, Artificial Sequence
  Description of Artificial Sequence: Synthetic peptide
  Seed: MDPRMCSLMQGSTLPRRSG
MDPRMYSLMQISTNPRRSG

SEQ ID NO: 101228 - protein, 19 aa, Artificial Sequence
  Description of Artificial Sequence: Synthetic peptide
  Seed: MDPRMCSLMQGSTLPRRSG
MDPRMYSLMQISTSPRRSG

SEQ ID NO: 101229 - protein, 19 aa, Artificial Sequence
  Description of Artificial Sequence: Synthetic peptide
  Seed: MDPRMCSLMQGSTLPRRSG
MDPRMYSLMQISTTPRRSG

SEQ ID NO: 101230 - protein, 19 aa, Artificial Sequence
  Description of Artificial Sequence: Synthetic peptide
  Seed: MDPRMCSLMQGSTLPRRSG
MDPRMYSLMQISTVPRRSG

SEQ ID NO: 101231 - protein, 19 aa, Artificial Sequence
  Description of Artificial Sequence: Synthetic peptide
  Seed: MDPRMCSLMQGSTLPRRSG
MDPRMYSLMQLSTAPRRSG

SEQ ID NO: 101232 - protein, 19 aa, Artificial Sequence
  Description of Artificial Sequence: Synthetic peptide
  Seed: MDPRMCSLMQGSTLPRRSG
MDPRMYSLMQLSTIPRRSG

SEQ ID NO: 101233 - protein, 19 aa, Artificial Sequence
  Description of Artificial Sequence: Synthetic peptide
  Seed: MDPRMCSLMQGSTLPRRSG
MDPRMYSLMQLSTLPRRSG

SEQ ID NO: 101234 - protein, 19 aa, Artificial Sequence
  Description of Artificial Sequence: Synthetic peptide
  Seed: MDPRMCSLMQGSTLPRRSG
MDPRMYSLMQLSTNPRRSG

SEQ ID NO: 101235 - protein, 19 aa, Artificial Sequence
  Description of Artificial Sequence: Synthetic peptide
  Seed: MDPRMCSLMQGSTLPRRSG
MDPRMYSLMQLSTSPRRSG

SEQ ID NO: 101236 - protein, 19 aa, Artificial Sequence
  Description of Artificial Sequence: Synthetic peptide
  Seed: MDPRMCSLMQGSTLPRRSG
MDPRMYSLMQLSTTPRRSG

SEQ ID NO: 101237 - protein, 19 aa, Artificial Sequence
  Description of Artificial Sequence: Synthetic peptide
  Seed: MDPRMCSLMQGSTLPRRSG
MDPRMYSLMQLSTVPRRSG

SEQ ID NO: 101238 - protein, 19 aa, Artificial Sequence
  Description of Artificial Sequence: Synthetic peptide
  Seed: MDPRMCSLMQGSTLPRRSG
MDPRMYSLMQMSTAPRRSG

SEQ ID NO: 101239 - protein, 19 aa, Artificial Sequence
  Description of Artificial Sequence: Synthetic peptide
  Seed: MDPRMCSLMQGSTLPRRSG
MDPRMYSLMQMSTLPRRSG

SEQ ID NO: 101240 - protein, 19 aa, Artificial Sequence
  Description of Artificial Sequence: Synthetic peptide
  Seed: MDPRMCSLMQGSTLPRRSG
MDPRMYSLMQMSTNPRRSG

SEQ ID NO: 101241 - protein, 19 aa, Artificial Sequence
  Description of Artificial Sequence: Synthetic peptide
  Seed: MDPRMCSLMQGSTLPRRSG
MDPRMYSLMQMSTSPRRSG

SEQ ID NO: 101242 - protein, 19 aa, Artificial Sequence
  Description of Artificial Sequence: Synthetic peptide
  Seed: MDPRMCSLMQGSTLPRRSG
MDPRMYSLMQMSTVPRRSG

SEQ ID NO: 101243 - protein, 19 aa, Artificial Sequence
  Description of Artificial Sequence: Synthetic peptide
  Seed: MDPRMCSLMQGSTLPRRSG
MDPRMYSLMQNSTAPRRSG

SEQ ID NO: 101244 - protein, 19 aa, Artificial Sequence
  Description of Artificial Sequence: Synthetic peptide
  Seed: MDPRMCSLMQGSTLPRRSG
MDPRMYSLMQNSTIPRRSG

SEQ ID NO: 101245 - protein, 19 aa, Artificial Sequence
  Description of Artificial Sequence: Synthetic peptide
  Seed: MDPRMCSLMQGSTLPRRSG
MDPRMYSLMQNSTLPRRSG

SEQ ID NO: 101246 - protein, 19 aa, Artificial Sequence
  Description of Artificial Sequence: Synthetic peptide
  Seed: MDPRMCSLMQGSTLPRRSG
MDPRMYSLMQNSTMPRRSG

SEQ ID NO: 101247 - protein, 19 aa, Artificial Sequence
  Description of Artificial Sequence: Synthetic peptide
  Seed: MDPRMCSLMQGSTLPRRSG
MDPRMYSLMQNSTNPRRSG

SEQ ID NO: 101248 - protein, 19 aa, Artificial Sequence
  Description of Artificial Sequence: Synthetic peptide
  Seed: MDPRMCSLMQGSTLPRRSG
MDPRMYSLMQNSTSPRRSG

SEQ ID NO: 101249 - protein, 19 aa, Artificial Sequence
  Description of Artificial Sequence: Synthetic peptide
  Seed: MDPRMCSLMQGSTLPRRSG
MDPRMYSLMQNSTTPRRSG

SEQ ID NO: 101250 - protein, 19 aa, Artificial Sequence
  Description of Artificial Sequence: Synthetic peptide
  Seed: MDPRMCSLMQGSTLPRRSG
MDPRMYSLMQNSTVPRRSG

SEQ ID NO: 101251 - protein, 19 aa, Artificial Sequence
  Description of Artificial Sequence: Synthetic peptide
  Seed: MDPRMCSLMQGSTLPRRSG
MDPRMYSLMQPSTAPRRSG

SEQ ID NO: 101252 - protein, 19 aa, Artificial Sequence
  Description of Artificial Sequence: Synthetic peptide
  Seed: MDPRMCSLMQGSTLPRRSG
MDPRMYSLMQPSTGPRRSG

SEQ ID NO: 101253 - protein, 19 aa, Artificial Sequence
  Description of Artificial Sequence: Synthetic peptide
  Seed: MDPRMCSLMQGSTLPRRSG
MDPRMYSLMQPSTHPRRSG

SEQ ID NO: 101254 - protein, 19 aa, Artificial Sequence
  Description of Artificial Sequence: Synthetic peptide
  Seed: MDPRMCSLMQGSTLPRRSG
MDPRMYSLMQPSTIPRRSG

SEQ ID NO: 101255 - protein, 19 aa, Artificial Sequence
  Description of Artificial Sequence: Synthetic peptide
  Seed: MDPRMCSLMQGSTLPRRSG
MDPRMYSLMQPSTLPRRSG

SEQ ID NO: 101256 - protein, 19 aa, Artificial Sequence
  Description of Artificial Sequence: Synthetic peptide
  Seed: MDPRMCSLMQGSTLPRRSG
MDPRMYSLMQPSTMPRRSG

SEQ ID NO: 101257 - protein, 19 aa, Artificial Sequence
  Description of Artificial Sequence: Synthetic peptide
  Seed: MDPRMCSLMQGSTLPRRSG
MDPRMYSLMQPSTNPRRSG

SEQ ID NO: 101258 - protein, 19 aa, Artificial Sequence
  Description of Artificial Sequence: Synthetic peptide
  Seed: MDPRMCSLMQGSTLPRRSG
MDPRMYSLMQPSTPPRRSG

SEQ ID NO: 101259 - protein, 19 aa, Artificial Sequence
  Description of Artificial Sequence: Synthetic peptide
  Seed: MDPRMCSLMQGSTLPRRSG
MDPRMYSLMQPSTQPRRSG

SEQ ID NO: 101260 - protein, 19 aa, Artificial Sequence
  Description of Artificial Sequence: Synthetic peptide
  Seed: MDPRMCSLMQGSTLPRRSG
MDPRMYSLMQPSTSPRRSG

SEQ ID NO: 101261 - protein, 19 aa, Artificial Sequence
  Description of Artificial Sequence: Synthetic peptide
  Seed: MDPRMCSLMQGSTLPRRSG
MDPRMYSLMQPSTTPRRSG

SEQ ID NO: 101262 - protein, 19 aa, Artificial Sequence
  Description of Artificial Sequence: Synthetic peptide
  Seed: MDPRMCSLMQGSTLPRRSG
MDPRMYSLMQPSTVPRRSG

SEQ ID NO: 101263 - protein, 19 aa, Artificial Sequence
  Description of Artificial Sequence: Synthetic peptide
  Seed: MDPRMCSLMQGSTLPRRSG
MDPRMYSLMQSSTAPRRSG

SEQ ID NO: 101264 - protein, 19 aa, Artificial Sequence
  Description of Artificial Sequence: Synthetic peptide
  Seed: MDPRMCSLMQGSTLPRRSG
MDPRMYSLMQSSTGPRRSG

SEQ ID NO: 101265 - protein, 19 aa, Artificial Sequence
  Description of Artificial Sequence: Synthetic peptide
  Seed: MDPRMCSLMQGSTLPRRSG
MDPRMYSLMQSSTHPRRSG

SEQ ID NO: 101266 - protein, 19 aa, Artificial Sequence
  Description of Artificial Sequence: Synthetic peptide
  Seed: MDPRMCSLMQGSTLPRRSG
MDPRMYSLMQSSTIPRRSG

SEQ ID NO: 101267 - protein, 19 aa, Artificial Sequence
  Description of Artificial Sequence: Synthetic peptide
  Seed: MDPRMCSLMQGSTLPRRSG
MDPRMYSLMQSSTLPRRSG

SEQ ID NO: 101268 - protein, 19 aa, Artificial Sequence
  Description of Artificial Sequence: Synthetic peptide
  Seed: MDPRMCSLMQGSTLPRRSG
MDPRMYSLMQSSTMPRRSG

SEQ ID NO: 101269 - protein, 19 aa, Artificial Sequence
  Description of Artificial Sequence: Synthetic peptide
  Seed: MDPRMCSLMQGSTLPRRSG
MDPRMYSLMQSSTNPRRSG

SEQ ID NO: 101270 - protein, 19 aa, Artificial Sequence
  Description of Artificial Sequence: Synthetic peptide
  Seed: MDPRMCSLMQGSTLPRRSG
MDPRMYSLMQSSTQPRRSG

SEQ ID NO: 101271 - protein, 19 aa, Artificial Sequence
  Description of Artificial Sequence: Synthetic peptide
  Seed: MDPRMCSLMQGSTLPRRSG
MDPRMYSLMQSSTSPRRSG

SEQ ID NO: 101272 - protein, 19 aa, Artificial Sequence
  Description of Artificial Sequence: Synthetic peptide
  Seed: MDPRMCSLMQGSTLPRRSG
MDPRMYSLMQSSTTPRRSG

SEQ ID NO: 101273 - protein, 19 aa, Artificial Sequence
  Description of Artificial Sequence: Synthetic peptide
  Seed: MDPRMCSLMQGSTLPRRSG
MDPRMYSLMQSSTVPRRSG

SEQ ID NO: 101274 - protein, 19 aa, Artificial Sequence
  Description of Artificial Sequence: Synthetic peptide
  Seed: MDPRMCSLMQGSTLPRRSG
MDPRMYSLMQTSTAPRRSG

SEQ ID NO: 101275 - protein, 19 aa, Artificial Sequence
  Description of Artificial Sequence: Synthetic peptide
  Seed: MDPRMCSLMQGSTLPRRSG
MDPRMYSLMQTSTHPRRSG

SEQ ID NO: 101276 - protein, 19 aa, Artificial Sequence
  Description of Artificial Sequence: Synthetic peptide
  Seed: MDPRMCSLMQGSTLPRRSG
MDPRMYSLMQTSTIPRRSG

SEQ ID NO: 101277 - protein, 19 aa, Artificial Sequence
  Description of Artificial Sequence: Synthetic peptide
  Seed: MDPRMCSLMQGSTLPRRSG
MDPRMYSLMQTSTLPRRSG

SEQ ID NO: 101278 - protein, 19 aa, Artificial Sequence
  Description of Artificial Sequence: Synthetic peptide
  Seed: MDPRMCSLMQGSTLPRRSG
MDPRMYSLMQTSTMPRRSG

SEQ ID NO: 101279 - protein, 19 aa, Artificial Sequence
  Description of Artificial Sequence: Synthetic peptide
  Seed: MDPRMCSLMQGSTLPRRSG
MDPRMYSLMQTSTNPRRSG

SEQ ID NO: 101280 - protein, 19 aa, Artificial Sequence
  Description of Artificial Sequence: Synthetic peptide
  Seed: MDPRMCSLMQGSTLPRRSG
MDPRMYSLMQTSTSPRRSG

SEQ ID NO: 101281 - protein, 19 aa, Artificial Sequence
  Description of Artificial Sequence: Synthetic peptide
  Seed: MDPRMCSLMQGSTLPRRSG
MDPRMYSLMQTSTTPRRSG

SEQ ID NO: 101282 - protein, 19 aa, Artificial Sequence
  Description of Artificial Sequence: Synthetic peptide
  Seed: MDPRMCSLMQGSTLPRRSG
MDPRMYSLMQTSTVPRRSG

SEQ ID NO: 101283 - protein, 19 aa, Artificial Sequence
  Description of Artificial Sequence: Synthetic peptide
  Seed: MDPRMCSLMQGSTLPRRSG
MDPRMYSLMQVSTAPRRSG

SEQ ID NO: 101284 - protein, 19 aa, Artificial Sequence
  Description of Artificial Sequence: Synthetic peptide
  Seed: MDPRMCSLMQGSTLPRRSG
MDPRMYSLMQVSTGPRRSG

SEQ ID NO: 101285 - protein, 19 aa, Artificial Sequence
  Description of Artificial Sequence: Synthetic peptide
  Seed: MDPRMCSLMQGSTLPRRSG
MDPRMYSLMQVSTHPRRSG

SEQ ID NO: 101286 - protein, 19 aa, Artificial Sequence
  Description of Artificial Sequence: Synthetic peptide
  Seed: MDPRMCSLMQGSTLPRRSG
MDPRMYSLMQVSTIPRRSG

SEQ ID NO: 101287 - protein, 19 aa, Artificial Sequence
  Description of Artificial Sequence: Synthetic peptide
  Seed: MDPRMCSLMQGSTLPRRSG
MDPRMYSLMQVSTLPRRSG

SEQ ID NO: 101288 - protein, 19 aa, Artificial Sequence
  Description of Artificial Sequence: Synthetic peptide
  Seed: MDPRMCSLMQGSTLPRRSG
MDPRMYSLMQVSTMPRRSG

SEQ ID NO: 101289 - protein, 19 aa, Artificial Sequence
  Description of Artificial Sequence: Synthetic peptide
  Seed: MDPRMCSLMQGSTLPRRSG
MDPRMYSLMQVSTNPRRSG

SEQ ID NO: 101290 - protein, 19 aa, Artificial Sequence
  Description of Artificial Sequence: Synthetic peptide
  Seed: MDPRMCSLMQGSTLPRRSG
MDPRMYSLMQVSTPPRRSG

SEQ ID NO: 101291 - protein, 19 aa, Artificial Sequence
  Description of Artificial Sequence: Synthetic peptide
  Seed: MDPRMCSLMQGSTLPRRSG
MDPRMYSLMQVSTQPRRSG

SEQ ID NO: 101292 - protein, 19 aa, Artificial Sequence
  Description of Artificial Sequence: Synthetic peptide
  Seed: MDPRMCSLMQGSTLPRRSG
MDPRMYSLMQVSTSPRRSG

SEQ ID NO: 101293 - protein, 19 aa, Artificial Sequence
  Description of Artificial Sequence: Synthetic peptide
  Seed: MDPRMCSLMQGSTLPRRSG
MDPRMYSLMQVSTTPRRSG

SEQ ID NO: 101294 - protein, 19 aa, Artificial Sequence
  Description of Artificial Sequence: Synthetic peptide
  Seed: MDPRMCSLMQGSTLPRRSG
MDPRMYSLMQVSTVPRRSG

SEQ ID NO: 101295 - protein, 19 aa, Artificial Sequence
  Description of Artificial Sequence: Synthetic peptide
  Seed: MDPRMCSLMQGSTLPRRSG
MDPRMYSLNQASTLPRRSG

SEQ ID NO: 101296 - protein, 19 aa, Artificial Sequence
  Description of Artificial Sequence: Synthetic peptide
  Seed: MDPRMCSLMQGSTLPRRSG
MDPRMYSLQQASTAPRRSG

SEQ ID NO: 101297 - protein, 19 aa, Artificial Sequence
  Description of Artificial Sequence: Synthetic peptide
  Seed: MDPRMCSLMQGSTLPRRSG
MDPRMYSLQQASTIPRRSG

SEQ ID NO: 101298 - protein, 19 aa, Artificial Sequence
  Description of Artificial Sequence: Synthetic peptide
  Seed: MDPRMCSLMQGSTLPRRSG
MDPRMYSLQQASTLPRRSG

SEQ ID NO: 101299 - protein, 19 aa, Artificial Sequence
  Description of Artificial Sequence: Synthetic peptide
  Seed: MDPRMCSLMQGSTLPRRSG
MDPRMYSLQQASTMPRRSG

SEQ ID NO: 101300 - protein, 19 aa, Artificial Sequence
  Description of Artificial Sequence: Synthetic peptide
  Seed: MDPRMCSLMQGSTLPRRSG
MDPRMYSLQQASTSPRRSG

SEQ ID NO: 101301 - protein, 19 aa, Artificial Sequence
  Description of Artificial Sequence: Synthetic peptide
  Seed: MDPRMCSLMQGSTLPRRSG
MDPRMYSLQQASTTPRRSG

SEQ ID NO: 101302 - protein, 19 aa, Artificial Sequence
  Description of Artificial Sequence: Synthetic peptide
  Seed: MDPRMCSLMQGSTLPRRSG
MDPRMYSLQQASTVPRRSG

SEQ ID NO: 101303 - protein, 19 aa, Artificial Sequence
  Description of Artificial Sequence: Synthetic peptide
  Seed: MDPRMCSLMQGSTLPRRSG
MDPRMYSLQQGSTAPRRSG

SEQ ID NO: 101304 - protein, 19 aa, Artificial Sequence
  Description of Artificial Sequence: Synthetic peptide
  Seed: MDPRMCSLMQGSTLPRRSG
MDPRMYSLQQGSTIPRRSG

SEQ ID NO: 101305 - protein, 19 aa, Artificial Sequence
  Description of Artificial Sequence: Synthetic peptide
  Seed: MDPRMCSLMQGSTLPRRSG
MDPRMYSLQQGSTLPRRSG

SEQ ID NO: 101306 - protein, 19 aa, Artificial Sequence
  Description of Artificial Sequence: Synthetic peptide
  Seed: MDPRMCSLMQGSTLPRRSG
MDPRMYSLQQGSTMPRRSG

SEQ ID NO: 101307 - protein, 19 aa, Artificial Sequence
  Description of Artificial Sequence: Synthetic peptide
  Seed: MDPRMCSLMQGSTLPRRSG
MDPRMYSLQQGSTVPRRSG

SEQ ID NO: 101308 - protein, 19 aa, Artificial Sequence
  Description of Artificial Sequence: Synthetic peptide
  Seed: MDPRMCSLMQGSTLPRRSG
MDPRMYSLQQPSTIPRRSG

SEQ ID NO: 101309 - protein, 19 aa, Artificial Sequence
  Description of Artificial Sequence: Synthetic peptide
  Seed: MDPRMCSLMQGSTLPRRSG
MDPRMYSLQQPSTLPRRSG

SEQ ID NO: 101310 - protein, 19 aa, Artificial Sequence
  Description of Artificial Sequence: Synthetic peptide
  Seed: MDPRMCSLMQGSTLPRRSG
MDPRMYSLQQPSTVPRRSG

SEQ ID NO: 101311 - protein, 19 aa, Artificial Sequence
  Description of Artificial Sequence: Synthetic peptide
  Seed: MDPRMCSLMQGSTLPRRSG
MDPRMYSLQQSSTAPRRSG

SEQ ID NO: 101312 - protein, 19 aa, Artificial Sequence
  Description of Artificial Sequence: Synthetic peptide
  Seed: MDPRMCSLMQGSTLPRRSG
MDPRMYSLQQSSTIPRRSG

SEQ ID NO: 101313 - protein, 19 aa, Artificial Sequence
  Description of Artificial Sequence: Synthetic peptide
  Seed: MDPRMCSLMQGSTLPRRSG
MDPRMYSLQQSSTLPRRSG

SEQ ID NO: 101314 - protein, 19 aa, Artificial Sequence
  Description of Artificial Sequence: Synthetic peptide
  Seed: MDPRMCSLMQGSTLPRRSG
MDPRMYSLQQSSTVPRRSG

SEQ ID NO: 101315 - protein, 19 aa, Artificial Sequence
  Description of Artificial Sequence: Synthetic peptide
  Seed: MDPRMCSLMQGSTLPRRSG
MDPRMYSLQQVSTAPRRSG

SEQ ID NO: 101316 - protein, 19 aa, Artificial Sequence
  Description of Artificial Sequence: Synthetic peptide
  Seed: MDPRMCSLMQGSTLPRRSG
MDPRMYSLSQASTAPRRSG

SEQ ID NO: 101317 - protein, 19 aa, Artificial Sequence
  Description of Artificial Sequence: Synthetic peptide
  Seed: MDPRMCSLMQGSTLPRRSG
MDPRMYSLSQASTIPRRSG

SEQ ID NO: 101318 - protein, 19 aa, Artificial Sequence
  Description of Artificial Sequence: Synthetic peptide
  Seed: MDPRMCSLMQGSTLPRRSG
MDPRMYSLSQASTLPRRSG

SEQ ID NO: 101319 - protein, 19 aa, Artificial Sequence
  Description of Artificial Sequence: Synthetic peptide
  Seed: MDPRMCSLMQGSTLPRRSG
MDPRMYSLSQASTVPRRSG

SEQ ID NO: 101320 - protein, 19 aa, Artificial Sequence
  Description of Artificial Sequence: Synthetic peptide
  Seed: MDPRMCSLMQGSTLPRRSG
MDPRMYSLSQGSTIPRRSG

SEQ ID NO: 101321 - protein, 19 aa, Artificial Sequence
  Description of Artificial Sequence: Synthetic peptide
  Seed: MDPRMCSLMQGSTLPRRSG
MDPRMYSLSQGSTLPRRSG

SEQ ID NO: 101322 - protein, 19 aa, Artificial Sequence
  Description of Artificial Sequence: Synthetic peptide
  Seed: MDPRMCSLMQGSTLPRRSG
MDPRMYSLSQGSTVPRRSG

SEQ ID NO: 101323 - protein, 19 aa, Artificial Sequence
  Description of Artificial Sequence: Synthetic peptide
  Seed: MDPRMCSLMQGSTLPRRSG
MDPRMYSLSQSSTIPRRSG

SEQ ID NO: 101324 - protein, 19 aa, Artificial Sequence
  Description of Artificial Sequence: Synthetic peptide
  Seed: MDPRMCSLMQGSTLPRRSG
MDPRMYSLSQSSTLPRRSG

SEQ ID NO: 101325 - protein, 19 aa, Artificial Sequence
  Description of Artificial Sequence: Synthetic peptide
  Seed: MDPRMCSLMQGSTLPRRSG
MDPRMYSLSQSSTVPRRSG

SEQ ID NO: 101326 - protein, 19 aa, Artificial Sequence
  Description of Artificial Sequence: Synthetic peptide
  Seed: MDPRMCSLMQGSTLPRRSG
MDPRMYSLTQASTIPRRSG

SEQ ID NO: 101327 - protein, 19 aa, Artificial Sequence
  Description of Artificial Sequence: Synthetic peptide
  Seed: MDPRMCSLMQGSTLPRRSG
MDPRMYSLTQASTLPRRSG

SEQ ID NO: 101328 - protein, 19 aa, Artificial Sequence
  Description of Artificial Sequence: Synthetic peptide
  Seed: MDPRMCSLMQGSTLPRRSG
MDPRMYSLTQASTVPRRSG

SEQ ID NO: 101329 - protein, 19 aa, Artificial Sequence
  Description of Artificial Sequence: Synthetic peptide
  Seed: MDPRMCSLMQGSTLPRRSG
MDPRMYSLVQASTAPRRSG

SEQ ID NO: 101330 - protein, 19 aa, Artificial Sequence
  Description of Artificial Sequence: Synthetic peptide
  Seed: MDPRMCSLMQGSTLPRRSG
MDPRMYSLVQASTIPRRSG

SEQ ID NO: 101331 - protein, 19 aa, Artificial Sequence
  Description of Artificial Sequence: Synthetic peptide
  Seed: MDPRMCSLMQGSTLPRRSG
MDPRMYSLVQASTLPRRSG

SEQ ID NO: 101332 - protein, 19 aa, Artificial Sequence
  Description of Artificial Sequence: Synthetic peptide
  Seed: MDPRMCSLMQGSTLPRRSG
MDPRMYSLVQASTMPRRSG

SEQ ID NO: 101333 - protein, 19 aa, Artificial Sequence
  Description of Artificial Sequence: Synthetic peptide
  Seed: MDPRMCSLMQGSTLPRRSG
MDPRMYSLVQASTNPRRSG

SEQ ID NO: 101334 - protein, 19 aa, Artificial Sequence
  Description of Artificial Sequence: Synthetic peptide
  Seed: MDPRMCSLMQGSTLPRRSG
MDPRMYSLVQASTSPRRSG

SEQ ID NO: 101335 - protein, 19 aa, Artificial Sequence
  Description of Artificial Sequence: Synthetic peptide
  Seed: MDPRMCSLMQGSTLPRRSG
MDPRMYSLVQASTTPRRSG

SEQ ID NO: 101336 - protein, 19 aa, Artificial Sequence
  Description of Artificial Sequence: Synthetic peptide
  Seed: MDPRMCSLMQGSTLPRRSG
MDPRMYSLVQASTVPRRSG

SEQ ID NO: 101337 - protein, 19 aa, Artificial Sequence
  Description of Artificial Sequence: Synthetic peptide
  Seed: MDPRMCSLMQGSTLPRRSG
MDPRMYSLVQGSTAPRRSG

SEQ ID NO: 101338 - protein, 19 aa, Artificial Sequence
  Description of Artificial Sequence: Synthetic peptide
  Seed: MDPRMCSLMQGSTLPRRSG
MDPRMYSLVQGSTIPRRSG

SEQ ID NO: 101339 - protein, 19 aa, Artificial Sequence
  Description of Artificial Sequence: Synthetic peptide
  Seed: MDPRMCSLMQGSTLPRRSG
MDPRMYSLVQGSTLPRRSG

SEQ ID NO: 101340 - protein, 19 aa, Artificial Sequence
  Description of Artificial Sequence: Synthetic peptide
  Seed: MDPRMCSLMQGSTLPRRSG
MDPRMYSLVQGSTMPRRSG

SEQ ID NO: 101341 - protein, 19 aa, Artificial Sequence
  Description of Artificial Sequence: Synthetic peptide
  Seed: MDPRMCSLMQGSTLPRRSG
MDPRMYSLVQGSTTPRRSG

SEQ ID NO: 101342 - protein, 19 aa, Artificial Sequence
  Description of Artificial Sequence: Synthetic peptide
  Seed: MDPRMCSLMQGSTLPRRSG
MDPRMYSLVQGSTVPRRSG

SEQ ID NO: 101343 - protein, 19 aa, Artificial Sequence
  Description of Artificial Sequence: Synthetic peptide
  Seed: MDPRMCSLMQGSTLPRRSG
MDPRMYSLVQISTAPRRSG

SEQ ID NO: 101344 - protein, 19 aa, Artificial Sequence
  Description of Artificial Sequence: Synthetic peptide
  Seed: MDPRMCSLMQGSTLPRRSG
MDPRMYSLVQISTNPRRSG

SEQ ID NO: 101345 - protein, 19 aa, Artificial Sequence
  Description of Artificial Sequence: Synthetic peptide
  Seed: MDPRMCSLMQGSTLPRRSG
MDPRMYSLVQISTSPRRSG

SEQ ID NO: 101346 - protein, 19 aa, Artificial Sequence
  Description of Artificial Sequence: Synthetic peptide
  Seed: MDPRMCSLMQGSTLPRRSG
MDPRMYSLVQPSTAPRRSG

SEQ ID NO: 101347 - protein, 19 aa, Artificial Sequence
  Description of Artificial Sequence: Synthetic peptide
  Seed: MDPRMCSLMQGSTLPRRSG
MDPRMYSLVQPSTIPRRSG

SEQ ID NO: 101348 - protein, 19 aa, Artificial Sequence
  Description of Artificial Sequence: Synthetic peptide
  Seed: MDPRMCSLMQGSTLPRRSG
MDPRMYSLVQPSTLPRRSG

SEQ ID NO: 101349 - protein, 19 aa, Artificial Sequence
  Description of Artificial Sequence: Synthetic peptide
  Seed: MDPRMCSLMQGSTLPRRSG
MDPRMYSLVQPSTNPRRSG

SEQ ID NO: 101350 - protein, 19 aa, Artificial Sequence
  Description of Artificial Sequence: Synthetic peptide
  Seed: MDPRMCSLMQGSTLPRRSG
MDPRMYSLVQPSTSPRRSG

SEQ ID NO: 101351 - protein, 19 aa, Artificial Sequence
  Description of Artificial Sequence: Synthetic peptide
  Seed: MDPRMCSLMQGSTLPRRSG
MDPRMYSLVQPSTTPRRSG

SEQ ID NO: 101352 - protein, 19 aa, Artificial Sequence
  Description of Artificial Sequence: Synthetic peptide
  Seed: MDPRMCSLMQGSTLPRRSG
MDPRMYSLVQPSTVPRRSG

SEQ ID NO: 101353 - protein, 19 aa, Artificial Sequence
  Description of Artificial Sequence: Synthetic peptide
  Seed: MDPRMCSLMQGSTLPRRSG
MDPRMYSLVQSSTAPRRSG

SEQ ID NO: 101354 - protein, 19 aa, Artificial Sequence
  Description of Artificial Sequence: Synthetic peptide
  Seed: MDPRMCSLMQGSTLPRRSG
MDPRMYSLVQSSTIPRRSG

SEQ ID NO: 101355 - protein, 19 aa, Artificial Sequence
  Description of Artificial Sequence: Synthetic peptide
  Seed: MDPRMCSLMQGSTLPRRSG
MDPRMYSLVQSSTLPRRSG

SEQ ID NO: 101356 - protein, 19 aa, Artificial Sequence
  Description of Artificial Sequence: Synthetic peptide
  Seed: MDPRMCSLMQGSTLPRRSG
MDPRMYSLVQSSTNPRRSG

SEQ ID NO: 101357 - protein, 19 aa, Artificial Sequence
  Description of Artificial Sequence: Synthetic peptide
  Seed: MDPRMCSLMQGSTLPRRSG
MDPRMYSLVQSSTSPRRSG

SEQ ID NO: 101358 - protein, 19 aa, Artificial Sequence
  Description of Artificial Sequence: Synthetic peptide
  Seed: MDPRMCSLMQGSTLPRRSG
MDPRMYSLVQSSTTPRRSG

SEQ ID NO: 101359 - protein, 19 aa, Artificial Sequence
  Description of Artificial Sequence: Synthetic peptide
  Seed: MDPRMCSLMQGSTLPRRSG
MDPRMYSLVQSSTVPRRSG

SEQ ID NO: 101360 - protein, 19 aa, Artificial Sequence
  Description of Artificial Sequence: Synthetic peptide
  Seed: MDPRMCSLMQGSTLPRRSG
MDPRMYSLVQTSTAPRRSG

SEQ ID NO: 101361 - protein, 19 aa, Artificial Sequence
  Description of Artificial Sequence: Synthetic peptide
  Seed: MDPRMCSLMQGSTLPRRSG
MDPRMYSLVQTSTIPRRSG

SEQ ID NO: 101362 - protein, 19 aa, Artificial Sequence
  Description of Artificial Sequence: Synthetic peptide
  Seed: MDPRMCSLMQGSTLPRRSG
MDPRMYSLVQTSTLPRRSG

SEQ ID NO: 101363 - protein, 19 aa, Artificial Sequence
  Description of Artificial Sequence: Synthetic peptide
  Seed: MDPRMCSLMQGSTLPRRSG
MDPRMYSLVQTSTNPRRSG

SEQ ID NO: 101364 - protein, 19 aa, Artificial Sequence
  Description of Artificial Sequence: Synthetic peptide
  Seed: MDPRMCSLMQGSTLPRRSG
MDPRMYSLVQTSTSPRRSG

SEQ ID NO: 101365 - protein, 19 aa, Artificial Sequence
  Description of Artificial Sequence: Synthetic peptide
  Seed: MDPRMCSLMQGSTLPRRSG
MDPRMYSLVQTSTTPRRSG

SEQ ID NO: 101366 - protein, 19 aa, Artificial Sequence
  Description of Artificial Sequence: Synthetic peptide
  Seed: MDPRMCSLMQGSTLPRRSG
MDPRMYSLVQTSTVPRRSG

SEQ ID NO: 101367 - protein, 19 aa, Artificial Sequence
  Description of Artificial Sequence: Synthetic peptide
  Seed: MDPRMCSLMQGSTLPRRSG
MDPRMYSLVQVSTAPRRSG

SEQ ID NO: 101368 - protein, 19 aa, Artificial Sequence
  Description of Artificial Sequence: Synthetic peptide
  Seed: MDPRMCSLMQGSTLPRRSG
MDPRMYSLVQVSTNPRRSG

SEQ ID NO: 101369 - protein, 19 aa, Artificial Sequence
  Description of Artificial Sequence: Synthetic peptide
  Seed: MDPRMCSLMQGSTLPRRSG
MDPRMYSLVQVSTSPRRSG

SEQ ID NO: 101370 - protein, 19 aa, Artificial Sequence
  Description of Artificial Sequence: Synthetic peptide
  Seed: MDPRMCSLMQGSTLPRRSG
MDPRMYSLVQVSTTPRRSG

SEQ ID NO: 101371 - protein, 19 aa, Artificial Sequence
  Description of Artificial Sequence: Synthetic peptide
  Seed: MDPRMCSLMQGSTLPRRSG
MDPRMYSLVQVSTVPRRSG

SEQ ID NO: 101372 - protein, 20 aa, Artificial Sequence
  Description of Artificial Sequence: Synthetic peptide
  Seed: MDPRMCSLMQGSTLPRRSGA
MDPRMCSLLQASTIPRRSGA

SEQ ID NO: 101373 - protein, 20 aa, Artificial Sequence
  Description of Artificial Sequence: Synthetic peptide
  Seed: MDPRMCSLMQGSTLPRRSGA
MDPRMCSLLQASTVPRRSGA

SEQ ID NO: 101374 - protein, 20 aa, Artificial Sequence
  Description of Artificial Sequence: Synthetic peptide
  Seed: MDPRMCSLMQGSTLPRRSGA
MDPRMCSLMQASTIPRRSGA

SEQ ID NO: 101375 - protein, 20 aa, Artificial Sequence
  Description of Artificial Sequence: Synthetic peptide
  Seed: MDPRMCSLMQGSTLPRRSGA
MDPRMCSLMQASTVPRRSGA

SEQ ID NO: 101376 - protein, 20 aa, Artificial Sequence
  Description of Artificial Sequence: Synthetic peptide
  Seed: MDPRMCSLMQGSTLPRRSGA
MDPRMFSLAQASTAPRRSGA

SEQ ID NO: 101377 - protein, 20 aa, Artificial Sequence
  Description of Artificial Sequence: Synthetic peptide
  Seed: MDPRMCSLMQGSTLPRRSGA
MDPRMFSLAQASTCPRRSGA

SEQ ID NO: 101378 - protein, 20 aa, Artificial Sequence
  Description of Artificial Sequence: Synthetic peptide
  Seed: MDPRMCSLMQGSTLPRRSGA
MDPRMFSLAQASTDPRRSGA

SEQ ID NO: 101379 - protein, 20 aa, Artificial Sequence
  Description of Artificial Sequence: Synthetic peptide
  Seed: MDPRMCSLMQGSTLPRRSGA
MDPRMFSLAQASTEPRRSGA

SEQ ID NO: 101380 - protein, 20 aa, Artificial Sequence
  Description of Artificial Sequence: Synthetic peptide
  Seed: MDPRMCSLMQGSTLPRRSGA
MDPRMFSLAQASTFPRRSGA

SEQ ID NO: 101381 - protein, 20 aa, Artificial Sequence
  Description of Artificial Sequence: Synthetic peptide
  Seed: MDPRMCSLMQGSTLPRRSGA
MDPRMFSLAQASTGPRRSGA

SEQ ID NO: 101382 - protein, 20 aa, Artificial Sequence
  Description of Artificial Sequence: Synthetic peptide
  Seed: MDPRMCSLMQGSTLPRRSGA
MDPRMFSLAQASTHPRRSGA

SEQ ID NO: 101383 - protein, 20 aa, Artificial Sequence
  Description of Artificial Sequence: Synthetic peptide
  Seed: MDPRMCSLMQGSTLPRRSGA
MDPRMFSLAQASTIPRRSGA

SEQ ID NO: 101384 - protein, 20 aa, Artificial Sequence
  Description of Artificial Sequence: Synthetic peptide
  Seed: MDPRMCSLMQGSTLPRRSGA
MDPRMFSLAQASTLPRRSGA

SEQ ID NO: 101385 - protein, 20 aa, Artificial Sequence
  Description of Artificial Sequence: Synthetic peptide
  Seed: MDPRMCSLMQGSTLPRRSGA
MDPRMFSLAQASTMPRRSGA

SEQ ID NO: 101386 - protein, 20 aa, Artificial Sequence
  Description of Artificial Sequence: Synthetic peptide
  Seed: MDPRMCSLMQGSTLPRRSGA
MDPRMFSLAQASTNPRRSGA

SEQ ID NO: 101387 - protein, 20 aa, Artificial Sequence
  Description of Artificial Sequence: Synthetic peptide
  Seed: MDPRMCSLMQGSTLPRRSGA
MDPRMFSLAQASTPPRRSGA

SEQ ID NO: 101388 - protein, 20 aa, Artificial Sequence
  Description of Artificial Sequence: Synthetic peptide
  Seed: MDPRMCSLMQGSTLPRRSGA
MDPRMFSLAQASTQPRRSGA

SEQ ID NO: 101389 - protein, 20 aa, Artificial Sequence
  Description of Artificial Sequence: Synthetic peptide
  Seed: MDPRMCSLMQGSTLPRRSGA
MDPRMFSLAQASTSPRRSGA

SEQ ID NO: 101390 - protein, 20 aa, Artificial Sequence
  Description of Artificial Sequence: Synthetic peptide
  Seed: MDPRMCSLMQGSTLPRRSGA
MDPRMFSLAQASTTPRRSGA

SEQ ID NO: 101391 - protein, 20 aa, Artificial Sequence
  Description of Artificial Sequence: Synthetic peptide
  Seed: MDPRMCSLMQGSTLPRRSGA
MDPRMFSLAQASTVPRRSGA

SEQ ID NO: 101392 - protein, 20 aa, Artificial Sequence
  Description of Artificial Sequence: Synthetic peptide
  Seed: MDPRMCSLMQGSTLPRRSGA
MDPRMFSLAQASTWPRRSGA

SEQ ID NO: 101393 - protein, 20 aa, Artificial Sequence
  Description of Artificial Sequence: Synthetic peptide
  Seed: MDPRMCSLMQGSTLPRRSGA
MDPRMFSLAQASTYPRRSGA

SEQ ID NO: 101394 - protein, 20 aa, Artificial Sequence
  Description of Artificial Sequence: Synthetic peptide
  Seed: MDPRMCSLMQGSTLPRRSGA
MDPRMFSLAQGSTAPRRSGA

SEQ ID NO: 101395 - protein, 20 aa, Artificial Sequence
  Description of Artificial Sequence: Synthetic peptide
  Seed: MDPRMCSLMQGSTLPRRSGA
MDPRMFSLAQGSTCPRRSGA

SEQ ID NO: 101396 - protein, 20 aa, Artificial Sequence
  Description of Artificial Sequence: Synthetic peptide
  Seed: MDPRMCSLMQGSTLPRRSGA
MDPRMFSLAQGSTFPRRSGA

SEQ ID NO: 101397 - protein, 20 aa, Artificial Sequence
  Description of Artificial Sequence: Synthetic peptide
  Seed: MDPRMCSLMQGSTLPRRSGA
MDPRMFSLAQGSTGPRRSGA

SEQ ID NO: 101398 - protein, 20 aa, Artificial Sequence
  Description of Artificial Sequence: Synthetic peptide
  Seed: MDPRMCSLMQGSTLPRRSGA
MDPRMFSLAQGSTIPRRSGA

SEQ ID NO: 101399 - protein, 20 aa, Artificial Sequence
  Description of Artificial Sequence: Synthetic peptide
  Seed: MDPRMCSLMQGSTLPRRSGA
MDPRMFSLAQGSTLPRRSGA

SEQ ID NO: 101400 - protein, 20 aa, Artificial Sequence
  Description of Artificial Sequence: Synthetic peptide
  Seed: MDPRMCSLMQGSTLPRRSGA
MDPRMFSLAQGSTMPRRSGA

SEQ ID NO: 101401 - protein, 20 aa, Artificial Sequence
  Description of Artificial Sequence: Synthetic peptide
  Seed: MDPRMCSLMQGSTLPRRSGA
MDPRMFSLAQGSTNPRRSGA

SEQ ID NO: 101402 - protein, 20 aa, Artificial Sequence
  Description of Artificial Sequence: Synthetic peptide
  Seed: MDPRMCSLMQGSTLPRRSGA
MDPRMFSLAQGSTSPRRSGA

SEQ ID NO: 101403 - protein, 20 aa, Artificial Sequence
  Description of Artificial Sequence: Synthetic peptide
  Seed: MDPRMCSLMQGSTLPRRSGA
MDPRMFSLAQGSTTPRRSGA

SEQ ID NO: 101404 - protein, 20 aa, Artificial Sequence
  Description of Artificial Sequence: Synthetic peptide
  Seed: MDPRMCSLMQGSTLPRRSGA
MDPRMFSLAQGSTVPRRSGA

SEQ ID NO: 101405 - protein, 20 aa, Artificial Sequence
  Description of Artificial Sequence: Synthetic peptide
  Seed: MDPRMCSLMQGSTLPRRSGA
MDPRMFSLAQISTAPRRSGA

SEQ ID NO: 101406 - protein, 20 aa, Artificial Sequence
  Description of Artificial Sequence: Synthetic peptide
  Seed: MDPRMCSLMQGSTLPRRSGA
MDPRMFSLAQISTGPRRSGA

SEQ ID NO: 101407 - protein, 20 aa, Artificial Sequence
  Description of Artificial Sequence: Synthetic peptide
  Seed: MDPRMCSLMQGSTLPRRSGA
MDPRMFSLAQISTHPRRSGA

SEQ ID NO: 101408 - protein, 20 aa, Artificial Sequence
  Description of Artificial Sequence: Synthetic peptide
  Seed: MDPRMCSLMQGSTLPRRSGA
MDPRMFSLAQISTIPRRSGA

SEQ ID NO: 101409 - protein, 20 aa, Artificial Sequence
  Description of Artificial Sequence: Synthetic peptide
  Seed: MDPRMCSLMQGSTLPRRSGA
MDPRMFSLAQISTLPRRSGA

SEQ ID NO: 101410 - protein, 20 aa, Artificial Sequence
  Description of Artificial Sequence: Synthetic peptide
  Seed: MDPRMCSLMQGSTLPRRSGA
MDPRMFSLAQISTMPRRSGA

SEQ ID NO: 101411 - protein, 20 aa, Artificial Sequence
  Description of Artificial Sequence: Synthetic peptide
  Seed: MDPRMCSLMQGSTLPRRSGA
MDPRMFSLAQISTNPRRSGA

SEQ ID NO: 101412 - protein, 20 aa, Artificial Sequence
  Description of Artificial Sequence: Synthetic peptide
  Seed: MDPRMCSLMQGSTLPRRSGA
MDPRMFSLAQISTQPRRSGA

SEQ ID NO: 101413 - protein, 20 aa, Artificial Sequence
  Description of Artificial Sequence: Synthetic peptide
  Seed: MDPRMCSLMQGSTLPRRSGA
MDPRMFSLAQISTSPRRSGA

SEQ ID NO: 101414 - protein, 20 aa, Artificial Sequence
  Description of Artificial Sequence: Synthetic peptide
  Seed: MDPRMCSLMQGSTLPRRSGA
MDPRMFSLAQISTTPRRSGA

SEQ ID NO: 101415 - protein, 20 aa, Artificial Sequence
  Description of Artificial Sequence: Synthetic peptide
  Seed: MDPRMCSLMQGSTLPRRSGA
MDPRMFSLAQISTVPRRSGA

SEQ ID NO: 101416 - protein, 20 aa, Artificial Sequence
  Description of Artificial Sequence: Synthetic peptide
  Seed: MDPRMCSLMQGSTLPRRSGA
MDPRMFSLAQLSTAPRRSGA

SEQ ID NO: 101417 - protein, 20 aa, Artificial Sequence
  Description of Artificial Sequence: Synthetic peptide
  Seed: MDPRMCSLMQGSTLPRRSGA
MDPRMFSLAQLSTIPRRSGA

SEQ ID NO: 101418 - protein, 20 aa, Artificial Sequence
  Description of Artificial Sequence: Synthetic peptide
  Seed: MDPRMCSLMQGSTLPRRSGA
MDPRMFSLAQLSTLPRRSGA

SEQ ID NO: 101419 - protein, 20 aa, Artificial Sequence
  Description of Artificial Sequence: Synthetic peptide
  Seed: MDPRMCSLMQGSTLPRRSGA
MDPRMFSLAQLSTMPRRSGA

SEQ ID NO: 101420 - protein, 20 aa, Artificial Sequence
  Description of Artificial Sequence: Synthetic peptide
  Seed: MDPRMCSLMQGSTLPRRSGA
MDPRMFSLAQLSTNPRRSGA

SEQ ID NO: 101421 - protein, 20 aa, Artificial Sequence
  Description of Artificial Sequence: Synthetic peptide
  Seed: MDPRMCSLMQGSTLPRRSGA
MDPRMFSLAQLSTSPRRSGA

SEQ ID NO: 101422 - protein, 20 aa, Artificial Sequence
  Description of Artificial Sequence: Synthetic peptide
  Seed: MDPRMCSLMQGSTLPRRSGA
MDPRMFSLAQLSTTPRRSGA

SEQ ID NO: 101423 - protein, 20 aa, Artificial Sequence
  Description of Artificial Sequence: Synthetic peptide
  Seed: MDPRMCSLMQGSTLPRRSGA
MDPRMFSLAQLSTVPRRSGA

SEQ ID NO: 101424 - protein, 20 aa, Artificial Sequence
  Description of Artificial Sequence: Synthetic peptide
  Seed: MDPRMCSLMQGSTLPRRSGA
MDPRMFSLAQMSTAPRRSGA

SEQ ID NO: 101425 - protein, 20 aa, Artificial Sequence
  Description of Artificial Sequence: Synthetic peptide
  Seed: MDPRMCSLMQGSTLPRRSGA
MDPRMFSLAQMSTIPRRSGA

SEQ ID NO: 101426 - protein, 20 aa, Artificial Sequence
  Description of Artificial Sequence: Synthetic peptide
  Seed: MDPRMCSLMQGSTLPRRSGA
MDPRMFSLAQMSTLPRRSGA

SEQ ID NO: 101427 - protein, 20 aa, Artificial Sequence
  Description of Artificial Sequence: Synthetic peptide
  Seed: MDPRMCSLMQGSTLPRRSGA
MDPRMFSLAQMSTNPRRSGA

SEQ ID NO: 101428 - protein, 20 aa, Artificial Sequence
  Description of Artificial Sequence: Synthetic peptide
  Seed: MDPRMCSLMQGSTLPRRSGA
MDPRMFSLAQMSTSPRRSGA

SEQ ID NO: 101429 - protein, 20 aa, Artificial Sequence
  Description of Artificial Sequence: Synthetic peptide
  Seed: MDPRMCSLMQGSTLPRRSGA
MDPRMFSLAQMSTVPRRSGA

SEQ ID NO: 101430 - protein, 20 aa, Artificial Sequence
  Description of Artificial Sequence: Synthetic peptide
  Seed: MDPRMCSLMQGSTLPRRSGA
MDPRMFSLAQNSTAPRRSGA

SEQ ID NO: 101431 - protein, 20 aa, Artificial Sequence
  Description of Artificial Sequence: Synthetic peptide
  Seed: MDPRMCSLMQGSTLPRRSGA
MDPRMFSLAQNSTGPRRSGA

SEQ ID NO: 101432 - protein, 20 aa, Artificial Sequence
  Description of Artificial Sequence: Synthetic peptide
  Seed: MDPRMCSLMQGSTLPRRSGA
MDPRMFSLAQNSTIPRRSGA

SEQ ID NO: 101433 - protein, 20 aa, Artificial Sequence
  Description of Artificial Sequence: Synthetic peptide
  Seed: MDPRMCSLMQGSTLPRRSGA
MDPRMFSLAQNSTLPRRSGA

SEQ ID NO: 101434 - protein, 20 aa, Artificial Sequence
  Description of Artificial Sequence: Synthetic peptide
  Seed: MDPRMCSLMQGSTLPRRSGA
MDPRMFSLAQNSTMPRRSGA

SEQ ID NO: 101435 - protein, 20 aa, Artificial Sequence
  Description of Artificial Sequence: Synthetic peptide
  Seed: MDPRMCSLMQGSTLPRRSGA
MDPRMFSLAQNSTNPRRSGA

SEQ ID NO: 101436 - protein, 20 aa, Artificial Sequence
  Description of Artificial Sequence: Synthetic peptide
  Seed: MDPRMCSLMQGSTLPRRSGA
MDPRMFSLAQNSTSPRRSGA

SEQ ID NO: 101437 - protein, 20 aa, Artificial Sequence
  Description of Artificial Sequence: Synthetic peptide
  Seed: MDPRMCSLMQGSTLPRRSGA
MDPRMFSLAQNSTTPRRSGA

SEQ ID NO: 101438 - protein, 20 aa, Artificial Sequence
  Description of Artificial Sequence: Synthetic peptide
  Seed: MDPRMCSLMQGSTLPRRSGA
MDPRMFSLAQNSTVPRRSGA

SEQ ID NO: 101439 - protein, 20 aa, Artificial Sequence
  Description of Artificial Sequence: Synthetic peptide
  Seed: MDPRMCSLMQGSTLPRRSGA
MDPRMFSLAQPSTAPRRSGA

SEQ ID NO: 101440 - protein, 20 aa, Artificial Sequence
  Description of Artificial Sequence: Synthetic peptide
  Seed: MDPRMCSLMQGSTLPRRSGA
MDPRMFSLAQPSTFPRRSGA

SEQ ID NO: 101441 - protein, 20 aa, Artificial Sequence
  Description of Artificial Sequence: Synthetic peptide
  Seed: MDPRMCSLMQGSTLPRRSGA
MDPRMFSLAQPSTGPRRSGA

SEQ ID NO: 101442 - protein, 20 aa, Artificial Sequence
  Description of Artificial Sequence: Synthetic peptide
  Seed: MDPRMCSLMQGSTLPRRSGA
MDPRMFSLAQPSTHPRRSGA

SEQ ID NO: 101443 - protein, 20 aa, Artificial Sequence
  Description of Artificial Sequence: Synthetic peptide
  Seed: MDPRMCSLMQGSTLPRRSGA
MDPRMFSLAQPSTIPRRSGA

SEQ ID NO: 101444 - protein, 20 aa, Artificial Sequence
  Description of Artificial Sequence: Synthetic peptide
  Seed: MDPRMCSLMQGSTLPRRSGA
MDPRMFSLAQPSTLPRRSGA

SEQ ID NO: 101445 - protein, 20 aa, Artificial Sequence
  Description of Artificial Sequence: Synthetic peptide
  Seed: MDPRMCSLMQGSTLPRRSGA
MDPRMFSLAQPSTMPRRSGA

SEQ ID NO: 101446 - protein, 20 aa, Artificial Sequence
  Description of Artificial Sequence: Synthetic peptide
  Seed: MDPRMCSLMQGSTLPRRSGA
MDPRMFSLAQPSTNPRRSGA

SEQ ID NO: 101447 - protein, 20 aa, Artificial Sequence
  Description of Artificial Sequence: Synthetic peptide
  Seed: MDPRMCSLMQGSTLPRRSGA
MDPRMFSLAQPSTQPRRSGA

SEQ ID NO: 101448 - protein, 20 aa, Artificial Sequence
  Description of Artificial Sequence: Synthetic peptide
  Seed: MDPRMCSLMQGSTLPRRSGA
MDPRMFSLAQPSTSPRRSGA

SEQ ID NO: 101449 - protein, 20 aa, Artificial Sequence
  Description of Artificial Sequence: Synthetic peptide
  Seed: MDPRMCSLMQGSTLPRRSGA
MDPRMFSLAQPSTTPRRSGA

SEQ ID NO: 101450 - protein, 20 aa, Artificial Sequence
  Description of Artificial Sequence: Synthetic peptide
  Seed: MDPRMCSLMQGSTLPRRSGA
MDPRMFSLAQPSTVPRRSGA

SEQ ID NO: 101451 - protein, 20 aa, Artificial Sequence
  Description of Artificial Sequence: Synthetic peptide
  Seed: MDPRMCSLMQGSTLPRRSGA
MDPRMFSLAQSSTAPRRSGA

SEQ ID NO: 101452 - protein, 20 aa, Artificial Sequence
  Description of Artificial Sequence: Synthetic peptide
  Seed: MDPRMCSLMQGSTLPRRSGA
MDPRMFSLAQSSTFPRRSGA

SEQ ID NO: 101453 - protein, 20 aa, Artificial Sequence
  Description of Artificial Sequence: Synthetic peptide
  Seed: MDPRMCSLMQGSTLPRRSGA
MDPRMFSLAQSSTGPRRSGA

SEQ ID NO: 101454 - protein, 20 aa, Artificial Sequence
  Description of Artificial Sequence: Synthetic peptide
  Seed: MDPRMCSLMQGSTLPRRSGA
MDPRMFSLAQSSTHPRRSGA

SEQ ID NO: 101455 - protein, 20 aa, Artificial Sequence
  Description of Artificial Sequence: Synthetic peptide
  Seed: MDPRMCSLMQGSTLPRRSGA
MDPRMFSLAQSSTIPRRSGA

SEQ ID NO: 101456 - protein, 20 aa, Artificial Sequence
  Description of Artificial Sequence: Synthetic peptide
  Seed: MDPRMCSLMQGSTLPRRSGA
MDPRMFSLAQSSTLPRRSGA

SEQ ID NO: 101457 - protein, 20 aa, Artificial Sequence
  Description of Artificial Sequence: Synthetic peptide
  Seed: MDPRMCSLMQGSTLPRRSGA
MDPRMFSLAQSSTMPRRSGA

SEQ ID NO: 101458 - protein, 20 aa, Artificial Sequence
  Description of Artificial Sequence: Synthetic peptide
  Seed: MDPRMCSLMQGSTLPRRSGA
MDPRMFSLAQSSTNPRRSGA

SEQ ID NO: 101459 - protein, 20 aa, Artificial Sequence
  Description of Artificial Sequence: Synthetic peptide
  Seed: MDPRMCSLMQGSTLPRRSGA
MDPRMFSLAQSSTQPRRSGA

SEQ ID NO: 101460 - protein, 20 aa, Artificial Sequence
  Description of Artificial Sequence: Synthetic peptide
  Seed: MDPRMCSLMQGSTLPRRSGA
MDPRMFSLAQSSTSPRRSGA

SEQ ID NO: 101461 - protein, 20 aa, Artificial Sequence
  Description of Artificial Sequence: Synthetic peptide
  Seed: MDPRMCSLMQGSTLPRRSGA
MDPRMFSLAQSSTTPRRSGA

SEQ ID NO: 101462 - protein, 20 aa, Artificial Sequence
  Description of Artificial Sequence: Synthetic peptide
  Seed: MDPRMCSLMQGSTLPRRSGA
MDPRMFSLAQSSTVPRRSGA

SEQ ID NO: 101463 - protein, 20 aa, Artificial Sequence
  Description of Artificial Sequence: Synthetic peptide
  Seed: MDPRMCSLMQGSTLPRRSGA
MDPRMFSLAQTSTAPRRSGA

SEQ ID NO: 101464 - protein, 20 aa, Artificial Sequence
  Description of Artificial Sequence: Synthetic peptide
  Seed: MDPRMCSLMQGSTLPRRSGA
MDPRMFSLAQTSTGPRRSGA

SEQ ID NO: 101465 - protein, 20 aa, Artificial Sequence
  Description of Artificial Sequence: Synthetic peptide
  Seed: MDPRMCSLMQGSTLPRRSGA
MDPRMFSLAQTSTHPRRSGA

SEQ ID NO: 101466 - protein, 20 aa, Artificial Sequence
  Description of Artificial Sequence: Synthetic peptide
  Seed: MDPRMCSLMQGSTLPRRSGA
MDPRMFSLAQTSTIPRRSGA

SEQ ID NO: 101467 - protein, 20 aa, Artificial Sequence
  Description of Artificial Sequence: Synthetic peptide
  Seed: MDPRMCSLMQGSTLPRRSGA
MDPRMFSLAQTSTLPRRSGA

SEQ ID NO: 101468 - protein, 20 aa, Artificial Sequence
  Description of Artificial Sequence: Synthetic peptide
  Seed: MDPRMCSLMQGSTLPRRSGA
MDPRMFSLAQTSTMPRRSGA

SEQ ID NO: 101469 - protein, 20 aa, Artificial Sequence
  Description of Artificial Sequence: Synthetic peptide
  Seed: MDPRMCSLMQGSTLPRRSGA
MDPRMFSLAQTSTNPRRSGA

SEQ ID NO: 101470 - protein, 20 aa, Artificial Sequence
  Description of Artificial Sequence: Synthetic peptide
  Seed: MDPRMCSLMQGSTLPRRSGA
MDPRMFSLAQTSTQPRRSGA

SEQ ID NO: 101471 - protein, 20 aa, Artificial Sequence
  Description of Artificial Sequence: Synthetic peptide
  Seed: MDPRMCSLMQGSTLPRRSGA
MDPRMFSLAQTSTSPRRSGA

SEQ ID NO: 101472 - protein, 20 aa, Artificial Sequence
  Description of Artificial Sequence: Synthetic peptide
  Seed: MDPRMCSLMQGSTLPRRSGA
MDPRMFSLAQTSTTPRRSGA

SEQ ID NO: 101473 - protein, 20 aa, Artificial Sequence
  Description of Artificial Sequence: Synthetic peptide
  Seed: MDPRMCSLMQGSTLPRRSGA
MDPRMFSLAQTSTVPRRSGA

SEQ ID NO: 101474 - protein, 20 aa, Artificial Sequence
  Description of Artificial Sequence: Synthetic peptide
  Seed: MDPRMCSLMQGSTLPRRSGA
MDPRMFSLAQVSTAPRRSGA

SEQ ID NO: 101475 - protein, 20 aa, Artificial Sequence
  Description of Artificial Sequence: Synthetic peptide
  Seed: MDPRMCSLMQGSTLPRRSGA
MDPRMFSLAQVSTDPRRSGA

SEQ ID NO: 101476 - protein, 20 aa, Artificial Sequence
  Description of Artificial Sequence: Synthetic peptide
  Seed: MDPRMCSLMQGSTLPRRSGA
MDPRMFSLAQVSTGPRRSGA

SEQ ID NO: 101477 - protein, 20 aa, Artificial Sequence
  Description of Artificial Sequence: Synthetic peptide
  Seed: MDPRMCSLMQGSTLPRRSGA
MDPRMFSLAQVSTHPRRSGA

SEQ ID NO: 101478 - protein, 20 aa, Artificial Sequence
  Description of Artificial Sequence: Synthetic peptide
  Seed: MDPRMCSLMQGSTLPRRSGA
MDPRMFSLAQVSTIPRRSGA

SEQ ID NO: 101479 - protein, 20 aa, Artificial Sequence
  Description of Artificial Sequence: Synthetic peptide
  Seed: MDPRMCSLMQGSTLPRRSGA
MDPRMFSLAQVSTLPRRSGA

SEQ ID NO: 101480 - protein, 20 aa, Artificial Sequence
  Description of Artificial Sequence: Synthetic peptide
  Seed: MDPRMCSLMQGSTLPRRSGA
MDPRMFSLAQVSTMPRRSGA

SEQ ID NO: 101481 - protein, 20 aa, Artificial Sequence
  Description of Artificial Sequence: Synthetic peptide
  Seed: MDPRMCSLMQGSTLPRRSGA
MDPRMFSLAQVSTNPRRSGA

SEQ ID NO: 101482 - protein, 20 aa, Artificial Sequence
  Description of Artificial Sequence: Synthetic peptide
  Seed: MDPRMCSLMQGSTLPRRSGA
MDPRMFSLAQVSTQPRRSGA

SEQ ID NO: 101483 - protein, 20 aa, Artificial Sequence
  Description of Artificial Sequence: Synthetic peptide
  Seed: MDPRMCSLMQGSTLPRRSGA
MDPRMFSLAQVSTSPRRSGA

SEQ ID NO: 101484 - protein, 20 aa, Artificial Sequence
  Description of Artificial Sequence: Synthetic peptide
  Seed: MDPRMCSLMQGSTLPRRSGA
MDPRMFSLAQVSTTPRRSGA

SEQ ID NO: 101485 - protein, 20 aa, Artificial Sequence
  Description of Artificial Sequence: Synthetic peptide
  Seed: MDPRMCSLMQGSTLPRRSGA
MDPRMFSLAQVSTVPRRSGA

SEQ ID NO: 101486 - protein, 20 aa, Artificial Sequence
  Description of Artificial Sequence: Synthetic peptide
  Seed: MDPRMCSLMQGSTLPRRSGA
MDPRMFSLCQASTAPRRSGA

SEQ ID NO: 101487 - protein, 20 aa, Artificial Sequence
  Description of Artificial Sequence: Synthetic peptide
  Seed: MDPRMCSLMQGSTLPRRSGA
MDPRMFSLCQASTIPRRSGA

SEQ ID NO: 101488 - protein, 20 aa, Artificial Sequence
  Description of Artificial Sequence: Synthetic peptide
  Seed: MDPRMCSLMQGSTLPRRSGA
MDPRMFSLCQASTLPRRSGA

SEQ ID NO: 101489 - protein, 20 aa, Artificial Sequence
  Description of Artificial Sequence: Synthetic peptide
  Seed: MDPRMCSLMQGSTLPRRSGA
MDPRMFSLCQASTVPRRSGA

SEQ ID NO: 101490 - protein, 20 aa, Artificial Sequence
  Description of Artificial Sequence: Synthetic peptide
  Seed: MDPRMCSLMQGSTLPRRSGA
MDPRMFSLCQGSTLPRRSGA

SEQ ID NO: 101491 - protein, 20 aa, Artificial Sequence
  Description of Artificial Sequence: Synthetic peptide
  Seed: MDPRMCSLMQGSTLPRRSGA
MDPRMFSLCQGSTVPRRSGA

SEQ ID NO: 101492 - protein, 20 aa, Artificial Sequence
  Description of Artificial Sequence: Synthetic peptide
  Seed: MDPRMCSLMQGSTLPRRSGA
MDPRMFSLCQSSTVPRRSGA

SEQ ID NO: 101493 - protein, 20 aa, Artificial Sequence
  Description of Artificial Sequence: Synthetic peptide
  Seed: MDPRMCSLMQGSTLPRRSGA
MDPRMFSLEQASTAPRRSGA

SEQ ID NO: 101494 - protein, 20 aa, Artificial Sequence
  Description of Artificial Sequence: Synthetic peptide
  Seed: MDPRMCSLMQGSTLPRRSGA
MDPRMFSLEQASTIPRRSGA

SEQ ID NO: 101495 - protein, 20 aa, Artificial Sequence
  Description of Artificial Sequence: Synthetic peptide
  Seed: MDPRMCSLMQGSTLPRRSGA
MDPRMFSLEQASTLPRRSGA

SEQ ID NO: 101496 - protein, 20 aa, Artificial Sequence
  Description of Artificial Sequence: Synthetic peptide
  Seed: MDPRMCSLMQGSTLPRRSGA
MDPRMFSLEQASTMPRRSGA

SEQ ID NO: 101497 - protein, 20 aa, Artificial Sequence
  Description of Artificial Sequence: Synthetic peptide
  Seed: MDPRMCSLMQGSTLPRRSGA
MDPRMFSLEQASTNPRRSGA

SEQ ID NO: 101498 - protein, 20 aa, Artificial Sequence
  Description of Artificial Sequence: Synthetic peptide
  Seed: MDPRMCSLMQGSTLPRRSGA
MDPRMFSLEQASTSPRRSGA

SEQ ID NO: 101499 - protein, 20 aa, Artificial Sequence
  Description of Artificial Sequence: Synthetic peptide
  Seed: MDPRMCSLMQGSTLPRRSGA
MDPRMFSLEQASTTPRRSGA

SEQ ID NO: 101500 - protein, 20 aa, Artificial Sequence
  Description of Artificial Sequence: Synthetic peptide
  Seed: MDPRMCSLMQGSTLPRRSGA
MDPRMFSLEQASTVPRRSGA

SEQ ID NO: 101501 - protein, 20 aa, Artificial Sequence
  Description of Artificial Sequence: Synthetic peptide
  Seed: MDPRMCSLMQGSTLPRRSGA
MDPRMFSLEQGSTAPRRSGA

SEQ ID NO: 101502 - protein, 20 aa, Artificial Sequence
  Description of Artificial Sequence: Synthetic peptide
  Seed: MDPRMCSLMQGSTLPRRSGA
MDPRMFSLEQGSTIPRRSGA

SEQ ID NO: 101503 - protein, 20 aa, Artificial Sequence
  Description of Artificial Sequence: Synthetic peptide
  Seed: MDPRMCSLMQGSTLPRRSGA
MDPRMFSLEQGSTLPRRSGA

SEQ ID NO: 101504 - protein, 20 aa, Artificial Sequence
  Description of Artificial Sequence: Synthetic peptide
  Seed: MDPRMCSLMQGSTLPRRSGA
MDPRMFSLEQGSTMPRRSGA

SEQ ID NO: 101505 - protein, 20 aa, Artificial Sequence
  Description of Artificial Sequence: Synthetic peptide
  Seed: MDPRMCSLMQGSTLPRRSGA
MDPRMFSLEQGSTVPRRSGA

SEQ ID NO: 101506 - protein, 20 aa, Artificial Sequence
  Description of Artificial Sequence: Synthetic peptide
  Seed: MDPRMCSLMQGSTLPRRSGA
MDPRMFSLEQPSTAPRRSGA

SEQ ID NO: 101507 - protein, 20 aa, Artificial Sequence
  Description of Artificial Sequence: Synthetic peptide
  Seed: MDPRMCSLMQGSTLPRRSGA
MDPRMFSLEQPSTIPRRSGA

SEQ ID NO: 101508 - protein, 20 aa, Artificial Sequence
  Description of Artificial Sequence: Synthetic peptide
  Seed: MDPRMCSLMQGSTLPRRSGA
MDPRMFSLEQPSTLPRRSGA

SEQ ID NO: 101509 - protein, 20 aa, Artificial Sequence
  Description of Artificial Sequence: Synthetic peptide
  Seed: MDPRMCSLMQGSTLPRRSGA
MDPRMFSLEQPSTVPRRSGA

SEQ ID NO: 101510 - protein, 20 aa, Artificial Sequence
  Description of Artificial Sequence: Synthetic peptide
  Seed: MDPRMCSLMQGSTLPRRSGA
MDPRMFSLEQSSTAPRRSGA

SEQ ID NO: 101511 - protein, 20 aa, Artificial Sequence
  Description of Artificial Sequence: Synthetic peptide
  Seed: MDPRMCSLMQGSTLPRRSGA
MDPRMFSLEQSSTIPRRSGA

SEQ ID NO: 101512 - protein, 20 aa, Artificial Sequence
  Description of Artificial Sequence: Synthetic peptide
  Seed: MDPRMCSLMQGSTLPRRSGA
MDPRMFSLEQSSTLPRRSGA

SEQ ID NO: 101513 - protein, 20 aa, Artificial Sequence
  Description of Artificial Sequence: Synthetic peptide
  Seed: MDPRMCSLMQGSTLPRRSGA
MDPRMFSLEQSSTSPRRSGA

SEQ ID NO: 101514 - protein, 20 aa, Artificial Sequence
  Description of Artificial Sequence: Synthetic peptide
  Seed: MDPRMCSLMQGSTLPRRSGA
MDPRMFSLEQSSTVPRRSGA

SEQ ID NO: 101515 - protein, 20 aa, Artificial Sequence
  Description of Artificial Sequence: Synthetic peptide
  Seed: MDPRMCSLMQGSTLPRRSGA
MDPRMFSLEQVSTAPRRSGA

SEQ ID NO: 101516 - protein, 20 aa, Artificial Sequence
  Description of Artificial Sequence: Synthetic peptide
  Seed: MDPRMCSLMQGSTLPRRSGA
MDPRMFSLEQVSTNPRRSGA

SEQ ID NO: 101517 - protein, 20 aa, Artificial Sequence
  Description of Artificial Sequence: Synthetic peptide
  Seed: MDPRMCSLMQGSTLPRRSGA
MDPRMFSLEQVSTSPRRSGA

SEQ ID NO: 101518 - protein, 20 aa, Artificial Sequence
  Description of Artificial Sequence: Synthetic peptide
  Seed: MDPRMCSLMQGSTLPRRSGA
MDPRMFSLFQASTAPRRSGA

SEQ ID NO: 101519 - protein, 20 aa, Artificial Sequence
  Description of Artificial Sequence: Synthetic peptide
  Seed: MDPRMCSLMQGSTLPRRSGA
MDPRMFSLFQASTGPRRSGA

SEQ ID NO: 101520 - protein, 20 aa, Artificial Sequence
  Description of Artificial Sequence: Synthetic peptide
  Seed: MDPRMCSLMQGSTLPRRSGA
MDPRMFSLFQASTHPRRSGA

SEQ ID NO: 101521 - protein, 20 aa, Artificial Sequence
  Description of Artificial Sequence: Synthetic peptide
  Seed: MDPRMCSLMQGSTLPRRSGA
MDPRMFSLFQASTIPRRSGA

SEQ ID NO: 101522 - protein, 20 aa, Artificial Sequence
  Description of Artificial Sequence: Synthetic peptide
  Seed: MDPRMCSLMQGSTLPRRSGA
MDPRMFSLFQASTLPRRSGA

SEQ ID NO: 101523 - protein, 20 aa, Artificial Sequence
  Description of Artificial Sequence: Synthetic peptide
  Seed: MDPRMCSLMQGSTLPRRSGA
MDPRMFSLFQASTMPRRSGA

SEQ ID NO: 101524 - protein, 20 aa, Artificial Sequence
  Description of Artificial Sequence: Synthetic peptide
  Seed: MDPRMCSLMQGSTLPRRSGA
MDPRMFSLFQASTNPRRSGA

SEQ ID NO: 101525 - protein, 20 aa, Artificial Sequence
  Description of Artificial Sequence: Synthetic peptide
  Seed: MDPRMCSLMQGSTLPRRSGA
MDPRMFSLFQASTSPRRSGA

SEQ ID NO: 101526 - protein, 20 aa, Artificial Sequence
  Description of Artificial Sequence: Synthetic peptide
  Seed: MDPRMCSLMQGSTLPRRSGA
MDPRMFSLFQASTTPRRSGA

SEQ ID NO: 101527 - protein, 20 aa, Artificial Sequence
  Description of Artificial Sequence: Synthetic peptide
  Seed: MDPRMCSLMQGSTLPRRSGA
MDPRMFSLFQASTVPRRSGA

SEQ ID NO: 101528 - protein, 20 aa, Artificial Sequence
  Description of Artificial Sequence: Synthetic peptide
  Seed: MDPRMCSLMQGSTLPRRSGA
MDPRMFSLFQGSTAPRRSGA

SEQ ID NO: 101529 - protein, 20 aa, Artificial Sequence
  Description of Artificial Sequence: Synthetic peptide
  Seed: MDPRMCSLMQGSTLPRRSGA
MDPRMFSLFQGSTIPRRSGA

SEQ ID NO: 101530 - protein, 20 aa, Artificial Sequence
  Description of Artificial Sequence: Synthetic peptide
  Seed: MDPRMCSLMQGSTLPRRSGA
MDPRMFSLFQGSTLPRRSGA

SEQ ID NO: 101531 - protein, 20 aa, Artificial Sequence
  Description of Artificial Sequence: Synthetic peptide
  Seed: MDPRMCSLMQGSTLPRRSGA
MDPRMFSLFQGSTVPRRSGA

SEQ ID NO: 101532 - protein, 20 aa, Artificial Sequence
  Description of Artificial Sequence: Synthetic peptide
  Seed: MDPRMCSLMQGSTLPRRSGA
MDPRMFSLFQISTAPRRSGA

SEQ ID NO: 101533 - protein, 20 aa, Artificial Sequence
  Description of Artificial Sequence: Synthetic peptide
  Seed: MDPRMCSLMQGSTLPRRSGA
MDPRMFSLFQISTNPRRSGA

SEQ ID NO: 101534 - protein, 20 aa, Artificial Sequence
  Description of Artificial Sequence: Synthetic peptide
  Seed: MDPRMCSLMQGSTLPRRSGA
MDPRMFSLFQISTSPRRSGA

SEQ ID NO: 101535 - protein, 20 aa, Artificial Sequence
  Description of Artificial Sequence: Synthetic peptide
  Seed: MDPRMCSLMQGSTLPRRSGA
MDPRMFSLFQNSTIPRRSGA

SEQ ID NO: 101536 - protein, 20 aa, Artificial Sequence
  Description of Artificial Sequence: Synthetic peptide
  Seed: MDPRMCSLMQGSTLPRRSGA
MDPRMFSLFQNSTLPRRSGA

SEQ ID NO: 101537 - protein, 20 aa, Artificial Sequence
  Description of Artificial Sequence: Synthetic peptide
  Seed: MDPRMCSLMQGSTLPRRSGA
MDPRMFSLFQNSTVPRRSGA

SEQ ID NO: 101538 - protein, 20 aa, Artificial Sequence
  Description of Artificial Sequence: Synthetic peptide
  Seed: MDPRMCSLMQGSTLPRRSGA
MDPRMFSLFQPSTAPRRSGA

SEQ ID NO: 101539 - protein, 20 aa, Artificial Sequence
  Description of Artificial Sequence: Synthetic peptide
  Seed: MDPRMCSLMQGSTLPRRSGA
MDPRMFSLFQPSTGPRRSGA

SEQ ID NO: 101540 - protein, 20 aa, Artificial Sequence
  Description of Artificial Sequence: Synthetic peptide
  Seed: MDPRMCSLMQGSTLPRRSGA
MDPRMFSLFQPSTIPRRSGA

SEQ ID NO: 101541 - protein, 20 aa, Artificial Sequence
  Description of Artificial Sequence: Synthetic peptide
  Seed: MDPRMCSLMQGSTLPRRSGA
MDPRMFSLFQPSTLPRRSGA

SEQ ID NO: 101542 - protein, 20 aa, Artificial Sequence
  Description of Artificial Sequence: Synthetic peptide
  Seed: MDPRMCSLMQGSTLPRRSGA
MDPRMFSLFQPSTNPRRSGA

SEQ ID NO: 101543 - protein, 20 aa, Artificial Sequence
  Description of Artificial Sequence: Synthetic peptide
  Seed: MDPRMCSLMQGSTLPRRSGA
MDPRMFSLFQPSTSPRRSGA

SEQ ID NO: 101544 - protein, 20 aa, Artificial Sequence
  Description of Artificial Sequence: Synthetic peptide
  Seed: MDPRMCSLMQGSTLPRRSGA
MDPRMFSLFQPSTTPRRSGA

SEQ ID NO: 101545 - protein, 20 aa, Artificial Sequence
  Description of Artificial Sequence: Synthetic peptide
  Seed: MDPRMCSLMQGSTLPRRSGA
MDPRMFSLFQPSTVPRRSGA

SEQ ID NO: 101546 - protein, 20 aa, Artificial Sequence
  Description of Artificial Sequence: Synthetic peptide
  Seed: MDPRMCSLMQGSTLPRRSGA
MDPRMFSLFQSSTAPRRSGA

SEQ ID NO: 101547 - protein, 20 aa, Artificial Sequence
  Description of Artificial Sequence: Synthetic peptide
  Seed: MDPRMCSLMQGSTLPRRSGA
MDPRMFSLFQSSTIPRRSGA

SEQ ID NO: 101548 - protein, 20 aa, Artificial Sequence
  Description of Artificial Sequence: Synthetic peptide
  Seed: MDPRMCSLMQGSTLPRRSGA
MDPRMFSLFQSSTLPRRSGA

SEQ ID NO: 101549 - protein, 20 aa, Artificial Sequence
  Description of Artificial Sequence: Synthetic peptide
  Seed: MDPRMCSLMQGSTLPRRSGA
MDPRMFSLFQSSTMPRRSGA

SEQ ID NO: 101550 - protein, 20 aa, Artificial Sequence
  Description of Artificial Sequence: Synthetic peptide
  Seed: MDPRMCSLMQGSTLPRRSGA
MDPRMFSLFQSSTNPRRSGA

SEQ ID NO: 101551 - protein, 20 aa, Artificial Sequence
  Description of Artificial Sequence: Synthetic peptide
  Seed: MDPRMCSLMQGSTLPRRSGA
MDPRMFSLFQSSTSPRRSGA

SEQ ID NO: 101552 - protein, 20 aa, Artificial Sequence
  Description of Artificial Sequence: Synthetic peptide
  Seed: MDPRMCSLMQGSTLPRRSGA
MDPRMFSLFQSSTTPRRSGA

SEQ ID NO: 101553 - protein, 20 aa, Artificial Sequence
  Description of Artificial Sequence: Synthetic peptide
  Seed: MDPRMCSLMQGSTLPRRSGA
MDPRMFSLFQSSTVPRRSGA

SEQ ID NO: 101554 - protein, 20 aa, Artificial Sequence
  Description of Artificial Sequence: Synthetic peptide
  Seed: MDPRMCSLMQGSTLPRRSGA
MDPRMFSLFQTSTAPRRSGA

SEQ ID NO: 101555 - protein, 20 aa, Artificial Sequence
  Description of Artificial Sequence: Synthetic peptide
  Seed: MDPRMCSLMQGSTLPRRSGA
MDPRMFSLFQTSTNPRRSGA

SEQ ID NO: 101556 - protein, 20 aa, Artificial Sequence
  Description of Artificial Sequence: Synthetic peptide
  Seed: MDPRMCSLMQGSTLPRRSGA
MDPRMFSLFQTSTSPRRSGA

SEQ ID NO: 101557 - protein, 20 aa, Artificial Sequence
  Description of Artificial Sequence: Synthetic peptide
  Seed: MDPRMCSLMQGSTLPRRSGA
MDPRMFSLFQTSTTPRRSGA

SEQ ID NO: 101558 - protein, 20 aa, Artificial Sequence
  Description of Artificial Sequence: Synthetic peptide
  Seed: MDPRMCSLMQGSTLPRRSGA
MDPRMFSLFQTSTVPRRSGA

SEQ ID NO: 101559 - protein, 20 aa, Artificial Sequence
  Description of Artificial Sequence: Synthetic peptide
  Seed: MDPRMCSLMQGSTLPRRSGA
MDPRMFSLFQVSTAPRRSGA

SEQ ID NO: 101560 - protein, 20 aa, Artificial Sequence
  Description of Artificial Sequence: Synthetic peptide
  Seed: MDPRMCSLMQGSTLPRRSGA
MDPRMFSLFQVSTNPRRSGA

SEQ ID NO: 101561 - protein, 20 aa, Artificial Sequence
  Description of Artificial Sequence: Synthetic peptide
  Seed: MDPRMCSLMQGSTLPRRSGA
MDPRMFSLFQVSTSPRRSGA

SEQ ID NO: 101562 - protein, 20 aa, Artificial Sequence
  Description of Artificial Sequence: Synthetic peptide
  Seed: MDPRMCSLMQGSTLPRRSGA
MDPRMFSLFQVSTTPRRSGA

SEQ ID NO: 101563 - protein, 20 aa, Artificial Sequence
  Description of Artificial Sequence: Synthetic peptide
  Seed: MDPRMCSLMQGSTLPRRSGA
MDPRMFSLFQVSTVPRRSGA

SEQ ID NO: 101564 - protein, 20 aa, Artificial Sequence
  Description of Artificial Sequence: Synthetic peptide
  Seed: MDPRMCSLMQGSTLPRRSGA
MDPRMFSLGQASTAPRRSGA

SEQ ID NO: 101565 - protein, 20 aa, Artificial Sequence
  Description of Artificial Sequence: Synthetic peptide
  Seed: MDPRMCSLMQGSTLPRRSGA
MDPRMFSLGQASTIPRRSGA

SEQ ID NO: 101566 - protein, 20 aa, Artificial Sequence
  Description of Artificial Sequence: Synthetic peptide
  Seed: MDPRMCSLMQGSTLPRRSGA
MDPRMFSLGQASTLPRRSGA

SEQ ID NO: 101567 - protein, 20 aa, Artificial Sequence
  Description of Artificial Sequence: Synthetic peptide
  Seed: MDPRMCSLMQGSTLPRRSGA
MDPRMFSLGQASTMPRRSGA

SEQ ID NO: 101568 - protein, 20 aa, Artificial Sequence
  Description of Artificial Sequence: Synthetic peptide
  Seed: MDPRMCSLMQGSTLPRRSGA
MDPRMFSLGQASTTPRRSGA

SEQ ID NO: 101569 - protein, 20 aa, Artificial Sequence
  Description of Artificial Sequence: Synthetic peptide
  Seed: MDPRMCSLMQGSTLPRRSGA
MDPRMFSLGQASTVPRRSGA

SEQ ID NO: 101570 - protein, 20 aa, Artificial Sequence
  Description of Artificial Sequence: Synthetic peptide
  Seed: MDPRMCSLMQGSTLPRRSGA
MDPRMFSLGQGSTAPRRSGA

SEQ ID NO: 101571 - protein, 20 aa, Artificial Sequence
  Description of Artificial Sequence: Synthetic peptide
  Seed: MDPRMCSLMQGSTLPRRSGA
MDPRMFSLGQGSTIPRRSGA

SEQ ID NO: 101572 - protein, 20 aa, Artificial Sequence
  Description of Artificial Sequence: Synthetic peptide
  Seed: MDPRMCSLMQGSTLPRRSGA
MDPRMFSLGQGSTLPRRSGA

SEQ ID NO: 101573 - protein, 20 aa, Artificial Sequence
  Description of Artificial Sequence: Synthetic peptide
  Seed: MDPRMCSLMQGSTLPRRSGA
MDPRMFSLGQGSTVPRRSGA

SEQ ID NO: 101574 - protein, 20 aa, Artificial Sequence
  Description of Artificial Sequence: Synthetic peptide
  Seed: MDPRMCSLMQGSTLPRRSGA
MDPRMFSLGQPSTIPRRSGA

SEQ ID NO: 101575 - protein, 20 aa, Artificial Sequence
  Description of Artificial Sequence: Synthetic peptide
  Seed: MDPRMCSLMQGSTLPRRSGA
MDPRMFSLGQPSTLPRRSGA

SEQ ID NO: 101576 - protein, 20 aa, Artificial Sequence
  Description of Artificial Sequence: Synthetic peptide
  Seed: MDPRMCSLMQGSTLPRRSGA
MDPRMFSLGQPSTVPRRSGA

SEQ ID NO: 101577 - protein, 20 aa, Artificial Sequence
  Description of Artificial Sequence: Synthetic peptide
  Seed: MDPRMCSLMQGSTLPRRSGA
MDPRMFSLGQSSTAPRRSGA

SEQ ID NO: 101578 - protein, 20 aa, Artificial Sequence
  Description of Artificial Sequence: Synthetic peptide
  Seed: MDPRMCSLMQGSTLPRRSGA
MDPRMFSLGQSSTIPRRSGA

SEQ ID NO: 101579 - protein, 20 aa, Artificial Sequence
  Description of Artificial Sequence: Synthetic peptide
  Seed: MDPRMCSLMQGSTLPRRSGA
MDPRMFSLGQSSTLPRRSGA

SEQ ID NO: 101580 - protein, 20 aa, Artificial Sequence
  Description of Artificial Sequence: Synthetic peptide
  Seed: MDPRMCSLMQGSTLPRRSGA
MDPRMFSLGQSSTVPRRSGA

SEQ ID NO: 101581 - protein, 20 aa, Artificial Sequence
  Description of Artificial Sequence: Synthetic peptide
  Seed: MDPRMCSLMQGSTLPRRSGA
MDPRMFSLHQASTAPRRSGA

SEQ ID NO: 101582 - protein, 20 aa, Artificial Sequence
  Description of Artificial Sequence: Synthetic peptide
  Seed: MDPRMCSLMQGSTLPRRSGA
MDPRMFSLHQASTIPRRSGA

SEQ ID NO: 101583 - protein, 20 aa, Artificial Sequence
  Description of Artificial Sequence: Synthetic peptide
  Seed: MDPRMCSLMQGSTLPRRSGA
MDPRMFSLHQASTLPRRSGA

SEQ ID NO: 101584 - protein, 20 aa, Artificial Sequence
  Description of Artificial Sequence: Synthetic peptide
  Seed: MDPRMCSLMQGSTLPRRSGA
MDPRMFSLHQASTVPRRSGA

SEQ ID NO: 101585 - protein, 20 aa, Artificial Sequence
  Description of Artificial Sequence: Synthetic peptide
  Seed: MDPRMCSLMQGSTLPRRSGA
MDPRMFSLHQGSTIPRRSGA

SEQ ID NO: 101586 - protein, 20 aa, Artificial Sequence
  Description of Artificial Sequence: Synthetic peptide
  Seed: MDPRMCSLMQGSTLPRRSGA
MDPRMFSLHQGSTLPRRSGA

SEQ ID NO: 101587 - protein, 20 aa, Artificial Sequence
  Description of Artificial Sequence: Synthetic peptide
  Seed: MDPRMCSLMQGSTLPRRSGA
MDPRMFSLHQGSTVPRRSGA

SEQ ID NO: 101588 - protein, 20 aa, Artificial Sequence
  Description of Artificial Sequence: Synthetic peptide
  Seed: MDPRMCSLMQGSTLPRRSGA
MDPRMFSLHQSSTIPRRSGA

SEQ ID NO: 101589 - protein, 20 aa, Artificial Sequence
  Description of Artificial Sequence: Synthetic peptide
  Seed: MDPRMCSLMQGSTLPRRSGA
MDPRMFSLHQSSTLPRRSGA

SEQ ID NO: 101590 - protein, 20 aa, Artificial Sequence
  Description of Artificial Sequence: Synthetic peptide
  Seed: MDPRMCSLMQGSTLPRRSGA
MDPRMFSLHQSSTVPRRSGA

SEQ ID NO: 101591 - protein, 20 aa, Artificial Sequence
  Description of Artificial Sequence: Synthetic peptide
  Seed: MDPRMCSLMQGSTLPRRSGA
MDPRMFSLIQASTAPRRSGA

SEQ ID NO: 101592 - protein, 20 aa, Artificial Sequence
  Description of Artificial Sequence: Synthetic peptide
  Seed: MDPRMCSLMQGSTLPRRSGA
MDPRMFSLIQASTCPRRSGA

SEQ ID NO: 101593 - protein, 20 aa, Artificial Sequence
  Description of Artificial Sequence: Synthetic peptide
  Seed: MDPRMCSLMQGSTLPRRSGA
MDPRMFSLIQASTDPRRSGA

SEQ ID NO: 101594 - protein, 20 aa, Artificial Sequence
  Description of Artificial Sequence: Synthetic peptide
  Seed: MDPRMCSLMQGSTLPRRSGA
MDPRMFSLIQASTEPRRSGA

SEQ ID NO: 101595 - protein, 20 aa, Artificial Sequence
  Description of Artificial Sequence: Synthetic peptide
  Seed: MDPRMCSLMQGSTLPRRSGA
MDPRMFSLIQASTFPRRSGA

SEQ ID NO: 101596 - protein, 20 aa, Artificial Sequence
  Description of Artificial Sequence: Synthetic peptide
  Seed: MDPRMCSLMQGSTLPRRSGA
MDPRMFSLIQASTGPRRSGA

SEQ ID NO: 101597 - protein, 20 aa, Artificial Sequence
  Description of Artificial Sequence: Synthetic peptide
  Seed: MDPRMCSLMQGSTLPRRSGA
MDPRMFSLIQASTHPRRSGA

SEQ ID NO: 101598 - protein, 20 aa, Artificial Sequence
  Description of Artificial Sequence: Synthetic peptide
  Seed: MDPRMCSLMQGSTLPRRSGA
MDPRMFSLIQASTIPRRSGA

SEQ ID NO: 101599 - protein, 20 aa, Artificial Sequence
  Description of Artificial Sequence: Synthetic peptide
  Seed: MDPRMCSLMQGSTLPRRSGA
MDPRMFSLIQASTLPRRSGA

SEQ ID NO: 101600 - protein, 20 aa, Artificial Sequence
  Description of Artificial Sequence: Synthetic peptide
  Seed: MDPRMCSLMQGSTLPRRSGA
MDPRMFSLIQASTMPRRSGA

SEQ ID NO: 101601 - protein, 20 aa, Artificial Sequence
  Description of Artificial Sequence: Synthetic peptide
  Seed: MDPRMCSLMQGSTLPRRSGA
MDPRMFSLIQASTNPRRSGA

SEQ ID NO: 101602 - protein, 20 aa, Artificial Sequence
  Description of Artificial Sequence: Synthetic peptide
  Seed: MDPRMCSLMQGSTLPRRSGA
MDPRMFSLIQASTPPRRSGA

SEQ ID NO: 101603 - protein, 20 aa, Artificial Sequence
  Description of Artificial Sequence: Synthetic peptide
  Seed: MDPRMCSLMQGSTLPRRSGA
MDPRMFSLIQASTQPRRSGA

SEQ ID NO: 101604 - protein, 20 aa, Artificial Sequence
  Description of Artificial Sequence: Synthetic peptide
  Seed: MDPRMCSLMQGSTLPRRSGA
MDPRMFSLIQASTSPRRSGA

SEQ ID NO: 101605 - protein, 20 aa, Artificial Sequence
  Description of Artificial Sequence: Synthetic peptide
  Seed: MDPRMCSLMQGSTLPRRSGA
MDPRMFSLIQASTTPRRSGA

SEQ ID NO: 101606 - protein, 20 aa, Artificial Sequence
  Description of Artificial Sequence: Synthetic peptide
  Seed: MDPRMCSLMQGSTLPRRSGA
MDPRMFSLIQASTVPRRSGA

SEQ ID NO: 101607 - protein, 20 aa, Artificial Sequence
  Description of Artificial Sequence: Synthetic peptide
  Seed: MDPRMCSLMQGSTLPRRSGA
MDPRMFSLIQASTWPRRSGA

SEQ ID NO: 101608 - protein, 20 aa, Artificial Sequence
  Description of Artificial Sequence: Synthetic peptide
  Seed: MDPRMCSLMQGSTLPRRSGA
MDPRMFSLIQASTYPRRSGA

SEQ ID NO: 101609 - protein, 20 aa, Artificial Sequence
  Description of Artificial Sequence: Synthetic peptide
  Seed: MDPRMCSLMQGSTLPRRSGA
MDPRMFSLIQESTAPRRSGA

SEQ ID NO: 101610 - protein, 20 aa, Artificial Sequence
  Description of Artificial Sequence: Synthetic peptide
  Seed: MDPRMCSLMQGSTLPRRSGA
MDPRMFSLIQGSTAPRRSGA

SEQ ID NO: 101611 - protein, 20 aa, Artificial Sequence
  Description of Artificial Sequence: Synthetic peptide
  Seed: MDPRMCSLMQGSTLPRRSGA
MDPRMFSLIQGSTCPRRSGA

SEQ ID NO: 101612 - protein, 20 aa, Artificial Sequence
  Description of Artificial Sequence: Synthetic peptide
  Seed: MDPRMCSLMQGSTLPRRSGA
MDPRMFSLIQGSTFPRRSGA

SEQ ID NO: 101613 - protein, 20 aa, Artificial Sequence
  Description of Artificial Sequence: Synthetic peptide
  Seed: MDPRMCSLMQGSTLPRRSGA
MDPRMFSLIQGSTGPRRSGA

SEQ ID NO: 101614 - protein, 20 aa, Artificial Sequence
  Description of Artificial Sequence: Synthetic peptide
  Seed: MDPRMCSLMQGSTLPRRSGA
MDPRMFSLIQGSTHPRRSGA

SEQ ID NO: 101615 - protein, 20 aa, Artificial Sequence
  Description of Artificial Sequence: Synthetic peptide
  Seed: MDPRMCSLMQGSTLPRRSGA
MDPRMFSLIQGSTIPRRSGA

SEQ ID NO: 101616 - protein, 20 aa, Artificial Sequence
  Description of Artificial Sequence: Synthetic peptide
  Seed: MDPRMCSLMQGSTLPRRSGA
MDPRMFSLIQGSTLPRRSGA

SEQ ID NO: 101617 - protein, 20 aa, Artificial Sequence
  Description of Artificial Sequence: Synthetic peptide
  Seed: MDPRMCSLMQGSTLPRRSGA
MDPRMFSLIQGSTMPRRSGA

SEQ ID NO: 101618 - protein, 20 aa, Artificial Sequence
  Description of Artificial Sequence: Synthetic peptide
  Seed: MDPRMCSLMQGSTLPRRSGA
MDPRMFSLIQGSTNPRRSGA

SEQ ID NO: 101619 - protein, 20 aa, Artificial Sequence
  Description of Artificial Sequence: Synthetic peptide
  Seed: MDPRMCSLMQGSTLPRRSGA
MDPRMFSLIQGSTQPRRSGA

SEQ ID NO: 101620 - protein, 20 aa, Artificial Sequence
  Description of Artificial Sequence: Synthetic peptide
  Seed: MDPRMCSLMQGSTLPRRSGA
MDPRMFSLIQGSTSPRRSGA

SEQ ID NO: 101621 - protein, 20 aa, Artificial Sequence
  Description of Artificial Sequence: Synthetic peptide
  Seed: MDPRMCSLMQGSTLPRRSGA
MDPRMFSLIQGSTTPRRSGA

SEQ ID NO: 101622 - protein, 20 aa, Artificial Sequence
  Description of Artificial Sequence: Synthetic peptide
  Seed: MDPRMCSLMQGSTLPRRSGA
MDPRMFSLIQGSTVPRRSGA

SEQ ID NO: 101623 - protein, 20 aa, Artificial Sequence
  Description of Artificial Sequence: Synthetic peptide
  Seed: MDPRMCSLMQGSTLPRRSGA
MDPRMFSLIQHSTAPRRSGA

SEQ ID NO: 101624 - protein, 20 aa, Artificial Sequence
  Description of Artificial Sequence: Synthetic peptide
  Seed: MDPRMCSLMQGSTLPRRSGA
MDPRMFSLIQISTAPRRSGA

SEQ ID NO: 101625 - protein, 20 aa, Artificial Sequence
  Description of Artificial Sequence: Synthetic peptide
  Seed: MDPRMCSLMQGSTLPRRSGA
MDPRMFSLIQISTGPRRSGA

SEQ ID NO: 101626 - protein, 20 aa, Artificial Sequence
  Description of Artificial Sequence: Synthetic peptide
  Seed: MDPRMCSLMQGSTLPRRSGA
MDPRMFSLIQISTHPRRSGA

SEQ ID NO: 101627 - protein, 20 aa, Artificial Sequence
  Description of Artificial Sequence: Synthetic peptide
  Seed: MDPRMCSLMQGSTLPRRSGA
MDPRMFSLIQISTIPRRSGA

SEQ ID NO: 101628 - protein, 20 aa, Artificial Sequence
  Description of Artificial Sequence: Synthetic peptide
  Seed: MDPRMCSLMQGSTLPRRSGA
MDPRMFSLIQISTLPRRSGA

SEQ ID NO: 101629 - protein, 20 aa, Artificial Sequence
  Description of Artificial Sequence: Synthetic peptide
  Seed: MDPRMCSLMQGSTLPRRSGA
MDPRMFSLIQISTMPRRSGA

SEQ ID NO: 101630 - protein, 20 aa, Artificial Sequence
  Description of Artificial Sequence: Synthetic peptide
  Seed: MDPRMCSLMQGSTLPRRSGA
MDPRMFSLIQISTNPRRSGA

SEQ ID NO: 101631 - protein, 20 aa, Artificial Sequence
  Description of Artificial Sequence: Synthetic peptide
  Seed: MDPRMCSLMQGSTLPRRSGA
MDPRMFSLIQISTQPRRSGA

SEQ ID NO: 101632 - protein, 20 aa, Artificial Sequence
  Description of Artificial Sequence: Synthetic peptide
  Seed: MDPRMCSLMQGSTLPRRSGA
MDPRMFSLIQISTSPRRSGA

SEQ ID NO: 101633 - protein, 20 aa, Artificial Sequence
  Description of Artificial Sequence: Synthetic peptide
  Seed: MDPRMCSLMQGSTLPRRSGA
MDPRMFSLIQISTTPRRSGA

SEQ ID NO: 101634 - protein, 20 aa, Artificial Sequence
  Description of Artificial Sequence: Synthetic peptide
  Seed: MDPRMCSLMQGSTLPRRSGA
MDPRMFSLIQISTVPRRSGA

SEQ ID NO: 101635 - protein, 20 aa, Artificial Sequence
  Description of Artificial Sequence: Synthetic peptide
  Seed: MDPRMCSLMQGSTLPRRSGA
MDPRMFSLIQLSTAPRRSGA

SEQ ID NO: 101636 - protein, 20 aa, Artificial Sequence
  Description of Artificial Sequence: Synthetic peptide
  Seed: MDPRMCSLMQGSTLPRRSGA
MDPRMFSLIQLSTGPRRSGA

SEQ ID NO: 101637 - protein, 20 aa, Artificial Sequence
  Description of Artificial Sequence: Synthetic peptide
  Seed: MDPRMCSLMQGSTLPRRSGA
MDPRMFSLIQLSTIPRRSGA

SEQ ID NO: 101638 - protein, 20 aa, Artificial Sequence
  Description of Artificial Sequence: Synthetic peptide
  Seed: MDPRMCSLMQGSTLPRRSGA
MDPRMFSLIQLSTLPRRSGA

SEQ ID NO: 101639 - protein, 20 aa, Artificial Sequence
  Description of Artificial Sequence: Synthetic peptide
  Seed: MDPRMCSLMQGSTLPRRSGA
MDPRMFSLIQLSTMPRRSGA

SEQ ID NO: 101640 - protein, 20 aa, Artificial Sequence
  Description of Artificial Sequence: Synthetic peptide
  Seed: MDPRMCSLMQGSTLPRRSGA
MDPRMFSLIQLSTNPRRSGA

SEQ ID NO: 101641 - protein, 20 aa, Artificial Sequence
  Description of Artificial Sequence: Synthetic peptide
  Seed: MDPRMCSLMQGSTLPRRSGA
MDPRMFSLIQLSTSPRRSGA

SEQ ID NO: 101642 - protein, 20 aa, Artificial Sequence
  Description of Artificial Sequence: Synthetic peptide
  Seed: MDPRMCSLMQGSTLPRRSGA
MDPRMFSLIQLSTTPRRSGA

SEQ ID NO: 101643 - protein, 20 aa, Artificial Sequence
  Description of Artificial Sequence: Synthetic peptide
  Seed: MDPRMCSLMQGSTLPRRSGA
MDPRMFSLIQLSTVPRRSGA

SEQ ID NO: 101644 - protein, 20 aa, Artificial Sequence
  Description of Artificial Sequence: Synthetic peptide
  Seed: MDPRMCSLMQGSTLPRRSGA
MDPRMFSLIQMSTAPRRSGA

SEQ ID NO: 101645 - protein, 20 aa, Artificial Sequence
  Description of Artificial Sequence: Synthetic peptide
  Seed: MDPRMCSLMQGSTLPRRSGA
MDPRMFSLIQMSTIPRRSGA

SEQ ID NO: 101646 - protein, 20 aa, Artificial Sequence
  Description of Artificial Sequence: Synthetic peptide
  Seed: MDPRMCSLMQGSTLPRRSGA
MDPRMFSLIQMSTLPRRSGA

SEQ ID NO: 101647 - protein, 20 aa, Artificial Sequence
  Description of Artificial Sequence: Synthetic peptide
  Seed: MDPRMCSLMQGSTLPRRSGA
MDPRMFSLIQMSTMPRRSGA

SEQ ID NO: 101648 - protein, 20 aa, Artificial Sequence
  Description of Artificial Sequence: Synthetic peptide
  Seed: MDPRMCSLMQGSTLPRRSGA
MDPRMFSLIQMSTNPRRSGA

SEQ ID NO: 101649 - protein, 20 aa, Artificial Sequence
  Description of Artificial Sequence: Synthetic peptide
  Seed: MDPRMCSLMQGSTLPRRSGA
MDPRMFSLIQMSTSPRRSGA

SEQ ID NO: 101650 - protein, 20 aa, Artificial Sequence
  Description of Artificial Sequence: Synthetic peptide
  Seed: MDPRMCSLMQGSTLPRRSGA
MDPRMFSLIQMSTTPRRSGA

SEQ ID NO: 101651 - protein, 20 aa, Artificial Sequence
  Description of Artificial Sequence: Synthetic peptide
  Seed: MDPRMCSLMQGSTLPRRSGA
MDPRMFSLIQMSTVPRRSGA

SEQ ID NO: 101652 - protein, 20 aa, Artificial Sequence
  Description of Artificial Sequence: Synthetic peptide
  Seed: MDPRMCSLMQGSTLPRRSGA
MDPRMFSLIQNSTAPRRSGA

SEQ ID NO: 101653 - protein, 20 aa, Artificial Sequence
  Description of Artificial Sequence: Synthetic peptide
  Seed: MDPRMCSLMQGSTLPRRSGA
MDPRMFSLIQNSTGPRRSGA

SEQ ID NO: 101654 - protein, 20 aa, Artificial Sequence
  Description of Artificial Sequence: Synthetic peptide
  Seed: MDPRMCSLMQGSTLPRRSGA
MDPRMFSLIQNSTIPRRSGA

SEQ ID NO: 101655 - protein, 20 aa, Artificial Sequence
  Description of Artificial Sequence: Synthetic peptide
  Seed: MDPRMCSLMQGSTLPRRSGA
MDPRMFSLIQNSTLPRRSGA

SEQ ID NO: 101656 - protein, 20 aa, Artificial Sequence
  Description of Artificial Sequence: Synthetic peptide
  Seed: MDPRMCSLMQGSTLPRRSGA
MDPRMFSLIQNSTMPRRSGA

SEQ ID NO: 101657 - protein, 20 aa, Artificial Sequence
  Description of Artificial Sequence: Synthetic peptide
  Seed: MDPRMCSLMQGSTLPRRSGA
MDPRMFSLIQNSTNPRRSGA

SEQ ID NO: 101658 - protein, 20 aa, Artificial Sequence
  Description of Artificial Sequence: Synthetic peptide
  Seed: MDPRMCSLMQGSTLPRRSGA
MDPRMFSLIQNSTQPRRSGA

SEQ ID NO: 101659 - protein, 20 aa, Artificial Sequence
  Description of Artificial Sequence: Synthetic peptide
  Seed: MDPRMCSLMQGSTLPRRSGA
MDPRMFSLIQNSTSPRRSGA

SEQ ID NO: 101660 - protein, 20 aa, Artificial Sequence
  Description of Artificial Sequence: Synthetic peptide
  Seed: MDPRMCSLMQGSTLPRRSGA
MDPRMFSLIQNSTTPRRSGA

SEQ ID NO: 101661 - protein, 20 aa, Artificial Sequence
  Description of Artificial Sequence: Synthetic peptide
  Seed: MDPRMCSLMQGSTLPRRSGA
MDPRMFSLIQNSTVPRRSGA

SEQ ID NO: 101662 - protein, 20 aa, Artificial Sequence
  Description of Artificial Sequence: Synthetic peptide
  Seed: MDPRMCSLMQGSTLPRRSGA
MDPRMFSLIQPSTAPRRSGA

SEQ ID NO: 101663 - protein, 20 aa, Artificial Sequence
  Description of Artificial Sequence: Synthetic peptide
  Seed: MDPRMCSLMQGSTLPRRSGA
MDPRMFSLIQPSTCPRRSGA

SEQ ID NO: 101664 - protein, 20 aa, Artificial Sequence
  Description of Artificial Sequence: Synthetic peptide
  Seed: MDPRMCSLMQGSTLPRRSGA
MDPRMFSLIQPSTDPRRSGA

SEQ ID NO: 101665 - protein, 20 aa, Artificial Sequence
  Description of Artificial Sequence: Synthetic peptide
  Seed: MDPRMCSLMQGSTLPRRSGA
MDPRMFSLIQPSTEPRRSGA

SEQ ID NO: 101666 - protein, 20 aa, Artificial Sequence
  Description of Artificial Sequence: Synthetic peptide
  Seed: MDPRMCSLMQGSTLPRRSGA
MDPRMFSLIQPSTFPRRSGA

SEQ ID NO: 101667 - protein, 20 aa, Artificial Sequence
  Description of Artificial Sequence: Synthetic peptide
  Seed: MDPRMCSLMQGSTLPRRSGA
MDPRMFSLIQPSTGPRRSGA

SEQ ID NO: 101668 - protein, 20 aa, Artificial Sequence
  Description of Artificial Sequence: Synthetic peptide
  Seed: MDPRMCSLMQGSTLPRRSGA
MDPRMFSLIQPSTHPRRSGA

SEQ ID NO: 101669 - protein, 20 aa, Artificial Sequence
  Description of Artificial Sequence: Synthetic peptide
  Seed: MDPRMCSLMQGSTLPRRSGA
MDPRMFSLIQPSTIPRRSGA

SEQ ID NO: 101670 - protein, 20 aa, Artificial Sequence
  Description of Artificial Sequence: Synthetic peptide
  Seed: MDPRMCSLMQGSTLPRRSGA
MDPRMFSLIQPSTLPRRSGA

SEQ ID NO: 101671 - protein, 20 aa, Artificial Sequence
  Description of Artificial Sequence: Synthetic peptide
  Seed: MDPRMCSLMQGSTLPRRSGA
MDPRMFSLIQPSTMPRRSGA

SEQ ID NO: 101672 - protein, 20 aa, Artificial Sequence
  Description of Artificial Sequence: Synthetic peptide
  Seed: MDPRMCSLMQGSTLPRRSGA
MDPRMFSLIQPSTNPRRSGA

SEQ ID NO: 101673 - protein, 20 aa, Artificial Sequence
  Description of Artificial Sequence: Synthetic peptide
  Seed: MDPRMCSLMQGSTLPRRSGA
MDPRMFSLIQPSTPPRRSGA

SEQ ID NO: 101674 - protein, 20 aa, Artificial Sequence
  Description of Artificial Sequence: Synthetic peptide
  Seed: MDPRMCSLMQGSTLPRRSGA
MDPRMFSLIQPSTQPRRSGA

SEQ ID NO: 101675 - protein, 20 aa, Artificial Sequence
  Description of Artificial Sequence: Synthetic peptide
  Seed: MDPRMCSLMQGSTLPRRSGA
MDPRMFSLIQPSTSPRRSGA

SEQ ID NO: 101676 - protein, 20 aa, Artificial Sequence
  Description of Artificial Sequence: Synthetic peptide
  Seed: MDPRMCSLMQGSTLPRRSGA
MDPRMFSLIQPSTTPRRSGA

SEQ ID NO: 101677 - protein, 20 aa, Artificial Sequence
  Description of Artificial Sequence: Synthetic peptide
  Seed: MDPRMCSLMQGSTLPRRSGA
MDPRMFSLIQPSTVPRRSGA

SEQ ID NO: 101678 - protein, 20 aa, Artificial Sequence
  Description of Artificial Sequence: Synthetic peptide
  Seed: MDPRMCSLMQGSTLPRRSGA
MDPRMFSLIQQSTAPRRSGA

SEQ ID NO: 101679 - protein, 20 aa, Artificial Sequence
  Description of Artificial Sequence: Synthetic peptide
  Seed: MDPRMCSLMQGSTLPRRSGA
MDPRMFSLIQSSTAPRRSGA

SEQ ID NO: 101680 - protein, 20 aa, Artificial Sequence
  Description of Artificial Sequence: Synthetic peptide
  Seed: MDPRMCSLMQGSTLPRRSGA
MDPRMFSLIQSSTCPRRSGA

SEQ ID NO: 101681 - protein, 20 aa, Artificial Sequence
  Description of Artificial Sequence: Synthetic peptide
  Seed: MDPRMCSLMQGSTLPRRSGA
MDPRMFSLIQSSTDPRRSGA

SEQ ID NO: 101682 - protein, 20 aa, Artificial Sequence
  Description of Artificial Sequence: Synthetic peptide
  Seed: MDPRMCSLMQGSTLPRRSGA
MDPRMFSLIQSSTEPRRSGA

SEQ ID NO: 101683 - protein, 20 aa, Artificial Sequence
  Description of Artificial Sequence: Synthetic peptide
  Seed: MDPRMCSLMQGSTLPRRSGA
MDPRMFSLIQSSTFPRRSGA

SEQ ID NO: 101684 - protein, 20 aa, Artificial Sequence
  Description of Artificial Sequence: Synthetic peptide
  Seed: MDPRMCSLMQGSTLPRRSGA
MDPRMFSLIQSSTGPRRSGA

SEQ ID NO: 101685 - protein, 20 aa, Artificial Sequence
  Description of Artificial Sequence: Synthetic peptide
  Seed: MDPRMCSLMQGSTLPRRSGA
MDPRMFSLIQSSTHPRRSGA

SEQ ID NO: 101686 - protein, 20 aa, Artificial Sequence
  Description of Artificial Sequence: Synthetic peptide
  Seed: MDPRMCSLMQGSTLPRRSGA
MDPRMFSLIQSSTIPRRSGA

SEQ ID NO: 101687 - protein, 20 aa, Artificial Sequence
  Description of Artificial Sequence: Synthetic peptide
  Seed: MDPRMCSLMQGSTLPRRSGA
MDPRMFSLIQSSTLPRRSGA

SEQ ID NO: 101688 - protein, 20 aa, Artificial Sequence
  Description of Artificial Sequence: Synthetic peptide
  Seed: MDPRMCSLMQGSTLPRRSGA
MDPRMFSLIQSSTMPRRSGA

SEQ ID NO: 101689 - protein, 20 aa, Artificial Sequence
  Description of Artificial Sequence: Synthetic peptide
  Seed: MDPRMCSLMQGSTLPRRSGA
MDPRMFSLIQSSTNPRRSGA

SEQ ID NO: 101690 - protein, 20 aa, Artificial Sequence
  Description of Artificial Sequence: Synthetic peptide
  Seed: MDPRMCSLMQGSTLPRRSGA
MDPRMFSLIQSSTPPRRSGA

SEQ ID NO: 101691 - protein, 20 aa, Artificial Sequence
  Description of Artificial Sequence: Synthetic peptide
  Seed: MDPRMCSLMQGSTLPRRSGA
MDPRMFSLIQSSTQPRRSGA

SEQ ID NO: 101692 - protein, 20 aa, Artificial Sequence
  Description of Artificial Sequence: Synthetic peptide
  Seed: MDPRMCSLMQGSTLPRRSGA
MDPRMFSLIQSSTSPRRSGA

SEQ ID NO: 101693 - protein, 20 aa, Artificial Sequence
  Description of Artificial Sequence: Synthetic peptide
  Seed: MDPRMCSLMQGSTLPRRSGA
MDPRMFSLIQSSTTPRRSGA

SEQ ID NO: 101694 - protein, 20 aa, Artificial Sequence
  Description of Artificial Sequence: Synthetic peptide
  Seed: MDPRMCSLMQGSTLPRRSGA
MDPRMFSLIQSSTVPRRSGA

SEQ ID NO: 101695 - protein, 20 aa, Artificial Sequence
  Description of Artificial Sequence: Synthetic peptide
  Seed: MDPRMCSLMQGSTLPRRSGA
MDPRMFSLIQTSTAPRRSGA

SEQ ID NO: 101696 - protein, 20 aa, Artificial Sequence
  Description of Artificial Sequence: Synthetic peptide
  Seed: MDPRMCSLMQGSTLPRRSGA
MDPRMFSLIQTSTCPRRSGA

SEQ ID NO: 101697 - protein, 20 aa, Artificial Sequence
  Description of Artificial Sequence: Synthetic peptide
  Seed: MDPRMCSLMQGSTLPRRSGA
MDPRMFSLIQTSTDPRRSGA

SEQ ID NO: 101698 - protein, 20 aa, Artificial Sequence
  Description of Artificial Sequence: Synthetic peptide
  Seed: MDPRMCSLMQGSTLPRRSGA
MDPRMFSLIQTSTEPRRSGA

SEQ ID NO: 101699 - protein, 20 aa, Artificial Sequence
  Description of Artificial Sequence: Synthetic peptide
  Seed: MDPRMCSLMQGSTLPRRSGA
MDPRMFSLIQTSTGPRRSGA

SEQ ID NO: 101700 - protein, 20 aa, Artificial Sequence
  Description of Artificial Sequence: Synthetic peptide
  Seed: MDPRMCSLMQGSTLPRRSGA
MDPRMFSLIQTSTHPRRSGA

SEQ ID NO: 101701 - protein, 20 aa, Artificial Sequence
  Description of Artificial Sequence: Synthetic peptide
  Seed: MDPRMCSLMQGSTLPRRSGA
MDPRMFSLIQTSTIPRRSGA

SEQ ID NO: 101702 - protein, 20 aa, Artificial Sequence
  Description of Artificial Sequence: Synthetic peptide
  Seed: MDPRMCSLMQGSTLPRRSGA
MDPRMFSLIQTSTLPRRSGA

SEQ ID NO: 101703 - protein, 20 aa, Artificial Sequence
  Description of Artificial Sequence: Synthetic peptide
  Seed: MDPRMCSLMQGSTLPRRSGA
MDPRMFSLIQTSTMPRRSGA

SEQ ID NO: 101704 - protein, 20 aa, Artificial Sequence
  Description of Artificial Sequence: Synthetic peptide
  Seed: MDPRMCSLMQGSTLPRRSGA
MDPRMFSLIQTSTNPRRSGA

SEQ ID NO: 101705 - protein, 20 aa, Artificial Sequence
  Description of Artificial Sequence: Synthetic peptide
  Seed: MDPRMCSLMQGSTLPRRSGA
MDPRMFSLIQTSTPPRRSGA

SEQ ID NO: 101706 - protein, 20 aa, Artificial Sequence
  Description of Artificial Sequence: Synthetic peptide
  Seed: MDPRMCSLMQGSTLPRRSGA
MDPRMFSLIQTSTQPRRSGA

SEQ ID NO: 101707 - protein, 20 aa, Artificial Sequence
  Description of Artificial Sequence: Synthetic peptide
  Seed: MDPRMCSLMQGSTLPRRSGA
MDPRMFSLIQTSTSPRRSGA

SEQ ID NO: 101708 - protein, 20 aa, Artificial Sequence
  Description of Artificial Sequence: Synthetic peptide
  Seed: MDPRMCSLMQGSTLPRRSGA
MDPRMFSLIQTSTTPRRSGA

SEQ ID NO: 101709 - protein, 20 aa, Artificial Sequence
  Description of Artificial Sequence: Synthetic peptide
  Seed: MDPRMCSLMQGSTLPRRSGA
MDPRMFSLIQTSTVPRRSGA

SEQ ID NO: 101710 - protein, 20 aa, Artificial Sequence
  Description of Artificial Sequence: Synthetic peptide
  Seed: MDPRMCSLMQGSTLPRRSGA
MDPRMFSLIQVSTAPRRSGA

SEQ ID NO: 101711 - protein, 20 aa, Artificial Sequence
  Description of Artificial Sequence: Synthetic peptide
  Seed: MDPRMCSLMQGSTLPRRSGA
MDPRMFSLIQVSTCPRRSGA

SEQ ID NO: 101712 - protein, 20 aa, Artificial Sequence
  Description of Artificial Sequence: Synthetic peptide
  Seed: MDPRMCSLMQGSTLPRRSGA
MDPRMFSLIQVSTDPRRSGA

SEQ ID NO: 101713 - protein, 20 aa, Artificial Sequence
  Description of Artificial Sequence: Synthetic peptide
  Seed: MDPRMCSLMQGSTLPRRSGA
MDPRMFSLIQVSTEPRRSGA

SEQ ID NO: 101714 - protein, 20 aa, Artificial Sequence
  Description of Artificial Sequence: Synthetic peptide
  Seed: MDPRMCSLMQGSTLPRRSGA
MDPRMFSLIQVSTGPRRSGA

SEQ ID NO: 101715 - protein, 20 aa, Artificial Sequence
  Description of Artificial Sequence: Synthetic peptide
  Seed: MDPRMCSLMQGSTLPRRSGA
MDPRMFSLIQVSTHPRRSGA

SEQ ID NO: 101716 - protein, 20 aa, Artificial Sequence
  Description of Artificial Sequence: Synthetic peptide
  Seed: MDPRMCSLMQGSTLPRRSGA
MDPRMFSLIQVSTIPRRSGA

SEQ ID NO: 101717 - protein, 20 aa, Artificial Sequence
  Description of Artificial Sequence: Synthetic peptide
  Seed: MDPRMCSLMQGSTLPRRSGA
MDPRMFSLIQVSTLPRRSGA

SEQ ID NO: 101718 - protein, 20 aa, Artificial Sequence
  Description of Artificial Sequence: Synthetic peptide
  Seed: MDPRMCSLMQGSTLPRRSGA
MDPRMFSLIQVSTMPRRSGA

SEQ ID NO: 101719 - protein, 20 aa, Artificial Sequence
  Description of Artificial Sequence: Synthetic peptide
  Seed: MDPRMCSLMQGSTLPRRSGA
MDPRMFSLIQVSTNPRRSGA

SEQ ID NO: 101720 - protein, 20 aa, Artificial Sequence
  Description of Artificial Sequence: Synthetic peptide
  Seed: MDPRMCSLMQGSTLPRRSGA
MDPRMFSLIQVSTPPRRSGA

SEQ ID NO: 101721 - protein, 20 aa, Artificial Sequence
  Description of Artificial Sequence: Synthetic peptide
  Seed: MDPRMCSLMQGSTLPRRSGA
MDPRMFSLIQVSTQPRRSGA

SEQ ID NO: 101722 - protein, 20 aa, Artificial Sequence
  Description of Artificial Sequence: Synthetic peptide
  Seed: MDPRMCSLMQGSTLPRRSGA
MDPRMFSLIQVSTSPRRSGA

SEQ ID NO: 101723 - protein, 20 aa, Artificial Sequence
  Description of Artificial Sequence: Synthetic peptide
  Seed: MDPRMCSLMQGSTLPRRSGA
MDPRMFSLIQVSTTPRRSGA

SEQ ID NO: 101724 - protein, 20 aa, Artificial Sequence
  Description of Artificial Sequence: Synthetic peptide
  Seed: MDPRMCSLMQGSTLPRRSGA
MDPRMFSLIQVSTVPRRSGA

SEQ ID NO: 101725 - protein, 20 aa, Artificial Sequence
  Description of Artificial Sequence: Synthetic peptide
  Seed: MDPRMCSLMQGSTLPRRSGA
MDPRMFSLKQASTLPRRSGA

SEQ ID NO: 101726 - protein, 20 aa, Artificial Sequence
  Description of Artificial Sequence: Synthetic peptide
  Seed: MDPRMCSLMQGSTLPRRSGA
MDPRMFSLLQASTAPRRSGA

SEQ ID NO: 101727 - protein, 20 aa, Artificial Sequence
  Description of Artificial Sequence: Synthetic peptide
  Seed: MDPRMCSLMQGSTLPRRSGA
MDPRMFSLLQASTCPRRSGA

SEQ ID NO: 101728 - protein, 20 aa, Artificial Sequence
  Description of Artificial Sequence: Synthetic peptide
  Seed: MDPRMCSLMQGSTLPRRSGA
MDPRMFSLLQASTDPRRSGA

SEQ ID NO: 101729 - protein, 20 aa, Artificial Sequence
  Description of Artificial Sequence: Synthetic peptide
  Seed: MDPRMCSLMQGSTLPRRSGA
MDPRMFSLLQASTEPRRSGA

SEQ ID NO: 101730 - protein, 20 aa, Artificial Sequence
  Description of Artificial Sequence: Synthetic peptide
  Seed: MDPRMCSLMQGSTLPRRSGA
MDPRMFSLLQASTFPRRSGA

SEQ ID NO: 101731 - protein, 20 aa, Artificial Sequence
  Description of Artificial Sequence: Synthetic peptide
  Seed: MDPRMCSLMQGSTLPRRSGA
MDPRMFSLLQASTGPRRSGA

SEQ ID NO: 101732 - protein, 20 aa, Artificial Sequence
  Description of Artificial Sequence: Synthetic peptide
  Seed: MDPRMCSLMQGSTLPRRSGA
MDPRMFSLLQASTHPRRSGA

SEQ ID NO: 101733 - protein, 20 aa, Artificial Sequence
  Description of Artificial Sequence: Synthetic peptide
  Seed: MDPRMCSLMQGSTLPRRSGA
MDPRMFSLLQASTIPRRSGA

SEQ ID NO: 101734 - protein, 20 aa, Artificial Sequence
  Description of Artificial Sequence: Synthetic peptide
  Seed: MDPRMCSLMQGSTLPRRSGA
MDPRMFSLLQASTKPRRSGA

SEQ ID NO: 101735 - protein, 20 aa, Artificial Sequence
  Description of Artificial Sequence: Synthetic peptide
  Seed: MDPRMCSLMQGSTLPRRSGA
MDPRMFSLLQASTLPRRSGA

SEQ ID NO: 101736 - protein, 20 aa, Artificial Sequence
  Description of Artificial Sequence: Synthetic peptide
  Seed: MDPRMCSLMQGSTLPRRSGA
MDPRMFSLLQASTMPRRSGA

SEQ ID NO: 101737 - protein, 20 aa, Artificial Sequence
  Description of Artificial Sequence: Synthetic peptide
  Seed: MDPRMCSLMQGSTLPRRSGA
MDPRMFSLLQASTNPRRSGA

SEQ ID NO: 101738 - protein, 20 aa, Artificial Sequence
  Description of Artificial Sequence: Synthetic peptide
  Seed: MDPRMCSLMQGSTLPRRSGA
MDPRMFSLLQASTPPRRSGA

SEQ ID NO: 101739 - protein, 20 aa, Artificial Sequence
  Description of Artificial Sequence: Synthetic peptide
  Seed: MDPRMCSLMQGSTLPRRSGA
MDPRMFSLLQASTQPRRSGA

SEQ ID NO: 101740 - protein, 20 aa, Artificial Sequence
  Description of Artificial Sequence: Synthetic peptide
  Seed: MDPRMCSLMQGSTLPRRSGA
MDPRMFSLLQASTRPRRSGA

SEQ ID NO: 101741 - protein, 20 aa, Artificial Sequence
  Description of Artificial Sequence: Synthetic peptide
  Seed: MDPRMCSLMQGSTLPRRSGA
MDPRMFSLLQASTSPRRSGA

SEQ ID NO: 101742 - protein, 20 aa, Artificial Sequence
  Description of Artificial Sequence: Synthetic peptide
  Seed: MDPRMCSLMQGSTLPRRSGA
MDPRMFSLLQASTTPRRSGA

SEQ ID NO: 101743 - protein, 20 aa, Artificial Sequence
  Description of Artificial Sequence: Synthetic peptide
  Seed: MDPRMCSLMQGSTLPRRSGA
MDPRMFSLLQASTVPRRSGA

SEQ ID NO: 101744 - protein, 20 aa, Artificial Sequence
  Description of Artificial Sequence: Synthetic peptide
  Seed: MDPRMCSLMQGSTLPRRSGA
MDPRMFSLLQASTWPRRSGA

SEQ ID NO: 101745 - protein, 20 aa, Artificial Sequence
  Description of Artificial Sequence: Synthetic peptide
  Seed: MDPRMCSLMQGSTLPRRSGA
MDPRMFSLLQASTYPRRSGA

SEQ ID NO: 101746 - protein, 20 aa, Artificial Sequence
  Description of Artificial Sequence: Synthetic peptide
  Seed: MDPRMCSLMQGSTLPRRSGA
MDPRMFSLLQCSTAPRRSGA

SEQ ID NO: 101747 - protein, 20 aa, Artificial Sequence
  Description of Artificial Sequence: Synthetic peptide
  Seed: MDPRMCSLMQGSTLPRRSGA
MDPRMFSLLQCSTIPRRSGA

SEQ ID NO: 101748 - protein, 20 aa, Artificial Sequence
  Description of Artificial Sequence: Synthetic peptide
  Seed: MDPRMCSLMQGSTLPRRSGA
MDPRMFSLLQCSTLPRRSGA

SEQ ID NO: 101749 - protein, 20 aa, Artificial Sequence
  Description of Artificial Sequence: Synthetic peptide
  Seed: MDPRMCSLMQGSTLPRRSGA
MDPRMFSLLQCSTNPRRSGA

SEQ ID NO: 101750 - protein, 20 aa, Artificial Sequence
  Description of Artificial Sequence: Synthetic peptide
  Seed: MDPRMCSLMQGSTLPRRSGA
MDPRMFSLLQCSTSPRRSGA

SEQ ID NO: 101751 - protein, 20 aa, Artificial Sequence
  Description of Artificial Sequence: Synthetic peptide
  Seed: MDPRMCSLMQGSTLPRRSGA
MDPRMFSLLQCSTVPRRSGA

SEQ ID NO: 101752 - protein, 20 aa, Artificial Sequence
  Description of Artificial Sequence: Synthetic peptide
  Seed: MDPRMCSLMQGSTLPRRSGA
MDPRMFSLLQDSTVPRRSGA

SEQ ID NO: 101753 - protein, 20 aa, Artificial Sequence
  Description of Artificial Sequence: Synthetic peptide
  Seed: MDPRMCSLMQGSTLPRRSGA
MDPRMFSLLQESTAPRRSGA

SEQ ID NO: 101754 - protein, 20 aa, Artificial Sequence
  Description of Artificial Sequence: Synthetic peptide
  Seed: MDPRMCSLMQGSTLPRRSGA
MDPRMFSLLQESTIPRRSGA

SEQ ID NO: 101755 - protein, 20 aa, Artificial Sequence
  Description of Artificial Sequence: Synthetic peptide
  Seed: MDPRMCSLMQGSTLPRRSGA
MDPRMFSLLQESTLPRRSGA

SEQ ID NO: 101756 - protein, 20 aa, Artificial Sequence
  Description of Artificial Sequence: Synthetic peptide
  Seed: MDPRMCSLMQGSTLPRRSGA
MDPRMFSLLQESTVPRRSGA

SEQ ID NO: 101757 - protein, 20 aa, Artificial Sequence
  Description of Artificial Sequence: Synthetic peptide
  Seed: MDPRMCSLMQGSTLPRRSGA
MDPRMFSLLQGSTAPRRSGA

SEQ ID NO: 101758 - protein, 20 aa, Artificial Sequence
  Description of Artificial Sequence: Synthetic peptide
  Seed: MDPRMCSLMQGSTLPRRSGA
MDPRMFSLLQGSTCPRRSGA

SEQ ID NO: 101759 - protein, 20 aa, Artificial Sequence
  Description of Artificial Sequence: Synthetic peptide
  Seed: MDPRMCSLMQGSTLPRRSGA
MDPRMFSLLQGSTDPRRSGA

SEQ ID NO: 101760 - protein, 20 aa, Artificial Sequence
  Description of Artificial Sequence: Synthetic peptide
  Seed: MDPRMCSLMQGSTLPRRSGA
MDPRMFSLLQGSTFPRRSGA

SEQ ID NO: 101761 - protein, 20 aa, Artificial Sequence
  Description of Artificial Sequence: Synthetic peptide
  Seed: MDPRMCSLMQGSTLPRRSGA
MDPRMFSLLQGSTGPRRSGA

SEQ ID NO: 101762 - protein, 20 aa, Artificial Sequence
  Description of Artificial Sequence: Synthetic peptide
  Seed: MDPRMCSLMQGSTLPRRSGA
MDPRMFSLLQGSTHPRRSGA

SEQ ID NO: 101763 - protein, 20 aa, Artificial Sequence
  Description of Artificial Sequence: Synthetic peptide
  Seed: MDPRMCSLMQGSTLPRRSGA
MDPRMFSLLQGSTIPRRSGA

SEQ ID NO: 101764 - protein, 20 aa, Artificial Sequence
  Description of Artificial Sequence: Synthetic peptide
  Seed: MDPRMCSLMQGSTLPRRSGA
MDPRMFSLLQGSTLPRRSGA

SEQ ID NO: 101765 - protein, 20 aa, Artificial Sequence
  Description of Artificial Sequence: Synthetic peptide
  Seed: MDPRMCSLMQGSTLPRRSGA
MDPRMFSLLQGSTMPRRSGA

SEQ ID NO: 101766 - protein, 20 aa, Artificial Sequence
  Description of Artificial Sequence: Synthetic peptide
  Seed: MDPRMCSLMQGSTLPRRSGA
MDPRMFSLLQGSTNPRRSGA

SEQ ID NO: 101767 - protein, 20 aa, Artificial Sequence
  Description of Artificial Sequence: Synthetic peptide
  Seed: MDPRMCSLMQGSTLPRRSGA
MDPRMFSLLQGSTPPRRSGA

SEQ ID NO: 101768 - protein, 20 aa, Artificial Sequence
  Description of Artificial Sequence: Synthetic peptide
  Seed: MDPRMCSLMQGSTLPRRSGA
MDPRMFSLLQGSTQPRRSGA

SEQ ID NO: 101769 - protein, 20 aa, Artificial Sequence
  Description of Artificial Sequence: Synthetic peptide
  Seed: MDPRMCSLMQGSTLPRRSGA
MDPRMFSLLQGSTSPRRSGA

SEQ ID NO: 101770 - protein, 20 aa, Artificial Sequence
  Description of Artificial Sequence: Synthetic peptide
  Seed: MDPRMCSLMQGSTLPRRSGA
MDPRMFSLLQGSTTPRRSGA

SEQ ID NO: 101771 - protein, 20 aa, Artificial Sequence
  Description of Artificial Sequence: Synthetic peptide
  Seed: MDPRMCSLMQGSTLPRRSGA
MDPRMFSLLQGSTVPRRSGA

SEQ ID NO: 101772 - protein, 20 aa, Artificial Sequence
  Description of Artificial Sequence: Synthetic peptide
  Seed: MDPRMCSLMQGSTLPRRSGA
MDPRMFSLLQGSTYPRRSGA

SEQ ID NO: 101773 - protein, 20 aa, Artificial Sequence
  Description of Artificial Sequence: Synthetic peptide
  Seed: MDPRMCSLMQGSTLPRRSGA
MDPRMFSLLQHSTAPRRSGA

SEQ ID NO: 101774 - protein, 20 aa, Artificial Sequence
  Description of Artificial Sequence: Synthetic peptide
  Seed: MDPRMCSLMQGSTLPRRSGA
MDPRMFSLLQHSTIPRRSGA

SEQ ID NO: 101775 - protein, 20 aa, Artificial Sequence
  Description of Artificial Sequence: Synthetic peptide
  Seed: MDPRMCSLMQGSTLPRRSGA
MDPRMFSLLQHSTLPRRSGA

SEQ ID NO: 101776 - protein, 20 aa, Artificial Sequence
  Description of Artificial Sequence: Synthetic peptide
  Seed: MDPRMCSLMQGSTLPRRSGA
MDPRMFSLLQHSTVPRRSGA

SEQ ID NO: 101777 - protein, 20 aa, Artificial Sequence
  Description of Artificial Sequence: Synthetic peptide
  Seed: MDPRMCSLMQGSTLPRRSGA
MDPRMFSLLQISTAPRRSGA

SEQ ID NO: 101778 - protein, 20 aa, Artificial Sequence
  Description of Artificial Sequence: Synthetic peptide
  Seed: MDPRMCSLMQGSTLPRRSGA
MDPRMFSLLQISTDPRRSGA

SEQ ID NO: 101779 - protein, 20 aa, Artificial Sequence
  Description of Artificial Sequence: Synthetic peptide
  Seed: MDPRMCSLMQGSTLPRRSGA
MDPRMFSLLQISTEPRRSGA

SEQ ID NO: 101780 - protein, 20 aa, Artificial Sequence
  Description of Artificial Sequence: Synthetic peptide
  Seed: MDPRMCSLMQGSTLPRRSGA
MDPRMFSLLQISTGPRRSGA

SEQ ID NO: 101781 - protein, 20 aa, Artificial Sequence
  Description of Artificial Sequence: Synthetic peptide
  Seed: MDPRMCSLMQGSTLPRRSGA
MDPRMFSLLQISTHPRRSGA

SEQ ID NO: 101782 - protein, 20 aa, Artificial Sequence
  Description of Artificial Sequence: Synthetic peptide
  Seed: MDPRMCSLMQGSTLPRRSGA
MDPRMFSLLQISTIPRRSGA

SEQ ID NO: 101783 - protein, 20 aa, Artificial Sequence
  Description of Artificial Sequence: Synthetic peptide
  Seed: MDPRMCSLMQGSTLPRRSGA
MDPRMFSLLQISTLPRRSGA

SEQ ID NO: 101784 - protein, 20 aa, Artificial Sequence
  Description of Artificial Sequence: Synthetic peptide
  Seed: MDPRMCSLMQGSTLPRRSGA
MDPRMFSLLQISTMPRRSGA

SEQ ID NO: 101785 - protein, 20 aa, Artificial Sequence
  Description of Artificial Sequence: Synthetic peptide
  Seed: MDPRMCSLMQGSTLPRRSGA
MDPRMFSLLQISTNPRRSGA

SEQ ID NO: 101786 - protein, 20 aa, Artificial Sequence
  Description of Artificial Sequence: Synthetic peptide
  Seed: MDPRMCSLMQGSTLPRRSGA
MDPRMFSLLQISTPPRRSGA

SEQ ID NO: 101787 - protein, 20 aa, Artificial Sequence
  Description of Artificial Sequence: Synthetic peptide
  Seed: MDPRMCSLMQGSTLPRRSGA
MDPRMFSLLQISTQPRRSGA

SEQ ID NO: 101788 - protein, 20 aa, Artificial Sequence
  Description of Artificial Sequence: Synthetic peptide
  Seed: MDPRMCSLMQGSTLPRRSGA
MDPRMFSLLQISTSPRRSGA

SEQ ID NO: 101789 - protein, 20 aa, Artificial Sequence
  Description of Artificial Sequence: Synthetic peptide
  Seed: MDPRMCSLMQGSTLPRRSGA
MDPRMFSLLQISTTPRRSGA

SEQ ID NO: 101790 - protein, 20 aa, Artificial Sequence
  Description of Artificial Sequence: Synthetic peptide
  Seed: MDPRMCSLMQGSTLPRRSGA
MDPRMFSLLQISTVPRRSGA

SEQ ID NO: 101791 - protein, 20 aa, Artificial Sequence
  Description of Artificial Sequence: Synthetic peptide
  Seed: MDPRMCSLMQGSTLPRRSGA
MDPRMFSLLQLSTAPRRSGA

SEQ ID NO: 101792 - protein, 20 aa, Artificial Sequence
  Description of Artificial Sequence: Synthetic peptide
  Seed: MDPRMCSLMQGSTLPRRSGA
MDPRMFSLLQLSTGPRRSGA

SEQ ID NO: 101793 - protein, 20 aa, Artificial Sequence
  Description of Artificial Sequence: Synthetic peptide
  Seed: MDPRMCSLMQGSTLPRRSGA
MDPRMFSLLQLSTIPRRSGA

SEQ ID NO: 101794 - protein, 20 aa, Artificial Sequence
  Description of Artificial Sequence: Synthetic peptide
  Seed: MDPRMCSLMQGSTLPRRSGA
MDPRMFSLLQLSTLPRRSGA

SEQ ID NO: 101795 - protein, 20 aa, Artificial Sequence
  Description of Artificial Sequence: Synthetic peptide
  Seed: MDPRMCSLMQGSTLPRRSGA
MDPRMFSLLQLSTMPRRSGA

SEQ ID NO: 101796 - protein, 20 aa, Artificial Sequence
  Description of Artificial Sequence: Synthetic peptide
  Seed: MDPRMCSLMQGSTLPRRSGA
MDPRMFSLLQLSTNPRRSGA

SEQ ID NO: 101797 - protein, 20 aa, Artificial Sequence
  Description of Artificial Sequence: Synthetic peptide
  Seed: MDPRMCSLMQGSTLPRRSGA
MDPRMFSLLQLSTSPRRSGA

SEQ ID NO: 101798 - protein, 20 aa, Artificial Sequence
  Description of Artificial Sequence: Synthetic peptide
  Seed: MDPRMCSLMQGSTLPRRSGA
MDPRMFSLLQLSTTPRRSGA

SEQ ID NO: 101799 - protein, 20 aa, Artificial Sequence
  Description of Artificial Sequence: Synthetic peptide
  Seed: MDPRMCSLMQGSTLPRRSGA
MDPRMFSLLQLSTVPRRSGA

SEQ ID NO: 101800 - protein, 20 aa, Artificial Sequence
  Description of Artificial Sequence: Synthetic peptide
  Seed: MDPRMCSLMQGSTLPRRSGA
MDPRMFSLLQMSTAPRRSGA

SEQ ID NO: 101801 - protein, 20 aa, Artificial Sequence
  Description of Artificial Sequence: Synthetic peptide
  Seed: MDPRMCSLMQGSTLPRRSGA
MDPRMFSLLQMSTGPRRSGA

SEQ ID NO: 101802 - protein, 20 aa, Artificial Sequence
  Description of Artificial Sequence: Synthetic peptide
  Seed: MDPRMCSLMQGSTLPRRSGA
MDPRMFSLLQMSTIPRRSGA

SEQ ID NO: 101803 - protein, 20 aa, Artificial Sequence
  Description of Artificial Sequence: Synthetic peptide
  Seed: MDPRMCSLMQGSTLPRRSGA
MDPRMFSLLQMSTLPRRSGA

SEQ ID NO: 101804 - protein, 20 aa, Artificial Sequence
  Description of Artificial Sequence: Synthetic peptide
  Seed: MDPRMCSLMQGSTLPRRSGA
MDPRMFSLLQMSTMPRRSGA

SEQ ID NO: 101805 - protein, 20 aa, Artificial Sequence
  Description of Artificial Sequence: Synthetic peptide
  Seed: MDPRMCSLMQGSTLPRRSGA
MDPRMFSLLQMSTNPRRSGA

SEQ ID NO: 101806 - protein, 20 aa, Artificial Sequence
  Description of Artificial Sequence: Synthetic peptide
  Seed: MDPRMCSLMQGSTLPRRSGA
MDPRMFSLLQMSTSPRRSGA

SEQ ID NO: 101807 - protein, 20 aa, Artificial Sequence
  Description of Artificial Sequence: Synthetic peptide
  Seed: MDPRMCSLMQGSTLPRRSGA
MDPRMFSLLQMSTTPRRSGA

SEQ ID NO: 101808 - protein, 20 aa, Artificial Sequence
  Description of Artificial Sequence: Synthetic peptide
  Seed: MDPRMCSLMQGSTLPRRSGA
MDPRMFSLLQMSTVPRRSGA

SEQ ID NO: 101809 - protein, 20 aa, Artificial Sequence
  Description of Artificial Sequence: Synthetic peptide
  Seed: MDPRMCSLMQGSTLPRRSGA
MDPRMFSLLQNSTAPRRSGA

SEQ ID NO: 101810 - protein, 20 aa, Artificial Sequence
  Description of Artificial Sequence: Synthetic peptide
  Seed: MDPRMCSLMQGSTLPRRSGA
MDPRMFSLLQNSTCPRRSGA

SEQ ID NO: 101811 - protein, 20 aa, Artificial Sequence
  Description of Artificial Sequence: Synthetic peptide
  Seed: MDPRMCSLMQGSTLPRRSGA
MDPRMFSLLQNSTFPRRSGA

SEQ ID NO: 101812 - protein, 20 aa, Artificial Sequence
  Description of Artificial Sequence: Synthetic peptide
  Seed: MDPRMCSLMQGSTLPRRSGA
MDPRMFSLLQNSTGPRRSGA

SEQ ID NO: 101813 - protein, 20 aa, Artificial Sequence
  Description of Artificial Sequence: Synthetic peptide
  Seed: MDPRMCSLMQGSTLPRRSGA
MDPRMFSLLQNSTHPRRSGA

SEQ ID NO: 101814 - protein, 20 aa, Artificial Sequence
  Description of Artificial Sequence: Synthetic peptide
  Seed: MDPRMCSLMQGSTLPRRSGA
MDPRMFSLLQNSTIPRRSGA

SEQ ID NO: 101815 - protein, 20 aa, Artificial Sequence
  Description of Artificial Sequence: Synthetic peptide
  Seed: MDPRMCSLMQGSTLPRRSGA
MDPRMFSLLQNSTLPRRSGA

SEQ ID NO: 101816 - protein, 20 aa, Artificial Sequence
  Description of Artificial Sequence: Synthetic peptide
  Seed: MDPRMCSLMQGSTLPRRSGA
MDPRMFSLLQNSTMPRRSGA

SEQ ID NO: 101817 - protein, 20 aa, Artificial Sequence
  Description of Artificial Sequence: Synthetic peptide
  Seed: MDPRMCSLMQGSTLPRRSGA
MDPRMFSLLQNSTNPRRSGA

SEQ ID NO: 101818 - protein, 20 aa, Artificial Sequence
  Description of Artificial Sequence: Synthetic peptide
  Seed: MDPRMCSLMQGSTLPRRSGA
MDPRMFSLLQNSTQPRRSGA

SEQ ID NO: 101819 - protein, 20 aa, Artificial Sequence
  Description of Artificial Sequence: Synthetic peptide
  Seed: MDPRMCSLMQGSTLPRRSGA
MDPRMFSLLQNSTSPRRSGA

SEQ ID NO: 101820 - protein, 20 aa, Artificial Sequence
  Description of Artificial Sequence: Synthetic peptide
  Seed: MDPRMCSLMQGSTLPRRSGA
MDPRMFSLLQNSTTPRRSGA

SEQ ID NO: 101821 - protein, 20 aa, Artificial Sequence
  Description of Artificial Sequence: Synthetic peptide
  Seed: MDPRMCSLMQGSTLPRRSGA
MDPRMFSLLQNSTVPRRSGA

SEQ ID NO: 101822 - protein, 20 aa, Artificial Sequence
  Description of Artificial Sequence: Synthetic peptide
  Seed: MDPRMCSLMQGSTLPRRSGA
MDPRMFSLLQPSTAPRRSGA

SEQ ID NO: 101823 - protein, 20 aa, Artificial Sequence
  Description of Artificial Sequence: Synthetic peptide
  Seed: MDPRMCSLMQGSTLPRRSGA
MDPRMFSLLQPSTCPRRSGA

SEQ ID NO: 101824 - protein, 20 aa, Artificial Sequence
  Description of Artificial Sequence: Synthetic peptide
  Seed: MDPRMCSLMQGSTLPRRSGA
MDPRMFSLLQPSTDPRRSGA

SEQ ID NO: 101825 - protein, 20 aa, Artificial Sequence
  Description of Artificial Sequence: Synthetic peptide
  Seed: MDPRMCSLMQGSTLPRRSGA
MDPRMFSLLQPSTEPRRSGA

SEQ ID NO: 101826 - protein, 20 aa, Artificial Sequence
  Description of Artificial Sequence: Synthetic peptide
  Seed: MDPRMCSLMQGSTLPRRSGA
MDPRMFSLLQPSTFPRRSGA

SEQ ID NO: 101827 - protein, 20 aa, Artificial Sequence
  Description of Artificial Sequence: Synthetic peptide
  Seed: MDPRMCSLMQGSTLPRRSGA
MDPRMFSLLQPSTGPRRSGA

SEQ ID NO: 101828 - protein, 20 aa, Artificial Sequence
  Description of Artificial Sequence: Synthetic peptide
  Seed: MDPRMCSLMQGSTLPRRSGA
MDPRMFSLLQPSTHPRRSGA

SEQ ID NO: 101829 - protein, 20 aa, Artificial Sequence
  Description of Artificial Sequence: Synthetic peptide
  Seed: MDPRMCSLMQGSTLPRRSGA
MDPRMFSLLQPSTIPRRSGA

SEQ ID NO: 101830 - protein, 20 aa, Artificial Sequence
  Description of Artificial Sequence: Synthetic peptide
  Seed: MDPRMCSLMQGSTLPRRSGA
MDPRMFSLLQPSTLPRRSGA

SEQ ID NO: 101831 - protein, 20 aa, Artificial Sequence
  Description of Artificial Sequence: Synthetic peptide
  Seed: MDPRMCSLMQGSTLPRRSGA
MDPRMFSLLQPSTMPRRSGA

SEQ ID NO: 101832 - protein, 20 aa, Artificial Sequence
  Description of Artificial Sequence: Synthetic peptide
  Seed: MDPRMCSLMQGSTLPRRSGA
MDPRMFSLLQPSTNPRRSGA

SEQ ID NO: 101833 - protein, 20 aa, Artificial Sequence
  Description of Artificial Sequence: Synthetic peptide
  Seed: MDPRMCSLMQGSTLPRRSGA
MDPRMFSLLQPSTPPRRSGA

SEQ ID NO: 101834 - protein, 20 aa, Artificial Sequence
  Description of Artificial Sequence: Synthetic peptide
  Seed: MDPRMCSLMQGSTLPRRSGA
MDPRMFSLLQPSTQPRRSGA

SEQ ID NO: 101835 - protein, 20 aa, Artificial Sequence
  Description of Artificial Sequence: Synthetic peptide
  Seed: MDPRMCSLMQGSTLPRRSGA
MDPRMFSLLQPSTSPRRSGA

SEQ ID NO: 101836 - protein, 20 aa, Artificial Sequence
  Description of Artificial Sequence: Synthetic peptide
  Seed: MDPRMCSLMQGSTLPRRSGA
MDPRMFSLLQPSTTPRRSGA

SEQ ID NO: 101837 - protein, 20 aa, Artificial Sequence
  Description of Artificial Sequence: Synthetic peptide
  Seed: MDPRMCSLMQGSTLPRRSGA
MDPRMFSLLQPSTVPRRSGA

SEQ ID NO: 101838 - protein, 20 aa, Artificial Sequence
  Description of Artificial Sequence: Synthetic peptide
  Seed: MDPRMCSLMQGSTLPRRSGA
MDPRMFSLLQPSTWPRRSGA

SEQ ID NO: 101839 - protein, 20 aa, Artificial Sequence
  Description of Artificial Sequence: Synthetic peptide
  Seed: MDPRMCSLMQGSTLPRRSGA
MDPRMFSLLQPSTYPRRSGA

SEQ ID NO: 101840 - protein, 20 aa, Artificial Sequence
  Description of Artificial Sequence: Synthetic peptide
  Seed: MDPRMCSLMQGSTLPRRSGA
MDPRMFSLLQQSTAPRRSGA

SEQ ID NO: 101841 - protein, 20 aa, Artificial Sequence
  Description of Artificial Sequence: Synthetic peptide
  Seed: MDPRMCSLMQGSTLPRRSGA
MDPRMFSLLQQSTIPRRSGA

SEQ ID NO: 101842 - protein, 20 aa, Artificial Sequence
  Description of Artificial Sequence: Synthetic peptide
  Seed: MDPRMCSLMQGSTLPRRSGA
MDPRMFSLLQQSTLPRRSGA

SEQ ID NO: 101843 - protein, 20 aa, Artificial Sequence
  Description of Artificial Sequence: Synthetic peptide
  Seed: MDPRMCSLMQGSTLPRRSGA
MDPRMFSLLQQSTVPRRSGA

SEQ ID NO: 101844 - protein, 20 aa, Artificial Sequence
  Description of Artificial Sequence: Synthetic peptide
  Seed: MDPRMCSLMQGSTLPRRSGA
MDPRMFSLLQSSTAPRRSGA

SEQ ID NO: 101845 - protein, 20 aa, Artificial Sequence
  Description of Artificial Sequence: Synthetic peptide
  Seed: MDPRMCSLMQGSTLPRRSGA
MDPRMFSLLQSSTCPRRSGA

SEQ ID NO: 101846 - protein, 20 aa, Artificial Sequence
  Description of Artificial Sequence: Synthetic peptide
  Seed: MDPRMCSLMQGSTLPRRSGA
MDPRMFSLLQSSTDPRRSGA

SEQ ID NO: 101847 - protein, 20 aa, Artificial Sequence
  Description of Artificial Sequence: Synthetic peptide
  Seed: MDPRMCSLMQGSTLPRRSGA
MDPRMFSLLQSSTEPRRSGA

SEQ ID NO: 101848 - protein, 20 aa, Artificial Sequence
  Description of Artificial Sequence: Synthetic peptide
  Seed: MDPRMCSLMQGSTLPRRSGA
MDPRMFSLLQSSTFPRRSGA

SEQ ID NO: 101849 - protein, 20 aa, Artificial Sequence
  Description of Artificial Sequence: Synthetic peptide
  Seed: MDPRMCSLMQGSTLPRRSGA
MDPRMFSLLQSSTGPRRSGA

SEQ ID NO: 101850 - protein, 20 aa, Artificial Sequence
  Description of Artificial Sequence: Synthetic peptide
  Seed: MDPRMCSLMQGSTLPRRSGA
MDPRMFSLLQSSTHPRRSGA

SEQ ID NO: 101851 - protein, 20 aa, Artificial Sequence
  Description of Artificial Sequence: Synthetic peptide
  Seed: MDPRMCSLMQGSTLPRRSGA
MDPRMFSLLQSSTIPRRSGA

SEQ ID NO: 101852 - protein, 20 aa, Artificial Sequence
  Description of Artificial Sequence: Synthetic peptide
  Seed: MDPRMCSLMQGSTLPRRSGA
MDPRMFSLLQSSTLPRRSGA

SEQ ID NO: 101853 - protein, 20 aa, Artificial Sequence
  Description of Artificial Sequence: Synthetic peptide
  Seed: MDPRMCSLMQGSTLPRRSGA
MDPRMFSLLQSSTMPRRSGA

SEQ ID NO: 101854 - protein, 20 aa, Artificial Sequence
  Description of Artificial Sequence: Synthetic peptide
  Seed: MDPRMCSLMQGSTLPRRSGA
MDPRMFSLLQSSTNPRRSGA

SEQ ID NO: 101855 - protein, 20 aa, Artificial Sequence
  Description of Artificial Sequence: Synthetic peptide
  Seed: MDPRMCSLMQGSTLPRRSGA
MDPRMFSLLQSSTPPRRSGA

SEQ ID NO: 101856 - protein, 20 aa, Artificial Sequence
  Description of Artificial Sequence: Synthetic peptide
  Seed: MDPRMCSLMQGSTLPRRSGA
MDPRMFSLLQSSTQPRRSGA

SEQ ID NO: 101857 - protein, 20 aa, Artificial Sequence
  Description of Artificial Sequence: Synthetic peptide
  Seed: MDPRMCSLMQGSTLPRRSGA
MDPRMFSLLQSSTSPRRSGA

SEQ ID NO: 101858 - protein, 20 aa, Artificial Sequence
  Description of Artificial Sequence: Synthetic peptide
  Seed: MDPRMCSLMQGSTLPRRSGA
MDPRMFSLLQSSTTPRRSGA

SEQ ID NO: 101859 - protein, 20 aa, Artificial Sequence
  Description of Artificial Sequence: Synthetic peptide
  Seed: MDPRMCSLMQGSTLPRRSGA
MDPRMFSLLQSSTVPRRSGA

SEQ ID NO: 101860 - protein, 20 aa, Artificial Sequence
  Description of Artificial Sequence: Synthetic peptide
  Seed: MDPRMCSLMQGSTLPRRSGA
MDPRMFSLLQSSTYPRRSGA

SEQ ID NO: 101861 - protein, 20 aa, Artificial Sequence
  Description of Artificial Sequence: Synthetic peptide
  Seed: MDPRMCSLMQGSTLPRRSGA
MDPRMFSLLQTSTAPRRSGA

SEQ ID NO: 101862 - protein, 20 aa, Artificial Sequence
  Description of Artificial Sequence: Synthetic peptide
  Seed: MDPRMCSLMQGSTLPRRSGA
MDPRMFSLLQTSTCPRRSGA

SEQ ID NO: 101863 - protein, 20 aa, Artificial Sequence
  Description of Artificial Sequence: Synthetic peptide
  Seed: MDPRMCSLMQGSTLPRRSGA
MDPRMFSLLQTSTDPRRSGA

SEQ ID NO: 101864 - protein, 20 aa, Artificial Sequence
  Description of Artificial Sequence: Synthetic peptide
  Seed: MDPRMCSLMQGSTLPRRSGA
MDPRMFSLLQTSTEPRRSGA

SEQ ID NO: 101865 - protein, 20 aa, Artificial Sequence
  Description of Artificial Sequence: Synthetic peptide
  Seed: MDPRMCSLMQGSTLPRRSGA
MDPRMFSLLQTSTFPRRSGA

SEQ ID NO: 101866 - protein, 20 aa, Artificial Sequence
  Description of Artificial Sequence: Synthetic peptide
  Seed: MDPRMCSLMQGSTLPRRSGA
MDPRMFSLLQTSTGPRRSGA

SEQ ID NO: 101867 - protein, 20 aa, Artificial Sequence
  Description of Artificial Sequence: Synthetic peptide
  Seed: MDPRMCSLMQGSTLPRRSGA
MDPRMFSLLQTSTHPRRSGA

SEQ ID NO: 101868 - protein, 20 aa, Artificial Sequence
  Description of Artificial Sequence: Synthetic peptide
  Seed: MDPRMCSLMQGSTLPRRSGA
MDPRMFSLLQTSTIPRRSGA

SEQ ID NO: 101869 - protein, 20 aa, Artificial Sequence
  Description of Artificial Sequence: Synthetic peptide
  Seed: MDPRMCSLMQGSTLPRRSGA
MDPRMFSLLQTSTLPRRSGA

SEQ ID NO: 101870 - protein, 20 aa, Artificial Sequence
  Description of Artificial Sequence: Synthetic peptide
  Seed: MDPRMCSLMQGSTLPRRSGA
MDPRMFSLLQTSTMPRRSGA

SEQ ID NO: 101871 - protein, 20 aa, Artificial Sequence
  Description of Artificial Sequence: Synthetic peptide
  Seed: MDPRMCSLMQGSTLPRRSGA
MDPRMFSLLQTSTNPRRSGA

SEQ ID NO: 101872 - protein, 20 aa, Artificial Sequence
  Description of Artificial Sequence: Synthetic peptide
  Seed: MDPRMCSLMQGSTLPRRSGA
MDPRMFSLLQTSTPPRRSGA

SEQ ID NO: 101873 - protein, 20 aa, Artificial Sequence
  Description of Artificial Sequence: Synthetic peptide
  Seed: MDPRMCSLMQGSTLPRRSGA
MDPRMFSLLQTSTQPRRSGA

SEQ ID NO: 101874 - protein, 20 aa, Artificial Sequence
  Description of Artificial Sequence: Synthetic peptide
  Seed: MDPRMCSLMQGSTLPRRSGA
MDPRMFSLLQTSTSPRRSGA

SEQ ID NO: 101875 - protein, 20 aa, Artificial Sequence
  Description of Artificial Sequence: Synthetic peptide
  Seed: MDPRMCSLMQGSTLPRRSGA
MDPRMFSLLQTSTTPRRSGA

SEQ ID NO: 101876 - protein, 20 aa, Artificial Sequence
  Description of Artificial Sequence: Synthetic peptide
  Seed: MDPRMCSLMQGSTLPRRSGA
MDPRMFSLLQTSTVPRRSGA

SEQ ID NO: 101877 - protein, 20 aa, Artificial Sequence
  Description of Artificial Sequence: Synthetic peptide
  Seed: MDPRMCSLMQGSTLPRRSGA
MDPRMFSLLQVSTAPRRSGA

SEQ ID NO: 101878 - protein, 20 aa, Artificial Sequence
  Description of Artificial Sequence: Synthetic peptide
  Seed: MDPRMCSLMQGSTLPRRSGA
MDPRMFSLLQVSTCPRRSGA

SEQ ID NO: 101879 - protein, 20 aa, Artificial Sequence
  Description of Artificial Sequence: Synthetic peptide
  Seed: MDPRMCSLMQGSTLPRRSGA
MDPRMFSLLQVSTDPRRSGA

SEQ ID NO: 101880 - protein, 20 aa, Artificial Sequence
  Description of Artificial Sequence: Synthetic peptide
  Seed: MDPRMCSLMQGSTLPRRSGA
MDPRMFSLLQVSTEPRRSGA

SEQ ID NO: 101881 - protein, 20 aa, Artificial Sequence
  Description of Artificial Sequence: Synthetic peptide
  Seed: MDPRMCSLMQGSTLPRRSGA
MDPRMFSLLQVSTGPRRSGA

SEQ ID NO: 101882 - protein, 20 aa, Artificial Sequence
  Description of Artificial Sequence: Synthetic peptide
  Seed: MDPRMCSLMQGSTLPRRSGA
MDPRMFSLLQVSTHPRRSGA

SEQ ID NO: 101883 - protein, 20 aa, Artificial Sequence
  Description of Artificial Sequence: Synthetic peptide
  Seed: MDPRMCSLMQGSTLPRRSGA
MDPRMFSLLQVSTIPRRSGA

SEQ ID NO: 101884 - protein, 20 aa, Artificial Sequence
  Description of Artificial Sequence: Synthetic peptide
  Seed: MDPRMCSLMQGSTLPRRSGA
MDPRMFSLLQVSTLPRRSGA

SEQ ID NO: 101885 - protein, 20 aa, Artificial Sequence
  Description of Artificial Sequence: Synthetic peptide
  Seed: MDPRMCSLMQGSTLPRRSGA
MDPRMFSLLQVSTMPRRSGA

SEQ ID NO: 101886 - protein, 20 aa, Artificial Sequence
  Description of Artificial Sequence: Synthetic peptide
  Seed: MDPRMCSLMQGSTLPRRSGA
MDPRMFSLLQVSTNPRRSGA

SEQ ID NO: 101887 - protein, 20 aa, Artificial Sequence
  Description of Artificial Sequence: Synthetic peptide
  Seed: MDPRMCSLMQGSTLPRRSGA
MDPRMFSLLQVSTPPRRSGA

SEQ ID NO: 101888 - protein, 20 aa, Artificial Sequence
  Description of Artificial Sequence: Synthetic peptide
  Seed: MDPRMCSLMQGSTLPRRSGA
MDPRMFSLLQVSTQPRRSGA

SEQ ID NO: 101889 - protein, 20 aa, Artificial Sequence
  Description of Artificial Sequence: Synthetic peptide
  Seed: MDPRMCSLMQGSTLPRRSGA
MDPRMFSLLQVSTSPRRSGA

SEQ ID NO: 101890 - protein, 20 aa, Artificial Sequence
  Description of Artificial Sequence: Synthetic peptide
  Seed: MDPRMCSLMQGSTLPRRSGA
MDPRMFSLLQVSTTPRRSGA

SEQ ID NO: 101891 - protein, 20 aa, Artificial Sequence
  Description of Artificial Sequence: Synthetic peptide
  Seed: MDPRMCSLMQGSTLPRRSGA
MDPRMFSLLQVSTVPRRSGA

SEQ ID NO: 101892 - protein, 20 aa, Artificial Sequence
  Description of Artificial Sequence: Synthetic peptide
  Seed: MDPRMCSLMQGSTLPRRSGA
MDPRMFSLMQASTAPRRSGA

SEQ ID NO: 101893 - protein, 20 aa, Artificial Sequence
  Description of Artificial Sequence: Synthetic peptide
  Seed: MDPRMCSLMQGSTLPRRSGA
MDPRMFSLMQASTCPRRSGA

SEQ ID NO: 101894 - protein, 20 aa, Artificial Sequence
  Description of Artificial Sequence: Synthetic peptide
  Seed: MDPRMCSLMQGSTLPRRSGA
MDPRMFSLMQASTDPRRSGA

SEQ ID NO: 101895 - protein, 20 aa, Artificial Sequence
  Description of Artificial Sequence: Synthetic peptide
  Seed: MDPRMCSLMQGSTLPRRSGA
MDPRMFSLMQASTEPRRSGA

SEQ ID NO: 101896 - protein, 20 aa, Artificial Sequence
  Description of Artificial Sequence: Synthetic peptide
  Seed: MDPRMCSLMQGSTLPRRSGA
MDPRMFSLMQASTFPRRSGA

SEQ ID NO: 101897 - protein, 20 aa, Artificial Sequence
  Description of Artificial Sequence: Synthetic peptide
  Seed: MDPRMCSLMQGSTLPRRSGA
MDPRMFSLMQASTGPRRSGA

SEQ ID NO: 101898 - protein, 20 aa, Artificial Sequence
  Description of Artificial Sequence: Synthetic peptide
  Seed: MDPRMCSLMQGSTLPRRSGA
MDPRMFSLMQASTHPRRSGA

SEQ ID NO: 101899 - protein, 20 aa, Artificial Sequence
  Description of Artificial Sequence: Synthetic peptide
  Seed: MDPRMCSLMQGSTLPRRSGA
MDPRMFSLMQASTIPRRSGA

SEQ ID NO: 101900 - protein, 20 aa, Artificial Sequence
  Description of Artificial Sequence: Synthetic peptide
  Seed: MDPRMCSLMQGSTLPRRSGA
MDPRMFSLMQASTKPRRSGA

SEQ ID NO: 101901 - protein, 20 aa, Artificial Sequence
  Description of Artificial Sequence: Synthetic peptide
  Seed: MDPRMCSLMQGSTLPRRSGA
MDPRMFSLMQASTLPRRSGA

SEQ ID NO: 101902 - protein, 20 aa, Artificial Sequence
  Description of Artificial Sequence: Synthetic peptide
  Seed: MDPRMCSLMQGSTLPRRSGA
MDPRMFSLMQASTMPRRSGA

SEQ ID NO: 101903 - protein, 20 aa, Artificial Sequence
  Description of Artificial Sequence: Synthetic peptide
  Seed: MDPRMCSLMQGSTLPRRSGA
MDPRMFSLMQASTNPRRSGA

SEQ ID NO: 101904 - protein, 20 aa, Artificial Sequence
  Description of Artificial Sequence: Synthetic peptide
  Seed: MDPRMCSLMQGSTLPRRSGA
MDPRMFSLMQASTPPRRSGA

SEQ ID NO: 101905 - protein, 20 aa, Artificial Sequence
  Description of Artificial Sequence: Synthetic peptide
  Seed: MDPRMCSLMQGSTLPRRSGA
MDPRMFSLMQASTQPRRSGA

SEQ ID NO: 101906 - protein, 20 aa, Artificial Sequence
  Description of Artificial Sequence: Synthetic peptide
  Seed: MDPRMCSLMQGSTLPRRSGA
MDPRMFSLMQASTRPRRSGA

SEQ ID NO: 101907 - protein, 20 aa, Artificial Sequence
  Description of Artificial Sequence: Synthetic peptide
  Seed: MDPRMCSLMQGSTLPRRSGA
MDPRMFSLMQASTSPRRSGA

SEQ ID NO: 101908 - protein, 20 aa, Artificial Sequence
  Description of Artificial Sequence: Synthetic peptide
  Seed: MDPRMCSLMQGSTLPRRSGA
MDPRMFSLMQASTTPRRSGA

SEQ ID NO: 101909 - protein, 20 aa, Artificial Sequence
  Description of Artificial Sequence: Synthetic peptide
  Seed: MDPRMCSLMQGSTLPRRSGA
MDPRMFSLMQASTVPRRSGA

SEQ ID NO: 101910 - protein, 20 aa, Artificial Sequence
  Description of Artificial Sequence: Synthetic peptide
  Seed: MDPRMCSLMQGSTLPRRSGA
MDPRMFSLMQASTWPRRSGA

SEQ ID NO: 101911 - protein, 20 aa, Artificial Sequence
  Description of Artificial Sequence: Synthetic peptide
  Seed: MDPRMCSLMQGSTLPRRSGA
MDPRMFSLMQASTYPRRSGA

SEQ ID NO: 101912 - protein, 20 aa, Artificial Sequence
  Description of Artificial Sequence: Synthetic peptide
  Seed: MDPRMCSLMQGSTLPRRSGA
MDPRMFSLMQCSTAPRRSGA

SEQ ID NO: 101913 - protein, 20 aa, Artificial Sequence
  Description of Artificial Sequence: Synthetic peptide
  Seed: MDPRMCSLMQGSTLPRRSGA
MDPRMFSLMQCSTIPRRSGA

SEQ ID NO: 101914 - protein, 20 aa, Artificial Sequence
  Description of Artificial Sequence: Synthetic peptide
  Seed: MDPRMCSLMQGSTLPRRSGA
MDPRMFSLMQCSTLPRRSGA

SEQ ID NO: 101915 - protein, 20 aa, Artificial Sequence
  Description of Artificial Sequence: Synthetic peptide
  Seed: MDPRMCSLMQGSTLPRRSGA
MDPRMFSLMQCSTNPRRSGA

SEQ ID NO: 101916 - protein, 20 aa, Artificial Sequence
  Description of Artificial Sequence: Synthetic peptide
  Seed: MDPRMCSLMQGSTLPRRSGA
MDPRMFSLMQCSTSPRRSGA

SEQ ID NO: 101917 - protein, 20 aa, Artificial Sequence
  Description of Artificial Sequence: Synthetic peptide
  Seed: MDPRMCSLMQGSTLPRRSGA
MDPRMFSLMQCSTVPRRSGA

SEQ ID NO: 101918 - protein, 20 aa, Artificial Sequence
  Description of Artificial Sequence: Synthetic peptide
  Seed: MDPRMCSLMQGSTLPRRSGA
MDPRMFSLMQDSTLPRRSGA

SEQ ID NO: 101919 - protein, 20 aa, Artificial Sequence
  Description of Artificial Sequence: Synthetic peptide
  Seed: MDPRMCSLMQGSTLPRRSGA
MDPRMFSLMQDSTVPRRSGA

SEQ ID NO: 101920 - protein, 20 aa, Artificial Sequence
  Description of Artificial Sequence: Synthetic peptide
  Seed: MDPRMCSLMQGSTLPRRSGA
MDPRMFSLMQESTAPRRSGA

SEQ ID NO: 101921 - protein, 20 aa, Artificial Sequence
  Description of Artificial Sequence: Synthetic peptide
  Seed: MDPRMCSLMQGSTLPRRSGA
MDPRMFSLMQESTIPRRSGA

SEQ ID NO: 101922 - protein, 20 aa, Artificial Sequence
  Description of Artificial Sequence: Synthetic peptide
  Seed: MDPRMCSLMQGSTLPRRSGA
MDPRMFSLMQESTLPRRSGA

SEQ ID NO: 101923 - protein, 20 aa, Artificial Sequence
  Description of Artificial Sequence: Synthetic peptide
  Seed: MDPRMCSLMQGSTLPRRSGA
MDPRMFSLMQESTNPRRSGA

SEQ ID NO: 101924 - protein, 20 aa, Artificial Sequence
  Description of Artificial Sequence: Synthetic peptide
  Seed: MDPRMCSLMQGSTLPRRSGA
MDPRMFSLMQESTSPRRSGA

SEQ ID NO: 101925 - protein, 20 aa, Artificial Sequence
  Description of Artificial Sequence: Synthetic peptide
  Seed: MDPRMCSLMQGSTLPRRSGA
MDPRMFSLMQESTVPRRSGA

SEQ ID NO: 101926 - protein, 20 aa, Artificial Sequence
  Description of Artificial Sequence: Synthetic peptide
  Seed: MDPRMCSLMQGSTLPRRSGA
MDPRMFSLMQFSTAPRRSGA

SEQ ID NO: 101927 - protein, 20 aa, Artificial Sequence
  Description of Artificial Sequence: Synthetic peptide
  Seed: MDPRMCSLMQGSTLPRRSGA
MDPRMFSLMQGSTAPRRSGA

SEQ ID NO: 101928 - protein, 20 aa, Artificial Sequence
  Description of Artificial Sequence: Synthetic peptide
  Seed: MDPRMCSLMQGSTLPRRSGA
MDPRMFSLMQGSTCPRRSGA

SEQ ID NO: 101929 - protein, 20 aa, Artificial Sequence
  Description of Artificial Sequence: Synthetic peptide
  Seed: MDPRMCSLMQGSTLPRRSGA
MDPRMFSLMQGSTDPRRSGA

SEQ ID NO: 101930 - protein, 20 aa, Artificial Sequence
  Description of Artificial Sequence: Synthetic peptide
  Seed: MDPRMCSLMQGSTLPRRSGA
MDPRMFSLMQGSTEPRRSGA

SEQ ID NO: 101931 - protein, 20 aa, Artificial Sequence
  Description of Artificial Sequence: Synthetic peptide
  Seed: MDPRMCSLMQGSTLPRRSGA
MDPRMFSLMQGSTFPRRSGA

SEQ ID NO: 101932 - protein, 20 aa, Artificial Sequence
  Description of Artificial Sequence: Synthetic peptide
  Seed: MDPRMCSLMQGSTLPRRSGA
MDPRMFSLMQGSTGPRRSGA

SEQ ID NO: 101933 - protein, 20 aa, Artificial Sequence
  Description of Artificial Sequence: Synthetic peptide
  Seed: MDPRMCSLMQGSTLPRRSGA
MDPRMFSLMQGSTHPRRSGA

SEQ ID NO: 101934 - protein, 20 aa, Artificial Sequence
  Description of Artificial Sequence: Synthetic peptide
  Seed: MDPRMCSLMQGSTLPRRSGA
MDPRMFSLMQGSTIPRRSGA

SEQ ID NO: 101935 - protein, 20 aa, Artificial Sequence
  Description of Artificial Sequence: Synthetic peptide
  Seed: MDPRMCSLMQGSTLPRRSGA
MDPRMFSLMQGSTLPRRSGA

SEQ ID NO: 101936 - protein, 20 aa, Artificial Sequence
  Description of Artificial Sequence: Synthetic peptide
  Seed: MDPRMCSLMQGSTLPRRSGA
MDPRMFSLMQGSTMPRRSGA

SEQ ID NO: 101937 - protein, 20 aa, Artificial Sequence
  Description of Artificial Sequence: Synthetic peptide
  Seed: MDPRMCSLMQGSTLPRRSGA
MDPRMFSLMQGSTNPRRSGA

SEQ ID NO: 101938 - protein, 20 aa, Artificial Sequence
  Description of Artificial Sequence: Synthetic peptide
  Seed: MDPRMCSLMQGSTLPRRSGA
MDPRMFSLMQGSTPPRRSGA

SEQ ID NO: 101939 - protein, 20 aa, Artificial Sequence
  Description of Artificial Sequence: Synthetic peptide
  Seed: MDPRMCSLMQGSTLPRRSGA
MDPRMFSLMQGSTQPRRSGA

SEQ ID NO: 101940 - protein, 20 aa, Artificial Sequence
  Description of Artificial Sequence: Synthetic peptide
  Seed: MDPRMCSLMQGSTLPRRSGA
MDPRMFSLMQGSTSPRRSGA

SEQ ID NO: 101941 - protein, 20 aa, Artificial Sequence
  Description of Artificial Sequence: Synthetic peptide
  Seed: MDPRMCSLMQGSTLPRRSGA
MDPRMFSLMQGSTTPRRSGA

SEQ ID NO: 101942 - protein, 20 aa, Artificial Sequence
  Description of Artificial Sequence: Synthetic peptide
  Seed: MDPRMCSLMQGSTLPRRSGA
MDPRMFSLMQGSTVPRRSGA

SEQ ID NO: 101943 - protein, 20 aa, Artificial Sequence
  Description of Artificial Sequence: Synthetic peptide
  Seed: MDPRMCSLMQGSTLPRRSGA
MDPRMFSLMQGSTYPRRSGA

SEQ ID NO: 101944 - protein, 20 aa, Artificial Sequence
  Description of Artificial Sequence: Synthetic peptide
  Seed: MDPRMCSLMQGSTLPRRSGA
MDPRMFSLMQHSTAPRRSGA

SEQ ID NO: 101945 - protein, 20 aa, Artificial Sequence
  Description of Artificial Sequence: Synthetic peptide
  Seed: MDPRMCSLMQGSTLPRRSGA
MDPRMFSLMQHSTIPRRSGA

SEQ ID NO: 101946 - protein, 20 aa, Artificial Sequence
  Description of Artificial Sequence: Synthetic peptide
  Seed: MDPRMCSLMQGSTLPRRSGA
MDPRMFSLMQHSTLPRRSGA

SEQ ID NO: 101947 - protein, 20 aa, Artificial Sequence
  Description of Artificial Sequence: Synthetic peptide
  Seed: MDPRMCSLMQGSTLPRRSGA
MDPRMFSLMQHSTMPRRSGA

SEQ ID NO: 101948 - protein, 20 aa, Artificial Sequence
  Description of Artificial Sequence: Synthetic peptide
  Seed: MDPRMCSLMQGSTLPRRSGA
MDPRMFSLMQHSTNPRRSGA

SEQ ID NO: 101949 - protein, 20 aa, Artificial Sequence
  Description of Artificial Sequence: Synthetic peptide
  Seed: MDPRMCSLMQGSTLPRRSGA
MDPRMFSLMQHSTSPRRSGA

SEQ ID NO: 101950 - protein, 20 aa, Artificial Sequence
  Description of Artificial Sequence: Synthetic peptide
  Seed: MDPRMCSLMQGSTLPRRSGA
MDPRMFSLMQHSTVPRRSGA

SEQ ID NO: 101951 - protein, 20 aa, Artificial Sequence
  Description of Artificial Sequence: Synthetic peptide
  Seed: MDPRMCSLMQGSTLPRRSGA
MDPRMFSLMQISTAPRRSGA

SEQ ID NO: 101952 - protein, 20 aa, Artificial Sequence
  Description of Artificial Sequence: Synthetic peptide
  Seed: MDPRMCSLMQGSTLPRRSGA
MDPRMFSLMQISTCPRRSGA

SEQ ID NO: 101953 - protein, 20 aa, Artificial Sequence
  Description of Artificial Sequence: Synthetic peptide
  Seed: MDPRMCSLMQGSTLPRRSGA
MDPRMFSLMQISTDPRRSGA

SEQ ID NO: 101954 - protein, 20 aa, Artificial Sequence
  Description of Artificial Sequence: Synthetic peptide
  Seed: MDPRMCSLMQGSTLPRRSGA
MDPRMFSLMQISTEPRRSGA

SEQ ID NO: 101955 - protein, 20 aa, Artificial Sequence
  Description of Artificial Sequence: Synthetic peptide
  Seed: MDPRMCSLMQGSTLPRRSGA
MDPRMFSLMQISTGPRRSGA

SEQ ID NO: 101956 - protein, 20 aa, Artificial Sequence
  Description of Artificial Sequence: Synthetic peptide
  Seed: MDPRMCSLMQGSTLPRRSGA
MDPRMFSLMQISTHPRRSGA

SEQ ID NO: 101957 - protein, 20 aa, Artificial Sequence
  Description of Artificial Sequence: Synthetic peptide
  Seed: MDPRMCSLMQGSTLPRRSGA
MDPRMFSLMQISTIPRRSGA

SEQ ID NO: 101958 - protein, 20 aa, Artificial Sequence
  Description of Artificial Sequence: Synthetic peptide
  Seed: MDPRMCSLMQGSTLPRRSGA
MDPRMFSLMQISTLPRRSGA

SEQ ID NO: 101959 - protein, 20 aa, Artificial Sequence
  Description of Artificial Sequence: Synthetic peptide
  Seed: MDPRMCSLMQGSTLPRRSGA
MDPRMFSLMQISTMPRRSGA

SEQ ID NO: 101960 - protein, 20 aa, Artificial Sequence
  Description of Artificial Sequence: Synthetic peptide
  Seed: MDPRMCSLMQGSTLPRRSGA
MDPRMFSLMQISTNPRRSGA

SEQ ID NO: 101961 - protein, 20 aa, Artificial Sequence
  Description of Artificial Sequence: Synthetic peptide
  Seed: MDPRMCSLMQGSTLPRRSGA
MDPRMFSLMQISTPPRRSGA

SEQ ID NO: 101962 - protein, 20 aa, Artificial Sequence
  Description of Artificial Sequence: Synthetic peptide
  Seed: MDPRMCSLMQGSTLPRRSGA
MDPRMFSLMQISTQPRRSGA

SEQ ID NO: 101963 - protein, 20 aa, Artificial Sequence
  Description of Artificial Sequence: Synthetic peptide
  Seed: MDPRMCSLMQGSTLPRRSGA
MDPRMFSLMQISTSPRRSGA

SEQ ID NO: 101964 - protein, 20 aa, Artificial Sequence
  Description of Artificial Sequence: Synthetic peptide
  Seed: MDPRMCSLMQGSTLPRRSGA
MDPRMFSLMQISTTPRRSGA

SEQ ID NO: 101965 - protein, 20 aa, Artificial Sequence
  Description of Artificial Sequence: Synthetic peptide
  Seed: MDPRMCSLMQGSTLPRRSGA
MDPRMFSLMQISTVPRRSGA

SEQ ID NO: 101966 - protein, 20 aa, Artificial Sequence
  Description of Artificial Sequence: Synthetic peptide
  Seed: MDPRMCSLMQGSTLPRRSGA
MDPRMFSLMQLSTAPRRSGA

SEQ ID NO: 101967 - protein, 20 aa, Artificial Sequence
  Description of Artificial Sequence: Synthetic peptide
  Seed: MDPRMCSLMQGSTLPRRSGA
MDPRMFSLMQLSTGPRRSGA

SEQ ID NO: 101968 - protein, 20 aa, Artificial Sequence
  Description of Artificial Sequence: Synthetic peptide
  Seed: MDPRMCSLMQGSTLPRRSGA
MDPRMFSLMQLSTHPRRSGA

SEQ ID NO: 101969 - protein, 20 aa, Artificial Sequence
  Description of Artificial Sequence: Synthetic peptide
  Seed: MDPRMCSLMQGSTLPRRSGA
MDPRMFSLMQLSTIPRRSGA

SEQ ID NO: 101970 - protein, 20 aa, Artificial Sequence
  Description of Artificial Sequence: Synthetic peptide
  Seed: MDPRMCSLMQGSTLPRRSGA
MDPRMFSLMQLSTLPRRSGA

SEQ ID NO: 101971 - protein, 20 aa, Artificial Sequence
  Description of Artificial Sequence: Synthetic peptide
  Seed: MDPRMCSLMQGSTLPRRSGA
MDPRMFSLMQLSTMPRRSGA

SEQ ID NO: 101972 - protein, 20 aa, Artificial Sequence
  Description of Artificial Sequence: Synthetic peptide
  Seed: MDPRMCSLMQGSTLPRRSGA
MDPRMFSLMQLSTNPRRSGA

SEQ ID NO: 101973 - protein, 20 aa, Artificial Sequence
  Description of Artificial Sequence: Synthetic peptide
  Seed: MDPRMCSLMQGSTLPRRSGA
MDPRMFSLMQLSTQPRRSGA

SEQ ID NO: 101974 - protein, 20 aa, Artificial Sequence
  Description of Artificial Sequence: Synthetic peptide
  Seed: MDPRMCSLMQGSTLPRRSGA
MDPRMFSLMQLSTSPRRSGA

SEQ ID NO: 101975 - protein, 20 aa, Artificial Sequence
  Description of Artificial Sequence: Synthetic peptide
  Seed: MDPRMCSLMQGSTLPRRSGA
MDPRMFSLMQLSTTPRRSGA

SEQ ID NO: 101976 - protein, 20 aa, Artificial Sequence
  Description of Artificial Sequence: Synthetic peptide
  Seed: MDPRMCSLMQGSTLPRRSGA
MDPRMFSLMQLSTVPRRSGA

SEQ ID NO: 101977 - protein, 20 aa, Artificial Sequence
  Description of Artificial Sequence: Synthetic peptide
  Seed: MDPRMCSLMQGSTLPRRSGA
MDPRMFSLMQMSTAPRRSGA

SEQ ID NO: 101978 - protein, 20 aa, Artificial Sequence
  Description of Artificial Sequence: Synthetic peptide
  Seed: MDPRMCSLMQGSTLPRRSGA
MDPRMFSLMQMSTGPRRSGA

SEQ ID NO: 101979 - protein, 20 aa, Artificial Sequence
  Description of Artificial Sequence: Synthetic peptide
  Seed: MDPRMCSLMQGSTLPRRSGA
MDPRMFSLMQMSTHPRRSGA

SEQ ID NO: 101980 - protein, 20 aa, Artificial Sequence
  Description of Artificial Sequence: Synthetic peptide
  Seed: MDPRMCSLMQGSTLPRRSGA
MDPRMFSLMQMSTIPRRSGA

SEQ ID NO: 101981 - protein, 20 aa, Artificial Sequence
  Description of Artificial Sequence: Synthetic peptide
  Seed: MDPRMCSLMQGSTLPRRSGA
MDPRMFSLMQMSTLPRRSGA

SEQ ID NO: 101982 - protein, 20 aa, Artificial Sequence
  Description of Artificial Sequence: Synthetic peptide
  Seed: MDPRMCSLMQGSTLPRRSGA
MDPRMFSLMQMSTMPRRSGA

SEQ ID NO: 101983 - protein, 20 aa, Artificial Sequence
  Description of Artificial Sequence: Synthetic peptide
  Seed: MDPRMCSLMQGSTLPRRSGA
MDPRMFSLMQMSTNPRRSGA

SEQ ID NO: 101984 - protein, 20 aa, Artificial Sequence
  Description of Artificial Sequence: Synthetic peptide
  Seed: MDPRMCSLMQGSTLPRRSGA
MDPRMFSLMQMSTQPRRSGA

SEQ ID NO: 101985 - protein, 20 aa, Artificial Sequence
  Description of Artificial Sequence: Synthetic peptide
  Seed: MDPRMCSLMQGSTLPRRSGA
MDPRMFSLMQMSTSPRRSGA

SEQ ID NO: 101986 - protein, 20 aa, Artificial Sequence
  Description of Artificial Sequence: Synthetic peptide
  Seed: MDPRMCSLMQGSTLPRRSGA
MDPRMFSLMQMSTTPRRSGA

SEQ ID NO: 101987 - protein, 20 aa, Artificial Sequence
  Description of Artificial Sequence: Synthetic peptide
  Seed: MDPRMCSLMQGSTLPRRSGA
MDPRMFSLMQMSTVPRRSGA

SEQ ID NO: 101988 - protein, 20 aa, Artificial Sequence
  Description of Artificial Sequence: Synthetic peptide
  Seed: MDPRMCSLMQGSTLPRRSGA
MDPRMFSLMQNSTAPRRSGA

SEQ ID NO: 101989 - protein, 20 aa, Artificial Sequence
  Description of Artificial Sequence: Synthetic peptide
  Seed: MDPRMCSLMQGSTLPRRSGA
MDPRMFSLMQNSTCPRRSGA

SEQ ID NO: 101990 - protein, 20 aa, Artificial Sequence
  Description of Artificial Sequence: Synthetic peptide
  Seed: MDPRMCSLMQGSTLPRRSGA
MDPRMFSLMQNSTDPRRSGA

SEQ ID NO: 101991 - protein, 20 aa, Artificial Sequence
  Description of Artificial Sequence: Synthetic peptide
  Seed: MDPRMCSLMQGSTLPRRSGA
MDPRMFSLMQNSTFPRRSGA

SEQ ID NO: 101992 - protein, 20 aa, Artificial Sequence
  Description of Artificial Sequence: Synthetic peptide
  Seed: MDPRMCSLMQGSTLPRRSGA
MDPRMFSLMQNSTGPRRSGA

SEQ ID NO: 101993 - protein, 20 aa, Artificial Sequence
  Description of Artificial Sequence: Synthetic peptide
  Seed: MDPRMCSLMQGSTLPRRSGA
MDPRMFSLMQNSTHPRRSGA

SEQ ID NO: 101994 - protein, 20 aa, Artificial Sequence
  Description of Artificial Sequence: Synthetic peptide
  Seed: MDPRMCSLMQGSTLPRRSGA
MDPRMFSLMQNSTIPRRSGA

SEQ ID NO: 101995 - protein, 20 aa, Artificial Sequence
  Description of Artificial Sequence: Synthetic peptide
  Seed: MDPRMCSLMQGSTLPRRSGA
MDPRMFSLMQNSTLPRRSGA

SEQ ID NO: 101996 - protein, 20 aa, Artificial Sequence
  Description of Artificial Sequence: Synthetic peptide
  Seed: MDPRMCSLMQGSTLPRRSGA
MDPRMFSLMQNSTMPRRSGA

SEQ ID NO: 101997 - protein, 20 aa, Artificial Sequence
  Description of Artificial Sequence: Synthetic peptide
  Seed: MDPRMCSLMQGSTLPRRSGA
MDPRMFSLMQNSTNPRRSGA

SEQ ID NO: 101998 - protein, 20 aa, Artificial Sequence
  Description of Artificial Sequence: Synthetic peptide
  Seed: MDPRMCSLMQGSTLPRRSGA
MDPRMFSLMQNSTQPRRSGA

SEQ ID NO: 101999 - protein, 20 aa, Artificial Sequence
  Description of Artificial Sequence: Synthetic peptide
  Seed: MDPRMCSLMQGSTLPRRSGA
MDPRMFSLMQNSTSPRRSGA

SEQ ID NO: 102000 - protein, 20 aa, Artificial Sequence
  Description of Artificial Sequence: Synthetic peptide
  Seed: MDPRMCSLMQGSTLPRRSGA
MDPRMFSLMQNSTTPRRSGA

SEQ ID NO: 102001 - protein, 20 aa, Artificial Sequence
  Description of Artificial Sequence: Synthetic peptide
  Seed: MDPRMCSLMQGSTLPRRSGA
MDPRMFSLMQNSTVPRRSGA

SEQ ID NO: 102002 - protein, 20 aa, Artificial Sequence
  Description of Artificial Sequence: Synthetic peptide
  Seed: MDPRMCSLMQGSTLPRRSGA
MDPRMFSLMQPSTAPRRSGA

SEQ ID NO: 102003 - protein, 20 aa, Artificial Sequence
  Description of Artificial Sequence: Synthetic peptide
  Seed: MDPRMCSLMQGSTLPRRSGA
MDPRMFSLMQPSTCPRRSGA

SEQ ID NO: 102004 - protein, 20 aa, Artificial Sequence
  Description of Artificial Sequence: Synthetic peptide
  Seed: MDPRMCSLMQGSTLPRRSGA
MDPRMFSLMQPSTDPRRSGA

SEQ ID NO: 102005 - protein, 20 aa, Artificial Sequence
  Description of Artificial Sequence: Synthetic peptide
  Seed: MDPRMCSLMQGSTLPRRSGA
MDPRMFSLMQPSTEPRRSGA

SEQ ID NO: 102006 - protein, 20 aa, Artificial Sequence
  Description of Artificial Sequence: Synthetic peptide
  Seed: MDPRMCSLMQGSTLPRRSGA
MDPRMFSLMQPSTFPRRSGA

SEQ ID NO: 102007 - protein, 20 aa, Artificial Sequence
  Description of Artificial Sequence: Synthetic peptide
  Seed: MDPRMCSLMQGSTLPRRSGA
MDPRMFSLMQPSTGPRRSGA

SEQ ID NO: 102008 - protein, 20 aa, Artificial Sequence
  Description of Artificial Sequence: Synthetic peptide
  Seed: MDPRMCSLMQGSTLPRRSGA
MDPRMFSLMQPSTHPRRSGA

SEQ ID NO: 102009 - protein, 20 aa, Artificial Sequence
  Description of Artificial Sequence: Synthetic peptide
  Seed: MDPRMCSLMQGSTLPRRSGA
MDPRMFSLMQPSTIPRRSGA

SEQ ID NO: 102010 - protein, 20 aa, Artificial Sequence
  Description of Artificial Sequence: Synthetic peptide
  Seed: MDPRMCSLMQGSTLPRRSGA
MDPRMFSLMQPSTLPRRSGA

SEQ ID NO: 102011 - protein, 20 aa, Artificial Sequence
  Description of Artificial Sequence: Synthetic peptide
  Seed: MDPRMCSLMQGSTLPRRSGA
MDPRMFSLMQPSTMPRRSGA

SEQ ID NO: 102012 - protein, 20 aa, Artificial Sequence
  Description of Artificial Sequence: Synthetic peptide
  Seed: MDPRMCSLMQGSTLPRRSGA
MDPRMFSLMQPSTNPRRSGA

SEQ ID NO: 102013 - protein, 20 aa, Artificial Sequence
  Description of Artificial Sequence: Synthetic peptide
  Seed: MDPRMCSLMQGSTLPRRSGA
MDPRMFSLMQPSTPPRRSGA

SEQ ID NO: 102014 - protein, 20 aa, Artificial Sequence
  Description of Artificial Sequence: Synthetic peptide
  Seed: MDPRMCSLMQGSTLPRRSGA
MDPRMFSLMQPSTQPRRSGA

SEQ ID NO: 102015 - protein, 20 aa, Artificial Sequence
  Description of Artificial Sequence: Synthetic peptide
  Seed: MDPRMCSLMQGSTLPRRSGA
MDPRMFSLMQPSTSPRRSGA

SEQ ID NO: 102016 - protein, 20 aa, Artificial Sequence
  Description of Artificial Sequence: Synthetic peptide
  Seed: MDPRMCSLMQGSTLPRRSGA
MDPRMFSLMQPSTTPRRSGA

SEQ ID NO: 102017 - protein, 20 aa, Artificial Sequence
  Description of Artificial Sequence: Synthetic peptide
  Seed: MDPRMCSLMQGSTLPRRSGA
MDPRMFSLMQPSTVPRRSGA

SEQ ID NO: 102018 - protein, 20 aa, Artificial Sequence
  Description of Artificial Sequence: Synthetic peptide
  Seed: MDPRMCSLMQGSTLPRRSGA
MDPRMFSLMQPSTWPRRSGA

SEQ ID NO: 102019 - protein, 20 aa, Artificial Sequence
  Description of Artificial Sequence: Synthetic peptide
  Seed: MDPRMCSLMQGSTLPRRSGA
MDPRMFSLMQPSTYPRRSGA

SEQ ID NO: 102020 - protein, 20 aa, Artificial Sequence
  Description of Artificial Sequence: Synthetic peptide
  Seed: MDPRMCSLMQGSTLPRRSGA
MDPRMFSLMQQSTAPRRSGA

SEQ ID NO: 102021 - protein, 20 aa, Artificial Sequence
  Description of Artificial Sequence: Synthetic peptide
  Seed: MDPRMCSLMQGSTLPRRSGA
MDPRMFSLMQQSTIPRRSGA

SEQ ID NO: 102022 - protein, 20 aa, Artificial Sequence
  Description of Artificial Sequence: Synthetic peptide
  Seed: MDPRMCSLMQGSTLPRRSGA
MDPRMFSLMQQSTLPRRSGA

SEQ ID NO: 102023 - protein, 20 aa, Artificial Sequence
  Description of Artificial Sequence: Synthetic peptide
  Seed: MDPRMCSLMQGSTLPRRSGA
MDPRMFSLMQQSTNPRRSGA

SEQ ID NO: 102024 - protein, 20 aa, Artificial Sequence
  Description of Artificial Sequence: Synthetic peptide
  Seed: MDPRMCSLMQGSTLPRRSGA
MDPRMFSLMQQSTSPRRSGA

SEQ ID NO: 102025 - protein, 20 aa, Artificial Sequence
  Description of Artificial Sequence: Synthetic peptide
  Seed: MDPRMCSLMQGSTLPRRSGA
MDPRMFSLMQQSTVPRRSGA

SEQ ID NO: 102026 - protein, 20 aa, Artificial Sequence
  Description of Artificial Sequence: Synthetic peptide
  Seed: MDPRMCSLMQGSTLPRRSGA
MDPRMFSLMQSSTAPRRSGA

SEQ ID NO: 102027 - protein, 20 aa, Artificial Sequence
  Description of Artificial Sequence: Synthetic peptide
  Seed: MDPRMCSLMQGSTLPRRSGA
MDPRMFSLMQSSTCPRRSGA

SEQ ID NO: 102028 - protein, 20 aa, Artificial Sequence
  Description of Artificial Sequence: Synthetic peptide
  Seed: MDPRMCSLMQGSTLPRRSGA
MDPRMFSLMQSSTDPRRSGA

SEQ ID NO: 102029 - protein, 20 aa, Artificial Sequence
  Description of Artificial Sequence: Synthetic peptide
  Seed: MDPRMCSLMQGSTLPRRSGA
MDPRMFSLMQSSTEPRRSGA

SEQ ID NO: 102030 - protein, 20 aa, Artificial Sequence
  Description of Artificial Sequence: Synthetic peptide
  Seed: MDPRMCSLMQGSTLPRRSGA
MDPRMFSLMQSSTFPRRSGA

SEQ ID NO: 102031 - protein, 20 aa, Artificial Sequence
  Description of Artificial Sequence: Synthetic peptide
  Seed: MDPRMCSLMQGSTLPRRSGA
MDPRMFSLMQSSTGPRRSGA

SEQ ID NO: 102032 - protein, 20 aa, Artificial Sequence
  Description of Artificial Sequence: Synthetic peptide
  Seed: MDPRMCSLMQGSTLPRRSGA
MDPRMFSLMQSSTHPRRSGA

SEQ ID NO: 102033 - protein, 20 aa, Artificial Sequence
  Description of Artificial Sequence: Synthetic peptide
  Seed: MDPRMCSLMQGSTLPRRSGA
MDPRMFSLMQSSTIPRRSGA

SEQ ID NO: 102034 - protein, 20 aa, Artificial Sequence
  Description of Artificial Sequence: Synthetic peptide
  Seed: MDPRMCSLMQGSTLPRRSGA
MDPRMFSLMQSSTLPRRSGA

SEQ ID NO: 102035 - protein, 20 aa, Artificial Sequence
  Description of Artificial Sequence: Synthetic peptide
  Seed: MDPRMCSLMQGSTLPRRSGA
MDPRMFSLMQSSTMPRRSGA

SEQ ID NO: 102036 - protein, 20 aa, Artificial Sequence
  Description of Artificial Sequence: Synthetic peptide
  Seed: MDPRMCSLMQGSTLPRRSGA
MDPRMFSLMQSSTNPRRSGA

SEQ ID NO: 102037 - protein, 20 aa, Artificial Sequence
  Description of Artificial Sequence: Synthetic peptide
  Seed: MDPRMCSLMQGSTLPRRSGA
MDPRMFSLMQSSTPPRRSGA

SEQ ID NO: 102038 - protein, 20 aa, Artificial Sequence
  Description of Artificial Sequence: Synthetic peptide
  Seed: MDPRMCSLMQGSTLPRRSGA
MDPRMFSLMQSSTQPRRSGA

SEQ ID NO: 102039 - protein, 20 aa, Artificial Sequence
  Description of Artificial Sequence: Synthetic peptide
  Seed: MDPRMCSLMQGSTLPRRSGA
MDPRMFSLMQSSTSPRRSGA

SEQ ID NO: 102040 - protein, 20 aa, Artificial Sequence
  Description of Artificial Sequence: Synthetic peptide
  Seed: MDPRMCSLMQGSTLPRRSGA
MDPRMFSLMQSSTTPRRSGA

SEQ ID NO: 102041 - protein, 20 aa, Artificial Sequence
  Description of Artificial Sequence: Synthetic peptide
  Seed: MDPRMCSLMQGSTLPRRSGA
MDPRMFSLMQSSTVPRRSGA

SEQ ID NO: 102042 - protein, 20 aa, Artificial Sequence
  Description of Artificial Sequence: Synthetic peptide
  Seed: MDPRMCSLMQGSTLPRRSGA
MDPRMFSLMQSSTYPRRSGA

SEQ ID NO: 102043 - protein, 20 aa, Artificial Sequence
  Description of Artificial Sequence: Synthetic peptide
  Seed: MDPRMCSLMQGSTLPRRSGA
MDPRMFSLMQTSTAPRRSGA

SEQ ID NO: 102044 - protein, 20 aa, Artificial Sequence
  Description of Artificial Sequence: Synthetic peptide
  Seed: MDPRMCSLMQGSTLPRRSGA
MDPRMFSLMQTSTCPRRSGA

SEQ ID NO: 102045 - protein, 20 aa, Artificial Sequence
  Description of Artificial Sequence: Synthetic peptide
  Seed: MDPRMCSLMQGSTLPRRSGA
MDPRMFSLMQTSTDPRRSGA

SEQ ID NO: 102046 - protein, 20 aa, Artificial Sequence
  Description of Artificial Sequence: Synthetic peptide
  Seed: MDPRMCSLMQGSTLPRRSGA
MDPRMFSLMQTSTEPRRSGA

SEQ ID NO: 102047 - protein, 20 aa, Artificial Sequence
  Description of Artificial Sequence: Synthetic peptide
  Seed: MDPRMCSLMQGSTLPRRSGA
MDPRMFSLMQTSTFPRRSGA

SEQ ID NO: 102048 - protein, 20 aa, Artificial Sequence
  Description of Artificial Sequence: Synthetic peptide
  Seed: MDPRMCSLMQGSTLPRRSGA
MDPRMFSLMQTSTGPRRSGA

SEQ ID NO: 102049 - protein, 20 aa, Artificial Sequence
  Description of Artificial Sequence: Synthetic peptide
  Seed: MDPRMCSLMQGSTLPRRSGA
MDPRMFSLMQTSTHPRRSGA

SEQ ID NO: 102050 - protein, 20 aa, Artificial Sequence
  Description of Artificial Sequence: Synthetic peptide
  Seed: MDPRMCSLMQGSTLPRRSGA
MDPRMFSLMQTSTIPRRSGA

SEQ ID NO: 102051 - protein, 20 aa, Artificial Sequence
  Description of Artificial Sequence: Synthetic peptide
  Seed: MDPRMCSLMQGSTLPRRSGA
MDPRMFSLMQTSTLPRRSGA

SEQ ID NO: 102052 - protein, 20 aa, Artificial Sequence
  Description of Artificial Sequence: Synthetic peptide
  Seed: MDPRMCSLMQGSTLPRRSGA
MDPRMFSLMQTSTMPRRSGA

SEQ ID NO: 102053 - protein, 20 aa, Artificial Sequence
  Description of Artificial Sequence: Synthetic peptide
  Seed: MDPRMCSLMQGSTLPRRSGA
MDPRMFSLMQTSTNPRRSGA

SEQ ID NO: 102054 - protein, 20 aa, Artificial Sequence
  Description of Artificial Sequence: Synthetic peptide
  Seed: MDPRMCSLMQGSTLPRRSGA
MDPRMFSLMQTSTPPRRSGA

SEQ ID NO: 102055 - protein, 20 aa, Artificial Sequence
  Description of Artificial Sequence: Synthetic peptide
  Seed: MDPRMCSLMQGSTLPRRSGA
MDPRMFSLMQTSTQPRRSGA

SEQ ID NO: 102056 - protein, 20 aa, Artificial Sequence
  Description of Artificial Sequence: Synthetic peptide
  Seed: MDPRMCSLMQGSTLPRRSGA
MDPRMFSLMQTSTSPRRSGA

SEQ ID NO: 102057 - protein, 20 aa, Artificial Sequence
  Description of Artificial Sequence: Synthetic peptide
  Seed: MDPRMCSLMQGSTLPRRSGA
MDPRMFSLMQTSTTPRRSGA

SEQ ID NO: 102058 - protein, 20 aa, Artificial Sequence
  Description of Artificial Sequence: Synthetic peptide
  Seed: MDPRMCSLMQGSTLPRRSGA
MDPRMFSLMQTSTVPRRSGA

SEQ ID NO: 102059 - protein, 20 aa, Artificial Sequence
  Description of Artificial Sequence: Synthetic peptide
  Seed: MDPRMCSLMQGSTLPRRSGA
MDPRMFSLMQTSTYPRRSGA

SEQ ID NO: 102060 - protein, 20 aa, Artificial Sequence
  Description of Artificial Sequence: Synthetic peptide
  Seed: MDPRMCSLMQGSTLPRRSGA
MDPRMFSLMQVSTAPRRSGA

SEQ ID NO: 102061 - protein, 20 aa, Artificial Sequence
  Description of Artificial Sequence: Synthetic peptide
  Seed: MDPRMCSLMQGSTLPRRSGA
MDPRMFSLMQVSTCPRRSGA

SEQ ID NO: 102062 - protein, 20 aa, Artificial Sequence
  Description of Artificial Sequence: Synthetic peptide
  Seed: MDPRMCSLMQGSTLPRRSGA
MDPRMFSLMQVSTDPRRSGA

SEQ ID NO: 102063 - protein, 20 aa, Artificial Sequence
  Description of Artificial Sequence: Synthetic peptide
  Seed: MDPRMCSLMQGSTLPRRSGA
MDPRMFSLMQVSTEPRRSGA

SEQ ID NO: 102064 - protein, 20 aa, Artificial Sequence
  Description of Artificial Sequence: Synthetic peptide
  Seed: MDPRMCSLMQGSTLPRRSGA
MDPRMFSLMQVSTFPRRSGA

SEQ ID NO: 102065 - protein, 20 aa, Artificial Sequence
  Description of Artificial Sequence: Synthetic peptide
  Seed: MDPRMCSLMQGSTLPRRSGA
MDPRMFSLMQVSTGPRRSGA

SEQ ID NO: 102066 - protein, 20 aa, Artificial Sequence
  Description of Artificial Sequence: Synthetic peptide
  Seed: MDPRMCSLMQGSTLPRRSGA
MDPRMFSLMQVSTHPRRSGA

SEQ ID NO: 102067 - protein, 20 aa, Artificial Sequence
  Description of Artificial Sequence: Synthetic peptide
  Seed: MDPRMCSLMQGSTLPRRSGA
MDPRMFSLMQVSTIPRRSGA

SEQ ID NO: 102068 - protein, 20 aa, Artificial Sequence
  Description of Artificial Sequence: Synthetic peptide
  Seed: MDPRMCSLMQGSTLPRRSGA
MDPRMFSLMQVSTKPRRSGA

SEQ ID NO: 102069 - protein, 20 aa, Artificial Sequence
  Description of Artificial Sequence: Synthetic peptide
  Seed: MDPRMCSLMQGSTLPRRSGA
MDPRMFSLMQVSTLPRRSGA

SEQ ID NO: 102070 - protein, 20 aa, Artificial Sequence
  Description of Artificial Sequence: Synthetic peptide
  Seed: MDPRMCSLMQGSTLPRRSGA
MDPRMFSLMQVSTMPRRSGA

SEQ ID NO: 102071 - protein, 20 aa, Artificial Sequence
  Description of Artificial Sequence: Synthetic peptide
  Seed: MDPRMCSLMQGSTLPRRSGA
MDPRMFSLMQVSTNPRRSGA

SEQ ID NO: 102072 - protein, 20 aa, Artificial Sequence
  Description of Artificial Sequence: Synthetic peptide
  Seed: MDPRMCSLMQGSTLPRRSGA
MDPRMFSLMQVSTPPRRSGA

SEQ ID NO: 102073 - protein, 20 aa, Artificial Sequence
  Description of Artificial Sequence: Synthetic peptide
  Seed: MDPRMCSLMQGSTLPRRSGA
MDPRMFSLMQVSTQPRRSGA

SEQ ID NO: 102074 - protein, 20 aa, Artificial Sequence
  Description of Artificial Sequence: Synthetic peptide
  Seed: MDPRMCSLMQGSTLPRRSGA
MDPRMFSLMQVSTSPRRSGA

SEQ ID NO: 102075 - protein, 20 aa, Artificial Sequence
  Description of Artificial Sequence: Synthetic peptide
  Seed: MDPRMCSLMQGSTLPRRSGA
MDPRMFSLMQVSTTPRRSGA

SEQ ID NO: 102076 - protein, 20 aa, Artificial Sequence
  Description of Artificial Sequence: Synthetic peptide
  Seed: MDPRMCSLMQGSTLPRRSGA
MDPRMFSLMQVSTVPRRSGA

SEQ ID NO: 102077 - protein, 20 aa, Artificial Sequence
  Description of Artificial Sequence: Synthetic peptide
  Seed: MDPRMCSLMQGSTLPRRSGA
MDPRMFSLNQASTAPRRSGA

SEQ ID NO: 102078 - protein, 20 aa, Artificial Sequence
  Description of Artificial Sequence: Synthetic peptide
  Seed: MDPRMCSLMQGSTLPRRSGA
MDPRMFSLNQASTIPRRSGA

SEQ ID NO: 102079 - protein, 20 aa, Artificial Sequence
  Description of Artificial Sequence: Synthetic peptide
  Seed: MDPRMCSLMQGSTLPRRSGA
MDPRMFSLNQASTLPRRSGA

SEQ ID NO: 102080 - protein, 20 aa, Artificial Sequence
  Description of Artificial Sequence: Synthetic peptide
  Seed: MDPRMCSLMQGSTLPRRSGA
MDPRMFSLNQASTMPRRSGA

SEQ ID NO: 102081 - protein, 20 aa, Artificial Sequence
  Description of Artificial Sequence: Synthetic peptide
  Seed: MDPRMCSLMQGSTLPRRSGA
MDPRMFSLNQASTVPRRSGA

SEQ ID NO: 102082 - protein, 20 aa, Artificial Sequence
  Description of Artificial Sequence: Synthetic peptide
  Seed: MDPRMCSLMQGSTLPRRSGA
MDPRMFSLNQGSTIPRRSGA

SEQ ID NO: 102083 - protein, 20 aa, Artificial Sequence
  Description of Artificial Sequence: Synthetic peptide
  Seed: MDPRMCSLMQGSTLPRRSGA
MDPRMFSLNQGSTLPRRSGA

SEQ ID NO: 102084 - protein, 20 aa, Artificial Sequence
  Description of Artificial Sequence: Synthetic peptide
  Seed: MDPRMCSLMQGSTLPRRSGA
MDPRMFSLNQGSTVPRRSGA

SEQ ID NO: 102085 - protein, 20 aa, Artificial Sequence
  Description of Artificial Sequence: Synthetic peptide
  Seed: MDPRMCSLMQGSTLPRRSGA
MDPRMFSLNQPSTIPRRSGA

SEQ ID NO: 102086 - protein, 20 aa, Artificial Sequence
  Description of Artificial Sequence: Synthetic peptide
  Seed: MDPRMCSLMQGSTLPRRSGA
MDPRMFSLNQPSTLPRRSGA

SEQ ID NO: 102087 - protein, 20 aa, Artificial Sequence
  Description of Artificial Sequence: Synthetic peptide
  Seed: MDPRMCSLMQGSTLPRRSGA
MDPRMFSLNQPSTVPRRSGA

SEQ ID NO: 102088 - protein, 20 aa, Artificial Sequence
  Description of Artificial Sequence: Synthetic peptide
  Seed: MDPRMCSLMQGSTLPRRSGA
MDPRMFSLNQSSTIPRRSGA

SEQ ID NO: 102089 - protein, 20 aa, Artificial Sequence
  Description of Artificial Sequence: Synthetic peptide
  Seed: MDPRMCSLMQGSTLPRRSGA
MDPRMFSLNQSSTLPRRSGA

SEQ ID NO: 102090 - protein, 20 aa, Artificial Sequence
  Description of Artificial Sequence: Synthetic peptide
  Seed: MDPRMCSLMQGSTLPRRSGA
MDPRMFSLNQSSTVPRRSGA

SEQ ID NO: 102091 - protein, 20 aa, Artificial Sequence
  Description of Artificial Sequence: Synthetic peptide
  Seed: MDPRMCSLMQGSTLPRRSGA
MDPRMFSLQQASTAPRRSGA

SEQ ID NO: 102092 - protein, 20 aa, Artificial Sequence
  Description of Artificial Sequence: Synthetic peptide
  Seed: MDPRMCSLMQGSTLPRRSGA
MDPRMFSLQQASTCPRRSGA

SEQ ID NO: 102093 - protein, 20 aa, Artificial Sequence
  Description of Artificial Sequence: Synthetic peptide
  Seed: MDPRMCSLMQGSTLPRRSGA
MDPRMFSLQQASTFPRRSGA

SEQ ID NO: 102094 - protein, 20 aa, Artificial Sequence
  Description of Artificial Sequence: Synthetic peptide
  Seed: MDPRMCSLMQGSTLPRRSGA
MDPRMFSLQQASTGPRRSGA

SEQ ID NO: 102095 - protein, 20 aa, Artificial Sequence
  Description of Artificial Sequence: Synthetic peptide
  Seed: MDPRMCSLMQGSTLPRRSGA
MDPRMFSLQQASTHPRRSGA

SEQ ID NO: 102096 - protein, 20 aa, Artificial Sequence
  Description of Artificial Sequence: Synthetic peptide
  Seed: MDPRMCSLMQGSTLPRRSGA
MDPRMFSLQQASTIPRRSGA

SEQ ID NO: 102097 - protein, 20 aa, Artificial Sequence
  Description of Artificial Sequence: Synthetic peptide
  Seed: MDPRMCSLMQGSTLPRRSGA
MDPRMFSLQQASTLPRRSGA

SEQ ID NO: 102098 - protein, 20 aa, Artificial Sequence
  Description of Artificial Sequence: Synthetic peptide
  Seed: MDPRMCSLMQGSTLPRRSGA
MDPRMFSLQQASTMPRRSGA

SEQ ID NO: 102099 - protein, 20 aa, Artificial Sequence
  Description of Artificial Sequence: Synthetic peptide
  Seed: MDPRMCSLMQGSTLPRRSGA
MDPRMFSLQQASTNPRRSGA

SEQ ID NO: 102100 - protein, 20 aa, Artificial Sequence
  Description of Artificial Sequence: Synthetic peptide
  Seed: MDPRMCSLMQGSTLPRRSGA
MDPRMFSLQQASTQPRRSGA

SEQ ID NO: 102101 - protein, 20 aa, Artificial Sequence
  Description of Artificial Sequence: Synthetic peptide
  Seed: MDPRMCSLMQGSTLPRRSGA
MDPRMFSLQQASTSPRRSGA

SEQ ID NO: 102102 - protein, 20 aa, Artificial Sequence
  Description of Artificial Sequence: Synthetic peptide
  Seed: MDPRMCSLMQGSTLPRRSGA
MDPRMFSLQQASTTPRRSGA

SEQ ID NO: 102103 - protein, 20 aa, Artificial Sequence
  Description of Artificial Sequence: Synthetic peptide
  Seed: MDPRMCSLMQGSTLPRRSGA
MDPRMFSLQQASTVPRRSGA

SEQ ID NO: 102104 - protein, 20 aa, Artificial Sequence
  Description of Artificial Sequence: Synthetic peptide
  Seed: MDPRMCSLMQGSTLPRRSGA
MDPRMFSLQQGSTAPRRSGA

SEQ ID NO: 102105 - protein, 20 aa, Artificial Sequence
  Description of Artificial Sequence: Synthetic peptide
  Seed: MDPRMCSLMQGSTLPRRSGA
MDPRMFSLQQGSTGPRRSGA

SEQ ID NO: 102106 - protein, 20 aa, Artificial Sequence
  Description of Artificial Sequence: Synthetic peptide
  Seed: MDPRMCSLMQGSTLPRRSGA
MDPRMFSLQQGSTIPRRSGA

SEQ ID NO: 102107 - protein, 20 aa, Artificial Sequence
  Description of Artificial Sequence: Synthetic peptide
  Seed: MDPRMCSLMQGSTLPRRSGA
MDPRMFSLQQGSTLPRRSGA

SEQ ID NO: 102108 - protein, 20 aa, Artificial Sequence
  Description of Artificial Sequence: Synthetic peptide
  Seed: MDPRMCSLMQGSTLPRRSGA
MDPRMFSLQQGSTMPRRSGA

SEQ ID NO: 102109 - protein, 20 aa, Artificial Sequence
  Description of Artificial Sequence: Synthetic peptide
  Seed: MDPRMCSLMQGSTLPRRSGA
MDPRMFSLQQGSTSPRRSGA

SEQ ID NO: 102110 - protein, 20 aa, Artificial Sequence
  Description of Artificial Sequence: Synthetic peptide
  Seed: MDPRMCSLMQGSTLPRRSGA
MDPRMFSLQQGSTTPRRSGA

SEQ ID NO: 102111 - protein, 20 aa, Artificial Sequence
  Description of Artificial Sequence: Synthetic peptide
  Seed: MDPRMCSLMQGSTLPRRSGA
MDPRMFSLQQGSTVPRRSGA

SEQ ID NO: 102112 - protein, 20 aa, Artificial Sequence
  Description of Artificial Sequence: Synthetic peptide
  Seed: MDPRMCSLMQGSTLPRRSGA
MDPRMFSLQQISTAPRRSGA

SEQ ID NO: 102113 - protein, 20 aa, Artificial Sequence
  Description of Artificial Sequence: Synthetic peptide
  Seed: MDPRMCSLMQGSTLPRRSGA
MDPRMFSLQQISTNPRRSGA

SEQ ID NO: 102114 - protein, 20 aa, Artificial Sequence
  Description of Artificial Sequence: Synthetic peptide
  Seed: MDPRMCSLMQGSTLPRRSGA
MDPRMFSLQQISTSPRRSGA

SEQ ID NO: 102115 - protein, 20 aa, Artificial Sequence
  Description of Artificial Sequence: Synthetic peptide
  Seed: MDPRMCSLMQGSTLPRRSGA
MDPRMFSLQQISTTPRRSGA

SEQ ID NO: 102116 - protein, 20 aa, Artificial Sequence
  Description of Artificial Sequence: Synthetic peptide
  Seed: MDPRMCSLMQGSTLPRRSGA
MDPRMFSLQQISTVPRRSGA

SEQ ID NO: 102117 - protein, 20 aa, Artificial Sequence
  Description of Artificial Sequence: Synthetic peptide
  Seed: MDPRMCSLMQGSTLPRRSGA
MDPRMFSLQQLSTAPRRSGA

SEQ ID NO: 102118 - protein, 20 aa, Artificial Sequence
  Description of Artificial Sequence: Synthetic peptide
  Seed: MDPRMCSLMQGSTLPRRSGA
MDPRMFSLQQNSTAPRRSGA

SEQ ID NO: 102119 - protein, 20 aa, Artificial Sequence
  Description of Artificial Sequence: Synthetic peptide
  Seed: MDPRMCSLMQGSTLPRRSGA
MDPRMFSLQQNSTIPRRSGA

SEQ ID NO: 102120 - protein, 20 aa, Artificial Sequence
  Description of Artificial Sequence: Synthetic peptide
  Seed: MDPRMCSLMQGSTLPRRSGA
MDPRMFSLQQNSTLPRRSGA

SEQ ID NO: 102121 - protein, 20 aa, Artificial Sequence
  Description of Artificial Sequence: Synthetic peptide
  Seed: MDPRMCSLMQGSTLPRRSGA
MDPRMFSLQQNSTVPRRSGA

SEQ ID NO: 102122 - protein, 20 aa, Artificial Sequence
  Description of Artificial Sequence: Synthetic peptide
  Seed: MDPRMCSLMQGSTLPRRSGA
MDPRMFSLQQPSTAPRRSGA

SEQ ID NO: 102123 - protein, 20 aa, Artificial Sequence
  Description of Artificial Sequence: Synthetic peptide
  Seed: MDPRMCSLMQGSTLPRRSGA
MDPRMFSLQQPSTIPRRSGA

SEQ ID NO: 102124 - protein, 20 aa, Artificial Sequence
  Description of Artificial Sequence: Synthetic peptide
  Seed: MDPRMCSLMQGSTLPRRSGA
MDPRMFSLQQPSTLPRRSGA

SEQ ID NO: 102125 - protein, 20 aa, Artificial Sequence
  Description of Artificial Sequence: Synthetic peptide
  Seed: MDPRMCSLMQGSTLPRRSGA
MDPRMFSLQQPSTMPRRSGA

SEQ ID NO: 102126 - protein, 20 aa, Artificial Sequence
  Description of Artificial Sequence: Synthetic peptide
  Seed: MDPRMCSLMQGSTLPRRSGA
MDPRMFSLQQPSTNPRRSGA

SEQ ID NO: 102127 - protein, 20 aa, Artificial Sequence
  Description of Artificial Sequence: Synthetic peptide
  Seed: MDPRMCSLMQGSTLPRRSGA
MDPRMFSLQQPSTSPRRSGA

SEQ ID NO: 102128 - protein, 20 aa, Artificial Sequence
  Description of Artificial Sequence: Synthetic peptide
  Seed: MDPRMCSLMQGSTLPRRSGA
MDPRMFSLQQPSTTPRRSGA

SEQ ID NO: 102129 - protein, 20 aa, Artificial Sequence
  Description of Artificial Sequence: Synthetic peptide
  Seed: MDPRMCSLMQGSTLPRRSGA
MDPRMFSLQQPSTVPRRSGA

SEQ ID NO: 102130 - protein, 20 aa, Artificial Sequence
  Description of Artificial Sequence: Synthetic peptide
  Seed: MDPRMCSLMQGSTLPRRSGA
MDPRMFSLQQSSTAPRRSGA

SEQ ID NO: 102131 - protein, 20 aa, Artificial Sequence
  Description of Artificial Sequence: Synthetic peptide
  Seed: MDPRMCSLMQGSTLPRRSGA
MDPRMFSLQQSSTGPRRSGA

SEQ ID NO: 102132 - protein, 20 aa, Artificial Sequence
  Description of Artificial Sequence: Synthetic peptide
  Seed: MDPRMCSLMQGSTLPRRSGA
MDPRMFSLQQSSTIPRRSGA

SEQ ID NO: 102133 - protein, 20 aa, Artificial Sequence
  Description of Artificial Sequence: Synthetic peptide
  Seed: MDPRMCSLMQGSTLPRRSGA
MDPRMFSLQQSSTLPRRSGA

SEQ ID NO: 102134 - protein, 20 aa, Artificial Sequence
  Description of Artificial Sequence: Synthetic peptide
  Seed: MDPRMCSLMQGSTLPRRSGA
MDPRMFSLQQSSTMPRRSGA

SEQ ID NO: 102135 - protein, 20 aa, Artificial Sequence
  Description of Artificial Sequence: Synthetic peptide
  Seed: MDPRMCSLMQGSTLPRRSGA
MDPRMFSLQQSSTNPRRSGA

SEQ ID NO: 102136 - protein, 20 aa, Artificial Sequence
  Description of Artificial Sequence: Synthetic peptide
  Seed: MDPRMCSLMQGSTLPRRSGA
MDPRMFSLQQSSTSPRRSGA

SEQ ID NO: 102137 - protein, 20 aa, Artificial Sequence
  Description of Artificial Sequence: Synthetic peptide
  Seed: MDPRMCSLMQGSTLPRRSGA
MDPRMFSLQQSSTTPRRSGA

SEQ ID NO: 102138 - protein, 20 aa, Artificial Sequence
  Description of Artificial Sequence: Synthetic peptide
  Seed: MDPRMCSLMQGSTLPRRSGA
MDPRMFSLQQSSTVPRRSGA

SEQ ID NO: 102139 - protein, 20 aa, Artificial Sequence
  Description of Artificial Sequence: Synthetic peptide
  Seed: MDPRMCSLMQGSTLPRRSGA
MDPRMFSLQQTSTAPRRSGA

SEQ ID NO: 102140 - protein, 20 aa, Artificial Sequence
  Description of Artificial Sequence: Synthetic peptide
  Seed: MDPRMCSLMQGSTLPRRSGA
MDPRMFSLQQTSTIPRRSGA

SEQ ID NO: 102141 - protein, 20 aa, Artificial Sequence
  Description of Artificial Sequence: Synthetic peptide
  Seed: MDPRMCSLMQGSTLPRRSGA
MDPRMFSLQQTSTLPRRSGA

SEQ ID NO: 102142 - protein, 20 aa, Artificial Sequence
  Description of Artificial Sequence: Synthetic peptide
  Seed: MDPRMCSLMQGSTLPRRSGA
MDPRMFSLQQTSTMPRRSGA

SEQ ID NO: 102143 - protein, 20 aa, Artificial Sequence
  Description of Artificial Sequence: Synthetic peptide
  Seed: MDPRMCSLMQGSTLPRRSGA
MDPRMFSLQQTSTNPRRSGA

SEQ ID NO: 102144 - protein, 20 aa, Artificial Sequence
  Description of Artificial Sequence: Synthetic peptide
  Seed: MDPRMCSLMQGSTLPRRSGA
MDPRMFSLQQTSTSPRRSGA

SEQ ID NO: 102145 - protein, 20 aa, Artificial Sequence
  Description of Artificial Sequence: Synthetic peptide
  Seed: MDPRMCSLMQGSTLPRRSGA
MDPRMFSLQQTSTTPRRSGA

SEQ ID NO: 102146 - protein, 20 aa, Artificial Sequence
  Description of Artificial Sequence: Synthetic peptide
  Seed: MDPRMCSLMQGSTLPRRSGA
MDPRMFSLQQTSTVPRRSGA

SEQ ID NO: 102147 - protein, 20 aa, Artificial Sequence
  Description of Artificial Sequence: Synthetic peptide
  Seed: MDPRMCSLMQGSTLPRRSGA
MDPRMFSLQQVSTAPRRSGA

SEQ ID NO: 102148 - protein, 20 aa, Artificial Sequence
  Description of Artificial Sequence: Synthetic peptide
  Seed: MDPRMCSLMQGSTLPRRSGA
MDPRMFSLQQVSTGPRRSGA

SEQ ID NO: 102149 - protein, 20 aa, Artificial Sequence
  Description of Artificial Sequence: Synthetic peptide
  Seed: MDPRMCSLMQGSTLPRRSGA
MDPRMFSLQQVSTIPRRSGA

SEQ ID NO: 102150 - protein, 20 aa, Artificial Sequence
  Description of Artificial Sequence: Synthetic peptide
  Seed: MDPRMCSLMQGSTLPRRSGA
MDPRMFSLQQVSTLPRRSGA

SEQ ID NO: 102151 - protein, 20 aa, Artificial Sequence
  Description of Artificial Sequence: Synthetic peptide
  Seed: MDPRMCSLMQGSTLPRRSGA
MDPRMFSLQQVSTMPRRSGA

SEQ ID NO: 102152 - protein, 20 aa, Artificial Sequence
  Description of Artificial Sequence: Synthetic peptide
  Seed: MDPRMCSLMQGSTLPRRSGA
MDPRMFSLQQVSTNPRRSGA

SEQ ID NO: 102153 - protein, 20 aa, Artificial Sequence
  Description of Artificial Sequence: Synthetic peptide
  Seed: MDPRMCSLMQGSTLPRRSGA
MDPRMFSLQQVSTSPRRSGA

SEQ ID NO: 102154 - protein, 20 aa, Artificial Sequence
  Description of Artificial Sequence: Synthetic peptide
  Seed: MDPRMCSLMQGSTLPRRSGA
MDPRMFSLQQVSTTPRRSGA

SEQ ID NO: 102155 - protein, 20 aa, Artificial Sequence
  Description of Artificial Sequence: Synthetic peptide
  Seed: MDPRMCSLMQGSTLPRRSGA
MDPRMFSLQQVSTVPRRSGA

SEQ ID NO: 102156 - protein, 20 aa, Artificial Sequence
  Description of Artificial Sequence: Synthetic peptide
  Seed: MDPRMCSLMQGSTLPRRSGA
MDPRMFSLSQASTAPRRSGA

SEQ ID NO: 102157 - protein, 20 aa, Artificial Sequence
  Description of Artificial Sequence: Synthetic peptide
  Seed: MDPRMCSLMQGSTLPRRSGA
MDPRMFSLSQASTFPRRSGA

SEQ ID NO: 102158 - protein, 20 aa, Artificial Sequence
  Description of Artificial Sequence: Synthetic peptide
  Seed: MDPRMCSLMQGSTLPRRSGA
MDPRMFSLSQASTGPRRSGA

SEQ ID NO: 102159 - protein, 20 aa, Artificial Sequence
  Description of Artificial Sequence: Synthetic peptide
  Seed: MDPRMCSLMQGSTLPRRSGA
MDPRMFSLSQASTIPRRSGA

SEQ ID NO: 102160 - protein, 20 aa, Artificial Sequence
  Description of Artificial Sequence: Synthetic peptide
  Seed: MDPRMCSLMQGSTLPRRSGA
MDPRMFSLSQASTLPRRSGA

SEQ ID NO: 102161 - protein, 20 aa, Artificial Sequence
  Description of Artificial Sequence: Synthetic peptide
  Seed: MDPRMCSLMQGSTLPRRSGA
MDPRMFSLSQASTMPRRSGA

SEQ ID NO: 102162 - protein, 20 aa, Artificial Sequence
  Description of Artificial Sequence: Synthetic peptide
  Seed: MDPRMCSLMQGSTLPRRSGA
MDPRMFSLSQASTNPRRSGA

SEQ ID NO: 102163 - protein, 20 aa, Artificial Sequence
  Description of Artificial Sequence: Synthetic peptide
  Seed: MDPRMCSLMQGSTLPRRSGA
MDPRMFSLSQASTQPRRSGA

SEQ ID NO: 102164 - protein, 20 aa, Artificial Sequence
  Description of Artificial Sequence: Synthetic peptide
  Seed: MDPRMCSLMQGSTLPRRSGA
MDPRMFSLSQASTSPRRSGA

SEQ ID NO: 102165 - protein, 20 aa, Artificial Sequence
  Description of Artificial Sequence: Synthetic peptide
  Seed: MDPRMCSLMQGSTLPRRSGA
MDPRMFSLSQASTTPRRSGA

SEQ ID NO: 102166 - protein, 20 aa, Artificial Sequence
  Description of Artificial Sequence: Synthetic peptide
  Seed: MDPRMCSLMQGSTLPRRSGA
MDPRMFSLSQASTVPRRSGA

SEQ ID NO: 102167 - protein, 20 aa, Artificial Sequence
  Description of Artificial Sequence: Synthetic peptide
  Seed: MDPRMCSLMQGSTLPRRSGA
MDPRMFSLSQGSTAPRRSGA

SEQ ID NO: 102168 - protein, 20 aa, Artificial Sequence
  Description of Artificial Sequence: Synthetic peptide
  Seed: MDPRMCSLMQGSTLPRRSGA
MDPRMFSLSQGSTIPRRSGA

SEQ ID NO: 102169 - protein, 20 aa, Artificial Sequence
  Description of Artificial Sequence: Synthetic peptide
  Seed: MDPRMCSLMQGSTLPRRSGA
MDPRMFSLSQGSTLPRRSGA

SEQ ID NO: 102170 - protein, 20 aa, Artificial Sequence
  Description of Artificial Sequence: Synthetic peptide
  Seed: MDPRMCSLMQGSTLPRRSGA
MDPRMFSLSQGSTMPRRSGA

SEQ ID NO: 102171 - protein, 20 aa, Artificial Sequence
  Description of Artificial Sequence: Synthetic peptide
  Seed: MDPRMCSLMQGSTLPRRSGA
MDPRMFSLSQGSTVPRRSGA

SEQ ID NO: 102172 - protein, 20 aa, Artificial Sequence
  Description of Artificial Sequence: Synthetic peptide
  Seed: MDPRMCSLMQGSTLPRRSGA
MDPRMFSLSQISTAPRRSGA

SEQ ID NO: 102173 - protein, 20 aa, Artificial Sequence
  Description of Artificial Sequence: Synthetic peptide
  Seed: MDPRMCSLMQGSTLPRRSGA
MDPRMFSLSQISTNPRRSGA

SEQ ID NO: 102174 - protein, 20 aa, Artificial Sequence
  Description of Artificial Sequence: Synthetic peptide
  Seed: MDPRMCSLMQGSTLPRRSGA
MDPRMFSLSQPSTAPRRSGA

SEQ ID NO: 102175 - protein, 20 aa, Artificial Sequence
  Description of Artificial Sequence: Synthetic peptide
  Seed: MDPRMCSLMQGSTLPRRSGA
MDPRMFSLSQPSTIPRRSGA

SEQ ID NO: 102176 - protein, 20 aa, Artificial Sequence
  Description of Artificial Sequence: Synthetic peptide
  Seed: MDPRMCSLMQGSTLPRRSGA
MDPRMFSLSQPSTLPRRSGA

SEQ ID NO: 102177 - protein, 20 aa, Artificial Sequence
  Description of Artificial Sequence: Synthetic peptide
  Seed: MDPRMCSLMQGSTLPRRSGA
MDPRMFSLSQPSTMPRRSGA

SEQ ID NO: 102178 - protein, 20 aa, Artificial Sequence
  Description of Artificial Sequence: Synthetic peptide
  Seed: MDPRMCSLMQGSTLPRRSGA
MDPRMFSLSQPSTNPRRSGA

SEQ ID NO: 102179 - protein, 20 aa, Artificial Sequence
  Description of Artificial Sequence: Synthetic peptide
  Seed: MDPRMCSLMQGSTLPRRSGA
MDPRMFSLSQPSTSPRRSGA

SEQ ID NO: 102180 - protein, 20 aa, Artificial Sequence
  Description of Artificial Sequence: Synthetic peptide
  Seed: MDPRMCSLMQGSTLPRRSGA
MDPRMFSLSQPSTVPRRSGA

SEQ ID NO: 102181 - protein, 20 aa, Artificial Sequence
  Description of Artificial Sequence: Synthetic peptide
  Seed: MDPRMCSLMQGSTLPRRSGA
MDPRMFSLSQSSTAPRRSGA

SEQ ID NO: 102182 - protein, 20 aa, Artificial Sequence
  Description of Artificial Sequence: Synthetic peptide
  Seed: MDPRMCSLMQGSTLPRRSGA
MDPRMFSLSQSSTIPRRSGA

SEQ ID NO: 102183 - protein, 20 aa, Artificial Sequence
  Description of Artificial Sequence: Synthetic peptide
  Seed: MDPRMCSLMQGSTLPRRSGA
MDPRMFSLSQSSTLPRRSGA

SEQ ID NO: 102184 - protein, 20 aa, Artificial Sequence
  Description of Artificial Sequence: Synthetic peptide
  Seed: MDPRMCSLMQGSTLPRRSGA
MDPRMFSLSQSSTMPRRSGA

SEQ ID NO: 102185 - protein, 20 aa, Artificial Sequence
  Description of Artificial Sequence: Synthetic peptide
  Seed: MDPRMCSLMQGSTLPRRSGA
MDPRMFSLSQSSTNPRRSGA

SEQ ID NO: 102186 - protein, 20 aa, Artificial Sequence
  Description of Artificial Sequence: Synthetic peptide
  Seed: MDPRMCSLMQGSTLPRRSGA
MDPRMFSLSQSSTSPRRSGA

SEQ ID NO: 102187 - protein, 20 aa, Artificial Sequence
  Description of Artificial Sequence: Synthetic peptide
  Seed: MDPRMCSLMQGSTLPRRSGA
MDPRMFSLSQSSTVPRRSGA

SEQ ID NO: 102188 - protein, 20 aa, Artificial Sequence
  Description of Artificial Sequence: Synthetic peptide
  Seed: MDPRMCSLMQGSTLPRRSGA
MDPRMFSLSQTSTAPRRSGA

SEQ ID NO: 102189 - protein, 20 aa, Artificial Sequence
  Description of Artificial Sequence: Synthetic peptide
  Seed: MDPRMCSLMQGSTLPRRSGA
MDPRMFSLSQTSTIPRRSGA

SEQ ID NO: 102190 - protein, 20 aa, Artificial Sequence
  Description of Artificial Sequence: Synthetic peptide
  Seed: MDPRMCSLMQGSTLPRRSGA
MDPRMFSLSQTSTNPRRSGA

SEQ ID NO: 102191 - protein, 20 aa, Artificial Sequence
  Description of Artificial Sequence: Synthetic peptide
  Seed: MDPRMCSLMQGSTLPRRSGA
MDPRMFSLSQTSTSPRRSGA

SEQ ID NO: 102192 - protein, 20 aa, Artificial Sequence
  Description of Artificial Sequence: Synthetic peptide
  Seed: MDPRMCSLMQGSTLPRRSGA
MDPRMFSLSQTSTVPRRSGA

SEQ ID NO: 102193 - protein, 20 aa, Artificial Sequence
  Description of Artificial Sequence: Synthetic peptide
  Seed: MDPRMCSLMQGSTLPRRSGA
MDPRMFSLSQVSTAPRRSGA

SEQ ID NO: 102194 - protein, 20 aa, Artificial Sequence
  Description of Artificial Sequence: Synthetic peptide
  Seed: MDPRMCSLMQGSTLPRRSGA
MDPRMFSLSQVSTNPRRSGA

SEQ ID NO: 102195 - protein, 20 aa, Artificial Sequence
  Description of Artificial Sequence: Synthetic peptide
  Seed: MDPRMCSLMQGSTLPRRSGA
MDPRMFSLSQVSTSPRRSGA

SEQ ID NO: 102196 - protein, 20 aa, Artificial Sequence
  Description of Artificial Sequence: Synthetic peptide
  Seed: MDPRMCSLMQGSTLPRRSGA
MDPRMFSLTQASTAPRRSGA

SEQ ID NO: 102197 - protein, 20 aa, Artificial Sequence
  Description of Artificial Sequence: Synthetic peptide
  Seed: MDPRMCSLMQGSTLPRRSGA
MDPRMFSLTQASTGPRRSGA

SEQ ID NO: 102198 - protein, 20 aa, Artificial Sequence
  Description of Artificial Sequence: Synthetic peptide
  Seed: MDPRMCSLMQGSTLPRRSGA
MDPRMFSLTQASTIPRRSGA

SEQ ID NO: 102199 - protein, 20 aa, Artificial Sequence
  Description of Artificial Sequence: Synthetic peptide
  Seed: MDPRMCSLMQGSTLPRRSGA
MDPRMFSLTQASTLPRRSGA

SEQ ID NO: 102200 - protein, 20 aa, Artificial Sequence
  Description of Artificial Sequence: Synthetic peptide
  Seed: MDPRMCSLMQGSTLPRRSGA
MDPRMFSLTQASTMPRRSGA

SEQ ID NO: 102201 - protein, 20 aa, Artificial Sequence
  Description of Artificial Sequence: Synthetic peptide
  Seed: MDPRMCSLMQGSTLPRRSGA
MDPRMFSLTQASTNPRRSGA

SEQ ID NO: 102202 - protein, 20 aa, Artificial Sequence
  Description of Artificial Sequence: Synthetic peptide
  Seed: MDPRMCSLMQGSTLPRRSGA
MDPRMFSLTQASTSPRRSGA

SEQ ID NO: 102203 - protein, 20 aa, Artificial Sequence
  Description of Artificial Sequence: Synthetic peptide
  Seed: MDPRMCSLMQGSTLPRRSGA
MDPRMFSLTQASTTPRRSGA

SEQ ID NO: 102204 - protein, 20 aa, Artificial Sequence
  Description of Artificial Sequence: Synthetic peptide
  Seed: MDPRMCSLMQGSTLPRRSGA
MDPRMFSLTQASTVPRRSGA

SEQ ID NO: 102205 - protein, 20 aa, Artificial Sequence
  Description of Artificial Sequence: Synthetic peptide
  Seed: MDPRMCSLMQGSTLPRRSGA
MDPRMFSLTQGSTAPRRSGA

SEQ ID NO: 102206 - protein, 20 aa, Artificial Sequence
  Description of Artificial Sequence: Synthetic peptide
  Seed: MDPRMCSLMQGSTLPRRSGA
MDPRMFSLTQGSTIPRRSGA

SEQ ID NO: 102207 - protein, 20 aa, Artificial Sequence
  Description of Artificial Sequence: Synthetic peptide
  Seed: MDPRMCSLMQGSTLPRRSGA
MDPRMFSLTQGSTLPRRSGA

SEQ ID NO: 102208 - protein, 20 aa, Artificial Sequence
  Description of Artificial Sequence: Synthetic peptide
  Seed: MDPRMCSLMQGSTLPRRSGA
MDPRMFSLTQGSTVPRRSGA

SEQ ID NO: 102209 - protein, 20 aa, Artificial Sequence
  Description of Artificial Sequence: Synthetic peptide
  Seed: MDPRMCSLMQGSTLPRRSGA
MDPRMFSLTQISTAPRRSGA

SEQ ID NO: 102210 - protein, 20 aa, Artificial Sequence
  Description of Artificial Sequence: Synthetic peptide
  Seed: MDPRMCSLMQGSTLPRRSGA
MDPRMFSLTQPSTAPRRSGA

SEQ ID NO: 102211 - protein, 20 aa, Artificial Sequence
  Description of Artificial Sequence: Synthetic peptide
  Seed: MDPRMCSLMQGSTLPRRSGA
MDPRMFSLTQPSTIPRRSGA

SEQ ID NO: 102212 - protein, 20 aa, Artificial Sequence
  Description of Artificial Sequence: Synthetic peptide
  Seed: MDPRMCSLMQGSTLPRRSGA
MDPRMFSLTQPSTLPRRSGA

SEQ ID NO: 102213 - protein, 20 aa, Artificial Sequence
  Description of Artificial Sequence: Synthetic peptide
  Seed: MDPRMCSLMQGSTLPRRSGA
MDPRMFSLTQPSTNPRRSGA

SEQ ID NO: 102214 - protein, 20 aa, Artificial Sequence
  Description of Artificial Sequence: Synthetic peptide
  Seed: MDPRMCSLMQGSTLPRRSGA
MDPRMFSLTQPSTSPRRSGA

SEQ ID NO: 102215 - protein, 20 aa, Artificial Sequence
  Description of Artificial Sequence: Synthetic peptide
  Seed: MDPRMCSLMQGSTLPRRSGA
MDPRMFSLTQPSTVPRRSGA

SEQ ID NO: 102216 - protein, 20 aa, Artificial Sequence
  Description of Artificial Sequence: Synthetic peptide
  Seed: MDPRMCSLMQGSTLPRRSGA
MDPRMFSLTQSSTAPRRSGA

SEQ ID NO: 102217 - protein, 20 aa, Artificial Sequence
  Description of Artificial Sequence: Synthetic peptide
  Seed: MDPRMCSLMQGSTLPRRSGA
MDPRMFSLTQSSTIPRRSGA

SEQ ID NO: 102218 - protein, 20 aa, Artificial Sequence
  Description of Artificial Sequence: Synthetic peptide
  Seed: MDPRMCSLMQGSTLPRRSGA
MDPRMFSLTQSSTLPRRSGA

SEQ ID NO: 102219 - protein, 20 aa, Artificial Sequence
  Description of Artificial Sequence: Synthetic peptide
  Seed: MDPRMCSLMQGSTLPRRSGA
MDPRMFSLTQSSTNPRRSGA

SEQ ID NO: 102220 - protein, 20 aa, Artificial Sequence
  Description of Artificial Sequence: Synthetic peptide
  Seed: MDPRMCSLMQGSTLPRRSGA
MDPRMFSLTQSSTSPRRSGA

SEQ ID NO: 102221 - protein, 20 aa, Artificial Sequence
  Description of Artificial Sequence: Synthetic peptide
  Seed: MDPRMCSLMQGSTLPRRSGA
MDPRMFSLTQSSTVPRRSGA

SEQ ID NO: 102222 - protein, 20 aa, Artificial Sequence
  Description of Artificial Sequence: Synthetic peptide
  Seed: MDPRMCSLMQGSTLPRRSGA
MDPRMFSLTQTSTAPRRSGA

SEQ ID NO: 102223 - protein, 20 aa, Artificial Sequence
  Description of Artificial Sequence: Synthetic peptide
  Seed: MDPRMCSLMQGSTLPRRSGA
MDPRMFSLTQTSTSPRRSGA

SEQ ID NO: 102224 - protein, 20 aa, Artificial Sequence
  Description of Artificial Sequence: Synthetic peptide
  Seed: MDPRMCSLMQGSTLPRRSGA
MDPRMFSLTQVSTAPRRSGA

SEQ ID NO: 102225 - protein, 20 aa, Artificial Sequence
  Description of Artificial Sequence: Synthetic peptide
  Seed: MDPRMCSLMQGSTLPRRSGA
MDPRMFSLTQVSTNPRRSGA

SEQ ID NO: 102226 - protein, 20 aa, Artificial Sequence
  Description of Artificial Sequence: Synthetic peptide
  Seed: MDPRMCSLMQGSTLPRRSGA
MDPRMFSLTQVSTSPRRSGA

SEQ ID NO: 102227 - protein, 20 aa, Artificial Sequence
  Description of Artificial Sequence: Synthetic peptide
  Seed: MDPRMCSLMQGSTLPRRSGA
MDPRMFSLVQASTAPRRSGA

SEQ ID NO: 102228 - protein, 20 aa, Artificial Sequence
  Description of Artificial Sequence: Synthetic peptide
  Seed: MDPRMCSLMQGSTLPRRSGA
MDPRMFSLVQASTCPRRSGA

SEQ ID NO: 102229 - protein, 20 aa, Artificial Sequence
  Description of Artificial Sequence: Synthetic peptide
  Seed: MDPRMCSLMQGSTLPRRSGA
MDPRMFSLVQASTDPRRSGA

SEQ ID NO: 102230 - protein, 20 aa, Artificial Sequence
  Description of Artificial Sequence: Synthetic peptide
  Seed: MDPRMCSLMQGSTLPRRSGA
MDPRMFSLVQASTEPRRSGA

SEQ ID NO: 102231 - protein, 20 aa, Artificial Sequence
  Description of Artificial Sequence: Synthetic peptide
  Seed: MDPRMCSLMQGSTLPRRSGA
MDPRMFSLVQASTFPRRSGA

SEQ ID NO: 102232 - protein, 20 aa, Artificial Sequence
  Description of Artificial Sequence: Synthetic peptide
  Seed: MDPRMCSLMQGSTLPRRSGA
MDPRMFSLVQASTGPRRSGA

SEQ ID NO: 102233 - protein, 20 aa, Artificial Sequence
  Description of Artificial Sequence: Synthetic peptide
  Seed: MDPRMCSLMQGSTLPRRSGA
MDPRMFSLVQASTHPRRSGA

SEQ ID NO: 102234 - protein, 20 aa, Artificial Sequence
  Description of Artificial Sequence: Synthetic peptide
  Seed: MDPRMCSLMQGSTLPRRSGA
MDPRMFSLVQASTIPRRSGA

SEQ ID NO: 102235 - protein, 20 aa, Artificial Sequence
  Description of Artificial Sequence: Synthetic peptide
  Seed: MDPRMCSLMQGSTLPRRSGA
MDPRMFSLVQASTLPRRSGA

SEQ ID NO: 102236 - protein, 20 aa, Artificial Sequence
  Description of Artificial Sequence: Synthetic peptide
  Seed: MDPRMCSLMQGSTLPRRSGA
MDPRMFSLVQASTMPRRSGA

SEQ ID NO: 102237 - protein, 20 aa, Artificial Sequence
  Description of Artificial Sequence: Synthetic peptide
  Seed: MDPRMCSLMQGSTLPRRSGA
MDPRMFSLVQASTNPRRSGA

SEQ ID NO: 102238 - protein, 20 aa, Artificial Sequence
  Description of Artificial Sequence: Synthetic peptide
  Seed: MDPRMCSLMQGSTLPRRSGA
MDPRMFSLVQASTPPRRSGA

SEQ ID NO: 102239 - protein, 20 aa, Artificial Sequence
  Description of Artificial Sequence: Synthetic peptide
  Seed: MDPRMCSLMQGSTLPRRSGA
MDPRMFSLVQASTQPRRSGA

SEQ ID NO: 102240 - protein, 20 aa, Artificial Sequence
  Description of Artificial Sequence: Synthetic peptide
  Seed: MDPRMCSLMQGSTLPRRSGA
MDPRMFSLVQASTSPRRSGA

SEQ ID NO: 102241 - protein, 20 aa, Artificial Sequence
  Description of Artificial Sequence: Synthetic peptide
  Seed: MDPRMCSLMQGSTLPRRSGA
MDPRMFSLVQASTTPRRSGA

SEQ ID NO: 102242 - protein, 20 aa, Artificial Sequence
  Description of Artificial Sequence: Synthetic peptide
  Seed: MDPRMCSLMQGSTLPRRSGA
MDPRMFSLVQASTVPRRSGA

SEQ ID NO: 102243 - protein, 20 aa, Artificial Sequence
  Description of Artificial Sequence: Synthetic peptide
  Seed: MDPRMCSLMQGSTLPRRSGA
MDPRMFSLVQGSTAPRRSGA

SEQ ID NO: 102244 - protein, 20 aa, Artificial Sequence
  Description of Artificial Sequence: Synthetic peptide
  Seed: MDPRMCSLMQGSTLPRRSGA
MDPRMFSLVQGSTCPRRSGA

SEQ ID NO: 102245 - protein, 20 aa, Artificial Sequence
  Description of Artificial Sequence: Synthetic peptide
  Seed: MDPRMCSLMQGSTLPRRSGA
MDPRMFSLVQGSTGPRRSGA

SEQ ID NO: 102246 - protein, 20 aa, Artificial Sequence
  Description of Artificial Sequence: Synthetic peptide
  Seed: MDPRMCSLMQGSTLPRRSGA
MDPRMFSLVQGSTIPRRSGA

SEQ ID NO: 102247 - protein, 20 aa, Artificial Sequence
  Description of Artificial Sequence: Synthetic peptide
  Seed: MDPRMCSLMQGSTLPRRSGA
MDPRMFSLVQGSTLPRRSGA

SEQ ID NO: 102248 - protein, 20 aa, Artificial Sequence
  Description of Artificial Sequence: Synthetic peptide
  Seed: MDPRMCSLMQGSTLPRRSGA
MDPRMFSLVQGSTMPRRSGA

SEQ ID NO: 102249 - protein, 20 aa, Artificial Sequence
  Description of Artificial Sequence: Synthetic peptide
  Seed: MDPRMCSLMQGSTLPRRSGA
MDPRMFSLVQGSTNPRRSGA

SEQ ID NO: 102250 - protein, 20 aa, Artificial Sequence
  Description of Artificial Sequence: Synthetic peptide
  Seed: MDPRMCSLMQGSTLPRRSGA
MDPRMFSLVQGSTSPRRSGA

SEQ ID NO: 102251 - protein, 20 aa, Artificial Sequence
  Description of Artificial Sequence: Synthetic peptide
  Seed: MDPRMCSLMQGSTLPRRSGA
MDPRMFSLVQGSTTPRRSGA

SEQ ID NO: 102252 - protein, 20 aa, Artificial Sequence
  Description of Artificial Sequence: Synthetic peptide
  Seed: MDPRMCSLMQGSTLPRRSGA
MDPRMFSLVQGSTVPRRSGA

SEQ ID NO: 102253 - protein, 20 aa, Artificial Sequence
  Description of Artificial Sequence: Synthetic peptide
  Seed: MDPRMCSLMQGSTLPRRSGA
MDPRMFSLVQISTAPRRSGA

SEQ ID NO: 102254 - protein, 20 aa, Artificial Sequence
  Description of Artificial Sequence: Synthetic peptide
  Seed: MDPRMCSLMQGSTLPRRSGA
MDPRMFSLVQISTGPRRSGA

SEQ ID NO: 102255 - protein, 20 aa, Artificial Sequence
  Description of Artificial Sequence: Synthetic peptide
  Seed: MDPRMCSLMQGSTLPRRSGA
MDPRMFSLVQISTIPRRSGA

SEQ ID NO: 102256 - protein, 20 aa, Artificial Sequence
  Description of Artificial Sequence: Synthetic peptide
  Seed: MDPRMCSLMQGSTLPRRSGA
MDPRMFSLVQISTLPRRSGA

SEQ ID NO: 102257 - protein, 20 aa, Artificial Sequence
  Description of Artificial Sequence: Synthetic peptide
  Seed: MDPRMCSLMQGSTLPRRSGA
MDPRMFSLVQISTMPRRSGA

SEQ ID NO: 102258 - protein, 20 aa, Artificial Sequence
  Description of Artificial Sequence: Synthetic peptide
  Seed: MDPRMCSLMQGSTLPRRSGA
MDPRMFSLVQISTNPRRSGA

SEQ ID NO: 102259 - protein, 20 aa, Artificial Sequence
  Description of Artificial Sequence: Synthetic peptide
  Seed: MDPRMCSLMQGSTLPRRSGA
MDPRMFSLVQISTSPRRSGA

SEQ ID NO: 102260 - protein, 20 aa, Artificial Sequence
  Description of Artificial Sequence: Synthetic peptide
  Seed: MDPRMCSLMQGSTLPRRSGA
MDPRMFSLVQISTTPRRSGA

SEQ ID NO: 102261 - protein, 20 aa, Artificial Sequence
  Description of Artificial Sequence: Synthetic peptide
  Seed: MDPRMCSLMQGSTLPRRSGA
MDPRMFSLVQISTVPRRSGA

SEQ ID NO: 102262 - protein, 20 aa, Artificial Sequence
  Description of Artificial Sequence: Synthetic peptide
  Seed: MDPRMCSLMQGSTLPRRSGA
MDPRMFSLVQLSTAPRRSGA

SEQ ID NO: 102263 - protein, 20 aa, Artificial Sequence
  Description of Artificial Sequence: Synthetic peptide
  Seed: MDPRMCSLMQGSTLPRRSGA
MDPRMFSLVQLSTNPRRSGA

SEQ ID NO: 102264 - protein, 20 aa, Artificial Sequence
  Description of Artificial Sequence: Synthetic peptide
  Seed: MDPRMCSLMQGSTLPRRSGA
MDPRMFSLVQLSTSPRRSGA

SEQ ID NO: 102265 - protein, 20 aa, Artificial Sequence
  Description of Artificial Sequence: Synthetic peptide
  Seed: MDPRMCSLMQGSTLPRRSGA
MDPRMFSLVQMSTAPRRSGA

SEQ ID NO: 102266 - protein, 20 aa, Artificial Sequence
  Description of Artificial Sequence: Synthetic peptide
  Seed: MDPRMCSLMQGSTLPRRSGA
MDPRMFSLVQMSTNPRRSGA

SEQ ID NO: 102267 - protein, 20 aa, Artificial Sequence
  Description of Artificial Sequence: Synthetic peptide
  Seed: MDPRMCSLMQGSTLPRRSGA
MDPRMFSLVQMSTSPRRSGA

SEQ ID NO: 102268 - protein, 20 aa, Artificial Sequence
  Description of Artificial Sequence: Synthetic peptide
  Seed: MDPRMCSLMQGSTLPRRSGA
MDPRMFSLVQNSTAPRRSGA

SEQ ID NO: 102269 - protein, 20 aa, Artificial Sequence
  Description of Artificial Sequence: Synthetic peptide
  Seed: MDPRMCSLMQGSTLPRRSGA
MDPRMFSLVQNSTIPRRSGA

SEQ ID NO: 102270 - protein, 20 aa, Artificial Sequence
  Description of Artificial Sequence: Synthetic peptide
  Seed: MDPRMCSLMQGSTLPRRSGA
MDPRMFSLVQNSTLPRRSGA

SEQ ID NO: 102271 - protein, 20 aa, Artificial Sequence
  Description of Artificial Sequence: Synthetic peptide
  Seed: MDPRMCSLMQGSTLPRRSGA
MDPRMFSLVQNSTNPRRSGA

SEQ ID NO: 102272 - protein, 20 aa, Artificial Sequence
  Description of Artificial Sequence: Synthetic peptide
  Seed: MDPRMCSLMQGSTLPRRSGA
MDPRMFSLVQNSTSPRRSGA

SEQ ID NO: 102273 - protein, 20 aa, Artificial Sequence
  Description of Artificial Sequence: Synthetic peptide
  Seed: MDPRMCSLMQGSTLPRRSGA
MDPRMFSLVQNSTTPRRSGA

SEQ ID NO: 102274 - protein, 20 aa, Artificial Sequence
  Description of Artificial Sequence: Synthetic peptide
  Seed: MDPRMCSLMQGSTLPRRSGA
MDPRMFSLVQNSTVPRRSGA

SEQ ID NO: 102275 - protein, 20 aa, Artificial Sequence
  Description of Artificial Sequence: Synthetic peptide
  Seed: MDPRMCSLMQGSTLPRRSGA
MDPRMFSLVQPSTAPRRSGA

SEQ ID NO: 102276 - protein, 20 aa, Artificial Sequence
  Description of Artificial Sequence: Synthetic peptide
  Seed: MDPRMCSLMQGSTLPRRSGA
MDPRMFSLVQPSTGPRRSGA

SEQ ID NO: 102277 - protein, 20 aa, Artificial Sequence
  Description of Artificial Sequence: Synthetic peptide
  Seed: MDPRMCSLMQGSTLPRRSGA
MDPRMFSLVQPSTHPRRSGA

SEQ ID NO: 102278 - protein, 20 aa, Artificial Sequence
  Description of Artificial Sequence: Synthetic peptide
  Seed: MDPRMCSLMQGSTLPRRSGA
MDPRMFSLVQPSTIPRRSGA

SEQ ID NO: 102279 - protein, 20 aa, Artificial Sequence
  Description of Artificial Sequence: Synthetic peptide
  Seed: MDPRMCSLMQGSTLPRRSGA
MDPRMFSLVQPSTLPRRSGA

SEQ ID NO: 102280 - protein, 20 aa, Artificial Sequence
  Description of Artificial Sequence: Synthetic peptide
  Seed: MDPRMCSLMQGSTLPRRSGA
MDPRMFSLVQPSTMPRRSGA

SEQ ID NO: 102281 - protein, 20 aa, Artificial Sequence
  Description of Artificial Sequence: Synthetic peptide
  Seed: MDPRMCSLMQGSTLPRRSGA
MDPRMFSLVQPSTNPRRSGA

SEQ ID NO: 102282 - protein, 20 aa, Artificial Sequence
  Description of Artificial Sequence: Synthetic peptide
  Seed: MDPRMCSLMQGSTLPRRSGA
MDPRMFSLVQPSTQPRRSGA

SEQ ID NO: 102283 - protein, 20 aa, Artificial Sequence
  Description of Artificial Sequence: Synthetic peptide
  Seed: MDPRMCSLMQGSTLPRRSGA
MDPRMFSLVQPSTSPRRSGA

SEQ ID NO: 102284 - protein, 20 aa, Artificial Sequence
  Description of Artificial Sequence: Synthetic peptide
  Seed: MDPRMCSLMQGSTLPRRSGA
MDPRMFSLVQPSTTPRRSGA

SEQ ID NO: 102285 - protein, 20 aa, Artificial Sequence
  Description of Artificial Sequence: Synthetic peptide
  Seed: MDPRMCSLMQGSTLPRRSGA
MDPRMFSLVQPSTVPRRSGA

SEQ ID NO: 102286 - protein, 20 aa, Artificial Sequence
  Description of Artificial Sequence: Synthetic peptide
  Seed: MDPRMCSLMQGSTLPRRSGA
MDPRMFSLVQSSTAPRRSGA

SEQ ID NO: 102287 - protein, 20 aa, Artificial Sequence
  Description of Artificial Sequence: Synthetic peptide
  Seed: MDPRMCSLMQGSTLPRRSGA
MDPRMFSLVQSSTGPRRSGA

SEQ ID NO: 102288 - protein, 20 aa, Artificial Sequence
  Description of Artificial Sequence: Synthetic peptide
  Seed: MDPRMCSLMQGSTLPRRSGA
MDPRMFSLVQSSTHPRRSGA

SEQ ID NO: 102289 - protein, 20 aa, Artificial Sequence
  Description of Artificial Sequence: Synthetic peptide
  Seed: MDPRMCSLMQGSTLPRRSGA
MDPRMFSLVQSSTIPRRSGA

SEQ ID NO: 102290 - protein, 20 aa, Artificial Sequence
  Description of Artificial Sequence: Synthetic peptide
  Seed: MDPRMCSLMQGSTLPRRSGA
MDPRMFSLVQSSTLPRRSGA

SEQ ID NO: 102291 - protein, 20 aa, Artificial Sequence
  Description of Artificial Sequence: Synthetic peptide
  Seed: MDPRMCSLMQGSTLPRRSGA
MDPRMFSLVQSSTMPRRSGA

SEQ ID NO: 102292 - protein, 20 aa, Artificial Sequence
  Description of Artificial Sequence: Synthetic peptide
  Seed: MDPRMCSLMQGSTLPRRSGA
MDPRMFSLVQSSTNPRRSGA

SEQ ID NO: 102293 - protein, 20 aa, Artificial Sequence
  Description of Artificial Sequence: Synthetic peptide
  Seed: MDPRMCSLMQGSTLPRRSGA
MDPRMFSLVQSSTQPRRSGA

SEQ ID NO: 102294 - protein, 20 aa, Artificial Sequence
  Description of Artificial Sequence: Synthetic peptide
  Seed: MDPRMCSLMQGSTLPRRSGA
MDPRMFSLVQSSTSPRRSGA

SEQ ID NO: 102295 - protein, 20 aa, Artificial Sequence
  Description of Artificial Sequence: Synthetic peptide
  Seed: MDPRMCSLMQGSTLPRRSGA
MDPRMFSLVQSSTTPRRSGA

SEQ ID NO: 102296 - protein, 20 aa, Artificial Sequence
  Description of Artificial Sequence: Synthetic peptide
  Seed: MDPRMCSLMQGSTLPRRSGA
MDPRMFSLVQSSTVPRRSGA

SEQ ID NO: 102297 - protein, 20 aa, Artificial Sequence
  Description of Artificial Sequence: Synthetic peptide
  Seed: MDPRMCSLMQGSTLPRRSGA
MDPRMFSLVQTSTAPRRSGA

SEQ ID NO: 102298 - protein, 20 aa, Artificial Sequence
  Description of Artificial Sequence: Synthetic peptide
  Seed: MDPRMCSLMQGSTLPRRSGA
MDPRMFSLVQTSTGPRRSGA

SEQ ID NO: 102299 - protein, 20 aa, Artificial Sequence
  Description of Artificial Sequence: Synthetic peptide
  Seed: MDPRMCSLMQGSTLPRRSGA
MDPRMFSLVQTSTHPRRSGA

SEQ ID NO: 102300 - protein, 20 aa, Artificial Sequence
  Description of Artificial Sequence: Synthetic peptide
  Seed: MDPRMCSLMQGSTLPRRSGA
MDPRMFSLVQTSTIPRRSGA

SEQ ID NO: 102301 - protein, 20 aa, Artificial Sequence
  Description of Artificial Sequence: Synthetic peptide
  Seed: MDPRMCSLMQGSTLPRRSGA
MDPRMFSLVQTSTLPRRSGA

SEQ ID NO: 102302 - protein, 20 aa, Artificial Sequence
  Description of Artificial Sequence: Synthetic peptide
  Seed: MDPRMCSLMQGSTLPRRSGA
MDPRMFSLVQTSTMPRRSGA

SEQ ID NO: 102303 - protein, 20 aa, Artificial Sequence
  Description of Artificial Sequence: Synthetic peptide
  Seed: MDPRMCSLMQGSTLPRRSGA
MDPRMFSLVQTSTNPRRSGA

SEQ ID NO: 102304 - protein, 20 aa, Artificial Sequence
  Description of Artificial Sequence: Synthetic peptide
  Seed: MDPRMCSLMQGSTLPRRSGA
MDPRMFSLVQTSTQPRRSGA

SEQ ID NO: 102305 - protein, 20 aa, Artificial Sequence
  Description of Artificial Sequence: Synthetic peptide
  Seed: MDPRMCSLMQGSTLPRRSGA
MDPRMFSLVQTSTSPRRSGA

SEQ ID NO: 102306 - protein, 20 aa, Artificial Sequence
  Description of Artificial Sequence: Synthetic peptide
  Seed: MDPRMCSLMQGSTLPRRSGA
MDPRMFSLVQTSTTPRRSGA

SEQ ID NO: 102307 - protein, 20 aa, Artificial Sequence
  Description of Artificial Sequence: Synthetic peptide
  Seed: MDPRMCSLMQGSTLPRRSGA
MDPRMFSLVQTSTVPRRSGA

SEQ ID NO: 102308 - protein, 20 aa, Artificial Sequence
  Description of Artificial Sequence: Synthetic peptide
  Seed: MDPRMCSLMQGSTLPRRSGA
MDPRMFSLVQVSTAPRRSGA

SEQ ID NO: 102309 - protein, 20 aa, Artificial Sequence
  Description of Artificial Sequence: Synthetic peptide
  Seed: MDPRMCSLMQGSTLPRRSGA
MDPRMFSLVQVSTGPRRSGA

SEQ ID NO: 102310 - protein, 20 aa, Artificial Sequence
  Description of Artificial Sequence: Synthetic peptide
  Seed: MDPRMCSLMQGSTLPRRSGA
MDPRMFSLVQVSTHPRRSGA

SEQ ID NO: 102311 - protein, 20 aa, Artificial Sequence
  Description of Artificial Sequence: Synthetic peptide
  Seed: MDPRMCSLMQGSTLPRRSGA
MDPRMFSLVQVSTIPRRSGA

SEQ ID NO: 102312 - protein, 20 aa, Artificial Sequence
  Description of Artificial Sequence: Synthetic peptide
  Seed: MDPRMCSLMQGSTLPRRSGA
MDPRMFSLVQVSTLPRRSGA

SEQ ID NO: 102313 - protein, 20 aa, Artificial Sequence
  Description of Artificial Sequence: Synthetic peptide
  Seed: MDPRMCSLMQGSTLPRRSGA
MDPRMFSLVQVSTMPRRSGA

SEQ ID NO: 102314 - protein, 20 aa, Artificial Sequence
  Description of Artificial Sequence: Synthetic peptide
  Seed: MDPRMCSLMQGSTLPRRSGA
MDPRMFSLVQVSTNPRRSGA

SEQ ID NO: 102315 - protein, 20 aa, Artificial Sequence
  Description of Artificial Sequence: Synthetic peptide
  Seed: MDPRMCSLMQGSTLPRRSGA
MDPRMFSLVQVSTQPRRSGA

SEQ ID NO: 102316 - protein, 20 aa, Artificial Sequence
  Description of Artificial Sequence: Synthetic peptide
  Seed: MDPRMCSLMQGSTLPRRSGA
MDPRMFSLVQVSTSPRRSGA

SEQ ID NO: 102317 - protein, 20 aa, Artificial Sequence
  Description of Artificial Sequence: Synthetic peptide
  Seed: MDPRMCSLMQGSTLPRRSGA
MDPRMFSLVQVSTTPRRSGA

SEQ ID NO: 102318 - protein, 20 aa, Artificial Sequence
  Description of Artificial Sequence: Synthetic peptide
  Seed: MDPRMCSLMQGSTLPRRSGA
MDPRMFSLVQVSTVPRRSGA

SEQ ID NO: 102319 - protein, 20 aa, Artificial Sequence
  Description of Artificial Sequence: Synthetic peptide
  Seed: MDPRMCSLMQGSTLPRRSGA
MDPRMFSLWQASTAPRRSGA

SEQ ID NO: 102320 - protein, 20 aa, Artificial Sequence
  Description of Artificial Sequence: Synthetic peptide
  Seed: MDPRMCSLMQGSTLPRRSGA
MDPRMFSLWQASTIPRRSGA

SEQ ID NO: 102321 - protein, 20 aa, Artificial Sequence
  Description of Artificial Sequence: Synthetic peptide
  Seed: MDPRMCSLMQGSTLPRRSGA
MDPRMFSLWQASTLPRRSGA

SEQ ID NO: 102322 - protein, 20 aa, Artificial Sequence
  Description of Artificial Sequence: Synthetic peptide
  Seed: MDPRMCSLMQGSTLPRRSGA
MDPRMFSLWQASTSPRRSGA

SEQ ID NO: 102323 - protein, 20 aa, Artificial Sequence
  Description of Artificial Sequence: Synthetic peptide
  Seed: MDPRMCSLMQGSTLPRRSGA
MDPRMFSLWQASTVPRRSGA

SEQ ID NO: 102324 - protein, 20 aa, Artificial Sequence
  Description of Artificial Sequence: Synthetic peptide
  Seed: MDPRMCSLMQGSTLPRRSGA
MDPRMFSLWQVSTAPRRSGA

SEQ ID NO: 102325 - protein, 20 aa, Artificial Sequence
  Description of Artificial Sequence: Synthetic peptide
  Seed: MDPRMCSLMQGSTLPRRSGA
MDPRMFSLYQASTAPRRSGA

SEQ ID NO: 102326 - protein, 20 aa, Artificial Sequence
  Description of Artificial Sequence: Synthetic peptide
  Seed: MDPRMCSLMQGSTLPRRSGA
MDPRMFSLYQSSTLPRRSGA

SEQ ID NO: 102327 - protein, 20 aa, Artificial Sequence
  Description of Artificial Sequence: Synthetic peptide
  Seed: MDPRMCSLMQGSTLPRRSGA
MDPRMISLAQASTAPRRSGA

SEQ ID NO: 102328 - protein, 20 aa, Artificial Sequence
  Description of Artificial Sequence: Synthetic peptide
  Seed: MDPRMCSLMQGSTLPRRSGA
MDPRMISLAQASTIPRRSGA

SEQ ID NO: 102329 - protein, 20 aa, Artificial Sequence
  Description of Artificial Sequence: Synthetic peptide
  Seed: MDPRMCSLMQGSTLPRRSGA
MDPRMISLAQASTLPRRSGA

SEQ ID NO: 102330 - protein, 20 aa, Artificial Sequence
  Description of Artificial Sequence: Synthetic peptide
  Seed: MDPRMCSLMQGSTLPRRSGA
MDPRMISLAQASTMPRRSGA

SEQ ID NO: 102331 - protein, 20 aa, Artificial Sequence
  Description of Artificial Sequence: Synthetic peptide
  Seed: MDPRMCSLMQGSTLPRRSGA
MDPRMISLAQASTNPRRSGA

SEQ ID NO: 102332 - protein, 20 aa, Artificial Sequence
  Description of Artificial Sequence: Synthetic peptide
  Seed: MDPRMCSLMQGSTLPRRSGA
MDPRMISLAQASTSPRRSGA

SEQ ID NO: 102333 - protein, 20 aa, Artificial Sequence
  Description of Artificial Sequence: Synthetic peptide
  Seed: MDPRMCSLMQGSTLPRRSGA
MDPRMISLAQASTTPRRSGA

SEQ ID NO: 102334 - protein, 20 aa, Artificial Sequence
  Description of Artificial Sequence: Synthetic peptide
  Seed: MDPRMCSLMQGSTLPRRSGA
MDPRMISLAQASTVPRRSGA

SEQ ID NO: 102335 - protein, 20 aa, Artificial Sequence
  Description of Artificial Sequence: Synthetic peptide
  Seed: MDPRMCSLMQGSTLPRRSGA
MDPRMISLAQGSTAPRRSGA

SEQ ID NO: 102336 - protein, 20 aa, Artificial Sequence
  Description of Artificial Sequence: Synthetic peptide
  Seed: MDPRMCSLMQGSTLPRRSGA
MDPRMISLAQGSTIPRRSGA

SEQ ID NO: 102337 - protein, 20 aa, Artificial Sequence
  Description of Artificial Sequence: Synthetic peptide
  Seed: MDPRMCSLMQGSTLPRRSGA
MDPRMISLAQGSTLPRRSGA

SEQ ID NO: 102338 - protein, 20 aa, Artificial Sequence
  Description of Artificial Sequence: Synthetic peptide
  Seed: MDPRMCSLMQGSTLPRRSGA
MDPRMISLAQGSTVPRRSGA

SEQ ID NO: 102339 - protein, 20 aa, Artificial Sequence
  Description of Artificial Sequence: Synthetic peptide
  Seed: MDPRMCSLMQGSTLPRRSGA
MDPRMISLAQPSTAPRRSGA

SEQ ID NO: 102340 - protein, 20 aa, Artificial Sequence
  Description of Artificial Sequence: Synthetic peptide
  Seed: MDPRMCSLMQGSTLPRRSGA
MDPRMISLAQPSTIPRRSGA

SEQ ID NO: 102341 - protein, 20 aa, Artificial Sequence
  Description of Artificial Sequence: Synthetic peptide
  Seed: MDPRMCSLMQGSTLPRRSGA
MDPRMISLAQPSTLPRRSGA

SEQ ID NO: 102342 - protein, 20 aa, Artificial Sequence
  Description of Artificial Sequence: Synthetic peptide
  Seed: MDPRMCSLMQGSTLPRRSGA
MDPRMISLAQPSTVPRRSGA

SEQ ID NO: 102343 - protein, 20 aa, Artificial Sequence
  Description of Artificial Sequence: Synthetic peptide
  Seed: MDPRMCSLMQGSTLPRRSGA
MDPRMISLAQSSTAPRRSGA

SEQ ID NO: 102344 - protein, 20 aa, Artificial Sequence
  Description of Artificial Sequence: Synthetic peptide
  Seed: MDPRMCSLMQGSTLPRRSGA
MDPRMISLAQSSTIPRRSGA

SEQ ID NO: 102345 - protein, 20 aa, Artificial Sequence
  Description of Artificial Sequence: Synthetic peptide
  Seed: MDPRMCSLMQGSTLPRRSGA
MDPRMISLAQSSTLPRRSGA

SEQ ID NO: 102346 - protein, 20 aa, Artificial Sequence
  Description of Artificial Sequence: Synthetic peptide
  Seed: MDPRMCSLMQGSTLPRRSGA
MDPRMISLAQSSTVPRRSGA

SEQ ID NO: 102347 - protein, 20 aa, Artificial Sequence
  Description of Artificial Sequence: Synthetic peptide
  Seed: MDPRMCSLMQGSTLPRRSGA
MDPRMISLAQVSTAPRRSGA

SEQ ID NO: 102348 - protein, 20 aa, Artificial Sequence
  Description of Artificial Sequence: Synthetic peptide
  Seed: MDPRMCSLMQGSTLPRRSGA
MDPRMISLEQASTIPRRSGA

SEQ ID NO: 102349 - protein, 20 aa, Artificial Sequence
  Description of Artificial Sequence: Synthetic peptide
  Seed: MDPRMCSLMQGSTLPRRSGA
MDPRMISLEQASTLPRRSGA

SEQ ID NO: 102350 - protein, 20 aa, Artificial Sequence
  Description of Artificial Sequence: Synthetic peptide
  Seed: MDPRMCSLMQGSTLPRRSGA
MDPRMISLEQASTVPRRSGA

SEQ ID NO: 102351 - protein, 20 aa, Artificial Sequence
  Description of Artificial Sequence: Synthetic peptide
  Seed: MDPRMCSLMQGSTLPRRSGA
MDPRMISLFQASTAPRRSGA

SEQ ID NO: 102352 - protein, 20 aa, Artificial Sequence
  Description of Artificial Sequence: Synthetic peptide
  Seed: MDPRMCSLMQGSTLPRRSGA
MDPRMISLFQASTVPRRSGA

SEQ ID NO: 102353 - protein, 20 aa, Artificial Sequence
  Description of Artificial Sequence: Synthetic peptide
  Seed: MDPRMCSLMQGSTLPRRSGA
MDPRMISLFQDSTAPRRSGA

SEQ ID NO: 102354 - protein, 20 aa, Artificial Sequence
  Description of Artificial Sequence: Synthetic peptide
  Seed: MDPRMCSLMQGSTLPRRSGA
MDPRMISLFQDSTIPRRSGA

SEQ ID NO: 102355 - protein, 20 aa, Artificial Sequence
  Description of Artificial Sequence: Synthetic peptide
  Seed: MDPRMCSLMQGSTLPRRSGA
MDPRMISLFQDSTLPRRSGA

SEQ ID NO: 102356 - protein, 20 aa, Artificial Sequence
  Description of Artificial Sequence: Synthetic peptide
  Seed: MDPRMCSLMQGSTLPRRSGA
MDPRMISLFQDSTVPRRSGA

SEQ ID NO: 102357 - protein, 20 aa, Artificial Sequence
  Description of Artificial Sequence: Synthetic peptide
  Seed: MDPRMCSLMQGSTLPRRSGA
MDPRMISLFQSSTAPRRSGA

SEQ ID NO: 102358 - protein, 20 aa, Artificial Sequence
  Description of Artificial Sequence: Synthetic peptide
  Seed: MDPRMCSLMQGSTLPRRSGA
MDPRMISLGQASTLPRRSGA

SEQ ID NO: 102359 - protein, 20 aa, Artificial Sequence
  Description of Artificial Sequence: Synthetic peptide
  Seed: MDPRMCSLMQGSTLPRRSGA
MDPRMISLIQASTAPRRSGA

SEQ ID NO: 102360 - protein, 20 aa, Artificial Sequence
  Description of Artificial Sequence: Synthetic peptide
  Seed: MDPRMCSLMQGSTLPRRSGA
MDPRMISLIQASTIPRRSGA

SEQ ID NO: 102361 - protein, 20 aa, Artificial Sequence
  Description of Artificial Sequence: Synthetic peptide
  Seed: MDPRMCSLMQGSTLPRRSGA
MDPRMISLIQASTLPRRSGA

SEQ ID NO: 102362 - protein, 20 aa, Artificial Sequence
  Description of Artificial Sequence: Synthetic peptide
  Seed: MDPRMCSLMQGSTLPRRSGA
MDPRMISLIQASTMPRRSGA

SEQ ID NO: 102363 - protein, 20 aa, Artificial Sequence
  Description of Artificial Sequence: Synthetic peptide
  Seed: MDPRMCSLMQGSTLPRRSGA
MDPRMISLIQASTNPRRSGA

SEQ ID NO: 102364 - protein, 20 aa, Artificial Sequence
  Description of Artificial Sequence: Synthetic peptide
  Seed: MDPRMCSLMQGSTLPRRSGA
MDPRMISLIQASTSPRRSGA

SEQ ID NO: 102365 - protein, 20 aa, Artificial Sequence
  Description of Artificial Sequence: Synthetic peptide
  Seed: MDPRMCSLMQGSTLPRRSGA
MDPRMISLIQASTTPRRSGA

SEQ ID NO: 102366 - protein, 20 aa, Artificial Sequence
  Description of Artificial Sequence: Synthetic peptide
  Seed: MDPRMCSLMQGSTLPRRSGA
MDPRMISLIQASTVPRRSGA

SEQ ID NO: 102367 - protein, 20 aa, Artificial Sequence
  Description of Artificial Sequence: Synthetic peptide
  Seed: MDPRMCSLMQGSTLPRRSGA
MDPRMISLIQGSTAPRRSGA

SEQ ID NO: 102368 - protein, 20 aa, Artificial Sequence
  Description of Artificial Sequence: Synthetic peptide
  Seed: MDPRMCSLMQGSTLPRRSGA
MDPRMISLIQGSTIPRRSGA

SEQ ID NO: 102369 - protein, 20 aa, Artificial Sequence
  Description of Artificial Sequence: Synthetic peptide
  Seed: MDPRMCSLMQGSTLPRRSGA
MDPRMISLIQGSTLPRRSGA

SEQ ID NO: 102370 - protein, 20 aa, Artificial Sequence
  Description of Artificial Sequence: Synthetic peptide
  Seed: MDPRMCSLMQGSTLPRRSGA
MDPRMISLIQGSTMPRRSGA

SEQ ID NO: 102371 - protein, 20 aa, Artificial Sequence
  Description of Artificial Sequence: Synthetic peptide
  Seed: MDPRMCSLMQGSTLPRRSGA
MDPRMISLIQGSTSPRRSGA

SEQ ID NO: 102372 - protein, 20 aa, Artificial Sequence
  Description of Artificial Sequence: Synthetic peptide
  Seed: MDPRMCSLMQGSTLPRRSGA
MDPRMISLIQGSTTPRRSGA

SEQ ID NO: 102373 - protein, 20 aa, Artificial Sequence
  Description of Artificial Sequence: Synthetic peptide
  Seed: MDPRMCSLMQGSTLPRRSGA
MDPRMISLIQGSTVPRRSGA

SEQ ID NO: 102374 - protein, 20 aa, Artificial Sequence
  Description of Artificial Sequence: Synthetic peptide
  Seed: MDPRMCSLMQGSTLPRRSGA
MDPRMISLIQNSTVPRRSGA

SEQ ID NO: 102375 - protein, 20 aa, Artificial Sequence
  Description of Artificial Sequence: Synthetic peptide
  Seed: MDPRMCSLMQGSTLPRRSGA
MDPRMISLIQPSTAPRRSGA

SEQ ID NO: 102376 - protein, 20 aa, Artificial Sequence
  Description of Artificial Sequence: Synthetic peptide
  Seed: MDPRMCSLMQGSTLPRRSGA
MDPRMISLIQPSTIPRRSGA

SEQ ID NO: 102377 - protein, 20 aa, Artificial Sequence
  Description of Artificial Sequence: Synthetic peptide
  Seed: MDPRMCSLMQGSTLPRRSGA
MDPRMISLIQPSTLPRRSGA

SEQ ID NO: 102378 - protein, 20 aa, Artificial Sequence
  Description of Artificial Sequence: Synthetic peptide
  Seed: MDPRMCSLMQGSTLPRRSGA
MDPRMISLIQPSTNPRRSGA

SEQ ID NO: 102379 - protein, 20 aa, Artificial Sequence
  Description of Artificial Sequence: Synthetic peptide
  Seed: MDPRMCSLMQGSTLPRRSGA
MDPRMISLIQPSTSPRRSGA

SEQ ID NO: 102380 - protein, 20 aa, Artificial Sequence
  Description of Artificial Sequence: Synthetic peptide
  Seed: MDPRMCSLMQGSTLPRRSGA
MDPRMISLIQPSTVPRRSGA

SEQ ID NO: 102381 - protein, 20 aa, Artificial Sequence
  Description of Artificial Sequence: Synthetic peptide
  Seed: MDPRMCSLMQGSTLPRRSGA
MDPRMISLIQSSTAPRRSGA

SEQ ID NO: 102382 - protein, 20 aa, Artificial Sequence
  Description of Artificial Sequence: Synthetic peptide
  Seed: MDPRMCSLMQGSTLPRRSGA
MDPRMISLIQSSTIPRRSGA

SEQ ID NO: 102383 - protein, 20 aa, Artificial Sequence
  Description of Artificial Sequence: Synthetic peptide
  Seed: MDPRMCSLMQGSTLPRRSGA
MDPRMISLIQSSTLPRRSGA

SEQ ID NO: 102384 - protein, 20 aa, Artificial Sequence
  Description of Artificial Sequence: Synthetic peptide
  Seed: MDPRMCSLMQGSTLPRRSGA
MDPRMISLIQSSTNPRRSGA

SEQ ID NO: 102385 - protein, 20 aa, Artificial Sequence
  Description of Artificial Sequence: Synthetic peptide
  Seed: MDPRMCSLMQGSTLPRRSGA
MDPRMISLIQSSTSPRRSGA

SEQ ID NO: 102386 - protein, 20 aa, Artificial Sequence
  Description of Artificial Sequence: Synthetic peptide
  Seed: MDPRMCSLMQGSTLPRRSGA
MDPRMISLIQSSTVPRRSGA

SEQ ID NO: 102387 - protein, 20 aa, Artificial Sequence
  Description of Artificial Sequence: Synthetic peptide
  Seed: MDPRMCSLMQGSTLPRRSGA
MDPRMISLIQTSTAPRRSGA

SEQ ID NO: 102388 - protein, 20 aa, Artificial Sequence
  Description of Artificial Sequence: Synthetic peptide
  Seed: MDPRMCSLMQGSTLPRRSGA
MDPRMISLIQTSTNPRRSGA

SEQ ID NO: 102389 - protein, 20 aa, Artificial Sequence
  Description of Artificial Sequence: Synthetic peptide
  Seed: MDPRMCSLMQGSTLPRRSGA
MDPRMISLIQTSTSPRRSGA

SEQ ID NO: 102390 - protein, 20 aa, Artificial Sequence
  Description of Artificial Sequence: Synthetic peptide
  Seed: MDPRMCSLMQGSTLPRRSGA
MDPRMISLIQTSTVPRRSGA

SEQ ID NO: 102391 - protein, 20 aa, Artificial Sequence
  Description of Artificial Sequence: Synthetic peptide
  Seed: MDPRMCSLMQGSTLPRRSGA
MDPRMISLIQVSTAPRRSGA

SEQ ID NO: 102392 - protein, 20 aa, Artificial Sequence
  Description of Artificial Sequence: Synthetic peptide
  Seed: MDPRMCSLMQGSTLPRRSGA
MDPRMISLIQVSTNPRRSGA

SEQ ID NO: 102393 - protein, 20 aa, Artificial Sequence
  Description of Artificial Sequence: Synthetic peptide
  Seed: MDPRMCSLMQGSTLPRRSGA
MDPRMISLIQVSTSPRRSGA

SEQ ID NO: 102394 - protein, 20 aa, Artificial Sequence
  Description of Artificial Sequence: Synthetic peptide
  Seed: MDPRMCSLMQGSTLPRRSGA
MDPRMISLLQASTAPRRSGA

SEQ ID NO: 102395 - protein, 20 aa, Artificial Sequence
  Description of Artificial Sequence: Synthetic peptide
  Seed: MDPRMCSLMQGSTLPRRSGA
MDPRMISLLQASTCPRRSGA

SEQ ID NO: 102396 - protein, 20 aa, Artificial Sequence
  Description of Artificial Sequence: Synthetic peptide
  Seed: MDPRMCSLMQGSTLPRRSGA
MDPRMISLLQASTFPRRSGA

SEQ ID NO: 102397 - protein, 20 aa, Artificial Sequence
  Description of Artificial Sequence: Synthetic peptide
  Seed: MDPRMCSLMQGSTLPRRSGA
MDPRMISLLQASTGPRRSGA

SEQ ID NO: 102398 - protein, 20 aa, Artificial Sequence
  Description of Artificial Sequence: Synthetic peptide
  Seed: MDPRMCSLMQGSTLPRRSGA
MDPRMISLLQASTIPRRSGA

SEQ ID NO: 102399 - protein, 20 aa, Artificial Sequence
  Description of Artificial Sequence: Synthetic peptide
  Seed: MDPRMCSLMQGSTLPRRSGA
MDPRMISLLQASTLPRRSGA

SEQ ID NO: 102400 - protein, 20 aa, Artificial Sequence
  Description of Artificial Sequence: Synthetic peptide
  Seed: MDPRMCSLMQGSTLPRRSGA
MDPRMISLLQASTMPRRSGA

SEQ ID NO: 102401 - protein, 20 aa, Artificial Sequence
  Description of Artificial Sequence: Synthetic peptide
  Seed: MDPRMCSLMQGSTLPRRSGA
MDPRMISLLQASTNPRRSGA

SEQ ID NO: 102402 - protein, 20 aa, Artificial Sequence
  Description of Artificial Sequence: Synthetic peptide
  Seed: MDPRMCSLMQGSTLPRRSGA
MDPRMISLLQASTSPRRSGA

SEQ ID NO: 102403 - protein, 20 aa, Artificial Sequence
  Description of Artificial Sequence: Synthetic peptide
  Seed: MDPRMCSLMQGSTLPRRSGA
MDPRMISLLQASTTPRRSGA

SEQ ID NO: 102404 - protein, 20 aa, Artificial Sequence
  Description of Artificial Sequence: Synthetic peptide
  Seed: MDPRMCSLMQGSTLPRRSGA
MDPRMISLLQASTVPRRSGA

SEQ ID NO: 102405 - protein, 20 aa, Artificial Sequence
  Description of Artificial Sequence: Synthetic peptide
  Seed: MDPRMCSLMQGSTLPRRSGA
MDPRMISLLQGSTAPRRSGA

SEQ ID NO: 102406 - protein, 20 aa, Artificial Sequence
  Description of Artificial Sequence: Synthetic peptide
  Seed: MDPRMCSLMQGSTLPRRSGA
MDPRMISLLQGSTCPRRSGA

SEQ ID NO: 102407 - protein, 20 aa, Artificial Sequence
  Description of Artificial Sequence: Synthetic peptide
  Seed: MDPRMCSLMQGSTLPRRSGA
MDPRMISLLQGSTGPRRSGA

SEQ ID NO: 102408 - protein, 20 aa, Artificial Sequence
  Description of Artificial Sequence: Synthetic peptide
  Seed: MDPRMCSLMQGSTLPRRSGA
MDPRMISLLQGSTIPRRSGA

SEQ ID NO: 102409 - protein, 20 aa, Artificial Sequence
  Description of Artificial Sequence: Synthetic peptide
  Seed: MDPRMCSLMQGSTLPRRSGA
MDPRMISLLQGSTLPRRSGA

SEQ ID NO: 102410 - protein, 20 aa, Artificial Sequence
  Description of Artificial Sequence: Synthetic peptide
  Seed: MDPRMCSLMQGSTLPRRSGA
MDPRMISLLQGSTMPRRSGA

SEQ ID NO: 102411 - protein, 20 aa, Artificial Sequence
  Description of Artificial Sequence: Synthetic peptide
  Seed: MDPRMCSLMQGSTLPRRSGA
MDPRMISLLQGSTSPRRSGA

SEQ ID NO: 102412 - protein, 20 aa, Artificial Sequence
  Description of Artificial Sequence: Synthetic peptide
  Seed: MDPRMCSLMQGSTLPRRSGA
MDPRMISLLQGSTTPRRSGA

SEQ ID NO: 102413 - protein, 20 aa, Artificial Sequence
  Description of Artificial Sequence: Synthetic peptide
  Seed: MDPRMCSLMQGSTLPRRSGA
MDPRMISLLQGSTVPRRSGA

SEQ ID NO: 102414 - protein, 20 aa, Artificial Sequence
  Description of Artificial Sequence: Synthetic peptide
  Seed: MDPRMCSLMQGSTLPRRSGA
MDPRMISLLQISTAPRRSGA

SEQ ID NO: 102415 - protein, 20 aa, Artificial Sequence
  Description of Artificial Sequence: Synthetic peptide
  Seed: MDPRMCSLMQGSTLPRRSGA
MDPRMISLLQISTNPRRSGA

SEQ ID NO: 102416 - protein, 20 aa, Artificial Sequence
  Description of Artificial Sequence: Synthetic peptide
  Seed: MDPRMCSLMQGSTLPRRSGA
MDPRMISLLQISTSPRRSGA

SEQ ID NO: 102417 - protein, 20 aa, Artificial Sequence
  Description of Artificial Sequence: Synthetic peptide
  Seed: MDPRMCSLMQGSTLPRRSGA
MDPRMISLLQNSTAPRRSGA

SEQ ID NO: 102418 - protein, 20 aa, Artificial Sequence
  Description of Artificial Sequence: Synthetic peptide
  Seed: MDPRMCSLMQGSTLPRRSGA
MDPRMISLLQNSTIPRRSGA

SEQ ID NO: 102419 - protein, 20 aa, Artificial Sequence
  Description of Artificial Sequence: Synthetic peptide
  Seed: MDPRMCSLMQGSTLPRRSGA
MDPRMISLLQNSTLPRRSGA

SEQ ID NO: 102420 - protein, 20 aa, Artificial Sequence
  Description of Artificial Sequence: Synthetic peptide
  Seed: MDPRMCSLMQGSTLPRRSGA
MDPRMISLLQNSTTPRRSGA

SEQ ID NO: 102421 - protein, 20 aa, Artificial Sequence
  Description of Artificial Sequence: Synthetic peptide
  Seed: MDPRMCSLMQGSTLPRRSGA
MDPRMISLLQNSTVPRRSGA

SEQ ID NO: 102422 - protein, 20 aa, Artificial Sequence
  Description of Artificial Sequence: Synthetic peptide
  Seed: MDPRMCSLMQGSTLPRRSGA
MDPRMISLLQPSTAPRRSGA

SEQ ID NO: 102423 - protein, 20 aa, Artificial Sequence
  Description of Artificial Sequence: Synthetic peptide
  Seed: MDPRMCSLMQGSTLPRRSGA
MDPRMISLLQPSTIPRRSGA

SEQ ID NO: 102424 - protein, 20 aa, Artificial Sequence
  Description of Artificial Sequence: Synthetic peptide
  Seed: MDPRMCSLMQGSTLPRRSGA
MDPRMISLLQPSTLPRRSGA

SEQ ID NO: 102425 - protein, 20 aa, Artificial Sequence
  Description of Artificial Sequence: Synthetic peptide
  Seed: MDPRMCSLMQGSTLPRRSGA
MDPRMISLLQPSTMPRRSGA

SEQ ID NO: 102426 - protein, 20 aa, Artificial Sequence
  Description of Artificial Sequence: Synthetic peptide
  Seed: MDPRMCSLMQGSTLPRRSGA
MDPRMISLLQPSTNPRRSGA

SEQ ID NO: 102427 - protein, 20 aa, Artificial Sequence
  Description of Artificial Sequence: Synthetic peptide
  Seed: MDPRMCSLMQGSTLPRRSGA
MDPRMISLLQPSTSPRRSGA

SEQ ID NO: 102428 - protein, 20 aa, Artificial Sequence
  Description of Artificial Sequence: Synthetic peptide
  Seed: MDPRMCSLMQGSTLPRRSGA
MDPRMISLLQPSTTPRRSGA

SEQ ID NO: 102429 - protein, 20 aa, Artificial Sequence
  Description of Artificial Sequence: Synthetic peptide
  Seed: MDPRMCSLMQGSTLPRRSGA
MDPRMISLLQPSTVPRRSGA

SEQ ID NO: 102430 - protein, 20 aa, Artificial Sequence
  Description of Artificial Sequence: Synthetic peptide
  Seed: MDPRMCSLMQGSTLPRRSGA
MDPRMISLLQSSTAPRRSGA

SEQ ID NO: 102431 - protein, 20 aa, Artificial Sequence
  Description of Artificial Sequence: Synthetic peptide
  Seed: MDPRMCSLMQGSTLPRRSGA
MDPRMISLLQSSTGPRRSGA

SEQ ID NO: 102432 - protein, 20 aa, Artificial Sequence
  Description of Artificial Sequence: Synthetic peptide
  Seed: MDPRMCSLMQGSTLPRRSGA
MDPRMISLLQSSTIPRRSGA

SEQ ID NO: 102433 - protein, 20 aa, Artificial Sequence
  Description of Artificial Sequence: Synthetic peptide
  Seed: MDPRMCSLMQGSTLPRRSGA
MDPRMISLLQSSTLPRRSGA

SEQ ID NO: 102434 - protein, 20 aa, Artificial Sequence
  Description of Artificial Sequence: Synthetic peptide
  Seed: MDPRMCSLMQGSTLPRRSGA
MDPRMISLLQSSTMPRRSGA

SEQ ID NO: 102435 - protein, 20 aa, Artificial Sequence
  Description of Artificial Sequence: Synthetic peptide
  Seed: MDPRMCSLMQGSTLPRRSGA
MDPRMISLLQSSTNPRRSGA

SEQ ID NO: 102436 - protein, 20 aa, Artificial Sequence
  Description of Artificial Sequence: Synthetic peptide
  Seed: MDPRMCSLMQGSTLPRRSGA
MDPRMISLLQSSTSPRRSGA

SEQ ID NO: 102437 - protein, 20 aa, Artificial Sequence
  Description of Artificial Sequence: Synthetic peptide
  Seed: MDPRMCSLMQGSTLPRRSGA
MDPRMISLLQSSTTPRRSGA

SEQ ID NO: 102438 - protein, 20 aa, Artificial Sequence
  Description of Artificial Sequence: Synthetic peptide
  Seed: MDPRMCSLMQGSTLPRRSGA
MDPRMISLLQSSTVPRRSGA

SEQ ID NO: 102439 - protein, 20 aa, Artificial Sequence
  Description of Artificial Sequence: Synthetic peptide
  Seed: MDPRMCSLMQGSTLPRRSGA
MDPRMISLLQTSTAPRRSGA

SEQ ID NO: 102440 - protein, 20 aa, Artificial Sequence
  Description of Artificial Sequence: Synthetic peptide
  Seed: MDPRMCSLMQGSTLPRRSGA
MDPRMISLLQTSTIPRRSGA

SEQ ID NO: 102441 - protein, 20 aa, Artificial Sequence
  Description of Artificial Sequence: Synthetic peptide
  Seed: MDPRMCSLMQGSTLPRRSGA
MDPRMISLLQTSTLPRRSGA

SEQ ID NO: 102442 - protein, 20 aa, Artificial Sequence
  Description of Artificial Sequence: Synthetic peptide
  Seed: MDPRMCSLMQGSTLPRRSGA
MDPRMISLLQTSTNPRRSGA

SEQ ID NO: 102443 - protein, 20 aa, Artificial Sequence
  Description of Artificial Sequence: Synthetic peptide
  Seed: MDPRMCSLMQGSTLPRRSGA
MDPRMISLLQTSTSPRRSGA

SEQ ID NO: 102444 - protein, 20 aa, Artificial Sequence
  Description of Artificial Sequence: Synthetic peptide
  Seed: MDPRMCSLMQGSTLPRRSGA
MDPRMISLLQTSTTPRRSGA

SEQ ID NO: 102445 - protein, 20 aa, Artificial Sequence
  Description of Artificial Sequence: Synthetic peptide
  Seed: MDPRMCSLMQGSTLPRRSGA
MDPRMISLLQTSTVPRRSGA

SEQ ID NO: 102446 - protein, 20 aa, Artificial Sequence
  Description of Artificial Sequence: Synthetic peptide
  Seed: MDPRMCSLMQGSTLPRRSGA
MDPRMISLLQVSTAPRRSGA

SEQ ID NO: 102447 - protein, 20 aa, Artificial Sequence
  Description of Artificial Sequence: Synthetic peptide
  Seed: MDPRMCSLMQGSTLPRRSGA
MDPRMISLLQVSTIPRRSGA

SEQ ID NO: 102448 - protein, 20 aa, Artificial Sequence
  Description of Artificial Sequence: Synthetic peptide
  Seed: MDPRMCSLMQGSTLPRRSGA
MDPRMISLLQVSTLPRRSGA

SEQ ID NO: 102449 - protein, 20 aa, Artificial Sequence
  Description of Artificial Sequence: Synthetic peptide
  Seed: MDPRMCSLMQGSTLPRRSGA
MDPRMISLLQVSTNPRRSGA

SEQ ID NO: 102450 - protein, 20 aa, Artificial Sequence
  Description of Artificial Sequence: Synthetic peptide
  Seed: MDPRMCSLMQGSTLPRRSGA
MDPRMISLLQVSTSPRRSGA

SEQ ID NO: 102451 - protein, 20 aa, Artificial Sequence
  Description of Artificial Sequence: Synthetic peptide
  Seed: MDPRMCSLMQGSTLPRRSGA
MDPRMISLLQVSTTPRRSGA

SEQ ID NO: 102452 - protein, 20 aa, Artificial Sequence
  Description of Artificial Sequence: Synthetic peptide
  Seed: MDPRMCSLMQGSTLPRRSGA
MDPRMISLLQVSTVPRRSGA

SEQ ID NO: 102453 - protein, 20 aa, Artificial Sequence
  Description of Artificial Sequence: Synthetic peptide
  Seed: MDPRMCSLMQGSTLPRRSGA
MDPRMISLMQASTAPRRSGA

SEQ ID NO: 102454 - protein, 20 aa, Artificial Sequence
  Description of Artificial Sequence: Synthetic peptide
  Seed: MDPRMCSLMQGSTLPRRSGA
MDPRMISLMQASTCPRRSGA

SEQ ID NO: 102455 - protein, 20 aa, Artificial Sequence
  Description of Artificial Sequence: Synthetic peptide
  Seed: MDPRMCSLMQGSTLPRRSGA
MDPRMISLMQASTFPRRSGA

SEQ ID NO: 102456 - protein, 20 aa, Artificial Sequence
  Description of Artificial Sequence: Synthetic peptide
  Seed: MDPRMCSLMQGSTLPRRSGA
MDPRMISLMQASTGPRRSGA

SEQ ID NO: 102457 - protein, 20 aa, Artificial Sequence
  Description of Artificial Sequence: Synthetic peptide
  Seed: MDPRMCSLMQGSTLPRRSGA
MDPRMISLMQASTHPRRSGA

SEQ ID NO: 102458 - protein, 20 aa, Artificial Sequence
  Description of Artificial Sequence: Synthetic peptide
  Seed: MDPRMCSLMQGSTLPRRSGA
MDPRMISLMQASTIPRRSGA

SEQ ID NO: 102459 - protein, 20 aa, Artificial Sequence
  Description of Artificial Sequence: Synthetic peptide
  Seed: MDPRMCSLMQGSTLPRRSGA
MDPRMISLMQASTLPRRSGA

SEQ ID NO: 102460 - protein, 20 aa, Artificial Sequence
  Description of Artificial Sequence: Synthetic peptide
  Seed: MDPRMCSLMQGSTLPRRSGA
MDPRMISLMQASTMPRRSGA

SEQ ID NO: 102461 - protein, 20 aa, Artificial Sequence
  Description of Artificial Sequence: Synthetic peptide
  Seed: MDPRMCSLMQGSTLPRRSGA
MDPRMISLMQASTNPRRSGA

SEQ ID NO: 102462 - protein, 20 aa, Artificial Sequence
  Description of Artificial Sequence: Synthetic peptide
  Seed: MDPRMCSLMQGSTLPRRSGA
MDPRMISLMQASTQPRRSGA

SEQ ID NO: 102463 - protein, 20 aa, Artificial Sequence
  Description of Artificial Sequence: Synthetic peptide
  Seed: MDPRMCSLMQGSTLPRRSGA
MDPRMISLMQASTSPRRSGA

SEQ ID NO: 102464 - protein, 20 aa, Artificial Sequence
  Description of Artificial Sequence: Synthetic peptide
  Seed: MDPRMCSLMQGSTLPRRSGA
MDPRMISLMQASTTPRRSGA

SEQ ID NO: 102465 - protein, 20 aa, Artificial Sequence
  Description of Artificial Sequence: Synthetic peptide
  Seed: MDPRMCSLMQGSTLPRRSGA
MDPRMISLMQASTVPRRSGA

SEQ ID NO: 102466 - protein, 20 aa, Artificial Sequence
  Description of Artificial Sequence: Synthetic peptide
  Seed: MDPRMCSLMQGSTLPRRSGA
MDPRMISLMQGSTAPRRSGA

SEQ ID NO: 102467 - protein, 20 aa, Artificial Sequence
  Description of Artificial Sequence: Synthetic peptide
  Seed: MDPRMCSLMQGSTLPRRSGA
MDPRMISLMQGSTGPRRSGA

SEQ ID NO: 102468 - protein, 20 aa, Artificial Sequence
  Description of Artificial Sequence: Synthetic peptide
  Seed: MDPRMCSLMQGSTLPRRSGA
MDPRMISLMQGSTIPRRSGA

SEQ ID NO: 102469 - protein, 20 aa, Artificial Sequence
  Description of Artificial Sequence: Synthetic peptide
  Seed: MDPRMCSLMQGSTLPRRSGA
MDPRMISLMQGSTLPRRSGA

SEQ ID NO: 102470 - protein, 20 aa, Artificial Sequence
  Description of Artificial Sequence: Synthetic peptide
  Seed: MDPRMCSLMQGSTLPRRSGA
MDPRMISLMQGSTMPRRSGA

SEQ ID NO: 102471 - protein, 20 aa, Artificial Sequence
  Description of Artificial Sequence: Synthetic peptide
  Seed: MDPRMCSLMQGSTLPRRSGA
MDPRMISLMQGSTNPRRSGA

SEQ ID NO: 102472 - protein, 20 aa, Artificial Sequence
  Description of Artificial Sequence: Synthetic peptide
  Seed: MDPRMCSLMQGSTLPRRSGA
MDPRMISLMQGSTSPRRSGA

SEQ ID NO: 102473 - protein, 20 aa, Artificial Sequence
  Description of Artificial Sequence: Synthetic peptide
  Seed: MDPRMCSLMQGSTLPRRSGA
MDPRMISLMQGSTTPRRSGA

SEQ ID NO: 102474 - protein, 20 aa, Artificial Sequence
  Description of Artificial Sequence: Synthetic peptide
  Seed: MDPRMCSLMQGSTLPRRSGA
MDPRMISLMQGSTVPRRSGA

SEQ ID NO: 102475 - protein, 20 aa, Artificial Sequence
  Description of Artificial Sequence: Synthetic peptide
  Seed: MDPRMCSLMQGSTLPRRSGA
MDPRMISLMQISTAPRRSGA

SEQ ID NO: 102476 - protein, 20 aa, Artificial Sequence
  Description of Artificial Sequence: Synthetic peptide
  Seed: MDPRMCSLMQGSTLPRRSGA
MDPRMISLMQISTNPRRSGA

SEQ ID NO: 102477 - protein, 20 aa, Artificial Sequence
  Description of Artificial Sequence: Synthetic peptide
  Seed: MDPRMCSLMQGSTLPRRSGA
MDPRMISLMQISTSPRRSGA

SEQ ID NO: 102478 - protein, 20 aa, Artificial Sequence
  Description of Artificial Sequence: Synthetic peptide
  Seed: MDPRMCSLMQGSTLPRRSGA
MDPRMISLMQISTTPRRSGA

SEQ ID NO: 102479 - protein, 20 aa, Artificial Sequence
  Description of Artificial Sequence: Synthetic peptide
  Seed: MDPRMCSLMQGSTLPRRSGA
MDPRMISLMQLSTAPRRSGA

SEQ ID NO: 102480 - protein, 20 aa, Artificial Sequence
  Description of Artificial Sequence: Synthetic peptide
  Seed: MDPRMCSLMQGSTLPRRSGA
MDPRMISLMQNSTAPRRSGA

SEQ ID NO: 102481 - protein, 20 aa, Artificial Sequence
  Description of Artificial Sequence: Synthetic peptide
  Seed: MDPRMCSLMQGSTLPRRSGA
MDPRMISLMQNSTIPRRSGA

SEQ ID NO: 102482 - protein, 20 aa, Artificial Sequence
  Description of Artificial Sequence: Synthetic peptide
  Seed: MDPRMCSLMQGSTLPRRSGA
MDPRMISLMQNSTLPRRSGA

SEQ ID NO: 102483 - protein, 20 aa, Artificial Sequence
  Description of Artificial Sequence: Synthetic peptide
  Seed: MDPRMCSLMQGSTLPRRSGA
MDPRMISLMQNSTTPRRSGA

SEQ ID NO: 102484 - protein, 20 aa, Artificial Sequence
  Description of Artificial Sequence: Synthetic peptide
  Seed: MDPRMCSLMQGSTLPRRSGA
MDPRMISLMQNSTVPRRSGA

SEQ ID NO: 102485 - protein, 20 aa, Artificial Sequence
  Description of Artificial Sequence: Synthetic peptide
  Seed: MDPRMCSLMQGSTLPRRSGA
MDPRMISLMQPSTAPRRSGA

SEQ ID NO: 102486 - protein, 20 aa, Artificial Sequence
  Description of Artificial Sequence: Synthetic peptide
  Seed: MDPRMCSLMQGSTLPRRSGA
MDPRMISLMQPSTIPRRSGA

SEQ ID NO: 102487 - protein, 20 aa, Artificial Sequence
  Description of Artificial Sequence: Synthetic peptide
  Seed: MDPRMCSLMQGSTLPRRSGA
MDPRMISLMQPSTLPRRSGA

SEQ ID NO: 102488 - protein, 20 aa, Artificial Sequence
  Description of Artificial Sequence: Synthetic peptide
  Seed: MDPRMCSLMQGSTLPRRSGA
MDPRMISLMQPSTMPRRSGA

SEQ ID NO: 102489 - protein, 20 aa, Artificial Sequence
  Description of Artificial Sequence: Synthetic peptide
  Seed: MDPRMCSLMQGSTLPRRSGA
MDPRMISLMQPSTNPRRSGA

SEQ ID NO: 102490 - protein, 20 aa, Artificial Sequence
  Description of Artificial Sequence: Synthetic peptide
  Seed: MDPRMCSLMQGSTLPRRSGA
MDPRMISLMQPSTSPRRSGA

SEQ ID NO: 102491 - protein, 20 aa, Artificial Sequence
  Description of Artificial Sequence: Synthetic peptide
  Seed: MDPRMCSLMQGSTLPRRSGA
MDPRMISLMQPSTTPRRSGA

SEQ ID NO: 102492 - protein, 20 aa, Artificial Sequence
  Description of Artificial Sequence: Synthetic peptide
  Seed: MDPRMCSLMQGSTLPRRSGA
MDPRMISLMQPSTVPRRSGA

SEQ ID NO: 102493 - protein, 20 aa, Artificial Sequence
  Description of Artificial Sequence: Synthetic peptide
  Seed: MDPRMCSLMQGSTLPRRSGA
MDPRMISLMQSSTAPRRSGA

SEQ ID NO: 102494 - protein, 20 aa, Artificial Sequence
  Description of Artificial Sequence: Synthetic peptide
  Seed: MDPRMCSLMQGSTLPRRSGA
MDPRMISLMQSSTIPRRSGA

SEQ ID NO: 102495 - protein, 20 aa, Artificial Sequence
  Description of Artificial Sequence: Synthetic peptide
  Seed: MDPRMCSLMQGSTLPRRSGA
MDPRMISLMQSSTLPRRSGA

SEQ ID NO: 102496 - protein, 20 aa, Artificial Sequence
  Description of Artificial Sequence: Synthetic peptide
  Seed: MDPRMCSLMQGSTLPRRSGA
MDPRMISLMQSSTMPRRSGA

SEQ ID NO: 102497 - protein, 20 aa, Artificial Sequence
  Description of Artificial Sequence: Synthetic peptide
  Seed: MDPRMCSLMQGSTLPRRSGA
MDPRMISLMQSSTNPRRSGA

SEQ ID NO: 102498 - protein, 20 aa, Artificial Sequence
  Description of Artificial Sequence: Synthetic peptide
  Seed: MDPRMCSLMQGSTLPRRSGA
MDPRMISLMQSSTSPRRSGA

SEQ ID NO: 102499 - protein, 20 aa, Artificial Sequence
  Description of Artificial Sequence: Synthetic peptide
  Seed: MDPRMCSLMQGSTLPRRSGA
MDPRMISLMQSSTTPRRSGA

SEQ ID NO: 102500 - protein, 20 aa, Artificial Sequence
  Description of Artificial Sequence: Synthetic peptide
  Seed: MDPRMCSLMQGSTLPRRSGA
MDPRMISLMQSSTVPRRSGA

SEQ ID NO: 102501 - protein, 20 aa, Artificial Sequence
  Description of Artificial Sequence: Synthetic peptide
  Seed: MDPRMCSLMQGSTLPRRSGA
MDPRMISLMQTSTAPRRSGA

SEQ ID NO: 102502 - protein, 20 aa, Artificial Sequence
  Description of Artificial Sequence: Synthetic peptide
  Seed: MDPRMCSLMQGSTLPRRSGA
MDPRMISLMQTSTIPRRSGA

SEQ ID NO: 102503 - protein, 20 aa, Artificial Sequence
  Description of Artificial Sequence: Synthetic peptide
  Seed: MDPRMCSLMQGSTLPRRSGA
MDPRMISLMQTSTLPRRSGA

SEQ ID NO: 102504 - protein, 20 aa, Artificial Sequence
  Description of Artificial Sequence: Synthetic peptide
  Seed: MDPRMCSLMQGSTLPRRSGA
MDPRMISLMQTSTMPRRSGA

SEQ ID NO: 102505 - protein, 20 aa, Artificial Sequence
  Description of Artificial Sequence: Synthetic peptide
  Seed: MDPRMCSLMQGSTLPRRSGA
MDPRMISLMQTSTNPRRSGA

SEQ ID NO: 102506 - protein, 20 aa, Artificial Sequence
  Description of Artificial Sequence: Synthetic peptide
  Seed: MDPRMCSLMQGSTLPRRSGA
MDPRMISLMQTSTSPRRSGA

SEQ ID NO: 102507 - protein, 20 aa, Artificial Sequence
  Description of Artificial Sequence: Synthetic peptide
  Seed: MDPRMCSLMQGSTLPRRSGA
MDPRMISLMQTSTTPRRSGA

SEQ ID NO: 102508 - protein, 20 aa, Artificial Sequence
  Description of Artificial Sequence: Synthetic peptide
  Seed: MDPRMCSLMQGSTLPRRSGA
MDPRMISLMQTSTVPRRSGA

SEQ ID NO: 102509 - protein, 20 aa, Artificial Sequence
  Description of Artificial Sequence: Synthetic peptide
  Seed: MDPRMCSLMQGSTLPRRSGA
MDPRMISLMQVSTAPRRSGA

SEQ ID NO: 102510 - protein, 20 aa, Artificial Sequence
  Description of Artificial Sequence: Synthetic peptide
  Seed: MDPRMCSLMQGSTLPRRSGA
MDPRMISLMQVSTIPRRSGA

SEQ ID NO: 102511 - protein, 20 aa, Artificial Sequence
  Description of Artificial Sequence: Synthetic peptide
  Seed: MDPRMCSLMQGSTLPRRSGA
MDPRMISLMQVSTLPRRSGA

SEQ ID NO: 102512 - protein, 20 aa, Artificial Sequence
  Description of Artificial Sequence: Synthetic peptide
  Seed: MDPRMCSLMQGSTLPRRSGA
MDPRMISLMQVSTNPRRSGA

SEQ ID NO: 102513 - protein, 20 aa, Artificial Sequence
  Description of Artificial Sequence: Synthetic peptide
  Seed: MDPRMCSLMQGSTLPRRSGA
MDPRMISLMQVSTSPRRSGA

SEQ ID NO: 102514 - protein, 20 aa, Artificial Sequence
  Description of Artificial Sequence: Synthetic peptide
  Seed: MDPRMCSLMQGSTLPRRSGA
MDPRMISLMQVSTTPRRSGA

SEQ ID NO: 102515 - protein, 20 aa, Artificial Sequence
  Description of Artificial Sequence: Synthetic peptide
  Seed: MDPRMCSLMQGSTLPRRSGA
MDPRMISLMQVSTVPRRSGA

SEQ ID NO: 102516 - protein, 20 aa, Artificial Sequence
  Description of Artificial Sequence: Synthetic peptide
  Seed: MDPRMCSLMQGSTLPRRSGA
MDPRMISLQQASTAPRRSGA

SEQ ID NO: 102517 - protein, 20 aa, Artificial Sequence
  Description of Artificial Sequence: Synthetic peptide
  Seed: MDPRMCSLMQGSTLPRRSGA
MDPRMISLQQASTIPRRSGA

SEQ ID NO: 102518 - protein, 20 aa, Artificial Sequence
  Description of Artificial Sequence: Synthetic peptide
  Seed: MDPRMCSLMQGSTLPRRSGA
MDPRMISLQQASTLPRRSGA

SEQ ID NO: 102519 - protein, 20 aa, Artificial Sequence
  Description of Artificial Sequence: Synthetic peptide
  Seed: MDPRMCSLMQGSTLPRRSGA
MDPRMISLQQASTMPRRSGA

SEQ ID NO: 102520 - protein, 20 aa, Artificial Sequence
  Description of Artificial Sequence: Synthetic peptide
  Seed: MDPRMCSLMQGSTLPRRSGA
MDPRMISLQQASTTPRRSGA

SEQ ID NO: 102521 - protein, 20 aa, Artificial Sequence
  Description of Artificial Sequence: Synthetic peptide
  Seed: MDPRMCSLMQGSTLPRRSGA
MDPRMISLQQASTVPRRSGA

SEQ ID NO: 102522 - protein, 20 aa, Artificial Sequence
  Description of Artificial Sequence: Synthetic peptide
  Seed: MDPRMCSLMQGSTLPRRSGA
MDPRMISLQQGSTAPRRSGA

SEQ ID NO: 102523 - protein, 20 aa, Artificial Sequence
  Description of Artificial Sequence: Synthetic peptide
  Seed: MDPRMCSLMQGSTLPRRSGA
MDPRMISLQQGSTIPRRSGA

SEQ ID NO: 102524 - protein, 20 aa, Artificial Sequence
  Description of Artificial Sequence: Synthetic peptide
  Seed: MDPRMCSLMQGSTLPRRSGA
MDPRMISLQQGSTLPRRSGA

SEQ ID NO: 102525 - protein, 20 aa, Artificial Sequence
  Description of Artificial Sequence: Synthetic peptide
  Seed: MDPRMCSLMQGSTLPRRSGA
MDPRMISLQQGSTVPRRSGA

SEQ ID NO: 102526 - protein, 20 aa, Artificial Sequence
  Description of Artificial Sequence: Synthetic peptide
  Seed: MDPRMCSLMQGSTLPRRSGA
MDPRMISLQQSSTAPRRSGA

SEQ ID NO: 102527 - protein, 20 aa, Artificial Sequence
  Description of Artificial Sequence: Synthetic peptide
  Seed: MDPRMCSLMQGSTLPRRSGA
MDPRMISLQQSSTIPRRSGA

SEQ ID NO: 102528 - protein, 20 aa, Artificial Sequence
  Description of Artificial Sequence: Synthetic peptide
  Seed: MDPRMCSLMQGSTLPRRSGA
MDPRMISLQQSSTLPRRSGA

SEQ ID NO: 102529 - protein, 20 aa, Artificial Sequence
  Description of Artificial Sequence: Synthetic peptide
  Seed: MDPRMCSLMQGSTLPRRSGA
MDPRMISLQQSSTVPRRSGA

SEQ ID NO: 102530 - protein, 20 aa, Artificial Sequence
  Description of Artificial Sequence: Synthetic peptide
  Seed: MDPRMCSLMQGSTLPRRSGA
MDPRMISLSQASTIPRRSGA

SEQ ID NO: 102531 - protein, 20 aa, Artificial Sequence
  Description of Artificial Sequence: Synthetic peptide
  Seed: MDPRMCSLMQGSTLPRRSGA
MDPRMISLSQASTLPRRSGA

SEQ ID NO: 102532 - protein, 20 aa, Artificial Sequence
  Description of Artificial Sequence: Synthetic peptide
  Seed: MDPRMCSLMQGSTLPRRSGA
MDPRMISLSQASTVPRRSGA

SEQ ID NO: 102533 - protein, 20 aa, Artificial Sequence
  Description of Artificial Sequence: Synthetic peptide
  Seed: MDPRMCSLMQGSTLPRRSGA
MDPRMISLVQASTAPRRSGA

SEQ ID NO: 102534 - protein, 20 aa, Artificial Sequence
  Description of Artificial Sequence: Synthetic peptide
  Seed: MDPRMCSLMQGSTLPRRSGA
MDPRMISLVQASTIPRRSGA

SEQ ID NO: 102535 - protein, 20 aa, Artificial Sequence
  Description of Artificial Sequence: Synthetic peptide
  Seed: MDPRMCSLMQGSTLPRRSGA
MDPRMISLVQASTLPRRSGA

SEQ ID NO: 102536 - protein, 20 aa, Artificial Sequence
  Description of Artificial Sequence: Synthetic peptide
  Seed: MDPRMCSLMQGSTLPRRSGA
MDPRMISLVQASTNPRRSGA

SEQ ID NO: 102537 - protein, 20 aa, Artificial Sequence
  Description of Artificial Sequence: Synthetic peptide
  Seed: MDPRMCSLMQGSTLPRRSGA
MDPRMISLVQASTSPRRSGA

SEQ ID NO: 102538 - protein, 20 aa, Artificial Sequence
  Description of Artificial Sequence: Synthetic peptide
  Seed: MDPRMCSLMQGSTLPRRSGA
MDPRMISLVQASTVPRRSGA

SEQ ID NO: 102539 - protein, 20 aa, Artificial Sequence
  Description of Artificial Sequence: Synthetic peptide
  Seed: MDPRMCSLMQGSTLPRRSGA
MDPRMISLVQGSTAPRRSGA

SEQ ID NO: 102540 - protein, 20 aa, Artificial Sequence
  Description of Artificial Sequence: Synthetic peptide
  Seed: MDPRMCSLMQGSTLPRRSGA
MDPRMISLVQGSTIPRRSGA

SEQ ID NO: 102541 - protein, 20 aa, Artificial Sequence
  Description of Artificial Sequence: Synthetic peptide
  Seed: MDPRMCSLMQGSTLPRRSGA
MDPRMISLVQGSTLPRRSGA

SEQ ID NO: 102542 - protein, 20 aa, Artificial Sequence
  Description of Artificial Sequence: Synthetic peptide
  Seed: MDPRMCSLMQGSTLPRRSGA
MDPRMISLVQGSTVPRRSGA

SEQ ID NO: 102543 - protein, 20 aa, Artificial Sequence
  Description of Artificial Sequence: Synthetic peptide
  Seed: MDPRMCSLMQGSTLPRRSGA
MDPRMISLVQPSTAPRRSGA

SEQ ID NO: 102544 - protein, 20 aa, Artificial Sequence
  Description of Artificial Sequence: Synthetic peptide
  Seed: MDPRMCSLMQGSTLPRRSGA
MDPRMISLVQSSTAPRRSGA

SEQ ID NO: 102545 - protein, 20 aa, Artificial Sequence
  Description of Artificial Sequence: Synthetic peptide
  Seed: MDPRMCSLMQGSTLPRRSGA
MDPRMISLVQSSTIPRRSGA

SEQ ID NO: 102546 - protein, 20 aa, Artificial Sequence
  Description of Artificial Sequence: Synthetic peptide
  Seed: MDPRMCSLMQGSTLPRRSGA
MDPRMISLVQSSTLPRRSGA

SEQ ID NO: 102547 - protein, 20 aa, Artificial Sequence
  Description of Artificial Sequence: Synthetic peptide
  Seed: MDPRMCSLMQGSTLPRRSGA
MDPRMISLVQSSTVPRRSGA

SEQ ID NO: 102548 - protein, 20 aa, Artificial Sequence
  Description of Artificial Sequence: Synthetic peptide
  Seed: MDPRMCSLMQGSTLPRRSGA
MDPRMLSLAQASTAPRRSGA

SEQ ID NO: 102549 - protein, 20 aa, Artificial Sequence
  Description of Artificial Sequence: Synthetic peptide
  Seed: MDPRMCSLMQGSTLPRRSGA
MDPRMLSLAQASTIPRRSGA

SEQ ID NO: 102550 - protein, 20 aa, Artificial Sequence
  Description of Artificial Sequence: Synthetic peptide
  Seed: MDPRMCSLMQGSTLPRRSGA
MDPRMLSLAQASTLPRRSGA

SEQ ID NO: 102551 - protein, 20 aa, Artificial Sequence
  Description of Artificial Sequence: Synthetic peptide
  Seed: MDPRMCSLMQGSTLPRRSGA
MDPRMLSLAQASTMPRRSGA

SEQ ID NO: 102552 - protein, 20 aa, Artificial Sequence
  Description of Artificial Sequence: Synthetic peptide
  Seed: MDPRMCSLMQGSTLPRRSGA
MDPRMLSLAQASTNPRRSGA

SEQ ID NO: 102553 - protein, 20 aa, Artificial Sequence
  Description of Artificial Sequence: Synthetic peptide
  Seed: MDPRMCSLMQGSTLPRRSGA
MDPRMLSLAQASTSPRRSGA

SEQ ID NO: 102554 - protein, 20 aa, Artificial Sequence
  Description of Artificial Sequence: Synthetic peptide
  Seed: MDPRMCSLMQGSTLPRRSGA
MDPRMLSLAQASTVPRRSGA

SEQ ID NO: 102555 - protein, 20 aa, Artificial Sequence
  Description of Artificial Sequence: Synthetic peptide
  Seed: MDPRMCSLMQGSTLPRRSGA
MDPRMLSLAQGSTAPRRSGA

SEQ ID NO: 102556 - protein, 20 aa, Artificial Sequence
  Description of Artificial Sequence: Synthetic peptide
  Seed: MDPRMCSLMQGSTLPRRSGA
MDPRMLSLAQGSTIPRRSGA

SEQ ID NO: 102557 - protein, 20 aa, Artificial Sequence
  Description of Artificial Sequence: Synthetic peptide
  Seed: MDPRMCSLMQGSTLPRRSGA
MDPRMLSLAQGSTLPRRSGA

SEQ ID NO: 102558 - protein, 20 aa, Artificial Sequence
  Description of Artificial Sequence: Synthetic peptide
  Seed: MDPRMCSLMQGSTLPRRSGA
MDPRMLSLAQGSTVPRRSGA

SEQ ID NO: 102559 - protein, 20 aa, Artificial Sequence
  Description of Artificial Sequence: Synthetic peptide
  Seed: MDPRMCSLMQGSTLPRRSGA
MDPRMLSLAQSSTIPRRSGA

SEQ ID NO: 102560 - protein, 20 aa, Artificial Sequence
  Description of Artificial Sequence: Synthetic peptide
  Seed: MDPRMCSLMQGSTLPRRSGA
MDPRMLSLAQSSTLPRRSGA

SEQ ID NO: 102561 - protein, 20 aa, Artificial Sequence
  Description of Artificial Sequence: Synthetic peptide
  Seed: MDPRMCSLMQGSTLPRRSGA
MDPRMLSLAQSSTVPRRSGA

SEQ ID NO: 102562 - protein, 20 aa, Artificial Sequence
  Description of Artificial Sequence: Synthetic peptide
  Seed: MDPRMCSLMQGSTLPRRSGA
MDPRMLSLFQASTAPRRSGA

SEQ ID NO: 102563 - protein, 20 aa, Artificial Sequence
  Description of Artificial Sequence: Synthetic peptide
  Seed: MDPRMCSLMQGSTLPRRSGA
MDPRMLSLIQASTAPRRSGA

SEQ ID NO: 102564 - protein, 20 aa, Artificial Sequence
  Description of Artificial Sequence: Synthetic peptide
  Seed: MDPRMCSLMQGSTLPRRSGA
MDPRMLSLIQASTIPRRSGA

SEQ ID NO: 102565 - protein, 20 aa, Artificial Sequence
  Description of Artificial Sequence: Synthetic peptide
  Seed: MDPRMCSLMQGSTLPRRSGA
MDPRMLSLIQASTLPRRSGA

SEQ ID NO: 102566 - protein, 20 aa, Artificial Sequence
  Description of Artificial Sequence: Synthetic peptide
  Seed: MDPRMCSLMQGSTLPRRSGA
MDPRMLSLIQASTMPRRSGA

SEQ ID NO: 102567 - protein, 20 aa, Artificial Sequence
  Description of Artificial Sequence: Synthetic peptide
  Seed: MDPRMCSLMQGSTLPRRSGA
MDPRMLSLIQASTNPRRSGA

SEQ ID NO: 102568 - protein, 20 aa, Artificial Sequence
  Description of Artificial Sequence: Synthetic peptide
  Seed: MDPRMCSLMQGSTLPRRSGA
MDPRMLSLIQASTSPRRSGA

SEQ ID NO: 102569 - protein, 20 aa, Artificial Sequence
  Description of Artificial Sequence: Synthetic peptide
  Seed: MDPRMCSLMQGSTLPRRSGA
MDPRMLSLIQASTTPRRSGA

SEQ ID NO: 102570 - protein, 20 aa, Artificial Sequence
  Description of Artificial Sequence: Synthetic peptide
  Seed: MDPRMCSLMQGSTLPRRSGA
MDPRMLSLIQASTVPRRSGA

SEQ ID NO: 102571 - protein, 20 aa, Artificial Sequence
  Description of Artificial Sequence: Synthetic peptide
  Seed: MDPRMCSLMQGSTLPRRSGA
MDPRMLSLIQGSTAPRRSGA

SEQ ID NO: 102572 - protein, 20 aa, Artificial Sequence
  Description of Artificial Sequence: Synthetic peptide
  Seed: MDPRMCSLMQGSTLPRRSGA
MDPRMLSLIQGSTIPRRSGA

SEQ ID NO: 102573 - protein, 20 aa, Artificial Sequence
  Description of Artificial Sequence: Synthetic peptide
  Seed: MDPRMCSLMQGSTLPRRSGA
MDPRMLSLIQGSTLPRRSGA

SEQ ID NO: 102574 - protein, 20 aa, Artificial Sequence
  Description of Artificial Sequence: Synthetic peptide
  Seed: MDPRMCSLMQGSTLPRRSGA
MDPRMLSLIQGSTVPRRSGA

SEQ ID NO: 102575 - protein, 20 aa, Artificial Sequence
  Description of Artificial Sequence: Synthetic peptide
  Seed: MDPRMCSLMQGSTLPRRSGA
MDPRMLSLIQPSTAPRRSGA

SEQ ID NO: 102576 - protein, 20 aa, Artificial Sequence
  Description of Artificial Sequence: Synthetic peptide
  Seed: MDPRMCSLMQGSTLPRRSGA
MDPRMLSLIQPSTIPRRSGA

SEQ ID NO: 102577 - protein, 20 aa, Artificial Sequence
  Description of Artificial Sequence: Synthetic peptide
  Seed: MDPRMCSLMQGSTLPRRSGA
MDPRMLSLIQPSTLPRRSGA

SEQ ID NO: 102578 - protein, 20 aa, Artificial Sequence
  Description of Artificial Sequence: Synthetic peptide
  Seed: MDPRMCSLMQGSTLPRRSGA
MDPRMLSLIQPSTNPRRSGA

SEQ ID NO: 102579 - protein, 20 aa, Artificial Sequence
  Description of Artificial Sequence: Synthetic peptide
  Seed: MDPRMCSLMQGSTLPRRSGA
MDPRMLSLIQPSTSPRRSGA

SEQ ID NO: 102580 - protein, 20 aa, Artificial Sequence
  Description of Artificial Sequence: Synthetic peptide
  Seed: MDPRMCSLMQGSTLPRRSGA
MDPRMLSLIQPSTVPRRSGA

SEQ ID NO: 102581 - protein, 20 aa, Artificial Sequence
  Description of Artificial Sequence: Synthetic peptide
  Seed: MDPRMCSLMQGSTLPRRSGA
MDPRMLSLIQSSTAPRRSGA

SEQ ID NO: 102582 - protein, 20 aa, Artificial Sequence
  Description of Artificial Sequence: Synthetic peptide
  Seed: MDPRMCSLMQGSTLPRRSGA
MDPRMLSLIQSSTIPRRSGA

SEQ ID NO: 102583 - protein, 20 aa, Artificial Sequence
  Description of Artificial Sequence: Synthetic peptide
  Seed: MDPRMCSLMQGSTLPRRSGA
MDPRMLSLIQSSTLPRRSGA

SEQ ID NO: 102584 - protein, 20 aa, Artificial Sequence
  Description of Artificial Sequence: Synthetic peptide
  Seed: MDPRMCSLMQGSTLPRRSGA
MDPRMLSLIQSSTNPRRSGA

SEQ ID NO: 102585 - protein, 20 aa, Artificial Sequence
  Description of Artificial Sequence: Synthetic peptide
  Seed: MDPRMCSLMQGSTLPRRSGA
MDPRMLSLIQSSTSPRRSGA

SEQ ID NO: 102586 - protein, 20 aa, Artificial Sequence
  Description of Artificial Sequence: Synthetic peptide
  Seed: MDPRMCSLMQGSTLPRRSGA
MDPRMLSLIQSSTVPRRSGA

SEQ ID NO: 102587 - protein, 20 aa, Artificial Sequence
  Description of Artificial Sequence: Synthetic peptide
  Seed: MDPRMCSLMQGSTLPRRSGA
MDPRMLSLIQTSTAPRRSGA

SEQ ID NO: 102588 - protein, 20 aa, Artificial Sequence
  Description of Artificial Sequence: Synthetic peptide
  Seed: MDPRMCSLMQGSTLPRRSGA
MDPRMLSLIQTSTNPRRSGA

SEQ ID NO: 102589 - protein, 20 aa, Artificial Sequence
  Description of Artificial Sequence: Synthetic peptide
  Seed: MDPRMCSLMQGSTLPRRSGA
MDPRMLSLIQTSTSPRRSGA

SEQ ID NO: 102590 - protein, 20 aa, Artificial Sequence
  Description of Artificial Sequence: Synthetic peptide
  Seed: MDPRMCSLMQGSTLPRRSGA
MDPRMLSLIQVSTAPRRSGA

SEQ ID NO: 102591 - protein, 20 aa, Artificial Sequence
  Description of Artificial Sequence: Synthetic peptide
  Seed: MDPRMCSLMQGSTLPRRSGA
MDPRMLSLIQVSTNPRRSGA

SEQ ID NO: 102592 - protein, 20 aa, Artificial Sequence
  Description of Artificial Sequence: Synthetic peptide
  Seed: MDPRMCSLMQGSTLPRRSGA
MDPRMLSLIQVSTSPRRSGA

SEQ ID NO: 102593 - protein, 20 aa, Artificial Sequence
  Description of Artificial Sequence: Synthetic peptide
  Seed: MDPRMCSLMQGSTLPRRSGA
MDPRMLSLLQASTAPRRSGA

SEQ ID NO: 102594 - protein, 20 aa, Artificial Sequence
  Description of Artificial Sequence: Synthetic peptide
  Seed: MDPRMCSLMQGSTLPRRSGA
MDPRMLSLLQASTCPRRSGA

SEQ ID NO: 102595 - protein, 20 aa, Artificial Sequence
  Description of Artificial Sequence: Synthetic peptide
  Seed: MDPRMCSLMQGSTLPRRSGA
MDPRMLSLLQASTGPRRSGA

SEQ ID NO: 102596 - protein, 20 aa, Artificial Sequence
  Description of Artificial Sequence: Synthetic peptide
  Seed: MDPRMCSLMQGSTLPRRSGA
MDPRMLSLLQASTIPRRSGA

SEQ ID NO: 102597 - protein, 20 aa, Artificial Sequence
  Description of Artificial Sequence: Synthetic peptide
  Seed: MDPRMCSLMQGSTLPRRSGA
MDPRMLSLLQASTLPRRSGA

SEQ ID NO: 102598 - protein, 20 aa, Artificial Sequence
  Description of Artificial Sequence: Synthetic peptide
  Seed: MDPRMCSLMQGSTLPRRSGA
MDPRMLSLLQASTMPRRSGA

SEQ ID NO: 102599 - protein, 20 aa, Artificial Sequence
  Description of Artificial Sequence: Synthetic peptide
  Seed: MDPRMCSLMQGSTLPRRSGA
MDPRMLSLLQASTNPRRSGA

SEQ ID NO: 102600 - protein, 20 aa, Artificial Sequence
  Description of Artificial Sequence: Synthetic peptide
  Seed: MDPRMCSLMQGSTLPRRSGA
MDPRMLSLLQASTSPRRSGA

SEQ ID NO: 102601 - protein, 20 aa, Artificial Sequence
  Description of Artificial Sequence: Synthetic peptide
  Seed: MDPRMCSLMQGSTLPRRSGA
MDPRMLSLLQASTTPRRSGA

SEQ ID NO: 102602 - protein, 20 aa, Artificial Sequence
  Description of Artificial Sequence: Synthetic peptide
  Seed: MDPRMCSLMQGSTLPRRSGA
MDPRMLSLLQASTVPRRSGA

SEQ ID NO: 102603 - protein, 20 aa, Artificial Sequence
  Description of Artificial Sequence: Synthetic peptide
  Seed: MDPRMCSLMQGSTLPRRSGA
MDPRMLSLLQGSTAPRRSGA

SEQ ID NO: 102604 - protein, 20 aa, Artificial Sequence
  Description of Artificial Sequence: Synthetic peptide
  Seed: MDPRMCSLMQGSTLPRRSGA
MDPRMLSLLQGSTGPRRSGA

SEQ ID NO: 102605 - protein, 20 aa, Artificial Sequence
  Description of Artificial Sequence: Synthetic peptide
  Seed: MDPRMCSLMQGSTLPRRSGA
MDPRMLSLLQGSTIPRRSGA

SEQ ID NO: 102606 - protein, 20 aa, Artificial Sequence
  Description of Artificial Sequence: Synthetic peptide
  Seed: MDPRMCSLMQGSTLPRRSGA
MDPRMLSLLQGSTLPRRSGA

SEQ ID NO: 102607 - protein, 20 aa, Artificial Sequence
  Description of Artificial Sequence: Synthetic peptide
  Seed: MDPRMCSLMQGSTLPRRSGA
MDPRMLSLLQGSTMPRRSGA

SEQ ID NO: 102608 - protein, 20 aa, Artificial Sequence
  Description of Artificial Sequence: Synthetic peptide
  Seed: MDPRMCSLMQGSTLPRRSGA
MDPRMLSLLQGSTSPRRSGA

SEQ ID NO: 102609 - protein, 20 aa, Artificial Sequence
  Description of Artificial Sequence: Synthetic peptide
  Seed: MDPRMCSLMQGSTLPRRSGA
MDPRMLSLLQGSTTPRRSGA

SEQ ID NO: 102610 - protein, 20 aa, Artificial Sequence
  Description of Artificial Sequence: Synthetic peptide
  Seed: MDPRMCSLMQGSTLPRRSGA
MDPRMLSLLQGSTVPRRSGA

SEQ ID NO: 102611 - protein, 20 aa, Artificial Sequence
  Description of Artificial Sequence: Synthetic peptide
  Seed: MDPRMCSLMQGSTLPRRSGA
MDPRMLSLLQISTAPRRSGA

SEQ ID NO: 102612 - protein, 20 aa, Artificial Sequence
  Description of Artificial Sequence: Synthetic peptide
  Seed: MDPRMCSLMQGSTLPRRSGA
MDPRMLSLLQISTNPRRSGA

SEQ ID NO: 102613 - protein, 20 aa, Artificial Sequence
  Description of Artificial Sequence: Synthetic peptide
  Seed: MDPRMCSLMQGSTLPRRSGA
MDPRMLSLLQISTSPRRSGA

SEQ ID NO: 102614 - protein, 20 aa, Artificial Sequence
  Description of Artificial Sequence: Synthetic peptide
  Seed: MDPRMCSLMQGSTLPRRSGA
MDPRMLSLLQNSTAPRRSGA

SEQ ID NO: 102615 - protein, 20 aa, Artificial Sequence
  Description of Artificial Sequence: Synthetic peptide
  Seed: MDPRMCSLMQGSTLPRRSGA
MDPRMLSLLQNSTIPRRSGA

SEQ ID NO: 102616 - protein, 20 aa, Artificial Sequence
  Description of Artificial Sequence: Synthetic peptide
  Seed: MDPRMCSLMQGSTLPRRSGA
MDPRMLSLLQNSTLPRRSGA

SEQ ID NO: 102617 - protein, 20 aa, Artificial Sequence
  Description of Artificial Sequence: Synthetic peptide
  Seed: MDPRMCSLMQGSTLPRRSGA
MDPRMLSLLQNSTVPRRSGA

SEQ ID NO: 102618 - protein, 20 aa, Artificial Sequence
  Description of Artificial Sequence: Synthetic peptide
  Seed: MDPRMCSLMQGSTLPRRSGA
MDPRMLSLLQPSTAPRRSGA

SEQ ID NO: 102619 - protein, 20 aa, Artificial Sequence
  Description of Artificial Sequence: Synthetic peptide
  Seed: MDPRMCSLMQGSTLPRRSGA
MDPRMLSLLQPSTIPRRSGA

SEQ ID NO: 102620 - protein, 20 aa, Artificial Sequence
  Description of Artificial Sequence: Synthetic peptide
  Seed: MDPRMCSLMQGSTLPRRSGA
MDPRMLSLLQPSTLPRRSGA

SEQ ID NO: 102621 - protein, 20 aa, Artificial Sequence
  Description of Artificial Sequence: Synthetic peptide
  Seed: MDPRMCSLMQGSTLPRRSGA
MDPRMLSLLQPSTMPRRSGA

SEQ ID NO: 102622 - protein, 20 aa, Artificial Sequence
  Description of Artificial Sequence: Synthetic peptide
  Seed: MDPRMCSLMQGSTLPRRSGA
MDPRMLSLLQPSTNPRRSGA

SEQ ID NO: 102623 - protein, 20 aa, Artificial Sequence
  Description of Artificial Sequence: Synthetic peptide
  Seed: MDPRMCSLMQGSTLPRRSGA
MDPRMLSLLQPSTSPRRSGA

SEQ ID NO: 102624 - protein, 20 aa, Artificial Sequence
  Description of Artificial Sequence: Synthetic peptide
  Seed: MDPRMCSLMQGSTLPRRSGA
MDPRMLSLLQPSTTPRRSGA

SEQ ID NO: 102625 - protein, 20 aa, Artificial Sequence
  Description of Artificial Sequence: Synthetic peptide
  Seed: MDPRMCSLMQGSTLPRRSGA
MDPRMLSLLQPSTVPRRSGA

SEQ ID NO: 102626 - protein, 20 aa, Artificial Sequence
  Description of Artificial Sequence: Synthetic peptide
  Seed: MDPRMCSLMQGSTLPRRSGA
MDPRMLSLLQSSTAPRRSGA

SEQ ID NO: 102627 - protein, 20 aa, Artificial Sequence
  Description of Artificial Sequence: Synthetic peptide
  Seed: MDPRMCSLMQGSTLPRRSGA
MDPRMLSLLQSSTIPRRSGA

SEQ ID NO: 102628 - protein, 20 aa, Artificial Sequence
  Description of Artificial Sequence: Synthetic peptide
  Seed: MDPRMCSLMQGSTLPRRSGA
MDPRMLSLLQSSTLPRRSGA

SEQ ID NO: 102629 - protein, 20 aa, Artificial Sequence
  Description of Artificial Sequence: Synthetic peptide
  Seed: MDPRMCSLMQGSTLPRRSGA
MDPRMLSLLQSSTMPRRSGA

SEQ ID NO: 102630 - protein, 20 aa, Artificial Sequence
  Description of Artificial Sequence: Synthetic peptide
  Seed: MDPRMCSLMQGSTLPRRSGA
MDPRMLSLLQSSTNPRRSGA

SEQ ID NO: 102631 - protein, 20 aa, Artificial Sequence
  Description of Artificial Sequence: Synthetic peptide
  Seed: MDPRMCSLMQGSTLPRRSGA
MDPRMLSLLQSSTSPRRSGA

SEQ ID NO: 102632 - protein, 20 aa, Artificial Sequence
  Description of Artificial Sequence: Synthetic peptide
  Seed: MDPRMCSLMQGSTLPRRSGA
MDPRMLSLLQSSTTPRRSGA

SEQ ID NO: 102633 - protein, 20 aa, Artificial Sequence
  Description of Artificial Sequence: Synthetic peptide
  Seed: MDPRMCSLMQGSTLPRRSGA
MDPRMLSLLQSSTVPRRSGA

SEQ ID NO: 102634 - protein, 20 aa, Artificial Sequence
  Description of Artificial Sequence: Synthetic peptide
  Seed: MDPRMCSLMQGSTLPRRSGA
MDPRMLSLLQTSTAPRRSGA

SEQ ID NO: 102635 - protein, 20 aa, Artificial Sequence
  Description of Artificial Sequence: Synthetic peptide
  Seed: MDPRMCSLMQGSTLPRRSGA
MDPRMLSLLQTSTIPRRSGA

SEQ ID NO: 102636 - protein, 20 aa, Artificial Sequence
  Description of Artificial Sequence: Synthetic peptide
  Seed: MDPRMCSLMQGSTLPRRSGA
MDPRMLSLLQTSTLPRRSGA

SEQ ID NO: 102637 - protein, 20 aa, Artificial Sequence
  Description of Artificial Sequence: Synthetic peptide
  Seed: MDPRMCSLMQGSTLPRRSGA
MDPRMLSLLQTSTNPRRSGA

SEQ ID NO: 102638 - protein, 20 aa, Artificial Sequence
  Description of Artificial Sequence: Synthetic peptide
  Seed: MDPRMCSLMQGSTLPRRSGA
MDPRMLSLLQTSTSPRRSGA

SEQ ID NO: 102639 - protein, 20 aa, Artificial Sequence
  Description of Artificial Sequence: Synthetic peptide
  Seed: MDPRMCSLMQGSTLPRRSGA
MDPRMLSLLQTSTTPRRSGA

SEQ ID NO: 102640 - protein, 20 aa, Artificial Sequence
  Description of Artificial Sequence: Synthetic peptide
  Seed: MDPRMCSLMQGSTLPRRSGA
MDPRMLSLLQTSTVPRRSGA

SEQ ID NO: 102641 - protein, 20 aa, Artificial Sequence
  Description of Artificial Sequence: Synthetic peptide
  Seed: MDPRMCSLMQGSTLPRRSGA
MDPRMLSLLQVSTAPRRSGA

SEQ ID NO: 102642 - protein, 20 aa, Artificial Sequence
  Description of Artificial Sequence: Synthetic peptide
  Seed: MDPRMCSLMQGSTLPRRSGA
MDPRMLSLLQVSTNPRRSGA

SEQ ID NO: 102643 - protein, 20 aa, Artificial Sequence
  Description of Artificial Sequence: Synthetic peptide
  Seed: MDPRMCSLMQGSTLPRRSGA
MDPRMLSLLQVSTSPRRSGA

SEQ ID NO: 102644 - protein, 20 aa, Artificial Sequence
  Description of Artificial Sequence: Synthetic peptide
  Seed: MDPRMCSLMQGSTLPRRSGA
MDPRMLSLLQVSTTPRRSGA

SEQ ID NO: 102645 - protein, 20 aa, Artificial Sequence
  Description of Artificial Sequence: Synthetic peptide
  Seed: MDPRMCSLMQGSTLPRRSGA
MDPRMLSLLQVSTVPRRSGA

SEQ ID NO: 102646 - protein, 20 aa, Artificial Sequence
  Description of Artificial Sequence: Synthetic peptide
  Seed: MDPRMCSLMQGSTLPRRSGA
MDPRMLSLMQASTAPRRSGA

SEQ ID NO: 102647 - protein, 20 aa, Artificial Sequence
  Description of Artificial Sequence: Synthetic peptide
  Seed: MDPRMCSLMQGSTLPRRSGA
MDPRMLSLMQASTCPRRSGA

SEQ ID NO: 102648 - protein, 20 aa, Artificial Sequence
  Description of Artificial Sequence: Synthetic peptide
  Seed: MDPRMCSLMQGSTLPRRSGA
MDPRMLSLMQASTGPRRSGA

SEQ ID NO: 102649 - protein, 20 aa, Artificial Sequence
  Description of Artificial Sequence: Synthetic peptide
  Seed: MDPRMCSLMQGSTLPRRSGA
MDPRMLSLMQASTHPRRSGA

SEQ ID NO: 102650 - protein, 20 aa, Artificial Sequence
  Description of Artificial Sequence: Synthetic peptide
  Seed: MDPRMCSLMQGSTLPRRSGA
MDPRMLSLMQASTIPRRSGA

SEQ ID NO: 102651 - protein, 20 aa, Artificial Sequence
  Description of Artificial Sequence: Synthetic peptide
  Seed: MDPRMCSLMQGSTLPRRSGA
MDPRMLSLMQASTLPRRSGA

SEQ ID NO: 102652 - protein, 20 aa, Artificial Sequence
  Description of Artificial Sequence: Synthetic peptide
  Seed: MDPRMCSLMQGSTLPRRSGA
MDPRMLSLMQASTMPRRSGA

SEQ ID NO: 102653 - protein, 20 aa, Artificial Sequence
  Description of Artificial Sequence: Synthetic peptide
  Seed: MDPRMCSLMQGSTLPRRSGA
MDPRMLSLMQASTNPRRSGA

SEQ ID NO: 102654 - protein, 20 aa, Artificial Sequence
  Description of Artificial Sequence: Synthetic peptide
  Seed: MDPRMCSLMQGSTLPRRSGA
MDPRMLSLMQASTQPRRSGA

SEQ ID NO: 102655 - protein, 20 aa, Artificial Sequence
  Description of Artificial Sequence: Synthetic peptide
  Seed: MDPRMCSLMQGSTLPRRSGA
MDPRMLSLMQASTSPRRSGA

SEQ ID NO: 102656 - protein, 20 aa, Artificial Sequence
  Description of Artificial Sequence: Synthetic peptide
  Seed: MDPRMCSLMQGSTLPRRSGA
MDPRMLSLMQASTTPRRSGA

SEQ ID NO: 102657 - protein, 20 aa, Artificial Sequence
  Description of Artificial Sequence: Synthetic peptide
  Seed: MDPRMCSLMQGSTLPRRSGA
MDPRMLSLMQASTVPRRSGA

SEQ ID NO: 102658 - protein, 20 aa, Artificial Sequence
  Description of Artificial Sequence: Synthetic peptide
  Seed: MDPRMCSLMQGSTLPRRSGA
MDPRMLSLMQGSTAPRRSGA

SEQ ID NO: 102659 - protein, 20 aa, Artificial Sequence
  Description of Artificial Sequence: Synthetic peptide
  Seed: MDPRMCSLMQGSTLPRRSGA
MDPRMLSLMQGSTGPRRSGA

SEQ ID NO: 102660 - protein, 20 aa, Artificial Sequence
  Description of Artificial Sequence: Synthetic peptide
  Seed: MDPRMCSLMQGSTLPRRSGA
MDPRMLSLMQGSTIPRRSGA

SEQ ID NO: 102661 - protein, 20 aa, Artificial Sequence
  Description of Artificial Sequence: Synthetic peptide
  Seed: MDPRMCSLMQGSTLPRRSGA
MDPRMLSLMQGSTLPRRSGA

SEQ ID NO: 102662 - protein, 20 aa, Artificial Sequence
  Description of Artificial Sequence: Synthetic peptide
  Seed: MDPRMCSLMQGSTLPRRSGA
MDPRMLSLMQGSTMPRRSGA

SEQ ID NO: 102663 - protein, 20 aa, Artificial Sequence
  Description of Artificial Sequence: Synthetic peptide
  Seed: MDPRMCSLMQGSTLPRRSGA
MDPRMLSLMQGSTNPRRSGA

SEQ ID NO: 102664 - protein, 20 aa, Artificial Sequence
  Description of Artificial Sequence: Synthetic peptide
  Seed: MDPRMCSLMQGSTLPRRSGA
MDPRMLSLMQGSTSPRRSGA

SEQ ID NO: 102665 - protein, 20 aa, Artificial Sequence
  Description of Artificial Sequence: Synthetic peptide
  Seed: MDPRMCSLMQGSTLPRRSGA
MDPRMLSLMQGSTTPRRSGA

SEQ ID NO: 102666 - protein, 20 aa, Artificial Sequence
  Description of Artificial Sequence: Synthetic peptide
  Seed: MDPRMCSLMQGSTLPRRSGA
MDPRMLSLMQGSTVPRRSGA

SEQ ID NO: 102667 - protein, 20 aa, Artificial Sequence
  Description of Artificial Sequence: Synthetic peptide
  Seed: MDPRMCSLMQGSTLPRRSGA
MDPRMLSLMQISTAPRRSGA

SEQ ID NO: 102668 - protein, 20 aa, Artificial Sequence
  Description of Artificial Sequence: Synthetic peptide
  Seed: MDPRMCSLMQGSTLPRRSGA
MDPRMLSLMQISTNPRRSGA

SEQ ID NO: 102669 - protein, 20 aa, Artificial Sequence
  Description of Artificial Sequence: Synthetic peptide
  Seed: MDPRMCSLMQGSTLPRRSGA
MDPRMLSLMQISTSPRRSGA

SEQ ID NO: 102670 - protein, 20 aa, Artificial Sequence
  Description of Artificial Sequence: Synthetic peptide
  Seed: MDPRMCSLMQGSTLPRRSGA
MDPRMLSLMQISTTPRRSGA

SEQ ID NO: 102671 - protein, 20 aa, Artificial Sequence
  Description of Artificial Sequence: Synthetic peptide
  Seed: MDPRMCSLMQGSTLPRRSGA
MDPRMLSLMQLSTAPRRSGA

SEQ ID NO: 102672 - protein, 20 aa, Artificial Sequence
  Description of Artificial Sequence: Synthetic peptide
  Seed: MDPRMCSLMQGSTLPRRSGA
MDPRMLSLMQNSTAPRRSGA

SEQ ID NO: 102673 - protein, 20 aa, Artificial Sequence
  Description of Artificial Sequence: Synthetic peptide
  Seed: MDPRMCSLMQGSTLPRRSGA
MDPRMLSLMQNSTIPRRSGA

SEQ ID NO: 102674 - protein, 20 aa, Artificial Sequence
  Description of Artificial Sequence: Synthetic peptide
  Seed: MDPRMCSLMQGSTLPRRSGA
MDPRMLSLMQNSTLPRRSGA

SEQ ID NO: 102675 - protein, 20 aa, Artificial Sequence
  Description of Artificial Sequence: Synthetic peptide
  Seed: MDPRMCSLMQGSTLPRRSGA
MDPRMLSLMQNSTVPRRSGA

SEQ ID NO: 102676 - protein, 20 aa, Artificial Sequence
  Description of Artificial Sequence: Synthetic peptide
  Seed: MDPRMCSLMQGSTLPRRSGA
MDPRMLSLMQPSTAPRRSGA

SEQ ID NO: 102677 - protein, 20 aa, Artificial Sequence
  Description of Artificial Sequence: Synthetic peptide
  Seed: MDPRMCSLMQGSTLPRRSGA
MDPRMLSLMQPSTIPRRSGA

SEQ ID NO: 102678 - protein, 20 aa, Artificial Sequence
  Description of Artificial Sequence: Synthetic peptide
  Seed: MDPRMCSLMQGSTLPRRSGA
MDPRMLSLMQPSTLPRRSGA

SEQ ID NO: 102679 - protein, 20 aa, Artificial Sequence
  Description of Artificial Sequence: Synthetic peptide
  Seed: MDPRMCSLMQGSTLPRRSGA
MDPRMLSLMQPSTMPRRSGA

SEQ ID NO: 102680 - protein, 20 aa, Artificial Sequence
  Description of Artificial Sequence: Synthetic peptide
  Seed: MDPRMCSLMQGSTLPRRSGA
MDPRMLSLMQPSTNPRRSGA

SEQ ID NO: 102681 - protein, 20 aa, Artificial Sequence
  Description of Artificial Sequence: Synthetic peptide
  Seed: MDPRMCSLMQGSTLPRRSGA
MDPRMLSLMQPSTSPRRSGA

SEQ ID NO: 102682 - protein, 20 aa, Artificial Sequence
  Description of Artificial Sequence: Synthetic peptide
  Seed: MDPRMCSLMQGSTLPRRSGA
MDPRMLSLMQPSTTPRRSGA

SEQ ID NO: 102683 - protein, 20 aa, Artificial Sequence
  Description of Artificial Sequence: Synthetic peptide
  Seed: MDPRMCSLMQGSTLPRRSGA
MDPRMLSLMQPSTVPRRSGA

SEQ ID NO: 102684 - protein, 20 aa, Artificial Sequence
  Description of Artificial Sequence: Synthetic peptide
  Seed: MDPRMCSLMQGSTLPRRSGA
MDPRMLSLMQSSTAPRRSGA

SEQ ID NO: 102685 - protein, 20 aa, Artificial Sequence
  Description of Artificial Sequence: Synthetic peptide
  Seed: MDPRMCSLMQGSTLPRRSGA
MDPRMLSLMQSSTIPRRSGA

SEQ ID NO: 102686 - protein, 20 aa, Artificial Sequence
  Description of Artificial Sequence: Synthetic peptide
  Seed: MDPRMCSLMQGSTLPRRSGA
MDPRMLSLMQSSTLPRRSGA

SEQ ID NO: 102687 - protein, 20 aa, Artificial Sequence
  Description of Artificial Sequence: Synthetic peptide
  Seed: MDPRMCSLMQGSTLPRRSGA
MDPRMLSLMQSSTMPRRSGA

SEQ ID NO: 102688 - protein, 20 aa, Artificial Sequence
  Description of Artificial Sequence: Synthetic peptide
  Seed: MDPRMCSLMQGSTLPRRSGA
MDPRMLSLMQSSTNPRRSGA

SEQ ID NO: 102689 - protein, 20 aa, Artificial Sequence
  Description of Artificial Sequence: Synthetic peptide
  Seed: MDPRMCSLMQGSTLPRRSGA
MDPRMLSLMQSSTSPRRSGA

SEQ ID NO: 102690 - protein, 20 aa, Artificial Sequence
  Description of Artificial Sequence: Synthetic peptide
  Seed: MDPRMCSLMQGSTLPRRSGA
MDPRMLSLMQSSTTPRRSGA

SEQ ID NO: 102691 - protein, 20 aa, Artificial Sequence
  Description of Artificial Sequence: Synthetic peptide
  Seed: MDPRMCSLMQGSTLPRRSGA
MDPRMLSLMQSSTVPRRSGA

SEQ ID NO: 102692 - protein, 20 aa, Artificial Sequence
  Description of Artificial Sequence: Synthetic peptide
  Seed: MDPRMCSLMQGSTLPRRSGA
MDPRMLSLMQTSTAPRRSGA

SEQ ID NO: 102693 - protein, 20 aa, Artificial Sequence
  Description of Artificial Sequence: Synthetic peptide
  Seed: MDPRMCSLMQGSTLPRRSGA
MDPRMLSLMQTSTIPRRSGA

SEQ ID NO: 102694 - protein, 20 aa, Artificial Sequence
  Description of Artificial Sequence: Synthetic peptide
  Seed: MDPRMCSLMQGSTLPRRSGA
MDPRMLSLMQTSTLPRRSGA

SEQ ID NO: 102695 - protein, 20 aa, Artificial Sequence
  Description of Artificial Sequence: Synthetic peptide
  Seed: MDPRMCSLMQGSTLPRRSGA
MDPRMLSLMQTSTMPRRSGA

SEQ ID NO: 102696 - protein, 20 aa, Artificial Sequence
  Description of Artificial Sequence: Synthetic peptide
  Seed: MDPRMCSLMQGSTLPRRSGA
MDPRMLSLMQTSTNPRRSGA

SEQ ID NO: 102697 - protein, 20 aa, Artificial Sequence
  Description of Artificial Sequence: Synthetic peptide
  Seed: MDPRMCSLMQGSTLPRRSGA
MDPRMLSLMQTSTSPRRSGA

SEQ ID NO: 102698 - protein, 20 aa, Artificial Sequence
  Description of Artificial Sequence: Synthetic peptide
  Seed: MDPRMCSLMQGSTLPRRSGA
MDPRMLSLMQTSTTPRRSGA

SEQ ID NO: 102699 - protein, 20 aa, Artificial Sequence
  Description of Artificial Sequence: Synthetic peptide
  Seed: MDPRMCSLMQGSTLPRRSGA
MDPRMLSLMQTSTVPRRSGA

SEQ ID NO: 102700 - protein, 20 aa, Artificial Sequence
  Description of Artificial Sequence: Synthetic peptide
  Seed: MDPRMCSLMQGSTLPRRSGA
MDPRMLSLMQVSTAPRRSGA

SEQ ID NO: 102701 - protein, 20 aa, Artificial Sequence
  Description of Artificial Sequence: Synthetic peptide
  Seed: MDPRMCSLMQGSTLPRRSGA
MDPRMLSLMQVSTNPRRSGA

SEQ ID NO: 102702 - protein, 20 aa, Artificial Sequence
  Description of Artificial Sequence: Synthetic peptide
  Seed: MDPRMCSLMQGSTLPRRSGA
MDPRMLSLMQVSTSPRRSGA

SEQ ID NO: 102703 - protein, 20 aa, Artificial Sequence
  Description of Artificial Sequence: Synthetic peptide
  Seed: MDPRMCSLMQGSTLPRRSGA
MDPRMLSLMQVSTTPRRSGA

SEQ ID NO: 102704 - protein, 20 aa, Artificial Sequence
  Description of Artificial Sequence: Synthetic peptide
  Seed: MDPRMCSLMQGSTLPRRSGA
MDPRMLSLMQVSTVPRRSGA

SEQ ID NO: 102705 - protein, 20 aa, Artificial Sequence
  Description of Artificial Sequence: Synthetic peptide
  Seed: MDPRMCSLMQGSTLPRRSGA
MDPRMLSLQQASTAPRRSGA

SEQ ID NO: 102706 - protein, 20 aa, Artificial Sequence
  Description of Artificial Sequence: Synthetic peptide
  Seed: MDPRMCSLMQGSTLPRRSGA
MDPRMLSLQQASTIPRRSGA

SEQ ID NO: 102707 - protein, 20 aa, Artificial Sequence
  Description of Artificial Sequence: Synthetic peptide
  Seed: MDPRMCSLMQGSTLPRRSGA
MDPRMLSLQQASTLPRRSGA

SEQ ID NO: 102708 - protein, 20 aa, Artificial Sequence
  Description of Artificial Sequence: Synthetic peptide
  Seed: MDPRMCSLMQGSTLPRRSGA
MDPRMLSLQQASTVPRRSGA

SEQ ID NO: 102709 - protein, 20 aa, Artificial Sequence
  Description of Artificial Sequence: Synthetic peptide
  Seed: MDPRMCSLMQGSTLPRRSGA
MDPRMLSLQQGSTIPRRSGA

SEQ ID NO: 102710 - protein, 20 aa, Artificial Sequence
  Description of Artificial Sequence: Synthetic peptide
  Seed: MDPRMCSLMQGSTLPRRSGA
MDPRMLSLQQGSTLPRRSGA

SEQ ID NO: 102711 - protein, 20 aa, Artificial Sequence
  Description of Artificial Sequence: Synthetic peptide
  Seed: MDPRMCSLMQGSTLPRRSGA
MDPRMLSLQQGSTVPRRSGA

SEQ ID NO: 102712 - protein, 20 aa, Artificial Sequence
  Description of Artificial Sequence: Synthetic peptide
  Seed: MDPRMCSLMQGSTLPRRSGA
MDPRMLSLQQSSTVPRRSGA

SEQ ID NO: 102713 - protein, 20 aa, Artificial Sequence
  Description of Artificial Sequence: Synthetic peptide
  Seed: MDPRMCSLMQGSTLPRRSGA
MDPRMLSLVQASTAPRRSGA

SEQ ID NO: 102714 - protein, 20 aa, Artificial Sequence
  Description of Artificial Sequence: Synthetic peptide
  Seed: MDPRMCSLMQGSTLPRRSGA
MDPRMLSLVQASTIPRRSGA

SEQ ID NO: 102715 - protein, 20 aa, Artificial Sequence
  Description of Artificial Sequence: Synthetic peptide
  Seed: MDPRMCSLMQGSTLPRRSGA
MDPRMLSLVQASTLPRRSGA

SEQ ID NO: 102716 - protein, 20 aa, Artificial Sequence
  Description of Artificial Sequence: Synthetic peptide
  Seed: MDPRMCSLMQGSTLPRRSGA
MDPRMLSLVQASTNPRRSGA

SEQ ID NO: 102717 - protein, 20 aa, Artificial Sequence
  Description of Artificial Sequence: Synthetic peptide
  Seed: MDPRMCSLMQGSTLPRRSGA
MDPRMLSLVQASTSPRRSGA

SEQ ID NO: 102718 - protein, 20 aa, Artificial Sequence
  Description of Artificial Sequence: Synthetic peptide
  Seed: MDPRMCSLMQGSTLPRRSGA
MDPRMLSLVQASTVPRRSGA

SEQ ID NO: 102719 - protein, 20 aa, Artificial Sequence
  Description of Artificial Sequence: Synthetic peptide
  Seed: MDPRMCSLMQGSTLPRRSGA
MDPRMLSLVQGSTIPRRSGA

SEQ ID NO: 102720 - protein, 20 aa, Artificial Sequence
  Description of Artificial Sequence: Synthetic peptide
  Seed: MDPRMCSLMQGSTLPRRSGA
MDPRMLSLVQGSTLPRRSGA

SEQ ID NO: 102721 - protein, 20 aa, Artificial Sequence
  Description of Artificial Sequence: Synthetic peptide
  Seed: MDPRMCSLMQGSTLPRRSGA
MDPRMLSLVQGSTVPRRSGA

SEQ ID NO: 102722 - protein, 20 aa, Artificial Sequence
  Description of Artificial Sequence: Synthetic peptide
  Seed: MDPRMCSLMQGSTLPRRSGA
MDPRMMSLAQASTAPRRSGA

SEQ ID NO: 102723 - protein, 20 aa, Artificial Sequence
  Description of Artificial Sequence: Synthetic peptide
  Seed: MDPRMCSLMQGSTLPRRSGA
MDPRMMSLAQASTIPRRSGA

SEQ ID NO: 102724 - protein, 20 aa, Artificial Sequence
  Description of Artificial Sequence: Synthetic peptide
  Seed: MDPRMCSLMQGSTLPRRSGA
MDPRMMSLAQASTLPRRSGA

SEQ ID NO: 102725 - protein, 20 aa, Artificial Sequence
  Description of Artificial Sequence: Synthetic peptide
  Seed: MDPRMCSLMQGSTLPRRSGA
MDPRMMSLAQASTVPRRSGA

SEQ ID NO: 102726 - protein, 20 aa, Artificial Sequence
  Description of Artificial Sequence: Synthetic peptide
  Seed: MDPRMCSLMQGSTLPRRSGA
MDPRMMSLIQASTAPRRSGA

SEQ ID NO: 102727 - protein, 20 aa, Artificial Sequence
  Description of Artificial Sequence: Synthetic peptide
  Seed: MDPRMCSLMQGSTLPRRSGA
MDPRMMSLIQASTIPRRSGA

SEQ ID NO: 102728 - protein, 20 aa, Artificial Sequence
  Description of Artificial Sequence: Synthetic peptide
  Seed: MDPRMCSLMQGSTLPRRSGA
MDPRMMSLIQASTLPRRSGA

SEQ ID NO: 102729 - protein, 20 aa, Artificial Sequence
  Description of Artificial Sequence: Synthetic peptide
  Seed: MDPRMCSLMQGSTLPRRSGA
MDPRMMSLIQASTNPRRSGA

SEQ ID NO: 102730 - protein, 20 aa, Artificial Sequence
  Description of Artificial Sequence: Synthetic peptide
  Seed: MDPRMCSLMQGSTLPRRSGA
MDPRMMSLIQASTSPRRSGA

SEQ ID NO: 102731 - protein, 20 aa, Artificial Sequence
  Description of Artificial Sequence: Synthetic peptide
  Seed: MDPRMCSLMQGSTLPRRSGA
MDPRMMSLIQASTVPRRSGA

SEQ ID NO: 102732 - protein, 20 aa, Artificial Sequence
  Description of Artificial Sequence: Synthetic peptide
  Seed: MDPRMCSLMQGSTLPRRSGA
MDPRMMSLIQGSTAPRRSGA

SEQ ID NO: 102733 - protein, 20 aa, Artificial Sequence
  Description of Artificial Sequence: Synthetic peptide
  Seed: MDPRMCSLMQGSTLPRRSGA
MDPRMMSLIQGSTLPRRSGA

SEQ ID NO: 102734 - protein, 20 aa, Artificial Sequence
  Description of Artificial Sequence: Synthetic peptide
  Seed: MDPRMCSLMQGSTLPRRSGA
MDPRMMSLIQGSTVPRRSGA

SEQ ID NO: 102735 - protein, 20 aa, Artificial Sequence
  Description of Artificial Sequence: Synthetic peptide
  Seed: MDPRMCSLMQGSTLPRRSGA
MDPRMMSLIQPSTAPRRSGA

SEQ ID NO: 102736 - protein, 20 aa, Artificial Sequence
  Description of Artificial Sequence: Synthetic peptide
  Seed: MDPRMCSLMQGSTLPRRSGA
MDPRMMSLIQVSTAPRRSGA

SEQ ID NO: 102737 - protein, 20 aa, Artificial Sequence
  Description of Artificial Sequence: Synthetic peptide
  Seed: MDPRMCSLMQGSTLPRRSGA
MDPRMMSLLQASTAPRRSGA

SEQ ID NO: 102738 - protein, 20 aa, Artificial Sequence
  Description of Artificial Sequence: Synthetic peptide
  Seed: MDPRMCSLMQGSTLPRRSGA
MDPRMMSLLQASTIPRRSGA

SEQ ID NO: 102739 - protein, 20 aa, Artificial Sequence
  Description of Artificial Sequence: Synthetic peptide
  Seed: MDPRMCSLMQGSTLPRRSGA
MDPRMMSLLQASTLPRRSGA

SEQ ID NO: 102740 - protein, 20 aa, Artificial Sequence
  Description of Artificial Sequence: Synthetic peptide
  Seed: MDPRMCSLMQGSTLPRRSGA
MDPRMMSLLQASTMPRRSGA

SEQ ID NO: 102741 - protein, 20 aa, Artificial Sequence
  Description of Artificial Sequence: Synthetic peptide
  Seed: MDPRMCSLMQGSTLPRRSGA
MDPRMMSLLQASTNPRRSGA

SEQ ID NO: 102742 - protein, 20 aa, Artificial Sequence
  Description of Artificial Sequence: Synthetic peptide
  Seed: MDPRMCSLMQGSTLPRRSGA
MDPRMMSLLQASTSPRRSGA

SEQ ID NO: 102743 - protein, 20 aa, Artificial Sequence
  Description of Artificial Sequence: Synthetic peptide
  Seed: MDPRMCSLMQGSTLPRRSGA
MDPRMMSLLQASTTPRRSGA

SEQ ID NO: 102744 - protein, 20 aa, Artificial Sequence
  Description of Artificial Sequence: Synthetic peptide
  Seed: MDPRMCSLMQGSTLPRRSGA
MDPRMMSLLQASTVPRRSGA

SEQ ID NO: 102745 - protein, 20 aa, Artificial Sequence
  Description of Artificial Sequence: Synthetic peptide
  Seed: MDPRMCSLMQGSTLPRRSGA
MDPRMMSLLQGSTAPRRSGA

SEQ ID NO: 102746 - protein, 20 aa, Artificial Sequence
  Description of Artificial Sequence: Synthetic peptide
  Seed: MDPRMCSLMQGSTLPRRSGA
MDPRMMSLLQGSTIPRRSGA

SEQ ID NO: 102747 - protein, 20 aa, Artificial Sequence
  Description of Artificial Sequence: Synthetic peptide
  Seed: MDPRMCSLMQGSTLPRRSGA
MDPRMMSLLQGSTLPRRSGA

SEQ ID NO: 102748 - protein, 20 aa, Artificial Sequence
  Description of Artificial Sequence: Synthetic peptide
  Seed: MDPRMCSLMQGSTLPRRSGA
MDPRMMSLLQGSTMPRRSGA

SEQ ID NO: 102749 - protein, 20 aa, Artificial Sequence
  Description of Artificial Sequence: Synthetic peptide
  Seed: MDPRMCSLMQGSTLPRRSGA
MDPRMMSLLQGSTTPRRSGA

SEQ ID NO: 102750 - protein, 20 aa, Artificial Sequence
  Description of Artificial Sequence: Synthetic peptide
  Seed: MDPRMCSLMQGSTLPRRSGA
MDPRMMSLLQGSTVPRRSGA

SEQ ID NO: 102751 - protein, 20 aa, Artificial Sequence
  Description of Artificial Sequence: Synthetic peptide
  Seed: MDPRMCSLMQGSTLPRRSGA
MDPRMMSLLQISTAPRRSGA

SEQ ID NO: 102752 - protein, 20 aa, Artificial Sequence
  Description of Artificial Sequence: Synthetic peptide
  Seed: MDPRMCSLMQGSTLPRRSGA
MDPRMMSLLQPSTAPRRSGA

SEQ ID NO: 102753 - protein, 20 aa, Artificial Sequence
  Description of Artificial Sequence: Synthetic peptide
  Seed: MDPRMCSLMQGSTLPRRSGA
MDPRMMSLLQPSTIPRRSGA

SEQ ID NO: 102754 - protein, 20 aa, Artificial Sequence
  Description of Artificial Sequence: Synthetic peptide
  Seed: MDPRMCSLMQGSTLPRRSGA
MDPRMMSLLQPSTLPRRSGA

SEQ ID NO: 102755 - protein, 20 aa, Artificial Sequence
  Description of Artificial Sequence: Synthetic peptide
  Seed: MDPRMCSLMQGSTLPRRSGA
MDPRMMSLLQPSTNPRRSGA

SEQ ID NO: 102756 - protein, 20 aa, Artificial Sequence
  Description of Artificial Sequence: Synthetic peptide
  Seed: MDPRMCSLMQGSTLPRRSGA
MDPRMMSLLQPSTSPRRSGA

SEQ ID NO: 102757 - protein, 20 aa, Artificial Sequence
  Description of Artificial Sequence: Synthetic peptide
  Seed: MDPRMCSLMQGSTLPRRSGA
MDPRMMSLLQPSTTPRRSGA

SEQ ID NO: 102758 - protein, 20 aa, Artificial Sequence
  Description of Artificial Sequence: Synthetic peptide
  Seed: MDPRMCSLMQGSTLPRRSGA
MDPRMMSLLQPSTVPRRSGA

SEQ ID NO: 102759 - protein, 20 aa, Artificial Sequence
  Description of Artificial Sequence: Synthetic peptide
  Seed: MDPRMCSLMQGSTLPRRSGA
MDPRMMSLLQSSTAPRRSGA

SEQ ID NO: 102760 - protein, 20 aa, Artificial Sequence
  Description of Artificial Sequence: Synthetic peptide
  Seed: MDPRMCSLMQGSTLPRRSGA
MDPRMMSLLQSSTIPRRSGA

SEQ ID NO: 102761 - protein, 20 aa, Artificial Sequence
  Description of Artificial Sequence: Synthetic peptide
  Seed: MDPRMCSLMQGSTLPRRSGA
MDPRMMSLLQSSTLPRRSGA

SEQ ID NO: 102762 - protein, 20 aa, Artificial Sequence
  Description of Artificial Sequence: Synthetic peptide
  Seed: MDPRMCSLMQGSTLPRRSGA
MDPRMMSLLQSSTNPRRSGA

SEQ ID NO: 102763 - protein, 20 aa, Artificial Sequence
  Description of Artificial Sequence: Synthetic peptide
  Seed: MDPRMCSLMQGSTLPRRSGA
MDPRMMSLLQSSTSPRRSGA

SEQ ID NO: 102764 - protein, 20 aa, Artificial Sequence
  Description of Artificial Sequence: Synthetic peptide
  Seed: MDPRMCSLMQGSTLPRRSGA
MDPRMMSLLQSSTVPRRSGA

SEQ ID NO: 102765 - protein, 20 aa, Artificial Sequence
  Description of Artificial Sequence: Synthetic peptide
  Seed: MDPRMCSLMQGSTLPRRSGA
MDPRMMSLLQTSTAPRRSGA

SEQ ID NO: 102766 - protein, 20 aa, Artificial Sequence
  Description of Artificial Sequence: Synthetic peptide
  Seed: MDPRMCSLMQGSTLPRRSGA
MDPRMMSLLQTSTNPRRSGA

SEQ ID NO: 102767 - protein, 20 aa, Artificial Sequence
  Description of Artificial Sequence: Synthetic peptide
  Seed: MDPRMCSLMQGSTLPRRSGA
MDPRMMSLLQTSTSPRRSGA

SEQ ID NO: 102768 - protein, 20 aa, Artificial Sequence
  Description of Artificial Sequence: Synthetic peptide
  Seed: MDPRMCSLMQGSTLPRRSGA
MDPRMMSLLQTSTVPRRSGA

SEQ ID NO: 102769 - protein, 20 aa, Artificial Sequence
  Description of Artificial Sequence: Synthetic peptide
  Seed: MDPRMCSLMQGSTLPRRSGA
MDPRMMSLLQVSTAPRRSGA

SEQ ID NO: 102770 - protein, 20 aa, Artificial Sequence
  Description of Artificial Sequence: Synthetic peptide
  Seed: MDPRMCSLMQGSTLPRRSGA
MDPRMMSLLQVSTNPRRSGA

SEQ ID NO: 102771 - protein, 20 aa, Artificial Sequence
  Description of Artificial Sequence: Synthetic peptide
  Seed: MDPRMCSLMQGSTLPRRSGA
MDPRMMSLLQVSTSPRRSGA

SEQ ID NO: 102772 - protein, 20 aa, Artificial Sequence
  Description of Artificial Sequence: Synthetic peptide
  Seed: MDPRMCSLMQGSTLPRRSGA
MDPRMMSLMQASTAPRRSGA

SEQ ID NO: 102773 - protein, 20 aa, Artificial Sequence
  Description of Artificial Sequence: Synthetic peptide
  Seed: MDPRMCSLMQGSTLPRRSGA
MDPRMMSLMQASTIPRRSGA

SEQ ID NO: 102774 - protein, 20 aa, Artificial Sequence
  Description of Artificial Sequence: Synthetic peptide
  Seed: MDPRMCSLMQGSTLPRRSGA
MDPRMMSLMQASTLPRRSGA

SEQ ID NO: 102775 - protein, 20 aa, Artificial Sequence
  Description of Artificial Sequence: Synthetic peptide
  Seed: MDPRMCSLMQGSTLPRRSGA
MDPRMMSLMQASTMPRRSGA

SEQ ID NO: 102776 - protein, 20 aa, Artificial Sequence
  Description of Artificial Sequence: Synthetic peptide
  Seed: MDPRMCSLMQGSTLPRRSGA
MDPRMMSLMQASTNPRRSGA

SEQ ID NO: 102777 - protein, 20 aa, Artificial Sequence
  Description of Artificial Sequence: Synthetic peptide
  Seed: MDPRMCSLMQGSTLPRRSGA
MDPRMMSLMQASTSPRRSGA

SEQ ID NO: 102778 - protein, 20 aa, Artificial Sequence
  Description of Artificial Sequence: Synthetic peptide
  Seed: MDPRMCSLMQGSTLPRRSGA
MDPRMMSLMQASTTPRRSGA

SEQ ID NO: 102779 - protein, 20 aa, Artificial Sequence
  Description of Artificial Sequence: Synthetic peptide
  Seed: MDPRMCSLMQGSTLPRRSGA
MDPRMMSLMQASTVPRRSGA

SEQ ID NO: 102780 - protein, 20 aa, Artificial Sequence
  Description of Artificial Sequence: Synthetic peptide
  Seed: MDPRMCSLMQGSTLPRRSGA
MDPRMMSLMQGSTAPRRSGA

SEQ ID NO: 102781 - protein, 20 aa, Artificial Sequence
  Description of Artificial Sequence: Synthetic peptide
  Seed: MDPRMCSLMQGSTLPRRSGA
MDPRMMSLMQGSTIPRRSGA

SEQ ID NO: 102782 - protein, 20 aa, Artificial Sequence
  Description of Artificial Sequence: Synthetic peptide
  Seed: MDPRMCSLMQGSTLPRRSGA
MDPRMMSLMQGSTLPRRSGA

SEQ ID NO: 102783 - protein, 20 aa, Artificial Sequence
  Description of Artificial Sequence: Synthetic peptide
  Seed: MDPRMCSLMQGSTLPRRSGA
MDPRMMSLMQGSTMPRRSGA

SEQ ID NO: 102784 - protein, 20 aa, Artificial Sequence
  Description of Artificial Sequence: Synthetic peptide
  Seed: MDPRMCSLMQGSTLPRRSGA
MDPRMMSLMQGSTTPRRSGA

SEQ ID NO: 102785 - protein, 20 aa, Artificial Sequence
  Description of Artificial Sequence: Synthetic peptide
  Seed: MDPRMCSLMQGSTLPRRSGA
MDPRMMSLMQGSTVPRRSGA

SEQ ID NO: 102786 - protein, 20 aa, Artificial Sequence
  Description of Artificial Sequence: Synthetic peptide
  Seed: MDPRMCSLMQGSTLPRRSGA
MDPRMMSLMQISTAPRRSGA

SEQ ID NO: 102787 - protein, 20 aa, Artificial Sequence
  Description of Artificial Sequence: Synthetic peptide
  Seed: MDPRMCSLMQGSTLPRRSGA
MDPRMMSLMQISTNPRRSGA

SEQ ID NO: 102788 - protein, 20 aa, Artificial Sequence
  Description of Artificial Sequence: Synthetic peptide
  Seed: MDPRMCSLMQGSTLPRRSGA
MDPRMMSLMQISTSPRRSGA

SEQ ID NO: 102789 - protein, 20 aa, Artificial Sequence
  Description of Artificial Sequence: Synthetic peptide
  Seed: MDPRMCSLMQGSTLPRRSGA
MDPRMMSLMQPSTAPRRSGA

SEQ ID NO: 102790 - protein, 20 aa, Artificial Sequence
  Description of Artificial Sequence: Synthetic peptide
  Seed: MDPRMCSLMQGSTLPRRSGA
MDPRMMSLMQPSTIPRRSGA

SEQ ID NO: 102791 - protein, 20 aa, Artificial Sequence
  Description of Artificial Sequence: Synthetic peptide
  Seed: MDPRMCSLMQGSTLPRRSGA
MDPRMMSLMQPSTLPRRSGA

SEQ ID NO: 102792 - protein, 20 aa, Artificial Sequence
  Description of Artificial Sequence: Synthetic peptide
  Seed: MDPRMCSLMQGSTLPRRSGA
MDPRMMSLMQPSTNPRRSGA

SEQ ID NO: 102793 - protein, 20 aa, Artificial Sequence
  Description of Artificial Sequence: Synthetic peptide
  Seed: MDPRMCSLMQGSTLPRRSGA
MDPRMMSLMQPSTSPRRSGA

SEQ ID NO: 102794 - protein, 20 aa, Artificial Sequence
  Description of Artificial Sequence: Synthetic peptide
  Seed: MDPRMCSLMQGSTLPRRSGA
MDPRMMSLMQPSTTPRRSGA

SEQ ID NO: 102795 - protein, 20 aa, Artificial Sequence
  Description of Artificial Sequence: Synthetic peptide
  Seed: MDPRMCSLMQGSTLPRRSGA
MDPRMMSLMQPSTVPRRSGA

SEQ ID NO: 102796 - protein, 20 aa, Artificial Sequence
  Description of Artificial Sequence: Synthetic peptide
  Seed: MDPRMCSLMQGSTLPRRSGA
MDPRMMSLMQSSTAPRRSGA

SEQ ID NO: 102797 - protein, 20 aa, Artificial Sequence
  Description of Artificial Sequence: Synthetic peptide
  Seed: MDPRMCSLMQGSTLPRRSGA
MDPRMMSLMQSSTIPRRSGA

SEQ ID NO: 102798 - protein, 20 aa, Artificial Sequence
  Description of Artificial Sequence: Synthetic peptide
  Seed: MDPRMCSLMQGSTLPRRSGA
MDPRMMSLMQSSTLPRRSGA

SEQ ID NO: 102799 - protein, 20 aa, Artificial Sequence
  Description of Artificial Sequence: Synthetic peptide
  Seed: MDPRMCSLMQGSTLPRRSGA
MDPRMMSLMQSSTNPRRSGA

SEQ ID NO: 102800 - protein, 20 aa, Artificial Sequence
  Description of Artificial Sequence: Synthetic peptide
  Seed: MDPRMCSLMQGSTLPRRSGA
MDPRMMSLMQSSTSPRRSGA

SEQ ID NO: 102801 - protein, 20 aa, Artificial Sequence
  Description of Artificial Sequence: Synthetic peptide
  Seed: MDPRMCSLMQGSTLPRRSGA
MDPRMMSLMQSSTVPRRSGA

SEQ ID NO: 102802 - protein, 20 aa, Artificial Sequence
  Description of Artificial Sequence: Synthetic peptide
  Seed: MDPRMCSLMQGSTLPRRSGA
MDPRMMSLMQTSTAPRRSGA

SEQ ID NO: 102803 - protein, 20 aa, Artificial Sequence
  Description of Artificial Sequence: Synthetic peptide
  Seed: MDPRMCSLMQGSTLPRRSGA
MDPRMMSLMQTSTNPRRSGA

SEQ ID NO: 102804 - protein, 20 aa, Artificial Sequence
  Description of Artificial Sequence: Synthetic peptide
  Seed: MDPRMCSLMQGSTLPRRSGA
MDPRMMSLMQTSTSPRRSGA

SEQ ID NO: 102805 - protein, 20 aa, Artificial Sequence
  Description of Artificial Sequence: Synthetic peptide
  Seed: MDPRMCSLMQGSTLPRRSGA
MDPRMMSLMQTSTVPRRSGA

SEQ ID NO: 102806 - protein, 20 aa, Artificial Sequence
  Description of Artificial Sequence: Synthetic peptide
  Seed: MDPRMCSLMQGSTLPRRSGA
MDPRMMSLMQVSTAPRRSGA

SEQ ID NO: 102807 - protein, 20 aa, Artificial Sequence
  Description of Artificial Sequence: Synthetic peptide
  Seed: MDPRMCSLMQGSTLPRRSGA
MDPRMMSLMQVSTNPRRSGA

SEQ ID NO: 102808 - protein, 20 aa, Artificial Sequence
  Description of Artificial Sequence: Synthetic peptide
  Seed: MDPRMCSLMQGSTLPRRSGA
MDPRMMSLMQVSTSPRRSGA

SEQ ID NO: 102809 - protein, 20 aa, Artificial Sequence
  Description of Artificial Sequence: Synthetic peptide
  Seed: MDPRMCSLMQGSTLPRRSGA
MDPRMMSLMQVSTTPRRSGA

SEQ ID NO: 102810 - protein, 20 aa, Artificial Sequence
  Description of Artificial Sequence: Synthetic peptide
  Seed: MDPRMCSLMQGSTLPRRSGA
MDPRMMSLMQVSTVPRRSGA

SEQ ID NO: 102811 - protein, 20 aa, Artificial Sequence
  Description of Artificial Sequence: Synthetic peptide
  Seed: MDPRMCSLMQGSTLPRRSGA
MDPRMMSLQQASTLPRRSGA

SEQ ID NO: 102812 - protein, 20 aa, Artificial Sequence
  Description of Artificial Sequence: Synthetic peptide
  Seed: MDPRMCSLMQGSTLPRRSGA
MDPRMMSLQQASTVPRRSGA

SEQ ID NO: 102813 - protein, 20 aa, Artificial Sequence
  Description of Artificial Sequence: Synthetic peptide
  Seed: MDPRMCSLMQGSTLPRRSGA
MDPRMVSLAQASTIPRRSGA

SEQ ID NO: 102814 - protein, 20 aa, Artificial Sequence
  Description of Artificial Sequence: Synthetic peptide
  Seed: MDPRMCSLMQGSTLPRRSGA
MDPRMVSLAQASTLPRRSGA

SEQ ID NO: 102815 - protein, 20 aa, Artificial Sequence
  Description of Artificial Sequence: Synthetic peptide
  Seed: MDPRMCSLMQGSTLPRRSGA
MDPRMVSLAQASTVPRRSGA

SEQ ID NO: 102816 - protein, 20 aa, Artificial Sequence
  Description of Artificial Sequence: Synthetic peptide
  Seed: MDPRMCSLMQGSTLPRRSGA
MDPRMVSLIQASTAPRRSGA

SEQ ID NO: 102817 - protein, 20 aa, Artificial Sequence
  Description of Artificial Sequence: Synthetic peptide
  Seed: MDPRMCSLMQGSTLPRRSGA
MDPRMVSLIQASTIPRRSGA

SEQ ID NO: 102818 - protein, 20 aa, Artificial Sequence
  Description of Artificial Sequence: Synthetic peptide
  Seed: MDPRMCSLMQGSTLPRRSGA
MDPRMVSLIQASTLPRRSGA

SEQ ID NO: 102819 - protein, 20 aa, Artificial Sequence
  Description of Artificial Sequence: Synthetic peptide
  Seed: MDPRMCSLMQGSTLPRRSGA
MDPRMVSLIQASTVPRRSGA

SEQ ID NO: 102820 - protein, 20 aa, Artificial Sequence
  Description of Artificial Sequence: Synthetic peptide
  Seed: MDPRMCSLMQGSTLPRRSGA
MDPRMVSLIQGSTAPRRSGA

SEQ ID NO: 102821 - protein, 20 aa, Artificial Sequence
  Description of Artificial Sequence: Synthetic peptide
  Seed: MDPRMCSLMQGSTLPRRSGA
MDPRMVSLIQGSTIPRRSGA

SEQ ID NO: 102822 - protein, 20 aa, Artificial Sequence
  Description of Artificial Sequence: Synthetic peptide
  Seed: MDPRMCSLMQGSTLPRRSGA
MDPRMVSLIQGSTLPRRSGA

SEQ ID NO: 102823 - protein, 20 aa, Artificial Sequence
  Description of Artificial Sequence: Synthetic peptide
  Seed: MDPRMCSLMQGSTLPRRSGA
MDPRMVSLIQGSTVPRRSGA

SEQ ID NO: 102824 - protein, 20 aa, Artificial Sequence
  Description of Artificial Sequence: Synthetic peptide
  Seed: MDPRMCSLMQGSTLPRRSGA
MDPRMVSLIQSSTVPRRSGA

SEQ ID NO: 102825 - protein, 20 aa, Artificial Sequence
  Description of Artificial Sequence: Synthetic peptide
  Seed: MDPRMCSLMQGSTLPRRSGA
MDPRMVSLLQASTAPRRSGA

SEQ ID NO: 102826 - protein, 20 aa, Artificial Sequence
  Description of Artificial Sequence: Synthetic peptide
  Seed: MDPRMCSLMQGSTLPRRSGA
MDPRMVSLLQASTIPRRSGA

SEQ ID NO: 102827 - protein, 20 aa, Artificial Sequence
  Description of Artificial Sequence: Synthetic peptide
  Seed: MDPRMCSLMQGSTLPRRSGA
MDPRMVSLLQASTLPRRSGA

SEQ ID NO: 102828 - protein, 20 aa, Artificial Sequence
  Description of Artificial Sequence: Synthetic peptide
  Seed: MDPRMCSLMQGSTLPRRSGA
MDPRMVSLLQASTMPRRSGA

SEQ ID NO: 102829 - protein, 20 aa, Artificial Sequence
  Description of Artificial Sequence: Synthetic peptide
  Seed: MDPRMCSLMQGSTLPRRSGA
MDPRMVSLLQASTNPRRSGA

SEQ ID NO: 102830 - protein, 20 aa, Artificial Sequence
  Description of Artificial Sequence: Synthetic peptide
  Seed: MDPRMCSLMQGSTLPRRSGA
MDPRMVSLLQASTSPRRSGA

SEQ ID NO: 102831 - protein, 20 aa, Artificial Sequence
  Description of Artificial Sequence: Synthetic peptide
  Seed: MDPRMCSLMQGSTLPRRSGA
MDPRMVSLLQASTTPRRSGA

SEQ ID NO: 102832 - protein, 20 aa, Artificial Sequence
  Description of Artificial Sequence: Synthetic peptide
  Seed: MDPRMCSLMQGSTLPRRSGA
MDPRMVSLLQASTVPRRSGA

SEQ ID NO: 102833 - protein, 20 aa, Artificial Sequence
  Description of Artificial Sequence: Synthetic peptide
  Seed: MDPRMCSLMQGSTLPRRSGA
MDPRMVSLLQGSTAPRRSGA

SEQ ID NO: 102834 - protein, 20 aa, Artificial Sequence
  Description of Artificial Sequence: Synthetic peptide
  Seed: MDPRMCSLMQGSTLPRRSGA
MDPRMVSLLQGSTIPRRSGA

SEQ ID NO: 102835 - protein, 20 aa, Artificial Sequence
  Description of Artificial Sequence: Synthetic peptide
  Seed: MDPRMCSLMQGSTLPRRSGA
MDPRMVSLLQGSTLPRRSGA

SEQ ID NO: 102836 - protein, 20 aa, Artificial Sequence
  Description of Artificial Sequence: Synthetic peptide
  Seed: MDPRMCSLMQGSTLPRRSGA
MDPRMVSLLQGSTMPRRSGA

SEQ ID NO: 102837 - protein, 20 aa, Artificial Sequence
  Description of Artificial Sequence: Synthetic peptide
  Seed: MDPRMCSLMQGSTLPRRSGA
MDPRMVSLLQGSTTPRRSGA

SEQ ID NO: 102838 - protein, 20 aa, Artificial Sequence
  Description of Artificial Sequence: Synthetic peptide
  Seed: MDPRMCSLMQGSTLPRRSGA
MDPRMVSLLQGSTVPRRSGA

SEQ ID NO: 102839 - protein, 20 aa, Artificial Sequence
  Description of Artificial Sequence: Synthetic peptide
  Seed: MDPRMCSLMQGSTLPRRSGA
MDPRMVSLLQNSTVPRRSGA

SEQ ID NO: 102840 - protein, 20 aa, Artificial Sequence
  Description of Artificial Sequence: Synthetic peptide
  Seed: MDPRMCSLMQGSTLPRRSGA
MDPRMVSLLQPSTAPRRSGA

SEQ ID NO: 102841 - protein, 20 aa, Artificial Sequence
  Description of Artificial Sequence: Synthetic peptide
  Seed: MDPRMCSLMQGSTLPRRSGA
MDPRMVSLLQPSTIPRRSGA

SEQ ID NO: 102842 - protein, 20 aa, Artificial Sequence
  Description of Artificial Sequence: Synthetic peptide
  Seed: MDPRMCSLMQGSTLPRRSGA
MDPRMVSLLQPSTLPRRSGA

SEQ ID NO: 102843 - protein, 20 aa, Artificial Sequence
  Description of Artificial Sequence: Synthetic peptide
  Seed: MDPRMCSLMQGSTLPRRSGA
MDPRMVSLLQPSTSPRRSGA

SEQ ID NO: 102844 - protein, 20 aa, Artificial Sequence
  Description of Artificial Sequence: Synthetic peptide
  Seed: MDPRMCSLMQGSTLPRRSGA
MDPRMVSLLQPSTVPRRSGA

SEQ ID NO: 102845 - protein, 20 aa, Artificial Sequence
  Description of Artificial Sequence: Synthetic peptide
  Seed: MDPRMCSLMQGSTLPRRSGA
MDPRMVSLLQSSTAPRRSGA

SEQ ID NO: 102846 - protein, 20 aa, Artificial Sequence
  Description of Artificial Sequence: Synthetic peptide
  Seed: MDPRMCSLMQGSTLPRRSGA
MDPRMVSLLQSSTIPRRSGA

SEQ ID NO: 102847 - protein, 20 aa, Artificial Sequence
  Description of Artificial Sequence: Synthetic peptide
  Seed: MDPRMCSLMQGSTLPRRSGA
MDPRMVSLLQSSTLPRRSGA

SEQ ID NO: 102848 - protein, 20 aa, Artificial Sequence
  Description of Artificial Sequence: Synthetic peptide
  Seed: MDPRMCSLMQGSTLPRRSGA
MDPRMVSLLQSSTVPRRSGA

SEQ ID NO: 102849 - protein, 20 aa, Artificial Sequence
  Description of Artificial Sequence: Synthetic peptide
  Seed: MDPRMCSLMQGSTLPRRSGA
MDPRMVSLLQTSTVPRRSGA

SEQ ID NO: 102850 - protein, 20 aa, Artificial Sequence
  Description of Artificial Sequence: Synthetic peptide
  Seed: MDPRMCSLMQGSTLPRRSGA
MDPRMVSLLQVSTAPRRSGA

SEQ ID NO: 102851 - protein, 20 aa, Artificial Sequence
  Description of Artificial Sequence: Synthetic peptide
  Seed: MDPRMCSLMQGSTLPRRSGA
MDPRMVSLMQASTAPRRSGA

SEQ ID NO: 102852 - protein, 20 aa, Artificial Sequence
  Description of Artificial Sequence: Synthetic peptide
  Seed: MDPRMCSLMQGSTLPRRSGA
MDPRMVSLMQASTIPRRSGA

SEQ ID NO: 102853 - protein, 20 aa, Artificial Sequence
  Description of Artificial Sequence: Synthetic peptide
  Seed: MDPRMCSLMQGSTLPRRSGA
MDPRMVSLMQASTLPRRSGA

SEQ ID NO: 102854 - protein, 20 aa, Artificial Sequence
  Description of Artificial Sequence: Synthetic peptide
  Seed: MDPRMCSLMQGSTLPRRSGA
MDPRMVSLMQASTMPRRSGA

SEQ ID NO: 102855 - protein, 20 aa, Artificial Sequence
  Description of Artificial Sequence: Synthetic peptide
  Seed: MDPRMCSLMQGSTLPRRSGA
MDPRMVSLMQASTNPRRSGA

SEQ ID NO: 102856 - protein, 20 aa, Artificial Sequence
  Description of Artificial Sequence: Synthetic peptide
  Seed: MDPRMCSLMQGSTLPRRSGA
MDPRMVSLMQASTSPRRSGA

SEQ ID NO: 102857 - protein, 20 aa, Artificial Sequence
  Description of Artificial Sequence: Synthetic peptide
  Seed: MDPRMCSLMQGSTLPRRSGA
MDPRMVSLMQASTTPRRSGA

SEQ ID NO: 102858 - protein, 20 aa, Artificial Sequence
  Description of Artificial Sequence: Synthetic peptide
  Seed: MDPRMCSLMQGSTLPRRSGA
MDPRMVSLMQASTVPRRSGA

SEQ ID NO: 102859 - protein, 20 aa, Artificial Sequence
  Description of Artificial Sequence: Synthetic peptide
  Seed: MDPRMCSLMQGSTLPRRSGA
MDPRMVSLMQGSTAPRRSGA

SEQ ID NO: 102860 - protein, 20 aa, Artificial Sequence
  Description of Artificial Sequence: Synthetic peptide
  Seed: MDPRMCSLMQGSTLPRRSGA
MDPRMVSLMQGSTIPRRSGA

SEQ ID NO: 102861 - protein, 20 aa, Artificial Sequence
  Description of Artificial Sequence: Synthetic peptide
  Seed: MDPRMCSLMQGSTLPRRSGA
MDPRMVSLMQGSTLPRRSGA

SEQ ID NO: 102862 - protein, 20 aa, Artificial Sequence
  Description of Artificial Sequence: Synthetic peptide
  Seed: MDPRMCSLMQGSTLPRRSGA
MDPRMVSLMQGSTMPRRSGA

SEQ ID NO: 102863 - protein, 20 aa, Artificial Sequence
  Description of Artificial Sequence: Synthetic peptide
  Seed: MDPRMCSLMQGSTLPRRSGA
MDPRMVSLMQGSTTPRRSGA

SEQ ID NO: 102864 - protein, 20 aa, Artificial Sequence
  Description of Artificial Sequence: Synthetic peptide
  Seed: MDPRMCSLMQGSTLPRRSGA
MDPRMVSLMQGSTVPRRSGA

SEQ ID NO: 102865 - protein, 20 aa, Artificial Sequence
  Description of Artificial Sequence: Synthetic peptide
  Seed: MDPRMCSLMQGSTLPRRSGA
MDPRMVSLMQISTAPRRSGA

SEQ ID NO: 102866 - protein, 20 aa, Artificial Sequence
  Description of Artificial Sequence: Synthetic peptide
  Seed: MDPRMCSLMQGSTLPRRSGA
MDPRMVSLMQNSTVPRRSGA

SEQ ID NO: 102867 - protein, 20 aa, Artificial Sequence
  Description of Artificial Sequence: Synthetic peptide
  Seed: MDPRMCSLMQGSTLPRRSGA
MDPRMVSLMQPSTAPRRSGA

SEQ ID NO: 102868 - protein, 20 aa, Artificial Sequence
  Description of Artificial Sequence: Synthetic peptide
  Seed: MDPRMCSLMQGSTLPRRSGA
MDPRMVSLMQPSTIPRRSGA

SEQ ID NO: 102869 - protein, 20 aa, Artificial Sequence
  Description of Artificial Sequence: Synthetic peptide
  Seed: MDPRMCSLMQGSTLPRRSGA
MDPRMVSLMQPSTLPRRSGA

SEQ ID NO: 102870 - protein, 20 aa, Artificial Sequence
  Description of Artificial Sequence: Synthetic peptide
  Seed: MDPRMCSLMQGSTLPRRSGA
MDPRMVSLMQPSTSPRRSGA

SEQ ID NO: 102871 - protein, 20 aa, Artificial Sequence
  Description of Artificial Sequence: Synthetic peptide
  Seed: MDPRMCSLMQGSTLPRRSGA
MDPRMVSLMQPSTVPRRSGA

SEQ ID NO: 102872 - protein, 20 aa, Artificial Sequence
  Description of Artificial Sequence: Synthetic peptide
  Seed: MDPRMCSLMQGSTLPRRSGA
MDPRMVSLMQSSTAPRRSGA

SEQ ID NO: 102873 - protein, 20 aa, Artificial Sequence
  Description of Artificial Sequence: Synthetic peptide
  Seed: MDPRMCSLMQGSTLPRRSGA
MDPRMVSLMQSSTIPRRSGA

SEQ ID NO: 102874 - protein, 20 aa, Artificial Sequence
  Description of Artificial Sequence: Synthetic peptide
  Seed: MDPRMCSLMQGSTLPRRSGA
MDPRMVSLMQSSTLPRRSGA

SEQ ID NO: 102875 - protein, 20 aa, Artificial Sequence
  Description of Artificial Sequence: Synthetic peptide
  Seed: MDPRMCSLMQGSTLPRRSGA
MDPRMVSLMQSSTVPRRSGA

SEQ ID NO: 102876 - protein, 20 aa, Artificial Sequence
  Description of Artificial Sequence: Synthetic peptide
  Seed: MDPRMCSLMQGSTLPRRSGA
MDPRMVSLMQTSTVPRRSGA

SEQ ID NO: 102877 - protein, 20 aa, Artificial Sequence
  Description of Artificial Sequence: Synthetic peptide
  Seed: MDPRMCSLMQGSTLPRRSGA
MDPRMVSLMQVSTAPRRSGA

SEQ ID NO: 102878 - protein, 20 aa, Artificial Sequence
  Description of Artificial Sequence: Synthetic peptide
  Seed: MDPRMCSLMQGSTLPRRSGA
MDPRMVSLMQVSTSPRRSGA

SEQ ID NO: 102879 - protein, 20 aa, Artificial Sequence
  Description of Artificial Sequence: Synthetic peptide
  Seed: MDPRMCSLMQGSTLPRRSGA
MDPRMVSLQQASTLPRRSGA

SEQ ID NO: 102880 - protein, 20 aa, Artificial Sequence
  Description of Artificial Sequence: Synthetic peptide
  Seed: MDPRMCSLMQGSTLPRRSGA
MDPRMVSLQQASTVPRRSGA

SEQ ID NO: 102881 - protein, 20 aa, Artificial Sequence
  Description of Artificial Sequence: Synthetic peptide
  Seed: MDPRMCSLMQGSTLPRRSGA
MDPRMWSLAQASTAPRRSGA

SEQ ID NO: 102882 - protein, 20 aa, Artificial Sequence
  Description of Artificial Sequence: Synthetic peptide
  Seed: MDPRMCSLMQGSTLPRRSGA
MDPRMWSLAQASTIPRRSGA

SEQ ID NO: 102883 - protein, 20 aa, Artificial Sequence
  Description of Artificial Sequence: Synthetic peptide
  Seed: MDPRMCSLMQGSTLPRRSGA
MDPRMWSLAQASTLPRRSGA

SEQ ID NO: 102884 - protein, 20 aa, Artificial Sequence
  Description of Artificial Sequence: Synthetic peptide
  Seed: MDPRMCSLMQGSTLPRRSGA
MDPRMWSLAQASTMPRRSGA

SEQ ID NO: 102885 - protein, 20 aa, Artificial Sequence
  Description of Artificial Sequence: Synthetic peptide
  Seed: MDPRMCSLMQGSTLPRRSGA
MDPRMWSLAQASTNPRRSGA

SEQ ID NO: 102886 - protein, 20 aa, Artificial Sequence
  Description of Artificial Sequence: Synthetic peptide
  Seed: MDPRMCSLMQGSTLPRRSGA
MDPRMWSLAQASTQPRRSGA

SEQ ID NO: 102887 - protein, 20 aa, Artificial Sequence
  Description of Artificial Sequence: Synthetic peptide
  Seed: MDPRMCSLMQGSTLPRRSGA
MDPRMWSLAQASTSPRRSGA

SEQ ID NO: 102888 - protein, 20 aa, Artificial Sequence
  Description of Artificial Sequence: Synthetic peptide
  Seed: MDPRMCSLMQGSTLPRRSGA
MDPRMWSLAQASTTPRRSGA

SEQ ID NO: 102889 - protein, 20 aa, Artificial Sequence
  Description of Artificial Sequence: Synthetic peptide
  Seed: MDPRMCSLMQGSTLPRRSGA
MDPRMWSLAQASTVPRRSGA

SEQ ID NO: 102890 - protein, 20 aa, Artificial Sequence
  Description of Artificial Sequence: Synthetic peptide
  Seed: MDPRMCSLMQGSTLPRRSGA
MDPRMWSLAQGSTAPRRSGA

SEQ ID NO: 102891 - protein, 20 aa, Artificial Sequence
  Description of Artificial Sequence: Synthetic peptide
  Seed: MDPRMCSLMQGSTLPRRSGA
MDPRMWSLAQGSTIPRRSGA

SEQ ID NO: 102892 - protein, 20 aa, Artificial Sequence
  Description of Artificial Sequence: Synthetic peptide
  Seed: MDPRMCSLMQGSTLPRRSGA
MDPRMWSLAQGSTLPRRSGA

SEQ ID NO: 102893 - protein, 20 aa, Artificial Sequence
  Description of Artificial Sequence: Synthetic peptide
  Seed: MDPRMCSLMQGSTLPRRSGA
MDPRMWSLAQGSTMPRRSGA

SEQ ID NO: 102894 - protein, 20 aa, Artificial Sequence
  Description of Artificial Sequence: Synthetic peptide
  Seed: MDPRMCSLMQGSTLPRRSGA
MDPRMWSLAQGSTVPRRSGA

SEQ ID NO: 102895 - protein, 20 aa, Artificial Sequence
  Description of Artificial Sequence: Synthetic peptide
  Seed: MDPRMCSLMQGSTLPRRSGA
MDPRMWSLAQISTAPRRSGA

SEQ ID NO: 102896 - protein, 20 aa, Artificial Sequence
  Description of Artificial Sequence: Synthetic peptide
  Seed: MDPRMCSLMQGSTLPRRSGA
MDPRMWSLAQISTNPRRSGA

SEQ ID NO: 102897 - protein, 20 aa, Artificial Sequence
  Description of Artificial Sequence: Synthetic peptide
  Seed: MDPRMCSLMQGSTLPRRSGA
MDPRMWSLAQISTSPRRSGA

SEQ ID NO: 102898 - protein, 20 aa, Artificial Sequence
  Description of Artificial Sequence: Synthetic peptide
  Seed: MDPRMCSLMQGSTLPRRSGA
MDPRMWSLAQNSTLPRRSGA

SEQ ID NO: 102899 - protein, 20 aa, Artificial Sequence
  Description of Artificial Sequence: Synthetic peptide
  Seed: MDPRMCSLMQGSTLPRRSGA
MDPRMWSLAQNSTVPRRSGA

SEQ ID NO: 102900 - protein, 20 aa, Artificial Sequence
  Description of Artificial Sequence: Synthetic peptide
  Seed: MDPRMCSLMQGSTLPRRSGA
MDPRMWSLAQPSTAPRRSGA

SEQ ID NO: 102901 - protein, 20 aa, Artificial Sequence
  Description of Artificial Sequence: Synthetic peptide
  Seed: MDPRMCSLMQGSTLPRRSGA
MDPRMWSLAQPSTIPRRSGA

SEQ ID NO: 102902 - protein, 20 aa, Artificial Sequence
  Description of Artificial Sequence: Synthetic peptide
  Seed: MDPRMCSLMQGSTLPRRSGA
MDPRMWSLAQPSTLPRRSGA

SEQ ID NO: 102903 - protein, 20 aa, Artificial Sequence
  Description of Artificial Sequence: Synthetic peptide
  Seed: MDPRMCSLMQGSTLPRRSGA
MDPRMWSLAQPSTSPRRSGA

SEQ ID NO: 102904 - protein, 20 aa, Artificial Sequence
  Description of Artificial Sequence: Synthetic peptide
  Seed: MDPRMCSLMQGSTLPRRSGA
MDPRMWSLAQPSTVPRRSGA

SEQ ID NO: 102905 - protein, 20 aa, Artificial Sequence
  Description of Artificial Sequence: Synthetic peptide
  Seed: MDPRMCSLMQGSTLPRRSGA
MDPRMWSLAQSSTAPRRSGA

SEQ ID NO: 102906 - protein, 20 aa, Artificial Sequence
  Description of Artificial Sequence: Synthetic peptide
  Seed: MDPRMCSLMQGSTLPRRSGA
MDPRMWSLAQSSTIPRRSGA

SEQ ID NO: 102907 - protein, 20 aa, Artificial Sequence
  Description of Artificial Sequence: Synthetic peptide
  Seed: MDPRMCSLMQGSTLPRRSGA
MDPRMWSLAQSSTLPRRSGA

SEQ ID NO: 102908 - protein, 20 aa, Artificial Sequence
  Description of Artificial Sequence: Synthetic peptide
  Seed: MDPRMCSLMQGSTLPRRSGA
MDPRMWSLAQSSTMPRRSGA

SEQ ID NO: 102909 - protein, 20 aa, Artificial Sequence
  Description of Artificial Sequence: Synthetic peptide
  Seed: MDPRMCSLMQGSTLPRRSGA
MDPRMWSLAQSSTNPRRSGA

SEQ ID NO: 102910 - protein, 20 aa, Artificial Sequence
  Description of Artificial Sequence: Synthetic peptide
  Seed: MDPRMCSLMQGSTLPRRSGA
MDPRMWSLAQSSTSPRRSGA

SEQ ID NO: 102911 - protein, 20 aa, Artificial Sequence
  Description of Artificial Sequence: Synthetic peptide
  Seed: MDPRMCSLMQGSTLPRRSGA
MDPRMWSLAQSSTVPRRSGA

SEQ ID NO: 102912 - protein, 20 aa, Artificial Sequence
  Description of Artificial Sequence: Synthetic peptide
  Seed: MDPRMCSLMQGSTLPRRSGA
MDPRMWSLAQTSTAPRRSGA

SEQ ID NO: 102913 - protein, 20 aa, Artificial Sequence
  Description of Artificial Sequence: Synthetic peptide
  Seed: MDPRMCSLMQGSTLPRRSGA
MDPRMWSLAQTSTIPRRSGA

SEQ ID NO: 102914 - protein, 20 aa, Artificial Sequence
  Description of Artificial Sequence: Synthetic peptide
  Seed: MDPRMCSLMQGSTLPRRSGA
MDPRMWSLAQTSTLPRRSGA

SEQ ID NO: 102915 - protein, 20 aa, Artificial Sequence
  Description of Artificial Sequence: Synthetic peptide
  Seed: MDPRMCSLMQGSTLPRRSGA
MDPRMWSLAQTSTNPRRSGA

SEQ ID NO: 102916 - protein, 20 aa, Artificial Sequence
  Description of Artificial Sequence: Synthetic peptide
  Seed: MDPRMCSLMQGSTLPRRSGA
MDPRMWSLAQTSTSPRRSGA

SEQ ID NO: 102917 - protein, 20 aa, Artificial Sequence
  Description of Artificial Sequence: Synthetic peptide
  Seed: MDPRMCSLMQGSTLPRRSGA
MDPRMWSLAQTSTVPRRSGA

SEQ ID NO: 102918 - protein, 20 aa, Artificial Sequence
  Description of Artificial Sequence: Synthetic peptide
  Seed: MDPRMCSLMQGSTLPRRSGA
MDPRMWSLAQVSTAPRRSGA

SEQ ID NO: 102919 - protein, 20 aa, Artificial Sequence
  Description of Artificial Sequence: Synthetic peptide
  Seed: MDPRMCSLMQGSTLPRRSGA
MDPRMWSLAQVSTNPRRSGA

SEQ ID NO: 102920 - protein, 20 aa, Artificial Sequence
  Description of Artificial Sequence: Synthetic peptide
  Seed: MDPRMCSLMQGSTLPRRSGA
MDPRMWSLAQVSTSPRRSGA

SEQ ID NO: 102921 - protein, 20 aa, Artificial Sequence
  Description of Artificial Sequence: Synthetic peptide
  Seed: MDPRMCSLMQGSTLPRRSGA
MDPRMWSLAQVSTTPRRSGA

SEQ ID NO: 102922 - protein, 20 aa, Artificial Sequence
  Description of Artificial Sequence: Synthetic peptide
  Seed: MDPRMCSLMQGSTLPRRSGA
MDPRMWSLAQVSTVPRRSGA

SEQ ID NO: 102923 - protein, 20 aa, Artificial Sequence
  Description of Artificial Sequence: Synthetic peptide
  Seed: MDPRMCSLMQGSTLPRRSGA
MDPRMWSLEQASTAPRRSGA

SEQ ID NO: 102924 - protein, 20 aa, Artificial Sequence
  Description of Artificial Sequence: Synthetic peptide
  Seed: MDPRMCSLMQGSTLPRRSGA
MDPRMWSLEQASTIPRRSGA

SEQ ID NO: 102925 - protein, 20 aa, Artificial Sequence
  Description of Artificial Sequence: Synthetic peptide
  Seed: MDPRMCSLMQGSTLPRRSGA
MDPRMWSLEQASTLPRRSGA

SEQ ID NO: 102926 - protein, 20 aa, Artificial Sequence
  Description of Artificial Sequence: Synthetic peptide
  Seed: MDPRMCSLMQGSTLPRRSGA
MDPRMWSLEQASTVPRRSGA

SEQ ID NO: 102927 - protein, 20 aa, Artificial Sequence
  Description of Artificial Sequence: Synthetic peptide
  Seed: MDPRMCSLMQGSTLPRRSGA
MDPRMWSLFQASTAPRRSGA

SEQ ID NO: 102928 - protein, 20 aa, Artificial Sequence
  Description of Artificial Sequence: Synthetic peptide
  Seed: MDPRMCSLMQGSTLPRRSGA
MDPRMWSLFQASTIPRRSGA

SEQ ID NO: 102929 - protein, 20 aa, Artificial Sequence
  Description of Artificial Sequence: Synthetic peptide
  Seed: MDPRMCSLMQGSTLPRRSGA
MDPRMWSLFQASTNPRRSGA

SEQ ID NO: 102930 - protein, 20 aa, Artificial Sequence
  Description of Artificial Sequence: Synthetic peptide
  Seed: MDPRMCSLMQGSTLPRRSGA
MDPRMWSLFQASTSPRRSGA

SEQ ID NO: 102931 - protein, 20 aa, Artificial Sequence
  Description of Artificial Sequence: Synthetic peptide
  Seed: MDPRMCSLMQGSTLPRRSGA
MDPRMWSLFQASTVPRRSGA

SEQ ID NO: 102932 - protein, 20 aa, Artificial Sequence
  Description of Artificial Sequence: Synthetic peptide
  Seed: MDPRMCSLMQGSTLPRRSGA
MDPRMWSLFQSSTAPRRSGA

SEQ ID NO: 102933 - protein, 20 aa, Artificial Sequence
  Description of Artificial Sequence: Synthetic peptide
  Seed: MDPRMCSLMQGSTLPRRSGA
MDPRMWSLFQVSTAPRRSGA

SEQ ID NO: 102934 - protein, 20 aa, Artificial Sequence
  Description of Artificial Sequence: Synthetic peptide
  Seed: MDPRMCSLMQGSTLPRRSGA
MDPRMWSLGQASTIPRRSGA

SEQ ID NO: 102935 - protein, 20 aa, Artificial Sequence
  Description of Artificial Sequence: Synthetic peptide
  Seed: MDPRMCSLMQGSTLPRRSGA
MDPRMWSLGQASTLPRRSGA

SEQ ID NO: 102936 - protein, 20 aa, Artificial Sequence
  Description of Artificial Sequence: Synthetic peptide
  Seed: MDPRMCSLMQGSTLPRRSGA
MDPRMWSLGQASTVPRRSGA

SEQ ID NO: 102937 - protein, 20 aa, Artificial Sequence
  Description of Artificial Sequence: Synthetic peptide
  Seed: MDPRMCSLMQGSTLPRRSGA
MDPRMWSLIQASTAPRRSGA

SEQ ID NO: 102938 - protein, 20 aa, Artificial Sequence
  Description of Artificial Sequence: Synthetic peptide
  Seed: MDPRMCSLMQGSTLPRRSGA
MDPRMWSLIQASTGPRRSGA

SEQ ID NO: 102939 - protein, 20 aa, Artificial Sequence
  Description of Artificial Sequence: Synthetic peptide
  Seed: MDPRMCSLMQGSTLPRRSGA
MDPRMWSLIQASTHPRRSGA

SEQ ID NO: 102940 - protein, 20 aa, Artificial Sequence
  Description of Artificial Sequence: Synthetic peptide
  Seed: MDPRMCSLMQGSTLPRRSGA
MDPRMWSLIQASTIPRRSGA

SEQ ID NO: 102941 - protein, 20 aa, Artificial Sequence
  Description of Artificial Sequence: Synthetic peptide
  Seed: MDPRMCSLMQGSTLPRRSGA
MDPRMWSLIQASTLPRRSGA

SEQ ID NO: 102942 - protein, 20 aa, Artificial Sequence
  Description of Artificial Sequence: Synthetic peptide
  Seed: MDPRMCSLMQGSTLPRRSGA
MDPRMWSLIQASTMPRRSGA

SEQ ID NO: 102943 - protein, 20 aa, Artificial Sequence
  Description of Artificial Sequence: Synthetic peptide
  Seed: MDPRMCSLMQGSTLPRRSGA
MDPRMWSLIQASTNPRRSGA

SEQ ID NO: 102944 - protein, 20 aa, Artificial Sequence
  Description of Artificial Sequence: Synthetic peptide
  Seed: MDPRMCSLMQGSTLPRRSGA
MDPRMWSLIQASTQPRRSGA

SEQ ID NO: 102945 - protein, 20 aa, Artificial Sequence
  Description of Artificial Sequence: Synthetic peptide
  Seed: MDPRMCSLMQGSTLPRRSGA
MDPRMWSLIQASTSPRRSGA

SEQ ID NO: 102946 - protein, 20 aa, Artificial Sequence
  Description of Artificial Sequence: Synthetic peptide
  Seed: MDPRMCSLMQGSTLPRRSGA
MDPRMWSLIQASTTPRRSGA

SEQ ID NO: 102947 - protein, 20 aa, Artificial Sequence
  Description of Artificial Sequence: Synthetic peptide
  Seed: MDPRMCSLMQGSTLPRRSGA
MDPRMWSLIQASTVPRRSGA

SEQ ID NO: 102948 - protein, 20 aa, Artificial Sequence
  Description of Artificial Sequence: Synthetic peptide
  Seed: MDPRMCSLMQGSTLPRRSGA
MDPRMWSLIQGSTAPRRSGA

SEQ ID NO: 102949 - protein, 20 aa, Artificial Sequence
  Description of Artificial Sequence: Synthetic peptide
  Seed: MDPRMCSLMQGSTLPRRSGA
MDPRMWSLIQGSTIPRRSGA

SEQ ID NO: 102950 - protein, 20 aa, Artificial Sequence
  Description of Artificial Sequence: Synthetic peptide
  Seed: MDPRMCSLMQGSTLPRRSGA
MDPRMWSLIQGSTLPRRSGA

SEQ ID NO: 102951 - protein, 20 aa, Artificial Sequence
  Description of Artificial Sequence: Synthetic peptide
  Seed: MDPRMCSLMQGSTLPRRSGA
MDPRMWSLIQGSTMPRRSGA

SEQ ID NO: 102952 - protein, 20 aa, Artificial Sequence
  Description of Artificial Sequence: Synthetic peptide
  Seed: MDPRMCSLMQGSTLPRRSGA
MDPRMWSLIQGSTNPRRSGA

SEQ ID NO: 102953 - protein, 20 aa, Artificial Sequence
  Description of Artificial Sequence: Synthetic peptide
  Seed: MDPRMCSLMQGSTLPRRSGA
MDPRMWSLIQGSTSPRRSGA

SEQ ID NO: 102954 - protein, 20 aa, Artificial Sequence
  Description of Artificial Sequence: Synthetic peptide
  Seed: MDPRMCSLMQGSTLPRRSGA
MDPRMWSLIQGSTTPRRSGA

SEQ ID NO: 102955 - protein, 20 aa, Artificial Sequence
  Description of Artificial Sequence: Synthetic peptide
  Seed: MDPRMCSLMQGSTLPRRSGA
MDPRMWSLIQGSTVPRRSGA

SEQ ID NO: 102956 - protein, 20 aa, Artificial Sequence
  Description of Artificial Sequence: Synthetic peptide
  Seed: MDPRMCSLMQGSTLPRRSGA
MDPRMWSLIQISTAPRRSGA

SEQ ID NO: 102957 - protein, 20 aa, Artificial Sequence
  Description of Artificial Sequence: Synthetic peptide
  Seed: MDPRMCSLMQGSTLPRRSGA
MDPRMWSLIQISTNPRRSGA

SEQ ID NO: 102958 - protein, 20 aa, Artificial Sequence
  Description of Artificial Sequence: Synthetic peptide
  Seed: MDPRMCSLMQGSTLPRRSGA
MDPRMWSLIQISTSPRRSGA

SEQ ID NO: 102959 - protein, 20 aa, Artificial Sequence
  Description of Artificial Sequence: Synthetic peptide
  Seed: MDPRMCSLMQGSTLPRRSGA
MDPRMWSLIQLSTAPRRSGA

SEQ ID NO: 102960 - protein, 20 aa, Artificial Sequence
  Description of Artificial Sequence: Synthetic peptide
  Seed: MDPRMCSLMQGSTLPRRSGA
MDPRMWSLIQMSTAPRRSGA

SEQ ID NO: 102961 - protein, 20 aa, Artificial Sequence
  Description of Artificial Sequence: Synthetic peptide
  Seed: MDPRMCSLMQGSTLPRRSGA
MDPRMWSLIQNSTAPRRSGA

SEQ ID NO: 102962 - protein, 20 aa, Artificial Sequence
  Description of Artificial Sequence: Synthetic peptide
  Seed: MDPRMCSLMQGSTLPRRSGA
MDPRMWSLIQNSTIPRRSGA

SEQ ID NO: 102963 - protein, 20 aa, Artificial Sequence
  Description of Artificial Sequence: Synthetic peptide
  Seed: MDPRMCSLMQGSTLPRRSGA
MDPRMWSLIQNSTLPRRSGA

SEQ ID NO: 102964 - protein, 20 aa, Artificial Sequence
  Description of Artificial Sequence: Synthetic peptide
  Seed: MDPRMCSLMQGSTLPRRSGA
MDPRMWSLIQNSTNPRRSGA

SEQ ID NO: 102965 - protein, 20 aa, Artificial Sequence
  Description of Artificial Sequence: Synthetic peptide
  Seed: MDPRMCSLMQGSTLPRRSGA
MDPRMWSLIQNSTSPRRSGA

SEQ ID NO: 102966 - protein, 20 aa, Artificial Sequence
  Description of Artificial Sequence: Synthetic peptide
  Seed: MDPRMCSLMQGSTLPRRSGA
MDPRMWSLIQNSTVPRRSGA

SEQ ID NO: 102967 - protein, 20 aa, Artificial Sequence
  Description of Artificial Sequence: Synthetic peptide
  Seed: MDPRMCSLMQGSTLPRRSGA
MDPRMWSLIQPSTAPRRSGA

SEQ ID NO: 102968 - protein, 20 aa, Artificial Sequence
  Description of Artificial Sequence: Synthetic peptide
  Seed: MDPRMCSLMQGSTLPRRSGA
MDPRMWSLIQPSTGPRRSGA

SEQ ID NO: 102969 - protein, 20 aa, Artificial Sequence
  Description of Artificial Sequence: Synthetic peptide
  Seed: MDPRMCSLMQGSTLPRRSGA
MDPRMWSLIQPSTIPRRSGA

SEQ ID NO: 102970 - protein, 20 aa, Artificial Sequence
  Description of Artificial Sequence: Synthetic peptide
  Seed: MDPRMCSLMQGSTLPRRSGA
MDPRMWSLIQPSTLPRRSGA

SEQ ID NO: 102971 - protein, 20 aa, Artificial Sequence
  Description of Artificial Sequence: Synthetic peptide
  Seed: MDPRMCSLMQGSTLPRRSGA
MDPRMWSLIQPSTMPRRSGA

SEQ ID NO: 102972 - protein, 20 aa, Artificial Sequence
  Description of Artificial Sequence: Synthetic peptide
  Seed: MDPRMCSLMQGSTLPRRSGA
MDPRMWSLIQPSTNPRRSGA

SEQ ID NO: 102973 - protein, 20 aa, Artificial Sequence
  Description of Artificial Sequence: Synthetic peptide
  Seed: MDPRMCSLMQGSTLPRRSGA
MDPRMWSLIQPSTSPRRSGA

SEQ ID NO: 102974 - protein, 20 aa, Artificial Sequence
  Description of Artificial Sequence: Synthetic peptide
  Seed: MDPRMCSLMQGSTLPRRSGA
MDPRMWSLIQPSTTPRRSGA

SEQ ID NO: 102975 - protein, 20 aa, Artificial Sequence
  Description of Artificial Sequence: Synthetic peptide
  Seed: MDPRMCSLMQGSTLPRRSGA
MDPRMWSLIQPSTVPRRSGA

SEQ ID NO: 102976 - protein, 20 aa, Artificial Sequence
  Description of Artificial Sequence: Synthetic peptide
  Seed: MDPRMCSLMQGSTLPRRSGA
MDPRMWSLIQSSTAPRRSGA

SEQ ID NO: 102977 - protein, 20 aa, Artificial Sequence
  Description of Artificial Sequence: Synthetic peptide
  Seed: MDPRMCSLMQGSTLPRRSGA
MDPRMWSLIQSSTGPRRSGA

SEQ ID NO: 102978 - protein, 20 aa, Artificial Sequence
  Description of Artificial Sequence: Synthetic peptide
  Seed: MDPRMCSLMQGSTLPRRSGA
MDPRMWSLIQSSTIPRRSGA

SEQ ID NO: 102979 - protein, 20 aa, Artificial Sequence
  Description of Artificial Sequence: Synthetic peptide
  Seed: MDPRMCSLMQGSTLPRRSGA
MDPRMWSLIQSSTLPRRSGA

SEQ ID NO: 102980 - protein, 20 aa, Artificial Sequence
  Description of Artificial Sequence: Synthetic peptide
  Seed: MDPRMCSLMQGSTLPRRSGA
MDPRMWSLIQSSTMPRRSGA

SEQ ID NO: 102981 - protein, 20 aa, Artificial Sequence
  Description of Artificial Sequence: Synthetic peptide
  Seed: MDPRMCSLMQGSTLPRRSGA
MDPRMWSLIQSSTNPRRSGA

SEQ ID NO: 102982 - protein, 20 aa, Artificial Sequence
  Description of Artificial Sequence: Synthetic peptide
  Seed: MDPRMCSLMQGSTLPRRSGA
MDPRMWSLIQSSTSPRRSGA

SEQ ID NO: 102983 - protein, 20 aa, Artificial Sequence
  Description of Artificial Sequence: Synthetic peptide
  Seed: MDPRMCSLMQGSTLPRRSGA
MDPRMWSLIQSSTTPRRSGA

SEQ ID NO: 102984 - protein, 20 aa, Artificial Sequence
  Description of Artificial Sequence: Synthetic peptide
  Seed: MDPRMCSLMQGSTLPRRSGA
MDPRMWSLIQSSTVPRRSGA

SEQ ID NO: 102985 - protein, 20 aa, Artificial Sequence
  Description of Artificial Sequence: Synthetic peptide
  Seed: MDPRMCSLMQGSTLPRRSGA
MDPRMWSLIQTSTAPRRSGA

SEQ ID NO: 102986 - protein, 20 aa, Artificial Sequence
  Description of Artificial Sequence: Synthetic peptide
  Seed: MDPRMCSLMQGSTLPRRSGA
MDPRMWSLIQTSTGPRRSGA

SEQ ID NO: 102987 - protein, 20 aa, Artificial Sequence
  Description of Artificial Sequence: Synthetic peptide
  Seed: MDPRMCSLMQGSTLPRRSGA
MDPRMWSLIQTSTIPRRSGA

SEQ ID NO: 102988 - protein, 20 aa, Artificial Sequence
  Description of Artificial Sequence: Synthetic peptide
  Seed: MDPRMCSLMQGSTLPRRSGA
MDPRMWSLIQTSTLPRRSGA

SEQ ID NO: 102989 - protein, 20 aa, Artificial Sequence
  Description of Artificial Sequence: Synthetic peptide
  Seed: MDPRMCSLMQGSTLPRRSGA
MDPRMWSLIQTSTMPRRSGA

SEQ ID NO: 102990 - protein, 20 aa, Artificial Sequence
  Description of Artificial Sequence: Synthetic peptide
  Seed: MDPRMCSLMQGSTLPRRSGA
MDPRMWSLIQTSTNPRRSGA

SEQ ID NO: 102991 - protein, 20 aa, Artificial Sequence
  Description of Artificial Sequence: Synthetic peptide
  Seed: MDPRMCSLMQGSTLPRRSGA
MDPRMWSLIQTSTSPRRSGA

SEQ ID NO: 102992 - protein, 20 aa, Artificial Sequence
  Description of Artificial Sequence: Synthetic peptide
  Seed: MDPRMCSLMQGSTLPRRSGA
MDPRMWSLIQTSTTPRRSGA

SEQ ID NO: 102993 - protein, 20 aa, Artificial Sequence
  Description of Artificial Sequence: Synthetic peptide
  Seed: MDPRMCSLMQGSTLPRRSGA
MDPRMWSLIQTSTVPRRSGA

SEQ ID NO: 102994 - protein, 20 aa, Artificial Sequence
  Description of Artificial Sequence: Synthetic peptide
  Seed: MDPRMCSLMQGSTLPRRSGA
MDPRMWSLIQVSTAPRRSGA

SEQ ID NO: 102995 - protein, 20 aa, Artificial Sequence
  Description of Artificial Sequence: Synthetic peptide
  Seed: MDPRMCSLMQGSTLPRRSGA
MDPRMWSLIQVSTGPRRSGA

SEQ ID NO: 102996 - protein, 20 aa, Artificial Sequence
  Description of Artificial Sequence: Synthetic peptide
  Seed: MDPRMCSLMQGSTLPRRSGA
MDPRMWSLIQVSTNPRRSGA

SEQ ID NO: 102997 - protein, 20 aa, Artificial Sequence
  Description of Artificial Sequence: Synthetic peptide
  Seed: MDPRMCSLMQGSTLPRRSGA
MDPRMWSLIQVSTSPRRSGA

SEQ ID NO: 102998 - protein, 20 aa, Artificial Sequence
  Description of Artificial Sequence: Synthetic peptide
  Seed: MDPRMCSLMQGSTLPRRSGA
MDPRMWSLIQVSTTPRRSGA

SEQ ID NO: 102999 - protein, 20 aa, Artificial Sequence
  Description of Artificial Sequence: Synthetic peptide
  Seed: MDPRMCSLMQGSTLPRRSGA
MDPRMWSLIQVSTVPRRSGA

SEQ ID NO: 103000 - protein, 20 aa, Artificial Sequence
  Description of Artificial Sequence: Synthetic peptide
  Seed: MDPRMCSLMQGSTLPRRSGA
MDPRMWSLLQASTAPRRSGA

SEQ ID NO: 103001 - protein, 20 aa, Artificial Sequence
  Description of Artificial Sequence: Synthetic peptide
  Seed: MDPRMCSLMQGSTLPRRSGA
MDPRMWSLLQASTCPRRSGA

SEQ ID NO: 103002 - protein, 20 aa, Artificial Sequence
  Description of Artificial Sequence: Synthetic peptide
  Seed: MDPRMCSLMQGSTLPRRSGA
MDPRMWSLLQASTFPRRSGA

SEQ ID NO: 103003 - protein, 20 aa, Artificial Sequence
  Description of Artificial Sequence: Synthetic peptide
  Seed: MDPRMCSLMQGSTLPRRSGA
MDPRMWSLLQASTGPRRSGA

SEQ ID NO: 103004 - protein, 20 aa, Artificial Sequence
  Description of Artificial Sequence: Synthetic peptide
  Seed: MDPRMCSLMQGSTLPRRSGA
MDPRMWSLLQASTHPRRSGA

SEQ ID NO: 103005 - protein, 20 aa, Artificial Sequence
  Description of Artificial Sequence: Synthetic peptide
  Seed: MDPRMCSLMQGSTLPRRSGA
MDPRMWSLLQASTIPRRSGA

SEQ ID NO: 103006 - protein, 20 aa, Artificial Sequence
  Description of Artificial Sequence: Synthetic peptide
  Seed: MDPRMCSLMQGSTLPRRSGA
MDPRMWSLLQASTLPRRSGA

SEQ ID NO: 103007 - protein, 20 aa, Artificial Sequence
  Description of Artificial Sequence: Synthetic peptide
  Seed: MDPRMCSLMQGSTLPRRSGA
MDPRMWSLLQASTMPRRSGA

SEQ ID NO: 103008 - protein, 20 aa, Artificial Sequence
  Description of Artificial Sequence: Synthetic peptide
  Seed: MDPRMCSLMQGSTLPRRSGA
MDPRMWSLLQASTNPRRSGA

SEQ ID NO: 103009 - protein, 20 aa, Artificial Sequence
  Description of Artificial Sequence: Synthetic peptide
  Seed: MDPRMCSLMQGSTLPRRSGA
MDPRMWSLLQASTQPRRSGA

SEQ ID NO: 103010 - protein, 20 aa, Artificial Sequence
  Description of Artificial Sequence: Synthetic peptide
  Seed: MDPRMCSLMQGSTLPRRSGA
MDPRMWSLLQASTSPRRSGA

SEQ ID NO: 103011 - protein, 20 aa, Artificial Sequence
  Description of Artificial Sequence: Synthetic peptide
  Seed: MDPRMCSLMQGSTLPRRSGA
MDPRMWSLLQASTTPRRSGA

SEQ ID NO: 103012 - protein, 20 aa, Artificial Sequence
  Description of Artificial Sequence: Synthetic peptide
  Seed: MDPRMCSLMQGSTLPRRSGA
MDPRMWSLLQASTVPRRSGA

SEQ ID NO: 103013 - protein, 20 aa, Artificial Sequence
  Description of Artificial Sequence: Synthetic peptide
  Seed: MDPRMCSLMQGSTLPRRSGA
MDPRMWSLLQGSTAPRRSGA

SEQ ID NO: 103014 - protein, 20 aa, Artificial Sequence
  Description of Artificial Sequence: Synthetic peptide
  Seed: MDPRMCSLMQGSTLPRRSGA
MDPRMWSLLQGSTCPRRSGA

SEQ ID NO: 103015 - protein, 20 aa, Artificial Sequence
  Description of Artificial Sequence: Synthetic peptide
  Seed: MDPRMCSLMQGSTLPRRSGA
MDPRMWSLLQGSTGPRRSGA

SEQ ID NO: 103016 - protein, 20 aa, Artificial Sequence
  Description of Artificial Sequence: Synthetic peptide
  Seed: MDPRMCSLMQGSTLPRRSGA
MDPRMWSLLQGSTIPRRSGA

SEQ ID NO: 103017 - protein, 20 aa, Artificial Sequence
  Description of Artificial Sequence: Synthetic peptide
  Seed: MDPRMCSLMQGSTLPRRSGA
MDPRMWSLLQGSTLPRRSGA

SEQ ID NO: 103018 - protein, 20 aa, Artificial Sequence
  Description of Artificial Sequence: Synthetic peptide
  Seed: MDPRMCSLMQGSTLPRRSGA
MDPRMWSLLQGSTMPRRSGA

SEQ ID NO: 103019 - protein, 20 aa, Artificial Sequence
  Description of Artificial Sequence: Synthetic peptide
  Seed: MDPRMCSLMQGSTLPRRSGA
MDPRMWSLLQGSTNPRRSGA

SEQ ID NO: 103020 - protein, 20 aa, Artificial Sequence
  Description of Artificial Sequence: Synthetic peptide
  Seed: MDPRMCSLMQGSTLPRRSGA
MDPRMWSLLQGSTSPRRSGA

SEQ ID NO: 103021 - protein, 20 aa, Artificial Sequence
  Description of Artificial Sequence: Synthetic peptide
  Seed: MDPRMCSLMQGSTLPRRSGA
MDPRMWSLLQGSTTPRRSGA

SEQ ID NO: 103022 - protein, 20 aa, Artificial Sequence
  Description of Artificial Sequence: Synthetic peptide
  Seed: MDPRMCSLMQGSTLPRRSGA
MDPRMWSLLQGSTVPRRSGA

SEQ ID NO: 103023 - protein, 20 aa, Artificial Sequence
  Description of Artificial Sequence: Synthetic peptide
  Seed: MDPRMCSLMQGSTLPRRSGA
MDPRMWSLLQISTAPRRSGA

SEQ ID NO: 103024 - protein, 20 aa, Artificial Sequence
  Description of Artificial Sequence: Synthetic peptide
  Seed: MDPRMCSLMQGSTLPRRSGA
MDPRMWSLLQISTNPRRSGA

SEQ ID NO: 103025 - protein, 20 aa, Artificial Sequence
  Description of Artificial Sequence: Synthetic peptide
  Seed: MDPRMCSLMQGSTLPRRSGA
MDPRMWSLLQISTSPRRSGA

SEQ ID NO: 103026 - protein, 20 aa, Artificial Sequence
  Description of Artificial Sequence: Synthetic peptide
  Seed: MDPRMCSLMQGSTLPRRSGA
MDPRMWSLLQISTTPRRSGA

SEQ ID NO: 103027 - protein, 20 aa, Artificial Sequence
  Description of Artificial Sequence: Synthetic peptide
  Seed: MDPRMCSLMQGSTLPRRSGA
MDPRMWSLLQISTVPRRSGA

SEQ ID NO: 103028 - protein, 20 aa, Artificial Sequence
  Description of Artificial Sequence: Synthetic peptide
  Seed: MDPRMCSLMQGSTLPRRSGA
MDPRMWSLLQLSTAPRRSGA

SEQ ID NO: 103029 - protein, 20 aa, Artificial Sequence
  Description of Artificial Sequence: Synthetic peptide
  Seed: MDPRMCSLMQGSTLPRRSGA
MDPRMWSLLQMSTAPRRSGA

SEQ ID NO: 103030 - protein, 20 aa, Artificial Sequence
  Description of Artificial Sequence: Synthetic peptide
  Seed: MDPRMCSLMQGSTLPRRSGA
MDPRMWSLLQNSTAPRRSGA

SEQ ID NO: 103031 - protein, 20 aa, Artificial Sequence
  Description of Artificial Sequence: Synthetic peptide
  Seed: MDPRMCSLMQGSTLPRRSGA
MDPRMWSLLQNSTIPRRSGA

SEQ ID NO: 103032 - protein, 20 aa, Artificial Sequence
  Description of Artificial Sequence: Synthetic peptide
  Seed: MDPRMCSLMQGSTLPRRSGA
MDPRMWSLLQNSTLPRRSGA

SEQ ID NO: 103033 - protein, 20 aa, Artificial Sequence
  Description of Artificial Sequence: Synthetic peptide
  Seed: MDPRMCSLMQGSTLPRRSGA
MDPRMWSLLQNSTMPRRSGA

SEQ ID NO: 103034 - protein, 20 aa, Artificial Sequence
  Description of Artificial Sequence: Synthetic peptide
  Seed: MDPRMCSLMQGSTLPRRSGA
MDPRMWSLLQNSTNPRRSGA

SEQ ID NO: 103035 - protein, 20 aa, Artificial Sequence
  Description of Artificial Sequence: Synthetic peptide
  Seed: MDPRMCSLMQGSTLPRRSGA
MDPRMWSLLQNSTSPRRSGA

SEQ ID NO: 103036 - protein, 20 aa, Artificial Sequence
  Description of Artificial Sequence: Synthetic peptide
  Seed: MDPRMCSLMQGSTLPRRSGA
MDPRMWSLLQNSTTPRRSGA

SEQ ID NO: 103037 - protein, 20 aa, Artificial Sequence
  Description of Artificial Sequence: Synthetic peptide
  Seed: MDPRMCSLMQGSTLPRRSGA
MDPRMWSLLQNSTVPRRSGA

SEQ ID NO: 103038 - protein, 20 aa, Artificial Sequence
  Description of Artificial Sequence: Synthetic peptide
  Seed: MDPRMCSLMQGSTLPRRSGA
MDPRMWSLLQPSTAPRRSGA

SEQ ID NO: 103039 - protein, 20 aa, Artificial Sequence
  Description of Artificial Sequence: Synthetic peptide
  Seed: MDPRMCSLMQGSTLPRRSGA
MDPRMWSLLQPSTGPRRSGA

SEQ ID NO: 103040 - protein, 20 aa, Artificial Sequence
  Description of Artificial Sequence: Synthetic peptide
  Seed: MDPRMCSLMQGSTLPRRSGA
MDPRMWSLLQPSTIPRRSGA

SEQ ID NO: 103041 - protein, 20 aa, Artificial Sequence
  Description of Artificial Sequence: Synthetic peptide
  Seed: MDPRMCSLMQGSTLPRRSGA
MDPRMWSLLQPSTLPRRSGA

SEQ ID NO: 103042 - protein, 20 aa, Artificial Sequence
  Description of Artificial Sequence: Synthetic peptide
  Seed: MDPRMCSLMQGSTLPRRSGA
MDPRMWSLLQPSTMPRRSGA

SEQ ID NO: 103043 - protein, 20 aa, Artificial Sequence
  Description of Artificial Sequence: Synthetic peptide
  Seed: MDPRMCSLMQGSTLPRRSGA
MDPRMWSLLQPSTNPRRSGA

SEQ ID NO: 103044 - protein, 20 aa, Artificial Sequence
  Description of Artificial Sequence: Synthetic peptide
  Seed: MDPRMCSLMQGSTLPRRSGA
MDPRMWSLLQPSTQPRRSGA

SEQ ID NO: 103045 - protein, 20 aa, Artificial Sequence
  Description of Artificial Sequence: Synthetic peptide
  Seed: MDPRMCSLMQGSTLPRRSGA
MDPRMWSLLQPSTSPRRSGA

SEQ ID NO: 103046 - protein, 20 aa, Artificial Sequence
  Description of Artificial Sequence: Synthetic peptide
  Seed: MDPRMCSLMQGSTLPRRSGA
MDPRMWSLLQPSTTPRRSGA

SEQ ID NO: 103047 - protein, 20 aa, Artificial Sequence
  Description of Artificial Sequence: Synthetic peptide
  Seed: MDPRMCSLMQGSTLPRRSGA
MDPRMWSLLQPSTVPRRSGA

SEQ ID NO: 103048 - protein, 20 aa, Artificial Sequence
  Description of Artificial Sequence: Synthetic peptide
  Seed: MDPRMCSLMQGSTLPRRSGA
MDPRMWSLLQSSTAPRRSGA

SEQ ID NO: 103049 - protein, 20 aa, Artificial Sequence
  Description of Artificial Sequence: Synthetic peptide
  Seed: MDPRMCSLMQGSTLPRRSGA
MDPRMWSLLQSSTGPRRSGA

SEQ ID NO: 103050 - protein, 20 aa, Artificial Sequence
  Description of Artificial Sequence: Synthetic peptide
  Seed: MDPRMCSLMQGSTLPRRSGA
MDPRMWSLLQSSTHPRRSGA

SEQ ID NO: 103051 - protein, 20 aa, Artificial Sequence
  Description of Artificial Sequence: Synthetic peptide
  Seed: MDPRMCSLMQGSTLPRRSGA
MDPRMWSLLQSSTIPRRSGA

SEQ ID NO: 103052 - protein, 20 aa, Artificial Sequence
  Description of Artificial Sequence: Synthetic peptide
  Seed: MDPRMCSLMQGSTLPRRSGA
MDPRMWSLLQSSTLPRRSGA

SEQ ID NO: 103053 - protein, 20 aa, Artificial Sequence
  Description of Artificial Sequence: Synthetic peptide
  Seed: MDPRMCSLMQGSTLPRRSGA
MDPRMWSLLQSSTMPRRSGA

SEQ ID NO: 103054 - protein, 20 aa, Artificial Sequence
  Description of Artificial Sequence: Synthetic peptide
  Seed: MDPRMCSLMQGSTLPRRSGA
MDPRMWSLLQSSTNPRRSGA

SEQ ID NO: 103055 - protein, 20 aa, Artificial Sequence
  Description of Artificial Sequence: Synthetic peptide
  Seed: MDPRMCSLMQGSTLPRRSGA
MDPRMWSLLQSSTSPRRSGA

SEQ ID NO: 103056 - protein, 20 aa, Artificial Sequence
  Description of Artificial Sequence: Synthetic peptide
  Seed: MDPRMCSLMQGSTLPRRSGA
MDPRMWSLLQSSTTPRRSGA

SEQ ID NO: 103057 - protein, 20 aa, Artificial Sequence
  Description of Artificial Sequence: Synthetic peptide
  Seed: MDPRMCSLMQGSTLPRRSGA
MDPRMWSLLQSSTVPRRSGA

SEQ ID NO: 103058 - protein, 20 aa, Artificial Sequence
  Description of Artificial Sequence: Synthetic peptide
  Seed: MDPRMCSLMQGSTLPRRSGA
MDPRMWSLLQTSTAPRRSGA

SEQ ID NO: 103059 - protein, 20 aa, Artificial Sequence
  Description of Artificial Sequence: Synthetic peptide
  Seed: MDPRMCSLMQGSTLPRRSGA
MDPRMWSLLQTSTGPRRSGA

SEQ ID NO: 103060 - protein, 20 aa, Artificial Sequence
  Description of Artificial Sequence: Synthetic peptide
  Seed: MDPRMCSLMQGSTLPRRSGA
MDPRMWSLLQTSTHPRRSGA

SEQ ID NO: 103061 - protein, 20 aa, Artificial Sequence
  Description of Artificial Sequence: Synthetic peptide
  Seed: MDPRMCSLMQGSTLPRRSGA
MDPRMWSLLQTSTIPRRSGA

SEQ ID NO: 103062 - protein, 20 aa, Artificial Sequence
  Description of Artificial Sequence: Synthetic peptide
  Seed: MDPRMCSLMQGSTLPRRSGA
MDPRMWSLLQTSTLPRRSGA

SEQ ID NO: 103063 - protein, 20 aa, Artificial Sequence
  Description of Artificial Sequence: Synthetic peptide
  Seed: MDPRMCSLMQGSTLPRRSGA
MDPRMWSLLQTSTMPRRSGA

SEQ ID NO: 103064 - protein, 20 aa, Artificial Sequence
  Description of Artificial Sequence: Synthetic peptide
  Seed: MDPRMCSLMQGSTLPRRSGA
MDPRMWSLLQTSTNPRRSGA

SEQ ID NO: 103065 - protein, 20 aa, Artificial Sequence
  Description of Artificial Sequence: Synthetic peptide
  Seed: MDPRMCSLMQGSTLPRRSGA
MDPRMWSLLQTSTSPRRSGA

SEQ ID NO: 103066 - protein, 20 aa, Artificial Sequence
  Description of Artificial Sequence: Synthetic peptide
  Seed: MDPRMCSLMQGSTLPRRSGA
MDPRMWSLLQTSTTPRRSGA

SEQ ID NO: 103067 - protein, 20 aa, Artificial Sequence
  Description of Artificial Sequence: Synthetic peptide
  Seed: MDPRMCSLMQGSTLPRRSGA
MDPRMWSLLQTSTVPRRSGA

SEQ ID NO: 103068 - protein, 20 aa, Artificial Sequence
  Description of Artificial Sequence: Synthetic peptide
  Seed: MDPRMCSLMQGSTLPRRSGA
MDPRMWSLLQVSTAPRRSGA

SEQ ID NO: 103069 - protein, 20 aa, Artificial Sequence
  Description of Artificial Sequence: Synthetic peptide
  Seed: MDPRMCSLMQGSTLPRRSGA
MDPRMWSLLQVSTGPRRSGA

SEQ ID NO: 103070 - protein, 20 aa, Artificial Sequence
  Description of Artificial Sequence: Synthetic peptide
  Seed: MDPRMCSLMQGSTLPRRSGA
MDPRMWSLLQVSTHPRRSGA

SEQ ID NO: 103071 - protein, 20 aa, Artificial Sequence
  Description of Artificial Sequence: Synthetic peptide
  Seed: MDPRMCSLMQGSTLPRRSGA
MDPRMWSLLQVSTIPRRSGA

SEQ ID NO: 103072 - protein, 20 aa, Artificial Sequence
  Description of Artificial Sequence: Synthetic peptide
  Seed: MDPRMCSLMQGSTLPRRSGA
MDPRMWSLLQVSTLPRRSGA

SEQ ID NO: 103073 - protein, 20 aa, Artificial Sequence
  Description of Artificial Sequence: Synthetic peptide
  Seed: MDPRMCSLMQGSTLPRRSGA
MDPRMWSLLQVSTMPRRSGA

SEQ ID NO: 103074 - protein, 20 aa, Artificial Sequence
  Description of Artificial Sequence: Synthetic peptide
  Seed: MDPRMCSLMQGSTLPRRSGA
MDPRMWSLLQVSTNPRRSGA

SEQ ID NO: 103075 - protein, 20 aa, Artificial Sequence
  Description of Artificial Sequence: Synthetic peptide
  Seed: MDPRMCSLMQGSTLPRRSGA
MDPRMWSLLQVSTSPRRSGA

SEQ ID NO: 103076 - protein, 20 aa, Artificial Sequence
  Description of Artificial Sequence: Synthetic peptide
  Seed: MDPRMCSLMQGSTLPRRSGA
MDPRMWSLLQVSTTPRRSGA

SEQ ID NO: 103077 - protein, 20 aa, Artificial Sequence
  Description of Artificial Sequence: Synthetic peptide
  Seed: MDPRMCSLMQGSTLPRRSGA
MDPRMWSLLQVSTVPRRSGA

SEQ ID NO: 103078 - protein, 20 aa, Artificial Sequence
  Description of Artificial Sequence: Synthetic peptide
  Seed: MDPRMCSLMQGSTLPRRSGA
MDPRMWSLMQASTAPRRSGA

SEQ ID NO: 103079 - protein, 20 aa, Artificial Sequence
  Description of Artificial Sequence: Synthetic peptide
  Seed: MDPRMCSLMQGSTLPRRSGA
MDPRMWSLMQASTCPRRSGA

SEQ ID NO: 103080 - protein, 20 aa, Artificial Sequence
  Description of Artificial Sequence: Synthetic peptide
  Seed: MDPRMCSLMQGSTLPRRSGA
MDPRMWSLMQASTDPRRSGA

SEQ ID NO: 103081 - protein, 20 aa, Artificial Sequence
  Description of Artificial Sequence: Synthetic peptide
  Seed: MDPRMCSLMQGSTLPRRSGA
MDPRMWSLMQASTEPRRSGA

SEQ ID NO: 103082 - protein, 20 aa, Artificial Sequence
  Description of Artificial Sequence: Synthetic peptide
  Seed: MDPRMCSLMQGSTLPRRSGA
MDPRMWSLMQASTFPRRSGA

SEQ ID NO: 103083 - protein, 20 aa, Artificial Sequence
  Description of Artificial Sequence: Synthetic peptide
  Seed: MDPRMCSLMQGSTLPRRSGA
MDPRMWSLMQASTGPRRSGA

SEQ ID NO: 103084 - protein, 20 aa, Artificial Sequence
  Description of Artificial Sequence: Synthetic peptide
  Seed: MDPRMCSLMQGSTLPRRSGA
MDPRMWSLMQASTHPRRSGA

SEQ ID NO: 103085 - protein, 20 aa, Artificial Sequence
  Description of Artificial Sequence: Synthetic peptide
  Seed: MDPRMCSLMQGSTLPRRSGA
MDPRMWSLMQASTIPRRSGA

SEQ ID NO: 103086 - protein, 20 aa, Artificial Sequence
  Description of Artificial Sequence: Synthetic peptide
  Seed: MDPRMCSLMQGSTLPRRSGA
MDPRMWSLMQASTLPRRSGA

SEQ ID NO: 103087 - protein, 20 aa, Artificial Sequence
  Description of Artificial Sequence: Synthetic peptide
  Seed: MDPRMCSLMQGSTLPRRSGA
MDPRMWSLMQASTMPRRSGA

SEQ ID NO: 103088 - protein, 20 aa, Artificial Sequence
  Description of Artificial Sequence: Synthetic peptide
  Seed: MDPRMCSLMQGSTLPRRSGA
MDPRMWSLMQASTNPRRSGA

SEQ ID NO: 103089 - protein, 20 aa, Artificial Sequence
  Description of Artificial Sequence: Synthetic peptide
  Seed: MDPRMCSLMQGSTLPRRSGA
MDPRMWSLMQASTPPRRSGA

SEQ ID NO: 103090 - protein, 20 aa, Artificial Sequence
  Description of Artificial Sequence: Synthetic peptide
  Seed: MDPRMCSLMQGSTLPRRSGA
MDPRMWSLMQASTQPRRSGA

SEQ ID NO: 103091 - protein, 20 aa, Artificial Sequence
  Description of Artificial Sequence: Synthetic peptide
  Seed: MDPRMCSLMQGSTLPRRSGA
MDPRMWSLMQASTSPRRSGA

SEQ ID NO: 103092 - protein, 20 aa, Artificial Sequence
  Description of Artificial Sequence: Synthetic peptide
  Seed: MDPRMCSLMQGSTLPRRSGA
MDPRMWSLMQASTTPRRSGA

SEQ ID NO: 103093 - protein, 20 aa, Artificial Sequence
  Description of Artificial Sequence: Synthetic peptide
  Seed: MDPRMCSLMQGSTLPRRSGA
MDPRMWSLMQASTVPRRSGA

SEQ ID NO: 103094 - protein, 20 aa, Artificial Sequence
  Description of Artificial Sequence: Synthetic peptide
  Seed: MDPRMCSLMQGSTLPRRSGA
MDPRMWSLMQGSTAPRRSGA

SEQ ID NO: 103095 - protein, 20 aa, Artificial Sequence
  Description of Artificial Sequence: Synthetic peptide
  Seed: MDPRMCSLMQGSTLPRRSGA
MDPRMWSLMQGSTCPRRSGA

SEQ ID NO: 103096 - protein, 20 aa, Artificial Sequence
  Description of Artificial Sequence: Synthetic peptide
  Seed: MDPRMCSLMQGSTLPRRSGA
MDPRMWSLMQGSTGPRRSGA

SEQ ID NO: 103097 - protein, 20 aa, Artificial Sequence
  Description of Artificial Sequence: Synthetic peptide
  Seed: MDPRMCSLMQGSTLPRRSGA
MDPRMWSLMQGSTIPRRSGA

SEQ ID NO: 103098 - protein, 20 aa, Artificial Sequence
  Description of Artificial Sequence: Synthetic peptide
  Seed: MDPRMCSLMQGSTLPRRSGA
MDPRMWSLMQGSTLPRRSGA

SEQ ID NO: 103099 - protein, 20 aa, Artificial Sequence
  Description of Artificial Sequence: Synthetic peptide
  Seed: MDPRMCSLMQGSTLPRRSGA
MDPRMWSLMQGSTMPRRSGA

SEQ ID NO: 103100 - protein, 20 aa, Artificial Sequence
  Description of Artificial Sequence: Synthetic peptide
  Seed: MDPRMCSLMQGSTLPRRSGA
MDPRMWSLMQGSTNPRRSGA

SEQ ID NO: 103101 - protein, 20 aa, Artificial Sequence
  Description of Artificial Sequence: Synthetic peptide
  Seed: MDPRMCSLMQGSTLPRRSGA
MDPRMWSLMQGSTSPRRSGA

SEQ ID NO: 103102 - protein, 20 aa, Artificial Sequence
  Description of Artificial Sequence: Synthetic peptide
  Seed: MDPRMCSLMQGSTLPRRSGA
MDPRMWSLMQGSTTPRRSGA

SEQ ID NO: 103103 - protein, 20 aa, Artificial Sequence
  Description of Artificial Sequence: Synthetic peptide
  Seed: MDPRMCSLMQGSTLPRRSGA
MDPRMWSLMQGSTVPRRSGA

SEQ ID NO: 103104 - protein, 20 aa, Artificial Sequence
  Description of Artificial Sequence: Synthetic peptide
  Seed: MDPRMCSLMQGSTLPRRSGA
MDPRMWSLMQISTAPRRSGA

SEQ ID NO: 103105 - protein, 20 aa, Artificial Sequence
  Description of Artificial Sequence: Synthetic peptide
  Seed: MDPRMCSLMQGSTLPRRSGA
MDPRMWSLMQISTGPRRSGA

SEQ ID NO: 103106 - protein, 20 aa, Artificial Sequence
  Description of Artificial Sequence: Synthetic peptide
  Seed: MDPRMCSLMQGSTLPRRSGA
MDPRMWSLMQISTIPRRSGA

SEQ ID NO: 103107 - protein, 20 aa, Artificial Sequence
  Description of Artificial Sequence: Synthetic peptide
  Seed: MDPRMCSLMQGSTLPRRSGA
MDPRMWSLMQISTLPRRSGA

SEQ ID NO: 103108 - protein, 20 aa, Artificial Sequence
  Description of Artificial Sequence: Synthetic peptide
  Seed: MDPRMCSLMQGSTLPRRSGA
MDPRMWSLMQISTMPRRSGA

SEQ ID NO: 103109 - protein, 20 aa, Artificial Sequence
  Description of Artificial Sequence: Synthetic peptide
  Seed: MDPRMCSLMQGSTLPRRSGA
MDPRMWSLMQISTNPRRSGA

SEQ ID NO: 103110 - protein, 20 aa, Artificial Sequence
  Description of Artificial Sequence: Synthetic peptide
  Seed: MDPRMCSLMQGSTLPRRSGA
MDPRMWSLMQISTSPRRSGA

SEQ ID NO: 103111 - protein, 20 aa, Artificial Sequence
  Description of Artificial Sequence: Synthetic peptide
  Seed: MDPRMCSLMQGSTLPRRSGA
MDPRMWSLMQISTTPRRSGA

SEQ ID NO: 103112 - protein, 20 aa, Artificial Sequence
  Description of Artificial Sequence: Synthetic peptide
  Seed: MDPRMCSLMQGSTLPRRSGA
MDPRMWSLMQISTVPRRSGA

SEQ ID NO: 103113 - protein, 20 aa, Artificial Sequence
  Description of Artificial Sequence: Synthetic peptide
  Seed: MDPRMCSLMQGSTLPRRSGA
MDPRMWSLMQLSTAPRRSGA

SEQ ID NO: 103114 - protein, 20 aa, Artificial Sequence
  Description of Artificial Sequence: Synthetic peptide
  Seed: MDPRMCSLMQGSTLPRRSGA
MDPRMWSLMQLSTNPRRSGA

SEQ ID NO: 103115 - protein, 20 aa, Artificial Sequence
  Description of Artificial Sequence: Synthetic peptide
  Seed: MDPRMCSLMQGSTLPRRSGA
MDPRMWSLMQLSTSPRRSGA

SEQ ID NO: 103116 - protein, 20 aa, Artificial Sequence
  Description of Artificial Sequence: Synthetic peptide
  Seed: MDPRMCSLMQGSTLPRRSGA
MDPRMWSLMQMSTAPRRSGA

SEQ ID NO: 103117 - protein, 20 aa, Artificial Sequence
  Description of Artificial Sequence: Synthetic peptide
  Seed: MDPRMCSLMQGSTLPRRSGA
MDPRMWSLMQMSTNPRRSGA

SEQ ID NO: 103118 - protein, 20 aa, Artificial Sequence
  Description of Artificial Sequence: Synthetic peptide
  Seed: MDPRMCSLMQGSTLPRRSGA
MDPRMWSLMQMSTSPRRSGA

SEQ ID NO: 103119 - protein, 20 aa, Artificial Sequence
  Description of Artificial Sequence: Synthetic peptide
  Seed: MDPRMCSLMQGSTLPRRSGA
MDPRMWSLMQNSTAPRRSGA

SEQ ID NO: 103120 - protein, 20 aa, Artificial Sequence
  Description of Artificial Sequence: Synthetic peptide
  Seed: MDPRMCSLMQGSTLPRRSGA
MDPRMWSLMQNSTIPRRSGA

SEQ ID NO: 103121 - protein, 20 aa, Artificial Sequence
  Description of Artificial Sequence: Synthetic peptide
  Seed: MDPRMCSLMQGSTLPRRSGA
MDPRMWSLMQNSTLPRRSGA

SEQ ID NO: 103122 - protein, 20 aa, Artificial Sequence
  Description of Artificial Sequence: Synthetic peptide
  Seed: MDPRMCSLMQGSTLPRRSGA
MDPRMWSLMQNSTMPRRSGA

SEQ ID NO: 103123 - protein, 20 aa, Artificial Sequence
  Description of Artificial Sequence: Synthetic peptide
  Seed: MDPRMCSLMQGSTLPRRSGA
MDPRMWSLMQNSTNPRRSGA

SEQ ID NO: 103124 - protein, 20 aa, Artificial Sequence
  Description of Artificial Sequence: Synthetic peptide
  Seed: MDPRMCSLMQGSTLPRRSGA
MDPRMWSLMQNSTSPRRSGA

SEQ ID NO: 103125 - protein, 20 aa, Artificial Sequence
  Description of Artificial Sequence: Synthetic peptide
  Seed: MDPRMCSLMQGSTLPRRSGA
MDPRMWSLMQNSTTPRRSGA

SEQ ID NO: 103126 - protein, 20 aa, Artificial Sequence
  Description of Artificial Sequence: Synthetic peptide
  Seed: MDPRMCSLMQGSTLPRRSGA
MDPRMWSLMQNSTVPRRSGA

SEQ ID NO: 103127 - protein, 20 aa, Artificial Sequence
  Description of Artificial Sequence: Synthetic peptide
  Seed: MDPRMCSLMQGSTLPRRSGA
MDPRMWSLMQPSTAPRRSGA

SEQ ID NO: 103128 - protein, 20 aa, Artificial Sequence
  Description of Artificial Sequence: Synthetic peptide
  Seed: MDPRMCSLMQGSTLPRRSGA
MDPRMWSLMQPSTGPRRSGA

SEQ ID NO: 103129 - protein, 20 aa, Artificial Sequence
  Description of Artificial Sequence: Synthetic peptide
  Seed: MDPRMCSLMQGSTLPRRSGA
MDPRMWSLMQPSTHPRRSGA

SEQ ID NO: 103130 - protein, 20 aa, Artificial Sequence
  Description of Artificial Sequence: Synthetic peptide
  Seed: MDPRMCSLMQGSTLPRRSGA
MDPRMWSLMQPSTIPRRSGA

SEQ ID NO: 103131 - protein, 20 aa, Artificial Sequence
  Description of Artificial Sequence: Synthetic peptide
  Seed: MDPRMCSLMQGSTLPRRSGA
MDPRMWSLMQPSTLPRRSGA

SEQ ID NO: 103132 - protein, 20 aa, Artificial Sequence
  Description of Artificial Sequence: Synthetic peptide
  Seed: MDPRMCSLMQGSTLPRRSGA
MDPRMWSLMQPSTMPRRSGA

SEQ ID NO: 103133 - protein, 20 aa, Artificial Sequence
  Description of Artificial Sequence: Synthetic peptide
  Seed: MDPRMCSLMQGSTLPRRSGA
MDPRMWSLMQPSTNPRRSGA

SEQ ID NO: 103134 - protein, 20 aa, Artificial Sequence
  Description of Artificial Sequence: Synthetic peptide
  Seed: MDPRMCSLMQGSTLPRRSGA
MDPRMWSLMQPSTQPRRSGA

SEQ ID NO: 103135 - protein, 20 aa, Artificial Sequence
  Description of Artificial Sequence: Synthetic peptide
  Seed: MDPRMCSLMQGSTLPRRSGA
MDPRMWSLMQPSTSPRRSGA

SEQ ID NO: 103136 - protein, 20 aa, Artificial Sequence
  Description of Artificial Sequence: Synthetic peptide
  Seed: MDPRMCSLMQGSTLPRRSGA
MDPRMWSLMQPSTTPRRSGA

SEQ ID NO: 103137 - protein, 20 aa, Artificial Sequence
  Description of Artificial Sequence: Synthetic peptide
  Seed: MDPRMCSLMQGSTLPRRSGA
MDPRMWSLMQPSTVPRRSGA

SEQ ID NO: 103138 - protein, 20 aa, Artificial Sequence
  Description of Artificial Sequence: Synthetic peptide
  Seed: MDPRMCSLMQGSTLPRRSGA
MDPRMWSLMQSSTAPRRSGA

SEQ ID NO: 103139 - protein, 20 aa, Artificial Sequence
  Description of Artificial Sequence: Synthetic peptide
  Seed: MDPRMCSLMQGSTLPRRSGA
MDPRMWSLMQSSTGPRRSGA

SEQ ID NO: 103140 - protein, 20 aa, Artificial Sequence
  Description of Artificial Sequence: Synthetic peptide
  Seed: MDPRMCSLMQGSTLPRRSGA
MDPRMWSLMQSSTHPRRSGA

SEQ ID NO: 103141 - protein, 20 aa, Artificial Sequence
  Description of Artificial Sequence: Synthetic peptide
  Seed: MDPRMCSLMQGSTLPRRSGA
MDPRMWSLMQSSTIPRRSGA

SEQ ID NO: 103142 - protein, 20 aa, Artificial Sequence
  Description of Artificial Sequence: Synthetic peptide
  Seed: MDPRMCSLMQGSTLPRRSGA
MDPRMWSLMQSSTLPRRSGA

SEQ ID NO: 103143 - protein, 20 aa, Artificial Sequence
  Description of Artificial Sequence: Synthetic peptide
  Seed: MDPRMCSLMQGSTLPRRSGA
MDPRMWSLMQSSTMPRRSGA

SEQ ID NO: 103144 - protein, 20 aa, Artificial Sequence
  Description of Artificial Sequence: Synthetic peptide
  Seed: MDPRMCSLMQGSTLPRRSGA
MDPRMWSLMQSSTNPRRSGA

SEQ ID NO: 103145 - protein, 20 aa, Artificial Sequence
  Description of Artificial Sequence: Synthetic peptide
  Seed: MDPRMCSLMQGSTLPRRSGA
MDPRMWSLMQSSTQPRRSGA

SEQ ID NO: 103146 - protein, 20 aa, Artificial Sequence
  Description of Artificial Sequence: Synthetic peptide
  Seed: MDPRMCSLMQGSTLPRRSGA
MDPRMWSLMQSSTSPRRSGA

SEQ ID NO: 103147 - protein, 20 aa, Artificial Sequence
  Description of Artificial Sequence: Synthetic peptide
  Seed: MDPRMCSLMQGSTLPRRSGA
MDPRMWSLMQSSTTPRRSGA

SEQ ID NO: 103148 - protein, 20 aa, Artificial Sequence
  Description of Artificial Sequence: Synthetic peptide
  Seed: MDPRMCSLMQGSTLPRRSGA
MDPRMWSLMQSSTVPRRSGA

SEQ ID NO: 103149 - protein, 20 aa, Artificial Sequence
  Description of Artificial Sequence: Synthetic peptide
  Seed: MDPRMCSLMQGSTLPRRSGA
MDPRMWSLMQTSTAPRRSGA

SEQ ID NO: 103150 - protein, 20 aa, Artificial Sequence
  Description of Artificial Sequence: Synthetic peptide
  Seed: MDPRMCSLMQGSTLPRRSGA
MDPRMWSLMQTSTGPRRSGA

SEQ ID NO: 103151 - protein, 20 aa, Artificial Sequence
  Description of Artificial Sequence: Synthetic peptide
  Seed: MDPRMCSLMQGSTLPRRSGA
MDPRMWSLMQTSTHPRRSGA

SEQ ID NO: 103152 - protein, 20 aa, Artificial Sequence
  Description of Artificial Sequence: Synthetic peptide
  Seed: MDPRMCSLMQGSTLPRRSGA
MDPRMWSLMQTSTIPRRSGA

SEQ ID NO: 103153 - protein, 20 aa, Artificial Sequence
  Description of Artificial Sequence: Synthetic peptide
  Seed: MDPRMCSLMQGSTLPRRSGA
MDPRMWSLMQTSTLPRRSGA

SEQ ID NO: 103154 - protein, 20 aa, Artificial Sequence
  Description of Artificial Sequence: Synthetic peptide
  Seed: MDPRMCSLMQGSTLPRRSGA
MDPRMWSLMQTSTMPRRSGA

SEQ ID NO: 103155 - protein, 20 aa, Artificial Sequence
  Description of Artificial Sequence: Synthetic peptide
  Seed: MDPRMCSLMQGSTLPRRSGA
MDPRMWSLMQTSTNPRRSGA

SEQ ID NO: 103156 - protein, 20 aa, Artificial Sequence
  Description of Artificial Sequence: Synthetic peptide
  Seed: MDPRMCSLMQGSTLPRRSGA
MDPRMWSLMQTSTQPRRSGA

SEQ ID NO: 103157 - protein, 20 aa, Artificial Sequence
  Description of Artificial Sequence: Synthetic peptide
  Seed: MDPRMCSLMQGSTLPRRSGA
MDPRMWSLMQTSTSPRRSGA

SEQ ID NO: 103158 - protein, 20 aa, Artificial Sequence
  Description of Artificial Sequence: Synthetic peptide
  Seed: MDPRMCSLMQGSTLPRRSGA
MDPRMWSLMQTSTTPRRSGA

SEQ ID NO: 103159 - protein, 20 aa, Artificial Sequence
  Description of Artificial Sequence: Synthetic peptide
  Seed: MDPRMCSLMQGSTLPRRSGA
MDPRMWSLMQTSTVPRRSGA

SEQ ID NO: 103160 - protein, 20 aa, Artificial Sequence
  Description of Artificial Sequence: Synthetic peptide
  Seed: MDPRMCSLMQGSTLPRRSGA
MDPRMWSLMQVSTAPRRSGA

SEQ ID NO: 103161 - protein, 20 aa, Artificial Sequence
  Description of Artificial Sequence: Synthetic peptide
  Seed: MDPRMCSLMQGSTLPRRSGA
MDPRMWSLMQVSTGPRRSGA

SEQ ID NO: 103162 - protein, 20 aa, Artificial Sequence
  Description of Artificial Sequence: Synthetic peptide
  Seed: MDPRMCSLMQGSTLPRRSGA
MDPRMWSLMQVSTHPRRSGA

SEQ ID NO: 103163 - protein, 20 aa, Artificial Sequence
  Description of Artificial Sequence: Synthetic peptide
  Seed: MDPRMCSLMQGSTLPRRSGA
MDPRMWSLMQVSTIPRRSGA

SEQ ID NO: 103164 - protein, 20 aa, Artificial Sequence
  Description of Artificial Sequence: Synthetic peptide
  Seed: MDPRMCSLMQGSTLPRRSGA
MDPRMWSLMQVSTLPRRSGA

SEQ ID NO: 103165 - protein, 20 aa, Artificial Sequence
  Description of Artificial Sequence: Synthetic peptide
  Seed: MDPRMCSLMQGSTLPRRSGA
MDPRMWSLMQVSTMPRRSGA

SEQ ID NO: 103166 - protein, 20 aa, Artificial Sequence
  Description of Artificial Sequence: Synthetic peptide
  Seed: MDPRMCSLMQGSTLPRRSGA
MDPRMWSLMQVSTNPRRSGA

SEQ ID NO: 103167 - protein, 20 aa, Artificial Sequence
  Description of Artificial Sequence: Synthetic peptide
  Seed: MDPRMCSLMQGSTLPRRSGA
MDPRMWSLMQVSTQPRRSGA

SEQ ID NO: 103168 - protein, 20 aa, Artificial Sequence
  Description of Artificial Sequence: Synthetic peptide
  Seed: MDPRMCSLMQGSTLPRRSGA
MDPRMWSLMQVSTSPRRSGA

SEQ ID NO: 103169 - protein, 20 aa, Artificial Sequence
  Description of Artificial Sequence: Synthetic peptide
  Seed: MDPRMCSLMQGSTLPRRSGA
MDPRMWSLMQVSTTPRRSGA

SEQ ID NO: 103170 - protein, 20 aa, Artificial Sequence
  Description of Artificial Sequence: Synthetic peptide
  Seed: MDPRMCSLMQGSTLPRRSGA
MDPRMWSLMQVSTVPRRSGA

SEQ ID NO: 103171 - protein, 20 aa, Artificial Sequence
  Description of Artificial Sequence: Synthetic peptide
  Seed: MDPRMCSLMQGSTLPRRSGA
MDPRMWSLNQASTLPRRSGA

SEQ ID NO: 103172 - protein, 20 aa, Artificial Sequence
  Description of Artificial Sequence: Synthetic peptide
  Seed: MDPRMCSLMQGSTLPRRSGA
MDPRMWSLNQASTVPRRSGA

SEQ ID NO: 103173 - protein, 20 aa, Artificial Sequence
  Description of Artificial Sequence: Synthetic peptide
  Seed: MDPRMCSLMQGSTLPRRSGA
MDPRMWSLQQASTAPRRSGA

SEQ ID NO: 103174 - protein, 20 aa, Artificial Sequence
  Description of Artificial Sequence: Synthetic peptide
  Seed: MDPRMCSLMQGSTLPRRSGA
MDPRMWSLQQASTIPRRSGA

SEQ ID NO: 103175 - protein, 20 aa, Artificial Sequence
  Description of Artificial Sequence: Synthetic peptide
  Seed: MDPRMCSLMQGSTLPRRSGA
MDPRMWSLQQASTLPRRSGA

SEQ ID NO: 103176 - protein, 20 aa, Artificial Sequence
  Description of Artificial Sequence: Synthetic peptide
  Seed: MDPRMCSLMQGSTLPRRSGA
MDPRMWSLQQASTMPRRSGA

SEQ ID NO: 103177 - protein, 20 aa, Artificial Sequence
  Description of Artificial Sequence: Synthetic peptide
  Seed: MDPRMCSLMQGSTLPRRSGA
MDPRMWSLQQASTSPRRSGA

SEQ ID NO: 103178 - protein, 20 aa, Artificial Sequence
  Description of Artificial Sequence: Synthetic peptide
  Seed: MDPRMCSLMQGSTLPRRSGA
MDPRMWSLQQASTTPRRSGA

SEQ ID NO: 103179 - protein, 20 aa, Artificial Sequence
  Description of Artificial Sequence: Synthetic peptide
  Seed: MDPRMCSLMQGSTLPRRSGA
MDPRMWSLQQASTVPRRSGA

SEQ ID NO: 103180 - protein, 20 aa, Artificial Sequence
  Description of Artificial Sequence: Synthetic peptide
  Seed: MDPRMCSLMQGSTLPRRSGA
MDPRMWSLQQGSTAPRRSGA

SEQ ID NO: 103181 - protein, 20 aa, Artificial Sequence
  Description of Artificial Sequence: Synthetic peptide
  Seed: MDPRMCSLMQGSTLPRRSGA
MDPRMWSLQQGSTIPRRSGA

SEQ ID NO: 103182 - protein, 20 aa, Artificial Sequence
  Description of Artificial Sequence: Synthetic peptide
  Seed: MDPRMCSLMQGSTLPRRSGA
MDPRMWSLQQGSTLPRRSGA

SEQ ID NO: 103183 - protein, 20 aa, Artificial Sequence
  Description of Artificial Sequence: Synthetic peptide
  Seed: MDPRMCSLMQGSTLPRRSGA
MDPRMWSLQQGSTVPRRSGA

SEQ ID NO: 103184 - protein, 20 aa, Artificial Sequence
  Description of Artificial Sequence: Synthetic peptide
  Seed: MDPRMCSLMQGSTLPRRSGA
MDPRMWSLQQPSTIPRRSGA

SEQ ID NO: 103185 - protein, 20 aa, Artificial Sequence
  Description of Artificial Sequence: Synthetic peptide
  Seed: MDPRMCSLMQGSTLPRRSGA
MDPRMWSLQQPSTLPRRSGA

SEQ ID NO: 103186 - protein, 20 aa, Artificial Sequence
  Description of Artificial Sequence: Synthetic peptide
  Seed: MDPRMCSLMQGSTLPRRSGA
MDPRMWSLQQPSTVPRRSGA

SEQ ID NO: 103187 - protein, 20 aa, Artificial Sequence
  Description of Artificial Sequence: Synthetic peptide
  Seed: MDPRMCSLMQGSTLPRRSGA
MDPRMWSLQQSSTAPRRSGA

SEQ ID NO: 103188 - protein, 20 aa, Artificial Sequence
  Description of Artificial Sequence: Synthetic peptide
  Seed: MDPRMCSLMQGSTLPRRSGA
MDPRMWSLQQSSTIPRRSGA

SEQ ID NO: 103189 - protein, 20 aa, Artificial Sequence
  Description of Artificial Sequence: Synthetic peptide
  Seed: MDPRMCSLMQGSTLPRRSGA
MDPRMWSLQQSSTLPRRSGA

SEQ ID NO: 103190 - protein, 20 aa, Artificial Sequence
  Description of Artificial Sequence: Synthetic peptide
  Seed: MDPRMCSLMQGSTLPRRSGA
MDPRMWSLQQSSTVPRRSGA

SEQ ID NO: 103191 - protein, 20 aa, Artificial Sequence
  Description of Artificial Sequence: Synthetic peptide
  Seed: MDPRMCSLMQGSTLPRRSGA
MDPRMWSLQQVSTAPRRSGA

SEQ ID NO: 103192 - protein, 20 aa, Artificial Sequence
  Description of Artificial Sequence: Synthetic peptide
  Seed: MDPRMCSLMQGSTLPRRSGA
MDPRMWSLSQASTAPRRSGA

SEQ ID NO: 103193 - protein, 20 aa, Artificial Sequence
  Description of Artificial Sequence: Synthetic peptide
  Seed: MDPRMCSLMQGSTLPRRSGA
MDPRMWSLSQASTIPRRSGA

SEQ ID NO: 103194 - protein, 20 aa, Artificial Sequence
  Description of Artificial Sequence: Synthetic peptide
  Seed: MDPRMCSLMQGSTLPRRSGA
MDPRMWSLSQASTLPRRSGA

SEQ ID NO: 103195 - protein, 20 aa, Artificial Sequence
  Description of Artificial Sequence: Synthetic peptide
  Seed: MDPRMCSLMQGSTLPRRSGA
MDPRMWSLSQASTVPRRSGA

SEQ ID NO: 103196 - protein, 20 aa, Artificial Sequence
  Description of Artificial Sequence: Synthetic peptide
  Seed: MDPRMCSLMQGSTLPRRSGA
MDPRMWSLSQSSTIPRRSGA

SEQ ID NO: 103197 - protein, 20 aa, Artificial Sequence
  Description of Artificial Sequence: Synthetic peptide
  Seed: MDPRMCSLMQGSTLPRRSGA
MDPRMWSLTQASTLPRRSGA

SEQ ID NO: 103198 - protein, 20 aa, Artificial Sequence
  Description of Artificial Sequence: Synthetic peptide
  Seed: MDPRMCSLMQGSTLPRRSGA
MDPRMWSLTQASTVPRRSGA

SEQ ID NO: 103199 - protein, 20 aa, Artificial Sequence
  Description of Artificial Sequence: Synthetic peptide
  Seed: MDPRMCSLMQGSTLPRRSGA
MDPRMWSLVQASTAPRRSGA

SEQ ID NO: 103200 - protein, 20 aa, Artificial Sequence
  Description of Artificial Sequence: Synthetic peptide
  Seed: MDPRMCSLMQGSTLPRRSGA
MDPRMWSLVQASTIPRRSGA

SEQ ID NO: 103201 - protein, 20 aa, Artificial Sequence
  Description of Artificial Sequence: Synthetic peptide
  Seed: MDPRMCSLMQGSTLPRRSGA
MDPRMWSLVQASTLPRRSGA

SEQ ID NO: 103202 - protein, 20 aa, Artificial Sequence
  Description of Artificial Sequence: Synthetic peptide
  Seed: MDPRMCSLMQGSTLPRRSGA
MDPRMWSLVQASTMPRRSGA

SEQ ID NO: 103203 - protein, 20 aa, Artificial Sequence
  Description of Artificial Sequence: Synthetic peptide
  Seed: MDPRMCSLMQGSTLPRRSGA
MDPRMWSLVQASTNPRRSGA

SEQ ID NO: 103204 - protein, 20 aa, Artificial Sequence
  Description of Artificial Sequence: Synthetic peptide
  Seed: MDPRMCSLMQGSTLPRRSGA
MDPRMWSLVQASTSPRRSGA

SEQ ID NO: 103205 - protein, 20 aa, Artificial Sequence
  Description of Artificial Sequence: Synthetic peptide
  Seed: MDPRMCSLMQGSTLPRRSGA
MDPRMWSLVQASTTPRRSGA

SEQ ID NO: 103206 - protein, 20 aa, Artificial Sequence
  Description of Artificial Sequence: Synthetic peptide
  Seed: MDPRMCSLMQGSTLPRRSGA
MDPRMWSLVQASTVPRRSGA

SEQ ID NO: 103207 - protein, 20 aa, Artificial Sequence
  Description of Artificial Sequence: Synthetic peptide
  Seed: MDPRMCSLMQGSTLPRRSGA
MDPRMWSLVQGSTAPRRSGA

SEQ ID NO: 103208 - protein, 20 aa, Artificial Sequence
  Description of Artificial Sequence: Synthetic peptide
  Seed: MDPRMCSLMQGSTLPRRSGA
MDPRMWSLVQGSTIPRRSGA

SEQ ID NO: 103209 - protein, 20 aa, Artificial Sequence
  Description of Artificial Sequence: Synthetic peptide
  Seed: MDPRMCSLMQGSTLPRRSGA
MDPRMWSLVQGSTLPRRSGA

SEQ ID NO: 103210 - protein, 20 aa, Artificial Sequence
  Description of Artificial Sequence: Synthetic peptide
  Seed: MDPRMCSLMQGSTLPRRSGA
MDPRMWSLVQGSTVPRRSGA

SEQ ID NO: 103211 - protein, 20 aa, Artificial Sequence
  Description of Artificial Sequence: Synthetic peptide
  Seed: MDPRMCSLMQGSTLPRRSGA
MDPRMWSLVQISTAPRRSGA

SEQ ID NO: 103212 - protein, 20 aa, Artificial Sequence
  Description of Artificial Sequence: Synthetic peptide
  Seed: MDPRMCSLMQGSTLPRRSGA
MDPRMWSLVQPSTAPRRSGA

SEQ ID NO: 103213 - protein, 20 aa, Artificial Sequence
  Description of Artificial Sequence: Synthetic peptide
  Seed: MDPRMCSLMQGSTLPRRSGA
MDPRMWSLVQPSTIPRRSGA

SEQ ID NO: 103214 - protein, 20 aa, Artificial Sequence
  Description of Artificial Sequence: Synthetic peptide
  Seed: MDPRMCSLMQGSTLPRRSGA
MDPRMWSLVQPSTLPRRSGA

SEQ ID NO: 103215 - protein, 20 aa, Artificial Sequence
  Description of Artificial Sequence: Synthetic peptide
  Seed: MDPRMCSLMQGSTLPRRSGA
MDPRMWSLVQPSTNPRRSGA

SEQ ID NO: 103216 - protein, 20 aa, Artificial Sequence
  Description of Artificial Sequence: Synthetic peptide
  Seed: MDPRMCSLMQGSTLPRRSGA
MDPRMWSLVQPSTSPRRSGA

SEQ ID NO: 103217 - protein, 20 aa, Artificial Sequence
  Description of Artificial Sequence: Synthetic peptide
  Seed: MDPRMCSLMQGSTLPRRSGA
MDPRMWSLVQPSTVPRRSGA

SEQ ID NO: 103218 - protein, 20 aa, Artificial Sequence
  Description of Artificial Sequence: Synthetic peptide
  Seed: MDPRMCSLMQGSTLPRRSGA
MDPRMWSLVQSSTAPRRSGA

SEQ ID NO: 103219 - protein, 20 aa, Artificial Sequence
  Description of Artificial Sequence: Synthetic peptide
  Seed: MDPRMCSLMQGSTLPRRSGA
MDPRMWSLVQSSTIPRRSGA

SEQ ID NO: 103220 - protein, 20 aa, Artificial Sequence
  Description of Artificial Sequence: Synthetic peptide
  Seed: MDPRMCSLMQGSTLPRRSGA
MDPRMWSLVQSSTLPRRSGA

SEQ ID NO: 103221 - protein, 20 aa, Artificial Sequence
  Description of Artificial Sequence: Synthetic peptide
  Seed: MDPRMCSLMQGSTLPRRSGA
MDPRMWSLVQSSTNPRRSGA

SEQ ID NO: 103222 - protein, 20 aa, Artificial Sequence
  Description of Artificial Sequence: Synthetic peptide
  Seed: MDPRMCSLMQGSTLPRRSGA
MDPRMWSLVQSSTSPRRSGA

SEQ ID NO: 103223 - protein, 20 aa, Artificial Sequence
  Description of Artificial Sequence: Synthetic peptide
  Seed: MDPRMCSLMQGSTLPRRSGA
MDPRMWSLVQSSTVPRRSGA

SEQ ID NO: 103224 - protein, 20 aa, Artificial Sequence
  Description of Artificial Sequence: Synthetic peptide
  Seed: MDPRMCSLMQGSTLPRRSGA
MDPRMWSLVQTSTAPRRSGA

SEQ ID NO: 103225 - protein, 20 aa, Artificial Sequence
  Description of Artificial Sequence: Synthetic peptide
  Seed: MDPRMCSLMQGSTLPRRSGA
MDPRMWSLVQTSTNPRRSGA

SEQ ID NO: 103226 - protein, 20 aa, Artificial Sequence
  Description of Artificial Sequence: Synthetic peptide
  Seed: MDPRMCSLMQGSTLPRRSGA
MDPRMWSLVQTSTSPRRSGA

SEQ ID NO: 103227 - protein, 20 aa, Artificial Sequence
  Description of Artificial Sequence: Synthetic peptide
  Seed: MDPRMCSLMQGSTLPRRSGA
MDPRMWSLVQVSTAPRRSGA

SEQ ID NO: 103228 - protein, 20 aa, Artificial Sequence
  Description of Artificial Sequence: Synthetic peptide
  Seed: MDPRMCSLMQGSTLPRRSGA
MDPRMWSLVQVSTNPRRSGA

SEQ ID NO: 103229 - protein, 20 aa, Artificial Sequence
  Description of Artificial Sequence: Synthetic peptide
  Seed: MDPRMCSLMQGSTLPRRSGA
MDPRMWSLVQVSTSPRRSGA

SEQ ID NO: 103230 - protein, 20 aa, Artificial Sequence
  Description of Artificial Sequence: Synthetic peptide
  Seed: MDPRMCSLMQGSTLPRRSGA
MDPRMYSLAQASTAPRRSGA

SEQ ID NO: 103231 - protein, 20 aa, Artificial Sequence
  Description of Artificial Sequence: Synthetic peptide
  Seed: MDPRMCSLMQGSTLPRRSGA
MDPRMYSLAQASTCPRRSGA

SEQ ID NO: 103232 - protein, 20 aa, Artificial Sequence
  Description of Artificial Sequence: Synthetic peptide
  Seed: MDPRMCSLMQGSTLPRRSGA
MDPRMYSLAQASTDPRRSGA

SEQ ID NO: 103233 - protein, 20 aa, Artificial Sequence
  Description of Artificial Sequence: Synthetic peptide
  Seed: MDPRMCSLMQGSTLPRRSGA
MDPRMYSLAQASTEPRRSGA

SEQ ID NO: 103234 - protein, 20 aa, Artificial Sequence
  Description of Artificial Sequence: Synthetic peptide
  Seed: MDPRMCSLMQGSTLPRRSGA
MDPRMYSLAQASTFPRRSGA

SEQ ID NO: 103235 - protein, 20 aa, Artificial Sequence
  Description of Artificial Sequence: Synthetic peptide
  Seed: MDPRMCSLMQGSTLPRRSGA
MDPRMYSLAQASTGPRRSGA

SEQ ID NO: 103236 - protein, 20 aa, Artificial Sequence
  Description of Artificial Sequence: Synthetic peptide
  Seed: MDPRMCSLMQGSTLPRRSGA
MDPRMYSLAQASTHPRRSGA

SEQ ID NO: 103237 - protein, 20 aa, Artificial Sequence
  Description of Artificial Sequence: Synthetic peptide
  Seed: MDPRMCSLMQGSTLPRRSGA
MDPRMYSLAQASTIPRRSGA

SEQ ID NO: 103238 - protein, 20 aa, Artificial Sequence
  Description of Artificial Sequence: Synthetic peptide
  Seed: MDPRMCSLMQGSTLPRRSGA
MDPRMYSLAQASTLPRRSGA

SEQ ID NO: 103239 - protein, 20 aa, Artificial Sequence
  Description of Artificial Sequence: Synthetic peptide
  Seed: MDPRMCSLMQGSTLPRRSGA
MDPRMYSLAQASTMPRRSGA

SEQ ID NO: 103240 - protein, 20 aa, Artificial Sequence
  Description of Artificial Sequence: Synthetic peptide
  Seed: MDPRMCSLMQGSTLPRRSGA
MDPRMYSLAQASTNPRRSGA

SEQ ID NO: 103241 - protein, 20 aa, Artificial Sequence
  Description of Artificial Sequence: Synthetic peptide
  Seed: MDPRMCSLMQGSTLPRRSGA
MDPRMYSLAQASTPPRRSGA

SEQ ID NO: 103242 - protein, 20 aa, Artificial Sequence
  Description of Artificial Sequence: Synthetic peptide
  Seed: MDPRMCSLMQGSTLPRRSGA
MDPRMYSLAQASTQPRRSGA

SEQ ID NO: 103243 - protein, 20 aa, Artificial Sequence
  Description of Artificial Sequence: Synthetic peptide
  Seed: MDPRMCSLMQGSTLPRRSGA
MDPRMYSLAQASTSPRRSGA

SEQ ID NO: 103244 - protein, 20 aa, Artificial Sequence
  Description of Artificial Sequence: Synthetic peptide
  Seed: MDPRMCSLMQGSTLPRRSGA
MDPRMYSLAQASTTPRRSGA

SEQ ID NO: 103245 - protein, 20 aa, Artificial Sequence
  Description of Artificial Sequence: Synthetic peptide
  Seed: MDPRMCSLMQGSTLPRRSGA
MDPRMYSLAQASTVPRRSGA

SEQ ID NO: 103246 - protein, 20 aa, Artificial Sequence
  Description of Artificial Sequence: Synthetic peptide
  Seed: MDPRMCSLMQGSTLPRRSGA
MDPRMYSLAQASTYPRRSGA

SEQ ID NO: 103247 - protein, 20 aa, Artificial Sequence
  Description of Artificial Sequence: Synthetic peptide
  Seed: MDPRMCSLMQGSTLPRRSGA
MDPRMYSLAQGSTAPRRSGA

SEQ ID NO: 103248 - protein, 20 aa, Artificial Sequence
  Description of Artificial Sequence: Synthetic peptide
  Seed: MDPRMCSLMQGSTLPRRSGA
MDPRMYSLAQGSTGPRRSGA

SEQ ID NO: 103249 - protein, 20 aa, Artificial Sequence
  Description of Artificial Sequence: Synthetic peptide
  Seed: MDPRMCSLMQGSTLPRRSGA
MDPRMYSLAQGSTIPRRSGA

SEQ ID NO: 103250 - protein, 20 aa, Artificial Sequence
  Description of Artificial Sequence: Synthetic peptide
  Seed: MDPRMCSLMQGSTLPRRSGA
MDPRMYSLAQGSTLPRRSGA

SEQ ID NO: 103251 - protein, 20 aa, Artificial Sequence
  Description of Artificial Sequence: Synthetic peptide
  Seed: MDPRMCSLMQGSTLPRRSGA
MDPRMYSLAQGSTMPRRSGA

SEQ ID NO: 103252 - protein, 20 aa, Artificial Sequence
  Description of Artificial Sequence: Synthetic peptide
  Seed: MDPRMCSLMQGSTLPRRSGA
MDPRMYSLAQGSTNPRRSGA

SEQ ID NO: 103253 - protein, 20 aa, Artificial Sequence
  Description of Artificial Sequence: Synthetic peptide
  Seed: MDPRMCSLMQGSTLPRRSGA
MDPRMYSLAQGSTSPRRSGA

SEQ ID NO: 103254 - protein, 20 aa, Artificial Sequence
  Description of Artificial Sequence: Synthetic peptide
  Seed: MDPRMCSLMQGSTLPRRSGA
MDPRMYSLAQGSTTPRRSGA

SEQ ID NO: 103255 - protein, 20 aa, Artificial Sequence
  Description of Artificial Sequence: Synthetic peptide
  Seed: MDPRMCSLMQGSTLPRRSGA
MDPRMYSLAQGSTVPRRSGA

SEQ ID NO: 103256 - protein, 20 aa, Artificial Sequence
  Description of Artificial Sequence: Synthetic peptide
  Seed: MDPRMCSLMQGSTLPRRSGA
MDPRMYSLAQISTAPRRSGA

SEQ ID NO: 103257 - protein, 20 aa, Artificial Sequence
  Description of Artificial Sequence: Synthetic peptide
  Seed: MDPRMCSLMQGSTLPRRSGA
MDPRMYSLAQISTGPRRSGA

SEQ ID NO: 103258 - protein, 20 aa, Artificial Sequence
  Description of Artificial Sequence: Synthetic peptide
  Seed: MDPRMCSLMQGSTLPRRSGA
MDPRMYSLAQISTIPRRSGA

SEQ ID NO: 103259 - protein, 20 aa, Artificial Sequence
  Description of Artificial Sequence: Synthetic peptide
  Seed: MDPRMCSLMQGSTLPRRSGA
MDPRMYSLAQISTLPRRSGA

SEQ ID NO: 103260 - protein, 20 aa, Artificial Sequence
  Description of Artificial Sequence: Synthetic peptide
  Seed: MDPRMCSLMQGSTLPRRSGA
MDPRMYSLAQISTMPRRSGA

SEQ ID NO: 103261 - protein, 20 aa, Artificial Sequence
  Description of Artificial Sequence: Synthetic peptide
  Seed: MDPRMCSLMQGSTLPRRSGA
MDPRMYSLAQISTNPRRSGA

SEQ ID NO: 103262 - protein, 20 aa, Artificial Sequence
  Description of Artificial Sequence: Synthetic peptide
  Seed: MDPRMCSLMQGSTLPRRSGA
MDPRMYSLAQISTQPRRSGA

SEQ ID NO: 103263 - protein, 20 aa, Artificial Sequence
  Description of Artificial Sequence: Synthetic peptide
  Seed: MDPRMCSLMQGSTLPRRSGA
MDPRMYSLAQISTSPRRSGA

SEQ ID NO: 103264 - protein, 20 aa, Artificial Sequence
  Description of Artificial Sequence: Synthetic peptide
  Seed: MDPRMCSLMQGSTLPRRSGA
MDPRMYSLAQISTTPRRSGA

SEQ ID NO: 103265 - protein, 20 aa, Artificial Sequence
  Description of Artificial Sequence: Synthetic peptide
  Seed: MDPRMCSLMQGSTLPRRSGA
MDPRMYSLAQISTVPRRSGA

SEQ ID NO: 103266 - protein, 20 aa, Artificial Sequence
  Description of Artificial Sequence: Synthetic peptide
  Seed: MDPRMCSLMQGSTLPRRSGA
MDPRMYSLAQLSTAPRRSGA

SEQ ID NO: 103267 - protein, 20 aa, Artificial Sequence
  Description of Artificial Sequence: Synthetic peptide
  Seed: MDPRMCSLMQGSTLPRRSGA
MDPRMYSLAQLSTNPRRSGA

SEQ ID NO: 103268 - protein, 20 aa, Artificial Sequence
  Description of Artificial Sequence: Synthetic peptide
  Seed: MDPRMCSLMQGSTLPRRSGA
MDPRMYSLAQLSTSPRRSGA

SEQ ID NO: 103269 - protein, 20 aa, Artificial Sequence
  Description of Artificial Sequence: Synthetic peptide
  Seed: MDPRMCSLMQGSTLPRRSGA
MDPRMYSLAQLSTVPRRSGA

SEQ ID NO: 103270 - protein, 20 aa, Artificial Sequence
  Description of Artificial Sequence: Synthetic peptide
  Seed: MDPRMCSLMQGSTLPRRSGA
MDPRMYSLAQMSTAPRRSGA

SEQ ID NO: 103271 - protein, 20 aa, Artificial Sequence
  Description of Artificial Sequence: Synthetic peptide
  Seed: MDPRMCSLMQGSTLPRRSGA
MDPRMYSLAQMSTNPRRSGA

SEQ ID NO: 103272 - protein, 20 aa, Artificial Sequence
  Description of Artificial Sequence: Synthetic peptide
  Seed: MDPRMCSLMQGSTLPRRSGA
MDPRMYSLAQMSTSPRRSGA

SEQ ID NO: 103273 - protein, 20 aa, Artificial Sequence
  Description of Artificial Sequence: Synthetic peptide
  Seed: MDPRMCSLMQGSTLPRRSGA
MDPRMYSLAQMSTVPRRSGA

SEQ ID NO: 103274 - protein, 20 aa, Artificial Sequence
  Description of Artificial Sequence: Synthetic peptide
  Seed: MDPRMCSLMQGSTLPRRSGA
MDPRMYSLAQNSTAPRRSGA

SEQ ID NO: 103275 - protein, 20 aa, Artificial Sequence
  Description of Artificial Sequence: Synthetic peptide
  Seed: MDPRMCSLMQGSTLPRRSGA
MDPRMYSLAQNSTIPRRSGA

SEQ ID NO: 103276 - protein, 20 aa, Artificial Sequence
  Description of Artificial Sequence: Synthetic peptide
  Seed: MDPRMCSLMQGSTLPRRSGA
MDPRMYSLAQNSTLPRRSGA

SEQ ID NO: 103277 - protein, 20 aa, Artificial Sequence
  Description of Artificial Sequence: Synthetic peptide
  Seed: MDPRMCSLMQGSTLPRRSGA
MDPRMYSLAQNSTMPRRSGA

SEQ ID NO: 103278 - protein, 20 aa, Artificial Sequence
  Description of Artificial Sequence: Synthetic peptide
  Seed: MDPRMCSLMQGSTLPRRSGA
MDPRMYSLAQNSTNPRRSGA

SEQ ID NO: 103279 - protein, 20 aa, Artificial Sequence
  Description of Artificial Sequence: Synthetic peptide
  Seed: MDPRMCSLMQGSTLPRRSGA
MDPRMYSLAQNSTSPRRSGA

SEQ ID NO: 103280 - protein, 20 aa, Artificial Sequence
  Description of Artificial Sequence: Synthetic peptide
  Seed: MDPRMCSLMQGSTLPRRSGA
MDPRMYSLAQNSTVPRRSGA

SEQ ID NO: 103281 - protein, 20 aa, Artificial Sequence
  Description of Artificial Sequence: Synthetic peptide
  Seed: MDPRMCSLMQGSTLPRRSGA
MDPRMYSLAQPSTAPRRSGA

SEQ ID NO: 103282 - protein, 20 aa, Artificial Sequence
  Description of Artificial Sequence: Synthetic peptide
  Seed: MDPRMCSLMQGSTLPRRSGA
MDPRMYSLAQPSTGPRRSGA

SEQ ID NO: 103283 - protein, 20 aa, Artificial Sequence
  Description of Artificial Sequence: Synthetic peptide
  Seed: MDPRMCSLMQGSTLPRRSGA
MDPRMYSLAQPSTIPRRSGA

SEQ ID NO: 103284 - protein, 20 aa, Artificial Sequence
  Description of Artificial Sequence: Synthetic peptide
  Seed: MDPRMCSLMQGSTLPRRSGA
MDPRMYSLAQPSTLPRRSGA

SEQ ID NO: 103285 - protein, 20 aa, Artificial Sequence
  Description of Artificial Sequence: Synthetic peptide
  Seed: MDPRMCSLMQGSTLPRRSGA
MDPRMYSLAQPSTMPRRSGA

SEQ ID NO: 103286 - protein, 20 aa, Artificial Sequence
  Description of Artificial Sequence: Synthetic peptide
  Seed: MDPRMCSLMQGSTLPRRSGA
MDPRMYSLAQPSTNPRRSGA

SEQ ID NO: 103287 - protein, 20 aa, Artificial Sequence
  Description of Artificial Sequence: Synthetic peptide
  Seed: MDPRMCSLMQGSTLPRRSGA
MDPRMYSLAQPSTQPRRSGA

SEQ ID NO: 103288 - protein, 20 aa, Artificial Sequence
  Description of Artificial Sequence: Synthetic peptide
  Seed: MDPRMCSLMQGSTLPRRSGA
MDPRMYSLAQPSTSPRRSGA

SEQ ID NO: 103289 - protein, 20 aa, Artificial Sequence
  Description of Artificial Sequence: Synthetic peptide
  Seed: MDPRMCSLMQGSTLPRRSGA
MDPRMYSLAQPSTTPRRSGA

SEQ ID NO: 103290 - protein, 20 aa, Artificial Sequence
  Description of Artificial Sequence: Synthetic peptide
  Seed: MDPRMCSLMQGSTLPRRSGA
MDPRMYSLAQPSTVPRRSGA

SEQ ID NO: 103291 - protein, 20 aa, Artificial Sequence
  Description of Artificial Sequence: Synthetic peptide
  Seed: MDPRMCSLMQGSTLPRRSGA
MDPRMYSLAQSSTAPRRSGA

SEQ ID NO: 103292 - protein, 20 aa, Artificial Sequence
  Description of Artificial Sequence: Synthetic peptide
  Seed: MDPRMCSLMQGSTLPRRSGA
MDPRMYSLAQSSTGPRRSGA

SEQ ID NO: 103293 - protein, 20 aa, Artificial Sequence
  Description of Artificial Sequence: Synthetic peptide
  Seed: MDPRMCSLMQGSTLPRRSGA
MDPRMYSLAQSSTIPRRSGA

SEQ ID NO: 103294 - protein, 20 aa, Artificial Sequence
  Description of Artificial Sequence: Synthetic peptide
  Seed: MDPRMCSLMQGSTLPRRSGA
MDPRMYSLAQSSTLPRRSGA

SEQ ID NO: 103295 - protein, 20 aa, Artificial Sequence
  Description of Artificial Sequence: Synthetic peptide
  Seed: MDPRMCSLMQGSTLPRRSGA
MDPRMYSLAQSSTMPRRSGA

SEQ ID NO: 103296 - protein, 20 aa, Artificial Sequence
  Description of Artificial Sequence: Synthetic peptide
  Seed: MDPRMCSLMQGSTLPRRSGA
MDPRMYSLAQSSTNPRRSGA

SEQ ID NO: 103297 - protein, 20 aa, Artificial Sequence
  Description of Artificial Sequence: Synthetic peptide
  Seed: MDPRMCSLMQGSTLPRRSGA
MDPRMYSLAQSSTQPRRSGA

SEQ ID NO: 103298 - protein, 20 aa, Artificial Sequence
  Description of Artificial Sequence: Synthetic peptide
  Seed: MDPRMCSLMQGSTLPRRSGA
MDPRMYSLAQSSTSPRRSGA

SEQ ID NO: 103299 - protein, 20 aa, Artificial Sequence
  Description of Artificial Sequence: Synthetic peptide
  Seed: MDPRMCSLMQGSTLPRRSGA
MDPRMYSLAQSSTTPRRSGA

SEQ ID NO: 103300 - protein, 20 aa, Artificial Sequence
  Description of Artificial Sequence: Synthetic peptide
  Seed: MDPRMCSLMQGSTLPRRSGA
MDPRMYSLAQSSTVPRRSGA

SEQ ID NO: 103301 - protein, 20 aa, Artificial Sequence
  Description of Artificial Sequence: Synthetic peptide
  Seed: MDPRMCSLMQGSTLPRRSGA
MDPRMYSLAQTSTAPRRSGA

SEQ ID NO: 103302 - protein, 20 aa, Artificial Sequence
  Description of Artificial Sequence: Synthetic peptide
  Seed: MDPRMCSLMQGSTLPRRSGA
MDPRMYSLAQTSTGPRRSGA

SEQ ID NO: 103303 - protein, 20 aa, Artificial Sequence
  Description of Artificial Sequence: Synthetic peptide
  Seed: MDPRMCSLMQGSTLPRRSGA
MDPRMYSLAQTSTIPRRSGA

SEQ ID NO: 103304 - protein, 20 aa, Artificial Sequence
  Description of Artificial Sequence: Synthetic peptide
  Seed: MDPRMCSLMQGSTLPRRSGA
MDPRMYSLAQTSTLPRRSGA

SEQ ID NO: 103305 - protein, 20 aa, Artificial Sequence
  Description of Artificial Sequence: Synthetic peptide
  Seed: MDPRMCSLMQGSTLPRRSGA
MDPRMYSLAQTSTMPRRSGA

SEQ ID NO: 103306 - protein, 20 aa, Artificial Sequence
  Description of Artificial Sequence: Synthetic peptide
  Seed: MDPRMCSLMQGSTLPRRSGA
MDPRMYSLAQTSTNPRRSGA

SEQ ID NO: 103307 - protein, 20 aa, Artificial Sequence
  Description of Artificial Sequence: Synthetic peptide
  Seed: MDPRMCSLMQGSTLPRRSGA
MDPRMYSLAQTSTSPRRSGA

SEQ ID NO: 103308 - protein, 20 aa, Artificial Sequence
  Description of Artificial Sequence: Synthetic peptide
  Seed: MDPRMCSLMQGSTLPRRSGA
MDPRMYSLAQTSTTPRRSGA

SEQ ID NO: 103309 - protein, 20 aa, Artificial Sequence
  Description of Artificial Sequence: Synthetic peptide
  Seed: MDPRMCSLMQGSTLPRRSGA
MDPRMYSLAQTSTVPRRSGA

SEQ ID NO: 103310 - protein, 20 aa, Artificial Sequence
  Description of Artificial Sequence: Synthetic peptide
  Seed: MDPRMCSLMQGSTLPRRSGA
MDPRMYSLAQVSTAPRRSGA

SEQ ID NO: 103311 - protein, 20 aa, Artificial Sequence
  Description of Artificial Sequence: Synthetic peptide
  Seed: MDPRMCSLMQGSTLPRRSGA
MDPRMYSLAQVSTGPRRSGA

SEQ ID NO: 103312 - protein, 20 aa, Artificial Sequence
  Description of Artificial Sequence: Synthetic peptide
  Seed: MDPRMCSLMQGSTLPRRSGA
MDPRMYSLAQVSTHPRRSGA

SEQ ID NO: 103313 - protein, 20 aa, Artificial Sequence
  Description of Artificial Sequence: Synthetic peptide
  Seed: MDPRMCSLMQGSTLPRRSGA
MDPRMYSLAQVSTIPRRSGA

SEQ ID NO: 103314 - protein, 20 aa, Artificial Sequence
  Description of Artificial Sequence: Synthetic peptide
  Seed: MDPRMCSLMQGSTLPRRSGA
MDPRMYSLAQVSTLPRRSGA

SEQ ID NO: 103315 - protein, 20 aa, Artificial Sequence
  Description of Artificial Sequence: Synthetic peptide
  Seed: MDPRMCSLMQGSTLPRRSGA
MDPRMYSLAQVSTMPRRSGA

SEQ ID NO: 103316 - protein, 20 aa, Artificial Sequence
  Description of Artificial Sequence: Synthetic peptide
  Seed: MDPRMCSLMQGSTLPRRSGA
MDPRMYSLAQVSTNPRRSGA

SEQ ID NO: 103317 - protein, 20 aa, Artificial Sequence
  Description of Artificial Sequence: Synthetic peptide
  Seed: MDPRMCSLMQGSTLPRRSGA
MDPRMYSLAQVSTQPRRSGA

SEQ ID NO: 103318 - protein, 20 aa, Artificial Sequence
  Description of Artificial Sequence: Synthetic peptide
  Seed: MDPRMCSLMQGSTLPRRSGA
MDPRMYSLAQVSTSPRRSGA

SEQ ID NO: 103319 - protein, 20 aa, Artificial Sequence
  Description of Artificial Sequence: Synthetic peptide
  Seed: MDPRMCSLMQGSTLPRRSGA
MDPRMYSLAQVSTTPRRSGA

SEQ ID NO: 103320 - protein, 20 aa, Artificial Sequence
  Description of Artificial Sequence: Synthetic peptide
  Seed: MDPRMCSLMQGSTLPRRSGA
MDPRMYSLAQVSTVPRRSGA

SEQ ID NO: 103321 - protein, 20 aa, Artificial Sequence
  Description of Artificial Sequence: Synthetic peptide
  Seed: MDPRMCSLMQGSTLPRRSGA
MDPRMYSLCQASTIPRRSGA

SEQ ID NO: 103322 - protein, 20 aa, Artificial Sequence
  Description of Artificial Sequence: Synthetic peptide
  Seed: MDPRMCSLMQGSTLPRRSGA
MDPRMYSLCQASTLPRRSGA

SEQ ID NO: 103323 - protein, 20 aa, Artificial Sequence
  Description of Artificial Sequence: Synthetic peptide
  Seed: MDPRMCSLMQGSTLPRRSGA
MDPRMYSLCQASTVPRRSGA

SEQ ID NO: 103324 - protein, 20 aa, Artificial Sequence
  Description of Artificial Sequence: Synthetic peptide
  Seed: MDPRMCSLMQGSTLPRRSGA
MDPRMYSLEQASTAPRRSGA

SEQ ID NO: 103325 - protein, 20 aa, Artificial Sequence
  Description of Artificial Sequence: Synthetic peptide
  Seed: MDPRMCSLMQGSTLPRRSGA
MDPRMYSLEQASTIPRRSGA

SEQ ID NO: 103326 - protein, 20 aa, Artificial Sequence
  Description of Artificial Sequence: Synthetic peptide
  Seed: MDPRMCSLMQGSTLPRRSGA
MDPRMYSLEQASTLPRRSGA

SEQ ID NO: 103327 - protein, 20 aa, Artificial Sequence
  Description of Artificial Sequence: Synthetic peptide
  Seed: MDPRMCSLMQGSTLPRRSGA
MDPRMYSLEQASTMPRRSGA

SEQ ID NO: 103328 - protein, 20 aa, Artificial Sequence
  Description of Artificial Sequence: Synthetic peptide
  Seed: MDPRMCSLMQGSTLPRRSGA
MDPRMYSLEQASTSPRRSGA

SEQ ID NO: 103329 - protein, 20 aa, Artificial Sequence
  Description of Artificial Sequence: Synthetic peptide
  Seed: MDPRMCSLMQGSTLPRRSGA
MDPRMYSLEQASTVPRRSGA

SEQ ID NO: 103330 - protein, 20 aa, Artificial Sequence
  Description of Artificial Sequence: Synthetic peptide
  Seed: MDPRMCSLMQGSTLPRRSGA
MDPRMYSLEQGSTAPRRSGA

SEQ ID NO: 103331 - protein, 20 aa, Artificial Sequence
  Description of Artificial Sequence: Synthetic peptide
  Seed: MDPRMCSLMQGSTLPRRSGA
MDPRMYSLEQGSTIPRRSGA

SEQ ID NO: 103332 - protein, 20 aa, Artificial Sequence
  Description of Artificial Sequence: Synthetic peptide
  Seed: MDPRMCSLMQGSTLPRRSGA
MDPRMYSLEQGSTLPRRSGA

SEQ ID NO: 103333 - protein, 20 aa, Artificial Sequence
  Description of Artificial Sequence: Synthetic peptide
  Seed: MDPRMCSLMQGSTLPRRSGA
MDPRMYSLEQGSTVPRRSGA

SEQ ID NO: 103334 - protein, 20 aa, Artificial Sequence
  Description of Artificial Sequence: Synthetic peptide
  Seed: MDPRMCSLMQGSTLPRRSGA
MDPRMYSLEQSSTAPRRSGA

SEQ ID NO: 103335 - protein, 20 aa, Artificial Sequence
  Description of Artificial Sequence: Synthetic peptide
  Seed: MDPRMCSLMQGSTLPRRSGA
MDPRMYSLEQSSTIPRRSGA

SEQ ID NO: 103336 - protein, 20 aa, Artificial Sequence
  Description of Artificial Sequence: Synthetic peptide
  Seed: MDPRMCSLMQGSTLPRRSGA
MDPRMYSLEQSSTLPRRSGA

SEQ ID NO: 103337 - protein, 20 aa, Artificial Sequence
  Description of Artificial Sequence: Synthetic peptide
  Seed: MDPRMCSLMQGSTLPRRSGA
MDPRMYSLEQSSTVPRRSGA

SEQ ID NO: 103338 - protein, 20 aa, Artificial Sequence
  Description of Artificial Sequence: Synthetic peptide
  Seed: MDPRMCSLMQGSTLPRRSGA
MDPRMYSLEQVSTAPRRSGA

SEQ ID NO: 103339 - protein, 20 aa, Artificial Sequence
  Description of Artificial Sequence: Synthetic peptide
  Seed: MDPRMCSLMQGSTLPRRSGA
MDPRMYSLFQASTAPRRSGA

SEQ ID NO: 103340 - protein, 20 aa, Artificial Sequence
  Description of Artificial Sequence: Synthetic peptide
  Seed: MDPRMCSLMQGSTLPRRSGA
MDPRMYSLFQASTGPRRSGA

SEQ ID NO: 103341 - protein, 20 aa, Artificial Sequence
  Description of Artificial Sequence: Synthetic peptide
  Seed: MDPRMCSLMQGSTLPRRSGA
MDPRMYSLFQASTIPRRSGA

SEQ ID NO: 103342 - protein, 20 aa, Artificial Sequence
  Description of Artificial Sequence: Synthetic peptide
  Seed: MDPRMCSLMQGSTLPRRSGA
MDPRMYSLFQASTLPRRSGA

SEQ ID NO: 103343 - protein, 20 aa, Artificial Sequence
  Description of Artificial Sequence: Synthetic peptide
  Seed: MDPRMCSLMQGSTLPRRSGA
MDPRMYSLFQASTMPRRSGA

SEQ ID NO: 103344 - protein, 20 aa, Artificial Sequence
  Description of Artificial Sequence: Synthetic peptide
  Seed: MDPRMCSLMQGSTLPRRSGA
MDPRMYSLFQASTNPRRSGA

SEQ ID NO: 103345 - protein, 20 aa, Artificial Sequence
  Description of Artificial Sequence: Synthetic peptide
  Seed: MDPRMCSLMQGSTLPRRSGA
MDPRMYSLFQASTSPRRSGA

SEQ ID NO: 103346 - protein, 20 aa, Artificial Sequence
  Description of Artificial Sequence: Synthetic peptide
  Seed: MDPRMCSLMQGSTLPRRSGA
MDPRMYSLFQASTTPRRSGA

SEQ ID NO: 103347 - protein, 20 aa, Artificial Sequence
  Description of Artificial Sequence: Synthetic peptide
  Seed: MDPRMCSLMQGSTLPRRSGA
MDPRMYSLFQASTVPRRSGA

SEQ ID NO: 103348 - protein, 20 aa, Artificial Sequence
  Description of Artificial Sequence: Synthetic peptide
  Seed: MDPRMCSLMQGSTLPRRSGA
MDPRMYSLFQGSTAPRRSGA

SEQ ID NO: 103349 - protein, 20 aa, Artificial Sequence
  Description of Artificial Sequence: Synthetic peptide
  Seed: MDPRMCSLMQGSTLPRRSGA
MDPRMYSLFQGSTIPRRSGA

SEQ ID NO: 103350 - protein, 20 aa, Artificial Sequence
  Description of Artificial Sequence: Synthetic peptide
  Seed: MDPRMCSLMQGSTLPRRSGA
MDPRMYSLFQGSTLPRRSGA

SEQ ID NO: 103351 - protein, 20 aa, Artificial Sequence
  Description of Artificial Sequence: Synthetic peptide
  Seed: MDPRMCSLMQGSTLPRRSGA
MDPRMYSLFQGSTVPRRSGA

SEQ ID NO: 103352 - protein, 20 aa, Artificial Sequence
  Description of Artificial Sequence: Synthetic peptide
  Seed: MDPRMCSLMQGSTLPRRSGA
MDPRMYSLFQISTAPRRSGA

SEQ ID NO: 103353 - protein, 20 aa, Artificial Sequence
  Description of Artificial Sequence: Synthetic peptide
  Seed: MDPRMCSLMQGSTLPRRSGA
MDPRMYSLFQISTNPRRSGA

SEQ ID NO: 103354 - protein, 20 aa, Artificial Sequence
  Description of Artificial Sequence: Synthetic peptide
  Seed: MDPRMCSLMQGSTLPRRSGA
MDPRMYSLFQISTSPRRSGA

SEQ ID NO: 103355 - protein, 20 aa, Artificial Sequence
  Description of Artificial Sequence: Synthetic peptide
  Seed: MDPRMCSLMQGSTLPRRSGA
MDPRMYSLFQPSTAPRRSGA

SEQ ID NO: 103356 - protein, 20 aa, Artificial Sequence
  Description of Artificial Sequence: Synthetic peptide
  Seed: MDPRMCSLMQGSTLPRRSGA
MDPRMYSLFQPSTIPRRSGA

SEQ ID NO: 103357 - protein, 20 aa, Artificial Sequence
  Description of Artificial Sequence: Synthetic peptide
  Seed: MDPRMCSLMQGSTLPRRSGA
MDPRMYSLFQPSTLPRRSGA

SEQ ID NO: 103358 - protein, 20 aa, Artificial Sequence
  Description of Artificial Sequence: Synthetic peptide
  Seed: MDPRMCSLMQGSTLPRRSGA
MDPRMYSLFQPSTNPRRSGA

SEQ ID NO: 103359 - protein, 20 aa, Artificial Sequence
  Description of Artificial Sequence: Synthetic peptide
  Seed: MDPRMCSLMQGSTLPRRSGA
MDPRMYSLFQPSTSPRRSGA

SEQ ID NO: 103360 - protein, 20 aa, Artificial Sequence
  Description of Artificial Sequence: Synthetic peptide
  Seed: MDPRMCSLMQGSTLPRRSGA
MDPRMYSLFQPSTVPRRSGA

SEQ ID NO: 103361 - protein, 20 aa, Artificial Sequence
  Description of Artificial Sequence: Synthetic peptide
  Seed: MDPRMCSLMQGSTLPRRSGA
MDPRMYSLFQSSTAPRRSGA

SEQ ID NO: 103362 - protein, 20 aa, Artificial Sequence
  Description of Artificial Sequence: Synthetic peptide
  Seed: MDPRMCSLMQGSTLPRRSGA
MDPRMYSLFQSSTIPRRSGA

SEQ ID NO: 103363 - protein, 20 aa, Artificial Sequence
  Description of Artificial Sequence: Synthetic peptide
  Seed: MDPRMCSLMQGSTLPRRSGA
MDPRMYSLFQSSTLPRRSGA

SEQ ID NO: 103364 - protein, 20 aa, Artificial Sequence
  Description of Artificial Sequence: Synthetic peptide
  Seed: MDPRMCSLMQGSTLPRRSGA
MDPRMYSLFQSSTNPRRSGA

SEQ ID NO: 103365 - protein, 20 aa, Artificial Sequence
  Description of Artificial Sequence: Synthetic peptide
  Seed: MDPRMCSLMQGSTLPRRSGA
MDPRMYSLFQSSTSPRRSGA

SEQ ID NO: 103366 - protein, 20 aa, Artificial Sequence
  Description of Artificial Sequence: Synthetic peptide
  Seed: MDPRMCSLMQGSTLPRRSGA
MDPRMYSLFQSSTVPRRSGA

SEQ ID NO: 103367 - protein, 20 aa, Artificial Sequence
  Description of Artificial Sequence: Synthetic peptide
  Seed: MDPRMCSLMQGSTLPRRSGA
MDPRMYSLFQTSTAPRRSGA

SEQ ID NO: 103368 - protein, 20 aa, Artificial Sequence
  Description of Artificial Sequence: Synthetic peptide
  Seed: MDPRMCSLMQGSTLPRRSGA
MDPRMYSLFQTSTNPRRSGA

SEQ ID NO: 103369 - protein, 20 aa, Artificial Sequence
  Description of Artificial Sequence: Synthetic peptide
  Seed: MDPRMCSLMQGSTLPRRSGA
MDPRMYSLFQTSTSPRRSGA

SEQ ID NO: 103370 - protein, 20 aa, Artificial Sequence
  Description of Artificial Sequence: Synthetic peptide
  Seed: MDPRMCSLMQGSTLPRRSGA
MDPRMYSLFQTSTVPRRSGA

SEQ ID NO: 103371 - protein, 20 aa, Artificial Sequence
  Description of Artificial Sequence: Synthetic peptide
  Seed: MDPRMCSLMQGSTLPRRSGA
MDPRMYSLFQVSTAPRRSGA

SEQ ID NO: 103372 - protein, 20 aa, Artificial Sequence
  Description of Artificial Sequence: Synthetic peptide
  Seed: MDPRMCSLMQGSTLPRRSGA
MDPRMYSLFQVSTNPRRSGA

SEQ ID NO: 103373 - protein, 20 aa, Artificial Sequence
  Description of Artificial Sequence: Synthetic peptide
  Seed: MDPRMCSLMQGSTLPRRSGA
MDPRMYSLFQVSTSPRRSGA

SEQ ID NO: 103374 - protein, 20 aa, Artificial Sequence
  Description of Artificial Sequence: Synthetic peptide
  Seed: MDPRMCSLMQGSTLPRRSGA
MDPRMYSLFQVSTTPRRSGA

SEQ ID NO: 103375 - protein, 20 aa, Artificial Sequence
  Description of Artificial Sequence: Synthetic peptide
  Seed: MDPRMCSLMQGSTLPRRSGA
MDPRMYSLFQVSTVPRRSGA

SEQ ID NO: 103376 - protein, 20 aa, Artificial Sequence
  Description of Artificial Sequence: Synthetic peptide
  Seed: MDPRMCSLMQGSTLPRRSGA
MDPRMYSLGQASTAPRRSGA

SEQ ID NO: 103377 - protein, 20 aa, Artificial Sequence
  Description of Artificial Sequence: Synthetic peptide
  Seed: MDPRMCSLMQGSTLPRRSGA
MDPRMYSLGQASTIPRRSGA

SEQ ID NO: 103378 - protein, 20 aa, Artificial Sequence
  Description of Artificial Sequence: Synthetic peptide
  Seed: MDPRMCSLMQGSTLPRRSGA
MDPRMYSLGQASTLPRRSGA

SEQ ID NO: 103379 - protein, 20 aa, Artificial Sequence
  Description of Artificial Sequence: Synthetic peptide
  Seed: MDPRMCSLMQGSTLPRRSGA
MDPRMYSLGQASTMPRRSGA

SEQ ID NO: 103380 - protein, 20 aa, Artificial Sequence
  Description of Artificial Sequence: Synthetic peptide
  Seed: MDPRMCSLMQGSTLPRRSGA
MDPRMYSLGQASTVPRRSGA

SEQ ID NO: 103381 - protein, 20 aa, Artificial Sequence
  Description of Artificial Sequence: Synthetic peptide
  Seed: MDPRMCSLMQGSTLPRRSGA
MDPRMYSLGQGSTIPRRSGA

SEQ ID NO: 103382 - protein, 20 aa, Artificial Sequence
  Description of Artificial Sequence: Synthetic peptide
  Seed: MDPRMCSLMQGSTLPRRSGA
MDPRMYSLGQGSTLPRRSGA

SEQ ID NO: 103383 - protein, 20 aa, Artificial Sequence
  Description of Artificial Sequence: Synthetic peptide
  Seed: MDPRMCSLMQGSTLPRRSGA
MDPRMYSLGQGSTVPRRSGA

SEQ ID NO: 103384 - protein, 20 aa, Artificial Sequence
  Description of Artificial Sequence: Synthetic peptide
  Seed: MDPRMCSLMQGSTLPRRSGA
MDPRMYSLGQPSTLPRRSGA

SEQ ID NO: 103385 - protein, 20 aa, Artificial Sequence
  Description of Artificial Sequence: Synthetic peptide
  Seed: MDPRMCSLMQGSTLPRRSGA
MDPRMYSLGQSSTIPRRSGA

SEQ ID NO: 103386 - protein, 20 aa, Artificial Sequence
  Description of Artificial Sequence: Synthetic peptide
  Seed: MDPRMCSLMQGSTLPRRSGA
MDPRMYSLGQSSTLPRRSGA

SEQ ID NO: 103387 - protein, 20 aa, Artificial Sequence
  Description of Artificial Sequence: Synthetic peptide
  Seed: MDPRMCSLMQGSTLPRRSGA
MDPRMYSLGQSSTVPRRSGA

SEQ ID NO: 103388 - protein, 20 aa, Artificial Sequence
  Description of Artificial Sequence: Synthetic peptide
  Seed: MDPRMCSLMQGSTLPRRSGA
MDPRMYSLHQASTIPRRSGA

SEQ ID NO: 103389 - protein, 20 aa, Artificial Sequence
  Description of Artificial Sequence: Synthetic peptide
  Seed: MDPRMCSLMQGSTLPRRSGA
MDPRMYSLHQASTLPRRSGA

SEQ ID NO: 103390 - protein, 20 aa, Artificial Sequence
  Description of Artificial Sequence: Synthetic peptide
  Seed: MDPRMCSLMQGSTLPRRSGA
MDPRMYSLHQASTVPRRSGA

SEQ ID NO: 103391 - protein, 20 aa, Artificial Sequence
  Description of Artificial Sequence: Synthetic peptide
  Seed: MDPRMCSLMQGSTLPRRSGA
MDPRMYSLIQASTAPRRSGA

SEQ ID NO: 103392 - protein, 20 aa, Artificial Sequence
  Description of Artificial Sequence: Synthetic peptide
  Seed: MDPRMCSLMQGSTLPRRSGA
MDPRMYSLIQASTCPRRSGA

SEQ ID NO: 103393 - protein, 20 aa, Artificial Sequence
  Description of Artificial Sequence: Synthetic peptide
  Seed: MDPRMCSLMQGSTLPRRSGA
MDPRMYSLIQASTDPRRSGA

SEQ ID NO: 103394 - protein, 20 aa, Artificial Sequence
  Description of Artificial Sequence: Synthetic peptide
  Seed: MDPRMCSLMQGSTLPRRSGA
MDPRMYSLIQASTEPRRSGA

SEQ ID NO: 103395 - protein, 20 aa, Artificial Sequence
  Description of Artificial Sequence: Synthetic peptide
  Seed: MDPRMCSLMQGSTLPRRSGA
MDPRMYSLIQASTFPRRSGA

SEQ ID NO: 103396 - protein, 20 aa, Artificial Sequence
  Description of Artificial Sequence: Synthetic peptide
  Seed: MDPRMCSLMQGSTLPRRSGA
MDPRMYSLIQASTGPRRSGA

SEQ ID NO: 103397 - protein, 20 aa, Artificial Sequence
  Description of Artificial Sequence: Synthetic peptide
  Seed: MDPRMCSLMQGSTLPRRSGA
MDPRMYSLIQASTHPRRSGA

SEQ ID NO: 103398 - protein, 20 aa, Artificial Sequence
  Description of Artificial Sequence: Synthetic peptide
  Seed: MDPRMCSLMQGSTLPRRSGA
MDPRMYSLIQASTIPRRSGA

SEQ ID NO: 103399 - protein, 20 aa, Artificial Sequence
  Description of Artificial Sequence: Synthetic peptide
  Seed: MDPRMCSLMQGSTLPRRSGA
MDPRMYSLIQASTLPRRSGA

SEQ ID NO: 103400 - protein, 20 aa, Artificial Sequence
  Description of Artificial Sequence: Synthetic peptide
  Seed: MDPRMCSLMQGSTLPRRSGA
MDPRMYSLIQASTMPRRSGA

SEQ ID NO: 103401 - protein, 20 aa, Artificial Sequence
  Description of Artificial Sequence: Synthetic peptide
  Seed: MDPRMCSLMQGSTLPRRSGA
MDPRMYSLIQASTNPRRSGA

SEQ ID NO: 103402 - protein, 20 aa, Artificial Sequence
  Description of Artificial Sequence: Synthetic peptide
  Seed: MDPRMCSLMQGSTLPRRSGA
MDPRMYSLIQASTPPRRSGA

SEQ ID NO: 103403 - protein, 20 aa, Artificial Sequence
  Description of Artificial Sequence: Synthetic peptide
  Seed: MDPRMCSLMQGSTLPRRSGA
MDPRMYSLIQASTQPRRSGA

SEQ ID NO: 103404 - protein, 20 aa, Artificial Sequence
  Description of Artificial Sequence: Synthetic peptide
  Seed: MDPRMCSLMQGSTLPRRSGA
MDPRMYSLIQASTSPRRSGA

SEQ ID NO: 103405 - protein, 20 aa, Artificial Sequence
  Description of Artificial Sequence: Synthetic peptide
  Seed: MDPRMCSLMQGSTLPRRSGA
MDPRMYSLIQASTTPRRSGA

SEQ ID NO: 103406 - protein, 20 aa, Artificial Sequence
  Description of Artificial Sequence: Synthetic peptide
  Seed: MDPRMCSLMQGSTLPRRSGA
MDPRMYSLIQASTVPRRSGA

SEQ ID NO: 103407 - protein, 20 aa, Artificial Sequence
  Description of Artificial Sequence: Synthetic peptide
  Seed: MDPRMCSLMQGSTLPRRSGA
MDPRMYSLIQASTYPRRSGA

SEQ ID NO: 103408 - protein, 20 aa, Artificial Sequence
  Description of Artificial Sequence: Synthetic peptide
  Seed: MDPRMCSLMQGSTLPRRSGA
MDPRMYSLIQGSTAPRRSGA

SEQ ID NO: 103409 - protein, 20 aa, Artificial Sequence
  Description of Artificial Sequence: Synthetic peptide
  Seed: MDPRMCSLMQGSTLPRRSGA
MDPRMYSLIQGSTCPRRSGA

SEQ ID NO: 103410 - protein, 20 aa, Artificial Sequence
  Description of Artificial Sequence: Synthetic peptide
  Seed: MDPRMCSLMQGSTLPRRSGA
MDPRMYSLIQGSTFPRRSGA

SEQ ID NO: 103411 - protein, 20 aa, Artificial Sequence
  Description of Artificial Sequence: Synthetic peptide
  Seed: MDPRMCSLMQGSTLPRRSGA
MDPRMYSLIQGSTGPRRSGA

SEQ ID NO: 103412 - protein, 20 aa, Artificial Sequence
  Description of Artificial Sequence: Synthetic peptide
  Seed: MDPRMCSLMQGSTLPRRSGA
MDPRMYSLIQGSTIPRRSGA

SEQ ID NO: 103413 - protein, 20 aa, Artificial Sequence
  Description of Artificial Sequence: Synthetic peptide
  Seed: MDPRMCSLMQGSTLPRRSGA
MDPRMYSLIQGSTLPRRSGA

SEQ ID NO: 103414 - protein, 20 aa, Artificial Sequence
  Description of Artificial Sequence: Synthetic peptide
  Seed: MDPRMCSLMQGSTLPRRSGA
MDPRMYSLIQGSTMPRRSGA

SEQ ID NO: 103415 - protein, 20 aa, Artificial Sequence
  Description of Artificial Sequence: Synthetic peptide
  Seed: MDPRMCSLMQGSTLPRRSGA
MDPRMYSLIQGSTNPRRSGA

SEQ ID NO: 103416 - protein, 20 aa, Artificial Sequence
  Description of Artificial Sequence: Synthetic peptide
  Seed: MDPRMCSLMQGSTLPRRSGA
MDPRMYSLIQGSTSPRRSGA

SEQ ID NO: 103417 - protein, 20 aa, Artificial Sequence
  Description of Artificial Sequence: Synthetic peptide
  Seed: MDPRMCSLMQGSTLPRRSGA
MDPRMYSLIQGSTTPRRSGA

SEQ ID NO: 103418 - protein, 20 aa, Artificial Sequence
  Description of Artificial Sequence: Synthetic peptide
  Seed: MDPRMCSLMQGSTLPRRSGA
MDPRMYSLIQGSTVPRRSGA

SEQ ID NO: 103419 - protein, 20 aa, Artificial Sequence
  Description of Artificial Sequence: Synthetic peptide
  Seed: MDPRMCSLMQGSTLPRRSGA
MDPRMYSLIQISTAPRRSGA

SEQ ID NO: 103420 - protein, 20 aa, Artificial Sequence
  Description of Artificial Sequence: Synthetic peptide
  Seed: MDPRMCSLMQGSTLPRRSGA
MDPRMYSLIQISTGPRRSGA

SEQ ID NO: 103421 - protein, 20 aa, Artificial Sequence
  Description of Artificial Sequence: Synthetic peptide
  Seed: MDPRMCSLMQGSTLPRRSGA
MDPRMYSLIQISTHPRRSGA

SEQ ID NO: 103422 - protein, 20 aa, Artificial Sequence
  Description of Artificial Sequence: Synthetic peptide
  Seed: MDPRMCSLMQGSTLPRRSGA
MDPRMYSLIQISTIPRRSGA

SEQ ID NO: 103423 - protein, 20 aa, Artificial Sequence
  Description of Artificial Sequence: Synthetic peptide
  Seed: MDPRMCSLMQGSTLPRRSGA
MDPRMYSLIQISTLPRRSGA

SEQ ID NO: 103424 - protein, 20 aa, Artificial Sequence
  Description of Artificial Sequence: Synthetic peptide
  Seed: MDPRMCSLMQGSTLPRRSGA
MDPRMYSLIQISTMPRRSGA

SEQ ID NO: 103425 - protein, 20 aa, Artificial Sequence
  Description of Artificial Sequence: Synthetic peptide
  Seed: MDPRMCSLMQGSTLPRRSGA
MDPRMYSLIQISTNPRRSGA

SEQ ID NO: 103426 - protein, 20 aa, Artificial Sequence
  Description of Artificial Sequence: Synthetic peptide
  Seed: MDPRMCSLMQGSTLPRRSGA
MDPRMYSLIQISTQPRRSGA

SEQ ID NO: 103427 - protein, 20 aa, Artificial Sequence
  Description of Artificial Sequence: Synthetic peptide
  Seed: MDPRMCSLMQGSTLPRRSGA
MDPRMYSLIQISTSPRRSGA

SEQ ID NO: 103428 - protein, 20 aa, Artificial Sequence
  Description of Artificial Sequence: Synthetic peptide
  Seed: MDPRMCSLMQGSTLPRRSGA
MDPRMYSLIQISTTPRRSGA

SEQ ID NO: 103429 - protein, 20 aa, Artificial Sequence
  Description of Artificial Sequence: Synthetic peptide
  Seed: MDPRMCSLMQGSTLPRRSGA
MDPRMYSLIQISTVPRRSGA

SEQ ID NO: 103430 - protein, 20 aa, Artificial Sequence
  Description of Artificial Sequence: Synthetic peptide
  Seed: MDPRMCSLMQGSTLPRRSGA
MDPRMYSLIQLSTAPRRSGA

SEQ ID NO: 103431 - protein, 20 aa, Artificial Sequence
  Description of Artificial Sequence: Synthetic peptide
  Seed: MDPRMCSLMQGSTLPRRSGA
MDPRMYSLIQLSTIPRRSGA

SEQ ID NO: 103432 - protein, 20 aa, Artificial Sequence
  Description of Artificial Sequence: Synthetic peptide
  Seed: MDPRMCSLMQGSTLPRRSGA
MDPRMYSLIQLSTNPRRSGA

SEQ ID NO: 103433 - protein, 20 aa, Artificial Sequence
  Description of Artificial Sequence: Synthetic peptide
  Seed: MDPRMCSLMQGSTLPRRSGA
MDPRMYSLIQLSTSPRRSGA

SEQ ID NO: 103434 - protein, 20 aa, Artificial Sequence
  Description of Artificial Sequence: Synthetic peptide
  Seed: MDPRMCSLMQGSTLPRRSGA
MDPRMYSLIQLSTTPRRSGA

SEQ ID NO: 103435 - protein, 20 aa, Artificial Sequence
  Description of Artificial Sequence: Synthetic peptide
  Seed: MDPRMCSLMQGSTLPRRSGA
MDPRMYSLIQLSTVPRRSGA

SEQ ID NO: 103436 - protein, 20 aa, Artificial Sequence
  Description of Artificial Sequence: Synthetic peptide
  Seed: MDPRMCSLMQGSTLPRRSGA
MDPRMYSLIQMSTAPRRSGA

SEQ ID NO: 103437 - protein, 20 aa, Artificial Sequence
  Description of Artificial Sequence: Synthetic peptide
  Seed: MDPRMCSLMQGSTLPRRSGA
MDPRMYSLIQMSTIPRRSGA

SEQ ID NO: 103438 - protein, 20 aa, Artificial Sequence
  Description of Artificial Sequence: Synthetic peptide
  Seed: MDPRMCSLMQGSTLPRRSGA
MDPRMYSLIQMSTLPRRSGA

SEQ ID NO: 103439 - protein, 20 aa, Artificial Sequence
  Description of Artificial Sequence: Synthetic peptide
  Seed: MDPRMCSLMQGSTLPRRSGA
MDPRMYSLIQMSTNPRRSGA

SEQ ID NO: 103440 - protein, 20 aa, Artificial Sequence
  Description of Artificial Sequence: Synthetic peptide
  Seed: MDPRMCSLMQGSTLPRRSGA
MDPRMYSLIQMSTSPRRSGA

SEQ ID NO: 103441 - protein, 20 aa, Artificial Sequence
  Description of Artificial Sequence: Synthetic peptide
  Seed: MDPRMCSLMQGSTLPRRSGA
MDPRMYSLIQMSTTPRRSGA

SEQ ID NO: 103442 - protein, 20 aa, Artificial Sequence
  Description of Artificial Sequence: Synthetic peptide
  Seed: MDPRMCSLMQGSTLPRRSGA
MDPRMYSLIQMSTVPRRSGA

SEQ ID NO: 103443 - protein, 20 aa, Artificial Sequence
  Description of Artificial Sequence: Synthetic peptide
  Seed: MDPRMCSLMQGSTLPRRSGA
MDPRMYSLIQNSTAPRRSGA

SEQ ID NO: 103444 - protein, 20 aa, Artificial Sequence
  Description of Artificial Sequence: Synthetic peptide
  Seed: MDPRMCSLMQGSTLPRRSGA
MDPRMYSLIQNSTGPRRSGA

SEQ ID NO: 103445 - protein, 20 aa, Artificial Sequence
  Description of Artificial Sequence: Synthetic peptide
  Seed: MDPRMCSLMQGSTLPRRSGA
MDPRMYSLIQNSTIPRRSGA

SEQ ID NO: 103446 - protein, 20 aa, Artificial Sequence
  Description of Artificial Sequence: Synthetic peptide
  Seed: MDPRMCSLMQGSTLPRRSGA
MDPRMYSLIQNSTLPRRSGA

SEQ ID NO: 103447 - protein, 20 aa, Artificial Sequence
  Description of Artificial Sequence: Synthetic peptide
  Seed: MDPRMCSLMQGSTLPRRSGA
MDPRMYSLIQNSTMPRRSGA

SEQ ID NO: 103448 - protein, 20 aa, Artificial Sequence
  Description of Artificial Sequence: Synthetic peptide
  Seed: MDPRMCSLMQGSTLPRRSGA
MDPRMYSLIQNSTNPRRSGA

SEQ ID NO: 103449 - protein, 20 aa, Artificial Sequence
  Description of Artificial Sequence: Synthetic peptide
  Seed: MDPRMCSLMQGSTLPRRSGA
MDPRMYSLIQNSTSPRRSGA

SEQ ID NO: 103450 - protein, 20 aa, Artificial Sequence
  Description of Artificial Sequence: Synthetic peptide
  Seed: MDPRMCSLMQGSTLPRRSGA
MDPRMYSLIQNSTTPRRSGA

SEQ ID NO: 103451 - protein, 20 aa, Artificial Sequence
  Description of Artificial Sequence: Synthetic peptide
  Seed: MDPRMCSLMQGSTLPRRSGA
MDPRMYSLIQNSTVPRRSGA

SEQ ID NO: 103452 - protein, 20 aa, Artificial Sequence
  Description of Artificial Sequence: Synthetic peptide
  Seed: MDPRMCSLMQGSTLPRRSGA
MDPRMYSLIQPSTAPRRSGA

SEQ ID NO: 103453 - protein, 20 aa, Artificial Sequence
  Description of Artificial Sequence: Synthetic peptide
  Seed: MDPRMCSLMQGSTLPRRSGA
MDPRMYSLIQPSTCPRRSGA

SEQ ID NO: 103454 - protein, 20 aa, Artificial Sequence
  Description of Artificial Sequence: Synthetic peptide
  Seed: MDPRMCSLMQGSTLPRRSGA
MDPRMYSLIQPSTDPRRSGA

SEQ ID NO: 103455 - protein, 20 aa, Artificial Sequence
  Description of Artificial Sequence: Synthetic peptide
  Seed: MDPRMCSLMQGSTLPRRSGA
MDPRMYSLIQPSTGPRRSGA

SEQ ID NO: 103456 - protein, 20 aa, Artificial Sequence
  Description of Artificial Sequence: Synthetic peptide
  Seed: MDPRMCSLMQGSTLPRRSGA
MDPRMYSLIQPSTHPRRSGA

SEQ ID NO: 103457 - protein, 20 aa, Artificial Sequence
  Description of Artificial Sequence: Synthetic peptide
  Seed: MDPRMCSLMQGSTLPRRSGA
MDPRMYSLIQPSTIPRRSGA

SEQ ID NO: 103458 - protein, 20 aa, Artificial Sequence
  Description of Artificial Sequence: Synthetic peptide
  Seed: MDPRMCSLMQGSTLPRRSGA
MDPRMYSLIQPSTLPRRSGA

SEQ ID NO: 103459 - protein, 20 aa, Artificial Sequence
  Description of Artificial Sequence: Synthetic peptide
  Seed: MDPRMCSLMQGSTLPRRSGA
MDPRMYSLIQPSTMPRRSGA

SEQ ID NO: 103460 - protein, 20 aa, Artificial Sequence
  Description of Artificial Sequence: Synthetic peptide
  Seed: MDPRMCSLMQGSTLPRRSGA
MDPRMYSLIQPSTNPRRSGA

SEQ ID NO: 103461 - protein, 20 aa, Artificial Sequence
  Description of Artificial Sequence: Synthetic peptide
  Seed: MDPRMCSLMQGSTLPRRSGA
MDPRMYSLIQPSTPPRRSGA

SEQ ID NO: 103462 - protein, 20 aa, Artificial Sequence
  Description of Artificial Sequence: Synthetic peptide
  Seed: MDPRMCSLMQGSTLPRRSGA
MDPRMYSLIQPSTQPRRSGA

SEQ ID NO: 103463 - protein, 20 aa, Artificial Sequence
  Description of Artificial Sequence: Synthetic peptide
  Seed: MDPRMCSLMQGSTLPRRSGA
MDPRMYSLIQPSTSPRRSGA

SEQ ID NO: 103464 - protein, 20 aa, Artificial Sequence
  Description of Artificial Sequence: Synthetic peptide
  Seed: MDPRMCSLMQGSTLPRRSGA
MDPRMYSLIQPSTTPRRSGA

SEQ ID NO: 103465 - protein, 20 aa, Artificial Sequence
  Description of Artificial Sequence: Synthetic peptide
  Seed: MDPRMCSLMQGSTLPRRSGA
MDPRMYSLIQPSTVPRRSGA

SEQ ID NO: 103466 - protein, 20 aa, Artificial Sequence
  Description of Artificial Sequence: Synthetic peptide
  Seed: MDPRMCSLMQGSTLPRRSGA
MDPRMYSLIQQSTAPRRSGA

SEQ ID NO: 103467 - protein, 20 aa, Artificial Sequence
  Description of Artificial Sequence: Synthetic peptide
  Seed: MDPRMCSLMQGSTLPRRSGA
MDPRMYSLIQSSTAPRRSGA

SEQ ID NO: 103468 - protein, 20 aa, Artificial Sequence
  Description of Artificial Sequence: Synthetic peptide
  Seed: MDPRMCSLMQGSTLPRRSGA
MDPRMYSLIQSSTCPRRSGA

SEQ ID NO: 103469 - protein, 20 aa, Artificial Sequence
  Description of Artificial Sequence: Synthetic peptide
  Seed: MDPRMCSLMQGSTLPRRSGA
MDPRMYSLIQSSTGPRRSGA

SEQ ID NO: 103470 - protein, 20 aa, Artificial Sequence
  Description of Artificial Sequence: Synthetic peptide
  Seed: MDPRMCSLMQGSTLPRRSGA
MDPRMYSLIQSSTHPRRSGA

SEQ ID NO: 103471 - protein, 20 aa, Artificial Sequence
  Description of Artificial Sequence: Synthetic peptide
  Seed: MDPRMCSLMQGSTLPRRSGA
MDPRMYSLIQSSTIPRRSGA

SEQ ID NO: 103472 - protein, 20 aa, Artificial Sequence
  Description of Artificial Sequence: Synthetic peptide
  Seed: MDPRMCSLMQGSTLPRRSGA
MDPRMYSLIQSSTLPRRSGA

SEQ ID NO: 103473 - protein, 20 aa, Artificial Sequence
  Description of Artificial Sequence: Synthetic peptide
  Seed: MDPRMCSLMQGSTLPRRSGA
MDPRMYSLIQSSTMPRRSGA

SEQ ID NO: 103474 - protein, 20 aa, Artificial Sequence
  Description of Artificial Sequence: Synthetic peptide
  Seed: MDPRMCSLMQGSTLPRRSGA
MDPRMYSLIQSSTNPRRSGA

SEQ ID NO: 103475 - protein, 20 aa, Artificial Sequence
  Description of Artificial Sequence: Synthetic peptide
  Seed: MDPRMCSLMQGSTLPRRSGA
MDPRMYSLIQSSTQPRRSGA

SEQ ID NO: 103476 - protein, 20 aa, Artificial Sequence
  Description of Artificial Sequence: Synthetic peptide
  Seed: MDPRMCSLMQGSTLPRRSGA
MDPRMYSLIQSSTSPRRSGA

SEQ ID NO: 103477 - protein, 20 aa, Artificial Sequence
  Description of Artificial Sequence: Synthetic peptide
  Seed: MDPRMCSLMQGSTLPRRSGA
MDPRMYSLIQSSTTPRRSGA

SEQ ID NO: 103478 - protein, 20 aa, Artificial Sequence
  Description of Artificial Sequence: Synthetic peptide
  Seed: MDPRMCSLMQGSTLPRRSGA
MDPRMYSLIQSSTVPRRSGA

SEQ ID NO: 103479 - protein, 20 aa, Artificial Sequence
  Description of Artificial Sequence: Synthetic peptide
  Seed: MDPRMCSLMQGSTLPRRSGA
MDPRMYSLIQTSTAPRRSGA

SEQ ID NO: 103480 - protein, 20 aa, Artificial Sequence
  Description of Artificial Sequence: Synthetic peptide
  Seed: MDPRMCSLMQGSTLPRRSGA
MDPRMYSLIQTSTGPRRSGA

SEQ ID NO: 103481 - protein, 20 aa, Artificial Sequence
  Description of Artificial Sequence: Synthetic peptide
  Seed: MDPRMCSLMQGSTLPRRSGA
MDPRMYSLIQTSTHPRRSGA

SEQ ID NO: 103482 - protein, 20 aa, Artificial Sequence
  Description of Artificial Sequence: Synthetic peptide
  Seed: MDPRMCSLMQGSTLPRRSGA
MDPRMYSLIQTSTIPRRSGA

SEQ ID NO: 103483 - protein, 20 aa, Artificial Sequence
  Description of Artificial Sequence: Synthetic peptide
  Seed: MDPRMCSLMQGSTLPRRSGA
MDPRMYSLIQTSTLPRRSGA

SEQ ID NO: 103484 - protein, 20 aa, Artificial Sequence
  Description of Artificial Sequence: Synthetic peptide
  Seed: MDPRMCSLMQGSTLPRRSGA
MDPRMYSLIQTSTMPRRSGA

SEQ ID NO: 103485 - protein, 20 aa, Artificial Sequence
  Description of Artificial Sequence: Synthetic peptide
  Seed: MDPRMCSLMQGSTLPRRSGA
MDPRMYSLIQTSTNPRRSGA

SEQ ID NO: 103486 - protein, 20 aa, Artificial Sequence
  Description of Artificial Sequence: Synthetic peptide
  Seed: MDPRMCSLMQGSTLPRRSGA
MDPRMYSLIQTSTQPRRSGA

SEQ ID NO: 103487 - protein, 20 aa, Artificial Sequence
  Description of Artificial Sequence: Synthetic peptide
  Seed: MDPRMCSLMQGSTLPRRSGA
MDPRMYSLIQTSTSPRRSGA

SEQ ID NO: 103488 - protein, 20 aa, Artificial Sequence
  Description of Artificial Sequence: Synthetic peptide
  Seed: MDPRMCSLMQGSTLPRRSGA
MDPRMYSLIQTSTTPRRSGA

SEQ ID NO: 103489 - protein, 20 aa, Artificial Sequence
  Description of Artificial Sequence: Synthetic peptide
  Seed: MDPRMCSLMQGSTLPRRSGA
MDPRMYSLIQTSTVPRRSGA

SEQ ID NO: 103490 - protein, 20 aa, Artificial Sequence
  Description of Artificial Sequence: Synthetic peptide
  Seed: MDPRMCSLMQGSTLPRRSGA
MDPRMYSLIQVSTAPRRSGA

SEQ ID NO: 103491 - protein, 20 aa, Artificial Sequence
  Description of Artificial Sequence: Synthetic peptide
  Seed: MDPRMCSLMQGSTLPRRSGA
MDPRMYSLIQVSTGPRRSGA

SEQ ID NO: 103492 - protein, 20 aa, Artificial Sequence
  Description of Artificial Sequence: Synthetic peptide
  Seed: MDPRMCSLMQGSTLPRRSGA
MDPRMYSLIQVSTHPRRSGA

SEQ ID NO: 103493 - protein, 20 aa, Artificial Sequence
  Description of Artificial Sequence: Synthetic peptide
  Seed: MDPRMCSLMQGSTLPRRSGA
MDPRMYSLIQVSTIPRRSGA

SEQ ID NO: 103494 - protein, 20 aa, Artificial Sequence
  Description of Artificial Sequence: Synthetic peptide
  Seed: MDPRMCSLMQGSTLPRRSGA
MDPRMYSLIQVSTLPRRSGA

SEQ ID NO: 103495 - protein, 20 aa, Artificial Sequence
  Description of Artificial Sequence: Synthetic peptide
  Seed: MDPRMCSLMQGSTLPRRSGA
MDPRMYSLIQVSTMPRRSGA

SEQ ID NO: 103496 - protein, 20 aa, Artificial Sequence
  Description of Artificial Sequence: Synthetic peptide
  Seed: MDPRMCSLMQGSTLPRRSGA
MDPRMYSLIQVSTNPRRSGA

SEQ ID NO: 103497 - protein, 20 aa, Artificial Sequence
  Description of Artificial Sequence: Synthetic peptide
  Seed: MDPRMCSLMQGSTLPRRSGA
MDPRMYSLIQVSTPPRRSGA

SEQ ID NO: 103498 - protein, 20 aa, Artificial Sequence
  Description of Artificial Sequence: Synthetic peptide
  Seed: MDPRMCSLMQGSTLPRRSGA
MDPRMYSLIQVSTQPRRSGA

SEQ ID NO: 103499 - protein, 20 aa, Artificial Sequence
  Description of Artificial Sequence: Synthetic peptide
  Seed: MDPRMCSLMQGSTLPRRSGA
MDPRMYSLIQVSTSPRRSGA

SEQ ID NO: 103500 - protein, 20 aa, Artificial Sequence
  Description of Artificial Sequence: Synthetic peptide
  Seed: MDPRMCSLMQGSTLPRRSGA
MDPRMYSLIQVSTTPRRSGA

SEQ ID NO: 103501 - protein, 20 aa, Artificial Sequence
  Description of Artificial Sequence: Synthetic peptide
  Seed: MDPRMCSLMQGSTLPRRSGA
MDPRMYSLIQVSTVPRRSGA

SEQ ID NO: 103502 - protein, 20 aa, Artificial Sequence
  Description of Artificial Sequence: Synthetic peptide
  Seed: MDPRMCSLMQGSTLPRRSGA
MDPRMYSLLQASTAPRRSGA

SEQ ID NO: 103503 - protein, 20 aa, Artificial Sequence
  Description of Artificial Sequence: Synthetic peptide
  Seed: MDPRMCSLMQGSTLPRRSGA
MDPRMYSLLQASTCPRRSGA

SEQ ID NO: 103504 - protein, 20 aa, Artificial Sequence
  Description of Artificial Sequence: Synthetic peptide
  Seed: MDPRMCSLMQGSTLPRRSGA
MDPRMYSLLQASTDPRRSGA

SEQ ID NO: 103505 - protein, 20 aa, Artificial Sequence
  Description of Artificial Sequence: Synthetic peptide
  Seed: MDPRMCSLMQGSTLPRRSGA
MDPRMYSLLQASTEPRRSGA

SEQ ID NO: 103506 - protein, 20 aa, Artificial Sequence
  Description of Artificial Sequence: Synthetic peptide
  Seed: MDPRMCSLMQGSTLPRRSGA
MDPRMYSLLQASTFPRRSGA

SEQ ID NO: 103507 - protein, 20 aa, Artificial Sequence
  Description of Artificial Sequence: Synthetic peptide
  Seed: MDPRMCSLMQGSTLPRRSGA
MDPRMYSLLQASTGPRRSGA

SEQ ID NO: 103508 - protein, 20 aa, Artificial Sequence
  Description of Artificial Sequence: Synthetic peptide
  Seed: MDPRMCSLMQGSTLPRRSGA
MDPRMYSLLQASTHPRRSGA

SEQ ID NO: 103509 - protein, 20 aa, Artificial Sequence
  Description of Artificial Sequence: Synthetic peptide
  Seed: MDPRMCSLMQGSTLPRRSGA
MDPRMYSLLQASTIPRRSGA

SEQ ID NO: 103510 - protein, 20 aa, Artificial Sequence
  Description of Artificial Sequence: Synthetic peptide
  Seed: MDPRMCSLMQGSTLPRRSGA
MDPRMYSLLQASTLPRRSGA

SEQ ID NO: 103511 - protein, 20 aa, Artificial Sequence
  Description of Artificial Sequence: Synthetic peptide
  Seed: MDPRMCSLMQGSTLPRRSGA
MDPRMYSLLQASTMPRRSGA

SEQ ID NO: 103512 - protein, 20 aa, Artificial Sequence
  Description of Artificial Sequence: Synthetic peptide
  Seed: MDPRMCSLMQGSTLPRRSGA
MDPRMYSLLQASTNPRRSGA

SEQ ID NO: 103513 - protein, 20 aa, Artificial Sequence
  Description of Artificial Sequence: Synthetic peptide
  Seed: MDPRMCSLMQGSTLPRRSGA
MDPRMYSLLQASTPPRRSGA

SEQ ID NO: 103514 - protein, 20 aa, Artificial Sequence
  Description of Artificial Sequence: Synthetic peptide
  Seed: MDPRMCSLMQGSTLPRRSGA
MDPRMYSLLQASTQPRRSGA

SEQ ID NO: 103515 - protein, 20 aa, Artificial Sequence
  Description of Artificial Sequence: Synthetic peptide
  Seed: MDPRMCSLMQGSTLPRRSGA
MDPRMYSLLQASTRPRRSGA

SEQ ID NO: 103516 - protein, 20 aa, Artificial Sequence
  Description of Artificial Sequence: Synthetic peptide
  Seed: MDPRMCSLMQGSTLPRRSGA
MDPRMYSLLQASTSPRRSGA

SEQ ID NO: 103517 - protein, 20 aa, Artificial Sequence
  Description of Artificial Sequence: Synthetic peptide
  Seed: MDPRMCSLMQGSTLPRRSGA
MDPRMYSLLQASTTPRRSGA

SEQ ID NO: 103518 - protein, 20 aa, Artificial Sequence
  Description of Artificial Sequence: Synthetic peptide
  Seed: MDPRMCSLMQGSTLPRRSGA
MDPRMYSLLQASTVPRRSGA

SEQ ID NO: 103519 - protein, 20 aa, Artificial Sequence
  Description of Artificial Sequence: Synthetic peptide
  Seed: MDPRMCSLMQGSTLPRRSGA
MDPRMYSLLQASTWPRRSGA

SEQ ID NO: 103520 - protein, 20 aa, Artificial Sequence
  Description of Artificial Sequence: Synthetic peptide
  Seed: MDPRMCSLMQGSTLPRRSGA
MDPRMYSLLQASTYPRRSGA

SEQ ID NO: 103521 - protein, 20 aa, Artificial Sequence
  Description of Artificial Sequence: Synthetic peptide
  Seed: MDPRMCSLMQGSTLPRRSGA
MDPRMYSLLQCSTAPRRSGA

SEQ ID NO: 103522 - protein, 20 aa, Artificial Sequence
  Description of Artificial Sequence: Synthetic peptide
  Seed: MDPRMCSLMQGSTLPRRSGA
MDPRMYSLLQCSTVPRRSGA

SEQ ID NO: 103523 - protein, 20 aa, Artificial Sequence
  Description of Artificial Sequence: Synthetic peptide
  Seed: MDPRMCSLMQGSTLPRRSGA
MDPRMYSLLQESTVPRRSGA

SEQ ID NO: 103524 - protein, 20 aa, Artificial Sequence
  Description of Artificial Sequence: Synthetic peptide
  Seed: MDPRMCSLMQGSTLPRRSGA
MDPRMYSLLQGSTAPRRSGA

SEQ ID NO: 103525 - protein, 20 aa, Artificial Sequence
  Description of Artificial Sequence: Synthetic peptide
  Seed: MDPRMCSLMQGSTLPRRSGA
MDPRMYSLLQGSTCPRRSGA

SEQ ID NO: 103526 - protein, 20 aa, Artificial Sequence
  Description of Artificial Sequence: Synthetic peptide
  Seed: MDPRMCSLMQGSTLPRRSGA
MDPRMYSLLQGSTFPRRSGA

SEQ ID NO: 103527 - protein, 20 aa, Artificial Sequence
  Description of Artificial Sequence: Synthetic peptide
  Seed: MDPRMCSLMQGSTLPRRSGA
MDPRMYSLLQGSTGPRRSGA

SEQ ID NO: 103528 - protein, 20 aa, Artificial Sequence
  Description of Artificial Sequence: Synthetic peptide
  Seed: MDPRMCSLMQGSTLPRRSGA
MDPRMYSLLQGSTIPRRSGA

SEQ ID NO: 103529 - protein, 20 aa, Artificial Sequence
  Description of Artificial Sequence: Synthetic peptide
  Seed: MDPRMCSLMQGSTLPRRSGA
MDPRMYSLLQGSTLPRRSGA

SEQ ID NO: 103530 - protein, 20 aa, Artificial Sequence
  Description of Artificial Sequence: Synthetic peptide
  Seed: MDPRMCSLMQGSTLPRRSGA
MDPRMYSLLQGSTMPRRSGA

SEQ ID NO: 103531 - protein, 20 aa, Artificial Sequence
  Description of Artificial Sequence: Synthetic peptide
  Seed: MDPRMCSLMQGSTLPRRSGA
MDPRMYSLLQGSTNPRRSGA

SEQ ID NO: 103532 - protein, 20 aa, Artificial Sequence
  Description of Artificial Sequence: Synthetic peptide
  Seed: MDPRMCSLMQGSTLPRRSGA
MDPRMYSLLQGSTPPRRSGA

SEQ ID NO: 103533 - protein, 20 aa, Artificial Sequence
  Description of Artificial Sequence: Synthetic peptide
  Seed: MDPRMCSLMQGSTLPRRSGA
MDPRMYSLLQGSTSPRRSGA

SEQ ID NO: 103534 - protein, 20 aa, Artificial Sequence
  Description of Artificial Sequence: Synthetic peptide
  Seed: MDPRMCSLMQGSTLPRRSGA
MDPRMYSLLQGSTTPRRSGA

SEQ ID NO: 103535 - protein, 20 aa, Artificial Sequence
  Description of Artificial Sequence: Synthetic peptide
  Seed: MDPRMCSLMQGSTLPRRSGA
MDPRMYSLLQGSTVPRRSGA

SEQ ID NO: 103536 - protein, 20 aa, Artificial Sequence
  Description of Artificial Sequence: Synthetic peptide
  Seed: MDPRMCSLMQGSTLPRRSGA
MDPRMYSLLQGSTYPRRSGA

SEQ ID NO: 103537 - protein, 20 aa, Artificial Sequence
  Description of Artificial Sequence: Synthetic peptide
  Seed: MDPRMCSLMQGSTLPRRSGA
MDPRMYSLLQHSTIPRRSGA

SEQ ID NO: 103538 - protein, 20 aa, Artificial Sequence
  Description of Artificial Sequence: Synthetic peptide
  Seed: MDPRMCSLMQGSTLPRRSGA
MDPRMYSLLQHSTLPRRSGA

SEQ ID NO: 103539 - protein, 20 aa, Artificial Sequence
  Description of Artificial Sequence: Synthetic peptide
  Seed: MDPRMCSLMQGSTLPRRSGA
MDPRMYSLLQHSTVPRRSGA

SEQ ID NO: 103540 - protein, 20 aa, Artificial Sequence
  Description of Artificial Sequence: Synthetic peptide
  Seed: MDPRMCSLMQGSTLPRRSGA
MDPRMYSLLQISTAPRRSGA

SEQ ID NO: 103541 - protein, 20 aa, Artificial Sequence
  Description of Artificial Sequence: Synthetic peptide
  Seed: MDPRMCSLMQGSTLPRRSGA
MDPRMYSLLQISTDPRRSGA

SEQ ID NO: 103542 - protein, 20 aa, Artificial Sequence
  Description of Artificial Sequence: Synthetic peptide
  Seed: MDPRMCSLMQGSTLPRRSGA
MDPRMYSLLQISTGPRRSGA

SEQ ID NO: 103543 - protein, 20 aa, Artificial Sequence
  Description of Artificial Sequence: Synthetic peptide
  Seed: MDPRMCSLMQGSTLPRRSGA
MDPRMYSLLQISTHPRRSGA

SEQ ID NO: 103544 - protein, 20 aa, Artificial Sequence
  Description of Artificial Sequence: Synthetic peptide
  Seed: MDPRMCSLMQGSTLPRRSGA
MDPRMYSLLQISTIPRRSGA

SEQ ID NO: 103545 - protein, 20 aa, Artificial Sequence
  Description of Artificial Sequence: Synthetic peptide
  Seed: MDPRMCSLMQGSTLPRRSGA
MDPRMYSLLQISTLPRRSGA

SEQ ID NO: 103546 - protein, 20 aa, Artificial Sequence
  Description of Artificial Sequence: Synthetic peptide
  Seed: MDPRMCSLMQGSTLPRRSGA
MDPRMYSLLQISTMPRRSGA

SEQ ID NO: 103547 - protein, 20 aa, Artificial Sequence
  Description of Artificial Sequence: Synthetic peptide
  Seed: MDPRMCSLMQGSTLPRRSGA
MDPRMYSLLQISTNPRRSGA

SEQ ID NO: 103548 - protein, 20 aa, Artificial Sequence
  Description of Artificial Sequence: Synthetic peptide
  Seed: MDPRMCSLMQGSTLPRRSGA
MDPRMYSLLQISTQPRRSGA

SEQ ID NO: 103549 - protein, 20 aa, Artificial Sequence
  Description of Artificial Sequence: Synthetic peptide
  Seed: MDPRMCSLMQGSTLPRRSGA
MDPRMYSLLQISTSPRRSGA

SEQ ID NO: 103550 - protein, 20 aa, Artificial Sequence
  Description of Artificial Sequence: Synthetic peptide
  Seed: MDPRMCSLMQGSTLPRRSGA
MDPRMYSLLQISTTPRRSGA

SEQ ID NO: 103551 - protein, 20 aa, Artificial Sequence
  Description of Artificial Sequence: Synthetic peptide
  Seed: MDPRMCSLMQGSTLPRRSGA
MDPRMYSLLQISTVPRRSGA

SEQ ID NO: 103552 - protein, 20 aa, Artificial Sequence
  Description of Artificial Sequence: Synthetic peptide
  Seed: MDPRMCSLMQGSTLPRRSGA
MDPRMYSLLQLSTAPRRSGA

SEQ ID NO: 103553 - protein, 20 aa, Artificial Sequence
  Description of Artificial Sequence: Synthetic peptide
  Seed: MDPRMCSLMQGSTLPRRSGA
MDPRMYSLLQLSTIPRRSGA

SEQ ID NO: 103554 - protein, 20 aa, Artificial Sequence
  Description of Artificial Sequence: Synthetic peptide
  Seed: MDPRMCSLMQGSTLPRRSGA
MDPRMYSLLQLSTLPRRSGA

SEQ ID NO: 103555 - protein, 20 aa, Artificial Sequence
  Description of Artificial Sequence: Synthetic peptide
  Seed: MDPRMCSLMQGSTLPRRSGA
MDPRMYSLLQLSTMPRRSGA

SEQ ID NO: 103556 - protein, 20 aa, Artificial Sequence
  Description of Artificial Sequence: Synthetic peptide
  Seed: MDPRMCSLMQGSTLPRRSGA
MDPRMYSLLQLSTNPRRSGA

SEQ ID NO: 103557 - protein, 20 aa, Artificial Sequence
  Description of Artificial Sequence: Synthetic peptide
  Seed: MDPRMCSLMQGSTLPRRSGA
MDPRMYSLLQLSTSPRRSGA

SEQ ID NO: 103558 - protein, 20 aa, Artificial Sequence
  Description of Artificial Sequence: Synthetic peptide
  Seed: MDPRMCSLMQGSTLPRRSGA
MDPRMYSLLQLSTTPRRSGA

SEQ ID NO: 103559 - protein, 20 aa, Artificial Sequence
  Description of Artificial Sequence: Synthetic peptide
  Seed: MDPRMCSLMQGSTLPRRSGA
MDPRMYSLLQLSTVPRRSGA

SEQ ID NO: 103560 - protein, 20 aa, Artificial Sequence
  Description of Artificial Sequence: Synthetic peptide
  Seed: MDPRMCSLMQGSTLPRRSGA
MDPRMYSLLQMSTAPRRSGA

SEQ ID NO: 103561 - protein, 20 aa, Artificial Sequence
  Description of Artificial Sequence: Synthetic peptide
  Seed: MDPRMCSLMQGSTLPRRSGA
MDPRMYSLLQMSTIPRRSGA

SEQ ID NO: 103562 - protein, 20 aa, Artificial Sequence
  Description of Artificial Sequence: Synthetic peptide
  Seed: MDPRMCSLMQGSTLPRRSGA
MDPRMYSLLQMSTLPRRSGA

SEQ ID NO: 103563 - protein, 20 aa, Artificial Sequence
  Description of Artificial Sequence: Synthetic peptide
  Seed: MDPRMCSLMQGSTLPRRSGA
MDPRMYSLLQMSTMPRRSGA

SEQ ID NO: 103564 - protein, 20 aa, Artificial Sequence
  Description of Artificial Sequence: Synthetic peptide
  Seed: MDPRMCSLMQGSTLPRRSGA
MDPRMYSLLQMSTNPRRSGA

SEQ ID NO: 103565 - protein, 20 aa, Artificial Sequence
  Description of Artificial Sequence: Synthetic peptide
  Seed: MDPRMCSLMQGSTLPRRSGA
MDPRMYSLLQMSTSPRRSGA

SEQ ID NO: 103566 - protein, 20 aa, Artificial Sequence
  Description of Artificial Sequence: Synthetic peptide
  Seed: MDPRMCSLMQGSTLPRRSGA
MDPRMYSLLQMSTTPRRSGA

SEQ ID NO: 103567 - protein, 20 aa, Artificial Sequence
  Description of Artificial Sequence: Synthetic peptide
  Seed: MDPRMCSLMQGSTLPRRSGA
MDPRMYSLLQMSTVPRRSGA

SEQ ID NO: 103568 - protein, 20 aa, Artificial Sequence
  Description of Artificial Sequence: Synthetic peptide
  Seed: MDPRMCSLMQGSTLPRRSGA
MDPRMYSLLQNSTAPRRSGA

SEQ ID NO: 103569 - protein, 20 aa, Artificial Sequence
  Description of Artificial Sequence: Synthetic peptide
  Seed: MDPRMCSLMQGSTLPRRSGA
MDPRMYSLLQNSTGPRRSGA

SEQ ID NO: 103570 - protein, 20 aa, Artificial Sequence
  Description of Artificial Sequence: Synthetic peptide
  Seed: MDPRMCSLMQGSTLPRRSGA
MDPRMYSLLQNSTIPRRSGA

SEQ ID NO: 103571 - protein, 20 aa, Artificial Sequence
  Description of Artificial Sequence: Synthetic peptide
  Seed: MDPRMCSLMQGSTLPRRSGA
MDPRMYSLLQNSTLPRRSGA

SEQ ID NO: 103572 - protein, 20 aa, Artificial Sequence
  Description of Artificial Sequence: Synthetic peptide
  Seed: MDPRMCSLMQGSTLPRRSGA
MDPRMYSLLQNSTMPRRSGA

SEQ ID NO: 103573 - protein, 20 aa, Artificial Sequence
  Description of Artificial Sequence: Synthetic peptide
  Seed: MDPRMCSLMQGSTLPRRSGA
MDPRMYSLLQNSTNPRRSGA

SEQ ID NO: 103574 - protein, 20 aa, Artificial Sequence
  Description of Artificial Sequence: Synthetic peptide
  Seed: MDPRMCSLMQGSTLPRRSGA
MDPRMYSLLQNSTSPRRSGA

SEQ ID NO: 103575 - protein, 20 aa, Artificial Sequence
  Description of Artificial Sequence: Synthetic peptide
  Seed: MDPRMCSLMQGSTLPRRSGA
MDPRMYSLLQNSTTPRRSGA

SEQ ID NO: 103576 - protein, 20 aa, Artificial Sequence
  Description of Artificial Sequence: Synthetic peptide
  Seed: MDPRMCSLMQGSTLPRRSGA
MDPRMYSLLQNSTVPRRSGA

SEQ ID NO: 103577 - protein, 20 aa, Artificial Sequence
  Description of Artificial Sequence: Synthetic peptide
  Seed: MDPRMCSLMQGSTLPRRSGA
MDPRMYSLLQPSTAPRRSGA

SEQ ID NO: 103578 - protein, 20 aa, Artificial Sequence
  Description of Artificial Sequence: Synthetic peptide
  Seed: MDPRMCSLMQGSTLPRRSGA
MDPRMYSLLQPSTCPRRSGA

SEQ ID NO: 103579 - protein, 20 aa, Artificial Sequence
  Description of Artificial Sequence: Synthetic peptide
  Seed: MDPRMCSLMQGSTLPRRSGA
MDPRMYSLLQPSTDPRRSGA

SEQ ID NO: 103580 - protein, 20 aa, Artificial Sequence
  Description of Artificial Sequence: Synthetic peptide
  Seed: MDPRMCSLMQGSTLPRRSGA
MDPRMYSLLQPSTEPRRSGA

SEQ ID NO: 103581 - protein, 20 aa, Artificial Sequence
  Description of Artificial Sequence: Synthetic peptide
  Seed: MDPRMCSLMQGSTLPRRSGA
MDPRMYSLLQPSTFPRRSGA

SEQ ID NO: 103582 - protein, 20 aa, Artificial Sequence
  Description of Artificial Sequence: Synthetic peptide
  Seed: MDPRMCSLMQGSTLPRRSGA
MDPRMYSLLQPSTGPRRSGA

SEQ ID NO: 103583 - protein, 20 aa, Artificial Sequence
  Description of Artificial Sequence: Synthetic peptide
  Seed: MDPRMCSLMQGSTLPRRSGA
MDPRMYSLLQPSTHPRRSGA

SEQ ID NO: 103584 - protein, 20 aa, Artificial Sequence
  Description of Artificial Sequence: Synthetic peptide
  Seed: MDPRMCSLMQGSTLPRRSGA
MDPRMYSLLQPSTIPRRSGA

SEQ ID NO: 103585 - protein, 20 aa, Artificial Sequence
  Description of Artificial Sequence: Synthetic peptide
  Seed: MDPRMCSLMQGSTLPRRSGA
MDPRMYSLLQPSTLPRRSGA

SEQ ID NO: 103586 - protein, 20 aa, Artificial Sequence
  Description of Artificial Sequence: Synthetic peptide
  Seed: MDPRMCSLMQGSTLPRRSGA
MDPRMYSLLQPSTMPRRSGA

SEQ ID NO: 103587 - protein, 20 aa, Artificial Sequence
  Description of Artificial Sequence: Synthetic peptide
  Seed: MDPRMCSLMQGSTLPRRSGA
MDPRMYSLLQPSTNPRRSGA

SEQ ID NO: 103588 - protein, 20 aa, Artificial Sequence
  Description of Artificial Sequence: Synthetic peptide
  Seed: MDPRMCSLMQGSTLPRRSGA
MDPRMYSLLQPSTPPRRSGA

SEQ ID NO: 103589 - protein, 20 aa, Artificial Sequence
  Description of Artificial Sequence: Synthetic peptide
  Seed: MDPRMCSLMQGSTLPRRSGA
MDPRMYSLLQPSTQPRRSGA

SEQ ID NO: 103590 - protein, 20 aa, Artificial Sequence
  Description of Artificial Sequence: Synthetic peptide
  Seed: MDPRMCSLMQGSTLPRRSGA
MDPRMYSLLQPSTSPRRSGA

SEQ ID NO: 103591 - protein, 20 aa, Artificial Sequence
  Description of Artificial Sequence: Synthetic peptide
  Seed: MDPRMCSLMQGSTLPRRSGA
MDPRMYSLLQPSTTPRRSGA

SEQ ID NO: 103592 - protein, 20 aa, Artificial Sequence
  Description of Artificial Sequence: Synthetic peptide
  Seed: MDPRMCSLMQGSTLPRRSGA
MDPRMYSLLQPSTVPRRSGA

SEQ ID NO: 103593 - protein, 20 aa, Artificial Sequence
  Description of Artificial Sequence: Synthetic peptide
  Seed: MDPRMCSLMQGSTLPRRSGA
MDPRMYSLLQQSTAPRRSGA

SEQ ID NO: 103594 - protein, 20 aa, Artificial Sequence
  Description of Artificial Sequence: Synthetic peptide
  Seed: MDPRMCSLMQGSTLPRRSGA
MDPRMYSLLQQSTIPRRSGA

SEQ ID NO: 103595 - protein, 20 aa, Artificial Sequence
  Description of Artificial Sequence: Synthetic peptide
  Seed: MDPRMCSLMQGSTLPRRSGA
MDPRMYSLLQQSTLPRRSGA

SEQ ID NO: 103596 - protein, 20 aa, Artificial Sequence
  Description of Artificial Sequence: Synthetic peptide
  Seed: MDPRMCSLMQGSTLPRRSGA
MDPRMYSLLQQSTVPRRSGA

SEQ ID NO: 103597 - protein, 20 aa, Artificial Sequence
  Description of Artificial Sequence: Synthetic peptide
  Seed: MDPRMCSLMQGSTLPRRSGA
MDPRMYSLLQSSTAPRRSGA

SEQ ID NO: 103598 - protein, 20 aa, Artificial Sequence
  Description of Artificial Sequence: Synthetic peptide
  Seed: MDPRMCSLMQGSTLPRRSGA
MDPRMYSLLQSSTCPRRSGA

SEQ ID NO: 103599 - protein, 20 aa, Artificial Sequence
  Description of Artificial Sequence: Synthetic peptide
  Seed: MDPRMCSLMQGSTLPRRSGA
MDPRMYSLLQSSTDPRRSGA

SEQ ID NO: 103600 - protein, 20 aa, Artificial Sequence
  Description of Artificial Sequence: Synthetic peptide
  Seed: MDPRMCSLMQGSTLPRRSGA
MDPRMYSLLQSSTFPRRSGA

SEQ ID NO: 103601 - protein, 20 aa, Artificial Sequence
  Description of Artificial Sequence: Synthetic peptide
  Seed: MDPRMCSLMQGSTLPRRSGA
MDPRMYSLLQSSTGPRRSGA

SEQ ID NO: 103602 - protein, 20 aa, Artificial Sequence
  Description of Artificial Sequence: Synthetic peptide
  Seed: MDPRMCSLMQGSTLPRRSGA
MDPRMYSLLQSSTHPRRSGA

SEQ ID NO: 103603 - protein, 20 aa, Artificial Sequence
  Description of Artificial Sequence: Synthetic peptide
  Seed: MDPRMCSLMQGSTLPRRSGA
MDPRMYSLLQSSTIPRRSGA

SEQ ID NO: 103604 - protein, 20 aa, Artificial Sequence
  Description of Artificial Sequence: Synthetic peptide
  Seed: MDPRMCSLMQGSTLPRRSGA
MDPRMYSLLQSSTLPRRSGA

SEQ ID NO: 103605 - protein, 20 aa, Artificial Sequence
  Description of Artificial Sequence: Synthetic peptide
  Seed: MDPRMCSLMQGSTLPRRSGA
MDPRMYSLLQSSTMPRRSGA

SEQ ID NO: 103606 - protein, 20 aa, Artificial Sequence
  Description of Artificial Sequence: Synthetic peptide
  Seed: MDPRMCSLMQGSTLPRRSGA
MDPRMYSLLQSSTNPRRSGA

SEQ ID NO: 103607 - protein, 20 aa, Artificial Sequence
  Description of Artificial Sequence: Synthetic peptide
  Seed: MDPRMCSLMQGSTLPRRSGA
MDPRMYSLLQSSTPPRRSGA

SEQ ID NO: 103608 - protein, 20 aa, Artificial Sequence
  Description of Artificial Sequence: Synthetic peptide
  Seed: MDPRMCSLMQGSTLPRRSGA
MDPRMYSLLQSSTQPRRSGA

SEQ ID NO: 103609 - protein, 20 aa, Artificial Sequence
  Description of Artificial Sequence: Synthetic peptide
  Seed: MDPRMCSLMQGSTLPRRSGA
MDPRMYSLLQSSTSPRRSGA

SEQ ID NO: 103610 - protein, 20 aa, Artificial Sequence
  Description of Artificial Sequence: Synthetic peptide
  Seed: MDPRMCSLMQGSTLPRRSGA
MDPRMYSLLQSSTTPRRSGA

SEQ ID NO: 103611 - protein, 20 aa, Artificial Sequence
  Description of Artificial Sequence: Synthetic peptide
  Seed: MDPRMCSLMQGSTLPRRSGA
MDPRMYSLLQSSTVPRRSGA

SEQ ID NO: 103612 - protein, 20 aa, Artificial Sequence
  Description of Artificial Sequence: Synthetic peptide
  Seed: MDPRMCSLMQGSTLPRRSGA
MDPRMYSLLQSSTYPRRSGA

SEQ ID NO: 103613 - protein, 20 aa, Artificial Sequence
  Description of Artificial Sequence: Synthetic peptide
  Seed: MDPRMCSLMQGSTLPRRSGA
MDPRMYSLLQTSTAPRRSGA

SEQ ID NO: 103614 - protein, 20 aa, Artificial Sequence
  Description of Artificial Sequence: Synthetic peptide
  Seed: MDPRMCSLMQGSTLPRRSGA
MDPRMYSLLQTSTDPRRSGA

SEQ ID NO: 103615 - protein, 20 aa, Artificial Sequence
  Description of Artificial Sequence: Synthetic peptide
  Seed: MDPRMCSLMQGSTLPRRSGA
MDPRMYSLLQTSTGPRRSGA

SEQ ID NO: 103616 - protein, 20 aa, Artificial Sequence
  Description of Artificial Sequence: Synthetic peptide
  Seed: MDPRMCSLMQGSTLPRRSGA
MDPRMYSLLQTSTHPRRSGA

SEQ ID NO: 103617 - protein, 20 aa, Artificial Sequence
  Description of Artificial Sequence: Synthetic peptide
  Seed: MDPRMCSLMQGSTLPRRSGA
MDPRMYSLLQTSTIPRRSGA

SEQ ID NO: 103618 - protein, 20 aa, Artificial Sequence
  Description of Artificial Sequence: Synthetic peptide
  Seed: MDPRMCSLMQGSTLPRRSGA
MDPRMYSLLQTSTLPRRSGA

SEQ ID NO: 103619 - protein, 20 aa, Artificial Sequence
  Description of Artificial Sequence: Synthetic peptide
  Seed: MDPRMCSLMQGSTLPRRSGA
MDPRMYSLLQTSTMPRRSGA

SEQ ID NO: 103620 - protein, 20 aa, Artificial Sequence
  Description of Artificial Sequence: Synthetic peptide
  Seed: MDPRMCSLMQGSTLPRRSGA
MDPRMYSLLQTSTNPRRSGA

SEQ ID NO: 103621 - protein, 20 aa, Artificial Sequence
  Description of Artificial Sequence: Synthetic peptide
  Seed: MDPRMCSLMQGSTLPRRSGA
MDPRMYSLLQTSTPPRRSGA

SEQ ID NO: 103622 - protein, 20 aa, Artificial Sequence
  Description of Artificial Sequence: Synthetic peptide
  Seed: MDPRMCSLMQGSTLPRRSGA
MDPRMYSLLQTSTQPRRSGA

SEQ ID NO: 103623 - protein, 20 aa, Artificial Sequence
  Description of Artificial Sequence: Synthetic peptide
  Seed: MDPRMCSLMQGSTLPRRSGA
MDPRMYSLLQTSTSPRRSGA

SEQ ID NO: 103624 - protein, 20 aa, Artificial Sequence
  Description of Artificial Sequence: Synthetic peptide
  Seed: MDPRMCSLMQGSTLPRRSGA
MDPRMYSLLQTSTTPRRSGA

SEQ ID NO: 103625 - protein, 20 aa, Artificial Sequence
  Description of Artificial Sequence: Synthetic peptide
  Seed: MDPRMCSLMQGSTLPRRSGA
MDPRMYSLLQTSTVPRRSGA

SEQ ID NO: 103626 - protein, 20 aa, Artificial Sequence
  Description of Artificial Sequence: Synthetic peptide
  Seed: MDPRMCSLMQGSTLPRRSGA
MDPRMYSLLQVSTAPRRSGA

SEQ ID NO: 103627 - protein, 20 aa, Artificial Sequence
  Description of Artificial Sequence: Synthetic peptide
  Seed: MDPRMCSLMQGSTLPRRSGA
MDPRMYSLLQVSTDPRRSGA

SEQ ID NO: 103628 - protein, 20 aa, Artificial Sequence
  Description of Artificial Sequence: Synthetic peptide
  Seed: MDPRMCSLMQGSTLPRRSGA
MDPRMYSLLQVSTEPRRSGA

SEQ ID NO: 103629 - protein, 20 aa, Artificial Sequence
  Description of Artificial Sequence: Synthetic peptide
  Seed: MDPRMCSLMQGSTLPRRSGA
MDPRMYSLLQVSTGPRRSGA

SEQ ID NO: 103630 - protein, 20 aa, Artificial Sequence
  Description of Artificial Sequence: Synthetic peptide
  Seed: MDPRMCSLMQGSTLPRRSGA
MDPRMYSLLQVSTHPRRSGA

SEQ ID NO: 103631 - protein, 20 aa, Artificial Sequence
  Description of Artificial Sequence: Synthetic peptide
  Seed: MDPRMCSLMQGSTLPRRSGA
MDPRMYSLLQVSTIPRRSGA

SEQ ID NO: 103632 - protein, 20 aa, Artificial Sequence
  Description of Artificial Sequence: Synthetic peptide
  Seed: MDPRMCSLMQGSTLPRRSGA
MDPRMYSLLQVSTLPRRSGA

SEQ ID NO: 103633 - protein, 20 aa, Artificial Sequence
  Description of Artificial Sequence: Synthetic peptide
  Seed: MDPRMCSLMQGSTLPRRSGA
MDPRMYSLLQVSTMPRRSGA

SEQ ID NO: 103634 - protein, 20 aa, Artificial Sequence
  Description of Artificial Sequence: Synthetic peptide
  Seed: MDPRMCSLMQGSTLPRRSGA
MDPRMYSLLQVSTNPRRSGA

SEQ ID NO: 103635 - protein, 20 aa, Artificial Sequence
  Description of Artificial Sequence: Synthetic peptide
  Seed: MDPRMCSLMQGSTLPRRSGA
MDPRMYSLLQVSTPPRRSGA

SEQ ID NO: 103636 - protein, 20 aa, Artificial Sequence
  Description of Artificial Sequence: Synthetic peptide
  Seed: MDPRMCSLMQGSTLPRRSGA
MDPRMYSLLQVSTQPRRSGA

SEQ ID NO: 103637 - protein, 20 aa, Artificial Sequence
  Description of Artificial Sequence: Synthetic peptide
  Seed: MDPRMCSLMQGSTLPRRSGA
MDPRMYSLLQVSTSPRRSGA

SEQ ID NO: 103638 - protein, 20 aa, Artificial Sequence
  Description of Artificial Sequence: Synthetic peptide
  Seed: MDPRMCSLMQGSTLPRRSGA
MDPRMYSLLQVSTTPRRSGA

SEQ ID NO: 103639 - protein, 20 aa, Artificial Sequence
  Description of Artificial Sequence: Synthetic peptide
  Seed: MDPRMCSLMQGSTLPRRSGA
MDPRMYSLLQVSTVPRRSGA

SEQ ID NO: 103640 - protein, 20 aa, Artificial Sequence
  Description of Artificial Sequence: Synthetic peptide
  Seed: MDPRMCSLMQGSTLPRRSGA
MDPRMYSLMQASTAPRRSGA

SEQ ID NO: 103641 - protein, 20 aa, Artificial Sequence
  Description of Artificial Sequence: Synthetic peptide
  Seed: MDPRMCSLMQGSTLPRRSGA
MDPRMYSLMQASTCPRRSGA

SEQ ID NO: 103642 - protein, 20 aa, Artificial Sequence
  Description of Artificial Sequence: Synthetic peptide
  Seed: MDPRMCSLMQGSTLPRRSGA
MDPRMYSLMQASTDPRRSGA

SEQ ID NO: 103643 - protein, 20 aa, Artificial Sequence
  Description of Artificial Sequence: Synthetic peptide
  Seed: MDPRMCSLMQGSTLPRRSGA
MDPRMYSLMQASTEPRRSGA

SEQ ID NO: 103644 - protein, 20 aa, Artificial Sequence
  Description of Artificial Sequence: Synthetic peptide
  Seed: MDPRMCSLMQGSTLPRRSGA
MDPRMYSLMQASTFPRRSGA

SEQ ID NO: 103645 - protein, 20 aa, Artificial Sequence
  Description of Artificial Sequence: Synthetic peptide
  Seed: MDPRMCSLMQGSTLPRRSGA
MDPRMYSLMQASTGPRRSGA

SEQ ID NO: 103646 - protein, 20 aa, Artificial Sequence
  Description of Artificial Sequence: Synthetic peptide
  Seed: MDPRMCSLMQGSTLPRRSGA
MDPRMYSLMQASTHPRRSGA

SEQ ID NO: 103647 - protein, 20 aa, Artificial Sequence
  Description of Artificial Sequence: Synthetic peptide
  Seed: MDPRMCSLMQGSTLPRRSGA
MDPRMYSLMQASTIPRRSGA

SEQ ID NO: 103648 - protein, 20 aa, Artificial Sequence
  Description of Artificial Sequence: Synthetic peptide
  Seed: MDPRMCSLMQGSTLPRRSGA
MDPRMYSLMQASTKPRRSGA

SEQ ID NO: 103649 - protein, 20 aa, Artificial Sequence
  Description of Artificial Sequence: Synthetic peptide
  Seed: MDPRMCSLMQGSTLPRRSGA
MDPRMYSLMQASTLPRRSGA

SEQ ID NO: 103650 - protein, 20 aa, Artificial Sequence
  Description of Artificial Sequence: Synthetic peptide
  Seed: MDPRMCSLMQGSTLPRRSGA
MDPRMYSLMQASTMPRRSGA

SEQ ID NO: 103651 - protein, 20 aa, Artificial Sequence
  Description of Artificial Sequence: Synthetic peptide
  Seed: MDPRMCSLMQGSTLPRRSGA
MDPRMYSLMQASTNPRRSGA

SEQ ID NO: 103652 - protein, 20 aa, Artificial Sequence
  Description of Artificial Sequence: Synthetic peptide
  Seed: MDPRMCSLMQGSTLPRRSGA
MDPRMYSLMQASTPPRRSGA

SEQ ID NO: 103653 - protein, 20 aa, Artificial Sequence
  Description of Artificial Sequence: Synthetic peptide
  Seed: MDPRMCSLMQGSTLPRRSGA
MDPRMYSLMQASTQPRRSGA

SEQ ID NO: 103654 - protein, 20 aa, Artificial Sequence
  Description of Artificial Sequence: Synthetic peptide
  Seed: MDPRMCSLMQGSTLPRRSGA
MDPRMYSLMQASTRPRRSGA

SEQ ID NO: 103655 - protein, 20 aa, Artificial Sequence
  Description of Artificial Sequence: Synthetic peptide
  Seed: MDPRMCSLMQGSTLPRRSGA
MDPRMYSLMQASTSPRRSGA

SEQ ID NO: 103656 - protein, 20 aa, Artificial Sequence
  Description of Artificial Sequence: Synthetic peptide
  Seed: MDPRMCSLMQGSTLPRRSGA
MDPRMYSLMQASTTPRRSGA

SEQ ID NO: 103657 - protein, 20 aa, Artificial Sequence
  Description of Artificial Sequence: Synthetic peptide
  Seed: MDPRMCSLMQGSTLPRRSGA
MDPRMYSLMQASTVPRRSGA

SEQ ID NO: 103658 - protein, 20 aa, Artificial Sequence
  Description of Artificial Sequence: Synthetic peptide
  Seed: MDPRMCSLMQGSTLPRRSGA
MDPRMYSLMQASTWPRRSGA

SEQ ID NO: 103659 - protein, 20 aa, Artificial Sequence
  Description of Artificial Sequence: Synthetic peptide
  Seed: MDPRMCSLMQGSTLPRRSGA
MDPRMYSLMQASTYPRRSGA

SEQ ID NO: 103660 - protein, 20 aa, Artificial Sequence
  Description of Artificial Sequence: Synthetic peptide
  Seed: MDPRMCSLMQGSTLPRRSGA
MDPRMYSLMQCSTAPRRSGA

SEQ ID NO: 103661 - protein, 20 aa, Artificial Sequence
  Description of Artificial Sequence: Synthetic peptide
  Seed: MDPRMCSLMQGSTLPRRSGA
MDPRMYSLMQCSTVPRRSGA

SEQ ID NO: 103662 - protein, 20 aa, Artificial Sequence
  Description of Artificial Sequence: Synthetic peptide
  Seed: MDPRMCSLMQGSTLPRRSGA
MDPRMYSLMQESTAPRRSGA

SEQ ID NO: 103663 - protein, 20 aa, Artificial Sequence
  Description of Artificial Sequence: Synthetic peptide
  Seed: MDPRMCSLMQGSTLPRRSGA
MDPRMYSLMQESTLPRRSGA

SEQ ID NO: 103664 - protein, 20 aa, Artificial Sequence
  Description of Artificial Sequence: Synthetic peptide
  Seed: MDPRMCSLMQGSTLPRRSGA
MDPRMYSLMQESTVPRRSGA

SEQ ID NO: 103665 - protein, 20 aa, Artificial Sequence
  Description of Artificial Sequence: Synthetic peptide
  Seed: MDPRMCSLMQGSTLPRRSGA
MDPRMYSLMQGSTAPRRSGA

SEQ ID NO: 103666 - protein, 20 aa, Artificial Sequence
  Description of Artificial Sequence: Synthetic peptide
  Seed: MDPRMCSLMQGSTLPRRSGA
MDPRMYSLMQGSTCPRRSGA

SEQ ID NO: 103667 - protein, 20 aa, Artificial Sequence
  Description of Artificial Sequence: Synthetic peptide
  Seed: MDPRMCSLMQGSTLPRRSGA
MDPRMYSLMQGSTFPRRSGA

SEQ ID NO: 103668 - protein, 20 aa, Artificial Sequence
  Description of Artificial Sequence: Synthetic peptide
  Seed: MDPRMCSLMQGSTLPRRSGA
MDPRMYSLMQGSTGPRRSGA

SEQ ID NO: 103669 - protein, 20 aa, Artificial Sequence
  Description of Artificial Sequence: Synthetic peptide
  Seed: MDPRMCSLMQGSTLPRRSGA
MDPRMYSLMQGSTIPRRSGA

SEQ ID NO: 103670 - protein, 20 aa, Artificial Sequence
  Description of Artificial Sequence: Synthetic peptide
  Seed: MDPRMCSLMQGSTLPRRSGA
MDPRMYSLMQGSTLPRRSGA

SEQ ID NO: 103671 - protein, 20 aa, Artificial Sequence
  Description of Artificial Sequence: Synthetic peptide
  Seed: MDPRMCSLMQGSTLPRRSGA
MDPRMYSLMQGSTMPRRSGA

SEQ ID NO: 103672 - protein, 20 aa, Artificial Sequence
  Description of Artificial Sequence: Synthetic peptide
  Seed: MDPRMCSLMQGSTLPRRSGA
MDPRMYSLMQGSTNPRRSGA

SEQ ID NO: 103673 - protein, 20 aa, Artificial Sequence
  Description of Artificial Sequence: Synthetic peptide
  Seed: MDPRMCSLMQGSTLPRRSGA
MDPRMYSLMQGSTQPRRSGA

SEQ ID NO: 103674 - protein, 20 aa, Artificial Sequence
  Description of Artificial Sequence: Synthetic peptide
  Seed: MDPRMCSLMQGSTLPRRSGA
MDPRMYSLMQGSTSPRRSGA

SEQ ID NO: 103675 - protein, 20 aa, Artificial Sequence
  Description of Artificial Sequence: Synthetic peptide
  Seed: MDPRMCSLMQGSTLPRRSGA
MDPRMYSLMQGSTTPRRSGA

SEQ ID NO: 103676 - protein, 20 aa, Artificial Sequence
  Description of Artificial Sequence: Synthetic peptide
  Seed: MDPRMCSLMQGSTLPRRSGA
MDPRMYSLMQGSTVPRRSGA

SEQ ID NO: 103677 - protein, 20 aa, Artificial Sequence
  Description of Artificial Sequence: Synthetic peptide
  Seed: MDPRMCSLMQGSTLPRRSGA
MDPRMYSLMQGSTYPRRSGA

SEQ ID NO: 103678 - protein, 20 aa, Artificial Sequence
  Description of Artificial Sequence: Synthetic peptide
  Seed: MDPRMCSLMQGSTLPRRSGA
MDPRMYSLMQHSTAPRRSGA

SEQ ID NO: 103679 - protein, 20 aa, Artificial Sequence
  Description of Artificial Sequence: Synthetic peptide
  Seed: MDPRMCSLMQGSTLPRRSGA
MDPRMYSLMQHSTIPRRSGA

SEQ ID NO: 103680 - protein, 20 aa, Artificial Sequence
  Description of Artificial Sequence: Synthetic peptide
  Seed: MDPRMCSLMQGSTLPRRSGA
MDPRMYSLMQHSTLPRRSGA

SEQ ID NO: 103681 - protein, 20 aa, Artificial Sequence
  Description of Artificial Sequence: Synthetic peptide
  Seed: MDPRMCSLMQGSTLPRRSGA
MDPRMYSLMQHSTVPRRSGA

SEQ ID NO: 103682 - protein, 20 aa, Artificial Sequence
  Description of Artificial Sequence: Synthetic peptide
  Seed: MDPRMCSLMQGSTLPRRSGA
MDPRMYSLMQISTAPRRSGA

SEQ ID NO: 103683 - protein, 20 aa, Artificial Sequence
  Description of Artificial Sequence: Synthetic peptide
  Seed: MDPRMCSLMQGSTLPRRSGA
MDPRMYSLMQISTDPRRSGA

SEQ ID NO: 103684 - protein, 20 aa, Artificial Sequence
  Description of Artificial Sequence: Synthetic peptide
  Seed: MDPRMCSLMQGSTLPRRSGA
MDPRMYSLMQISTEPRRSGA

SEQ ID NO: 103685 - protein, 20 aa, Artificial Sequence
  Description of Artificial Sequence: Synthetic peptide
  Seed: MDPRMCSLMQGSTLPRRSGA
MDPRMYSLMQISTGPRRSGA

SEQ ID NO: 103686 - protein, 20 aa, Artificial Sequence
  Description of Artificial Sequence: Synthetic peptide
  Seed: MDPRMCSLMQGSTLPRRSGA
MDPRMYSLMQISTHPRRSGA

SEQ ID NO: 103687 - protein, 20 aa, Artificial Sequence
  Description of Artificial Sequence: Synthetic peptide
  Seed: MDPRMCSLMQGSTLPRRSGA
MDPRMYSLMQISTIPRRSGA

SEQ ID NO: 103688 - protein, 20 aa, Artificial Sequence
  Description of Artificial Sequence: Synthetic peptide
  Seed: MDPRMCSLMQGSTLPRRSGA
MDPRMYSLMQISTLPRRSGA

SEQ ID NO: 103689 - protein, 20 aa, Artificial Sequence
  Description of Artificial Sequence: Synthetic peptide
  Seed: MDPRMCSLMQGSTLPRRSGA
MDPRMYSLMQISTMPRRSGA

SEQ ID NO: 103690 - protein, 20 aa, Artificial Sequence
  Description of Artificial Sequence: Synthetic peptide
  Seed: MDPRMCSLMQGSTLPRRSGA
MDPRMYSLMQISTNPRRSGA

SEQ ID NO: 103691 - protein, 20 aa, Artificial Sequence
  Description of Artificial Sequence: Synthetic peptide
  Seed: MDPRMCSLMQGSTLPRRSGA
MDPRMYSLMQISTPPRRSGA

SEQ ID NO: 103692 - protein, 20 aa, Artificial Sequence
  Description of Artificial Sequence: Synthetic peptide
  Seed: MDPRMCSLMQGSTLPRRSGA
MDPRMYSLMQISTQPRRSGA

SEQ ID NO: 103693 - protein, 20 aa, Artificial Sequence
  Description of Artificial Sequence: Synthetic peptide
  Seed: MDPRMCSLMQGSTLPRRSGA
MDPRMYSLMQISTSPRRSGA

SEQ ID NO: 103694 - protein, 20 aa, Artificial Sequence
  Description of Artificial Sequence: Synthetic peptide
  Seed: MDPRMCSLMQGSTLPRRSGA
MDPRMYSLMQISTTPRRSGA

SEQ ID NO: 103695 - protein, 20 aa, Artificial Sequence
  Description of Artificial Sequence: Synthetic peptide
  Seed: MDPRMCSLMQGSTLPRRSGA
MDPRMYSLMQISTVPRRSGA

SEQ ID NO: 103696 - protein, 20 aa, Artificial Sequence
  Description of Artificial Sequence: Synthetic peptide
  Seed: MDPRMCSLMQGSTLPRRSGA
MDPRMYSLMQLSTAPRRSGA

SEQ ID NO: 103697 - protein, 20 aa, Artificial Sequence
  Description of Artificial Sequence: Synthetic peptide
  Seed: MDPRMCSLMQGSTLPRRSGA
MDPRMYSLMQLSTGPRRSGA

SEQ ID NO: 103698 - protein, 20 aa, Artificial Sequence
  Description of Artificial Sequence: Synthetic peptide
  Seed: MDPRMCSLMQGSTLPRRSGA
MDPRMYSLMQLSTIPRRSGA

SEQ ID NO: 103699 - protein, 20 aa, Artificial Sequence
  Description of Artificial Sequence: Synthetic peptide
  Seed: MDPRMCSLMQGSTLPRRSGA
MDPRMYSLMQLSTLPRRSGA

SEQ ID NO: 103700 - protein, 20 aa, Artificial Sequence
  Description of Artificial Sequence: Synthetic peptide
  Seed: MDPRMCSLMQGSTLPRRSGA
MDPRMYSLMQLSTMPRRSGA

SEQ ID NO: 103701 - protein, 20 aa, Artificial Sequence
  Description of Artificial Sequence: Synthetic peptide
  Seed: MDPRMCSLMQGSTLPRRSGA
MDPRMYSLMQLSTNPRRSGA

SEQ ID NO: 103702 - protein, 20 aa, Artificial Sequence
  Description of Artificial Sequence: Synthetic peptide
  Seed: MDPRMCSLMQGSTLPRRSGA
MDPRMYSLMQLSTSPRRSGA

SEQ ID NO: 103703 - protein, 20 aa, Artificial Sequence
  Description of Artificial Sequence: Synthetic peptide
  Seed: MDPRMCSLMQGSTLPRRSGA
MDPRMYSLMQLSTTPRRSGA

SEQ ID NO: 103704 - protein, 20 aa, Artificial Sequence
  Description of Artificial Sequence: Synthetic peptide
  Seed: MDPRMCSLMQGSTLPRRSGA
MDPRMYSLMQLSTVPRRSGA

SEQ ID NO: 103705 - protein, 20 aa, Artificial Sequence
  Description of Artificial Sequence: Synthetic peptide
  Seed: MDPRMCSLMQGSTLPRRSGA
MDPRMYSLMQMSTAPRRSGA

SEQ ID NO: 103706 - protein, 20 aa, Artificial Sequence
  Description of Artificial Sequence: Synthetic peptide
  Seed: MDPRMCSLMQGSTLPRRSGA
MDPRMYSLMQMSTIPRRSGA

SEQ ID NO: 103707 - protein, 20 aa, Artificial Sequence
  Description of Artificial Sequence: Synthetic peptide
  Seed: MDPRMCSLMQGSTLPRRSGA
MDPRMYSLMQMSTLPRRSGA

SEQ ID NO: 103708 - protein, 20 aa, Artificial Sequence
  Description of Artificial Sequence: Synthetic peptide
  Seed: MDPRMCSLMQGSTLPRRSGA
MDPRMYSLMQMSTMPRRSGA

SEQ ID NO: 103709 - protein, 20 aa, Artificial Sequence
  Description of Artificial Sequence: Synthetic peptide
  Seed: MDPRMCSLMQGSTLPRRSGA
MDPRMYSLMQMSTNPRRSGA

SEQ ID NO: 103710 - protein, 20 aa, Artificial Sequence
  Description of Artificial Sequence: Synthetic peptide
  Seed: MDPRMCSLMQGSTLPRRSGA
MDPRMYSLMQMSTSPRRSGA

SEQ ID NO: 103711 - protein, 20 aa, Artificial Sequence
  Description of Artificial Sequence: Synthetic peptide
  Seed: MDPRMCSLMQGSTLPRRSGA
MDPRMYSLMQMSTTPRRSGA

SEQ ID NO: 103712 - protein, 20 aa, Artificial Sequence
  Description of Artificial Sequence: Synthetic peptide
  Seed: MDPRMCSLMQGSTLPRRSGA
MDPRMYSLMQMSTVPRRSGA

SEQ ID NO: 103713 - protein, 20 aa, Artificial Sequence
  Description of Artificial Sequence: Synthetic peptide
  Seed: MDPRMCSLMQGSTLPRRSGA
MDPRMYSLMQNSTAPRRSGA

SEQ ID NO: 103714 - protein, 20 aa, Artificial Sequence
  Description of Artificial Sequence: Synthetic peptide
  Seed: MDPRMCSLMQGSTLPRRSGA
MDPRMYSLMQNSTGPRRSGA

SEQ ID NO: 103715 - protein, 20 aa, Artificial Sequence
  Description of Artificial Sequence: Synthetic peptide
  Seed: MDPRMCSLMQGSTLPRRSGA
MDPRMYSLMQNSTIPRRSGA

SEQ ID NO: 103716 - protein, 20 aa, Artificial Sequence
  Description of Artificial Sequence: Synthetic peptide
  Seed: MDPRMCSLMQGSTLPRRSGA
MDPRMYSLMQNSTLPRRSGA

SEQ ID NO: 103717 - protein, 20 aa, Artificial Sequence
  Description of Artificial Sequence: Synthetic peptide
  Seed: MDPRMCSLMQGSTLPRRSGA
MDPRMYSLMQNSTMPRRSGA

SEQ ID NO: 103718 - protein, 20 aa, Artificial Sequence
  Description of Artificial Sequence: Synthetic peptide
  Seed: MDPRMCSLMQGSTLPRRSGA
MDPRMYSLMQNSTNPRRSGA

SEQ ID NO: 103719 - protein, 20 aa, Artificial Sequence
  Description of Artificial Sequence: Synthetic peptide
  Seed: MDPRMCSLMQGSTLPRRSGA
MDPRMYSLMQNSTSPRRSGA

SEQ ID NO: 103720 - protein, 20 aa, Artificial Sequence
  Description of Artificial Sequence: Synthetic peptide
  Seed: MDPRMCSLMQGSTLPRRSGA
MDPRMYSLMQNSTTPRRSGA

SEQ ID NO: 103721 - protein, 20 aa, Artificial Sequence
  Description of Artificial Sequence: Synthetic peptide
  Seed: MDPRMCSLMQGSTLPRRSGA
MDPRMYSLMQNSTVPRRSGA

SEQ ID NO: 103722 - protein, 20 aa, Artificial Sequence
  Description of Artificial Sequence: Synthetic peptide
  Seed: MDPRMCSLMQGSTLPRRSGA
MDPRMYSLMQPSTAPRRSGA

SEQ ID NO: 103723 - protein, 20 aa, Artificial Sequence
  Description of Artificial Sequence: Synthetic peptide
  Seed: MDPRMCSLMQGSTLPRRSGA
MDPRMYSLMQPSTCPRRSGA

SEQ ID NO: 103724 - protein, 20 aa, Artificial Sequence
  Description of Artificial Sequence: Synthetic peptide
  Seed: MDPRMCSLMQGSTLPRRSGA
MDPRMYSLMQPSTDPRRSGA

SEQ ID NO: 103725 - protein, 20 aa, Artificial Sequence
  Description of Artificial Sequence: Synthetic peptide
  Seed: MDPRMCSLMQGSTLPRRSGA
MDPRMYSLMQPSTEPRRSGA

SEQ ID NO: 103726 - protein, 20 aa, Artificial Sequence
  Description of Artificial Sequence: Synthetic peptide
  Seed: MDPRMCSLMQGSTLPRRSGA
MDPRMYSLMQPSTFPRRSGA

SEQ ID NO: 103727 - protein, 20 aa, Artificial Sequence
  Description of Artificial Sequence: Synthetic peptide
  Seed: MDPRMCSLMQGSTLPRRSGA
MDPRMYSLMQPSTGPRRSGA

SEQ ID NO: 103728 - protein, 20 aa, Artificial Sequence
  Description of Artificial Sequence: Synthetic peptide
  Seed: MDPRMCSLMQGSTLPRRSGA
MDPRMYSLMQPSTHPRRSGA

SEQ ID NO: 103729 - protein, 20 aa, Artificial Sequence
  Description of Artificial Sequence: Synthetic peptide
  Seed: MDPRMCSLMQGSTLPRRSGA
MDPRMYSLMQPSTIPRRSGA

SEQ ID NO: 103730 - protein, 20 aa, Artificial Sequence
  Description of Artificial Sequence: Synthetic peptide
  Seed: MDPRMCSLMQGSTLPRRSGA
MDPRMYSLMQPSTLPRRSGA

SEQ ID NO: 103731 - protein, 20 aa, Artificial Sequence
  Description of Artificial Sequence: Synthetic peptide
  Seed: MDPRMCSLMQGSTLPRRSGA
MDPRMYSLMQPSTMPRRSGA

SEQ ID NO: 103732 - protein, 20 aa, Artificial Sequence
  Description of Artificial Sequence: Synthetic peptide
  Seed: MDPRMCSLMQGSTLPRRSGA
MDPRMYSLMQPSTNPRRSGA

SEQ ID NO: 103733 - protein, 20 aa, Artificial Sequence
  Description of Artificial Sequence: Synthetic peptide
  Seed: MDPRMCSLMQGSTLPRRSGA
MDPRMYSLMQPSTPPRRSGA

SEQ ID NO: 103734 - protein, 20 aa, Artificial Sequence
  Description of Artificial Sequence: Synthetic peptide
  Seed: MDPRMCSLMQGSTLPRRSGA
MDPRMYSLMQPSTQPRRSGA

SEQ ID NO: 103735 - protein, 20 aa, Artificial Sequence
  Description of Artificial Sequence: Synthetic peptide
  Seed: MDPRMCSLMQGSTLPRRSGA
MDPRMYSLMQPSTSPRRSGA

SEQ ID NO: 103736 - protein, 20 aa, Artificial Sequence
  Description of Artificial Sequence: Synthetic peptide
  Seed: MDPRMCSLMQGSTLPRRSGA
MDPRMYSLMQPSTTPRRSGA

SEQ ID NO: 103737 - protein, 20 aa, Artificial Sequence
  Description of Artificial Sequence: Synthetic peptide
  Seed: MDPRMCSLMQGSTLPRRSGA
MDPRMYSLMQPSTVPRRSGA

SEQ ID NO: 103738 - protein, 20 aa, Artificial Sequence
  Description of Artificial Sequence: Synthetic peptide
  Seed: MDPRMCSLMQGSTLPRRSGA
MDPRMYSLMQPSTWPRRSGA

SEQ ID NO: 103739 - protein, 20 aa, Artificial Sequence
  Description of Artificial Sequence: Synthetic peptide
  Seed: MDPRMCSLMQGSTLPRRSGA
MDPRMYSLMQQSTAPRRSGA

SEQ ID NO: 103740 - protein, 20 aa, Artificial Sequence
  Description of Artificial Sequence: Synthetic peptide
  Seed: MDPRMCSLMQGSTLPRRSGA
MDPRMYSLMQQSTIPRRSGA

SEQ ID NO: 103741 - protein, 20 aa, Artificial Sequence
  Description of Artificial Sequence: Synthetic peptide
  Seed: MDPRMCSLMQGSTLPRRSGA
MDPRMYSLMQQSTLPRRSGA

SEQ ID NO: 103742 - protein, 20 aa, Artificial Sequence
  Description of Artificial Sequence: Synthetic peptide
  Seed: MDPRMCSLMQGSTLPRRSGA
MDPRMYSLMQQSTVPRRSGA

SEQ ID NO: 103743 - protein, 20 aa, Artificial Sequence
  Description of Artificial Sequence: Synthetic peptide
  Seed: MDPRMCSLMQGSTLPRRSGA
MDPRMYSLMQSSTAPRRSGA

SEQ ID NO: 103744 - protein, 20 aa, Artificial Sequence
  Description of Artificial Sequence: Synthetic peptide
  Seed: MDPRMCSLMQGSTLPRRSGA
MDPRMYSLMQSSTCPRRSGA

SEQ ID NO: 103745 - protein, 20 aa, Artificial Sequence
  Description of Artificial Sequence: Synthetic peptide
  Seed: MDPRMCSLMQGSTLPRRSGA
MDPRMYSLMQSSTDPRRSGA

SEQ ID NO: 103746 - protein, 20 aa, Artificial Sequence
  Description of Artificial Sequence: Synthetic peptide
  Seed: MDPRMCSLMQGSTLPRRSGA
MDPRMYSLMQSSTEPRRSGA

SEQ ID NO: 103747 - protein, 20 aa, Artificial Sequence
  Description of Artificial Sequence: Synthetic peptide
  Seed: MDPRMCSLMQGSTLPRRSGA
MDPRMYSLMQSSTFPRRSGA

SEQ ID NO: 103748 - protein, 20 aa, Artificial Sequence
  Description of Artificial Sequence: Synthetic peptide
  Seed: MDPRMCSLMQGSTLPRRSGA
MDPRMYSLMQSSTGPRRSGA

SEQ ID NO: 103749 - protein, 20 aa, Artificial Sequence
  Description of Artificial Sequence: Synthetic peptide
  Seed: MDPRMCSLMQGSTLPRRSGA
MDPRMYSLMQSSTHPRRSGA

SEQ ID NO: 103750 - protein, 20 aa, Artificial Sequence
  Description of Artificial Sequence: Synthetic peptide
  Seed: MDPRMCSLMQGSTLPRRSGA
MDPRMYSLMQSSTIPRRSGA

SEQ ID NO: 103751 - protein, 20 aa, Artificial Sequence
  Description of Artificial Sequence: Synthetic peptide
  Seed: MDPRMCSLMQGSTLPRRSGA
MDPRMYSLMQSSTLPRRSGA

SEQ ID NO: 103752 - protein, 20 aa, Artificial Sequence
  Description of Artificial Sequence: Synthetic peptide
  Seed: MDPRMCSLMQGSTLPRRSGA
MDPRMYSLMQSSTMPRRSGA

SEQ ID NO: 103753 - protein, 20 aa, Artificial Sequence
  Description of Artificial Sequence: Synthetic peptide
  Seed: MDPRMCSLMQGSTLPRRSGA
MDPRMYSLMQSSTNPRRSGA

SEQ ID NO: 103754 - protein, 20 aa, Artificial Sequence
  Description of Artificial Sequence: Synthetic peptide
  Seed: MDPRMCSLMQGSTLPRRSGA
MDPRMYSLMQSSTPPRRSGA

SEQ ID NO: 103755 - protein, 20 aa, Artificial Sequence
  Description of Artificial Sequence: Synthetic peptide
  Seed: MDPRMCSLMQGSTLPRRSGA
MDPRMYSLMQSSTQPRRSGA

SEQ ID NO: 103756 - protein, 20 aa, Artificial Sequence
  Description of Artificial Sequence: Synthetic peptide
  Seed: MDPRMCSLMQGSTLPRRSGA
MDPRMYSLMQSSTSPRRSGA

SEQ ID NO: 103757 - protein, 20 aa, Artificial Sequence
  Description of Artificial Sequence: Synthetic peptide
  Seed: MDPRMCSLMQGSTLPRRSGA
MDPRMYSLMQSSTTPRRSGA

SEQ ID NO: 103758 - protein, 20 aa, Artificial Sequence
  Description of Artificial Sequence: Synthetic peptide
  Seed: MDPRMCSLMQGSTLPRRSGA
MDPRMYSLMQSSTVPRRSGA

SEQ ID NO: 103759 - protein, 20 aa, Artificial Sequence
  Description of Artificial Sequence: Synthetic peptide
  Seed: MDPRMCSLMQGSTLPRRSGA
MDPRMYSLMQSSTYPRRSGA

SEQ ID NO: 103760 - protein, 20 aa, Artificial Sequence
  Description of Artificial Sequence: Synthetic peptide
  Seed: MDPRMCSLMQGSTLPRRSGA
MDPRMYSLMQTSTAPRRSGA

SEQ ID NO: 103761 - protein, 20 aa, Artificial Sequence
  Description of Artificial Sequence: Synthetic peptide
  Seed: MDPRMCSLMQGSTLPRRSGA
MDPRMYSLMQTSTCPRRSGA

SEQ ID NO: 103762 - protein, 20 aa, Artificial Sequence
  Description of Artificial Sequence: Synthetic peptide
  Seed: MDPRMCSLMQGSTLPRRSGA
MDPRMYSLMQTSTDPRRSGA

SEQ ID NO: 103763 - protein, 20 aa, Artificial Sequence
  Description of Artificial Sequence: Synthetic peptide
  Seed: MDPRMCSLMQGSTLPRRSGA
MDPRMYSLMQTSTEPRRSGA

SEQ ID NO: 103764 - protein, 20 aa, Artificial Sequence
  Description of Artificial Sequence: Synthetic peptide
  Seed: MDPRMCSLMQGSTLPRRSGA
MDPRMYSLMQTSTFPRRSGA

SEQ ID NO: 103765 - protein, 20 aa, Artificial Sequence
  Description of Artificial Sequence: Synthetic peptide
  Seed: MDPRMCSLMQGSTLPRRSGA
MDPRMYSLMQTSTGPRRSGA

SEQ ID NO: 103766 - protein, 20 aa, Artificial Sequence
  Description of Artificial Sequence: Synthetic peptide
  Seed: MDPRMCSLMQGSTLPRRSGA
MDPRMYSLMQTSTHPRRSGA

SEQ ID NO: 103767 - protein, 20 aa, Artificial Sequence
  Description of Artificial Sequence: Synthetic peptide
  Seed: MDPRMCSLMQGSTLPRRSGA
MDPRMYSLMQTSTIPRRSGA

SEQ ID NO: 103768 - protein, 20 aa, Artificial Sequence
  Description of Artificial Sequence: Synthetic peptide
  Seed: MDPRMCSLMQGSTLPRRSGA
MDPRMYSLMQTSTLPRRSGA

SEQ ID NO: 103769 - protein, 20 aa, Artificial Sequence
  Description of Artificial Sequence: Synthetic peptide
  Seed: MDPRMCSLMQGSTLPRRSGA
MDPRMYSLMQTSTMPRRSGA

SEQ ID NO: 103770 - protein, 20 aa, Artificial Sequence
  Description of Artificial Sequence: Synthetic peptide
  Seed: MDPRMCSLMQGSTLPRRSGA
MDPRMYSLMQTSTNPRRSGA

SEQ ID NO: 103771 - protein, 20 aa, Artificial Sequence
  Description of Artificial Sequence: Synthetic peptide
  Seed: MDPRMCSLMQGSTLPRRSGA
MDPRMYSLMQTSTPPRRSGA

SEQ ID NO: 103772 - protein, 20 aa, Artificial Sequence
  Description of Artificial Sequence: Synthetic peptide
  Seed: MDPRMCSLMQGSTLPRRSGA
MDPRMYSLMQTSTQPRRSGA

SEQ ID NO: 103773 - protein, 20 aa, Artificial Sequence
  Description of Artificial Sequence: Synthetic peptide
  Seed: MDPRMCSLMQGSTLPRRSGA
MDPRMYSLMQTSTSPRRSGA

SEQ ID NO: 103774 - protein, 20 aa, Artificial Sequence
  Description of Artificial Sequence: Synthetic peptide
  Seed: MDPRMCSLMQGSTLPRRSGA
MDPRMYSLMQTSTTPRRSGA

SEQ ID NO: 103775 - protein, 20 aa, Artificial Sequence
  Description of Artificial Sequence: Synthetic peptide
  Seed: MDPRMCSLMQGSTLPRRSGA
MDPRMYSLMQTSTVPRRSGA

SEQ ID NO: 103776 - protein, 20 aa, Artificial Sequence
  Description of Artificial Sequence: Synthetic peptide
  Seed: MDPRMCSLMQGSTLPRRSGA
MDPRMYSLMQVSTAPRRSGA

SEQ ID NO: 103777 - protein, 20 aa, Artificial Sequence
  Description of Artificial Sequence: Synthetic peptide
  Seed: MDPRMCSLMQGSTLPRRSGA
MDPRMYSLMQVSTCPRRSGA

SEQ ID NO: 103778 - protein, 20 aa, Artificial Sequence
  Description of Artificial Sequence: Synthetic peptide
  Seed: MDPRMCSLMQGSTLPRRSGA
MDPRMYSLMQVSTDPRRSGA

SEQ ID NO: 103779 - protein, 20 aa, Artificial Sequence
  Description of Artificial Sequence: Synthetic peptide
  Seed: MDPRMCSLMQGSTLPRRSGA
MDPRMYSLMQVSTEPRRSGA

SEQ ID NO: 103780 - protein, 20 aa, Artificial Sequence
  Description of Artificial Sequence: Synthetic peptide
  Seed: MDPRMCSLMQGSTLPRRSGA
MDPRMYSLMQVSTGPRRSGA

SEQ ID NO: 103781 - protein, 20 aa, Artificial Sequence
  Description of Artificial Sequence: Synthetic peptide
  Seed: MDPRMCSLMQGSTLPRRSGA
MDPRMYSLMQVSTHPRRSGA

SEQ ID NO: 103782 - protein, 20 aa, Artificial Sequence
  Description of Artificial Sequence: Synthetic peptide
  Seed: MDPRMCSLMQGSTLPRRSGA
MDPRMYSLMQVSTIPRRSGA

SEQ ID NO: 103783 - protein, 20 aa, Artificial Sequence
  Description of Artificial Sequence: Synthetic peptide
  Seed: MDPRMCSLMQGSTLPRRSGA
MDPRMYSLMQVSTLPRRSGA

SEQ ID NO: 103784 - protein, 20 aa, Artificial Sequence
  Description of Artificial Sequence: Synthetic peptide
  Seed: MDPRMCSLMQGSTLPRRSGA
MDPRMYSLMQVSTMPRRSGA

SEQ ID NO: 103785 - protein, 20 aa, Artificial Sequence
  Description of Artificial Sequence: Synthetic peptide
  Seed: MDPRMCSLMQGSTLPRRSGA
MDPRMYSLMQVSTNPRRSGA

SEQ ID NO: 103786 - protein, 20 aa, Artificial Sequence
  Description of Artificial Sequence: Synthetic peptide
  Seed: MDPRMCSLMQGSTLPRRSGA
MDPRMYSLMQVSTPPRRSGA

SEQ ID NO: 103787 - protein, 20 aa, Artificial Sequence
  Description of Artificial Sequence: Synthetic peptide
  Seed: MDPRMCSLMQGSTLPRRSGA
MDPRMYSLMQVSTQPRRSGA

SEQ ID NO: 103788 - protein, 20 aa, Artificial Sequence
  Description of Artificial Sequence: Synthetic peptide
  Seed: MDPRMCSLMQGSTLPRRSGA
MDPRMYSLMQVSTSPRRSGA

SEQ ID NO: 103789 - protein, 20 aa, Artificial Sequence
  Description of Artificial Sequence: Synthetic peptide
  Seed: MDPRMCSLMQGSTLPRRSGA
MDPRMYSLMQVSTTPRRSGA

SEQ ID NO: 103790 - protein, 20 aa, Artificial Sequence
  Description of Artificial Sequence: Synthetic peptide
  Seed: MDPRMCSLMQGSTLPRRSGA
MDPRMYSLMQVSTVPRRSGA

SEQ ID NO: 103791 - protein, 20 aa, Artificial Sequence
  Description of Artificial Sequence: Synthetic peptide
  Seed: MDPRMCSLMQGSTLPRRSGA
MDPRMYSLNQASTAPRRSGA

SEQ ID NO: 103792 - protein, 20 aa, Artificial Sequence
  Description of Artificial Sequence: Synthetic peptide
  Seed: MDPRMCSLMQGSTLPRRSGA
MDPRMYSLNQASTIPRRSGA

SEQ ID NO: 103793 - protein, 20 aa, Artificial Sequence
  Description of Artificial Sequence: Synthetic peptide
  Seed: MDPRMCSLMQGSTLPRRSGA
MDPRMYSLNQASTLPRRSGA

SEQ ID NO: 103794 - protein, 20 aa, Artificial Sequence
  Description of Artificial Sequence: Synthetic peptide
  Seed: MDPRMCSLMQGSTLPRRSGA
MDPRMYSLNQASTMPRRSGA

SEQ ID NO: 103795 - protein, 20 aa, Artificial Sequence
  Description of Artificial Sequence: Synthetic peptide
  Seed: MDPRMCSLMQGSTLPRRSGA
MDPRMYSLNQASTVPRRSGA

SEQ ID NO: 103796 - protein, 20 aa, Artificial Sequence
  Description of Artificial Sequence: Synthetic peptide
  Seed: MDPRMCSLMQGSTLPRRSGA
MDPRMYSLNQGSTLPRRSGA

SEQ ID NO: 103797 - protein, 20 aa, Artificial Sequence
  Description of Artificial Sequence: Synthetic peptide
  Seed: MDPRMCSLMQGSTLPRRSGA
MDPRMYSLNQGSTVPRRSGA

SEQ ID NO: 103798 - protein, 20 aa, Artificial Sequence
  Description of Artificial Sequence: Synthetic peptide
  Seed: MDPRMCSLMQGSTLPRRSGA
MDPRMYSLQQASTAPRRSGA

SEQ ID NO: 103799 - protein, 20 aa, Artificial Sequence
  Description of Artificial Sequence: Synthetic peptide
  Seed: MDPRMCSLMQGSTLPRRSGA
MDPRMYSLQQASTFPRRSGA

SEQ ID NO: 103800 - protein, 20 aa, Artificial Sequence
  Description of Artificial Sequence: Synthetic peptide
  Seed: MDPRMCSLMQGSTLPRRSGA
MDPRMYSLQQASTGPRRSGA

SEQ ID NO: 103801 - protein, 20 aa, Artificial Sequence
  Description of Artificial Sequence: Synthetic peptide
  Seed: MDPRMCSLMQGSTLPRRSGA
MDPRMYSLQQASTIPRRSGA

SEQ ID NO: 103802 - protein, 20 aa, Artificial Sequence
  Description of Artificial Sequence: Synthetic peptide
  Seed: MDPRMCSLMQGSTLPRRSGA
MDPRMYSLQQASTLPRRSGA

SEQ ID NO: 103803 - protein, 20 aa, Artificial Sequence
  Description of Artificial Sequence: Synthetic peptide
  Seed: MDPRMCSLMQGSTLPRRSGA
MDPRMYSLQQASTMPRRSGA

SEQ ID NO: 103804 - protein, 20 aa, Artificial Sequence
  Description of Artificial Sequence: Synthetic peptide
  Seed: MDPRMCSLMQGSTLPRRSGA
MDPRMYSLQQASTNPRRSGA

SEQ ID NO: 103805 - protein, 20 aa, Artificial Sequence
  Description of Artificial Sequence: Synthetic peptide
  Seed: MDPRMCSLMQGSTLPRRSGA
MDPRMYSLQQASTSPRRSGA

SEQ ID NO: 103806 - protein, 20 aa, Artificial Sequence
  Description of Artificial Sequence: Synthetic peptide
  Seed: MDPRMCSLMQGSTLPRRSGA
MDPRMYSLQQASTTPRRSGA

SEQ ID NO: 103807 - protein, 20 aa, Artificial Sequence
  Description of Artificial Sequence: Synthetic peptide
  Seed: MDPRMCSLMQGSTLPRRSGA
MDPRMYSLQQASTVPRRSGA

SEQ ID NO: 103808 - protein, 20 aa, Artificial Sequence
  Description of Artificial Sequence: Synthetic peptide
  Seed: MDPRMCSLMQGSTLPRRSGA
MDPRMYSLQQGSTAPRRSGA

SEQ ID NO: 103809 - protein, 20 aa, Artificial Sequence
  Description of Artificial Sequence: Synthetic peptide
  Seed: MDPRMCSLMQGSTLPRRSGA
MDPRMYSLQQGSTIPRRSGA

SEQ ID NO: 103810 - protein, 20 aa, Artificial Sequence
  Description of Artificial Sequence: Synthetic peptide
  Seed: MDPRMCSLMQGSTLPRRSGA
MDPRMYSLQQGSTLPRRSGA

SEQ ID NO: 103811 - protein, 20 aa, Artificial Sequence
  Description of Artificial Sequence: Synthetic peptide
  Seed: MDPRMCSLMQGSTLPRRSGA
MDPRMYSLQQGSTMPRRSGA

SEQ ID NO: 103812 - protein, 20 aa, Artificial Sequence
  Description of Artificial Sequence: Synthetic peptide
  Seed: MDPRMCSLMQGSTLPRRSGA
MDPRMYSLQQGSTSPRRSGA

SEQ ID NO: 103813 - protein, 20 aa, Artificial Sequence
  Description of Artificial Sequence: Synthetic peptide
  Seed: MDPRMCSLMQGSTLPRRSGA
MDPRMYSLQQGSTTPRRSGA

SEQ ID NO: 103814 - protein, 20 aa, Artificial Sequence
  Description of Artificial Sequence: Synthetic peptide
  Seed: MDPRMCSLMQGSTLPRRSGA
MDPRMYSLQQGSTVPRRSGA

SEQ ID NO: 103815 - protein, 20 aa, Artificial Sequence
  Description of Artificial Sequence: Synthetic peptide
  Seed: MDPRMCSLMQGSTLPRRSGA
MDPRMYSLQQISTAPRRSGA

SEQ ID NO: 103816 - protein, 20 aa, Artificial Sequence
  Description of Artificial Sequence: Synthetic peptide
  Seed: MDPRMCSLMQGSTLPRRSGA
MDPRMYSLQQISTNPRRSGA

SEQ ID NO: 103817 - protein, 20 aa, Artificial Sequence
  Description of Artificial Sequence: Synthetic peptide
  Seed: MDPRMCSLMQGSTLPRRSGA
MDPRMYSLQQISTSPRRSGA

SEQ ID NO: 103818 - protein, 20 aa, Artificial Sequence
  Description of Artificial Sequence: Synthetic peptide
  Seed: MDPRMCSLMQGSTLPRRSGA
MDPRMYSLQQISTVPRRSGA

SEQ ID NO: 103819 - protein, 20 aa, Artificial Sequence
  Description of Artificial Sequence: Synthetic peptide
  Seed: MDPRMCSLMQGSTLPRRSGA
MDPRMYSLQQNSTAPRRSGA

SEQ ID NO: 103820 - protein, 20 aa, Artificial Sequence
  Description of Artificial Sequence: Synthetic peptide
  Seed: MDPRMCSLMQGSTLPRRSGA
MDPRMYSLQQNSTIPRRSGA

SEQ ID NO: 103821 - protein, 20 aa, Artificial Sequence
  Description of Artificial Sequence: Synthetic peptide
  Seed: MDPRMCSLMQGSTLPRRSGA
MDPRMYSLQQNSTLPRRSGA

SEQ ID NO: 103822 - protein, 20 aa, Artificial Sequence
  Description of Artificial Sequence: Synthetic peptide
  Seed: MDPRMCSLMQGSTLPRRSGA
MDPRMYSLQQNSTVPRRSGA

SEQ ID NO: 103823 - protein, 20 aa, Artificial Sequence
  Description of Artificial Sequence: Synthetic peptide
  Seed: MDPRMCSLMQGSTLPRRSGA
MDPRMYSLQQPSTAPRRSGA

SEQ ID NO: 103824 - protein, 20 aa, Artificial Sequence
  Description of Artificial Sequence: Synthetic peptide
  Seed: MDPRMCSLMQGSTLPRRSGA
MDPRMYSLQQPSTIPRRSGA

SEQ ID NO: 103825 - protein, 20 aa, Artificial Sequence
  Description of Artificial Sequence: Synthetic peptide
  Seed: MDPRMCSLMQGSTLPRRSGA
MDPRMYSLQQPSTLPRRSGA

SEQ ID NO: 103826 - protein, 20 aa, Artificial Sequence
  Description of Artificial Sequence: Synthetic peptide
  Seed: MDPRMCSLMQGSTLPRRSGA
MDPRMYSLQQPSTMPRRSGA

SEQ ID NO: 103827 - protein, 20 aa, Artificial Sequence
  Description of Artificial Sequence: Synthetic peptide
  Seed: MDPRMCSLMQGSTLPRRSGA
MDPRMYSLQQPSTNPRRSGA

SEQ ID NO: 103828 - protein, 20 aa, Artificial Sequence
  Description of Artificial Sequence: Synthetic peptide
  Seed: MDPRMCSLMQGSTLPRRSGA
MDPRMYSLQQPSTSPRRSGA

SEQ ID NO: 103829 - protein, 20 aa, Artificial Sequence
  Description of Artificial Sequence: Synthetic peptide
  Seed: MDPRMCSLMQGSTLPRRSGA
MDPRMYSLQQPSTVPRRSGA

SEQ ID NO: 103830 - protein, 20 aa, Artificial Sequence
  Description of Artificial Sequence: Synthetic peptide
  Seed: MDPRMCSLMQGSTLPRRSGA
MDPRMYSLQQSSTAPRRSGA

SEQ ID NO: 103831 - protein, 20 aa, Artificial Sequence
  Description of Artificial Sequence: Synthetic peptide
  Seed: MDPRMCSLMQGSTLPRRSGA
MDPRMYSLQQSSTIPRRSGA

SEQ ID NO: 103832 - protein, 20 aa, Artificial Sequence
  Description of Artificial Sequence: Synthetic peptide
  Seed: MDPRMCSLMQGSTLPRRSGA
MDPRMYSLQQSSTLPRRSGA

SEQ ID NO: 103833 - protein, 20 aa, Artificial Sequence
  Description of Artificial Sequence: Synthetic peptide
  Seed: MDPRMCSLMQGSTLPRRSGA
MDPRMYSLQQSSTMPRRSGA

SEQ ID NO: 103834 - protein, 20 aa, Artificial Sequence
  Description of Artificial Sequence: Synthetic peptide
  Seed: MDPRMCSLMQGSTLPRRSGA
MDPRMYSLQQSSTNPRRSGA

SEQ ID NO: 103835 - protein, 20 aa, Artificial Sequence
  Description of Artificial Sequence: Synthetic peptide
  Seed: MDPRMCSLMQGSTLPRRSGA
MDPRMYSLQQSSTSPRRSGA

SEQ ID NO: 103836 - protein, 20 aa, Artificial Sequence
  Description of Artificial Sequence: Synthetic peptide
  Seed: MDPRMCSLMQGSTLPRRSGA
MDPRMYSLQQSSTTPRRSGA

SEQ ID NO: 103837 - protein, 20 aa, Artificial Sequence
  Description of Artificial Sequence: Synthetic peptide
  Seed: MDPRMCSLMQGSTLPRRSGA
MDPRMYSLQQSSTVPRRSGA

SEQ ID NO: 103838 - protein, 20 aa, Artificial Sequence
  Description of Artificial Sequence: Synthetic peptide
  Seed: MDPRMCSLMQGSTLPRRSGA
MDPRMYSLQQTSTAPRRSGA

SEQ ID NO: 103839 - protein, 20 aa, Artificial Sequence
  Description of Artificial Sequence: Synthetic peptide
  Seed: MDPRMCSLMQGSTLPRRSGA
MDPRMYSLQQTSTIPRRSGA

SEQ ID NO: 103840 - protein, 20 aa, Artificial Sequence
  Description of Artificial Sequence: Synthetic peptide
  Seed: MDPRMCSLMQGSTLPRRSGA
MDPRMYSLQQTSTLPRRSGA

SEQ ID NO: 103841 - protein, 20 aa, Artificial Sequence
  Description of Artificial Sequence: Synthetic peptide
  Seed: MDPRMCSLMQGSTLPRRSGA
MDPRMYSLQQTSTNPRRSGA

SEQ ID NO: 103842 - protein, 20 aa, Artificial Sequence
  Description of Artificial Sequence: Synthetic peptide
  Seed: MDPRMCSLMQGSTLPRRSGA
MDPRMYSLQQTSTSPRRSGA

SEQ ID NO: 103843 - protein, 20 aa, Artificial Sequence
  Description of Artificial Sequence: Synthetic peptide
  Seed: MDPRMCSLMQGSTLPRRSGA
MDPRMYSLQQTSTVPRRSGA

SEQ ID NO: 103844 - protein, 20 aa, Artificial Sequence
  Description of Artificial Sequence: Synthetic peptide
  Seed: MDPRMCSLMQGSTLPRRSGA
MDPRMYSLQQVSTAPRRSGA

SEQ ID NO: 103845 - protein, 20 aa, Artificial Sequence
  Description of Artificial Sequence: Synthetic peptide
  Seed: MDPRMCSLMQGSTLPRRSGA
MDPRMYSLQQVSTIPRRSGA

SEQ ID NO: 103846 - protein, 20 aa, Artificial Sequence
  Description of Artificial Sequence: Synthetic peptide
  Seed: MDPRMCSLMQGSTLPRRSGA
MDPRMYSLQQVSTLPRRSGA

SEQ ID NO: 103847 - protein, 20 aa, Artificial Sequence
  Description of Artificial Sequence: Synthetic peptide
  Seed: MDPRMCSLMQGSTLPRRSGA
MDPRMYSLQQVSTNPRRSGA

SEQ ID NO: 103848 - protein, 20 aa, Artificial Sequence
  Description of Artificial Sequence: Synthetic peptide
  Seed: MDPRMCSLMQGSTLPRRSGA
MDPRMYSLQQVSTSPRRSGA

SEQ ID NO: 103849 - protein, 20 aa, Artificial Sequence
  Description of Artificial Sequence: Synthetic peptide
  Seed: MDPRMCSLMQGSTLPRRSGA
MDPRMYSLQQVSTTPRRSGA

SEQ ID NO: 103850 - protein, 20 aa, Artificial Sequence
  Description of Artificial Sequence: Synthetic peptide
  Seed: MDPRMCSLMQGSTLPRRSGA
MDPRMYSLQQVSTVPRRSGA

SEQ ID NO: 103851 - protein, 20 aa, Artificial Sequence
  Description of Artificial Sequence: Synthetic peptide
  Seed: MDPRMCSLMQGSTLPRRSGA
MDPRMYSLSQASTAPRRSGA

SEQ ID NO: 103852 - protein, 20 aa, Artificial Sequence
  Description of Artificial Sequence: Synthetic peptide
  Seed: MDPRMCSLMQGSTLPRRSGA
MDPRMYSLSQASTIPRRSGA

SEQ ID NO: 103853 - protein, 20 aa, Artificial Sequence
  Description of Artificial Sequence: Synthetic peptide
  Seed: MDPRMCSLMQGSTLPRRSGA
MDPRMYSLSQASTLPRRSGA

SEQ ID NO: 103854 - protein, 20 aa, Artificial Sequence
  Description of Artificial Sequence: Synthetic peptide
  Seed: MDPRMCSLMQGSTLPRRSGA
MDPRMYSLSQASTMPRRSGA

SEQ ID NO: 103855 - protein, 20 aa, Artificial Sequence
  Description of Artificial Sequence: Synthetic peptide
  Seed: MDPRMCSLMQGSTLPRRSGA
MDPRMYSLSQASTNPRRSGA

SEQ ID NO: 103856 - protein, 20 aa, Artificial Sequence
  Description of Artificial Sequence: Synthetic peptide
  Seed: MDPRMCSLMQGSTLPRRSGA
MDPRMYSLSQASTSPRRSGA

SEQ ID NO: 103857 - protein, 20 aa, Artificial Sequence
  Description of Artificial Sequence: Synthetic peptide
  Seed: MDPRMCSLMQGSTLPRRSGA
MDPRMYSLSQASTTPRRSGA

SEQ ID NO: 103858 - protein, 20 aa, Artificial Sequence
  Description of Artificial Sequence: Synthetic peptide
  Seed: MDPRMCSLMQGSTLPRRSGA
MDPRMYSLSQASTVPRRSGA

SEQ ID NO: 103859 - protein, 20 aa, Artificial Sequence
  Description of Artificial Sequence: Synthetic peptide
  Seed: MDPRMCSLMQGSTLPRRSGA
MDPRMYSLSQGSTAPRRSGA

SEQ ID NO: 103860 - protein, 20 aa, Artificial Sequence
  Description of Artificial Sequence: Synthetic peptide
  Seed: MDPRMCSLMQGSTLPRRSGA
MDPRMYSLSQGSTIPRRSGA

SEQ ID NO: 103861 - protein, 20 aa, Artificial Sequence
  Description of Artificial Sequence: Synthetic peptide
  Seed: MDPRMCSLMQGSTLPRRSGA
MDPRMYSLSQGSTLPRRSGA

SEQ ID NO: 103862 - protein, 20 aa, Artificial Sequence
  Description of Artificial Sequence: Synthetic peptide
  Seed: MDPRMCSLMQGSTLPRRSGA
MDPRMYSLSQGSTMPRRSGA

SEQ ID NO: 103863 - protein, 20 aa, Artificial Sequence
  Description of Artificial Sequence: Synthetic peptide
  Seed: MDPRMCSLMQGSTLPRRSGA
MDPRMYSLSQGSTVPRRSGA

SEQ ID NO: 103864 - protein, 20 aa, Artificial Sequence
  Description of Artificial Sequence: Synthetic peptide
  Seed: MDPRMCSLMQGSTLPRRSGA
MDPRMYSLSQISTAPRRSGA

SEQ ID NO: 103865 - protein, 20 aa, Artificial Sequence
  Description of Artificial Sequence: Synthetic peptide
  Seed: MDPRMCSLMQGSTLPRRSGA
MDPRMYSLSQPSTAPRRSGA

SEQ ID NO: 103866 - protein, 20 aa, Artificial Sequence
  Description of Artificial Sequence: Synthetic peptide
  Seed: MDPRMCSLMQGSTLPRRSGA
MDPRMYSLSQPSTIPRRSGA

SEQ ID NO: 103867 - protein, 20 aa, Artificial Sequence
  Description of Artificial Sequence: Synthetic peptide
  Seed: MDPRMCSLMQGSTLPRRSGA
MDPRMYSLSQPSTLPRRSGA

SEQ ID NO: 103868 - protein, 20 aa, Artificial Sequence
  Description of Artificial Sequence: Synthetic peptide
  Seed: MDPRMCSLMQGSTLPRRSGA
MDPRMYSLSQPSTSPRRSGA

SEQ ID NO: 103869 - protein, 20 aa, Artificial Sequence
  Description of Artificial Sequence: Synthetic peptide
  Seed: MDPRMCSLMQGSTLPRRSGA
MDPRMYSLSQPSTVPRRSGA

SEQ ID NO: 103870 - protein, 20 aa, Artificial Sequence
  Description of Artificial Sequence: Synthetic peptide
  Seed: MDPRMCSLMQGSTLPRRSGA
MDPRMYSLSQSSTAPRRSGA

SEQ ID NO: 103871 - protein, 20 aa, Artificial Sequence
  Description of Artificial Sequence: Synthetic peptide
  Seed: MDPRMCSLMQGSTLPRRSGA
MDPRMYSLSQSSTIPRRSGA

SEQ ID NO: 103872 - protein, 20 aa, Artificial Sequence
  Description of Artificial Sequence: Synthetic peptide
  Seed: MDPRMCSLMQGSTLPRRSGA
MDPRMYSLSQSSTLPRRSGA

SEQ ID NO: 103873 - protein, 20 aa, Artificial Sequence
  Description of Artificial Sequence: Synthetic peptide
  Seed: MDPRMCSLMQGSTLPRRSGA
MDPRMYSLSQSSTVPRRSGA

SEQ ID NO: 103874 - protein, 20 aa, Artificial Sequence
  Description of Artificial Sequence: Synthetic peptide
  Seed: MDPRMCSLMQGSTLPRRSGA
MDPRMYSLSQTSTAPRRSGA

SEQ ID NO: 103875 - protein, 20 aa, Artificial Sequence
  Description of Artificial Sequence: Synthetic peptide
  Seed: MDPRMCSLMQGSTLPRRSGA
MDPRMYSLSQVSTAPRRSGA

SEQ ID NO: 103876 - protein, 20 aa, Artificial Sequence
  Description of Artificial Sequence: Synthetic peptide
  Seed: MDPRMCSLMQGSTLPRRSGA
MDPRMYSLSQVSTSPRRSGA

SEQ ID NO: 103877 - protein, 20 aa, Artificial Sequence
  Description of Artificial Sequence: Synthetic peptide
  Seed: MDPRMCSLMQGSTLPRRSGA
MDPRMYSLTQASTAPRRSGA

SEQ ID NO: 103878 - protein, 20 aa, Artificial Sequence
  Description of Artificial Sequence: Synthetic peptide
  Seed: MDPRMCSLMQGSTLPRRSGA
MDPRMYSLTQASTIPRRSGA

SEQ ID NO: 103879 - protein, 20 aa, Artificial Sequence
  Description of Artificial Sequence: Synthetic peptide
  Seed: MDPRMCSLMQGSTLPRRSGA
MDPRMYSLTQASTLPRRSGA

SEQ ID NO: 103880 - protein, 20 aa, Artificial Sequence
  Description of Artificial Sequence: Synthetic peptide
  Seed: MDPRMCSLMQGSTLPRRSGA
MDPRMYSLTQASTMPRRSGA

SEQ ID NO: 103881 - protein, 20 aa, Artificial Sequence
  Description of Artificial Sequence: Synthetic peptide
  Seed: MDPRMCSLMQGSTLPRRSGA
MDPRMYSLTQASTNPRRSGA

SEQ ID NO: 103882 - protein, 20 aa, Artificial Sequence
  Description of Artificial Sequence: Synthetic peptide
  Seed: MDPRMCSLMQGSTLPRRSGA
MDPRMYSLTQASTSPRRSGA

SEQ ID NO: 103883 - protein, 20 aa, Artificial Sequence
  Description of Artificial Sequence: Synthetic peptide
  Seed: MDPRMCSLMQGSTLPRRSGA
MDPRMYSLTQASTVPRRSGA

SEQ ID NO: 103884 - protein, 20 aa, Artificial Sequence
  Description of Artificial Sequence: Synthetic peptide
  Seed: MDPRMCSLMQGSTLPRRSGA
MDPRMYSLTQGSTIPRRSGA

SEQ ID NO: 103885 - protein, 20 aa, Artificial Sequence
  Description of Artificial Sequence: Synthetic peptide
  Seed: MDPRMCSLMQGSTLPRRSGA
MDPRMYSLTQGSTLPRRSGA

SEQ ID NO: 103886 - protein, 20 aa, Artificial Sequence
  Description of Artificial Sequence: Synthetic peptide
  Seed: MDPRMCSLMQGSTLPRRSGA
MDPRMYSLTQGSTVPRRSGA

SEQ ID NO: 103887 - protein, 20 aa, Artificial Sequence
  Description of Artificial Sequence: Synthetic peptide
  Seed: MDPRMCSLMQGSTLPRRSGA
MDPRMYSLTQPSTAPRRSGA

SEQ ID NO: 103888 - protein, 20 aa, Artificial Sequence
  Description of Artificial Sequence: Synthetic peptide
  Seed: MDPRMCSLMQGSTLPRRSGA
MDPRMYSLTQPSTIPRRSGA

SEQ ID NO: 103889 - protein, 20 aa, Artificial Sequence
  Description of Artificial Sequence: Synthetic peptide
  Seed: MDPRMCSLMQGSTLPRRSGA
MDPRMYSLTQPSTLPRRSGA

SEQ ID NO: 103890 - protein, 20 aa, Artificial Sequence
  Description of Artificial Sequence: Synthetic peptide
  Seed: MDPRMCSLMQGSTLPRRSGA
MDPRMYSLTQPSTVPRRSGA

SEQ ID NO: 103891 - protein, 20 aa, Artificial Sequence
  Description of Artificial Sequence: Synthetic peptide
  Seed: MDPRMCSLMQGSTLPRRSGA
MDPRMYSLTQSSTAPRRSGA

SEQ ID NO: 103892 - protein, 20 aa, Artificial Sequence
  Description of Artificial Sequence: Synthetic peptide
  Seed: MDPRMCSLMQGSTLPRRSGA
MDPRMYSLTQSSTIPRRSGA

SEQ ID NO: 103893 - protein, 20 aa, Artificial Sequence
  Description of Artificial Sequence: Synthetic peptide
  Seed: MDPRMCSLMQGSTLPRRSGA
MDPRMYSLTQSSTLPRRSGA

SEQ ID NO: 103894 - protein, 20 aa, Artificial Sequence
  Description of Artificial Sequence: Synthetic peptide
  Seed: MDPRMCSLMQGSTLPRRSGA
MDPRMYSLTQSSTVPRRSGA

SEQ ID NO: 103895 - protein, 20 aa, Artificial Sequence
  Description of Artificial Sequence: Synthetic peptide
  Seed: MDPRMCSLMQGSTLPRRSGA
MDPRMYSLTQVSTAPRRSGA

SEQ ID NO: 103896 - protein, 20 aa, Artificial Sequence
  Description of Artificial Sequence: Synthetic peptide
  Seed: MDPRMCSLMQGSTLPRRSGA
MDPRMYSLVQASTAPRRSGA

SEQ ID NO: 103897 - protein, 20 aa, Artificial Sequence
  Description of Artificial Sequence: Synthetic peptide
  Seed: MDPRMCSLMQGSTLPRRSGA
MDPRMYSLVQASTGPRRSGA

SEQ ID NO: 103898 - protein, 20 aa, Artificial Sequence
  Description of Artificial Sequence: Synthetic peptide
  Seed: MDPRMCSLMQGSTLPRRSGA
MDPRMYSLVQASTHPRRSGA

SEQ ID NO: 103899 - protein, 20 aa, Artificial Sequence
  Description of Artificial Sequence: Synthetic peptide
  Seed: MDPRMCSLMQGSTLPRRSGA
MDPRMYSLVQASTIPRRSGA

SEQ ID NO: 103900 - protein, 20 aa, Artificial Sequence
  Description of Artificial Sequence: Synthetic peptide
  Seed: MDPRMCSLMQGSTLPRRSGA
MDPRMYSLVQASTLPRRSGA

SEQ ID NO: 103901 - protein, 20 aa, Artificial Sequence
  Description of Artificial Sequence: Synthetic peptide
  Seed: MDPRMCSLMQGSTLPRRSGA
MDPRMYSLVQASTMPRRSGA

SEQ ID NO: 103902 - protein, 20 aa, Artificial Sequence
  Description of Artificial Sequence: Synthetic peptide
  Seed: MDPRMCSLMQGSTLPRRSGA
MDPRMYSLVQASTNPRRSGA

SEQ ID NO: 103903 - protein, 20 aa, Artificial Sequence
  Description of Artificial Sequence: Synthetic peptide
  Seed: MDPRMCSLMQGSTLPRRSGA
MDPRMYSLVQASTPPRRSGA

SEQ ID NO: 103904 - protein, 20 aa, Artificial Sequence
  Description of Artificial Sequence: Synthetic peptide
  Seed: MDPRMCSLMQGSTLPRRSGA
MDPRMYSLVQASTQPRRSGA

SEQ ID NO: 103905 - protein, 20 aa, Artificial Sequence
  Description of Artificial Sequence: Synthetic peptide
  Seed: MDPRMCSLMQGSTLPRRSGA
MDPRMYSLVQASTSPRRSGA

SEQ ID NO: 103906 - protein, 20 aa, Artificial Sequence
  Description of Artificial Sequence: Synthetic peptide
  Seed: MDPRMCSLMQGSTLPRRSGA
MDPRMYSLVQASTTPRRSGA

SEQ ID NO: 103907 - protein, 20 aa, Artificial Sequence
  Description of Artificial Sequence: Synthetic peptide
  Seed: MDPRMCSLMQGSTLPRRSGA
MDPRMYSLVQASTVPRRSGA

SEQ ID NO: 103908 - protein, 20 aa, Artificial Sequence
  Description of Artificial Sequence: Synthetic peptide
  Seed: MDPRMCSLMQGSTLPRRSGA
MDPRMYSLVQGSTAPRRSGA

SEQ ID NO: 103909 - protein, 20 aa, Artificial Sequence
  Description of Artificial Sequence: Synthetic peptide
  Seed: MDPRMCSLMQGSTLPRRSGA
MDPRMYSLVQGSTIPRRSGA

SEQ ID NO: 103910 - protein, 20 aa, Artificial Sequence
  Description of Artificial Sequence: Synthetic peptide
  Seed: MDPRMCSLMQGSTLPRRSGA
MDPRMYSLVQGSTLPRRSGA

SEQ ID NO: 103911 - protein, 20 aa, Artificial Sequence
  Description of Artificial Sequence: Synthetic peptide
  Seed: MDPRMCSLMQGSTLPRRSGA
MDPRMYSLVQGSTMPRRSGA

SEQ ID NO: 103912 - protein, 20 aa, Artificial Sequence
  Description of Artificial Sequence: Synthetic peptide
  Seed: MDPRMCSLMQGSTLPRRSGA
MDPRMYSLVQGSTNPRRSGA

SEQ ID NO: 103913 - protein, 20 aa, Artificial Sequence
  Description of Artificial Sequence: Synthetic peptide
  Seed: MDPRMCSLMQGSTLPRRSGA
MDPRMYSLVQGSTSPRRSGA

SEQ ID NO: 103914 - protein, 20 aa, Artificial Sequence
  Description of Artificial Sequence: Synthetic peptide
  Seed: MDPRMCSLMQGSTLPRRSGA
MDPRMYSLVQGSTTPRRSGA

SEQ ID NO: 103915 - protein, 20 aa, Artificial Sequence
  Description of Artificial Sequence: Synthetic peptide
  Seed: MDPRMCSLMQGSTLPRRSGA
MDPRMYSLVQGSTVPRRSGA

SEQ ID NO: 103916 - protein, 20 aa, Artificial Sequence
  Description of Artificial Sequence: Synthetic peptide
  Seed: MDPRMCSLMQGSTLPRRSGA
MDPRMYSLVQISTAPRRSGA

SEQ ID NO: 103917 - protein, 20 aa, Artificial Sequence
  Description of Artificial Sequence: Synthetic peptide
  Seed: MDPRMCSLMQGSTLPRRSGA
MDPRMYSLVQISTIPRRSGA

SEQ ID NO: 103918 - protein, 20 aa, Artificial Sequence
  Description of Artificial Sequence: Synthetic peptide
  Seed: MDPRMCSLMQGSTLPRRSGA
MDPRMYSLVQISTLPRRSGA

SEQ ID NO: 103919 - protein, 20 aa, Artificial Sequence
  Description of Artificial Sequence: Synthetic peptide
  Seed: MDPRMCSLMQGSTLPRRSGA
MDPRMYSLVQISTMPRRSGA

SEQ ID NO: 103920 - protein, 20 aa, Artificial Sequence
  Description of Artificial Sequence: Synthetic peptide
  Seed: MDPRMCSLMQGSTLPRRSGA
MDPRMYSLVQISTNPRRSGA

SEQ ID NO: 103921 - protein, 20 aa, Artificial Sequence
  Description of Artificial Sequence: Synthetic peptide
  Seed: MDPRMCSLMQGSTLPRRSGA
MDPRMYSLVQISTSPRRSGA

SEQ ID NO: 103922 - protein, 20 aa, Artificial Sequence
  Description of Artificial Sequence: Synthetic peptide
  Seed: MDPRMCSLMQGSTLPRRSGA
MDPRMYSLVQISTTPRRSGA

SEQ ID NO: 103923 - protein, 20 aa, Artificial Sequence
  Description of Artificial Sequence: Synthetic peptide
  Seed: MDPRMCSLMQGSTLPRRSGA
MDPRMYSLVQISTVPRRSGA

SEQ ID NO: 103924 - protein, 20 aa, Artificial Sequence
  Description of Artificial Sequence: Synthetic peptide
  Seed: MDPRMCSLMQGSTLPRRSGA
MDPRMYSLVQLSTAPRRSGA

SEQ ID NO: 103925 - protein, 20 aa, Artificial Sequence
  Description of Artificial Sequence: Synthetic peptide
  Seed: MDPRMCSLMQGSTLPRRSGA
MDPRMYSLVQLSTNPRRSGA

SEQ ID NO: 103926 - protein, 20 aa, Artificial Sequence
  Description of Artificial Sequence: Synthetic peptide
  Seed: MDPRMCSLMQGSTLPRRSGA
MDPRMYSLVQLSTSPRRSGA

SEQ ID NO: 103927 - protein, 20 aa, Artificial Sequence
  Description of Artificial Sequence: Synthetic peptide
  Seed: MDPRMCSLMQGSTLPRRSGA
MDPRMYSLVQMSTAPRRSGA

SEQ ID NO: 103928 - protein, 20 aa, Artificial Sequence
  Description of Artificial Sequence: Synthetic peptide
  Seed: MDPRMCSLMQGSTLPRRSGA
MDPRMYSLVQMSTNPRRSGA

SEQ ID NO: 103929 - protein, 20 aa, Artificial Sequence
  Description of Artificial Sequence: Synthetic peptide
  Seed: MDPRMCSLMQGSTLPRRSGA
MDPRMYSLVQMSTSPRRSGA

SEQ ID NO: 103930 - protein, 20 aa, Artificial Sequence
  Description of Artificial Sequence: Synthetic peptide
  Seed: MDPRMCSLMQGSTLPRRSGA
MDPRMYSLVQNSTAPRRSGA

SEQ ID NO: 103931 - protein, 20 aa, Artificial Sequence
  Description of Artificial Sequence: Synthetic peptide
  Seed: MDPRMCSLMQGSTLPRRSGA
MDPRMYSLVQNSTIPRRSGA

SEQ ID NO: 103932 - protein, 20 aa, Artificial Sequence
  Description of Artificial Sequence: Synthetic peptide
  Seed: MDPRMCSLMQGSTLPRRSGA
MDPRMYSLVQNSTLPRRSGA

SEQ ID NO: 103933 - protein, 20 aa, Artificial Sequence
  Description of Artificial Sequence: Synthetic peptide
  Seed: MDPRMCSLMQGSTLPRRSGA
MDPRMYSLVQNSTNPRRSGA

SEQ ID NO: 103934 - protein, 20 aa, Artificial Sequence
  Description of Artificial Sequence: Synthetic peptide
  Seed: MDPRMCSLMQGSTLPRRSGA
MDPRMYSLVQNSTSPRRSGA

SEQ ID NO: 103935 - protein, 20 aa, Artificial Sequence
  Description of Artificial Sequence: Synthetic peptide
  Seed: MDPRMCSLMQGSTLPRRSGA
MDPRMYSLVQNSTVPRRSGA

SEQ ID NO: 103936 - protein, 20 aa, Artificial Sequence
  Description of Artificial Sequence: Synthetic peptide
  Seed: MDPRMCSLMQGSTLPRRSGA
MDPRMYSLVQPSTAPRRSGA

SEQ ID NO: 103937 - protein, 20 aa, Artificial Sequence
  Description of Artificial Sequence: Synthetic peptide
  Seed: MDPRMCSLMQGSTLPRRSGA
MDPRMYSLVQPSTGPRRSGA

SEQ ID NO: 103938 - protein, 20 aa, Artificial Sequence
  Description of Artificial Sequence: Synthetic peptide
  Seed: MDPRMCSLMQGSTLPRRSGA
MDPRMYSLVQPSTIPRRSGA

SEQ ID NO: 103939 - protein, 20 aa, Artificial Sequence
  Description of Artificial Sequence: Synthetic peptide
  Seed: MDPRMCSLMQGSTLPRRSGA
MDPRMYSLVQPSTLPRRSGA

SEQ ID NO: 103940 - protein, 20 aa, Artificial Sequence
  Description of Artificial Sequence: Synthetic peptide
  Seed: MDPRMCSLMQGSTLPRRSGA
MDPRMYSLVQPSTMPRRSGA

SEQ ID NO: 103941 - protein, 20 aa, Artificial Sequence
  Description of Artificial Sequence: Synthetic peptide
  Seed: MDPRMCSLMQGSTLPRRSGA
MDPRMYSLVQPSTNPRRSGA

SEQ ID NO: 103942 - protein, 20 aa, Artificial Sequence
  Description of Artificial Sequence: Synthetic peptide
  Seed: MDPRMCSLMQGSTLPRRSGA
MDPRMYSLVQPSTQPRRSGA

SEQ ID NO: 103943 - protein, 20 aa, Artificial Sequence
  Description of Artificial Sequence: Synthetic peptide
  Seed: MDPRMCSLMQGSTLPRRSGA
MDPRMYSLVQPSTSPRRSGA

SEQ ID NO: 103944 - protein, 20 aa, Artificial Sequence
  Description of Artificial Sequence: Synthetic peptide
  Seed: MDPRMCSLMQGSTLPRRSGA
MDPRMYSLVQPSTTPRRSGA

SEQ ID NO: 103945 - protein, 20 aa, Artificial Sequence
  Description of Artificial Sequence: Synthetic peptide
  Seed: MDPRMCSLMQGSTLPRRSGA
MDPRMYSLVQPSTVPRRSGA

SEQ ID NO: 103946 - protein, 20 aa, Artificial Sequence
  Description of Artificial Sequence: Synthetic peptide
  Seed: MDPRMCSLMQGSTLPRRSGA
MDPRMYSLVQSSTAPRRSGA

SEQ ID NO: 103947 - protein, 20 aa, Artificial Sequence
  Description of Artificial Sequence: Synthetic peptide
  Seed: MDPRMCSLMQGSTLPRRSGA
MDPRMYSLVQSSTGPRRSGA

SEQ ID NO: 103948 - protein, 20 aa, Artificial Sequence
  Description of Artificial Sequence: Synthetic peptide
  Seed: MDPRMCSLMQGSTLPRRSGA
MDPRMYSLVQSSTIPRRSGA

SEQ ID NO: 103949 - protein, 20 aa, Artificial Sequence
  Description of Artificial Sequence: Synthetic peptide
  Seed: MDPRMCSLMQGSTLPRRSGA
MDPRMYSLVQSSTLPRRSGA

SEQ ID NO: 103950 - protein, 20 aa, Artificial Sequence
  Description of Artificial Sequence: Synthetic peptide
  Seed: MDPRMCSLMQGSTLPRRSGA
MDPRMYSLVQSSTMPRRSGA

SEQ ID NO: 103951 - protein, 20 aa, Artificial Sequence
  Description of Artificial Sequence: Synthetic peptide
  Seed: MDPRMCSLMQGSTLPRRSGA
MDPRMYSLVQSSTNPRRSGA

SEQ ID NO: 103952 - protein, 20 aa, Artificial Sequence
  Description of Artificial Sequence: Synthetic peptide
  Seed: MDPRMCSLMQGSTLPRRSGA
MDPRMYSLVQSSTSPRRSGA

SEQ ID NO: 103953 - protein, 20 aa, Artificial Sequence
  Description of Artificial Sequence: Synthetic peptide
  Seed: MDPRMCSLMQGSTLPRRSGA
MDPRMYSLVQSSTTPRRSGA

SEQ ID NO: 103954 - protein, 20 aa, Artificial Sequence
  Description of Artificial Sequence: Synthetic peptide
  Seed: MDPRMCSLMQGSTLPRRSGA
MDPRMYSLVQSSTVPRRSGA

SEQ ID NO: 103955 - protein, 20 aa, Artificial Sequence
  Description of Artificial Sequence: Synthetic peptide
  Seed: MDPRMCSLMQGSTLPRRSGA
MDPRMYSLVQTSTAPRRSGA

SEQ ID NO: 103956 - protein, 20 aa, Artificial Sequence
  Description of Artificial Sequence: Synthetic peptide
  Seed: MDPRMCSLMQGSTLPRRSGA
MDPRMYSLVQTSTGPRRSGA

SEQ ID NO: 103957 - protein, 20 aa, Artificial Sequence
  Description of Artificial Sequence: Synthetic peptide
  Seed: MDPRMCSLMQGSTLPRRSGA
MDPRMYSLVQTSTIPRRSGA

SEQ ID NO: 103958 - protein, 20 aa, Artificial Sequence
  Description of Artificial Sequence: Synthetic peptide
  Seed: MDPRMCSLMQGSTLPRRSGA
MDPRMYSLVQTSTLPRRSGA

SEQ ID NO: 103959 - protein, 20 aa, Artificial Sequence
  Description of Artificial Sequence: Synthetic peptide
  Seed: MDPRMCSLMQGSTLPRRSGA
MDPRMYSLVQTSTMPRRSGA

SEQ ID NO: 103960 - protein, 20 aa, Artificial Sequence
  Description of Artificial Sequence: Synthetic peptide
  Seed: MDPRMCSLMQGSTLPRRSGA
MDPRMYSLVQTSTNPRRSGA

SEQ ID NO: 103961 - protein, 20 aa, Artificial Sequence
  Description of Artificial Sequence: Synthetic peptide
  Seed: MDPRMCSLMQGSTLPRRSGA
MDPRMYSLVQTSTSPRRSGA

SEQ ID NO: 103962 - protein, 20 aa, Artificial Sequence
  Description of Artificial Sequence: Synthetic peptide
  Seed: MDPRMCSLMQGSTLPRRSGA
MDPRMYSLVQTSTTPRRSGA

SEQ ID NO: 103963 - protein, 20 aa, Artificial Sequence
  Description of Artificial Sequence: Synthetic peptide
  Seed: MDPRMCSLMQGSTLPRRSGA
MDPRMYSLVQTSTVPRRSGA

SEQ ID NO: 103964 - protein, 20 aa, Artificial Sequence
  Description of Artificial Sequence: Synthetic peptide
  Seed: MDPRMCSLMQGSTLPRRSGA
MDPRMYSLVQVSTAPRRSGA

SEQ ID NO: 103965 - protein, 20 aa, Artificial Sequence
  Description of Artificial Sequence: Synthetic peptide
  Seed: MDPRMCSLMQGSTLPRRSGA
MDPRMYSLVQVSTGPRRSGA

SEQ ID NO: 103966 - protein, 20 aa, Artificial Sequence
  Description of Artificial Sequence: Synthetic peptide
  Seed: MDPRMCSLMQGSTLPRRSGA
MDPRMYSLVQVSTIPRRSGA

SEQ ID NO: 103967 - protein, 20 aa, Artificial Sequence
  Description of Artificial Sequence: Synthetic peptide
  Seed: MDPRMCSLMQGSTLPRRSGA
MDPRMYSLVQVSTLPRRSGA

SEQ ID NO: 103968 - protein, 20 aa, Artificial Sequence
  Description of Artificial Sequence: Synthetic peptide
  Seed: MDPRMCSLMQGSTLPRRSGA
MDPRMYSLVQVSTMPRRSGA

SEQ ID NO: 103969 - protein, 20 aa, Artificial Sequence
  Description of Artificial Sequence: Synthetic peptide
  Seed: MDPRMCSLMQGSTLPRRSGA
MDPRMYSLVQVSTNPRRSGA

SEQ ID NO: 103970 - protein, 20 aa, Artificial Sequence
  Description of Artificial Sequence: Synthetic peptide
  Seed: MDPRMCSLMQGSTLPRRSGA
MDPRMYSLVQVSTSPRRSGA

SEQ ID NO: 103971 - protein, 20 aa, Artificial Sequence
  Description of Artificial Sequence: Synthetic peptide
  Seed: MDPRMCSLMQGSTLPRRSGA
MDPRMYSLVQVSTTPRRSGA

SEQ ID NO: 103972 - protein, 20 aa, Artificial Sequence
  Description of Artificial Sequence: Synthetic peptide
  Seed: MDPRMCSLMQGSTLPRRSGA
MDPRMYSLVQVSTVPRRSGA

SEQ ID NO: 103973 - protein, 20 aa, Artificial Sequence
  Description of Artificial Sequence: Synthetic peptide
  Seed: MDPRMCSLMQGSTLPRRSGA
MDPRMYSLWQASTAPRRSGA

SEQ ID NO: 103974 - protein, 20 aa, Artificial Sequence
  Description of Artificial Sequence: Synthetic peptide
  Seed: MDPRMCSLMQGSTLPRRSGA
MDPRMCSLFQGITFPRVSGA

SEQ ID NO: 103975 - protein, 20 aa, Artificial Sequence
  Description of Artificial Sequence: Synthetic peptide
  Seed: MDPRMCSLMQGSTLPRRSGA
MDPRMCSLMIGSALIRRAGA

SEQ ID NO: 103976 - protein, 21 aa, Artificial Sequence
  Description of Artificial Sequence: Synthetic peptide
  Seed: MDPRMCSLMQGSTLPRRSGAA
MDPRMFSLAQASTAPRRSGAA

SEQ ID NO: 103977 - protein, 21 aa, Artificial Sequence
  Description of Artificial Sequence: Synthetic peptide
  Seed: MDPRMCSLMQGSTLPRRSGAA
MDPRMFSLAQASTFPRRSGAA

SEQ ID NO: 103978 - protein, 21 aa, Artificial Sequence
  Description of Artificial Sequence: Synthetic peptide
  Seed: MDPRMCSLMQGSTLPRRSGAA
MDPRMFSLAQASTGPRRSGAA

SEQ ID NO: 103979 - protein, 21 aa, Artificial Sequence
  Description of Artificial Sequence: Synthetic peptide
  Seed: MDPRMCSLMQGSTLPRRSGAA
MDPRMFSLAQASTHPRRSGAA

SEQ ID NO: 103980 - protein, 21 aa, Artificial Sequence
  Description of Artificial Sequence: Synthetic peptide
  Seed: MDPRMCSLMQGSTLPRRSGAA
MDPRMFSLAQASTIPRRSGAA

SEQ ID NO: 103981 - protein, 21 aa, Artificial Sequence
  Description of Artificial Sequence: Synthetic peptide
  Seed: MDPRMCSLMQGSTLPRRSGAA
MDPRMFSLAQASTLPRRSGAA

SEQ ID NO: 103982 - protein, 21 aa, Artificial Sequence
  Description of Artificial Sequence: Synthetic peptide
  Seed: MDPRMCSLMQGSTLPRRSGAA
MDPRMFSLAQASTMPRRSGAA

SEQ ID NO: 103983 - protein, 21 aa, Artificial Sequence
  Description of Artificial Sequence: Synthetic peptide
  Seed: MDPRMCSLMQGSTLPRRSGAA
MDPRMFSLAQASTNPRRSGAA

SEQ ID NO: 103984 - protein, 21 aa, Artificial Sequence
  Description of Artificial Sequence: Synthetic peptide
  Seed: MDPRMCSLMQGSTLPRRSGAA
MDPRMFSLAQASTQPRRSGAA

SEQ ID NO: 103985 - protein, 21 aa, Artificial Sequence
  Description of Artificial Sequence: Synthetic peptide
  Seed: MDPRMCSLMQGSTLPRRSGAA
MDPRMFSLAQASTSPRRSGAA

SEQ ID NO: 103986 - protein, 21 aa, Artificial Sequence
  Description of Artificial Sequence: Synthetic peptide
  Seed: MDPRMCSLMQGSTLPRRSGAA
MDPRMFSLAQASTTPRRSGAA

SEQ ID NO: 103987 - protein, 21 aa, Artificial Sequence
  Description of Artificial Sequence: Synthetic peptide
  Seed: MDPRMCSLMQGSTLPRRSGAA
MDPRMFSLAQASTVPRRSGAA

SEQ ID NO: 103988 - protein, 21 aa, Artificial Sequence
  Description of Artificial Sequence: Synthetic peptide
  Seed: MDPRMCSLMQGSTLPRRSGAA
MDPRMFSLAQGSTAPRRSGAA

SEQ ID NO: 103989 - protein, 21 aa, Artificial Sequence
  Description of Artificial Sequence: Synthetic peptide
  Seed: MDPRMCSLMQGSTLPRRSGAA
MDPRMFSLAQGSTIPRRSGAA

SEQ ID NO: 103990 - protein, 21 aa, Artificial Sequence
  Description of Artificial Sequence: Synthetic peptide
  Seed: MDPRMCSLMQGSTLPRRSGAA
MDPRMFSLAQGSTLPRRSGAA

SEQ ID NO: 103991 - protein, 21 aa, Artificial Sequence
  Description of Artificial Sequence: Synthetic peptide
  Seed: MDPRMCSLMQGSTLPRRSGAA
MDPRMFSLAQGSTMPRRSGAA

SEQ ID NO: 103992 - protein, 21 aa, Artificial Sequence
  Description of Artificial Sequence: Synthetic peptide
  Seed: MDPRMCSLMQGSTLPRRSGAA
MDPRMFSLAQGSTSPRRSGAA

SEQ ID NO: 103993 - protein, 21 aa, Artificial Sequence
  Description of Artificial Sequence: Synthetic peptide
  Seed: MDPRMCSLMQGSTLPRRSGAA
MDPRMFSLAQGSTTPRRSGAA

SEQ ID NO: 103994 - protein, 21 aa, Artificial Sequence
  Description of Artificial Sequence: Synthetic peptide
  Seed: MDPRMCSLMQGSTLPRRSGAA
MDPRMFSLAQGSTVPRRSGAA

SEQ ID NO: 103995 - protein, 21 aa, Artificial Sequence
  Description of Artificial Sequence: Synthetic peptide
  Seed: MDPRMCSLMQGSTLPRRSGAA
MDPRMFSLAQISTAPRRSGAA

SEQ ID NO: 103996 - protein, 21 aa, Artificial Sequence
  Description of Artificial Sequence: Synthetic peptide
  Seed: MDPRMCSLMQGSTLPRRSGAA
MDPRMFSLAQISTNPRRSGAA

SEQ ID NO: 103997 - protein, 21 aa, Artificial Sequence
  Description of Artificial Sequence: Synthetic peptide
  Seed: MDPRMCSLMQGSTLPRRSGAA
MDPRMFSLAQISTSPRRSGAA

SEQ ID NO: 103998 - protein, 21 aa, Artificial Sequence
  Description of Artificial Sequence: Synthetic peptide
  Seed: MDPRMCSLMQGSTLPRRSGAA
MDPRMFSLAQISTTPRRSGAA

SEQ ID NO: 103999 - protein, 21 aa, Artificial Sequence
  Description of Artificial Sequence: Synthetic peptide
  Seed: MDPRMCSLMQGSTLPRRSGAA
MDPRMFSLAQISTVPRRSGAA

SEQ ID NO: 104000 - protein, 21 aa, Artificial Sequence
  Description of Artificial Sequence: Synthetic peptide
  Seed: MDPRMCSLMQGSTLPRRSGAA
MDPRMFSLAQLSTAPRRSGAA

SEQ ID NO: 104001 - protein, 21 aa, Artificial Sequence
  Description of Artificial Sequence: Synthetic peptide
  Seed: MDPRMCSLMQGSTLPRRSGAA
MDPRMFSLAQNSTAPRRSGAA

SEQ ID NO: 104002 - protein, 21 aa, Artificial Sequence
  Description of Artificial Sequence: Synthetic peptide
  Seed: MDPRMCSLMQGSTLPRRSGAA
MDPRMFSLAQNSTIPRRSGAA

SEQ ID NO: 104003 - protein, 21 aa, Artificial Sequence
  Description of Artificial Sequence: Synthetic peptide
  Seed: MDPRMCSLMQGSTLPRRSGAA
MDPRMFSLAQNSTLPRRSGAA

SEQ ID NO: 104004 - protein, 21 aa, Artificial Sequence
  Description of Artificial Sequence: Synthetic peptide
  Seed: MDPRMCSLMQGSTLPRRSGAA
MDPRMFSLAQNSTVPRRSGAA

SEQ ID NO: 104005 - protein, 21 aa, Artificial Sequence
  Description of Artificial Sequence: Synthetic peptide
  Seed: MDPRMCSLMQGSTLPRRSGAA
MDPRMFSLAQPSTAPRRSGAA

SEQ ID NO: 104006 - protein, 21 aa, Artificial Sequence
  Description of Artificial Sequence: Synthetic peptide
  Seed: MDPRMCSLMQGSTLPRRSGAA
MDPRMFSLAQPSTIPRRSGAA

SEQ ID NO: 104007 - protein, 21 aa, Artificial Sequence
  Description of Artificial Sequence: Synthetic peptide
  Seed: MDPRMCSLMQGSTLPRRSGAA
MDPRMFSLAQPSTLPRRSGAA

SEQ ID NO: 104008 - protein, 21 aa, Artificial Sequence
  Description of Artificial Sequence: Synthetic peptide
  Seed: MDPRMCSLMQGSTLPRRSGAA
MDPRMFSLAQPSTMPRRSGAA

SEQ ID NO: 104009 - protein, 21 aa, Artificial Sequence
  Description of Artificial Sequence: Synthetic peptide
  Seed: MDPRMCSLMQGSTLPRRSGAA
MDPRMFSLAQPSTNPRRSGAA

SEQ ID NO: 104010 - protein, 21 aa, Artificial Sequence
  Description of Artificial Sequence: Synthetic peptide
  Seed: MDPRMCSLMQGSTLPRRSGAA
MDPRMFSLAQPSTSPRRSGAA

SEQ ID NO: 104011 - protein, 21 aa, Artificial Sequence
  Description of Artificial Sequence: Synthetic peptide
  Seed: MDPRMCSLMQGSTLPRRSGAA
MDPRMFSLAQPSTTPRRSGAA

SEQ ID NO: 104012 - protein, 21 aa, Artificial Sequence
  Description of Artificial Sequence: Synthetic peptide
  Seed: MDPRMCSLMQGSTLPRRSGAA
MDPRMFSLAQPSTVPRRSGAA

SEQ ID NO: 104013 - protein, 21 aa, Artificial Sequence
  Description of Artificial Sequence: Synthetic peptide
  Seed: MDPRMCSLMQGSTLPRRSGAA
MDPRMFSLAQSSTAPRRSGAA

SEQ ID NO: 104014 - protein, 21 aa, Artificial Sequence
  Description of Artificial Sequence: Synthetic peptide
  Seed: MDPRMCSLMQGSTLPRRSGAA
MDPRMFSLAQSSTIPRRSGAA

SEQ ID NO: 104015 - protein, 21 aa, Artificial Sequence
  Description of Artificial Sequence: Synthetic peptide
  Seed: MDPRMCSLMQGSTLPRRSGAA
MDPRMFSLAQSSTLPRRSGAA

SEQ ID NO: 104016 - protein, 21 aa, Artificial Sequence
  Description of Artificial Sequence: Synthetic peptide
  Seed: MDPRMCSLMQGSTLPRRSGAA
MDPRMFSLAQSSTMPRRSGAA

SEQ ID NO: 104017 - protein, 21 aa, Artificial Sequence
  Description of Artificial Sequence: Synthetic peptide
  Seed: MDPRMCSLMQGSTLPRRSGAA
MDPRMFSLAQSSTNPRRSGAA

SEQ ID NO: 104018 - protein, 21 aa, Artificial Sequence
  Description of Artificial Sequence: Synthetic peptide
  Seed: MDPRMCSLMQGSTLPRRSGAA
MDPRMFSLAQSSTSPRRSGAA

SEQ ID NO: 104019 - protein, 21 aa, Artificial Sequence
  Description of Artificial Sequence: Synthetic peptide
  Seed: MDPRMCSLMQGSTLPRRSGAA
MDPRMFSLAQSSTTPRRSGAA

SEQ ID NO: 104020 - protein, 21 aa, Artificial Sequence
  Description of Artificial Sequence: Synthetic peptide
  Seed: MDPRMCSLMQGSTLPRRSGAA
MDPRMFSLAQSSTVPRRSGAA

SEQ ID NO: 104021 - protein, 21 aa, Artificial Sequence
  Description of Artificial Sequence: Synthetic peptide
  Seed: MDPRMCSLMQGSTLPRRSGAA
MDPRMFSLAQTSTAPRRSGAA

SEQ ID NO: 104022 - protein, 21 aa, Artificial Sequence
  Description of Artificial Sequence: Synthetic peptide
  Seed: MDPRMCSLMQGSTLPRRSGAA
MDPRMFSLAQTSTIPRRSGAA

SEQ ID NO: 104023 - protein, 21 aa, Artificial Sequence
  Description of Artificial Sequence: Synthetic peptide
  Seed: MDPRMCSLMQGSTLPRRSGAA
MDPRMFSLAQTSTLPRRSGAA

SEQ ID NO: 104024 - protein, 21 aa, Artificial Sequence
  Description of Artificial Sequence: Synthetic peptide
  Seed: MDPRMCSLMQGSTLPRRSGAA
MDPRMFSLAQTSTMPRRSGAA

SEQ ID NO: 104025 - protein, 21 aa, Artificial Sequence
  Description of Artificial Sequence: Synthetic peptide
  Seed: MDPRMCSLMQGSTLPRRSGAA
MDPRMFSLAQTSTNPRRSGAA

SEQ ID NO: 104026 - protein, 21 aa, Artificial Sequence
  Description of Artificial Sequence: Synthetic peptide
  Seed: MDPRMCSLMQGSTLPRRSGAA
MDPRMFSLAQTSTSPRRSGAA

SEQ ID NO: 104027 - protein, 21 aa, Artificial Sequence
  Description of Artificial Sequence: Synthetic peptide
  Seed: MDPRMCSLMQGSTLPRRSGAA
MDPRMFSLAQTSTTPRRSGAA

SEQ ID NO: 104028 - protein, 21 aa, Artificial Sequence
  Description of Artificial Sequence: Synthetic peptide
  Seed: MDPRMCSLMQGSTLPRRSGAA
MDPRMFSLAQTSTVPRRSGAA

SEQ ID NO: 104029 - protein, 21 aa, Artificial Sequence
  Description of Artificial Sequence: Synthetic peptide
  Seed: MDPRMCSLMQGSTLPRRSGAA
MDPRMFSLAQVSTAPRRSGAA

SEQ ID NO: 104030 - protein, 21 aa, Artificial Sequence
  Description of Artificial Sequence: Synthetic peptide
  Seed: MDPRMCSLMQGSTLPRRSGAA
MDPRMFSLAQVSTIPRRSGAA

SEQ ID NO: 104031 - protein, 21 aa, Artificial Sequence
  Description of Artificial Sequence: Synthetic peptide
  Seed: MDPRMCSLMQGSTLPRRSGAA
MDPRMFSLAQVSTLPRRSGAA

SEQ ID NO: 104032 - protein, 21 aa, Artificial Sequence
  Description of Artificial Sequence: Synthetic peptide
  Seed: MDPRMCSLMQGSTLPRRSGAA
MDPRMFSLAQVSTMPRRSGAA

SEQ ID NO: 104033 - protein, 21 aa, Artificial Sequence
  Description of Artificial Sequence: Synthetic peptide
  Seed: MDPRMCSLMQGSTLPRRSGAA
MDPRMFSLAQVSTNPRRSGAA

SEQ ID NO: 104034 - protein, 21 aa, Artificial Sequence
  Description of Artificial Sequence: Synthetic peptide
  Seed: MDPRMCSLMQGSTLPRRSGAA
MDPRMFSLAQVSTSPRRSGAA

SEQ ID NO: 104035 - protein, 21 aa, Artificial Sequence
  Description of Artificial Sequence: Synthetic peptide
  Seed: MDPRMCSLMQGSTLPRRSGAA
MDPRMFSLAQVSTTPRRSGAA

SEQ ID NO: 104036 - protein, 21 aa, Artificial Sequence
  Description of Artificial Sequence: Synthetic peptide
  Seed: MDPRMCSLMQGSTLPRRSGAA
MDPRMFSLAQVSTVPRRSGAA

SEQ ID NO: 104037 - protein, 21 aa, Artificial Sequence
  Description of Artificial Sequence: Synthetic peptide
  Seed: MDPRMCSLMQGSTLPRRSGAA
MDPRMFSLEQASTAPRRSGAA

SEQ ID NO: 104038 - protein, 21 aa, Artificial Sequence
  Description of Artificial Sequence: Synthetic peptide
  Seed: MDPRMCSLMQGSTLPRRSGAA
MDPRMFSLEQASTIPRRSGAA

SEQ ID NO: 104039 - protein, 21 aa, Artificial Sequence
  Description of Artificial Sequence: Synthetic peptide
  Seed: MDPRMCSLMQGSTLPRRSGAA
MDPRMFSLEQASTLPRRSGAA

SEQ ID NO: 104040 - protein, 21 aa, Artificial Sequence
  Description of Artificial Sequence: Synthetic peptide
  Seed: MDPRMCSLMQGSTLPRRSGAA
MDPRMFSLEQASTVPRRSGAA

SEQ ID NO: 104041 - protein, 21 aa, Artificial Sequence
  Description of Artificial Sequence: Synthetic peptide
  Seed: MDPRMCSLMQGSTLPRRSGAA
MDPRMFSLEQGSTIPRRSGAA

SEQ ID NO: 104042 - protein, 21 aa, Artificial Sequence
  Description of Artificial Sequence: Synthetic peptide
  Seed: MDPRMCSLMQGSTLPRRSGAA
MDPRMFSLEQGSTLPRRSGAA

SEQ ID NO: 104043 - protein, 21 aa, Artificial Sequence
  Description of Artificial Sequence: Synthetic peptide
  Seed: MDPRMCSLMQGSTLPRRSGAA
MDPRMFSLEQGSTVPRRSGAA

SEQ ID NO: 104044 - protein, 21 aa, Artificial Sequence
  Description of Artificial Sequence: Synthetic peptide
  Seed: MDPRMCSLMQGSTLPRRSGAA
MDPRMFSLEQSSTVPRRSGAA

SEQ ID NO: 104045 - protein, 21 aa, Artificial Sequence
  Description of Artificial Sequence: Synthetic peptide
  Seed: MDPRMCSLMQGSTLPRRSGAA
MDPRMFSLFQASTAPRRSGAA

SEQ ID NO: 104046 - protein, 21 aa, Artificial Sequence
  Description of Artificial Sequence: Synthetic peptide
  Seed: MDPRMCSLMQGSTLPRRSGAA
MDPRMFSLFQASTIPRRSGAA

SEQ ID NO: 104047 - protein, 21 aa, Artificial Sequence
  Description of Artificial Sequence: Synthetic peptide
  Seed: MDPRMCSLMQGSTLPRRSGAA
MDPRMFSLFQASTLPRRSGAA

SEQ ID NO: 104048 - protein, 21 aa, Artificial Sequence
  Description of Artificial Sequence: Synthetic peptide
  Seed: MDPRMCSLMQGSTLPRRSGAA
MDPRMFSLFQASTNPRRSGAA

SEQ ID NO: 104049 - protein, 21 aa, Artificial Sequence
  Description of Artificial Sequence: Synthetic peptide
  Seed: MDPRMCSLMQGSTLPRRSGAA
MDPRMFSLFQASTSPRRSGAA

SEQ ID NO: 104050 - protein, 21 aa, Artificial Sequence
  Description of Artificial Sequence: Synthetic peptide
  Seed: MDPRMCSLMQGSTLPRRSGAA
MDPRMFSLFQASTVPRRSGAA

SEQ ID NO: 104051 - protein, 21 aa, Artificial Sequence
  Description of Artificial Sequence: Synthetic peptide
  Seed: MDPRMCSLMQGSTLPRRSGAA
MDPRMFSLFQGSTAPRRSGAA

SEQ ID NO: 104052 - protein, 21 aa, Artificial Sequence
  Description of Artificial Sequence: Synthetic peptide
  Seed: MDPRMCSLMQGSTLPRRSGAA
MDPRMFSLFQGSTVPRRSGAA

SEQ ID NO: 104053 - protein, 21 aa, Artificial Sequence
  Description of Artificial Sequence: Synthetic peptide
  Seed: MDPRMCSLMQGSTLPRRSGAA
MDPRMFSLFQPSTAPRRSGAA

SEQ ID NO: 104054 - protein, 21 aa, Artificial Sequence
  Description of Artificial Sequence: Synthetic peptide
  Seed: MDPRMCSLMQGSTLPRRSGAA
MDPRMFSLFQPSTNPRRSGAA

SEQ ID NO: 104055 - protein, 21 aa, Artificial Sequence
  Description of Artificial Sequence: Synthetic peptide
  Seed: MDPRMCSLMQGSTLPRRSGAA
MDPRMFSLFQPSTSPRRSGAA

SEQ ID NO: 104056 - protein, 21 aa, Artificial Sequence
  Description of Artificial Sequence: Synthetic peptide
  Seed: MDPRMCSLMQGSTLPRRSGAA
MDPRMFSLFQSSTAPRRSGAA

SEQ ID NO: 104057 - protein, 21 aa, Artificial Sequence
  Description of Artificial Sequence: Synthetic peptide
  Seed: MDPRMCSLMQGSTLPRRSGAA
MDPRMFSLFQTSTAPRRSGAA

SEQ ID NO: 104058 - protein, 21 aa, Artificial Sequence
  Description of Artificial Sequence: Synthetic peptide
  Seed: MDPRMCSLMQGSTLPRRSGAA
MDPRMFSLFQVSTAPRRSGAA

SEQ ID NO: 104059 - protein, 21 aa, Artificial Sequence
  Description of Artificial Sequence: Synthetic peptide
  Seed: MDPRMCSLMQGSTLPRRSGAA
MDPRMFSLGQASTAPRRSGAA

SEQ ID NO: 104060 - protein, 21 aa, Artificial Sequence
  Description of Artificial Sequence: Synthetic peptide
  Seed: MDPRMCSLMQGSTLPRRSGAA
MDPRMFSLGQASTIPRRSGAA

SEQ ID NO: 104061 - protein, 21 aa, Artificial Sequence
  Description of Artificial Sequence: Synthetic peptide
  Seed: MDPRMCSLMQGSTLPRRSGAA
MDPRMFSLGQASTLPRRSGAA

SEQ ID NO: 104062 - protein, 21 aa, Artificial Sequence
  Description of Artificial Sequence: Synthetic peptide
  Seed: MDPRMCSLMQGSTLPRRSGAA
MDPRMFSLGQASTVPRRSGAA

SEQ ID NO: 104063 - protein, 21 aa, Artificial Sequence
  Description of Artificial Sequence: Synthetic peptide
  Seed: MDPRMCSLMQGSTLPRRSGAA
MDPRMFSLIQASTAPRRSGAA

SEQ ID NO: 104064 - protein, 21 aa, Artificial Sequence
  Description of Artificial Sequence: Synthetic peptide
  Seed: MDPRMCSLMQGSTLPRRSGAA
MDPRMFSLIQASTCPRRSGAA

SEQ ID NO: 104065 - protein, 21 aa, Artificial Sequence
  Description of Artificial Sequence: Synthetic peptide
  Seed: MDPRMCSLMQGSTLPRRSGAA
MDPRMFSLIQASTDPRRSGAA

SEQ ID NO: 104066 - protein, 21 aa, Artificial Sequence
  Description of Artificial Sequence: Synthetic peptide
  Seed: MDPRMCSLMQGSTLPRRSGAA
MDPRMFSLIQASTEPRRSGAA

SEQ ID NO: 104067 - protein, 21 aa, Artificial Sequence
  Description of Artificial Sequence: Synthetic peptide
  Seed: MDPRMCSLMQGSTLPRRSGAA
MDPRMFSLIQASTGPRRSGAA

SEQ ID NO: 104068 - protein, 21 aa, Artificial Sequence
  Description of Artificial Sequence: Synthetic peptide
  Seed: MDPRMCSLMQGSTLPRRSGAA
MDPRMFSLIQASTHPRRSGAA

SEQ ID NO: 104069 - protein, 21 aa, Artificial Sequence
  Description of Artificial Sequence: Synthetic peptide
  Seed: MDPRMCSLMQGSTLPRRSGAA
MDPRMFSLIQASTIPRRSGAA

SEQ ID NO: 104070 - protein, 21 aa, Artificial Sequence
  Description of Artificial Sequence: Synthetic peptide
  Seed: MDPRMCSLMQGSTLPRRSGAA
MDPRMFSLIQASTLPRRSGAA

SEQ ID NO: 104071 - protein, 21 aa, Artificial Sequence
  Description of Artificial Sequence: Synthetic peptide
  Seed: MDPRMCSLMQGSTLPRRSGAA
MDPRMFSLIQASTMPRRSGAA

SEQ ID NO: 104072 - protein, 21 aa, Artificial Sequence
  Description of Artificial Sequence: Synthetic peptide
  Seed: MDPRMCSLMQGSTLPRRSGAA
MDPRMFSLIQASTNPRRSGAA

SEQ ID NO: 104073 - protein, 21 aa, Artificial Sequence
  Description of Artificial Sequence: Synthetic peptide
  Seed: MDPRMCSLMQGSTLPRRSGAA
MDPRMFSLIQASTPPRRSGAA

SEQ ID NO: 104074 - protein, 21 aa, Artificial Sequence
  Description of Artificial Sequence: Synthetic peptide
  Seed: MDPRMCSLMQGSTLPRRSGAA
MDPRMFSLIQASTQPRRSGAA

SEQ ID NO: 104075 - protein, 21 aa, Artificial Sequence
  Description of Artificial Sequence: Synthetic peptide
  Seed: MDPRMCSLMQGSTLPRRSGAA
MDPRMFSLIQASTSPRRSGAA

SEQ ID NO: 104076 - protein, 21 aa, Artificial Sequence
  Description of Artificial Sequence: Synthetic peptide
  Seed: MDPRMCSLMQGSTLPRRSGAA
MDPRMFSLIQASTTPRRSGAA

SEQ ID NO: 104077 - protein, 21 aa, Artificial Sequence
  Description of Artificial Sequence: Synthetic peptide
  Seed: MDPRMCSLMQGSTLPRRSGAA
MDPRMFSLIQASTVPRRSGAA

SEQ ID NO: 104078 - protein, 21 aa, Artificial Sequence
  Description of Artificial Sequence: Synthetic peptide
  Seed: MDPRMCSLMQGSTLPRRSGAA
MDPRMFSLIQGSTAPRRSGAA

SEQ ID NO: 104079 - protein, 21 aa, Artificial Sequence
  Description of Artificial Sequence: Synthetic peptide
  Seed: MDPRMCSLMQGSTLPRRSGAA
MDPRMFSLIQGSTCPRRSGAA

SEQ ID NO: 104080 - protein, 21 aa, Artificial Sequence
  Description of Artificial Sequence: Synthetic peptide
  Seed: MDPRMCSLMQGSTLPRRSGAA
MDPRMFSLIQGSTGPRRSGAA

SEQ ID NO: 104081 - protein, 21 aa, Artificial Sequence
  Description of Artificial Sequence: Synthetic peptide
  Seed: MDPRMCSLMQGSTLPRRSGAA
MDPRMFSLIQGSTIPRRSGAA

SEQ ID NO: 104082 - protein, 21 aa, Artificial Sequence
  Description of Artificial Sequence: Synthetic peptide
  Seed: MDPRMCSLMQGSTLPRRSGAA
MDPRMFSLIQGSTLPRRSGAA

SEQ ID NO: 104083 - protein, 21 aa, Artificial Sequence
  Description of Artificial Sequence: Synthetic peptide
  Seed: MDPRMCSLMQGSTLPRRSGAA
MDPRMFSLIQGSTMPRRSGAA

SEQ ID NO: 104084 - protein, 21 aa, Artificial Sequence
  Description of Artificial Sequence: Synthetic peptide
  Seed: MDPRMCSLMQGSTLPRRSGAA
MDPRMFSLIQGSTNPRRSGAA

SEQ ID NO: 104085 - protein, 21 aa, Artificial Sequence
  Description of Artificial Sequence: Synthetic peptide
  Seed: MDPRMCSLMQGSTLPRRSGAA
MDPRMFSLIQGSTSPRRSGAA

SEQ ID NO: 104086 - protein, 21 aa, Artificial Sequence
  Description of Artificial Sequence: Synthetic peptide
  Seed: MDPRMCSLMQGSTLPRRSGAA
MDPRMFSLIQGSTTPRRSGAA

SEQ ID NO: 104087 - protein, 21 aa, Artificial Sequence
  Description of Artificial Sequence: Synthetic peptide
  Seed: MDPRMCSLMQGSTLPRRSGAA
MDPRMFSLIQGSTVPRRSGAA

SEQ ID NO: 104088 - protein, 21 aa, Artificial Sequence
  Description of Artificial Sequence: Synthetic peptide
  Seed: MDPRMCSLMQGSTLPRRSGAA
MDPRMFSLIQISTAPRRSGAA

SEQ ID NO: 104089 - protein, 21 aa, Artificial Sequence
  Description of Artificial Sequence: Synthetic peptide
  Seed: MDPRMCSLMQGSTLPRRSGAA
MDPRMFSLIQISTGPRRSGAA

SEQ ID NO: 104090 - protein, 21 aa, Artificial Sequence
  Description of Artificial Sequence: Synthetic peptide
  Seed: MDPRMCSLMQGSTLPRRSGAA
MDPRMFSLIQISTMPRRSGAA

SEQ ID NO: 104091 - protein, 21 aa, Artificial Sequence
  Description of Artificial Sequence: Synthetic peptide
  Seed: MDPRMCSLMQGSTLPRRSGAA
MDPRMFSLIQISTNPRRSGAA

SEQ ID NO: 104092 - protein, 21 aa, Artificial Sequence
  Description of Artificial Sequence: Synthetic peptide
  Seed: MDPRMCSLMQGSTLPRRSGAA
MDPRMFSLIQISTSPRRSGAA

SEQ ID NO: 104093 - protein, 21 aa, Artificial Sequence
  Description of Artificial Sequence: Synthetic peptide
  Seed: MDPRMCSLMQGSTLPRRSGAA
MDPRMFSLIQISTTPRRSGAA

SEQ ID NO: 104094 - protein, 21 aa, Artificial Sequence
  Description of Artificial Sequence: Synthetic peptide
  Seed: MDPRMCSLMQGSTLPRRSGAA
MDPRMFSLIQISTVPRRSGAA

SEQ ID NO: 104095 - protein, 21 aa, Artificial Sequence
  Description of Artificial Sequence: Synthetic peptide
  Seed: MDPRMCSLMQGSTLPRRSGAA
MDPRMFSLIQLSTAPRRSGAA

SEQ ID NO: 104096 - protein, 21 aa, Artificial Sequence
  Description of Artificial Sequence: Synthetic peptide
  Seed: MDPRMCSLMQGSTLPRRSGAA
MDPRMFSLIQLSTNPRRSGAA

SEQ ID NO: 104097 - protein, 21 aa, Artificial Sequence
  Description of Artificial Sequence: Synthetic peptide
  Seed: MDPRMCSLMQGSTLPRRSGAA
MDPRMFSLIQLSTSPRRSGAA

SEQ ID NO: 104098 - protein, 21 aa, Artificial Sequence
  Description of Artificial Sequence: Synthetic peptide
  Seed: MDPRMCSLMQGSTLPRRSGAA
MDPRMFSLIQMSTAPRRSGAA

SEQ ID NO: 104099 - protein, 21 aa, Artificial Sequence
  Description of Artificial Sequence: Synthetic peptide
  Seed: MDPRMCSLMQGSTLPRRSGAA
MDPRMFSLIQMSTNPRRSGAA

SEQ ID NO: 104100 - protein, 21 aa, Artificial Sequence
  Description of Artificial Sequence: Synthetic peptide
  Seed: MDPRMCSLMQGSTLPRRSGAA
MDPRMFSLIQNSTAPRRSGAA

SEQ ID NO: 104101 - protein, 21 aa, Artificial Sequence
  Description of Artificial Sequence: Synthetic peptide
  Seed: MDPRMCSLMQGSTLPRRSGAA
MDPRMFSLIQNSTIPRRSGAA

SEQ ID NO: 104102 - protein, 21 aa, Artificial Sequence
  Description of Artificial Sequence: Synthetic peptide
  Seed: MDPRMCSLMQGSTLPRRSGAA
MDPRMFSLIQNSTLPRRSGAA

SEQ ID NO: 104103 - protein, 21 aa, Artificial Sequence
  Description of Artificial Sequence: Synthetic peptide
  Seed: MDPRMCSLMQGSTLPRRSGAA
MDPRMFSLIQNSTNPRRSGAA

SEQ ID NO: 104104 - protein, 21 aa, Artificial Sequence
  Description of Artificial Sequence: Synthetic peptide
  Seed: MDPRMCSLMQGSTLPRRSGAA
MDPRMFSLIQNSTSPRRSGAA

SEQ ID NO: 104105 - protein, 21 aa, Artificial Sequence
  Description of Artificial Sequence: Synthetic peptide
  Seed: MDPRMCSLMQGSTLPRRSGAA
MDPRMFSLIQNSTTPRRSGAA

SEQ ID NO: 104106 - protein, 21 aa, Artificial Sequence
  Description of Artificial Sequence: Synthetic peptide
  Seed: MDPRMCSLMQGSTLPRRSGAA
MDPRMFSLIQNSTVPRRSGAA

SEQ ID NO: 104107 - protein, 21 aa, Artificial Sequence
  Description of Artificial Sequence: Synthetic peptide
  Seed: MDPRMCSLMQGSTLPRRSGAA
MDPRMFSLIQPSTAPRRSGAA

SEQ ID NO: 104108 - protein, 21 aa, Artificial Sequence
  Description of Artificial Sequence: Synthetic peptide
  Seed: MDPRMCSLMQGSTLPRRSGAA
MDPRMFSLIQPSTGPRRSGAA

SEQ ID NO: 104109 - protein, 21 aa, Artificial Sequence
  Description of Artificial Sequence: Synthetic peptide
  Seed: MDPRMCSLMQGSTLPRRSGAA
MDPRMFSLIQPSTHPRRSGAA

SEQ ID NO: 104110 - protein, 21 aa, Artificial Sequence
  Description of Artificial Sequence: Synthetic peptide
  Seed: MDPRMCSLMQGSTLPRRSGAA
MDPRMFSLIQPSTIPRRSGAA

SEQ ID NO: 104111 - protein, 21 aa, Artificial Sequence
  Description of Artificial Sequence: Synthetic peptide
  Seed: MDPRMCSLMQGSTLPRRSGAA
MDPRMFSLIQPSTLPRRSGAA

SEQ ID NO: 104112 - protein, 21 aa, Artificial Sequence
  Description of Artificial Sequence: Synthetic peptide
  Seed: MDPRMCSLMQGSTLPRRSGAA
MDPRMFSLIQPSTMPRRSGAA

SEQ ID NO: 104113 - protein, 21 aa, Artificial Sequence
  Description of Artificial Sequence: Synthetic peptide
  Seed: MDPRMCSLMQGSTLPRRSGAA
MDPRMFSLIQPSTNPRRSGAA

SEQ ID NO: 104114 - protein, 21 aa, Artificial Sequence
  Description of Artificial Sequence: Synthetic peptide
  Seed: MDPRMCSLMQGSTLPRRSGAA
MDPRMFSLIQPSTQPRRSGAA

SEQ ID NO: 104115 - protein, 21 aa, Artificial Sequence
  Description of Artificial Sequence: Synthetic peptide
  Seed: MDPRMCSLMQGSTLPRRSGAA
MDPRMFSLIQPSTSPRRSGAA

SEQ ID NO: 104116 - protein, 21 aa, Artificial Sequence
  Description of Artificial Sequence: Synthetic peptide
  Seed: MDPRMCSLMQGSTLPRRSGAA
MDPRMFSLIQPSTTPRRSGAA

SEQ ID NO: 104117 - protein, 21 aa, Artificial Sequence
  Description of Artificial Sequence: Synthetic peptide
  Seed: MDPRMCSLMQGSTLPRRSGAA
MDPRMFSLIQPSTVPRRSGAA

SEQ ID NO: 104118 - protein, 21 aa, Artificial Sequence
  Description of Artificial Sequence: Synthetic peptide
  Seed: MDPRMCSLMQGSTLPRRSGAA
MDPRMFSLIQSSTAPRRSGAA

SEQ ID NO: 104119 - protein, 21 aa, Artificial Sequence
  Description of Artificial Sequence: Synthetic peptide
  Seed: MDPRMCSLMQGSTLPRRSGAA
MDPRMFSLIQSSTGPRRSGAA

SEQ ID NO: 104120 - protein, 21 aa, Artificial Sequence
  Description of Artificial Sequence: Synthetic peptide
  Seed: MDPRMCSLMQGSTLPRRSGAA
MDPRMFSLIQSSTHPRRSGAA

SEQ ID NO: 104121 - protein, 21 aa, Artificial Sequence
  Description of Artificial Sequence: Synthetic peptide
  Seed: MDPRMCSLMQGSTLPRRSGAA
MDPRMFSLIQSSTIPRRSGAA

SEQ ID NO: 104122 - protein, 21 aa, Artificial Sequence
  Description of Artificial Sequence: Synthetic peptide
  Seed: MDPRMCSLMQGSTLPRRSGAA
MDPRMFSLIQSSTLPRRSGAA

SEQ ID NO: 104123 - protein, 21 aa, Artificial Sequence
  Description of Artificial Sequence: Synthetic peptide
  Seed: MDPRMCSLMQGSTLPRRSGAA
MDPRMFSLIQSSTMPRRSGAA

SEQ ID NO: 104124 - protein, 21 aa, Artificial Sequence
  Description of Artificial Sequence: Synthetic peptide
  Seed: MDPRMCSLMQGSTLPRRSGAA
MDPRMFSLIQSSTNPRRSGAA

SEQ ID NO: 104125 - protein, 21 aa, Artificial Sequence
  Description of Artificial Sequence: Synthetic peptide
  Seed: MDPRMCSLMQGSTLPRRSGAA
MDPRMFSLIQSSTQPRRSGAA

SEQ ID NO: 104126 - protein, 21 aa, Artificial Sequence
  Description of Artificial Sequence: Synthetic peptide
  Seed: MDPRMCSLMQGSTLPRRSGAA
MDPRMFSLIQSSTSPRRSGAA

SEQ ID NO: 104127 - protein, 21 aa, Artificial Sequence
  Description of Artificial Sequence: Synthetic peptide
  Seed: MDPRMCSLMQGSTLPRRSGAA
MDPRMFSLIQSSTTPRRSGAA

SEQ ID NO: 104128 - protein, 21 aa, Artificial Sequence
  Description of Artificial Sequence: Synthetic peptide
  Seed: MDPRMCSLMQGSTLPRRSGAA
MDPRMFSLIQSSTVPRRSGAA

SEQ ID NO: 104129 - protein, 21 aa, Artificial Sequence
  Description of Artificial Sequence: Synthetic peptide
  Seed: MDPRMCSLMQGSTLPRRSGAA
MDPRMFSLIQTSTAPRRSGAA

SEQ ID NO: 104130 - protein, 21 aa, Artificial Sequence
  Description of Artificial Sequence: Synthetic peptide
  Seed: MDPRMCSLMQGSTLPRRSGAA
MDPRMFSLIQTSTGPRRSGAA

SEQ ID NO: 104131 - protein, 21 aa, Artificial Sequence
  Description of Artificial Sequence: Synthetic peptide
  Seed: MDPRMCSLMQGSTLPRRSGAA
MDPRMFSLIQTSTHPRRSGAA

SEQ ID NO: 104132 - protein, 21 aa, Artificial Sequence
  Description of Artificial Sequence: Synthetic peptide
  Seed: MDPRMCSLMQGSTLPRRSGAA
MDPRMFSLIQTSTIPRRSGAA

SEQ ID NO: 104133 - protein, 21 aa, Artificial Sequence
  Description of Artificial Sequence: Synthetic peptide
  Seed: MDPRMCSLMQGSTLPRRSGAA
MDPRMFSLIQTSTLPRRSGAA

SEQ ID NO: 104134 - protein, 21 aa, Artificial Sequence
  Description of Artificial Sequence: Synthetic peptide
  Seed: MDPRMCSLMQGSTLPRRSGAA
MDPRMFSLIQTSTMPRRSGAA

SEQ ID NO: 104135 - protein, 21 aa, Artificial Sequence
  Description of Artificial Sequence: Synthetic peptide
  Seed: MDPRMCSLMQGSTLPRRSGAA
MDPRMFSLIQTSTNPRRSGAA

SEQ ID NO: 104136 - protein, 21 aa, Artificial Sequence
  Description of Artificial Sequence: Synthetic peptide
  Seed: MDPRMCSLMQGSTLPRRSGAA
MDPRMFSLIQTSTQPRRSGAA

SEQ ID NO: 104137 - protein, 21 aa, Artificial Sequence
  Description of Artificial Sequence: Synthetic peptide
  Seed: MDPRMCSLMQGSTLPRRSGAA
MDPRMFSLIQTSTSPRRSGAA

SEQ ID NO: 104138 - protein, 21 aa, Artificial Sequence
  Description of Artificial Sequence: Synthetic peptide
  Seed: MDPRMCSLMQGSTLPRRSGAA
MDPRMFSLIQTSTTPRRSGAA

SEQ ID NO: 104139 - protein, 21 aa, Artificial Sequence
  Description of Artificial Sequence: Synthetic peptide
  Seed: MDPRMCSLMQGSTLPRRSGAA
MDPRMFSLIQTSTVPRRSGAA

SEQ ID NO: 104140 - protein, 21 aa, Artificial Sequence
  Description of Artificial Sequence: Synthetic peptide
  Seed: MDPRMCSLMQGSTLPRRSGAA
MDPRMFSLIQVSTAPRRSGAA

SEQ ID NO: 104141 - protein, 21 aa, Artificial Sequence
  Description of Artificial Sequence: Synthetic peptide
  Seed: MDPRMCSLMQGSTLPRRSGAA
MDPRMFSLIQVSTGPRRSGAA

SEQ ID NO: 104142 - protein, 21 aa, Artificial Sequence
  Description of Artificial Sequence: Synthetic peptide
  Seed: MDPRMCSLMQGSTLPRRSGAA
MDPRMFSLIQVSTHPRRSGAA

SEQ ID NO: 104143 - protein, 21 aa, Artificial Sequence
  Description of Artificial Sequence: Synthetic peptide
  Seed: MDPRMCSLMQGSTLPRRSGAA
MDPRMFSLIQVSTIPRRSGAA

SEQ ID NO: 104144 - protein, 21 aa, Artificial Sequence
  Description of Artificial Sequence: Synthetic peptide
  Seed: MDPRMCSLMQGSTLPRRSGAA
MDPRMFSLIQVSTLPRRSGAA

SEQ ID NO: 104145 - protein, 21 aa, Artificial Sequence
  Description of Artificial Sequence: Synthetic peptide
  Seed: MDPRMCSLMQGSTLPRRSGAA
MDPRMFSLIQVSTMPRRSGAA

SEQ ID NO: 104146 - protein, 21 aa, Artificial Sequence
  Description of Artificial Sequence: Synthetic peptide
  Seed: MDPRMCSLMQGSTLPRRSGAA
MDPRMFSLIQVSTNPRRSGAA

SEQ ID NO: 104147 - protein, 21 aa, Artificial Sequence
  Description of Artificial Sequence: Synthetic peptide
  Seed: MDPRMCSLMQGSTLPRRSGAA
MDPRMFSLIQVSTQPRRSGAA

SEQ ID NO: 104148 - protein, 21 aa, Artificial Sequence
  Description of Artificial Sequence: Synthetic peptide
  Seed: MDPRMCSLMQGSTLPRRSGAA
MDPRMFSLIQVSTSPRRSGAA

SEQ ID NO: 104149 - protein, 21 aa, Artificial Sequence
  Description of Artificial Sequence: Synthetic peptide
  Seed: MDPRMCSLMQGSTLPRRSGAA
MDPRMFSLIQVSTTPRRSGAA

SEQ ID NO: 104150 - protein, 21 aa, Artificial Sequence
  Description of Artificial Sequence: Synthetic peptide
  Seed: MDPRMCSLMQGSTLPRRSGAA
MDPRMFSLIQVSTVPRRSGAA

SEQ ID NO: 104151 - protein, 21 aa, Artificial Sequence
  Description of Artificial Sequence: Synthetic peptide
  Seed: MDPRMCSLMQGSTLPRRSGAA
MDPRMFSLLQASTAPRRSGAA

SEQ ID NO: 104152 - protein, 21 aa, Artificial Sequence
  Description of Artificial Sequence: Synthetic peptide
  Seed: MDPRMCSLMQGSTLPRRSGAA
MDPRMFSLLQASTCPRRSGAA

SEQ ID NO: 104153 - protein, 21 aa, Artificial Sequence
  Description of Artificial Sequence: Synthetic peptide
  Seed: MDPRMCSLMQGSTLPRRSGAA
MDPRMFSLLQASTDPRRSGAA

SEQ ID NO: 104154 - protein, 21 aa, Artificial Sequence
  Description of Artificial Sequence: Synthetic peptide
  Seed: MDPRMCSLMQGSTLPRRSGAA
MDPRMFSLLQASTEPRRSGAA

SEQ ID NO: 104155 - protein, 21 aa, Artificial Sequence
  Description of Artificial Sequence: Synthetic peptide
  Seed: MDPRMCSLMQGSTLPRRSGAA
MDPRMFSLLQASTFPRRSGAA

SEQ ID NO: 104156 - protein, 21 aa, Artificial Sequence
  Description of Artificial Sequence: Synthetic peptide
  Seed: MDPRMCSLMQGSTLPRRSGAA
MDPRMFSLLQASTGPRRSGAA

SEQ ID NO: 104157 - protein, 21 aa, Artificial Sequence
  Description of Artificial Sequence: Synthetic peptide
  Seed: MDPRMCSLMQGSTLPRRSGAA
MDPRMFSLLQASTHPRRSGAA

SEQ ID NO: 104158 - protein, 21 aa, Artificial Sequence
  Description of Artificial Sequence: Synthetic peptide
  Seed: MDPRMCSLMQGSTLPRRSGAA
MDPRMFSLLQASTIPRRSGAA

SEQ ID NO: 104159 - protein, 21 aa, Artificial Sequence
  Description of Artificial Sequence: Synthetic peptide
  Seed: MDPRMCSLMQGSTLPRRSGAA
MDPRMFSLLQASTLPRRSGAA

SEQ ID NO: 104160 - protein, 21 aa, Artificial Sequence
  Description of Artificial Sequence: Synthetic peptide
  Seed: MDPRMCSLMQGSTLPRRSGAA
MDPRMFSLLQASTMPRRSGAA

SEQ ID NO: 104161 - protein, 21 aa, Artificial Sequence
  Description of Artificial Sequence: Synthetic peptide
  Seed: MDPRMCSLMQGSTLPRRSGAA
MDPRMFSLLQASTNPRRSGAA

SEQ ID NO: 104162 - protein, 21 aa, Artificial Sequence
  Description of Artificial Sequence: Synthetic peptide
  Seed: MDPRMCSLMQGSTLPRRSGAA
MDPRMFSLLQASTPPRRSGAA

SEQ ID NO: 104163 - protein, 21 aa, Artificial Sequence
  Description of Artificial Sequence: Synthetic peptide
  Seed: MDPRMCSLMQGSTLPRRSGAA
MDPRMFSLLQASTQPRRSGAA

SEQ ID NO: 104164 - protein, 21 aa, Artificial Sequence
  Description of Artificial Sequence: Synthetic peptide
  Seed: MDPRMCSLMQGSTLPRRSGAA
MDPRMFSLLQASTSPRRSGAA

SEQ ID NO: 104165 - protein, 21 aa, Artificial Sequence
  Description of Artificial Sequence: Synthetic peptide
  Seed: MDPRMCSLMQGSTLPRRSGAA
MDPRMFSLLQASTTPRRSGAA

SEQ ID NO: 104166 - protein, 21 aa, Artificial Sequence
  Description of Artificial Sequence: Synthetic peptide
  Seed: MDPRMCSLMQGSTLPRRSGAA
MDPRMFSLLQASTVPRRSGAA

SEQ ID NO: 104167 - protein, 21 aa, Artificial Sequence
  Description of Artificial Sequence: Synthetic peptide
  Seed: MDPRMCSLMQGSTLPRRSGAA
MDPRMFSLLQASTYPRRSGAA

SEQ ID NO: 104168 - protein, 21 aa, Artificial Sequence
  Description of Artificial Sequence: Synthetic peptide
  Seed: MDPRMCSLMQGSTLPRRSGAA
MDPRMFSLLQGSTAPRRSGAA

SEQ ID NO: 104169 - protein, 21 aa, Artificial Sequence
  Description of Artificial Sequence: Synthetic peptide
  Seed: MDPRMCSLMQGSTLPRRSGAA
MDPRMFSLLQGSTCPRRSGAA

SEQ ID NO: 104170 - protein, 21 aa, Artificial Sequence
  Description of Artificial Sequence: Synthetic peptide
  Seed: MDPRMCSLMQGSTLPRRSGAA
MDPRMFSLLQGSTFPRRSGAA

SEQ ID NO: 104171 - protein, 21 aa, Artificial Sequence
  Description of Artificial Sequence: Synthetic peptide
  Seed: MDPRMCSLMQGSTLPRRSGAA
MDPRMFSLLQGSTGPRRSGAA

SEQ ID NO: 104172 - protein, 21 aa, Artificial Sequence
  Description of Artificial Sequence: Synthetic peptide
  Seed: MDPRMCSLMQGSTLPRRSGAA
MDPRMFSLLQGSTIPRRSGAA

SEQ ID NO: 104173 - protein, 21 aa, Artificial Sequence
  Description of Artificial Sequence: Synthetic peptide
  Seed: MDPRMCSLMQGSTLPRRSGAA
MDPRMFSLLQGSTLPRRSGAA

SEQ ID NO: 104174 - protein, 21 aa, Artificial Sequence
  Description of Artificial Sequence: Synthetic peptide
  Seed: MDPRMCSLMQGSTLPRRSGAA
MDPRMFSLLQGSTMPRRSGAA

SEQ ID NO: 104175 - protein, 21 aa, Artificial Sequence
  Description of Artificial Sequence: Synthetic peptide
  Seed: MDPRMCSLMQGSTLPRRSGAA
MDPRMFSLLQGSTNPRRSGAA

SEQ ID NO: 104176 - protein, 21 aa, Artificial Sequence
  Description of Artificial Sequence: Synthetic peptide
  Seed: MDPRMCSLMQGSTLPRRSGAA
MDPRMFSLLQGSTSPRRSGAA

SEQ ID NO: 104177 - protein, 21 aa, Artificial Sequence
  Description of Artificial Sequence: Synthetic peptide
  Seed: MDPRMCSLMQGSTLPRRSGAA
MDPRMFSLLQGSTTPRRSGAA

SEQ ID NO: 104178 - protein, 21 aa, Artificial Sequence
  Description of Artificial Sequence: Synthetic peptide
  Seed: MDPRMCSLMQGSTLPRRSGAA
MDPRMFSLLQGSTVPRRSGAA

SEQ ID NO: 104179 - protein, 21 aa, Artificial Sequence
  Description of Artificial Sequence: Synthetic peptide
  Seed: MDPRMCSLMQGSTLPRRSGAA
MDPRMFSLLQISTAPRRSGAA

SEQ ID NO: 104180 - protein, 21 aa, Artificial Sequence
  Description of Artificial Sequence: Synthetic peptide
  Seed: MDPRMCSLMQGSTLPRRSGAA
MDPRMFSLLQISTGPRRSGAA

SEQ ID NO: 104181 - protein, 21 aa, Artificial Sequence
  Description of Artificial Sequence: Synthetic peptide
  Seed: MDPRMCSLMQGSTLPRRSGAA
MDPRMFSLLQISTHPRRSGAA

SEQ ID NO: 104182 - protein, 21 aa, Artificial Sequence
  Description of Artificial Sequence: Synthetic peptide
  Seed: MDPRMCSLMQGSTLPRRSGAA
MDPRMFSLLQISTIPRRSGAA

SEQ ID NO: 104183 - protein, 21 aa, Artificial Sequence
  Description of Artificial Sequence: Synthetic peptide
  Seed: MDPRMCSLMQGSTLPRRSGAA
MDPRMFSLLQISTLPRRSGAA

SEQ ID NO: 104184 - protein, 21 aa, Artificial Sequence
  Description of Artificial Sequence: Synthetic peptide
  Seed: MDPRMCSLMQGSTLPRRSGAA
MDPRMFSLLQISTMPRRSGAA

SEQ ID NO: 104185 - protein, 21 aa, Artificial Sequence
  Description of Artificial Sequence: Synthetic peptide
  Seed: MDPRMCSLMQGSTLPRRSGAA
MDPRMFSLLQISTNPRRSGAA

SEQ ID NO: 104186 - protein, 21 aa, Artificial Sequence
  Description of Artificial Sequence: Synthetic peptide
  Seed: MDPRMCSLMQGSTLPRRSGAA
MDPRMFSLLQISTQPRRSGAA

SEQ ID NO: 104187 - protein, 21 aa, Artificial Sequence
  Description of Artificial Sequence: Synthetic peptide
  Seed: MDPRMCSLMQGSTLPRRSGAA
MDPRMFSLLQISTSPRRSGAA

SEQ ID NO: 104188 - protein, 21 aa, Artificial Sequence
  Description of Artificial Sequence: Synthetic peptide
  Seed: MDPRMCSLMQGSTLPRRSGAA
MDPRMFSLLQISTTPRRSGAA

SEQ ID NO: 104189 - protein, 21 aa, Artificial Sequence
  Description of Artificial Sequence: Synthetic peptide
  Seed: MDPRMCSLMQGSTLPRRSGAA
MDPRMFSLLQISTVPRRSGAA

SEQ ID NO: 104190 - protein, 21 aa, Artificial Sequence
  Description of Artificial Sequence: Synthetic peptide
  Seed: MDPRMCSLMQGSTLPRRSGAA
MDPRMFSLLQLSTAPRRSGAA

SEQ ID NO: 104191 - protein, 21 aa, Artificial Sequence
  Description of Artificial Sequence: Synthetic peptide
  Seed: MDPRMCSLMQGSTLPRRSGAA
MDPRMFSLLQLSTNPRRSGAA

SEQ ID NO: 104192 - protein, 21 aa, Artificial Sequence
  Description of Artificial Sequence: Synthetic peptide
  Seed: MDPRMCSLMQGSTLPRRSGAA
MDPRMFSLLQLSTSPRRSGAA

SEQ ID NO: 104193 - protein, 21 aa, Artificial Sequence
  Description of Artificial Sequence: Synthetic peptide
  Seed: MDPRMCSLMQGSTLPRRSGAA
MDPRMFSLLQMSTAPRRSGAA

SEQ ID NO: 104194 - protein, 21 aa, Artificial Sequence
  Description of Artificial Sequence: Synthetic peptide
  Seed: MDPRMCSLMQGSTLPRRSGAA
MDPRMFSLLQMSTNPRRSGAA

SEQ ID NO: 104195 - protein, 21 aa, Artificial Sequence
  Description of Artificial Sequence: Synthetic peptide
  Seed: MDPRMCSLMQGSTLPRRSGAA
MDPRMFSLLQMSTSPRRSGAA

SEQ ID NO: 104196 - protein, 21 aa, Artificial Sequence
  Description of Artificial Sequence: Synthetic peptide
  Seed: MDPRMCSLMQGSTLPRRSGAA
MDPRMFSLLQNSTAPRRSGAA

SEQ ID NO: 104197 - protein, 21 aa, Artificial Sequence
  Description of Artificial Sequence: Synthetic peptide
  Seed: MDPRMCSLMQGSTLPRRSGAA
MDPRMFSLLQNSTGPRRSGAA

SEQ ID NO: 104198 - protein, 21 aa, Artificial Sequence
  Description of Artificial Sequence: Synthetic peptide
  Seed: MDPRMCSLMQGSTLPRRSGAA
MDPRMFSLLQNSTIPRRSGAA

SEQ ID NO: 104199 - protein, 21 aa, Artificial Sequence
  Description of Artificial Sequence: Synthetic peptide
  Seed: MDPRMCSLMQGSTLPRRSGAA
MDPRMFSLLQNSTLPRRSGAA

SEQ ID NO: 104200 - protein, 21 aa, Artificial Sequence
  Description of Artificial Sequence: Synthetic peptide
  Seed: MDPRMCSLMQGSTLPRRSGAA
MDPRMFSLLQNSTMPRRSGAA

SEQ ID NO: 104201 - protein, 21 aa, Artificial Sequence
  Description of Artificial Sequence: Synthetic peptide
  Seed: MDPRMCSLMQGSTLPRRSGAA
MDPRMFSLLQNSTNPRRSGAA

SEQ ID NO: 104202 - protein, 21 aa, Artificial Sequence
  Description of Artificial Sequence: Synthetic peptide
  Seed: MDPRMCSLMQGSTLPRRSGAA
MDPRMFSLLQNSTSPRRSGAA

SEQ ID NO: 104203 - protein, 21 aa, Artificial Sequence
  Description of Artificial Sequence: Synthetic peptide
  Seed: MDPRMCSLMQGSTLPRRSGAA
MDPRMFSLLQNSTTPRRSGAA

SEQ ID NO: 104204 - protein, 21 aa, Artificial Sequence
  Description of Artificial Sequence: Synthetic peptide
  Seed: MDPRMCSLMQGSTLPRRSGAA
MDPRMFSLLQNSTVPRRSGAA

SEQ ID NO: 104205 - protein, 21 aa, Artificial Sequence
  Description of Artificial Sequence: Synthetic peptide
  Seed: MDPRMCSLMQGSTLPRRSGAA
MDPRMFSLLQPSTAPRRSGAA

SEQ ID NO: 104206 - protein, 21 aa, Artificial Sequence
  Description of Artificial Sequence: Synthetic peptide
  Seed: MDPRMCSLMQGSTLPRRSGAA
MDPRMFSLLQPSTCPRRSGAA

SEQ ID NO: 104207 - protein, 21 aa, Artificial Sequence
  Description of Artificial Sequence: Synthetic peptide
  Seed: MDPRMCSLMQGSTLPRRSGAA
MDPRMFSLLQPSTDPRRSGAA

SEQ ID NO: 104208 - protein, 21 aa, Artificial Sequence
  Description of Artificial Sequence: Synthetic peptide
  Seed: MDPRMCSLMQGSTLPRRSGAA
MDPRMFSLLQPSTEPRRSGAA

SEQ ID NO: 104209 - protein, 21 aa, Artificial Sequence
  Description of Artificial Sequence: Synthetic peptide
  Seed: MDPRMCSLMQGSTLPRRSGAA
MDPRMFSLLQPSTFPRRSGAA

SEQ ID NO: 104210 - protein, 21 aa, Artificial Sequence
  Description of Artificial Sequence: Synthetic peptide
  Seed: MDPRMCSLMQGSTLPRRSGAA
MDPRMFSLLQPSTGPRRSGAA

SEQ ID NO: 104211 - protein, 21 aa, Artificial Sequence
  Description of Artificial Sequence: Synthetic peptide
  Seed: MDPRMCSLMQGSTLPRRSGAA
MDPRMFSLLQPSTHPRRSGAA

SEQ ID NO: 104212 - protein, 21 aa, Artificial Sequence
  Description of Artificial Sequence: Synthetic peptide
  Seed: MDPRMCSLMQGSTLPRRSGAA
MDPRMFSLLQPSTIPRRSGAA

SEQ ID NO: 104213 - protein, 21 aa, Artificial Sequence
  Description of Artificial Sequence: Synthetic peptide
  Seed: MDPRMCSLMQGSTLPRRSGAA
MDPRMFSLLQPSTLPRRSGAA

SEQ ID NO: 104214 - protein, 21 aa, Artificial Sequence
  Description of Artificial Sequence: Synthetic peptide
  Seed: MDPRMCSLMQGSTLPRRSGAA
MDPRMFSLLQPSTMPRRSGAA

SEQ ID NO: 104215 - protein, 21 aa, Artificial Sequence
  Description of Artificial Sequence: Synthetic peptide
  Seed: MDPRMCSLMQGSTLPRRSGAA
MDPRMFSLLQPSTNPRRSGAA

SEQ ID NO: 104216 - protein, 21 aa, Artificial Sequence
  Description of Artificial Sequence: Synthetic peptide
  Seed: MDPRMCSLMQGSTLPRRSGAA
MDPRMFSLLQPSTPPRRSGAA

SEQ ID NO: 104217 - protein, 21 aa, Artificial Sequence
  Description of Artificial Sequence: Synthetic peptide
  Seed: MDPRMCSLMQGSTLPRRSGAA
MDPRMFSLLQPSTQPRRSGAA

SEQ ID NO: 104218 - protein, 21 aa, Artificial Sequence
  Description of Artificial Sequence: Synthetic peptide
  Seed: MDPRMCSLMQGSTLPRRSGAA
MDPRMFSLLQPSTSPRRSGAA

SEQ ID NO: 104219 - protein, 21 aa, Artificial Sequence
  Description of Artificial Sequence: Synthetic peptide
  Seed: MDPRMCSLMQGSTLPRRSGAA
MDPRMFSLLQPSTTPRRSGAA

SEQ ID NO: 104220 - protein, 21 aa, Artificial Sequence
  Description of Artificial Sequence: Synthetic peptide
  Seed: MDPRMCSLMQGSTLPRRSGAA
MDPRMFSLLQPSTVPRRSGAA

SEQ ID NO: 104221 - protein, 21 aa, Artificial Sequence
  Description of Artificial Sequence: Synthetic peptide
  Seed: MDPRMCSLMQGSTLPRRSGAA
MDPRMFSLLQSSTAPRRSGAA

SEQ ID NO: 104222 - protein, 21 aa, Artificial Sequence
  Description of Artificial Sequence: Synthetic peptide
  Seed: MDPRMCSLMQGSTLPRRSGAA
MDPRMFSLLQSSTCPRRSGAA

SEQ ID NO: 104223 - protein, 21 aa, Artificial Sequence
  Description of Artificial Sequence: Synthetic peptide
  Seed: MDPRMCSLMQGSTLPRRSGAA
MDPRMFSLLQSSTFPRRSGAA

SEQ ID NO: 104224 - protein, 21 aa, Artificial Sequence
  Description of Artificial Sequence: Synthetic peptide
  Seed: MDPRMCSLMQGSTLPRRSGAA
MDPRMFSLLQSSTGPRRSGAA

SEQ ID NO: 104225 - protein, 21 aa, Artificial Sequence
  Description of Artificial Sequence: Synthetic peptide
  Seed: MDPRMCSLMQGSTLPRRSGAA
MDPRMFSLLQSSTHPRRSGAA

SEQ ID NO: 104226 - protein, 21 aa, Artificial Sequence
  Description of Artificial Sequence: Synthetic peptide
  Seed: MDPRMCSLMQGSTLPRRSGAA
MDPRMFSLLQSSTIPRRSGAA

SEQ ID NO: 104227 - protein, 21 aa, Artificial Sequence
  Description of Artificial Sequence: Synthetic peptide
  Seed: MDPRMCSLMQGSTLPRRSGAA
MDPRMFSLLQSSTLPRRSGAA

SEQ ID NO: 104228 - protein, 21 aa, Artificial Sequence
  Description of Artificial Sequence: Synthetic peptide
  Seed: MDPRMCSLMQGSTLPRRSGAA
MDPRMFSLLQSSTMPRRSGAA

SEQ ID NO: 104229 - protein, 21 aa, Artificial Sequence
  Description of Artificial Sequence: Synthetic peptide
  Seed: MDPRMCSLMQGSTLPRRSGAA
MDPRMFSLLQSSTNPRRSGAA

SEQ ID NO: 104230 - protein, 21 aa, Artificial Sequence
  Description of Artificial Sequence: Synthetic peptide
  Seed: MDPRMCSLMQGSTLPRRSGAA
MDPRMFSLLQSSTQPRRSGAA

SEQ ID NO: 104231 - protein, 21 aa, Artificial Sequence
  Description of Artificial Sequence: Synthetic peptide
  Seed: MDPRMCSLMQGSTLPRRSGAA
MDPRMFSLLQSSTSPRRSGAA

SEQ ID NO: 104232 - protein, 21 aa, Artificial Sequence
  Description of Artificial Sequence: Synthetic peptide
  Seed: MDPRMCSLMQGSTLPRRSGAA
MDPRMFSLLQSSTTPRRSGAA

SEQ ID NO: 104233 - protein, 21 aa, Artificial Sequence
  Description of Artificial Sequence: Synthetic peptide
  Seed: MDPRMCSLMQGSTLPRRSGAA
MDPRMFSLLQSSTVPRRSGAA

SEQ ID NO: 104234 - protein, 21 aa, Artificial Sequence
  Description of Artificial Sequence: Synthetic peptide
  Seed: MDPRMCSLMQGSTLPRRSGAA
MDPRMFSLLQTSTAPRRSGAA

SEQ ID NO: 104235 - protein, 21 aa, Artificial Sequence
  Description of Artificial Sequence: Synthetic peptide
  Seed: MDPRMCSLMQGSTLPRRSGAA
MDPRMFSLLQTSTGPRRSGAA

SEQ ID NO: 104236 - protein, 21 aa, Artificial Sequence
  Description of Artificial Sequence: Synthetic peptide
  Seed: MDPRMCSLMQGSTLPRRSGAA
MDPRMFSLLQTSTHPRRSGAA

SEQ ID NO: 104237 - protein, 21 aa, Artificial Sequence
  Description of Artificial Sequence: Synthetic peptide
  Seed: MDPRMCSLMQGSTLPRRSGAA
MDPRMFSLLQTSTIPRRSGAA

SEQ ID NO: 104238 - protein, 21 aa, Artificial Sequence
  Description of Artificial Sequence: Synthetic peptide
  Seed: MDPRMCSLMQGSTLPRRSGAA
MDPRMFSLLQTSTLPRRSGAA

SEQ ID NO: 104239 - protein, 21 aa, Artificial Sequence
  Description of Artificial Sequence: Synthetic peptide
  Seed: MDPRMCSLMQGSTLPRRSGAA
MDPRMFSLLQTSTMPRRSGAA

SEQ ID NO: 104240 - protein, 21 aa, Artificial Sequence
  Description of Artificial Sequence: Synthetic peptide
  Seed: MDPRMCSLMQGSTLPRRSGAA
MDPRMFSLLQTSTNPRRSGAA

SEQ ID NO: 104241 - protein, 21 aa, Artificial Sequence
  Description of Artificial Sequence: Synthetic peptide
  Seed: MDPRMCSLMQGSTLPRRSGAA
MDPRMFSLLQTSTQPRRSGAA

SEQ ID NO: 104242 - protein, 21 aa, Artificial Sequence
  Description of Artificial Sequence: Synthetic peptide
  Seed: MDPRMCSLMQGSTLPRRSGAA
MDPRMFSLLQTSTSPRRSGAA

SEQ ID NO: 104243 - protein, 21 aa, Artificial Sequence
  Description of Artificial Sequence: Synthetic peptide
  Seed: MDPRMCSLMQGSTLPRRSGAA
MDPRMFSLLQTSTTPRRSGAA

SEQ ID NO: 104244 - protein, 21 aa, Artificial Sequence
  Description of Artificial Sequence: Synthetic peptide
  Seed: MDPRMCSLMQGSTLPRRSGAA
MDPRMFSLLQTSTVPRRSGAA

SEQ ID NO: 104245 - protein, 21 aa, Artificial Sequence
  Description of Artificial Sequence: Synthetic peptide
  Seed: MDPRMCSLMQGSTLPRRSGAA
MDPRMFSLLQVSTAPRRSGAA

SEQ ID NO: 104246 - protein, 21 aa, Artificial Sequence
  Description of Artificial Sequence: Synthetic peptide
  Seed: MDPRMCSLMQGSTLPRRSGAA
MDPRMFSLLQVSTDPRRSGAA

SEQ ID NO: 104247 - protein, 21 aa, Artificial Sequence
  Description of Artificial Sequence: Synthetic peptide
  Seed: MDPRMCSLMQGSTLPRRSGAA
MDPRMFSLLQVSTGPRRSGAA

SEQ ID NO: 104248 - protein, 21 aa, Artificial Sequence
  Description of Artificial Sequence: Synthetic peptide
  Seed: MDPRMCSLMQGSTLPRRSGAA
MDPRMFSLLQVSTHPRRSGAA

SEQ ID NO: 104249 - protein, 21 aa, Artificial Sequence
  Description of Artificial Sequence: Synthetic peptide
  Seed: MDPRMCSLMQGSTLPRRSGAA
MDPRMFSLLQVSTIPRRSGAA

SEQ ID NO: 104250 - protein, 21 aa, Artificial Sequence
  Description of Artificial Sequence: Synthetic peptide
  Seed: MDPRMCSLMQGSTLPRRSGAA
MDPRMFSLLQVSTLPRRSGAA

SEQ ID NO: 104251 - protein, 21 aa, Artificial Sequence
  Description of Artificial Sequence: Synthetic peptide
  Seed: MDPRMCSLMQGSTLPRRSGAA
MDPRMFSLLQVSTMPRRSGAA

SEQ ID NO: 104252 - protein, 21 aa, Artificial Sequence
  Description of Artificial Sequence: Synthetic peptide
  Seed: MDPRMCSLMQGSTLPRRSGAA
MDPRMFSLLQVSTNPRRSGAA

SEQ ID NO: 104253 - protein, 21 aa, Artificial Sequence
  Description of Artificial Sequence: Synthetic peptide
  Seed: MDPRMCSLMQGSTLPRRSGAA
MDPRMFSLLQVSTQPRRSGAA

SEQ ID NO: 104254 - protein, 21 aa, Artificial Sequence
  Description of Artificial Sequence: Synthetic peptide
  Seed: MDPRMCSLMQGSTLPRRSGAA
MDPRMFSLLQVSTSPRRSGAA

SEQ ID NO: 104255 - protein, 21 aa, Artificial Sequence
  Description of Artificial Sequence: Synthetic peptide
  Seed: MDPRMCSLMQGSTLPRRSGAA
MDPRMFSLLQVSTTPRRSGAA

SEQ ID NO: 104256 - protein, 21 aa, Artificial Sequence
  Description of Artificial Sequence: Synthetic peptide
  Seed: MDPRMCSLMQGSTLPRRSGAA
MDPRMFSLLQVSTVPRRSGAA

SEQ ID NO: 104257 - protein, 21 aa, Artificial Sequence
  Description of Artificial Sequence: Synthetic peptide
  Seed: MDPRMCSLMQGSTLPRRSGAA
MDPRMFSLMQASTAPRRSGAA

SEQ ID NO: 104258 - protein, 21 aa, Artificial Sequence
  Description of Artificial Sequence: Synthetic peptide
  Seed: MDPRMCSLMQGSTLPRRSGAA
MDPRMFSLMQASTCPRRSGAA

SEQ ID NO: 104259 - protein, 21 aa, Artificial Sequence
  Description of Artificial Sequence: Synthetic peptide
  Seed: MDPRMCSLMQGSTLPRRSGAA
MDPRMFSLMQASTDPRRSGAA

SEQ ID NO: 104260 - protein, 21 aa, Artificial Sequence
  Description of Artificial Sequence: Synthetic peptide
  Seed: MDPRMCSLMQGSTLPRRSGAA
MDPRMFSLMQASTEPRRSGAA

SEQ ID NO: 104261 - protein, 21 aa, Artificial Sequence
  Description of Artificial Sequence: Synthetic peptide
  Seed: MDPRMCSLMQGSTLPRRSGAA
MDPRMFSLMQASTFPRRSGAA

SEQ ID NO: 104262 - protein, 21 aa, Artificial Sequence
  Description of Artificial Sequence: Synthetic peptide
  Seed: MDPRMCSLMQGSTLPRRSGAA
MDPRMFSLMQASTGPRRSGAA

SEQ ID NO: 104263 - protein, 21 aa, Artificial Sequence
  Description of Artificial Sequence: Synthetic peptide
  Seed: MDPRMCSLMQGSTLPRRSGAA
MDPRMFSLMQASTHPRRSGAA

SEQ ID NO: 104264 - protein, 21 aa, Artificial Sequence
  Description of Artificial Sequence: Synthetic peptide
  Seed: MDPRMCSLMQGSTLPRRSGAA
MDPRMFSLMQASTIPRRSGAA

SEQ ID NO: 104265 - protein, 21 aa, Artificial Sequence
  Description of Artificial Sequence: Synthetic peptide
  Seed: MDPRMCSLMQGSTLPRRSGAA
MDPRMFSLMQASTLPRRSGAA

SEQ ID NO: 104266 - protein, 21 aa, Artificial Sequence
  Description of Artificial Sequence: Synthetic peptide
  Seed: MDPRMCSLMQGSTLPRRSGAA
MDPRMFSLMQASTMPRRSGAA

SEQ ID NO: 104267 - protein, 21 aa, Artificial Sequence
  Description of Artificial Sequence: Synthetic peptide
  Seed: MDPRMCSLMQGSTLPRRSGAA
MDPRMFSLMQASTNPRRSGAA

SEQ ID NO: 104268 - protein, 21 aa, Artificial Sequence
  Description of Artificial Sequence: Synthetic peptide
  Seed: MDPRMCSLMQGSTLPRRSGAA
MDPRMFSLMQASTPPRRSGAA

SEQ ID NO: 104269 - protein, 21 aa, Artificial Sequence
  Description of Artificial Sequence: Synthetic peptide
  Seed: MDPRMCSLMQGSTLPRRSGAA
MDPRMFSLMQASTQPRRSGAA

SEQ ID NO: 104270 - protein, 21 aa, Artificial Sequence
  Description of Artificial Sequence: Synthetic peptide
  Seed: MDPRMCSLMQGSTLPRRSGAA
MDPRMFSLMQASTSPRRSGAA

SEQ ID NO: 104271 - protein, 21 aa, Artificial Sequence
  Description of Artificial Sequence: Synthetic peptide
  Seed: MDPRMCSLMQGSTLPRRSGAA
MDPRMFSLMQASTTPRRSGAA

SEQ ID NO: 104272 - protein, 21 aa, Artificial Sequence
  Description of Artificial Sequence: Synthetic peptide
  Seed: MDPRMCSLMQGSTLPRRSGAA
MDPRMFSLMQASTVPRRSGAA

SEQ ID NO: 104273 - protein, 21 aa, Artificial Sequence
  Description of Artificial Sequence: Synthetic peptide
  Seed: MDPRMCSLMQGSTLPRRSGAA
MDPRMFSLMQASTYPRRSGAA

SEQ ID NO: 104274 - protein, 21 aa, Artificial Sequence
  Description of Artificial Sequence: Synthetic peptide
  Seed: MDPRMCSLMQGSTLPRRSGAA
MDPRMFSLMQGSTAPRRSGAA

SEQ ID NO: 104275 - protein, 21 aa, Artificial Sequence
  Description of Artificial Sequence: Synthetic peptide
  Seed: MDPRMCSLMQGSTLPRRSGAA
MDPRMFSLMQGSTCPRRSGAA

SEQ ID NO: 104276 - protein, 21 aa, Artificial Sequence
  Description of Artificial Sequence: Synthetic peptide
  Seed: MDPRMCSLMQGSTLPRRSGAA
MDPRMFSLMQGSTFPRRSGAA

SEQ ID NO: 104277 - protein, 21 aa, Artificial Sequence
  Description of Artificial Sequence: Synthetic peptide
  Seed: MDPRMCSLMQGSTLPRRSGAA
MDPRMFSLMQGSTGPRRSGAA

SEQ ID NO: 104278 - protein, 21 aa, Artificial Sequence
  Description of Artificial Sequence: Synthetic peptide
  Seed: MDPRMCSLMQGSTLPRRSGAA
MDPRMFSLMQGSTIPRRSGAA

SEQ ID NO: 104279 - protein, 21 aa, Artificial Sequence
  Description of Artificial Sequence: Synthetic peptide
  Seed: MDPRMCSLMQGSTLPRRSGAA
MDPRMFSLMQGSTLPRRSGAA

SEQ ID NO: 104280 - protein, 21 aa, Artificial Sequence
  Description of Artificial Sequence: Synthetic peptide
  Seed: MDPRMCSLMQGSTLPRRSGAA
MDPRMFSLMQGSTMPRRSGAA

SEQ ID NO: 104281 - protein, 21 aa, Artificial Sequence
  Description of Artificial Sequence: Synthetic peptide
  Seed: MDPRMCSLMQGSTLPRRSGAA
MDPRMFSLMQGSTNPRRSGAA

SEQ ID NO: 104282 - protein, 21 aa, Artificial Sequence
  Description of Artificial Sequence: Synthetic peptide
  Seed: MDPRMCSLMQGSTLPRRSGAA
MDPRMFSLMQGSTQPRRSGAA

SEQ ID NO: 104283 - protein, 21 aa, Artificial Sequence
  Description of Artificial Sequence: Synthetic peptide
  Seed: MDPRMCSLMQGSTLPRRSGAA
MDPRMFSLMQGSTSPRRSGAA

SEQ ID NO: 104284 - protein, 21 aa, Artificial Sequence
  Description of Artificial Sequence: Synthetic peptide
  Seed: MDPRMCSLMQGSTLPRRSGAA
MDPRMFSLMQGSTTPRRSGAA

SEQ ID NO: 104285 - protein, 21 aa, Artificial Sequence
  Description of Artificial Sequence: Synthetic peptide
  Seed: MDPRMCSLMQGSTLPRRSGAA
MDPRMFSLMQGSTVPRRSGAA

SEQ ID NO: 104286 - protein, 21 aa, Artificial Sequence
  Description of Artificial Sequence: Synthetic peptide
  Seed: MDPRMCSLMQGSTLPRRSGAA
MDPRMFSLMQHSTLPRRSGAA

SEQ ID NO: 104287 - protein, 21 aa, Artificial Sequence
  Description of Artificial Sequence: Synthetic peptide
  Seed: MDPRMCSLMQGSTLPRRSGAA
MDPRMFSLMQHSTVPRRSGAA

SEQ ID NO: 104288 - protein, 21 aa, Artificial Sequence
  Description of Artificial Sequence: Synthetic peptide
  Seed: MDPRMCSLMQGSTLPRRSGAA
MDPRMFSLMQISTAPRRSGAA

SEQ ID NO: 104289 - protein, 21 aa, Artificial Sequence
  Description of Artificial Sequence: Synthetic peptide
  Seed: MDPRMCSLMQGSTLPRRSGAA
MDPRMFSLMQISTGPRRSGAA

SEQ ID NO: 104290 - protein, 21 aa, Artificial Sequence
  Description of Artificial Sequence: Synthetic peptide
  Seed: MDPRMCSLMQGSTLPRRSGAA
MDPRMFSLMQISTHPRRSGAA

SEQ ID NO: 104291 - protein, 21 aa, Artificial Sequence
  Description of Artificial Sequence: Synthetic peptide
  Seed: MDPRMCSLMQGSTLPRRSGAA
MDPRMFSLMQISTIPRRSGAA

SEQ ID NO: 104292 - protein, 21 aa, Artificial Sequence
  Description of Artificial Sequence: Synthetic peptide
  Seed: MDPRMCSLMQGSTLPRRSGAA
MDPRMFSLMQISTLPRRSGAA

SEQ ID NO: 104293 - protein, 21 aa, Artificial Sequence
  Description of Artificial Sequence: Synthetic peptide
  Seed: MDPRMCSLMQGSTLPRRSGAA
MDPRMFSLMQISTMPRRSGAA

SEQ ID NO: 104294 - protein, 21 aa, Artificial Sequence
  Description of Artificial Sequence: Synthetic peptide
  Seed: MDPRMCSLMQGSTLPRRSGAA
MDPRMFSLMQISTNPRRSGAA

SEQ ID NO: 104295 - protein, 21 aa, Artificial Sequence
  Description of Artificial Sequence: Synthetic peptide
  Seed: MDPRMCSLMQGSTLPRRSGAA
MDPRMFSLMQISTQPRRSGAA

SEQ ID NO: 104296 - protein, 21 aa, Artificial Sequence
  Description of Artificial Sequence: Synthetic peptide
  Seed: MDPRMCSLMQGSTLPRRSGAA
MDPRMFSLMQISTSPRRSGAA

SEQ ID NO: 104297 - protein, 21 aa, Artificial Sequence
  Description of Artificial Sequence: Synthetic peptide
  Seed: MDPRMCSLMQGSTLPRRSGAA
MDPRMFSLMQISTTPRRSGAA

SEQ ID NO: 104298 - protein, 21 aa, Artificial Sequence
  Description of Artificial Sequence: Synthetic peptide
  Seed: MDPRMCSLMQGSTLPRRSGAA
MDPRMFSLMQISTVPRRSGAA

SEQ ID NO: 104299 - protein, 21 aa, Artificial Sequence
  Description of Artificial Sequence: Synthetic peptide
  Seed: MDPRMCSLMQGSTLPRRSGAA
MDPRMFSLMQLSTAPRRSGAA

SEQ ID NO: 104300 - protein, 21 aa, Artificial Sequence
  Description of Artificial Sequence: Synthetic peptide
  Seed: MDPRMCSLMQGSTLPRRSGAA
MDPRMFSLMQLSTNPRRSGAA

SEQ ID NO: 104301 - protein, 21 aa, Artificial Sequence
  Description of Artificial Sequence: Synthetic peptide
  Seed: MDPRMCSLMQGSTLPRRSGAA
MDPRMFSLMQLSTSPRRSGAA

SEQ ID NO: 104302 - protein, 21 aa, Artificial Sequence
  Description of Artificial Sequence: Synthetic peptide
  Seed: MDPRMCSLMQGSTLPRRSGAA
MDPRMFSLMQLSTTPRRSGAA

SEQ ID NO: 104303 - protein, 21 aa, Artificial Sequence
  Description of Artificial Sequence: Synthetic peptide
  Seed: MDPRMCSLMQGSTLPRRSGAA
MDPRMFSLMQLSTVPRRSGAA

SEQ ID NO: 104304 - protein, 21 aa, Artificial Sequence
  Description of Artificial Sequence: Synthetic peptide
  Seed: MDPRMCSLMQGSTLPRRSGAA
MDPRMFSLMQMSTAPRRSGAA

SEQ ID NO: 104305 - protein, 21 aa, Artificial Sequence
  Description of Artificial Sequence: Synthetic peptide
  Seed: MDPRMCSLMQGSTLPRRSGAA
MDPRMFSLMQMSTNPRRSGAA

SEQ ID NO: 104306 - protein, 21 aa, Artificial Sequence
  Description of Artificial Sequence: Synthetic peptide
  Seed: MDPRMCSLMQGSTLPRRSGAA
MDPRMFSLMQMSTSPRRSGAA

SEQ ID NO: 104307 - protein, 21 aa, Artificial Sequence
  Description of Artificial Sequence: Synthetic peptide
  Seed: MDPRMCSLMQGSTLPRRSGAA
MDPRMFSLMQMSTTPRRSGAA

SEQ ID NO: 104308 - protein, 21 aa, Artificial Sequence
  Description of Artificial Sequence: Synthetic peptide
  Seed: MDPRMCSLMQGSTLPRRSGAA
MDPRMFSLMQMSTVPRRSGAA

SEQ ID NO: 104309 - protein, 21 aa, Artificial Sequence
  Description of Artificial Sequence: Synthetic peptide
  Seed: MDPRMCSLMQGSTLPRRSGAA
MDPRMFSLMQNSTAPRRSGAA

SEQ ID NO: 104310 - protein, 21 aa, Artificial Sequence
  Description of Artificial Sequence: Synthetic peptide
  Seed: MDPRMCSLMQGSTLPRRSGAA
MDPRMFSLMQNSTGPRRSGAA

SEQ ID NO: 104311 - protein, 21 aa, Artificial Sequence
  Description of Artificial Sequence: Synthetic peptide
  Seed: MDPRMCSLMQGSTLPRRSGAA
MDPRMFSLMQNSTIPRRSGAA

SEQ ID NO: 104312 - protein, 21 aa, Artificial Sequence
  Description of Artificial Sequence: Synthetic peptide
  Seed: MDPRMCSLMQGSTLPRRSGAA
MDPRMFSLMQNSTLPRRSGAA

SEQ ID NO: 104313 - protein, 21 aa, Artificial Sequence
  Description of Artificial Sequence: Synthetic peptide
  Seed: MDPRMCSLMQGSTLPRRSGAA
MDPRMFSLMQNSTMPRRSGAA

SEQ ID NO: 104314 - protein, 21 aa, Artificial Sequence
  Description of Artificial Sequence: Synthetic peptide
  Seed: MDPRMCSLMQGSTLPRRSGAA
MDPRMFSLMQNSTNPRRSGAA

SEQ ID NO: 104315 - protein, 21 aa, Artificial Sequence
  Description of Artificial Sequence: Synthetic peptide
  Seed: MDPRMCSLMQGSTLPRRSGAA
MDPRMFSLMQNSTSPRRSGAA

SEQ ID NO: 104316 - protein, 21 aa, Artificial Sequence
  Description of Artificial Sequence: Synthetic peptide
  Seed: MDPRMCSLMQGSTLPRRSGAA
MDPRMFSLMQNSTTPRRSGAA

SEQ ID NO: 104317 - protein, 21 aa, Artificial Sequence
  Description of Artificial Sequence: Synthetic peptide
  Seed: MDPRMCSLMQGSTLPRRSGAA
MDPRMFSLMQNSTVPRRSGAA

SEQ ID NO: 104318 - protein, 21 aa, Artificial Sequence
  Description of Artificial Sequence: Synthetic peptide
  Seed: MDPRMCSLMQGSTLPRRSGAA
MDPRMFSLMQPSTAPRRSGAA

SEQ ID NO: 104319 - protein, 21 aa, Artificial Sequence
  Description of Artificial Sequence: Synthetic peptide
  Seed: MDPRMCSLMQGSTLPRRSGAA
MDPRMFSLMQPSTCPRRSGAA

SEQ ID NO: 104320 - protein, 21 aa, Artificial Sequence
  Description of Artificial Sequence: Synthetic peptide
  Seed: MDPRMCSLMQGSTLPRRSGAA
MDPRMFSLMQPSTDPRRSGAA

SEQ ID NO: 104321 - protein, 21 aa, Artificial Sequence
  Description of Artificial Sequence: Synthetic peptide
  Seed: MDPRMCSLMQGSTLPRRSGAA
MDPRMFSLMQPSTEPRRSGAA

SEQ ID NO: 104322 - protein, 21 aa, Artificial Sequence
  Description of Artificial Sequence: Synthetic peptide
  Seed: MDPRMCSLMQGSTLPRRSGAA
MDPRMFSLMQPSTFPRRSGAA

SEQ ID NO: 104323 - protein, 21 aa, Artificial Sequence
  Description of Artificial Sequence: Synthetic peptide
  Seed: MDPRMCSLMQGSTLPRRSGAA
MDPRMFSLMQPSTGPRRSGAA

SEQ ID NO: 104324 - protein, 21 aa, Artificial Sequence
  Description of Artificial Sequence: Synthetic peptide
  Seed: MDPRMCSLMQGSTLPRRSGAA
MDPRMFSLMQPSTHPRRSGAA

SEQ ID NO: 104325 - protein, 21 aa, Artificial Sequence
  Description of Artificial Sequence: Synthetic peptide
  Seed: MDPRMCSLMQGSTLPRRSGAA
MDPRMFSLMQPSTIPRRSGAA

SEQ ID NO: 104326 - protein, 21 aa, Artificial Sequence
  Description of Artificial Sequence: Synthetic peptide
  Seed: MDPRMCSLMQGSTLPRRSGAA
MDPRMFSLMQPSTLPRRSGAA

SEQ ID NO: 104327 - protein, 21 aa, Artificial Sequence
  Description of Artificial Sequence: Synthetic peptide
  Seed: MDPRMCSLMQGSTLPRRSGAA
MDPRMFSLMQPSTMPRRSGAA

SEQ ID NO: 104328 - protein, 21 aa, Artificial Sequence
  Description of Artificial Sequence: Synthetic peptide
  Seed: MDPRMCSLMQGSTLPRRSGAA
MDPRMFSLMQPSTNPRRSGAA

SEQ ID NO: 104329 - protein, 21 aa, Artificial Sequence
  Description of Artificial Sequence: Synthetic peptide
  Seed: MDPRMCSLMQGSTLPRRSGAA
MDPRMFSLMQPSTPPRRSGAA

SEQ ID NO: 104330 - protein, 21 aa, Artificial Sequence
  Description of Artificial Sequence: Synthetic peptide
  Seed: MDPRMCSLMQGSTLPRRSGAA
MDPRMFSLMQPSTQPRRSGAA

SEQ ID NO: 104331 - protein, 21 aa, Artificial Sequence
  Description of Artificial Sequence: Synthetic peptide
  Seed: MDPRMCSLMQGSTLPRRSGAA
MDPRMFSLMQPSTSPRRSGAA

SEQ ID NO: 104332 - protein, 21 aa, Artificial Sequence
  Description of Artificial Sequence: Synthetic peptide
  Seed: MDPRMCSLMQGSTLPRRSGAA
MDPRMFSLMQPSTTPRRSGAA

SEQ ID NO: 104333 - protein, 21 aa, Artificial Sequence
  Description of Artificial Sequence: Synthetic peptide
  Seed: MDPRMCSLMQGSTLPRRSGAA
MDPRMFSLMQPSTVPRRSGAA

SEQ ID NO: 104334 - protein, 21 aa, Artificial Sequence
  Description of Artificial Sequence: Synthetic peptide
  Seed: MDPRMCSLMQGSTLPRRSGAA
MDPRMFSLMQSSTAPRRSGAA

SEQ ID NO: 104335 - protein, 21 aa, Artificial Sequence
  Description of Artificial Sequence: Synthetic peptide
  Seed: MDPRMCSLMQGSTLPRRSGAA
MDPRMFSLMQSSTCPRRSGAA

SEQ ID NO: 104336 - protein, 21 aa, Artificial Sequence
  Description of Artificial Sequence: Synthetic peptide
  Seed: MDPRMCSLMQGSTLPRRSGAA
MDPRMFSLMQSSTDPRRSGAA

SEQ ID NO: 104337 - protein, 21 aa, Artificial Sequence
  Description of Artificial Sequence: Synthetic peptide
  Seed: MDPRMCSLMQGSTLPRRSGAA
MDPRMFSLMQSSTFPRRSGAA

SEQ ID NO: 104338 - protein, 21 aa, Artificial Sequence
  Description of Artificial Sequence: Synthetic peptide
  Seed: MDPRMCSLMQGSTLPRRSGAA
MDPRMFSLMQSSTGPRRSGAA

SEQ ID NO: 104339 - protein, 21 aa, Artificial Sequence
  Description of Artificial Sequence: Synthetic peptide
  Seed: MDPRMCSLMQGSTLPRRSGAA
MDPRMFSLMQSSTHPRRSGAA

SEQ ID NO: 104340 - protein, 21 aa, Artificial Sequence
  Description of Artificial Sequence: Synthetic peptide
  Seed: MDPRMCSLMQGSTLPRRSGAA
MDPRMFSLMQSSTIPRRSGAA

SEQ ID NO: 104341 - protein, 21 aa, Artificial Sequence
  Description of Artificial Sequence: Synthetic peptide
  Seed: MDPRMCSLMQGSTLPRRSGAA
MDPRMFSLMQSSTLPRRSGAA

SEQ ID NO: 104342 - protein, 21 aa, Artificial Sequence
  Description of Artificial Sequence: Synthetic peptide
  Seed: MDPRMCSLMQGSTLPRRSGAA
MDPRMFSLMQSSTMPRRSGAA

SEQ ID NO: 104343 - protein, 21 aa, Artificial Sequence
  Description of Artificial Sequence: Synthetic peptide
  Seed: MDPRMCSLMQGSTLPRRSGAA
MDPRMFSLMQSSTNPRRSGAA

SEQ ID NO: 104344 - protein, 21 aa, Artificial Sequence
  Description of Artificial Sequence: Synthetic peptide
  Seed: MDPRMCSLMQGSTLPRRSGAA
MDPRMFSLMQSSTPPRRSGAA

SEQ ID NO: 104345 - protein, 21 aa, Artificial Sequence
  Description of Artificial Sequence: Synthetic peptide
  Seed: MDPRMCSLMQGSTLPRRSGAA
MDPRMFSLMQSSTQPRRSGAA

SEQ ID NO: 104346 - protein, 21 aa, Artificial Sequence
  Description of Artificial Sequence: Synthetic peptide
  Seed: MDPRMCSLMQGSTLPRRSGAA
MDPRMFSLMQSSTSPRRSGAA

SEQ ID NO: 104347 - protein, 21 aa, Artificial Sequence
  Description of Artificial Sequence: Synthetic peptide
  Seed: MDPRMCSLMQGSTLPRRSGAA
MDPRMFSLMQSSTTPRRSGAA

SEQ ID NO: 104348 - protein, 21 aa, Artificial Sequence
  Description of Artificial Sequence: Synthetic peptide
  Seed: MDPRMCSLMQGSTLPRRSGAA
MDPRMFSLMQSSTVPRRSGAA

SEQ ID NO: 104349 - protein, 21 aa, Artificial Sequence
  Description of Artificial Sequence: Synthetic peptide
  Seed: MDPRMCSLMQGSTLPRRSGAA
MDPRMFSLMQTSTAPRRSGAA

SEQ ID NO: 104350 - protein, 21 aa, Artificial Sequence
  Description of Artificial Sequence: Synthetic peptide
  Seed: MDPRMCSLMQGSTLPRRSGAA
MDPRMFSLMQTSTDPRRSGAA

SEQ ID NO: 104351 - protein, 21 aa, Artificial Sequence
  Description of Artificial Sequence: Synthetic peptide
  Seed: MDPRMCSLMQGSTLPRRSGAA
MDPRMFSLMQTSTGPRRSGAA

SEQ ID NO: 104352 - protein, 21 aa, Artificial Sequence
  Description of Artificial Sequence: Synthetic peptide
  Seed: MDPRMCSLMQGSTLPRRSGAA
MDPRMFSLMQTSTHPRRSGAA

SEQ ID NO: 104353 - protein, 21 aa, Artificial Sequence
  Description of Artificial Sequence: Synthetic peptide
  Seed: MDPRMCSLMQGSTLPRRSGAA
MDPRMFSLMQTSTIPRRSGAA

SEQ ID NO: 104354 - protein, 21 aa, Artificial Sequence
  Description of Artificial Sequence: Synthetic peptide
  Seed: MDPRMCSLMQGSTLPRRSGAA
MDPRMFSLMQTSTLPRRSGAA

SEQ ID NO: 104355 - protein, 21 aa, Artificial Sequence
  Description of Artificial Sequence: Synthetic peptide
  Seed: MDPRMCSLMQGSTLPRRSGAA
MDPRMFSLMQTSTMPRRSGAA

SEQ ID NO: 104356 - protein, 21 aa, Artificial Sequence
  Description of Artificial Sequence: Synthetic peptide
  Seed: MDPRMCSLMQGSTLPRRSGAA
MDPRMFSLMQTSTNPRRSGAA

SEQ ID NO: 104357 - protein, 21 aa, Artificial Sequence
  Description of Artificial Sequence: Synthetic peptide
  Seed: MDPRMCSLMQGSTLPRRSGAA
MDPRMFSLMQTSTQPRRSGAA

SEQ ID NO: 104358 - protein, 21 aa, Artificial Sequence
  Description of Artificial Sequence: Synthetic peptide
  Seed: MDPRMCSLMQGSTLPRRSGAA
MDPRMFSLMQTSTSPRRSGAA

SEQ ID NO: 104359 - protein, 21 aa, Artificial Sequence
  Description of Artificial Sequence: Synthetic peptide
  Seed: MDPRMCSLMQGSTLPRRSGAA
MDPRMFSLMQTSTTPRRSGAA

SEQ ID NO: 104360 - protein, 21 aa, Artificial Sequence
  Description of Artificial Sequence: Synthetic peptide
  Seed: MDPRMCSLMQGSTLPRRSGAA
MDPRMFSLMQTSTVPRRSGAA

SEQ ID NO: 104361 - protein, 21 aa, Artificial Sequence
  Description of Artificial Sequence: Synthetic peptide
  Seed: MDPRMCSLMQGSTLPRRSGAA
MDPRMFSLMQVSTAPRRSGAA

SEQ ID NO: 104362 - protein, 21 aa, Artificial Sequence
  Description of Artificial Sequence: Synthetic peptide
  Seed: MDPRMCSLMQGSTLPRRSGAA
MDPRMFSLMQVSTDPRRSGAA

SEQ ID NO: 104363 - protein, 21 aa, Artificial Sequence
  Description of Artificial Sequence: Synthetic peptide
  Seed: MDPRMCSLMQGSTLPRRSGAA
MDPRMFSLMQVSTEPRRSGAA

SEQ ID NO: 104364 - protein, 21 aa, Artificial Sequence
  Description of Artificial Sequence: Synthetic peptide
  Seed: MDPRMCSLMQGSTLPRRSGAA
MDPRMFSLMQVSTGPRRSGAA

SEQ ID NO: 104365 - protein, 21 aa, Artificial Sequence
  Description of Artificial Sequence: Synthetic peptide
  Seed: MDPRMCSLMQGSTLPRRSGAA
MDPRMFSLMQVSTHPRRSGAA

SEQ ID NO: 104366 - protein, 21 aa, Artificial Sequence
  Description of Artificial Sequence: Synthetic peptide
  Seed: MDPRMCSLMQGSTLPRRSGAA
MDPRMFSLMQVSTIPRRSGAA

SEQ ID NO: 104367 - protein, 21 aa, Artificial Sequence
  Description of Artificial Sequence: Synthetic peptide
  Seed: MDPRMCSLMQGSTLPRRSGAA
MDPRMFSLMQVSTLPRRSGAA

SEQ ID NO: 104368 - protein, 21 aa, Artificial Sequence
  Description of Artificial Sequence: Synthetic peptide
  Seed: MDPRMCSLMQGSTLPRRSGAA
MDPRMFSLMQVSTMPRRSGAA

SEQ ID NO: 104369 - protein, 21 aa, Artificial Sequence
  Description of Artificial Sequence: Synthetic peptide
  Seed: MDPRMCSLMQGSTLPRRSGAA
MDPRMFSLMQVSTNPRRSGAA

SEQ ID NO: 104370 - protein, 21 aa, Artificial Sequence
  Description of Artificial Sequence: Synthetic peptide
  Seed: MDPRMCSLMQGSTLPRRSGAA
MDPRMFSLMQVSTPPRRSGAA

SEQ ID NO: 104371 - protein, 21 aa, Artificial Sequence
  Description of Artificial Sequence: Synthetic peptide
  Seed: MDPRMCSLMQGSTLPRRSGAA
MDPRMFSLMQVSTQPRRSGAA

SEQ ID NO: 104372 - protein, 21 aa, Artificial Sequence
  Description of Artificial Sequence: Synthetic peptide
  Seed: MDPRMCSLMQGSTLPRRSGAA
MDPRMFSLMQVSTSPRRSGAA

SEQ ID NO: 104373 - protein, 21 aa, Artificial Sequence
  Description of Artificial Sequence: Synthetic peptide
  Seed: MDPRMCSLMQGSTLPRRSGAA
MDPRMFSLMQVSTTPRRSGAA

SEQ ID NO: 104374 - protein, 21 aa, Artificial Sequence
  Description of Artificial Sequence: Synthetic peptide
  Seed: MDPRMCSLMQGSTLPRRSGAA
MDPRMFSLMQVSTVPRRSGAA

SEQ ID NO: 104375 - protein, 21 aa, Artificial Sequence
  Description of Artificial Sequence: Synthetic peptide
  Seed: MDPRMCSLMQGSTLPRRSGAA
MDPRMFSLNQASTIPRRSGAA

SEQ ID NO: 104376 - protein, 21 aa, Artificial Sequence
  Description of Artificial Sequence: Synthetic peptide
  Seed: MDPRMCSLMQGSTLPRRSGAA
MDPRMFSLNQASTLPRRSGAA

SEQ ID NO: 104377 - protein, 21 aa, Artificial Sequence
  Description of Artificial Sequence: Synthetic peptide
  Seed: MDPRMCSLMQGSTLPRRSGAA
MDPRMFSLNQASTVPRRSGAA

SEQ ID NO: 104378 - protein, 21 aa, Artificial Sequence
  Description of Artificial Sequence: Synthetic peptide
  Seed: MDPRMCSLMQGSTLPRRSGAA
MDPRMFSLQQASTAPRRSGAA

SEQ ID NO: 104379 - protein, 21 aa, Artificial Sequence
  Description of Artificial Sequence: Synthetic peptide
  Seed: MDPRMCSLMQGSTLPRRSGAA
MDPRMFSLQQASTIPRRSGAA

SEQ ID NO: 104380 - protein, 21 aa, Artificial Sequence
  Description of Artificial Sequence: Synthetic peptide
  Seed: MDPRMCSLMQGSTLPRRSGAA
MDPRMFSLQQASTLPRRSGAA

SEQ ID NO: 104381 - protein, 21 aa, Artificial Sequence
  Description of Artificial Sequence: Synthetic peptide
  Seed: MDPRMCSLMQGSTLPRRSGAA
MDPRMFSLQQASTMPRRSGAA

SEQ ID NO: 104382 - protein, 21 aa, Artificial Sequence
  Description of Artificial Sequence: Synthetic peptide
  Seed: MDPRMCSLMQGSTLPRRSGAA
MDPRMFSLQQASTNPRRSGAA

SEQ ID NO: 104383 - protein, 21 aa, Artificial Sequence
  Description of Artificial Sequence: Synthetic peptide
  Seed: MDPRMCSLMQGSTLPRRSGAA
MDPRMFSLQQASTSPRRSGAA

SEQ ID NO: 104384 - protein, 21 aa, Artificial Sequence
  Description of Artificial Sequence: Synthetic peptide
  Seed: MDPRMCSLMQGSTLPRRSGAA
MDPRMFSLQQASTTPRRSGAA

SEQ ID NO: 104385 - protein, 21 aa, Artificial Sequence
  Description of Artificial Sequence: Synthetic peptide
  Seed: MDPRMCSLMQGSTLPRRSGAA
MDPRMFSLQQASTVPRRSGAA

SEQ ID NO: 104386 - protein, 21 aa, Artificial Sequence
  Description of Artificial Sequence: Synthetic peptide
  Seed: MDPRMCSLMQGSTLPRRSGAA
MDPRMFSLQQGSTAPRRSGAA

SEQ ID NO: 104387 - protein, 21 aa, Artificial Sequence
  Description of Artificial Sequence: Synthetic peptide
  Seed: MDPRMCSLMQGSTLPRRSGAA
MDPRMFSLQQGSTIPRRSGAA

SEQ ID NO: 104388 - protein, 21 aa, Artificial Sequence
  Description of Artificial Sequence: Synthetic peptide
  Seed: MDPRMCSLMQGSTLPRRSGAA
MDPRMFSLQQGSTLPRRSGAA

SEQ ID NO: 104389 - protein, 21 aa, Artificial Sequence
  Description of Artificial Sequence: Synthetic peptide
  Seed: MDPRMCSLMQGSTLPRRSGAA
MDPRMFSLQQGSTMPRRSGAA

SEQ ID NO: 104390 - protein, 21 aa, Artificial Sequence
  Description of Artificial Sequence: Synthetic peptide
  Seed: MDPRMCSLMQGSTLPRRSGAA
MDPRMFSLQQGSTVPRRSGAA

SEQ ID NO: 104391 - protein, 21 aa, Artificial Sequence
  Description of Artificial Sequence: Synthetic peptide
  Seed: MDPRMCSLMQGSTLPRRSGAA
MDPRMFSLQQISTAPRRSGAA

SEQ ID NO: 104392 - protein, 21 aa, Artificial Sequence
  Description of Artificial Sequence: Synthetic peptide
  Seed: MDPRMCSLMQGSTLPRRSGAA
MDPRMFSLQQNSTLPRRSGAA

SEQ ID NO: 104393 - protein, 21 aa, Artificial Sequence
  Description of Artificial Sequence: Synthetic peptide
  Seed: MDPRMCSLMQGSTLPRRSGAA
MDPRMFSLQQNSTVPRRSGAA

SEQ ID NO: 104394 - protein, 21 aa, Artificial Sequence
  Description of Artificial Sequence: Synthetic peptide
  Seed: MDPRMCSLMQGSTLPRRSGAA
MDPRMFSLQQPSTAPRRSGAA

SEQ ID NO: 104395 - protein, 21 aa, Artificial Sequence
  Description of Artificial Sequence: Synthetic peptide
  Seed: MDPRMCSLMQGSTLPRRSGAA
MDPRMFSLQQPSTIPRRSGAA

SEQ ID NO: 104396 - protein, 21 aa, Artificial Sequence
  Description of Artificial Sequence: Synthetic peptide
  Seed: MDPRMCSLMQGSTLPRRSGAA
MDPRMFSLQQPSTLPRRSGAA

SEQ ID NO: 104397 - protein, 21 aa, Artificial Sequence
  Description of Artificial Sequence: Synthetic peptide
  Seed: MDPRMCSLMQGSTLPRRSGAA
MDPRMFSLQQPSTVPRRSGAA

SEQ ID NO: 104398 - protein, 21 aa, Artificial Sequence
  Description of Artificial Sequence: Synthetic peptide
  Seed: MDPRMCSLMQGSTLPRRSGAA
MDPRMFSLQQSSTAPRRSGAA

SEQ ID NO: 104399 - protein, 21 aa, Artificial Sequence
  Description of Artificial Sequence: Synthetic peptide
  Seed: MDPRMCSLMQGSTLPRRSGAA
MDPRMFSLQQSSTIPRRSGAA

SEQ ID NO: 104400 - protein, 21 aa, Artificial Sequence
  Description of Artificial Sequence: Synthetic peptide
  Seed: MDPRMCSLMQGSTLPRRSGAA
MDPRMFSLQQSSTLPRRSGAA

SEQ ID NO: 104401 - protein, 21 aa, Artificial Sequence
  Description of Artificial Sequence: Synthetic peptide
  Seed: MDPRMCSLMQGSTLPRRSGAA
MDPRMFSLQQSSTSPRRSGAA

SEQ ID NO: 104402 - protein, 21 aa, Artificial Sequence
  Description of Artificial Sequence: Synthetic peptide
  Seed: MDPRMCSLMQGSTLPRRSGAA
MDPRMFSLQQSSTVPRRSGAA

SEQ ID NO: 104403 - protein, 21 aa, Artificial Sequence
  Description of Artificial Sequence: Synthetic peptide
  Seed: MDPRMCSLMQGSTLPRRSGAA
MDPRMFSLQQTSTAPRRSGAA

SEQ ID NO: 104404 - protein, 21 aa, Artificial Sequence
  Description of Artificial Sequence: Synthetic peptide
  Seed: MDPRMCSLMQGSTLPRRSGAA
MDPRMFSLQQTSTLPRRSGAA

SEQ ID NO: 104405 - protein, 21 aa, Artificial Sequence
  Description of Artificial Sequence: Synthetic peptide
  Seed: MDPRMCSLMQGSTLPRRSGAA
MDPRMFSLQQTSTVPRRSGAA

SEQ ID NO: 104406 - protein, 21 aa, Artificial Sequence
  Description of Artificial Sequence: Synthetic peptide
  Seed: MDPRMCSLMQGSTLPRRSGAA
MDPRMFSLQQVSTAPRRSGAA

SEQ ID NO: 104407 - protein, 21 aa, Artificial Sequence
  Description of Artificial Sequence: Synthetic peptide
  Seed: MDPRMCSLMQGSTLPRRSGAA
MDPRMFSLQQVSTNPRRSGAA

SEQ ID NO: 104408 - protein, 21 aa, Artificial Sequence
  Description of Artificial Sequence: Synthetic peptide
  Seed: MDPRMCSLMQGSTLPRRSGAA
MDPRMFSLQQVSTSPRRSGAA

SEQ ID NO: 104409 - protein, 21 aa, Artificial Sequence
  Description of Artificial Sequence: Synthetic peptide
  Seed: MDPRMCSLMQGSTLPRRSGAA
MDPRMFSLSQASTAPRRSGAA

SEQ ID NO: 104410 - protein, 21 aa, Artificial Sequence
  Description of Artificial Sequence: Synthetic peptide
  Seed: MDPRMCSLMQGSTLPRRSGAA
MDPRMFSLSQASTIPRRSGAA

SEQ ID NO: 104411 - protein, 21 aa, Artificial Sequence
  Description of Artificial Sequence: Synthetic peptide
  Seed: MDPRMCSLMQGSTLPRRSGAA
MDPRMFSLSQASTLPRRSGAA

SEQ ID NO: 104412 - protein, 21 aa, Artificial Sequence
  Description of Artificial Sequence: Synthetic peptide
  Seed: MDPRMCSLMQGSTLPRRSGAA
MDPRMFSLSQASTMPRRSGAA

SEQ ID NO: 104413 - protein, 21 aa, Artificial Sequence
  Description of Artificial Sequence: Synthetic peptide
  Seed: MDPRMCSLMQGSTLPRRSGAA
MDPRMFSLSQASTNPRRSGAA

SEQ ID NO: 104414 - protein, 21 aa, Artificial Sequence
  Description of Artificial Sequence: Synthetic peptide
  Seed: MDPRMCSLMQGSTLPRRSGAA
MDPRMFSLSQASTSPRRSGAA

SEQ ID NO: 104415 - protein, 21 aa, Artificial Sequence
  Description of Artificial Sequence: Synthetic peptide
  Seed: MDPRMCSLMQGSTLPRRSGAA
MDPRMFSLSQASTVPRRSGAA

SEQ ID NO: 104416 - protein, 21 aa, Artificial Sequence
  Description of Artificial Sequence: Synthetic peptide
  Seed: MDPRMCSLMQGSTLPRRSGAA
MDPRMFSLSQGSTIPRRSGAA

SEQ ID NO: 104417 - protein, 21 aa, Artificial Sequence
  Description of Artificial Sequence: Synthetic peptide
  Seed: MDPRMCSLMQGSTLPRRSGAA
MDPRMFSLSQGSTLPRRSGAA

SEQ ID NO: 104418 - protein, 21 aa, Artificial Sequence
  Description of Artificial Sequence: Synthetic peptide
  Seed: MDPRMCSLMQGSTLPRRSGAA
MDPRMFSLSQGSTVPRRSGAA

SEQ ID NO: 104419 - protein, 21 aa, Artificial Sequence
  Description of Artificial Sequence: Synthetic peptide
  Seed: MDPRMCSLMQGSTLPRRSGAA
MDPRMFSLSQSSTIPRRSGAA

SEQ ID NO: 104420 - protein, 21 aa, Artificial Sequence
  Description of Artificial Sequence: Synthetic peptide
  Seed: MDPRMCSLMQGSTLPRRSGAA
MDPRMFSLSQSSTLPRRSGAA

SEQ ID NO: 104421 - protein, 21 aa, Artificial Sequence
  Description of Artificial Sequence: Synthetic peptide
  Seed: MDPRMCSLMQGSTLPRRSGAA
MDPRMFSLSQSSTVPRRSGAA

SEQ ID NO: 104422 - protein, 21 aa, Artificial Sequence
  Description of Artificial Sequence: Synthetic peptide
  Seed: MDPRMCSLMQGSTLPRRSGAA
MDPRMFSLTQASTAPRRSGAA

SEQ ID NO: 104423 - protein, 21 aa, Artificial Sequence
  Description of Artificial Sequence: Synthetic peptide
  Seed: MDPRMCSLMQGSTLPRRSGAA
MDPRMFSLTQASTIPRRSGAA

SEQ ID NO: 104424 - protein, 21 aa, Artificial Sequence
  Description of Artificial Sequence: Synthetic peptide
  Seed: MDPRMCSLMQGSTLPRRSGAA
MDPRMFSLTQASTLPRRSGAA

SEQ ID NO: 104425 - protein, 21 aa, Artificial Sequence
  Description of Artificial Sequence: Synthetic peptide
  Seed: MDPRMCSLMQGSTLPRRSGAA
MDPRMFSLTQASTSPRRSGAA

SEQ ID NO: 104426 - protein, 21 aa, Artificial Sequence
  Description of Artificial Sequence: Synthetic peptide
  Seed: MDPRMCSLMQGSTLPRRSGAA
MDPRMFSLTQASTVPRRSGAA

SEQ ID NO: 104427 - protein, 21 aa, Artificial Sequence
  Description of Artificial Sequence: Synthetic peptide
  Seed: MDPRMCSLMQGSTLPRRSGAA
MDPRMFSLVQASTAPRRSGAA

SEQ ID NO: 104428 - protein, 21 aa, Artificial Sequence
  Description of Artificial Sequence: Synthetic peptide
  Seed: MDPRMCSLMQGSTLPRRSGAA
MDPRMFSLVQASTGPRRSGAA

SEQ ID NO: 104429 - protein, 21 aa, Artificial Sequence
  Description of Artificial Sequence: Synthetic peptide
  Seed: MDPRMCSLMQGSTLPRRSGAA
MDPRMFSLVQASTIPRRSGAA

SEQ ID NO: 104430 - protein, 21 aa, Artificial Sequence
  Description of Artificial Sequence: Synthetic peptide
  Seed: MDPRMCSLMQGSTLPRRSGAA
MDPRMFSLVQASTLPRRSGAA

SEQ ID NO: 104431 - protein, 21 aa, Artificial Sequence
  Description of Artificial Sequence: Synthetic peptide
  Seed: MDPRMCSLMQGSTLPRRSGAA
MDPRMFSLVQASTMPRRSGAA

SEQ ID NO: 104432 - protein, 21 aa, Artificial Sequence
  Description of Artificial Sequence: Synthetic peptide
  Seed: MDPRMCSLMQGSTLPRRSGAA
MDPRMFSLVQASTNPRRSGAA

SEQ ID NO: 104433 - protein, 21 aa, Artificial Sequence
  Description of Artificial Sequence: Synthetic peptide
  Seed: MDPRMCSLMQGSTLPRRSGAA
MDPRMFSLVQASTQPRRSGAA

SEQ ID NO: 104434 - protein, 21 aa, Artificial Sequence
  Description of Artificial Sequence: Synthetic peptide
  Seed: MDPRMCSLMQGSTLPRRSGAA
MDPRMFSLVQASTSPRRSGAA

SEQ ID NO: 104435 - protein, 21 aa, Artificial Sequence
  Description of Artificial Sequence: Synthetic peptide
  Seed: MDPRMCSLMQGSTLPRRSGAA
MDPRMFSLVQASTTPRRSGAA

SEQ ID NO: 104436 - protein, 21 aa, Artificial Sequence
  Description of Artificial Sequence: Synthetic peptide
  Seed: MDPRMCSLMQGSTLPRRSGAA
MDPRMFSLVQASTVPRRSGAA

SEQ ID NO: 104437 - protein, 21 aa, Artificial Sequence
  Description of Artificial Sequence: Synthetic peptide
  Seed: MDPRMCSLMQGSTLPRRSGAA
MDPRMFSLVQGSTAPRRSGAA

SEQ ID NO: 104438 - protein, 21 aa, Artificial Sequence
  Description of Artificial Sequence: Synthetic peptide
  Seed: MDPRMCSLMQGSTLPRRSGAA
MDPRMFSLVQGSTIPRRSGAA

SEQ ID NO: 104439 - protein, 21 aa, Artificial Sequence
  Description of Artificial Sequence: Synthetic peptide
  Seed: MDPRMCSLMQGSTLPRRSGAA
MDPRMFSLVQGSTLPRRSGAA

SEQ ID NO: 104440 - protein, 21 aa, Artificial Sequence
  Description of Artificial Sequence: Synthetic peptide
  Seed: MDPRMCSLMQGSTLPRRSGAA
MDPRMFSLVQGSTMPRRSGAA

SEQ ID NO: 104441 - protein, 21 aa, Artificial Sequence
  Description of Artificial Sequence: Synthetic peptide
  Seed: MDPRMCSLMQGSTLPRRSGAA
MDPRMFSLVQGSTNPRRSGAA

SEQ ID NO: 104442 - protein, 21 aa, Artificial Sequence
  Description of Artificial Sequence: Synthetic peptide
  Seed: MDPRMCSLMQGSTLPRRSGAA
MDPRMFSLVQGSTSPRRSGAA

SEQ ID NO: 104443 - protein, 21 aa, Artificial Sequence
  Description of Artificial Sequence: Synthetic peptide
  Seed: MDPRMCSLMQGSTLPRRSGAA
MDPRMFSLVQGSTTPRRSGAA

SEQ ID NO: 104444 - protein, 21 aa, Artificial Sequence
  Description of Artificial Sequence: Synthetic peptide
  Seed: MDPRMCSLMQGSTLPRRSGAA
MDPRMFSLVQGSTVPRRSGAA

SEQ ID NO: 104445 - protein, 21 aa, Artificial Sequence
  Description of Artificial Sequence: Synthetic peptide
  Seed: MDPRMCSLMQGSTLPRRSGAA
MDPRMFSLVQISTAPRRSGAA

SEQ ID NO: 104446 - protein, 21 aa, Artificial Sequence
  Description of Artificial Sequence: Synthetic peptide
  Seed: MDPRMCSLMQGSTLPRRSGAA
MDPRMFSLVQISTNPRRSGAA

SEQ ID NO: 104447 - protein, 21 aa, Artificial Sequence
  Description of Artificial Sequence: Synthetic peptide
  Seed: MDPRMCSLMQGSTLPRRSGAA
MDPRMFSLVQISTSPRRSGAA

SEQ ID NO: 104448 - protein, 21 aa, Artificial Sequence
  Description of Artificial Sequence: Synthetic peptide
  Seed: MDPRMCSLMQGSTLPRRSGAA
MDPRMFSLVQNSTAPRRSGAA

SEQ ID NO: 104449 - protein, 21 aa, Artificial Sequence
  Description of Artificial Sequence: Synthetic peptide
  Seed: MDPRMCSLMQGSTLPRRSGAA
MDPRMFSLVQNSTLPRRSGAA

SEQ ID NO: 104450 - protein, 21 aa, Artificial Sequence
  Description of Artificial Sequence: Synthetic peptide
  Seed: MDPRMCSLMQGSTLPRRSGAA
MDPRMFSLVQNSTVPRRSGAA

SEQ ID NO: 104451 - protein, 21 aa, Artificial Sequence
  Description of Artificial Sequence: Synthetic peptide
  Seed: MDPRMCSLMQGSTLPRRSGAA
MDPRMFSLVQPSTAPRRSGAA

SEQ ID NO: 104452 - protein, 21 aa, Artificial Sequence
  Description of Artificial Sequence: Synthetic peptide
  Seed: MDPRMCSLMQGSTLPRRSGAA
MDPRMFSLVQPSTGPRRSGAA

SEQ ID NO: 104453 - protein, 21 aa, Artificial Sequence
  Description of Artificial Sequence: Synthetic peptide
  Seed: MDPRMCSLMQGSTLPRRSGAA
MDPRMFSLVQPSTIPRRSGAA

SEQ ID NO: 104454 - protein, 21 aa, Artificial Sequence
  Description of Artificial Sequence: Synthetic peptide
  Seed: MDPRMCSLMQGSTLPRRSGAA
MDPRMFSLVQPSTLPRRSGAA

SEQ ID NO: 104455 - protein, 21 aa, Artificial Sequence
  Description of Artificial Sequence: Synthetic peptide
  Seed: MDPRMCSLMQGSTLPRRSGAA
MDPRMFSLVQPSTMPRRSGAA

SEQ ID NO: 104456 - protein, 21 aa, Artificial Sequence
  Description of Artificial Sequence: Synthetic peptide
  Seed: MDPRMCSLMQGSTLPRRSGAA
MDPRMFSLVQPSTNPRRSGAA

SEQ ID NO: 104457 - protein, 21 aa, Artificial Sequence
  Description of Artificial Sequence: Synthetic peptide
  Seed: MDPRMCSLMQGSTLPRRSGAA
MDPRMFSLVQPSTSPRRSGAA

SEQ ID NO: 104458 - protein, 21 aa, Artificial Sequence
  Description of Artificial Sequence: Synthetic peptide
  Seed: MDPRMCSLMQGSTLPRRSGAA
MDPRMFSLVQPSTTPRRSGAA

SEQ ID NO: 104459 - protein, 21 aa, Artificial Sequence
  Description of Artificial Sequence: Synthetic peptide
  Seed: MDPRMCSLMQGSTLPRRSGAA
MDPRMFSLVQPSTVPRRSGAA

SEQ ID NO: 104460 - protein, 21 aa, Artificial Sequence
  Description of Artificial Sequence: Synthetic peptide
  Seed: MDPRMCSLMQGSTLPRRSGAA
MDPRMFSLVQSSTAPRRSGAA

SEQ ID NO: 104461 - protein, 21 aa, Artificial Sequence
  Description of Artificial Sequence: Synthetic peptide
  Seed: MDPRMCSLMQGSTLPRRSGAA
MDPRMFSLVQSSTIPRRSGAA

SEQ ID NO: 104462 - protein, 21 aa, Artificial Sequence
  Description of Artificial Sequence: Synthetic peptide
  Seed: MDPRMCSLMQGSTLPRRSGAA
MDPRMFSLVQSSTLPRRSGAA

SEQ ID NO: 104463 - protein, 21 aa, Artificial Sequence
  Description of Artificial Sequence: Synthetic peptide
  Seed: MDPRMCSLMQGSTLPRRSGAA
MDPRMFSLVQSSTNPRRSGAA

SEQ ID NO: 104464 - protein, 21 aa, Artificial Sequence
  Description of Artificial Sequence: Synthetic peptide
  Seed: MDPRMCSLMQGSTLPRRSGAA
MDPRMFSLVQSSTSPRRSGAA

SEQ ID NO: 104465 - protein, 21 aa, Artificial Sequence
  Description of Artificial Sequence: Synthetic peptide
  Seed: MDPRMCSLMQGSTLPRRSGAA
MDPRMFSLVQSSTTPRRSGAA

SEQ ID NO: 104466 - protein, 21 aa, Artificial Sequence
  Description of Artificial Sequence: Synthetic peptide
  Seed: MDPRMCSLMQGSTLPRRSGAA
MDPRMFSLVQSSTVPRRSGAA

SEQ ID NO: 104467 - protein, 21 aa, Artificial Sequence
  Description of Artificial Sequence: Synthetic peptide
  Seed: MDPRMCSLMQGSTLPRRSGAA
MDPRMFSLVQTSTAPRRSGAA

SEQ ID NO: 104468 - protein, 21 aa, Artificial Sequence
  Description of Artificial Sequence: Synthetic peptide
  Seed: MDPRMCSLMQGSTLPRRSGAA
MDPRMFSLVQTSTIPRRSGAA

SEQ ID NO: 104469 - protein, 21 aa, Artificial Sequence
  Description of Artificial Sequence: Synthetic peptide
  Seed: MDPRMCSLMQGSTLPRRSGAA
MDPRMFSLVQTSTLPRRSGAA

SEQ ID NO: 104470 - protein, 21 aa, Artificial Sequence
  Description of Artificial Sequence: Synthetic peptide
  Seed: MDPRMCSLMQGSTLPRRSGAA
MDPRMFSLVQTSTNPRRSGAA

SEQ ID NO: 104471 - protein, 21 aa, Artificial Sequence
  Description of Artificial Sequence: Synthetic peptide
  Seed: MDPRMCSLMQGSTLPRRSGAA
MDPRMFSLVQTSTSPRRSGAA

SEQ ID NO: 104472 - protein, 21 aa, Artificial Sequence
  Description of Artificial Sequence: Synthetic peptide
  Seed: MDPRMCSLMQGSTLPRRSGAA
MDPRMFSLVQTSTTPRRSGAA

SEQ ID NO: 104473 - protein, 21 aa, Artificial Sequence
  Description of Artificial Sequence: Synthetic peptide
  Seed: MDPRMCSLMQGSTLPRRSGAA
MDPRMFSLVQTSTVPRRSGAA

SEQ ID NO: 104474 - protein, 21 aa, Artificial Sequence
  Description of Artificial Sequence: Synthetic peptide
  Seed: MDPRMCSLMQGSTLPRRSGAA
MDPRMFSLVQVSTAPRRSGAA

SEQ ID NO: 104475 - protein, 21 aa, Artificial Sequence
  Description of Artificial Sequence: Synthetic peptide
  Seed: MDPRMCSLMQGSTLPRRSGAA
MDPRMFSLVQVSTNPRRSGAA

SEQ ID NO: 104476 - protein, 21 aa, Artificial Sequence
  Description of Artificial Sequence: Synthetic peptide
  Seed: MDPRMCSLMQGSTLPRRSGAA
MDPRMFSLVQVSTSPRRSGAA

SEQ ID NO: 104477 - protein, 21 aa, Artificial Sequence
  Description of Artificial Sequence: Synthetic peptide
  Seed: MDPRMCSLMQGSTLPRRSGAA
MDPRMFSLVQVSTTPRRSGAA

SEQ ID NO: 104478 - protein, 21 aa, Artificial Sequence
  Description of Artificial Sequence: Synthetic peptide
  Seed: MDPRMCSLMQGSTLPRRSGAA
MDPRMFSLVQVSTVPRRSGAA

SEQ ID NO: 104479 - protein, 21 aa, Artificial Sequence
  Description of Artificial Sequence: Synthetic peptide
  Seed: MDPRMCSLMQGSTLPRRSGAA
MDPRMISLAQASTAPRRSGAA

SEQ ID NO: 104480 - protein, 21 aa, Artificial Sequence
  Description of Artificial Sequence: Synthetic peptide
  Seed: MDPRMCSLMQGSTLPRRSGAA
MDPRMISLAQASTIPRRSGAA

SEQ ID NO: 104481 - protein, 21 aa, Artificial Sequence
  Description of Artificial Sequence: Synthetic peptide
  Seed: MDPRMCSLMQGSTLPRRSGAA
MDPRMISLAQASTLPRRSGAA

SEQ ID NO: 104482 - protein, 21 aa, Artificial Sequence
  Description of Artificial Sequence: Synthetic peptide
  Seed: MDPRMCSLMQGSTLPRRSGAA
MDPRMISLAQASTVPRRSGAA

SEQ ID NO: 104483 - protein, 21 aa, Artificial Sequence
  Description of Artificial Sequence: Synthetic peptide
  Seed: MDPRMCSLMQGSTLPRRSGAA
MDPRMISLAQGSTLPRRSGAA

SEQ ID NO: 104484 - protein, 21 aa, Artificial Sequence
  Description of Artificial Sequence: Synthetic peptide
  Seed: MDPRMCSLMQGSTLPRRSGAA
MDPRMISLIQASTAPRRSGAA

SEQ ID NO: 104485 - protein, 21 aa, Artificial Sequence
  Description of Artificial Sequence: Synthetic peptide
  Seed: MDPRMCSLMQGSTLPRRSGAA
MDPRMISLIQASTIPRRSGAA

SEQ ID NO: 104486 - protein, 21 aa, Artificial Sequence
  Description of Artificial Sequence: Synthetic peptide
  Seed: MDPRMCSLMQGSTLPRRSGAA
MDPRMISLIQASTLPRRSGAA

SEQ ID NO: 104487 - protein, 21 aa, Artificial Sequence
  Description of Artificial Sequence: Synthetic peptide
  Seed: MDPRMCSLMQGSTLPRRSGAA
MDPRMISLIQASTNPRRSGAA

SEQ ID NO: 104488 - protein, 21 aa, Artificial Sequence
  Description of Artificial Sequence: Synthetic peptide
  Seed: MDPRMCSLMQGSTLPRRSGAA
MDPRMISLIQASTSPRRSGAA

SEQ ID NO: 104489 - protein, 21 aa, Artificial Sequence
  Description of Artificial Sequence: Synthetic peptide
  Seed: MDPRMCSLMQGSTLPRRSGAA
MDPRMISLIQASTVPRRSGAA

SEQ ID NO: 104490 - protein, 21 aa, Artificial Sequence
  Description of Artificial Sequence: Synthetic peptide
  Seed: MDPRMCSLMQGSTLPRRSGAA
MDPRMISLIQGSTAPRRSGAA

SEQ ID NO: 104491 - protein, 21 aa, Artificial Sequence
  Description of Artificial Sequence: Synthetic peptide
  Seed: MDPRMCSLMQGSTLPRRSGAA
MDPRMISLIQGSTIPRRSGAA

SEQ ID NO: 104492 - protein, 21 aa, Artificial Sequence
  Description of Artificial Sequence: Synthetic peptide
  Seed: MDPRMCSLMQGSTLPRRSGAA
MDPRMISLIQGSTLPRRSGAA

SEQ ID NO: 104493 - protein, 21 aa, Artificial Sequence
  Description of Artificial Sequence: Synthetic peptide
  Seed: MDPRMCSLMQGSTLPRRSGAA
MDPRMISLIQGSTVPRRSGAA

SEQ ID NO: 104494 - protein, 21 aa, Artificial Sequence
  Description of Artificial Sequence: Synthetic peptide
  Seed: MDPRMCSLMQGSTLPRRSGAA
MDPRMISLIQSSTVPRRSGAA

SEQ ID NO: 104495 - protein, 21 aa, Artificial Sequence
  Description of Artificial Sequence: Synthetic peptide
  Seed: MDPRMCSLMQGSTLPRRSGAA
MDPRMISLLQASTAPRRSGAA

SEQ ID NO: 104496 - protein, 21 aa, Artificial Sequence
  Description of Artificial Sequence: Synthetic peptide
  Seed: MDPRMCSLMQGSTLPRRSGAA
MDPRMISLLQASTGPRRSGAA

SEQ ID NO: 104497 - protein, 21 aa, Artificial Sequence
  Description of Artificial Sequence: Synthetic peptide
  Seed: MDPRMCSLMQGSTLPRRSGAA
MDPRMISLLQASTIPRRSGAA

SEQ ID NO: 104498 - protein, 21 aa, Artificial Sequence
  Description of Artificial Sequence: Synthetic peptide
  Seed: MDPRMCSLMQGSTLPRRSGAA
MDPRMISLLQASTLPRRSGAA

SEQ ID NO: 104499 - protein, 21 aa, Artificial Sequence
  Description of Artificial Sequence: Synthetic peptide
  Seed: MDPRMCSLMQGSTLPRRSGAA
MDPRMISLLQASTMPRRSGAA

SEQ ID NO: 104500 - protein, 21 aa, Artificial Sequence
  Description of Artificial Sequence: Synthetic peptide
  Seed: MDPRMCSLMQGSTLPRRSGAA
MDPRMISLLQASTNPRRSGAA

SEQ ID NO: 104501 - protein, 21 aa, Artificial Sequence
  Description of Artificial Sequence: Synthetic peptide
  Seed: MDPRMCSLMQGSTLPRRSGAA
MDPRMISLLQASTSPRRSGAA

SEQ ID NO: 104502 - protein, 21 aa, Artificial Sequence
  Description of Artificial Sequence: Synthetic peptide
  Seed: MDPRMCSLMQGSTLPRRSGAA
MDPRMISLLQASTTPRRSGAA

SEQ ID NO: 104503 - protein, 21 aa, Artificial Sequence
  Description of Artificial Sequence: Synthetic peptide
  Seed: MDPRMCSLMQGSTLPRRSGAA
MDPRMISLLQASTVPRRSGAA

SEQ ID NO: 104504 - protein, 21 aa, Artificial Sequence
  Description of Artificial Sequence: Synthetic peptide
  Seed: MDPRMCSLMQGSTLPRRSGAA
MDPRMISLLQGSTAPRRSGAA

SEQ ID NO: 104505 - protein, 21 aa, Artificial Sequence
  Description of Artificial Sequence: Synthetic peptide
  Seed: MDPRMCSLMQGSTLPRRSGAA
MDPRMISLLQGSTIPRRSGAA

SEQ ID NO: 104506 - protein, 21 aa, Artificial Sequence
  Description of Artificial Sequence: Synthetic peptide
  Seed: MDPRMCSLMQGSTLPRRSGAA
MDPRMISLLQGSTLPRRSGAA

SEQ ID NO: 104507 - protein, 21 aa, Artificial Sequence
  Description of Artificial Sequence: Synthetic peptide
  Seed: MDPRMCSLMQGSTLPRRSGAA
MDPRMISLLQGSTMPRRSGAA

SEQ ID NO: 104508 - protein, 21 aa, Artificial Sequence
  Description of Artificial Sequence: Synthetic peptide
  Seed: MDPRMCSLMQGSTLPRRSGAA
MDPRMISLLQGSTSPRRSGAA

SEQ ID NO: 104509 - protein, 21 aa, Artificial Sequence
  Description of Artificial Sequence: Synthetic peptide
  Seed: MDPRMCSLMQGSTLPRRSGAA
MDPRMISLLQGSTTPRRSGAA

SEQ ID NO: 104510 - protein, 21 aa, Artificial Sequence
  Description of Artificial Sequence: Synthetic peptide
  Seed: MDPRMCSLMQGSTLPRRSGAA
MDPRMISLLQGSTVPRRSGAA

SEQ ID NO: 104511 - protein, 21 aa, Artificial Sequence
  Description of Artificial Sequence: Synthetic peptide
  Seed: MDPRMCSLMQGSTLPRRSGAA
MDPRMISLLQNSTIPRRSGAA

SEQ ID NO: 104512 - protein, 21 aa, Artificial Sequence
  Description of Artificial Sequence: Synthetic peptide
  Seed: MDPRMCSLMQGSTLPRRSGAA
MDPRMISLLQNSTLPRRSGAA

SEQ ID NO: 104513 - protein, 21 aa, Artificial Sequence
  Description of Artificial Sequence: Synthetic peptide
  Seed: MDPRMCSLMQGSTLPRRSGAA
MDPRMISLLQNSTVPRRSGAA

SEQ ID NO: 104514 - protein, 21 aa, Artificial Sequence
  Description of Artificial Sequence: Synthetic peptide
  Seed: MDPRMCSLMQGSTLPRRSGAA
MDPRMISLLQPSTAPRRSGAA

SEQ ID NO: 104515 - protein, 21 aa, Artificial Sequence
  Description of Artificial Sequence: Synthetic peptide
  Seed: MDPRMCSLMQGSTLPRRSGAA
MDPRMISLLQPSTIPRRSGAA

SEQ ID NO: 104516 - protein, 21 aa, Artificial Sequence
  Description of Artificial Sequence: Synthetic peptide
  Seed: MDPRMCSLMQGSTLPRRSGAA
MDPRMISLLQPSTLPRRSGAA

SEQ ID NO: 104517 - protein, 21 aa, Artificial Sequence
  Description of Artificial Sequence: Synthetic peptide
  Seed: MDPRMCSLMQGSTLPRRSGAA
MDPRMISLLQPSTMPRRSGAA

SEQ ID NO: 104518 - protein, 21 aa, Artificial Sequence
  Description of Artificial Sequence: Synthetic peptide
  Seed: MDPRMCSLMQGSTLPRRSGAA
MDPRMISLLQPSTNPRRSGAA

SEQ ID NO: 104519 - protein, 21 aa, Artificial Sequence
  Description of Artificial Sequence: Synthetic peptide
  Seed: MDPRMCSLMQGSTLPRRSGAA
MDPRMISLLQPSTSPRRSGAA

SEQ ID NO: 104520 - protein, 21 aa, Artificial Sequence
  Description of Artificial Sequence: Synthetic peptide
  Seed: MDPRMCSLMQGSTLPRRSGAA
MDPRMISLLQPSTTPRRSGAA

SEQ ID NO: 104521 - protein, 21 aa, Artificial Sequence
  Description of Artificial Sequence: Synthetic peptide
  Seed: MDPRMCSLMQGSTLPRRSGAA
MDPRMISLLQPSTVPRRSGAA

SEQ ID NO: 104522 - protein, 21 aa, Artificial Sequence
  Description of Artificial Sequence: Synthetic peptide
  Seed: MDPRMCSLMQGSTLPRRSGAA
MDPRMISLLQSSTAPRRSGAA

SEQ ID NO: 104523 - protein, 21 aa, Artificial Sequence
  Description of Artificial Sequence: Synthetic peptide
  Seed: MDPRMCSLMQGSTLPRRSGAA
MDPRMISLLQSSTIPRRSGAA

SEQ ID NO: 104524 - protein, 21 aa, Artificial Sequence
  Description of Artificial Sequence: Synthetic peptide
  Seed: MDPRMCSLMQGSTLPRRSGAA
MDPRMISLLQSSTLPRRSGAA

SEQ ID NO: 104525 - protein, 21 aa, Artificial Sequence
  Description of Artificial Sequence: Synthetic peptide
  Seed: MDPRMCSLMQGSTLPRRSGAA
MDPRMISLLQSSTMPRRSGAA

SEQ ID NO: 104526 - protein, 21 aa, Artificial Sequence
  Description of Artificial Sequence: Synthetic peptide
  Seed: MDPRMCSLMQGSTLPRRSGAA
MDPRMISLLQSSTSPRRSGAA

SEQ ID NO: 104527 - protein, 21 aa, Artificial Sequence
  Description of Artificial Sequence: Synthetic peptide
  Seed: MDPRMCSLMQGSTLPRRSGAA
MDPRMISLLQSSTTPRRSGAA

SEQ ID NO: 104528 - protein, 21 aa, Artificial Sequence
  Description of Artificial Sequence: Synthetic peptide
  Seed: MDPRMCSLMQGSTLPRRSGAA
MDPRMISLLQSSTVPRRSGAA

SEQ ID NO: 104529 - protein, 21 aa, Artificial Sequence
  Description of Artificial Sequence: Synthetic peptide
  Seed: MDPRMCSLMQGSTLPRRSGAA
MDPRMISLLQTSTAPRRSGAA

SEQ ID NO: 104530 - protein, 21 aa, Artificial Sequence
  Description of Artificial Sequence: Synthetic peptide
  Seed: MDPRMCSLMQGSTLPRRSGAA
MDPRMISLLQTSTIPRRSGAA

SEQ ID NO: 104531 - protein, 21 aa, Artificial Sequence
  Description of Artificial Sequence: Synthetic peptide
  Seed: MDPRMCSLMQGSTLPRRSGAA
MDPRMISLLQTSTLPRRSGAA

SEQ ID NO: 104532 - protein, 21 aa, Artificial Sequence
  Description of Artificial Sequence: Synthetic peptide
  Seed: MDPRMCSLMQGSTLPRRSGAA
MDPRMISLLQTSTNPRRSGAA

SEQ ID NO: 104533 - protein, 21 aa, Artificial Sequence
  Description of Artificial Sequence: Synthetic peptide
  Seed: MDPRMCSLMQGSTLPRRSGAA
MDPRMISLLQTSTVPRRSGAA

SEQ ID NO: 104534 - protein, 21 aa, Artificial Sequence
  Description of Artificial Sequence: Synthetic peptide
  Seed: MDPRMCSLMQGSTLPRRSGAA
MDPRMISLLQVSTAPRRSGAA

SEQ ID NO: 104535 - protein, 21 aa, Artificial Sequence
  Description of Artificial Sequence: Synthetic peptide
  Seed: MDPRMCSLMQGSTLPRRSGAA
MDPRMISLLQVSTNPRRSGAA

SEQ ID NO: 104536 - protein, 21 aa, Artificial Sequence
  Description of Artificial Sequence: Synthetic peptide
  Seed: MDPRMCSLMQGSTLPRRSGAA
MDPRMISLLQVSTSPRRSGAA

SEQ ID NO: 104537 - protein, 21 aa, Artificial Sequence
  Description of Artificial Sequence: Synthetic peptide
  Seed: MDPRMCSLMQGSTLPRRSGAA
MDPRMISLMQASTAPRRSGAA

SEQ ID NO: 104538 - protein, 21 aa, Artificial Sequence
  Description of Artificial Sequence: Synthetic peptide
  Seed: MDPRMCSLMQGSTLPRRSGAA
MDPRMISLMQASTGPRRSGAA

SEQ ID NO: 104539 - protein, 21 aa, Artificial Sequence
  Description of Artificial Sequence: Synthetic peptide
  Seed: MDPRMCSLMQGSTLPRRSGAA
MDPRMISLMQASTIPRRSGAA

SEQ ID NO: 104540 - protein, 21 aa, Artificial Sequence
  Description of Artificial Sequence: Synthetic peptide
  Seed: MDPRMCSLMQGSTLPRRSGAA
MDPRMISLMQASTLPRRSGAA

SEQ ID NO: 104541 - protein, 21 aa, Artificial Sequence
  Description of Artificial Sequence: Synthetic peptide
  Seed: MDPRMCSLMQGSTLPRRSGAA
MDPRMISLMQASTMPRRSGAA

SEQ ID NO: 104542 - protein, 21 aa, Artificial Sequence
  Description of Artificial Sequence: Synthetic peptide
  Seed: MDPRMCSLMQGSTLPRRSGAA
MDPRMISLMQASTNPRRSGAA

SEQ ID NO: 104543 - protein, 21 aa, Artificial Sequence
  Description of Artificial Sequence: Synthetic peptide
  Seed: MDPRMCSLMQGSTLPRRSGAA
MDPRMISLMQASTSPRRSGAA

SEQ ID NO: 104544 - protein, 21 aa, Artificial Sequence
  Description of Artificial Sequence: Synthetic peptide
  Seed: MDPRMCSLMQGSTLPRRSGAA
MDPRMISLMQASTTPRRSGAA

SEQ ID NO: 104545 - protein, 21 aa, Artificial Sequence
  Description of Artificial Sequence: Synthetic peptide
  Seed: MDPRMCSLMQGSTLPRRSGAA
MDPRMISLMQASTVPRRSGAA

SEQ ID NO: 104546 - protein, 21 aa, Artificial Sequence
  Description of Artificial Sequence: Synthetic peptide
  Seed: MDPRMCSLMQGSTLPRRSGAA
MDPRMISLMQGSTAPRRSGAA

SEQ ID NO: 104547 - protein, 21 aa, Artificial Sequence
  Description of Artificial Sequence: Synthetic peptide
  Seed: MDPRMCSLMQGSTLPRRSGAA
MDPRMISLMQGSTIPRRSGAA

SEQ ID NO: 104548 - protein, 21 aa, Artificial Sequence
  Description of Artificial Sequence: Synthetic peptide
  Seed: MDPRMCSLMQGSTLPRRSGAA
MDPRMISLMQGSTLPRRSGAA

SEQ ID NO: 104549 - protein, 21 aa, Artificial Sequence
  Description of Artificial Sequence: Synthetic peptide
  Seed: MDPRMCSLMQGSTLPRRSGAA
MDPRMISLMQGSTMPRRSGAA

SEQ ID NO: 104550 - protein, 21 aa, Artificial Sequence
  Description of Artificial Sequence: Synthetic peptide
  Seed: MDPRMCSLMQGSTLPRRSGAA
MDPRMISLMQGSTSPRRSGAA

SEQ ID NO: 104551 - protein, 21 aa, Artificial Sequence
  Description of Artificial Sequence: Synthetic peptide
  Seed: MDPRMCSLMQGSTLPRRSGAA
MDPRMISLMQGSTTPRRSGAA

SEQ ID NO: 104552 - protein, 21 aa, Artificial Sequence
  Description of Artificial Sequence: Synthetic peptide
  Seed: MDPRMCSLMQGSTLPRRSGAA
MDPRMISLMQGSTVPRRSGAA

SEQ ID NO: 104553 - protein, 21 aa, Artificial Sequence
  Description of Artificial Sequence: Synthetic peptide
  Seed: MDPRMCSLMQGSTLPRRSGAA
MDPRMISLMQISTAPRRSGAA

SEQ ID NO: 104554 - protein, 21 aa, Artificial Sequence
  Description of Artificial Sequence: Synthetic peptide
  Seed: MDPRMCSLMQGSTLPRRSGAA
MDPRMISLMQNSTIPRRSGAA

SEQ ID NO: 104555 - protein, 21 aa, Artificial Sequence
  Description of Artificial Sequence: Synthetic peptide
  Seed: MDPRMCSLMQGSTLPRRSGAA
MDPRMISLMQNSTLPRRSGAA

SEQ ID NO: 104556 - protein, 21 aa, Artificial Sequence
  Description of Artificial Sequence: Synthetic peptide
  Seed: MDPRMCSLMQGSTLPRRSGAA
MDPRMISLMQNSTVPRRSGAA

SEQ ID NO: 104557 - protein, 21 aa, Artificial Sequence
  Description of Artificial Sequence: Synthetic peptide
  Seed: MDPRMCSLMQGSTLPRRSGAA
MDPRMISLMQPSTAPRRSGAA

SEQ ID NO: 104558 - protein, 21 aa, Artificial Sequence
  Description of Artificial Sequence: Synthetic peptide
  Seed: MDPRMCSLMQGSTLPRRSGAA
MDPRMISLMQPSTIPRRSGAA

SEQ ID NO: 104559 - protein, 21 aa, Artificial Sequence
  Description of Artificial Sequence: Synthetic peptide
  Seed: MDPRMCSLMQGSTLPRRSGAA
MDPRMISLMQPSTLPRRSGAA

SEQ ID NO: 104560 - protein, 21 aa, Artificial Sequence
  Description of Artificial Sequence: Synthetic peptide
  Seed: MDPRMCSLMQGSTLPRRSGAA
MDPRMISLMQPSTMPRRSGAA

SEQ ID NO: 104561 - protein, 21 aa, Artificial Sequence
  Description of Artificial Sequence: Synthetic peptide
  Seed: MDPRMCSLMQGSTLPRRSGAA
MDPRMISLMQPSTNPRRSGAA

SEQ ID NO: 104562 - protein, 21 aa, Artificial Sequence
  Description of Artificial Sequence: Synthetic peptide
  Seed: MDPRMCSLMQGSTLPRRSGAA
MDPRMISLMQPSTSPRRSGAA

SEQ ID NO: 104563 - protein, 21 aa, Artificial Sequence
  Description of Artificial Sequence: Synthetic peptide
  Seed: MDPRMCSLMQGSTLPRRSGAA
MDPRMISLMQPSTVPRRSGAA

SEQ ID NO: 104564 - protein, 21 aa, Artificial Sequence
  Description of Artificial Sequence: Synthetic peptide
  Seed: MDPRMCSLMQGSTLPRRSGAA
MDPRMISLMQSSTAPRRSGAA

SEQ ID NO: 104565 - protein, 21 aa, Artificial Sequence
  Description of Artificial Sequence: Synthetic peptide
  Seed: MDPRMCSLMQGSTLPRRSGAA
MDPRMISLMQSSTIPRRSGAA

SEQ ID NO: 104566 - protein, 21 aa, Artificial Sequence
  Description of Artificial Sequence: Synthetic peptide
  Seed: MDPRMCSLMQGSTLPRRSGAA
MDPRMISLMQSSTLPRRSGAA

SEQ ID NO: 104567 - protein, 21 aa, Artificial Sequence
  Description of Artificial Sequence: Synthetic peptide
  Seed: MDPRMCSLMQGSTLPRRSGAA
MDPRMISLMQSSTMPRRSGAA

SEQ ID NO: 104568 - protein, 21 aa, Artificial Sequence
  Description of Artificial Sequence: Synthetic peptide
  Seed: MDPRMCSLMQGSTLPRRSGAA
MDPRMISLMQSSTSPRRSGAA

SEQ ID NO: 104569 - protein, 21 aa, Artificial Sequence
  Description of Artificial Sequence: Synthetic peptide
  Seed: MDPRMCSLMQGSTLPRRSGAA
MDPRMISLMQSSTTPRRSGAA

SEQ ID NO: 104570 - protein, 21 aa, Artificial Sequence
  Description of Artificial Sequence: Synthetic peptide
  Seed: MDPRMCSLMQGSTLPRRSGAA
MDPRMISLMQSSTVPRRSGAA

SEQ ID NO: 104571 - protein, 21 aa, Artificial Sequence
  Description of Artificial Sequence: Synthetic peptide
  Seed: MDPRMCSLMQGSTLPRRSGAA
MDPRMISLMQTSTAPRRSGAA

SEQ ID NO: 104572 - protein, 21 aa, Artificial Sequence
  Description of Artificial Sequence: Synthetic peptide
  Seed: MDPRMCSLMQGSTLPRRSGAA
MDPRMISLMQTSTIPRRSGAA

SEQ ID NO: 104573 - protein, 21 aa, Artificial Sequence
  Description of Artificial Sequence: Synthetic peptide
  Seed: MDPRMCSLMQGSTLPRRSGAA
MDPRMISLMQTSTLPRRSGAA

SEQ ID NO: 104574 - protein, 21 aa, Artificial Sequence
  Description of Artificial Sequence: Synthetic peptide
  Seed: MDPRMCSLMQGSTLPRRSGAA
MDPRMISLMQTSTNPRRSGAA

SEQ ID NO: 104575 - protein, 21 aa, Artificial Sequence
  Description of Artificial Sequence: Synthetic peptide
  Seed: MDPRMCSLMQGSTLPRRSGAA
MDPRMISLMQTSTVPRRSGAA

SEQ ID NO: 104576 - protein, 21 aa, Artificial Sequence
  Description of Artificial Sequence: Synthetic peptide
  Seed: MDPRMCSLMQGSTLPRRSGAA
MDPRMISLMQVSTAPRRSGAA

SEQ ID NO: 104577 - protein, 21 aa, Artificial Sequence
  Description of Artificial Sequence: Synthetic peptide
  Seed: MDPRMCSLMQGSTLPRRSGAA
MDPRMISLMQVSTNPRRSGAA

SEQ ID NO: 104578 - protein, 21 aa, Artificial Sequence
  Description of Artificial Sequence: Synthetic peptide
  Seed: MDPRMCSLMQGSTLPRRSGAA
MDPRMISLMQVSTSPRRSGAA

SEQ ID NO: 104579 - protein, 21 aa, Artificial Sequence
  Description of Artificial Sequence: Synthetic peptide
  Seed: MDPRMCSLMQGSTLPRRSGAA
MDPRMISLQQASTIPRRSGAA

SEQ ID NO: 104580 - protein, 21 aa, Artificial Sequence
  Description of Artificial Sequence: Synthetic peptide
  Seed: MDPRMCSLMQGSTLPRRSGAA
MDPRMISLQQASTLPRRSGAA

SEQ ID NO: 104581 - protein, 21 aa, Artificial Sequence
  Description of Artificial Sequence: Synthetic peptide
  Seed: MDPRMCSLMQGSTLPRRSGAA
MDPRMISLQQASTVPRRSGAA

SEQ ID NO: 104582 - protein, 21 aa, Artificial Sequence
  Description of Artificial Sequence: Synthetic peptide
  Seed: MDPRMCSLMQGSTLPRRSGAA
MDPRMISLVQASTVPRRSGAA

SEQ ID NO: 104583 - protein, 21 aa, Artificial Sequence
  Description of Artificial Sequence: Synthetic peptide
  Seed: MDPRMCSLMQGSTLPRRSGAA
MDPRMLSLAQASTIPRRSGAA

SEQ ID NO: 104584 - protein, 21 aa, Artificial Sequence
  Description of Artificial Sequence: Synthetic peptide
  Seed: MDPRMCSLMQGSTLPRRSGAA
MDPRMLSLAQASTLPRRSGAA

SEQ ID NO: 104585 - protein, 21 aa, Artificial Sequence
  Description of Artificial Sequence: Synthetic peptide
  Seed: MDPRMCSLMQGSTLPRRSGAA
MDPRMLSLAQASTVPRRSGAA

SEQ ID NO: 104586 - protein, 21 aa, Artificial Sequence
  Description of Artificial Sequence: Synthetic peptide
  Seed: MDPRMCSLMQGSTLPRRSGAA
MDPRMLSLIQASTAPRRSGAA

SEQ ID NO: 104587 - protein, 21 aa, Artificial Sequence
  Description of Artificial Sequence: Synthetic peptide
  Seed: MDPRMCSLMQGSTLPRRSGAA
MDPRMLSLIQASTIPRRSGAA

SEQ ID NO: 104588 - protein, 21 aa, Artificial Sequence
  Description of Artificial Sequence: Synthetic peptide
  Seed: MDPRMCSLMQGSTLPRRSGAA
MDPRMLSLIQASTLPRRSGAA

SEQ ID NO: 104589 - protein, 21 aa, Artificial Sequence
  Description of Artificial Sequence: Synthetic peptide
  Seed: MDPRMCSLMQGSTLPRRSGAA
MDPRMLSLIQASTSPRRSGAA

SEQ ID NO: 104590 - protein, 21 aa, Artificial Sequence
  Description of Artificial Sequence: Synthetic peptide
  Seed: MDPRMCSLMQGSTLPRRSGAA
MDPRMLSLIQASTVPRRSGAA

SEQ ID NO: 104591 - protein, 21 aa, Artificial Sequence
  Description of Artificial Sequence: Synthetic peptide
  Seed: MDPRMCSLMQGSTLPRRSGAA
MDPRMLSLIQGSTLPRRSGAA

SEQ ID NO: 104592 - protein, 21 aa, Artificial Sequence
  Description of Artificial Sequence: Synthetic peptide
  Seed: MDPRMCSLMQGSTLPRRSGAA
MDPRMLSLIQGSTVPRRSGAA

SEQ ID NO: 104593 - protein, 21 aa, Artificial Sequence
  Description of Artificial Sequence: Synthetic peptide
  Seed: MDPRMCSLMQGSTLPRRSGAA
MDPRMLSLLQASTAPRRSGAA

SEQ ID NO: 104594 - protein, 21 aa, Artificial Sequence
  Description of Artificial Sequence: Synthetic peptide
  Seed: MDPRMCSLMQGSTLPRRSGAA
MDPRMLSLLQASTIPRRSGAA

SEQ ID NO: 104595 - protein, 21 aa, Artificial Sequence
  Description of Artificial Sequence: Synthetic peptide
  Seed: MDPRMCSLMQGSTLPRRSGAA
MDPRMLSLLQASTLPRRSGAA

SEQ ID NO: 104596 - protein, 21 aa, Artificial Sequence
  Description of Artificial Sequence: Synthetic peptide
  Seed: MDPRMCSLMQGSTLPRRSGAA
MDPRMLSLLQASTMPRRSGAA

SEQ ID NO: 104597 - protein, 21 aa, Artificial Sequence
  Description of Artificial Sequence: Synthetic peptide
  Seed: MDPRMCSLMQGSTLPRRSGAA
MDPRMLSLLQASTNPRRSGAA

SEQ ID NO: 104598 - protein, 21 aa, Artificial Sequence
  Description of Artificial Sequence: Synthetic peptide
  Seed: MDPRMCSLMQGSTLPRRSGAA
MDPRMLSLLQASTSPRRSGAA

SEQ ID NO: 104599 - protein, 21 aa, Artificial Sequence
  Description of Artificial Sequence: Synthetic peptide
  Seed: MDPRMCSLMQGSTLPRRSGAA
MDPRMLSLLQASTTPRRSGAA

SEQ ID NO: 104600 - protein, 21 aa, Artificial Sequence
  Description of Artificial Sequence: Synthetic peptide
  Seed: MDPRMCSLMQGSTLPRRSGAA
MDPRMLSLLQASTVPRRSGAA

SEQ ID NO: 104601 - protein, 21 aa, Artificial Sequence
  Description of Artificial Sequence: Synthetic peptide
  Seed: MDPRMCSLMQGSTLPRRSGAA
MDPRMLSLLQGSTAPRRSGAA

SEQ ID NO: 104602 - protein, 21 aa, Artificial Sequence
  Description of Artificial Sequence: Synthetic peptide
  Seed: MDPRMCSLMQGSTLPRRSGAA
MDPRMLSLLQGSTIPRRSGAA

SEQ ID NO: 104603 - protein, 21 aa, Artificial Sequence
  Description of Artificial Sequence: Synthetic peptide
  Seed: MDPRMCSLMQGSTLPRRSGAA
MDPRMLSLLQGSTLPRRSGAA

SEQ ID NO: 104604 - protein, 21 aa, Artificial Sequence
  Description of Artificial Sequence: Synthetic peptide
  Seed: MDPRMCSLMQGSTLPRRSGAA
MDPRMLSLLQGSTMPRRSGAA

SEQ ID NO: 104605 - protein, 21 aa, Artificial Sequence
  Description of Artificial Sequence: Synthetic peptide
  Seed: MDPRMCSLMQGSTLPRRSGAA
MDPRMLSLLQGSTSPRRSGAA

SEQ ID NO: 104606 - protein, 21 aa, Artificial Sequence
  Description of Artificial Sequence: Synthetic peptide
  Seed: MDPRMCSLMQGSTLPRRSGAA
MDPRMLSLLQGSTTPRRSGAA

SEQ ID NO: 104607 - protein, 21 aa, Artificial Sequence
  Description of Artificial Sequence: Synthetic peptide
  Seed: MDPRMCSLMQGSTLPRRSGAA
MDPRMLSLLQGSTVPRRSGAA

SEQ ID NO: 104608 - protein, 21 aa, Artificial Sequence
  Description of Artificial Sequence: Synthetic peptide
  Seed: MDPRMCSLMQGSTLPRRSGAA
MDPRMLSLLQPSTAPRRSGAA

SEQ ID NO: 104609 - protein, 21 aa, Artificial Sequence
  Description of Artificial Sequence: Synthetic peptide
  Seed: MDPRMCSLMQGSTLPRRSGAA
MDPRMLSLLQPSTIPRRSGAA

SEQ ID NO: 104610 - protein, 21 aa, Artificial Sequence
  Description of Artificial Sequence: Synthetic peptide
  Seed: MDPRMCSLMQGSTLPRRSGAA
MDPRMLSLLQPSTLPRRSGAA

SEQ ID NO: 104611 - protein, 21 aa, Artificial Sequence
  Description of Artificial Sequence: Synthetic peptide
  Seed: MDPRMCSLMQGSTLPRRSGAA
MDPRMLSLLQPSTNPRRSGAA

SEQ ID NO: 104612 - protein, 21 aa, Artificial Sequence
  Description of Artificial Sequence: Synthetic peptide
  Seed: MDPRMCSLMQGSTLPRRSGAA
MDPRMLSLLQPSTSPRRSGAA

SEQ ID NO: 104613 - protein, 21 aa, Artificial Sequence
  Description of Artificial Sequence: Synthetic peptide
  Seed: MDPRMCSLMQGSTLPRRSGAA
MDPRMLSLLQPSTVPRRSGAA

SEQ ID NO: 104614 - protein, 21 aa, Artificial Sequence
  Description of Artificial Sequence: Synthetic peptide
  Seed: MDPRMCSLMQGSTLPRRSGAA
MDPRMLSLLQSSTAPRRSGAA

SEQ ID NO: 104615 - protein, 21 aa, Artificial Sequence
  Description of Artificial Sequence: Synthetic peptide
  Seed: MDPRMCSLMQGSTLPRRSGAA
MDPRMLSLLQSSTIPRRSGAA

SEQ ID NO: 104616 - protein, 21 aa, Artificial Sequence
  Description of Artificial Sequence: Synthetic peptide
  Seed: MDPRMCSLMQGSTLPRRSGAA
MDPRMLSLLQSSTLPRRSGAA

SEQ ID NO: 104617 - protein, 21 aa, Artificial Sequence
  Description of Artificial Sequence: Synthetic peptide
  Seed: MDPRMCSLMQGSTLPRRSGAA
MDPRMLSLLQSSTVPRRSGAA

SEQ ID NO: 104618 - protein, 21 aa, Artificial Sequence
  Description of Artificial Sequence: Synthetic peptide
  Seed: MDPRMCSLMQGSTLPRRSGAA
MDPRMLSLLQTSTAPRRSGAA

SEQ ID NO: 104619 - protein, 21 aa, Artificial Sequence
  Description of Artificial Sequence: Synthetic peptide
  Seed: MDPRMCSLMQGSTLPRRSGAA
MDPRMLSLLQTSTNPRRSGAA

SEQ ID NO: 104620 - protein, 21 aa, Artificial Sequence
  Description of Artificial Sequence: Synthetic peptide
  Seed: MDPRMCSLMQGSTLPRRSGAA
MDPRMLSLLQVSTAPRRSGAA

SEQ ID NO: 104621 - protein, 21 aa, Artificial Sequence
  Description of Artificial Sequence: Synthetic peptide
  Seed: MDPRMCSLMQGSTLPRRSGAA
MDPRMLSLLQVSTNPRRSGAA

SEQ ID NO: 104622 - protein, 21 aa, Artificial Sequence
  Description of Artificial Sequence: Synthetic peptide
  Seed: MDPRMCSLMQGSTLPRRSGAA
MDPRMLSLLQVSTSPRRSGAA

SEQ ID NO: 104623 - protein, 21 aa, Artificial Sequence
  Description of Artificial Sequence: Synthetic peptide
  Seed: MDPRMCSLMQGSTLPRRSGAA
MDPRMLSLMQASTAPRRSGAA

SEQ ID NO: 104624 - protein, 21 aa, Artificial Sequence
  Description of Artificial Sequence: Synthetic peptide
  Seed: MDPRMCSLMQGSTLPRRSGAA
MDPRMLSLMQASTIPRRSGAA

SEQ ID NO: 104625 - protein, 21 aa, Artificial Sequence
  Description of Artificial Sequence: Synthetic peptide
  Seed: MDPRMCSLMQGSTLPRRSGAA
MDPRMLSLMQASTLPRRSGAA

SEQ ID NO: 104626 - protein, 21 aa, Artificial Sequence
  Description of Artificial Sequence: Synthetic peptide
  Seed: MDPRMCSLMQGSTLPRRSGAA
MDPRMLSLMQASTMPRRSGAA

SEQ ID NO: 104627 - protein, 21 aa, Artificial Sequence
  Description of Artificial Sequence: Synthetic peptide
  Seed: MDPRMCSLMQGSTLPRRSGAA
MDPRMLSLMQASTNPRRSGAA

SEQ ID NO: 104628 - protein, 21 aa, Artificial Sequence
  Description of Artificial Sequence: Synthetic peptide
  Seed: MDPRMCSLMQGSTLPRRSGAA
MDPRMLSLMQASTSPRRSGAA

SEQ ID NO: 104629 - protein, 21 aa, Artificial Sequence
  Description of Artificial Sequence: Synthetic peptide
  Seed: MDPRMCSLMQGSTLPRRSGAA
MDPRMLSLMQASTTPRRSGAA

SEQ ID NO: 104630 - protein, 21 aa, Artificial Sequence
  Description of Artificial Sequence: Synthetic peptide
  Seed: MDPRMCSLMQGSTLPRRSGAA
MDPRMLSLMQASTVPRRSGAA

SEQ ID NO: 104631 - protein, 21 aa, Artificial Sequence
  Description of Artificial Sequence: Synthetic peptide
  Seed: MDPRMCSLMQGSTLPRRSGAA
MDPRMLSLMQGSTAPRRSGAA

SEQ ID NO: 104632 - protein, 21 aa, Artificial Sequence
  Description of Artificial Sequence: Synthetic peptide
  Seed: MDPRMCSLMQGSTLPRRSGAA
MDPRMLSLMQGSTIPRRSGAA

SEQ ID NO: 104633 - protein, 21 aa, Artificial Sequence
  Description of Artificial Sequence: Synthetic peptide
  Seed: MDPRMCSLMQGSTLPRRSGAA
MDPRMLSLMQGSTLPRRSGAA

SEQ ID NO: 104634 - protein, 21 aa, Artificial Sequence
  Description of Artificial Sequence: Synthetic peptide
  Seed: MDPRMCSLMQGSTLPRRSGAA
MDPRMLSLMQGSTMPRRSGAA

SEQ ID NO: 104635 - protein, 21 aa, Artificial Sequence
  Description of Artificial Sequence: Synthetic peptide
  Seed: MDPRMCSLMQGSTLPRRSGAA
MDPRMLSLMQGSTSPRRSGAA

SEQ ID NO: 104636 - protein, 21 aa, Artificial Sequence
  Description of Artificial Sequence: Synthetic peptide
  Seed: MDPRMCSLMQGSTLPRRSGAA
MDPRMLSLMQGSTTPRRSGAA

SEQ ID NO: 104637 - protein, 21 aa, Artificial Sequence
  Description of Artificial Sequence: Synthetic peptide
  Seed: MDPRMCSLMQGSTLPRRSGAA
MDPRMLSLMQGSTVPRRSGAA

SEQ ID NO: 104638 - protein, 21 aa, Artificial Sequence
  Description of Artificial Sequence: Synthetic peptide
  Seed: MDPRMCSLMQGSTLPRRSGAA
MDPRMLSLMQISTAPRRSGAA

SEQ ID NO: 104639 - protein, 21 aa, Artificial Sequence
  Description of Artificial Sequence: Synthetic peptide
  Seed: MDPRMCSLMQGSTLPRRSGAA
MDPRMLSLMQPSTAPRRSGAA

SEQ ID NO: 104640 - protein, 21 aa, Artificial Sequence
  Description of Artificial Sequence: Synthetic peptide
  Seed: MDPRMCSLMQGSTLPRRSGAA
MDPRMLSLMQPSTIPRRSGAA

SEQ ID NO: 104641 - protein, 21 aa, Artificial Sequence
  Description of Artificial Sequence: Synthetic peptide
  Seed: MDPRMCSLMQGSTLPRRSGAA
MDPRMLSLMQPSTLPRRSGAA

SEQ ID NO: 104642 - protein, 21 aa, Artificial Sequence
  Description of Artificial Sequence: Synthetic peptide
  Seed: MDPRMCSLMQGSTLPRRSGAA
MDPRMLSLMQPSTNPRRSGAA

SEQ ID NO: 104643 - protein, 21 aa, Artificial Sequence
  Description of Artificial Sequence: Synthetic peptide
  Seed: MDPRMCSLMQGSTLPRRSGAA
MDPRMLSLMQPSTSPRRSGAA

SEQ ID NO: 104644 - protein, 21 aa, Artificial Sequence
  Description of Artificial Sequence: Synthetic peptide
  Seed: MDPRMCSLMQGSTLPRRSGAA
MDPRMLSLMQPSTVPRRSGAA

SEQ ID NO: 104645 - protein, 21 aa, Artificial Sequence
  Description of Artificial Sequence: Synthetic peptide
  Seed: MDPRMCSLMQGSTLPRRSGAA
MDPRMLSLMQSSTAPRRSGAA

SEQ ID NO: 104646 - protein, 21 aa, Artificial Sequence
  Description of Artificial Sequence: Synthetic peptide
  Seed: MDPRMCSLMQGSTLPRRSGAA
MDPRMLSLMQSSTIPRRSGAA

SEQ ID NO: 104647 - protein, 21 aa, Artificial Sequence
  Description of Artificial Sequence: Synthetic peptide
  Seed: MDPRMCSLMQGSTLPRRSGAA
MDPRMLSLMQSSTLPRRSGAA

SEQ ID NO: 104648 - protein, 21 aa, Artificial Sequence
  Description of Artificial Sequence: Synthetic peptide
  Seed: MDPRMCSLMQGSTLPRRSGAA
MDPRMLSLMQSSTSPRRSGAA

SEQ ID NO: 104649 - protein, 21 aa, Artificial Sequence
  Description of Artificial Sequence: Synthetic peptide
  Seed: MDPRMCSLMQGSTLPRRSGAA
MDPRMLSLMQSSTVPRRSGAA

SEQ ID NO: 104650 - protein, 21 aa, Artificial Sequence
  Description of Artificial Sequence: Synthetic peptide
  Seed: MDPRMCSLMQGSTLPRRSGAA
MDPRMLSLMQTSTAPRRSGAA

SEQ ID NO: 104651 - protein, 21 aa, Artificial Sequence
  Description of Artificial Sequence: Synthetic peptide
  Seed: MDPRMCSLMQGSTLPRRSGAA
MDPRMLSLMQVSTAPRRSGAA

SEQ ID NO: 104652 - protein, 21 aa, Artificial Sequence
  Description of Artificial Sequence: Synthetic peptide
  Seed: MDPRMCSLMQGSTLPRRSGAA
MDPRMLSLMQVSTNPRRSGAA

SEQ ID NO: 104653 - protein, 21 aa, Artificial Sequence
  Description of Artificial Sequence: Synthetic peptide
  Seed: MDPRMCSLMQGSTLPRRSGAA
MDPRMLSLMQVSTSPRRSGAA

SEQ ID NO: 104654 - protein, 21 aa, Artificial Sequence
  Description of Artificial Sequence: Synthetic peptide
  Seed: MDPRMCSLMQGSTLPRRSGAA
MDPRMMSLLQASTAPRRSGAA

SEQ ID NO: 104655 - protein, 21 aa, Artificial Sequence
  Description of Artificial Sequence: Synthetic peptide
  Seed: MDPRMCSLMQGSTLPRRSGAA
MDPRMMSLLQASTIPRRSGAA

SEQ ID NO: 104656 - protein, 21 aa, Artificial Sequence
  Description of Artificial Sequence: Synthetic peptide
  Seed: MDPRMCSLMQGSTLPRRSGAA
MDPRMMSLLQASTLPRRSGAA

SEQ ID NO: 104657 - protein, 21 aa, Artificial Sequence
  Description of Artificial Sequence: Synthetic peptide
  Seed: MDPRMCSLMQGSTLPRRSGAA
MDPRMMSLLQASTMPRRSGAA

SEQ ID NO: 104658 - protein, 21 aa, Artificial Sequence
  Description of Artificial Sequence: Synthetic peptide
  Seed: MDPRMCSLMQGSTLPRRSGAA
MDPRMMSLLQASTNPRRSGAA

SEQ ID NO: 104659 - protein, 21 aa, Artificial Sequence
  Description of Artificial Sequence: Synthetic peptide
  Seed: MDPRMCSLMQGSTLPRRSGAA
MDPRMMSLLQASTSPRRSGAA

SEQ ID NO: 104660 - protein, 21 aa, Artificial Sequence
  Description of Artificial Sequence: Synthetic peptide
  Seed: MDPRMCSLMQGSTLPRRSGAA
MDPRMMSLLQASTTPRRSGAA

SEQ ID NO: 104661 - protein, 21 aa, Artificial Sequence
  Description of Artificial Sequence: Synthetic peptide
  Seed: MDPRMCSLMQGSTLPRRSGAA
MDPRMMSLLQASTVPRRSGAA

SEQ ID NO: 104662 - protein, 21 aa, Artificial Sequence
  Description of Artificial Sequence: Synthetic peptide
  Seed: MDPRMCSLMQGSTLPRRSGAA
MDPRMMSLLQGSTAPRRSGAA

SEQ ID NO: 104663 - protein, 21 aa, Artificial Sequence
  Description of Artificial Sequence: Synthetic peptide
  Seed: MDPRMCSLMQGSTLPRRSGAA
MDPRMMSLLQGSTIPRRSGAA

SEQ ID NO: 104664 - protein, 21 aa, Artificial Sequence
  Description of Artificial Sequence: Synthetic peptide
  Seed: MDPRMCSLMQGSTLPRRSGAA
MDPRMMSLLQGSTLPRRSGAA

SEQ ID NO: 104665 - protein, 21 aa, Artificial Sequence
  Description of Artificial Sequence: Synthetic peptide
  Seed: MDPRMCSLMQGSTLPRRSGAA
MDPRMMSLLQGSTVPRRSGAA

SEQ ID NO: 104666 - protein, 21 aa, Artificial Sequence
  Description of Artificial Sequence: Synthetic peptide
  Seed: MDPRMCSLMQGSTLPRRSGAA
MDPRMMSLLQPSTVPRRSGAA

SEQ ID NO: 104667 - protein, 21 aa, Artificial Sequence
  Description of Artificial Sequence: Synthetic peptide
  Seed: MDPRMCSLMQGSTLPRRSGAA
MDPRMMSLLQSSTAPRRSGAA

SEQ ID NO: 104668 - protein, 21 aa, Artificial Sequence
  Description of Artificial Sequence: Synthetic peptide
  Seed: MDPRMCSLMQGSTLPRRSGAA
MDPRMMSLLQSSTIPRRSGAA

SEQ ID NO: 104669 - protein, 21 aa, Artificial Sequence
  Description of Artificial Sequence: Synthetic peptide
  Seed: MDPRMCSLMQGSTLPRRSGAA
MDPRMMSLLQSSTLPRRSGAA

SEQ ID NO: 104670 - protein, 21 aa, Artificial Sequence
  Description of Artificial Sequence: Synthetic peptide
  Seed: MDPRMCSLMQGSTLPRRSGAA
MDPRMMSLLQSSTVPRRSGAA

SEQ ID NO: 104671 - protein, 21 aa, Artificial Sequence
  Description of Artificial Sequence: Synthetic peptide
  Seed: MDPRMCSLMQGSTLPRRSGAA
MDPRMMSLMQASTAPRRSGAA

SEQ ID NO: 104672 - protein, 21 aa, Artificial Sequence
  Description of Artificial Sequence: Synthetic peptide
  Seed: MDPRMCSLMQGSTLPRRSGAA
MDPRMMSLMQASTIPRRSGAA

SEQ ID NO: 104673 - protein, 21 aa, Artificial Sequence
  Description of Artificial Sequence: Synthetic peptide
  Seed: MDPRMCSLMQGSTLPRRSGAA
MDPRMMSLMQASTLPRRSGAA

SEQ ID NO: 104674 - protein, 21 aa, Artificial Sequence
  Description of Artificial Sequence: Synthetic peptide
  Seed: MDPRMCSLMQGSTLPRRSGAA
MDPRMMSLMQASTMPRRSGAA

SEQ ID NO: 104675 - protein, 21 aa, Artificial Sequence
  Description of Artificial Sequence: Synthetic peptide
  Seed: MDPRMCSLMQGSTLPRRSGAA
MDPRMMSLMQASTNPRRSGAA

SEQ ID NO: 104676 - protein, 21 aa, Artificial Sequence
  Description of Artificial Sequence: Synthetic peptide
  Seed: MDPRMCSLMQGSTLPRRSGAA
MDPRMMSLMQASTSPRRSGAA

SEQ ID NO: 104677 - protein, 21 aa, Artificial Sequence
  Description of Artificial Sequence: Synthetic peptide
  Seed: MDPRMCSLMQGSTLPRRSGAA
MDPRMMSLMQASTVPRRSGAA

SEQ ID NO: 104678 - protein, 21 aa, Artificial Sequence
  Description of Artificial Sequence: Synthetic peptide
  Seed: MDPRMCSLMQGSTLPRRSGAA
MDPRMMSLMQGSTAPRRSGAA

SEQ ID NO: 104679 - protein, 21 aa, Artificial Sequence
  Description of Artificial Sequence: Synthetic peptide
  Seed: MDPRMCSLMQGSTLPRRSGAA
MDPRMMSLMQGSTIPRRSGAA

SEQ ID NO: 104680 - protein, 21 aa, Artificial Sequence
  Description of Artificial Sequence: Synthetic peptide
  Seed: MDPRMCSLMQGSTLPRRSGAA
MDPRMMSLMQGSTLPRRSGAA

SEQ ID NO: 104681 - protein, 21 aa, Artificial Sequence
  Description of Artificial Sequence: Synthetic peptide
  Seed: MDPRMCSLMQGSTLPRRSGAA
MDPRMMSLMQGSTVPRRSGAA

SEQ ID NO: 104682 - protein, 21 aa, Artificial Sequence
  Description of Artificial Sequence: Synthetic peptide
  Seed: MDPRMCSLMQGSTLPRRSGAA
MDPRMMSLMQPSTAPRRSGAA

SEQ ID NO: 104683 - protein, 21 aa, Artificial Sequence
  Description of Artificial Sequence: Synthetic peptide
  Seed: MDPRMCSLMQGSTLPRRSGAA
MDPRMMSLMQPSTVPRRSGAA

SEQ ID NO: 104684 - protein, 21 aa, Artificial Sequence
  Description of Artificial Sequence: Synthetic peptide
  Seed: MDPRMCSLMQGSTLPRRSGAA
MDPRMMSLMQSSTIPRRSGAA

SEQ ID NO: 104685 - protein, 21 aa, Artificial Sequence
  Description of Artificial Sequence: Synthetic peptide
  Seed: MDPRMCSLMQGSTLPRRSGAA
MDPRMMSLMQSSTLPRRSGAA

SEQ ID NO: 104686 - protein, 21 aa, Artificial Sequence
  Description of Artificial Sequence: Synthetic peptide
  Seed: MDPRMCSLMQGSTLPRRSGAA
MDPRMMSLMQSSTVPRRSGAA

SEQ ID NO: 104687 - protein, 21 aa, Artificial Sequence
  Description of Artificial Sequence: Synthetic peptide
  Seed: MDPRMCSLMQGSTLPRRSGAA
MDPRMMSLMQVSTAPRRSGAA

SEQ ID NO: 104688 - protein, 21 aa, Artificial Sequence
  Description of Artificial Sequence: Synthetic peptide
  Seed: MDPRMCSLMQGSTLPRRSGAA
MDPRMVSLLQASTAPRRSGAA

SEQ ID NO: 104689 - protein, 21 aa, Artificial Sequence
  Description of Artificial Sequence: Synthetic peptide
  Seed: MDPRMCSLMQGSTLPRRSGAA
MDPRMVSLLQASTIPRRSGAA

SEQ ID NO: 104690 - protein, 21 aa, Artificial Sequence
  Description of Artificial Sequence: Synthetic peptide
  Seed: MDPRMCSLMQGSTLPRRSGAA
MDPRMVSLLQASTLPRRSGAA

SEQ ID NO: 104691 - protein, 21 aa, Artificial Sequence
  Description of Artificial Sequence: Synthetic peptide
  Seed: MDPRMCSLMQGSTLPRRSGAA
MDPRMVSLLQASTVPRRSGAA

SEQ ID NO: 104692 - protein, 21 aa, Artificial Sequence
  Description of Artificial Sequence: Synthetic peptide
  Seed: MDPRMCSLMQGSTLPRRSGAA
MDPRMVSLLQGSTAPRRSGAA

SEQ ID NO: 104693 - protein, 21 aa, Artificial Sequence
  Description of Artificial Sequence: Synthetic peptide
  Seed: MDPRMCSLMQGSTLPRRSGAA
MDPRMVSLLQGSTIPRRSGAA

SEQ ID NO: 104694 - protein, 21 aa, Artificial Sequence
  Description of Artificial Sequence: Synthetic peptide
  Seed: MDPRMCSLMQGSTLPRRSGAA
MDPRMVSLLQGSTLPRRSGAA

SEQ ID NO: 104695 - protein, 21 aa, Artificial Sequence
  Description of Artificial Sequence: Synthetic peptide
  Seed: MDPRMCSLMQGSTLPRRSGAA
MDPRMVSLLQGSTVPRRSGAA

SEQ ID NO: 104696 - protein, 21 aa, Artificial Sequence
  Description of Artificial Sequence: Synthetic peptide
  Seed: MDPRMCSLMQGSTLPRRSGAA
MDPRMVSLLQPSTIPRRSGAA

SEQ ID NO: 104697 - protein, 21 aa, Artificial Sequence
  Description of Artificial Sequence: Synthetic peptide
  Seed: MDPRMCSLMQGSTLPRRSGAA
MDPRMVSLLQPSTLPRRSGAA

SEQ ID NO: 104698 - protein, 21 aa, Artificial Sequence
  Description of Artificial Sequence: Synthetic peptide
  Seed: MDPRMCSLMQGSTLPRRSGAA
MDPRMVSLLQPSTVPRRSGAA

SEQ ID NO: 104699 - protein, 21 aa, Artificial Sequence
  Description of Artificial Sequence: Synthetic peptide
  Seed: MDPRMCSLMQGSTLPRRSGAA
MDPRMVSLLQSSTAPRRSGAA

SEQ ID NO: 104700 - protein, 21 aa, Artificial Sequence
  Description of Artificial Sequence: Synthetic peptide
  Seed: MDPRMCSLMQGSTLPRRSGAA
MDPRMVSLLQSSTIPRRSGAA

SEQ ID NO: 104701 - protein, 21 aa, Artificial Sequence
  Description of Artificial Sequence: Synthetic peptide
  Seed: MDPRMCSLMQGSTLPRRSGAA
MDPRMVSLLQSSTLPRRSGAA

SEQ ID NO: 104702 - protein, 21 aa, Artificial Sequence
  Description of Artificial Sequence: Synthetic peptide
  Seed: MDPRMCSLMQGSTLPRRSGAA
MDPRMVSLLQSSTVPRRSGAA

SEQ ID NO: 104703 - protein, 21 aa, Artificial Sequence
  Description of Artificial Sequence: Synthetic peptide
  Seed: MDPRMCSLMQGSTLPRRSGAA
MDPRMVSLMQASTAPRRSGAA

SEQ ID NO: 104704 - protein, 21 aa, Artificial Sequence
  Description of Artificial Sequence: Synthetic peptide
  Seed: MDPRMCSLMQGSTLPRRSGAA
MDPRMVSLMQASTIPRRSGAA

SEQ ID NO: 104705 - protein, 21 aa, Artificial Sequence
  Description of Artificial Sequence: Synthetic peptide
  Seed: MDPRMCSLMQGSTLPRRSGAA
MDPRMVSLMQASTLPRRSGAA

SEQ ID NO: 104706 - protein, 21 aa, Artificial Sequence
  Description of Artificial Sequence: Synthetic peptide
  Seed: MDPRMCSLMQGSTLPRRSGAA
MDPRMVSLMQASTMPRRSGAA

SEQ ID NO: 104707 - protein, 21 aa, Artificial Sequence
  Description of Artificial Sequence: Synthetic peptide
  Seed: MDPRMCSLMQGSTLPRRSGAA
MDPRMVSLMQASTVPRRSGAA

SEQ ID NO: 104708 - protein, 21 aa, Artificial Sequence
  Description of Artificial Sequence: Synthetic peptide
  Seed: MDPRMCSLMQGSTLPRRSGAA
MDPRMVSLMQGSTAPRRSGAA

SEQ ID NO: 104709 - protein, 21 aa, Artificial Sequence
  Description of Artificial Sequence: Synthetic peptide
  Seed: MDPRMCSLMQGSTLPRRSGAA
MDPRMVSLMQGSTIPRRSGAA

SEQ ID NO: 104710 - protein, 21 aa, Artificial Sequence
  Description of Artificial Sequence: Synthetic peptide
  Seed: MDPRMCSLMQGSTLPRRSGAA
MDPRMVSLMQGSTLPRRSGAA

SEQ ID NO: 104711 - protein, 21 aa, Artificial Sequence
  Description of Artificial Sequence: Synthetic peptide
  Seed: MDPRMCSLMQGSTLPRRSGAA
MDPRMVSLMQGSTVPRRSGAA

SEQ ID NO: 104712 - protein, 21 aa, Artificial Sequence
  Description of Artificial Sequence: Synthetic peptide
  Seed: MDPRMCSLMQGSTLPRRSGAA
MDPRMVSLMQPSTVPRRSGAA

SEQ ID NO: 104713 - protein, 21 aa, Artificial Sequence
  Description of Artificial Sequence: Synthetic peptide
  Seed: MDPRMCSLMQGSTLPRRSGAA
MDPRMVSLMQSSTIPRRSGAA

SEQ ID NO: 104714 - protein, 21 aa, Artificial Sequence
  Description of Artificial Sequence: Synthetic peptide
  Seed: MDPRMCSLMQGSTLPRRSGAA
MDPRMVSLMQSSTLPRRSGAA

SEQ ID NO: 104715 - protein, 21 aa, Artificial Sequence
  Description of Artificial Sequence: Synthetic peptide
  Seed: MDPRMCSLMQGSTLPRRSGAA
MDPRMVSLMQSSTVPRRSGAA

SEQ ID NO: 104716 - protein, 21 aa, Artificial Sequence
  Description of Artificial Sequence: Synthetic peptide
  Seed: MDPRMCSLMQGSTLPRRSGAA
MDPRMWSLAQASTAPRRSGAA

SEQ ID NO: 104717 - protein, 21 aa, Artificial Sequence
  Description of Artificial Sequence: Synthetic peptide
  Seed: MDPRMCSLMQGSTLPRRSGAA
MDPRMWSLAQASTIPRRSGAA

SEQ ID NO: 104718 - protein, 21 aa, Artificial Sequence
  Description of Artificial Sequence: Synthetic peptide
  Seed: MDPRMCSLMQGSTLPRRSGAA
MDPRMWSLAQASTLPRRSGAA

SEQ ID NO: 104719 - protein, 21 aa, Artificial Sequence
  Description of Artificial Sequence: Synthetic peptide
  Seed: MDPRMCSLMQGSTLPRRSGAA
MDPRMWSLAQASTMPRRSGAA

SEQ ID NO: 104720 - protein, 21 aa, Artificial Sequence
  Description of Artificial Sequence: Synthetic peptide
  Seed: MDPRMCSLMQGSTLPRRSGAA
MDPRMWSLAQASTSPRRSGAA

SEQ ID NO: 104721 - protein, 21 aa, Artificial Sequence
  Description of Artificial Sequence: Synthetic peptide
  Seed: MDPRMCSLMQGSTLPRRSGAA
MDPRMWSLAQASTVPRRSGAA

SEQ ID NO: 104722 - protein, 21 aa, Artificial Sequence
  Description of Artificial Sequence: Synthetic peptide
  Seed: MDPRMCSLMQGSTLPRRSGAA
MDPRMWSLAQGSTIPRRSGAA

SEQ ID NO: 104723 - protein, 21 aa, Artificial Sequence
  Description of Artificial Sequence: Synthetic peptide
  Seed: MDPRMCSLMQGSTLPRRSGAA
MDPRMWSLAQGSTLPRRSGAA

SEQ ID NO: 104724 - protein, 21 aa, Artificial Sequence
  Description of Artificial Sequence: Synthetic peptide
  Seed: MDPRMCSLMQGSTLPRRSGAA
MDPRMWSLAQGSTVPRRSGAA

SEQ ID NO: 104725 - protein, 21 aa, Artificial Sequence
  Description of Artificial Sequence: Synthetic peptide
  Seed: MDPRMCSLMQGSTLPRRSGAA
MDPRMWSLAQSSTIPRRSGAA

SEQ ID NO: 104726 - protein, 21 aa, Artificial Sequence
  Description of Artificial Sequence: Synthetic peptide
  Seed: MDPRMCSLMQGSTLPRRSGAA
MDPRMWSLAQSSTLPRRSGAA

SEQ ID NO: 104727 - protein, 21 aa, Artificial Sequence
  Description of Artificial Sequence: Synthetic peptide
  Seed: MDPRMCSLMQGSTLPRRSGAA
MDPRMWSLAQSSTVPRRSGAA

SEQ ID NO: 104728 - protein, 21 aa, Artificial Sequence
  Description of Artificial Sequence: Synthetic peptide
  Seed: MDPRMCSLMQGSTLPRRSGAA
MDPRMWSLIQASTAPRRSGAA

SEQ ID NO: 104729 - protein, 21 aa, Artificial Sequence
  Description of Artificial Sequence: Synthetic peptide
  Seed: MDPRMCSLMQGSTLPRRSGAA
MDPRMWSLIQASTIPRRSGAA

SEQ ID NO: 104730 - protein, 21 aa, Artificial Sequence
  Description of Artificial Sequence: Synthetic peptide
  Seed: MDPRMCSLMQGSTLPRRSGAA
MDPRMWSLIQASTLPRRSGAA

SEQ ID NO: 104731 - protein, 21 aa, Artificial Sequence
  Description of Artificial Sequence: Synthetic peptide
  Seed: MDPRMCSLMQGSTLPRRSGAA
MDPRMWSLIQASTMPRRSGAA

SEQ ID NO: 104732 - protein, 21 aa, Artificial Sequence
  Description of Artificial Sequence: Synthetic peptide
  Seed: MDPRMCSLMQGSTLPRRSGAA
MDPRMWSLIQASTNPRRSGAA

SEQ ID NO: 104733 - protein, 21 aa, Artificial Sequence
  Description of Artificial Sequence: Synthetic peptide
  Seed: MDPRMCSLMQGSTLPRRSGAA
MDPRMWSLIQASTSPRRSGAA

SEQ ID NO: 104734 - protein, 21 aa, Artificial Sequence
  Description of Artificial Sequence: Synthetic peptide
  Seed: MDPRMCSLMQGSTLPRRSGAA
MDPRMWSLIQASTTPRRSGAA

SEQ ID NO: 104735 - protein, 21 aa, Artificial Sequence
  Description of Artificial Sequence: Synthetic peptide
  Seed: MDPRMCSLMQGSTLPRRSGAA
MDPRMWSLIQASTVPRRSGAA

SEQ ID NO: 104736 - protein, 21 aa, Artificial Sequence
  Description of Artificial Sequence: Synthetic peptide
  Seed: MDPRMCSLMQGSTLPRRSGAA
MDPRMWSLIQGSTAPRRSGAA

SEQ ID NO: 104737 - protein, 21 aa, Artificial Sequence
  Description of Artificial Sequence: Synthetic peptide
  Seed: MDPRMCSLMQGSTLPRRSGAA
MDPRMWSLIQGSTIPRRSGAA

SEQ ID NO: 104738 - protein, 21 aa, Artificial Sequence
  Description of Artificial Sequence: Synthetic peptide
  Seed: MDPRMCSLMQGSTLPRRSGAA
MDPRMWSLIQGSTLPRRSGAA

SEQ ID NO: 104739 - protein, 21 aa, Artificial Sequence
  Description of Artificial Sequence: Synthetic peptide
  Seed: MDPRMCSLMQGSTLPRRSGAA
MDPRMWSLIQGSTVPRRSGAA

SEQ ID NO: 104740 - protein, 21 aa, Artificial Sequence
  Description of Artificial Sequence: Synthetic peptide
  Seed: MDPRMCSLMQGSTLPRRSGAA
MDPRMWSLIQPSTAPRRSGAA

SEQ ID NO: 104741 - protein, 21 aa, Artificial Sequence
  Description of Artificial Sequence: Synthetic peptide
  Seed: MDPRMCSLMQGSTLPRRSGAA
MDPRMWSLIQPSTIPRRSGAA

SEQ ID NO: 104742 - protein, 21 aa, Artificial Sequence
  Description of Artificial Sequence: Synthetic peptide
  Seed: MDPRMCSLMQGSTLPRRSGAA
MDPRMWSLIQPSTLPRRSGAA

SEQ ID NO: 104743 - protein, 21 aa, Artificial Sequence
  Description of Artificial Sequence: Synthetic peptide
  Seed: MDPRMCSLMQGSTLPRRSGAA
MDPRMWSLIQPSTNPRRSGAA

SEQ ID NO: 104744 - protein, 21 aa, Artificial Sequence
  Description of Artificial Sequence: Synthetic peptide
  Seed: MDPRMCSLMQGSTLPRRSGAA
MDPRMWSLIQPSTSPRRSGAA

SEQ ID NO: 104745 - protein, 21 aa, Artificial Sequence
  Description of Artificial Sequence: Synthetic peptide
  Seed: MDPRMCSLMQGSTLPRRSGAA
MDPRMWSLIQPSTVPRRSGAA

SEQ ID NO: 104746 - protein, 21 aa, Artificial Sequence
  Description of Artificial Sequence: Synthetic peptide
  Seed: MDPRMCSLMQGSTLPRRSGAA
MDPRMWSLIQSSTAPRRSGAA

SEQ ID NO: 104747 - protein, 21 aa, Artificial Sequence
  Description of Artificial Sequence: Synthetic peptide
  Seed: MDPRMCSLMQGSTLPRRSGAA
MDPRMWSLIQSSTIPRRSGAA

SEQ ID NO: 104748 - protein, 21 aa, Artificial Sequence
  Description of Artificial Sequence: Synthetic peptide
  Seed: MDPRMCSLMQGSTLPRRSGAA
MDPRMWSLIQSSTLPRRSGAA

SEQ ID NO: 104749 - protein, 21 aa, Artificial Sequence
  Description of Artificial Sequence: Synthetic peptide
  Seed: MDPRMCSLMQGSTLPRRSGAA
MDPRMWSLIQSSTNPRRSGAA

SEQ ID NO: 104750 - protein, 21 aa, Artificial Sequence
  Description of Artificial Sequence: Synthetic peptide
  Seed: MDPRMCSLMQGSTLPRRSGAA
MDPRMWSLIQSSTSPRRSGAA

SEQ ID NO: 104751 - protein, 21 aa, Artificial Sequence
  Description of Artificial Sequence: Synthetic peptide
  Seed: MDPRMCSLMQGSTLPRRSGAA
MDPRMWSLIQSSTVPRRSGAA

SEQ ID NO: 104752 - protein, 21 aa, Artificial Sequence
  Description of Artificial Sequence: Synthetic peptide
  Seed: MDPRMCSLMQGSTLPRRSGAA
MDPRMWSLIQTSTAPRRSGAA

SEQ ID NO: 104753 - protein, 21 aa, Artificial Sequence
  Description of Artificial Sequence: Synthetic peptide
  Seed: MDPRMCSLMQGSTLPRRSGAA
MDPRMWSLIQTSTNPRRSGAA

SEQ ID NO: 104754 - protein, 21 aa, Artificial Sequence
  Description of Artificial Sequence: Synthetic peptide
  Seed: MDPRMCSLMQGSTLPRRSGAA
MDPRMWSLIQTSTSPRRSGAA

SEQ ID NO: 104755 - protein, 21 aa, Artificial Sequence
  Description of Artificial Sequence: Synthetic peptide
  Seed: MDPRMCSLMQGSTLPRRSGAA
MDPRMWSLIQVSTAPRRSGAA

SEQ ID NO: 104756 - protein, 21 aa, Artificial Sequence
  Description of Artificial Sequence: Synthetic peptide
  Seed: MDPRMCSLMQGSTLPRRSGAA
MDPRMWSLIQVSTNPRRSGAA

SEQ ID NO: 104757 - protein, 21 aa, Artificial Sequence
  Description of Artificial Sequence: Synthetic peptide
  Seed: MDPRMCSLMQGSTLPRRSGAA
MDPRMWSLIQVSTSPRRSGAA

SEQ ID NO: 104758 - protein, 21 aa, Artificial Sequence
  Description of Artificial Sequence: Synthetic peptide
  Seed: MDPRMCSLMQGSTLPRRSGAA
MDPRMWSLLQASTAPRRSGAA

SEQ ID NO: 104759 - protein, 21 aa, Artificial Sequence
  Description of Artificial Sequence: Synthetic peptide
  Seed: MDPRMCSLMQGSTLPRRSGAA
MDPRMWSLLQASTGPRRSGAA

SEQ ID NO: 104760 - protein, 21 aa, Artificial Sequence
  Description of Artificial Sequence: Synthetic peptide
  Seed: MDPRMCSLMQGSTLPRRSGAA
MDPRMWSLLQASTIPRRSGAA

SEQ ID NO: 104761 - protein, 21 aa, Artificial Sequence
  Description of Artificial Sequence: Synthetic peptide
  Seed: MDPRMCSLMQGSTLPRRSGAA
MDPRMWSLLQASTLPRRSGAA

SEQ ID NO: 104762 - protein, 21 aa, Artificial Sequence
  Description of Artificial Sequence: Synthetic peptide
  Seed: MDPRMCSLMQGSTLPRRSGAA
MDPRMWSLLQASTMPRRSGAA

SEQ ID NO: 104763 - protein, 21 aa, Artificial Sequence
  Description of Artificial Sequence: Synthetic peptide
  Seed: MDPRMCSLMQGSTLPRRSGAA
MDPRMWSLLQASTNPRRSGAA

SEQ ID NO: 104764 - protein, 21 aa, Artificial Sequence
  Description of Artificial Sequence: Synthetic peptide
  Seed: MDPRMCSLMQGSTLPRRSGAA
MDPRMWSLLQASTSPRRSGAA

SEQ ID NO: 104765 - protein, 21 aa, Artificial Sequence
  Description of Artificial Sequence: Synthetic peptide
  Seed: MDPRMCSLMQGSTLPRRSGAA
MDPRMWSLLQASTTPRRSGAA

SEQ ID NO: 104766 - protein, 21 aa, Artificial Sequence
  Description of Artificial Sequence: Synthetic peptide
  Seed: MDPRMCSLMQGSTLPRRSGAA
MDPRMWSLLQASTVPRRSGAA

SEQ ID NO: 104767 - protein, 21 aa, Artificial Sequence
  Description of Artificial Sequence: Synthetic peptide
  Seed: MDPRMCSLMQGSTLPRRSGAA
MDPRMWSLLQGSTAPRRSGAA

SEQ ID NO: 104768 - protein, 21 aa, Artificial Sequence
  Description of Artificial Sequence: Synthetic peptide
  Seed: MDPRMCSLMQGSTLPRRSGAA
MDPRMWSLLQGSTGPRRSGAA

SEQ ID NO: 104769 - protein, 21 aa, Artificial Sequence
  Description of Artificial Sequence: Synthetic peptide
  Seed: MDPRMCSLMQGSTLPRRSGAA
MDPRMWSLLQGSTIPRRSGAA

SEQ ID NO: 104770 - protein, 21 aa, Artificial Sequence
  Description of Artificial Sequence: Synthetic peptide
  Seed: MDPRMCSLMQGSTLPRRSGAA
MDPRMWSLLQGSTLPRRSGAA

SEQ ID NO: 104771 - protein, 21 aa, Artificial Sequence
  Description of Artificial Sequence: Synthetic peptide
  Seed: MDPRMCSLMQGSTLPRRSGAA
MDPRMWSLLQGSTMPRRSGAA

SEQ ID NO: 104772 - protein, 21 aa, Artificial Sequence
  Description of Artificial Sequence: Synthetic peptide
  Seed: MDPRMCSLMQGSTLPRRSGAA
MDPRMWSLLQGSTSPRRSGAA

SEQ ID NO: 104773 - protein, 21 aa, Artificial Sequence
  Description of Artificial Sequence: Synthetic peptide
  Seed: MDPRMCSLMQGSTLPRRSGAA
MDPRMWSLLQGSTTPRRSGAA

SEQ ID NO: 104774 - protein, 21 aa, Artificial Sequence
  Description of Artificial Sequence: Synthetic peptide
  Seed: MDPRMCSLMQGSTLPRRSGAA
MDPRMWSLLQGSTVPRRSGAA

SEQ ID NO: 104775 - protein, 21 aa, Artificial Sequence
  Description of Artificial Sequence: Synthetic peptide
  Seed: MDPRMCSLMQGSTLPRRSGAA
MDPRMWSLLQISTAPRRSGAA

SEQ ID NO: 104776 - protein, 21 aa, Artificial Sequence
  Description of Artificial Sequence: Synthetic peptide
  Seed: MDPRMCSLMQGSTLPRRSGAA
MDPRMWSLLQISTNPRRSGAA

SEQ ID NO: 104777 - protein, 21 aa, Artificial Sequence
  Description of Artificial Sequence: Synthetic peptide
  Seed: MDPRMCSLMQGSTLPRRSGAA
MDPRMWSLLQISTSPRRSGAA

SEQ ID NO: 104778 - protein, 21 aa, Artificial Sequence
  Description of Artificial Sequence: Synthetic peptide
  Seed: MDPRMCSLMQGSTLPRRSGAA
MDPRMWSLLQNSTAPRRSGAA

SEQ ID NO: 104779 - protein, 21 aa, Artificial Sequence
  Description of Artificial Sequence: Synthetic peptide
  Seed: MDPRMCSLMQGSTLPRRSGAA
MDPRMWSLLQNSTIPRRSGAA

SEQ ID NO: 104780 - protein, 21 aa, Artificial Sequence
  Description of Artificial Sequence: Synthetic peptide
  Seed: MDPRMCSLMQGSTLPRRSGAA
MDPRMWSLLQNSTLPRRSGAA

SEQ ID NO: 104781 - protein, 21 aa, Artificial Sequence
  Description of Artificial Sequence: Synthetic peptide
  Seed: MDPRMCSLMQGSTLPRRSGAA
MDPRMWSLLQNSTVPRRSGAA

SEQ ID NO: 104782 - protein, 21 aa, Artificial Sequence
  Description of Artificial Sequence: Synthetic peptide
  Seed: MDPRMCSLMQGSTLPRRSGAA
MDPRMWSLLQPSTAPRRSGAA

SEQ ID NO: 104783 - protein, 21 aa, Artificial Sequence
  Description of Artificial Sequence: Synthetic peptide
  Seed: MDPRMCSLMQGSTLPRRSGAA
MDPRMWSLLQPSTIPRRSGAA

SEQ ID NO: 104784 - protein, 21 aa, Artificial Sequence
  Description of Artificial Sequence: Synthetic peptide
  Seed: MDPRMCSLMQGSTLPRRSGAA
MDPRMWSLLQPSTLPRRSGAA

SEQ ID NO: 104785 - protein, 21 aa, Artificial Sequence
  Description of Artificial Sequence: Synthetic peptide
  Seed: MDPRMCSLMQGSTLPRRSGAA
MDPRMWSLLQPSTMPRRSGAA

SEQ ID NO: 104786 - protein, 21 aa, Artificial Sequence
  Description of Artificial Sequence: Synthetic peptide
  Seed: MDPRMCSLMQGSTLPRRSGAA
MDPRMWSLLQPSTNPRRSGAA

SEQ ID NO: 104787 - protein, 21 aa, Artificial Sequence
  Description of Artificial Sequence: Synthetic peptide
  Seed: MDPRMCSLMQGSTLPRRSGAA
MDPRMWSLLQPSTSPRRSGAA

SEQ ID NO: 104788 - protein, 21 aa, Artificial Sequence
  Description of Artificial Sequence: Synthetic peptide
  Seed: MDPRMCSLMQGSTLPRRSGAA
MDPRMWSLLQPSTTPRRSGAA

SEQ ID NO: 104789 - protein, 21 aa, Artificial Sequence
  Description of Artificial Sequence: Synthetic peptide
  Seed: MDPRMCSLMQGSTLPRRSGAA
MDPRMWSLLQPSTVPRRSGAA

SEQ ID NO: 104790 - protein, 21 aa, Artificial Sequence
  Description of Artificial Sequence: Synthetic peptide
  Seed: MDPRMCSLMQGSTLPRRSGAA
MDPRMWSLLQSSTAPRRSGAA

SEQ ID NO: 104791 - protein, 21 aa, Artificial Sequence
  Description of Artificial Sequence: Synthetic peptide
  Seed: MDPRMCSLMQGSTLPRRSGAA
MDPRMWSLLQSSTIPRRSGAA

SEQ ID NO: 104792 - protein, 21 aa, Artificial Sequence
  Description of Artificial Sequence: Synthetic peptide
  Seed: MDPRMCSLMQGSTLPRRSGAA
MDPRMWSLLQSSTLPRRSGAA

SEQ ID NO: 104793 - protein, 21 aa, Artificial Sequence
  Description of Artificial Sequence: Synthetic peptide
  Seed: MDPRMCSLMQGSTLPRRSGAA
MDPRMWSLLQSSTMPRRSGAA

SEQ ID NO: 104794 - protein, 21 aa, Artificial Sequence
  Description of Artificial Sequence: Synthetic peptide
  Seed: MDPRMCSLMQGSTLPRRSGAA
MDPRMWSLLQSSTNPRRSGAA

SEQ ID NO: 104795 - protein, 21 aa, Artificial Sequence
  Description of Artificial Sequence: Synthetic peptide
  Seed: MDPRMCSLMQGSTLPRRSGAA
MDPRMWSLLQSSTSPRRSGAA

SEQ ID NO: 104796 - protein, 21 aa, Artificial Sequence
  Description of Artificial Sequence: Synthetic peptide
  Seed: MDPRMCSLMQGSTLPRRSGAA
MDPRMWSLLQSSTTPRRSGAA

SEQ ID NO: 104797 - protein, 21 aa, Artificial Sequence
  Description of Artificial Sequence: Synthetic peptide
  Seed: MDPRMCSLMQGSTLPRRSGAA
MDPRMWSLLQSSTVPRRSGAA

SEQ ID NO: 104798 - protein, 21 aa, Artificial Sequence
  Description of Artificial Sequence: Synthetic peptide
  Seed: MDPRMCSLMQGSTLPRRSGAA
MDPRMWSLLQTSTAPRRSGAA

SEQ ID NO: 104799 - protein, 21 aa, Artificial Sequence
  Description of Artificial Sequence: Synthetic peptide
  Seed: MDPRMCSLMQGSTLPRRSGAA
MDPRMWSLLQTSTIPRRSGAA

SEQ ID NO: 104800 - protein, 21 aa, Artificial Sequence
  Description of Artificial Sequence: Synthetic peptide
  Seed: MDPRMCSLMQGSTLPRRSGAA
MDPRMWSLLQTSTLPRRSGAA

SEQ ID NO: 104801 - protein, 21 aa, Artificial Sequence
  Description of Artificial Sequence: Synthetic peptide
  Seed: MDPRMCSLMQGSTLPRRSGAA
MDPRMWSLLQTSTNPRRSGAA

SEQ ID NO: 104802 - protein, 21 aa, Artificial Sequence
  Description of Artificial Sequence: Synthetic peptide
  Seed: MDPRMCSLMQGSTLPRRSGAA
MDPRMWSLLQTSTSPRRSGAA

SEQ ID NO: 104803 - protein, 21 aa, Artificial Sequence
  Description of Artificial Sequence: Synthetic peptide
  Seed: MDPRMCSLMQGSTLPRRSGAA
MDPRMWSLLQTSTTPRRSGAA

SEQ ID NO: 104804 - protein, 21 aa, Artificial Sequence
  Description of Artificial Sequence: Synthetic peptide
  Seed: MDPRMCSLMQGSTLPRRSGAA
MDPRMWSLLQTSTVPRRSGAA

SEQ ID NO: 104805 - protein, 21 aa, Artificial Sequence
  Description of Artificial Sequence: Synthetic peptide
  Seed: MDPRMCSLMQGSTLPRRSGAA
MDPRMWSLLQVSTAPRRSGAA

SEQ ID NO: 104806 - protein, 21 aa, Artificial Sequence
  Description of Artificial Sequence: Synthetic peptide
  Seed: MDPRMCSLMQGSTLPRRSGAA
MDPRMWSLLQVSTNPRRSGAA

SEQ ID NO: 104807 - protein, 21 aa, Artificial Sequence
  Description of Artificial Sequence: Synthetic peptide
  Seed: MDPRMCSLMQGSTLPRRSGAA
MDPRMWSLLQVSTSPRRSGAA

SEQ ID NO: 104808 - protein, 21 aa, Artificial Sequence
  Description of Artificial Sequence: Synthetic peptide
  Seed: MDPRMCSLMQGSTLPRRSGAA
MDPRMWSLLQVSTTPRRSGAA

SEQ ID NO: 104809 - protein, 21 aa, Artificial Sequence
  Description of Artificial Sequence: Synthetic peptide
  Seed: MDPRMCSLMQGSTLPRRSGAA
MDPRMWSLMQASTAPRRSGAA

SEQ ID NO: 104810 - protein, 21 aa, Artificial Sequence
  Description of Artificial Sequence: Synthetic peptide
  Seed: MDPRMCSLMQGSTLPRRSGAA
MDPRMWSLMQASTGPRRSGAA

SEQ ID NO: 104811 - protein, 21 aa, Artificial Sequence
  Description of Artificial Sequence: Synthetic peptide
  Seed: MDPRMCSLMQGSTLPRRSGAA
MDPRMWSLMQASTIPRRSGAA

SEQ ID NO: 104812 - protein, 21 aa, Artificial Sequence
  Description of Artificial Sequence: Synthetic peptide
  Seed: MDPRMCSLMQGSTLPRRSGAA
MDPRMWSLMQASTLPRRSGAA

SEQ ID NO: 104813 - protein, 21 aa, Artificial Sequence
  Description of Artificial Sequence: Synthetic peptide
  Seed: MDPRMCSLMQGSTLPRRSGAA
MDPRMWSLMQASTMPRRSGAA

SEQ ID NO: 104814 - protein, 21 aa, Artificial Sequence
  Description of Artificial Sequence: Synthetic peptide
  Seed: MDPRMCSLMQGSTLPRRSGAA
MDPRMWSLMQASTNPRRSGAA

SEQ ID NO: 104815 - protein, 21 aa, Artificial Sequence
  Description of Artificial Sequence: Synthetic peptide
  Seed: MDPRMCSLMQGSTLPRRSGAA
MDPRMWSLMQASTQPRRSGAA

SEQ ID NO: 104816 - protein, 21 aa, Artificial Sequence
  Description of Artificial Sequence: Synthetic peptide
  Seed: MDPRMCSLMQGSTLPRRSGAA
MDPRMWSLMQASTSPRRSGAA

SEQ ID NO: 104817 - protein, 21 aa, Artificial Sequence
  Description of Artificial Sequence: Synthetic peptide
  Seed: MDPRMCSLMQGSTLPRRSGAA
MDPRMWSLMQASTTPRRSGAA

SEQ ID NO: 104818 - protein, 21 aa, Artificial Sequence
  Description of Artificial Sequence: Synthetic peptide
  Seed: MDPRMCSLMQGSTLPRRSGAA
MDPRMWSLMQASTVPRRSGAA

SEQ ID NO: 104819 - protein, 21 aa, Artificial Sequence
  Description of Artificial Sequence: Synthetic peptide
  Seed: MDPRMCSLMQGSTLPRRSGAA
MDPRMWSLMQGSTAPRRSGAA

SEQ ID NO: 104820 - protein, 21 aa, Artificial Sequence
  Description of Artificial Sequence: Synthetic peptide
  Seed: MDPRMCSLMQGSTLPRRSGAA
MDPRMWSLMQGSTIPRRSGAA

SEQ ID NO: 104821 - protein, 21 aa, Artificial Sequence
  Description of Artificial Sequence: Synthetic peptide
  Seed: MDPRMCSLMQGSTLPRRSGAA
MDPRMWSLMQGSTLPRRSGAA

SEQ ID NO: 104822 - protein, 21 aa, Artificial Sequence
  Description of Artificial Sequence: Synthetic peptide
  Seed: MDPRMCSLMQGSTLPRRSGAA
MDPRMWSLMQGSTMPRRSGAA

SEQ ID NO: 104823 - protein, 21 aa, Artificial Sequence
  Description of Artificial Sequence: Synthetic peptide
  Seed: MDPRMCSLMQGSTLPRRSGAA
MDPRMWSLMQGSTSPRRSGAA

SEQ ID NO: 104824 - protein, 21 aa, Artificial Sequence
  Description of Artificial Sequence: Synthetic peptide
  Seed: MDPRMCSLMQGSTLPRRSGAA
MDPRMWSLMQGSTTPRRSGAA

SEQ ID NO: 104825 - protein, 21 aa, Artificial Sequence
  Description of Artificial Sequence: Synthetic peptide
  Seed: MDPRMCSLMQGSTLPRRSGAA
MDPRMWSLMQGSTVPRRSGAA

SEQ ID NO: 104826 - protein, 21 aa, Artificial Sequence
  Description of Artificial Sequence: Synthetic peptide
  Seed: MDPRMCSLMQGSTLPRRSGAA
MDPRMWSLMQISTAPRRSGAA

SEQ ID NO: 104827 - protein, 21 aa, Artificial Sequence
  Description of Artificial Sequence: Synthetic peptide
  Seed: MDPRMCSLMQGSTLPRRSGAA
MDPRMWSLMQISTNPRRSGAA

SEQ ID NO: 104828 - protein, 21 aa, Artificial Sequence
  Description of Artificial Sequence: Synthetic peptide
  Seed: MDPRMCSLMQGSTLPRRSGAA
MDPRMWSLMQISTSPRRSGAA

SEQ ID NO: 104829 - protein, 21 aa, Artificial Sequence
  Description of Artificial Sequence: Synthetic peptide
  Seed: MDPRMCSLMQGSTLPRRSGAA
MDPRMWSLMQNSTAPRRSGAA

SEQ ID NO: 104830 - protein, 21 aa, Artificial Sequence
  Description of Artificial Sequence: Synthetic peptide
  Seed: MDPRMCSLMQGSTLPRRSGAA
MDPRMWSLMQNSTIPRRSGAA

SEQ ID NO: 104831 - protein, 21 aa, Artificial Sequence
  Description of Artificial Sequence: Synthetic peptide
  Seed: MDPRMCSLMQGSTLPRRSGAA
MDPRMWSLMQNSTLPRRSGAA

SEQ ID NO: 104832 - protein, 21 aa, Artificial Sequence
  Description of Artificial Sequence: Synthetic peptide
  Seed: MDPRMCSLMQGSTLPRRSGAA
MDPRMWSLMQNSTVPRRSGAA

SEQ ID NO: 104833 - protein, 21 aa, Artificial Sequence
  Description of Artificial Sequence: Synthetic peptide
  Seed: MDPRMCSLMQGSTLPRRSGAA
MDPRMWSLMQPSTAPRRSGAA

SEQ ID NO: 104834 - protein, 21 aa, Artificial Sequence
  Description of Artificial Sequence: Synthetic peptide
  Seed: MDPRMCSLMQGSTLPRRSGAA
MDPRMWSLMQPSTIPRRSGAA

SEQ ID NO: 104835 - protein, 21 aa, Artificial Sequence
  Description of Artificial Sequence: Synthetic peptide
  Seed: MDPRMCSLMQGSTLPRRSGAA
MDPRMWSLMQPSTLPRRSGAA

SEQ ID NO: 104836 - protein, 21 aa, Artificial Sequence
  Description of Artificial Sequence: Synthetic peptide
  Seed: MDPRMCSLMQGSTLPRRSGAA
MDPRMWSLMQPSTMPRRSGAA

SEQ ID NO: 104837 - protein, 21 aa, Artificial Sequence
  Description of Artificial Sequence: Synthetic peptide
  Seed: MDPRMCSLMQGSTLPRRSGAA
MDPRMWSLMQPSTNPRRSGAA

SEQ ID NO: 104838 - protein, 21 aa, Artificial Sequence
  Description of Artificial Sequence: Synthetic peptide
  Seed: MDPRMCSLMQGSTLPRRSGAA
MDPRMWSLMQPSTSPRRSGAA

SEQ ID NO: 104839 - protein, 21 aa, Artificial Sequence
  Description of Artificial Sequence: Synthetic peptide
  Seed: MDPRMCSLMQGSTLPRRSGAA
MDPRMWSLMQPSTTPRRSGAA

SEQ ID NO: 104840 - protein, 21 aa, Artificial Sequence
  Description of Artificial Sequence: Synthetic peptide
  Seed: MDPRMCSLMQGSTLPRRSGAA
MDPRMWSLMQPSTVPRRSGAA

SEQ ID NO: 104841 - protein, 21 aa, Artificial Sequence
  Description of Artificial Sequence: Synthetic peptide
  Seed: MDPRMCSLMQGSTLPRRSGAA
MDPRMWSLMQSSTAPRRSGAA

SEQ ID NO: 104842 - protein, 21 aa, Artificial Sequence
  Description of Artificial Sequence: Synthetic peptide
  Seed: MDPRMCSLMQGSTLPRRSGAA
MDPRMWSLMQSSTIPRRSGAA

SEQ ID NO: 104843 - protein, 21 aa, Artificial Sequence
  Description of Artificial Sequence: Synthetic peptide
  Seed: MDPRMCSLMQGSTLPRRSGAA
MDPRMWSLMQSSTLPRRSGAA

SEQ ID NO: 104844 - protein, 21 aa, Artificial Sequence
  Description of Artificial Sequence: Synthetic peptide
  Seed: MDPRMCSLMQGSTLPRRSGAA
MDPRMWSLMQSSTMPRRSGAA

SEQ ID NO: 104845 - protein, 21 aa, Artificial Sequence
  Description of Artificial Sequence: Synthetic peptide
  Seed: MDPRMCSLMQGSTLPRRSGAA
MDPRMWSLMQSSTNPRRSGAA

SEQ ID NO: 104846 - protein, 21 aa, Artificial Sequence
  Description of Artificial Sequence: Synthetic peptide
  Seed: MDPRMCSLMQGSTLPRRSGAA
MDPRMWSLMQSSTSPRRSGAA

SEQ ID NO: 104847 - protein, 21 aa, Artificial Sequence
  Description of Artificial Sequence: Synthetic peptide
  Seed: MDPRMCSLMQGSTLPRRSGAA
MDPRMWSLMQSSTTPRRSGAA

SEQ ID NO: 104848 - protein, 21 aa, Artificial Sequence
  Description of Artificial Sequence: Synthetic peptide
  Seed: MDPRMCSLMQGSTLPRRSGAA
MDPRMWSLMQSSTVPRRSGAA

SEQ ID NO: 104849 - protein, 21 aa, Artificial Sequence
  Description of Artificial Sequence: Synthetic peptide
  Seed: MDPRMCSLMQGSTLPRRSGAA
MDPRMWSLMQTSTAPRRSGAA

SEQ ID NO: 104850 - protein, 21 aa, Artificial Sequence
  Description of Artificial Sequence: Synthetic peptide
  Seed: MDPRMCSLMQGSTLPRRSGAA
MDPRMWSLMQTSTIPRRSGAA

SEQ ID NO: 104851 - protein, 21 aa, Artificial Sequence
  Description of Artificial Sequence: Synthetic peptide
  Seed: MDPRMCSLMQGSTLPRRSGAA
MDPRMWSLMQTSTLPRRSGAA

SEQ ID NO: 104852 - protein, 21 aa, Artificial Sequence
  Description of Artificial Sequence: Synthetic peptide
  Seed: MDPRMCSLMQGSTLPRRSGAA
MDPRMWSLMQTSTNPRRSGAA

SEQ ID NO: 104853 - protein, 21 aa, Artificial Sequence
  Description of Artificial Sequence: Synthetic peptide
  Seed: MDPRMCSLMQGSTLPRRSGAA
MDPRMWSLMQTSTSPRRSGAA

SEQ ID NO: 104854 - protein, 21 aa, Artificial Sequence
  Description of Artificial Sequence: Synthetic peptide
  Seed: MDPRMCSLMQGSTLPRRSGAA
MDPRMWSLMQTSTTPRRSGAA

SEQ ID NO: 104855 - protein, 21 aa, Artificial Sequence
  Description of Artificial Sequence: Synthetic peptide
  Seed: MDPRMCSLMQGSTLPRRSGAA
MDPRMWSLMQTSTVPRRSGAA

SEQ ID NO: 104856 - protein, 21 aa, Artificial Sequence
  Description of Artificial Sequence: Synthetic peptide
  Seed: MDPRMCSLMQGSTLPRRSGAA
MDPRMWSLMQVSTAPRRSGAA

SEQ ID NO: 104857 - protein, 21 aa, Artificial Sequence
  Description of Artificial Sequence: Synthetic peptide
  Seed: MDPRMCSLMQGSTLPRRSGAA
MDPRMWSLMQVSTNPRRSGAA

SEQ ID NO: 104858 - protein, 21 aa, Artificial Sequence
  Description of Artificial Sequence: Synthetic peptide
  Seed: MDPRMCSLMQGSTLPRRSGAA
MDPRMWSLMQVSTSPRRSGAA

SEQ ID NO: 104859 - protein, 21 aa, Artificial Sequence
  Description of Artificial Sequence: Synthetic peptide
  Seed: MDPRMCSLMQGSTLPRRSGAA
MDPRMWSLMQVSTTPRRSGAA

SEQ ID NO: 104860 - protein, 21 aa, Artificial Sequence
  Description of Artificial Sequence: Synthetic peptide
  Seed: MDPRMCSLMQGSTLPRRSGAA
MDPRMWSLQQASTAPRRSGAA

SEQ ID NO: 104861 - protein, 21 aa, Artificial Sequence
  Description of Artificial Sequence: Synthetic peptide
  Seed: MDPRMCSLMQGSTLPRRSGAA
MDPRMWSLQQASTIPRRSGAA

SEQ ID NO: 104862 - protein, 21 aa, Artificial Sequence
  Description of Artificial Sequence: Synthetic peptide
  Seed: MDPRMCSLMQGSTLPRRSGAA
MDPRMWSLQQASTLPRRSGAA

SEQ ID NO: 104863 - protein, 21 aa, Artificial Sequence
  Description of Artificial Sequence: Synthetic peptide
  Seed: MDPRMCSLMQGSTLPRRSGAA
MDPRMWSLQQASTVPRRSGAA

SEQ ID NO: 104864 - protein, 21 aa, Artificial Sequence
  Description of Artificial Sequence: Synthetic peptide
  Seed: MDPRMCSLMQGSTLPRRSGAA
MDPRMWSLQQGSTLPRRSGAA

SEQ ID NO: 104865 - protein, 21 aa, Artificial Sequence
  Description of Artificial Sequence: Synthetic peptide
  Seed: MDPRMCSLMQGSTLPRRSGAA
MDPRMWSLQQGSTVPRRSGAA

SEQ ID NO: 104866 - protein, 21 aa, Artificial Sequence
  Description of Artificial Sequence: Synthetic peptide
  Seed: MDPRMCSLMQGSTLPRRSGAA
MDPRMWSLVQASTAPRRSGAA

SEQ ID NO: 104867 - protein, 21 aa, Artificial Sequence
  Description of Artificial Sequence: Synthetic peptide
  Seed: MDPRMCSLMQGSTLPRRSGAA
MDPRMWSLVQASTIPRRSGAA

SEQ ID NO: 104868 - protein, 21 aa, Artificial Sequence
  Description of Artificial Sequence: Synthetic peptide
  Seed: MDPRMCSLMQGSTLPRRSGAA
MDPRMWSLVQASTLPRRSGAA

SEQ ID NO: 104869 - protein, 21 aa, Artificial Sequence
  Description of Artificial Sequence: Synthetic peptide
  Seed: MDPRMCSLMQGSTLPRRSGAA
MDPRMWSLVQASTSPRRSGAA

SEQ ID NO: 104870 - protein, 21 aa, Artificial Sequence
  Description of Artificial Sequence: Synthetic peptide
  Seed: MDPRMCSLMQGSTLPRRSGAA
MDPRMWSLVQASTVPRRSGAA

SEQ ID NO: 104871 - protein, 21 aa, Artificial Sequence
  Description of Artificial Sequence: Synthetic peptide
  Seed: MDPRMCSLMQGSTLPRRSGAA
MDPRMWSLVQGSTLPRRSGAA

SEQ ID NO: 104872 - protein, 21 aa, Artificial Sequence
  Description of Artificial Sequence: Synthetic peptide
  Seed: MDPRMCSLMQGSTLPRRSGAA
MDPRMWSLVQGSTVPRRSGAA

SEQ ID NO: 104873 - protein, 21 aa, Artificial Sequence
  Description of Artificial Sequence: Synthetic peptide
  Seed: MDPRMCSLMQGSTLPRRSGAA
MDPRMYSLAQASTAPRRSGAA

SEQ ID NO: 104874 - protein, 21 aa, Artificial Sequence
  Description of Artificial Sequence: Synthetic peptide
  Seed: MDPRMCSLMQGSTLPRRSGAA
MDPRMYSLAQASTIPRRSGAA

SEQ ID NO: 104875 - protein, 21 aa, Artificial Sequence
  Description of Artificial Sequence: Synthetic peptide
  Seed: MDPRMCSLMQGSTLPRRSGAA
MDPRMYSLAQASTLPRRSGAA

SEQ ID NO: 104876 - protein, 21 aa, Artificial Sequence
  Description of Artificial Sequence: Synthetic peptide
  Seed: MDPRMCSLMQGSTLPRRSGAA
MDPRMYSLAQASTMPRRSGAA

SEQ ID NO: 104877 - protein, 21 aa, Artificial Sequence
  Description of Artificial Sequence: Synthetic peptide
  Seed: MDPRMCSLMQGSTLPRRSGAA
MDPRMYSLAQASTNPRRSGAA

SEQ ID NO: 104878 - protein, 21 aa, Artificial Sequence
  Description of Artificial Sequence: Synthetic peptide
  Seed: MDPRMCSLMQGSTLPRRSGAA
MDPRMYSLAQASTQPRRSGAA

SEQ ID NO: 104879 - protein, 21 aa, Artificial Sequence
  Description of Artificial Sequence: Synthetic peptide
  Seed: MDPRMCSLMQGSTLPRRSGAA
MDPRMYSLAQASTSPRRSGAA

SEQ ID NO: 104880 - protein, 21 aa, Artificial Sequence
  Description of Artificial Sequence: Synthetic peptide
  Seed: MDPRMCSLMQGSTLPRRSGAA
MDPRMYSLAQASTTPRRSGAA

SEQ ID NO: 104881 - protein, 21 aa, Artificial Sequence
  Description of Artificial Sequence: Synthetic peptide
  Seed: MDPRMCSLMQGSTLPRRSGAA
MDPRMYSLAQASTVPRRSGAA

SEQ ID NO: 104882 - protein, 21 aa, Artificial Sequence
  Description of Artificial Sequence: Synthetic peptide
  Seed: MDPRMCSLMQGSTLPRRSGAA
MDPRMYSLAQGSTAPRRSGAA

SEQ ID NO: 104883 - protein, 21 aa, Artificial Sequence
  Description of Artificial Sequence: Synthetic peptide
  Seed: MDPRMCSLMQGSTLPRRSGAA
MDPRMYSLAQGSTIPRRSGAA

SEQ ID NO: 104884 - protein, 21 aa, Artificial Sequence
  Description of Artificial Sequence: Synthetic peptide
  Seed: MDPRMCSLMQGSTLPRRSGAA
MDPRMYSLAQGSTLPRRSGAA

SEQ ID NO: 104885 - protein, 21 aa, Artificial Sequence
  Description of Artificial Sequence: Synthetic peptide
  Seed: MDPRMCSLMQGSTLPRRSGAA
MDPRMYSLAQGSTMPRRSGAA

SEQ ID NO: 104886 - protein, 21 aa, Artificial Sequence
  Description of Artificial Sequence: Synthetic peptide
  Seed: MDPRMCSLMQGSTLPRRSGAA
MDPRMYSLAQGSTVPRRSGAA

SEQ ID NO: 104887 - protein, 21 aa, Artificial Sequence
  Description of Artificial Sequence: Synthetic peptide
  Seed: MDPRMCSLMQGSTLPRRSGAA
MDPRMYSLAQISTAPRRSGAA

SEQ ID NO: 104888 - protein, 21 aa, Artificial Sequence
  Description of Artificial Sequence: Synthetic peptide
  Seed: MDPRMCSLMQGSTLPRRSGAA
MDPRMYSLAQISTNPRRSGAA

SEQ ID NO: 104889 - protein, 21 aa, Artificial Sequence
  Description of Artificial Sequence: Synthetic peptide
  Seed: MDPRMCSLMQGSTLPRRSGAA
MDPRMYSLAQISTSPRRSGAA

SEQ ID NO: 104890 - protein, 21 aa, Artificial Sequence
  Description of Artificial Sequence: Synthetic peptide
  Seed: MDPRMCSLMQGSTLPRRSGAA
MDPRMYSLAQISTVPRRSGAA

SEQ ID NO: 104891 - protein, 21 aa, Artificial Sequence
  Description of Artificial Sequence: Synthetic peptide
  Seed: MDPRMCSLMQGSTLPRRSGAA
MDPRMYSLAQNSTIPRRSGAA

SEQ ID NO: 104892 - protein, 21 aa, Artificial Sequence
  Description of Artificial Sequence: Synthetic peptide
  Seed: MDPRMCSLMQGSTLPRRSGAA
MDPRMYSLAQNSTLPRRSGAA

SEQ ID NO: 104893 - protein, 21 aa, Artificial Sequence
  Description of Artificial Sequence: Synthetic peptide
  Seed: MDPRMCSLMQGSTLPRRSGAA
MDPRMYSLAQNSTVPRRSGAA

SEQ ID NO: 104894 - protein, 21 aa, Artificial Sequence
  Description of Artificial Sequence: Synthetic peptide
  Seed: MDPRMCSLMQGSTLPRRSGAA
MDPRMYSLAQPSTAPRRSGAA

SEQ ID NO: 104895 - protein, 21 aa, Artificial Sequence
  Description of Artificial Sequence: Synthetic peptide
  Seed: MDPRMCSLMQGSTLPRRSGAA
MDPRMYSLAQPSTIPRRSGAA

SEQ ID NO: 104896 - protein, 21 aa, Artificial Sequence
  Description of Artificial Sequence: Synthetic peptide
  Seed: MDPRMCSLMQGSTLPRRSGAA
MDPRMYSLAQPSTLPRRSGAA

SEQ ID NO: 104897 - protein, 21 aa, Artificial Sequence
  Description of Artificial Sequence: Synthetic peptide
  Seed: MDPRMCSLMQGSTLPRRSGAA
MDPRMYSLAQPSTNPRRSGAA

SEQ ID NO: 104898 - protein, 21 aa, Artificial Sequence
  Description of Artificial Sequence: Synthetic peptide
  Seed: MDPRMCSLMQGSTLPRRSGAA
MDPRMYSLAQPSTSPRRSGAA

SEQ ID NO: 104899 - protein, 21 aa, Artificial Sequence
  Description of Artificial Sequence: Synthetic peptide
  Seed: MDPRMCSLMQGSTLPRRSGAA
MDPRMYSLAQPSTVPRRSGAA

SEQ ID NO: 104900 - protein, 21 aa, Artificial Sequence
  Description of Artificial Sequence: Synthetic peptide
  Seed: MDPRMCSLMQGSTLPRRSGAA
MDPRMYSLAQSSTAPRRSGAA

SEQ ID NO: 104901 - protein, 21 aa, Artificial Sequence
  Description of Artificial Sequence: Synthetic peptide
  Seed: MDPRMCSLMQGSTLPRRSGAA
MDPRMYSLAQSSTIPRRSGAA

SEQ ID NO: 104902 - protein, 21 aa, Artificial Sequence
  Description of Artificial Sequence: Synthetic peptide
  Seed: MDPRMCSLMQGSTLPRRSGAA
MDPRMYSLAQSSTLPRRSGAA

SEQ ID NO: 104903 - protein, 21 aa, Artificial Sequence
  Description of Artificial Sequence: Synthetic peptide
  Seed: MDPRMCSLMQGSTLPRRSGAA
MDPRMYSLAQSSTMPRRSGAA

SEQ ID NO: 104904 - protein, 21 aa, Artificial Sequence
  Description of Artificial Sequence: Synthetic peptide
  Seed: MDPRMCSLMQGSTLPRRSGAA
MDPRMYSLAQSSTNPRRSGAA

SEQ ID NO: 104905 - protein, 21 aa, Artificial Sequence
  Description of Artificial Sequence: Synthetic peptide
  Seed: MDPRMCSLMQGSTLPRRSGAA
MDPRMYSLAQSSTSPRRSGAA

SEQ ID NO: 104906 - protein, 21 aa, Artificial Sequence
  Description of Artificial Sequence: Synthetic peptide
  Seed: MDPRMCSLMQGSTLPRRSGAA
MDPRMYSLAQSSTVPRRSGAA

SEQ ID NO: 104907 - protein, 21 aa, Artificial Sequence
  Description of Artificial Sequence: Synthetic peptide
  Seed: MDPRMCSLMQGSTLPRRSGAA
MDPRMYSLAQTSTAPRRSGAA

SEQ ID NO: 104908 - protein, 21 aa, Artificial Sequence
  Description of Artificial Sequence: Synthetic peptide
  Seed: MDPRMCSLMQGSTLPRRSGAA
MDPRMYSLAQTSTIPRRSGAA

SEQ ID NO: 104909 - protein, 21 aa, Artificial Sequence
  Description of Artificial Sequence: Synthetic peptide
  Seed: MDPRMCSLMQGSTLPRRSGAA
MDPRMYSLAQTSTLPRRSGAA

SEQ ID NO: 104910 - protein, 21 aa, Artificial Sequence
  Description of Artificial Sequence: Synthetic peptide
  Seed: MDPRMCSLMQGSTLPRRSGAA
MDPRMYSLAQTSTNPRRSGAA

SEQ ID NO: 104911 - protein, 21 aa, Artificial Sequence
  Description of Artificial Sequence: Synthetic peptide
  Seed: MDPRMCSLMQGSTLPRRSGAA
MDPRMYSLAQTSTSPRRSGAA

SEQ ID NO: 104912 - protein, 21 aa, Artificial Sequence
  Description of Artificial Sequence: Synthetic peptide
  Seed: MDPRMCSLMQGSTLPRRSGAA
MDPRMYSLAQTSTVPRRSGAA

SEQ ID NO: 104913 - protein, 21 aa, Artificial Sequence
  Description of Artificial Sequence: Synthetic peptide
  Seed: MDPRMCSLMQGSTLPRRSGAA
MDPRMYSLAQVSTAPRRSGAA

SEQ ID NO: 104914 - protein, 21 aa, Artificial Sequence
  Description of Artificial Sequence: Synthetic peptide
  Seed: MDPRMCSLMQGSTLPRRSGAA
MDPRMYSLAQVSTIPRRSGAA

SEQ ID NO: 104915 - protein, 21 aa, Artificial Sequence
  Description of Artificial Sequence: Synthetic peptide
  Seed: MDPRMCSLMQGSTLPRRSGAA
MDPRMYSLAQVSTLPRRSGAA

SEQ ID NO: 104916 - protein, 21 aa, Artificial Sequence
  Description of Artificial Sequence: Synthetic peptide
  Seed: MDPRMCSLMQGSTLPRRSGAA
MDPRMYSLAQVSTNPRRSGAA

SEQ ID NO: 104917 - protein, 21 aa, Artificial Sequence
  Description of Artificial Sequence: Synthetic peptide
  Seed: MDPRMCSLMQGSTLPRRSGAA
MDPRMYSLAQVSTSPRRSGAA

SEQ ID NO: 104918 - protein, 21 aa, Artificial Sequence
  Description of Artificial Sequence: Synthetic peptide
  Seed: MDPRMCSLMQGSTLPRRSGAA
MDPRMYSLAQVSTTPRRSGAA

SEQ ID NO: 104919 - protein, 21 aa, Artificial Sequence
  Description of Artificial Sequence: Synthetic peptide
  Seed: MDPRMCSLMQGSTLPRRSGAA
MDPRMYSLAQVSTVPRRSGAA

SEQ ID NO: 104920 - protein, 21 aa, Artificial Sequence
  Description of Artificial Sequence: Synthetic peptide
  Seed: MDPRMCSLMQGSTLPRRSGAA
MDPRMYSLEQASTIPRRSGAA

SEQ ID NO: 104921 - protein, 21 aa, Artificial Sequence
  Description of Artificial Sequence: Synthetic peptide
  Seed: MDPRMCSLMQGSTLPRRSGAA
MDPRMYSLEQASTLPRRSGAA

SEQ ID NO: 104922 - protein, 21 aa, Artificial Sequence
  Description of Artificial Sequence: Synthetic peptide
  Seed: MDPRMCSLMQGSTLPRRSGAA
MDPRMYSLEQASTVPRRSGAA

SEQ ID NO: 104923 - protein, 21 aa, Artificial Sequence
  Description of Artificial Sequence: Synthetic peptide
  Seed: MDPRMCSLMQGSTLPRRSGAA
MDPRMYSLFQASTAPRRSGAA

SEQ ID NO: 104924 - protein, 21 aa, Artificial Sequence
  Description of Artificial Sequence: Synthetic peptide
  Seed: MDPRMCSLMQGSTLPRRSGAA
MDPRMYSLFQASTIPRRSGAA

SEQ ID NO: 104925 - protein, 21 aa, Artificial Sequence
  Description of Artificial Sequence: Synthetic peptide
  Seed: MDPRMCSLMQGSTLPRRSGAA
MDPRMYSLFQASTLPRRSGAA

SEQ ID NO: 104926 - protein, 21 aa, Artificial Sequence
  Description of Artificial Sequence: Synthetic peptide
  Seed: MDPRMCSLMQGSTLPRRSGAA
MDPRMYSLFQASTNPRRSGAA

SEQ ID NO: 104927 - protein, 21 aa, Artificial Sequence
  Description of Artificial Sequence: Synthetic peptide
  Seed: MDPRMCSLMQGSTLPRRSGAA
MDPRMYSLFQASTSPRRSGAA

SEQ ID NO: 104928 - protein, 21 aa, Artificial Sequence
  Description of Artificial Sequence: Synthetic peptide
  Seed: MDPRMCSLMQGSTLPRRSGAA
MDPRMYSLFQASTVPRRSGAA

SEQ ID NO: 104929 - protein, 21 aa, Artificial Sequence
  Description of Artificial Sequence: Synthetic peptide
  Seed: MDPRMCSLMQGSTLPRRSGAA
MDPRMYSLFQPSTAPRRSGAA

SEQ ID NO: 104930 - protein, 21 aa, Artificial Sequence
  Description of Artificial Sequence: Synthetic peptide
  Seed: MDPRMCSLMQGSTLPRRSGAA
MDPRMYSLFQVSTAPRRSGAA

SEQ ID NO: 104931 - protein, 21 aa, Artificial Sequence
  Description of Artificial Sequence: Synthetic peptide
  Seed: MDPRMCSLMQGSTLPRRSGAA
MDPRMYSLGQASTIPRRSGAA

SEQ ID NO: 104932 - protein, 21 aa, Artificial Sequence
  Description of Artificial Sequence: Synthetic peptide
  Seed: MDPRMCSLMQGSTLPRRSGAA
MDPRMYSLGQASTLPRRSGAA

SEQ ID NO: 104933 - protein, 21 aa, Artificial Sequence
  Description of Artificial Sequence: Synthetic peptide
  Seed: MDPRMCSLMQGSTLPRRSGAA
MDPRMYSLGQASTVPRRSGAA

SEQ ID NO: 104934 - protein, 21 aa, Artificial Sequence
  Description of Artificial Sequence: Synthetic peptide
  Seed: MDPRMCSLMQGSTLPRRSGAA
MDPRMYSLIQASTAPRRSGAA

SEQ ID NO: 104935 - protein, 21 aa, Artificial Sequence
  Description of Artificial Sequence: Synthetic peptide
  Seed: MDPRMCSLMQGSTLPRRSGAA
MDPRMYSLIQASTGPRRSGAA

SEQ ID NO: 104936 - protein, 21 aa, Artificial Sequence
  Description of Artificial Sequence: Synthetic peptide
  Seed: MDPRMCSLMQGSTLPRRSGAA
MDPRMYSLIQASTHPRRSGAA

SEQ ID NO: 104937 - protein, 21 aa, Artificial Sequence
  Description of Artificial Sequence: Synthetic peptide
  Seed: MDPRMCSLMQGSTLPRRSGAA
MDPRMYSLIQASTIPRRSGAA

SEQ ID NO: 104938 - protein, 21 aa, Artificial Sequence
  Description of Artificial Sequence: Synthetic peptide
  Seed: MDPRMCSLMQGSTLPRRSGAA
MDPRMYSLIQASTLPRRSGAA

SEQ ID NO: 104939 - protein, 21 aa, Artificial Sequence
  Description of Artificial Sequence: Synthetic peptide
  Seed: MDPRMCSLMQGSTLPRRSGAA
MDPRMYSLIQASTMPRRSGAA

SEQ ID NO: 104940 - protein, 21 aa, Artificial Sequence
  Description of Artificial Sequence: Synthetic peptide
  Seed: MDPRMCSLMQGSTLPRRSGAA
MDPRMYSLIQASTNPRRSGAA

SEQ ID NO: 104941 - protein, 21 aa, Artificial Sequence
  Description of Artificial Sequence: Synthetic peptide
  Seed: MDPRMCSLMQGSTLPRRSGAA
MDPRMYSLIQASTQPRRSGAA

SEQ ID NO: 104942 - protein, 21 aa, Artificial Sequence
  Description of Artificial Sequence: Synthetic peptide
  Seed: MDPRMCSLMQGSTLPRRSGAA
MDPRMYSLIQASTSPRRSGAA

SEQ ID NO: 104943 - protein, 21 aa, Artificial Sequence
  Description of Artificial Sequence: Synthetic peptide
  Seed: MDPRMCSLMQGSTLPRRSGAA
MDPRMYSLIQASTTPRRSGAA

SEQ ID NO: 104944 - protein, 21 aa, Artificial Sequence
  Description of Artificial Sequence: Synthetic peptide
  Seed: MDPRMCSLMQGSTLPRRSGAA
MDPRMYSLIQASTVPRRSGAA

SEQ ID NO: 104945 - protein, 21 aa, Artificial Sequence
  Description of Artificial Sequence: Synthetic peptide
  Seed: MDPRMCSLMQGSTLPRRSGAA
MDPRMYSLIQGSTAPRRSGAA

SEQ ID NO: 104946 - protein, 21 aa, Artificial Sequence
  Description of Artificial Sequence: Synthetic peptide
  Seed: MDPRMCSLMQGSTLPRRSGAA
MDPRMYSLIQGSTIPRRSGAA

SEQ ID NO: 104947 - protein, 21 aa, Artificial Sequence
  Description of Artificial Sequence: Synthetic peptide
  Seed: MDPRMCSLMQGSTLPRRSGAA
MDPRMYSLIQGSTLPRRSGAA

SEQ ID NO: 104948 - protein, 21 aa, Artificial Sequence
  Description of Artificial Sequence: Synthetic peptide
  Seed: MDPRMCSLMQGSTLPRRSGAA
MDPRMYSLIQGSTMPRRSGAA

SEQ ID NO: 104949 - protein, 21 aa, Artificial Sequence
  Description of Artificial Sequence: Synthetic peptide
  Seed: MDPRMCSLMQGSTLPRRSGAA
MDPRMYSLIQGSTNPRRSGAA

SEQ ID NO: 104950 - protein, 21 aa, Artificial Sequence
  Description of Artificial Sequence: Synthetic peptide
  Seed: MDPRMCSLMQGSTLPRRSGAA
MDPRMYSLIQGSTSPRRSGAA

SEQ ID NO: 104951 - protein, 21 aa, Artificial Sequence
  Description of Artificial Sequence: Synthetic peptide
  Seed: MDPRMCSLMQGSTLPRRSGAA
MDPRMYSLIQGSTTPRRSGAA

SEQ ID NO: 104952 - protein, 21 aa, Artificial Sequence
  Description of Artificial Sequence: Synthetic peptide
  Seed: MDPRMCSLMQGSTLPRRSGAA
MDPRMYSLIQGSTVPRRSGAA

SEQ ID NO: 104953 - protein, 21 aa, Artificial Sequence
  Description of Artificial Sequence: Synthetic peptide
  Seed: MDPRMCSLMQGSTLPRRSGAA
MDPRMYSLIQISTAPRRSGAA

SEQ ID NO: 104954 - protein, 21 aa, Artificial Sequence
  Description of Artificial Sequence: Synthetic peptide
  Seed: MDPRMCSLMQGSTLPRRSGAA
MDPRMYSLIQISTNPRRSGAA

SEQ ID NO: 104955 - protein, 21 aa, Artificial Sequence
  Description of Artificial Sequence: Synthetic peptide
  Seed: MDPRMCSLMQGSTLPRRSGAA
MDPRMYSLIQISTSPRRSGAA

SEQ ID NO: 104956 - protein, 21 aa, Artificial Sequence
  Description of Artificial Sequence: Synthetic peptide
  Seed: MDPRMCSLMQGSTLPRRSGAA
MDPRMYSLIQISTTPRRSGAA

SEQ ID NO: 104957 - protein, 21 aa, Artificial Sequence
  Description of Artificial Sequence: Synthetic peptide
  Seed: MDPRMCSLMQGSTLPRRSGAA
MDPRMYSLIQISTVPRRSGAA

SEQ ID NO: 104958 - protein, 21 aa, Artificial Sequence
  Description of Artificial Sequence: Synthetic peptide
  Seed: MDPRMCSLMQGSTLPRRSGAA
MDPRMYSLIQLSTAPRRSGAA

SEQ ID NO: 104959 - protein, 21 aa, Artificial Sequence
  Description of Artificial Sequence: Synthetic peptide
  Seed: MDPRMCSLMQGSTLPRRSGAA
MDPRMYSLIQMSTAPRRSGAA

SEQ ID NO: 104960 - protein, 21 aa, Artificial Sequence
  Description of Artificial Sequence: Synthetic peptide
  Seed: MDPRMCSLMQGSTLPRRSGAA
MDPRMYSLIQNSTAPRRSGAA

SEQ ID NO: 104961 - protein, 21 aa, Artificial Sequence
  Description of Artificial Sequence: Synthetic peptide
  Seed: MDPRMCSLMQGSTLPRRSGAA
MDPRMYSLIQNSTIPRRSGAA

SEQ ID NO: 104962 - protein, 21 aa, Artificial Sequence
  Description of Artificial Sequence: Synthetic peptide
  Seed: MDPRMCSLMQGSTLPRRSGAA
MDPRMYSLIQNSTLPRRSGAA

SEQ ID NO: 104963 - protein, 21 aa, Artificial Sequence
  Description of Artificial Sequence: Synthetic peptide
  Seed: MDPRMCSLMQGSTLPRRSGAA
MDPRMYSLIQNSTNPRRSGAA

SEQ ID NO: 104964 - protein, 21 aa, Artificial Sequence
  Description of Artificial Sequence: Synthetic peptide
  Seed: MDPRMCSLMQGSTLPRRSGAA
MDPRMYSLIQNSTSPRRSGAA

SEQ ID NO: 104965 - protein, 21 aa, Artificial Sequence
  Description of Artificial Sequence: Synthetic peptide
  Seed: MDPRMCSLMQGSTLPRRSGAA
MDPRMYSLIQNSTVPRRSGAA

SEQ ID NO: 104966 - protein, 21 aa, Artificial Sequence
  Description of Artificial Sequence: Synthetic peptide
  Seed: MDPRMCSLMQGSTLPRRSGAA
MDPRMYSLIQPSTAPRRSGAA

SEQ ID NO: 104967 - protein, 21 aa, Artificial Sequence
  Description of Artificial Sequence: Synthetic peptide
  Seed: MDPRMCSLMQGSTLPRRSGAA
MDPRMYSLIQPSTGPRRSGAA

SEQ ID NO: 104968 - protein, 21 aa, Artificial Sequence
  Description of Artificial Sequence: Synthetic peptide
  Seed: MDPRMCSLMQGSTLPRRSGAA
MDPRMYSLIQPSTIPRRSGAA

SEQ ID NO: 104969 - protein, 21 aa, Artificial Sequence
  Description of Artificial Sequence: Synthetic peptide
  Seed: MDPRMCSLMQGSTLPRRSGAA
MDPRMYSLIQPSTLPRRSGAA

SEQ ID NO: 104970 - protein, 21 aa, Artificial Sequence
  Description of Artificial Sequence: Synthetic peptide
  Seed: MDPRMCSLMQGSTLPRRSGAA
MDPRMYSLIQPSTMPRRSGAA

SEQ ID NO: 104971 - protein, 21 aa, Artificial Sequence
  Description of Artificial Sequence: Synthetic peptide
  Seed: MDPRMCSLMQGSTLPRRSGAA
MDPRMYSLIQPSTNPRRSGAA

SEQ ID NO: 104972 - protein, 21 aa, Artificial Sequence
  Description of Artificial Sequence: Synthetic peptide
  Seed: MDPRMCSLMQGSTLPRRSGAA
MDPRMYSLIQPSTQPRRSGAA

SEQ ID NO: 104973 - protein, 21 aa, Artificial Sequence
  Description of Artificial Sequence: Synthetic peptide
  Seed: MDPRMCSLMQGSTLPRRSGAA
MDPRMYSLIQPSTSPRRSGAA

SEQ ID NO: 104974 - protein, 21 aa, Artificial Sequence
  Description of Artificial Sequence: Synthetic peptide
  Seed: MDPRMCSLMQGSTLPRRSGAA
MDPRMYSLIQPSTTPRRSGAA

SEQ ID NO: 104975 - protein, 21 aa, Artificial Sequence
  Description of Artificial Sequence: Synthetic peptide
  Seed: MDPRMCSLMQGSTLPRRSGAA
MDPRMYSLIQPSTVPRRSGAA

SEQ ID NO: 104976 - protein, 21 aa, Artificial Sequence
  Description of Artificial Sequence: Synthetic peptide
  Seed: MDPRMCSLMQGSTLPRRSGAA
MDPRMYSLIQSSTAPRRSGAA

SEQ ID NO: 104977 - protein, 21 aa, Artificial Sequence
  Description of Artificial Sequence: Synthetic peptide
  Seed: MDPRMCSLMQGSTLPRRSGAA
MDPRMYSLIQSSTGPRRSGAA

SEQ ID NO: 104978 - protein, 21 aa, Artificial Sequence
  Description of Artificial Sequence: Synthetic peptide
  Seed: MDPRMCSLMQGSTLPRRSGAA
MDPRMYSLIQSSTIPRRSGAA

SEQ ID NO: 104979 - protein, 21 aa, Artificial Sequence
  Description of Artificial Sequence: Synthetic peptide
  Seed: MDPRMCSLMQGSTLPRRSGAA
MDPRMYSLIQSSTLPRRSGAA

SEQ ID NO: 104980 - protein, 21 aa, Artificial Sequence
  Description of Artificial Sequence: Synthetic peptide
  Seed: MDPRMCSLMQGSTLPRRSGAA
MDPRMYSLIQSSTMPRRSGAA

SEQ ID NO: 104981 - protein, 21 aa, Artificial Sequence
  Description of Artificial Sequence: Synthetic peptide
  Seed: MDPRMCSLMQGSTLPRRSGAA
MDPRMYSLIQSSTNPRRSGAA

SEQ ID NO: 104982 - protein, 21 aa, Artificial Sequence
  Description of Artificial Sequence: Synthetic peptide
  Seed: MDPRMCSLMQGSTLPRRSGAA
MDPRMYSLIQSSTSPRRSGAA

SEQ ID NO: 104983 - protein, 21 aa, Artificial Sequence
  Description of Artificial Sequence: Synthetic peptide
  Seed: MDPRMCSLMQGSTLPRRSGAA
MDPRMYSLIQSSTTPRRSGAA

SEQ ID NO: 104984 - protein, 21 aa, Artificial Sequence
  Description of Artificial Sequence: Synthetic peptide
  Seed: MDPRMCSLMQGSTLPRRSGAA
MDPRMYSLIQSSTVPRRSGAA

SEQ ID NO: 104985 - protein, 21 aa, Artificial Sequence
  Description of Artificial Sequence: Synthetic peptide
  Seed: MDPRMCSLMQGSTLPRRSGAA
MDPRMYSLIQTSTAPRRSGAA

SEQ ID NO: 104986 - protein, 21 aa, Artificial Sequence
  Description of Artificial Sequence: Synthetic peptide
  Seed: MDPRMCSLMQGSTLPRRSGAA
MDPRMYSLIQTSTGPRRSGAA

SEQ ID NO: 104987 - protein, 21 aa, Artificial Sequence
  Description of Artificial Sequence: Synthetic peptide
  Seed: MDPRMCSLMQGSTLPRRSGAA
MDPRMYSLIQTSTIPRRSGAA

SEQ ID NO: 104988 - protein, 21 aa, Artificial Sequence
  Description of Artificial Sequence: Synthetic peptide
  Seed: MDPRMCSLMQGSTLPRRSGAA
MDPRMYSLIQTSTLPRRSGAA

SEQ ID NO: 104989 - protein, 21 aa, Artificial Sequence
  Description of Artificial Sequence: Synthetic peptide
  Seed: MDPRMCSLMQGSTLPRRSGAA
MDPRMYSLIQTSTMPRRSGAA

SEQ ID NO: 104990 - protein, 21 aa, Artificial Sequence
  Description of Artificial Sequence: Synthetic peptide
  Seed: MDPRMCSLMQGSTLPRRSGAA
MDPRMYSLIQTSTNPRRSGAA

SEQ ID NO: 104991 - protein, 21 aa, Artificial Sequence
  Description of Artificial Sequence: Synthetic peptide
  Seed: MDPRMCSLMQGSTLPRRSGAA
MDPRMYSLIQTSTSPRRSGAA

SEQ ID NO: 104992 - protein, 21 aa, Artificial Sequence
  Description of Artificial Sequence: Synthetic peptide
  Seed: MDPRMCSLMQGSTLPRRSGAA
MDPRMYSLIQTSTTPRRSGAA

SEQ ID NO: 104993 - protein, 21 aa, Artificial Sequence
  Description of Artificial Sequence: Synthetic peptide
  Seed: MDPRMCSLMQGSTLPRRSGAA
MDPRMYSLIQTSTVPRRSGAA

SEQ ID NO: 104994 - protein, 21 aa, Artificial Sequence
  Description of Artificial Sequence: Synthetic peptide
  Seed: MDPRMCSLMQGSTLPRRSGAA
MDPRMYSLIQVSTAPRRSGAA

SEQ ID NO: 104995 - protein, 21 aa, Artificial Sequence
  Description of Artificial Sequence: Synthetic peptide
  Seed: MDPRMCSLMQGSTLPRRSGAA
MDPRMYSLIQVSTGPRRSGAA

SEQ ID NO: 104996 - protein, 21 aa, Artificial Sequence
  Description of Artificial Sequence: Synthetic peptide
  Seed: MDPRMCSLMQGSTLPRRSGAA
MDPRMYSLIQVSTIPRRSGAA

SEQ ID NO: 104997 - protein, 21 aa, Artificial Sequence
  Description of Artificial Sequence: Synthetic peptide
  Seed: MDPRMCSLMQGSTLPRRSGAA
MDPRMYSLIQVSTLPRRSGAA

SEQ ID NO: 104998 - protein, 21 aa, Artificial Sequence
  Description of Artificial Sequence: Synthetic peptide
  Seed: MDPRMCSLMQGSTLPRRSGAA
MDPRMYSLIQVSTMPRRSGAA

SEQ ID NO: 104999 - protein, 21 aa, Artificial Sequence
  Description of Artificial Sequence: Synthetic peptide
  Seed: MDPRMCSLMQGSTLPRRSGAA
MDPRMYSLIQVSTNPRRSGAA

SEQ ID NO: 105000 - protein, 21 aa, Artificial Sequence
  Description of Artificial Sequence: Synthetic peptide
  Seed: MDPRMCSLMQGSTLPRRSGAA
MDPRMYSLIQVSTSPRRSGAA

SEQ ID NO: 105001 - protein, 21 aa, Artificial Sequence
  Description of Artificial Sequence: Synthetic peptide
  Seed: MDPRMCSLMQGSTLPRRSGAA
MDPRMYSLIQVSTTPRRSGAA

SEQ ID NO: 105002 - protein, 21 aa, Artificial Sequence
  Description of Artificial Sequence: Synthetic peptide
  Seed: MDPRMCSLMQGSTLPRRSGAA
MDPRMYSLIQVSTVPRRSGAA

SEQ ID NO: 105003 - protein, 21 aa, Artificial Sequence
  Description of Artificial Sequence: Synthetic peptide
  Seed: MDPRMCSLMQGSTLPRRSGAA
MDPRMYSLLQASTAPRRSGAA

SEQ ID NO: 105004 - protein, 21 aa, Artificial Sequence
  Description of Artificial Sequence: Synthetic peptide
  Seed: MDPRMCSLMQGSTLPRRSGAA
MDPRMYSLLQASTCPRRSGAA

SEQ ID NO: 105005 - protein, 21 aa, Artificial Sequence
  Description of Artificial Sequence: Synthetic peptide
  Seed: MDPRMCSLMQGSTLPRRSGAA
MDPRMYSLLQASTDPRRSGAA

SEQ ID NO: 105006 - protein, 21 aa, Artificial Sequence
  Description of Artificial Sequence: Synthetic peptide
  Seed: MDPRMCSLMQGSTLPRRSGAA
MDPRMYSLLQASTEPRRSGAA

SEQ ID NO: 105007 - protein, 21 aa, Artificial Sequence
  Description of Artificial Sequence: Synthetic peptide
  Seed: MDPRMCSLMQGSTLPRRSGAA
MDPRMYSLLQASTFPRRSGAA

SEQ ID NO: 105008 - protein, 21 aa, Artificial Sequence
  Description of Artificial Sequence: Synthetic peptide
  Seed: MDPRMCSLMQGSTLPRRSGAA
MDPRMYSLLQASTGPRRSGAA

SEQ ID NO: 105009 - protein, 21 aa, Artificial Sequence
  Description of Artificial Sequence: Synthetic peptide
  Seed: MDPRMCSLMQGSTLPRRSGAA
MDPRMYSLLQASTHPRRSGAA

SEQ ID NO: 105010 - protein, 21 aa, Artificial Sequence
  Description of Artificial Sequence: Synthetic peptide
  Seed: MDPRMCSLMQGSTLPRRSGAA
MDPRMYSLLQASTIPRRSGAA

SEQ ID NO: 105011 - protein, 21 aa, Artificial Sequence
  Description of Artificial Sequence: Synthetic peptide
  Seed: MDPRMCSLMQGSTLPRRSGAA
MDPRMYSLLQASTLPRRSGAA

SEQ ID NO: 105012 - protein, 21 aa, Artificial Sequence
  Description of Artificial Sequence: Synthetic peptide
  Seed: MDPRMCSLMQGSTLPRRSGAA
MDPRMYSLLQASTMPRRSGAA

SEQ ID NO: 105013 - protein, 21 aa, Artificial Sequence
  Description of Artificial Sequence: Synthetic peptide
  Seed: MDPRMCSLMQGSTLPRRSGAA
MDPRMYSLLQASTNPRRSGAA

SEQ ID NO: 105014 - protein, 21 aa, Artificial Sequence
  Description of Artificial Sequence: Synthetic peptide
  Seed: MDPRMCSLMQGSTLPRRSGAA
MDPRMYSLLQASTPPRRSGAA

SEQ ID NO: 105015 - protein, 21 aa, Artificial Sequence
  Description of Artificial Sequence: Synthetic peptide
  Seed: MDPRMCSLMQGSTLPRRSGAA
MDPRMYSLLQASTQPRRSGAA

SEQ ID NO: 105016 - protein, 21 aa, Artificial Sequence
  Description of Artificial Sequence: Synthetic peptide
  Seed: MDPRMCSLMQGSTLPRRSGAA
MDPRMYSLLQASTSPRRSGAA

SEQ ID NO: 105017 - protein, 21 aa, Artificial Sequence
  Description of Artificial Sequence: Synthetic peptide
  Seed: MDPRMCSLMQGSTLPRRSGAA
MDPRMYSLLQASTTPRRSGAA

SEQ ID NO: 105018 - protein, 21 aa, Artificial Sequence
  Description of Artificial Sequence: Synthetic peptide
  Seed: MDPRMCSLMQGSTLPRRSGAA
MDPRMYSLLQASTVPRRSGAA

SEQ ID NO: 105019 - protein, 21 aa, Artificial Sequence
  Description of Artificial Sequence: Synthetic peptide
  Seed: MDPRMCSLMQGSTLPRRSGAA
MDPRMYSLLQGSTAPRRSGAA

SEQ ID NO: 105020 - protein, 21 aa, Artificial Sequence
  Description of Artificial Sequence: Synthetic peptide
  Seed: MDPRMCSLMQGSTLPRRSGAA
MDPRMYSLLQGSTCPRRSGAA

SEQ ID NO: 105021 - protein, 21 aa, Artificial Sequence
  Description of Artificial Sequence: Synthetic peptide
  Seed: MDPRMCSLMQGSTLPRRSGAA
MDPRMYSLLQGSTFPRRSGAA

SEQ ID NO: 105022 - protein, 21 aa, Artificial Sequence
  Description of Artificial Sequence: Synthetic peptide
  Seed: MDPRMCSLMQGSTLPRRSGAA
MDPRMYSLLQGSTGPRRSGAA

SEQ ID NO: 105023 - protein, 21 aa, Artificial Sequence
  Description of Artificial Sequence: Synthetic peptide
  Seed: MDPRMCSLMQGSTLPRRSGAA
MDPRMYSLLQGSTIPRRSGAA

SEQ ID NO: 105024 - protein, 21 aa, Artificial Sequence
  Description of Artificial Sequence: Synthetic peptide
  Seed: MDPRMCSLMQGSTLPRRSGAA
MDPRMYSLLQGSTLPRRSGAA

SEQ ID NO: 105025 - protein, 21 aa, Artificial Sequence
  Description of Artificial Sequence: Synthetic peptide
  Seed: MDPRMCSLMQGSTLPRRSGAA
MDPRMYSLLQGSTMPRRSGAA

SEQ ID NO: 105026 - protein, 21 aa, Artificial Sequence
  Description of Artificial Sequence: Synthetic peptide
  Seed: MDPRMCSLMQGSTLPRRSGAA
MDPRMYSLLQGSTNPRRSGAA

SEQ ID NO: 105027 - protein, 21 aa, Artificial Sequence
  Description of Artificial Sequence: Synthetic peptide
  Seed: MDPRMCSLMQGSTLPRRSGAA
MDPRMYSLLQGSTSPRRSGAA

SEQ ID NO: 105028 - protein, 21 aa, Artificial Sequence
  Description of Artificial Sequence: Synthetic peptide
  Seed: MDPRMCSLMQGSTLPRRSGAA
MDPRMYSLLQGSTTPRRSGAA

SEQ ID NO: 105029 - protein, 21 aa, Artificial Sequence
  Description of Artificial Sequence: Synthetic peptide
  Seed: MDPRMCSLMQGSTLPRRSGAA
MDPRMYSLLQGSTVPRRSGAA

SEQ ID NO: 105030 - protein, 21 aa, Artificial Sequence
  Description of Artificial Sequence: Synthetic peptide
  Seed: MDPRMCSLMQGSTLPRRSGAA
MDPRMYSLLQISTAPRRSGAA

SEQ ID NO: 105031 - protein, 21 aa, Artificial Sequence
  Description of Artificial Sequence: Synthetic peptide
  Seed: MDPRMCSLMQGSTLPRRSGAA
MDPRMYSLLQISTGPRRSGAA

SEQ ID NO: 105032 - protein, 21 aa, Artificial Sequence
  Description of Artificial Sequence: Synthetic peptide
  Seed: MDPRMCSLMQGSTLPRRSGAA
MDPRMYSLLQISTIPRRSGAA

SEQ ID NO: 105033 - protein, 21 aa, Artificial Sequence
  Description of Artificial Sequence: Synthetic peptide
  Seed: MDPRMCSLMQGSTLPRRSGAA
MDPRMYSLLQISTLPRRSGAA

SEQ ID NO: 105034 - protein, 21 aa, Artificial Sequence
  Description of Artificial Sequence: Synthetic peptide
  Seed: MDPRMCSLMQGSTLPRRSGAA
MDPRMYSLLQISTMPRRSGAA

SEQ ID NO: 105035 - protein, 21 aa, Artificial Sequence
  Description of Artificial Sequence: Synthetic peptide
  Seed: MDPRMCSLMQGSTLPRRSGAA
MDPRMYSLLQISTNPRRSGAA

SEQ ID NO: 105036 - protein, 21 aa, Artificial Sequence
  Description of Artificial Sequence: Synthetic peptide
  Seed: MDPRMCSLMQGSTLPRRSGAA
MDPRMYSLLQISTSPRRSGAA

SEQ ID NO: 105037 - protein, 21 aa, Artificial Sequence
  Description of Artificial Sequence: Synthetic peptide
  Seed: MDPRMCSLMQGSTLPRRSGAA
MDPRMYSLLQISTTPRRSGAA

SEQ ID NO: 105038 - protein, 21 aa, Artificial Sequence
  Description of Artificial Sequence: Synthetic peptide
  Seed: MDPRMCSLMQGSTLPRRSGAA
MDPRMYSLLQISTVPRRSGAA

SEQ ID NO: 105039 - protein, 21 aa, Artificial Sequence
  Description of Artificial Sequence: Synthetic peptide
  Seed: MDPRMCSLMQGSTLPRRSGAA
MDPRMYSLLQLSTAPRRSGAA

SEQ ID NO: 105040 - protein, 21 aa, Artificial Sequence
  Description of Artificial Sequence: Synthetic peptide
  Seed: MDPRMCSLMQGSTLPRRSGAA
MDPRMYSLLQLSTNPRRSGAA

SEQ ID NO: 105041 - protein, 21 aa, Artificial Sequence
  Description of Artificial Sequence: Synthetic peptide
  Seed: MDPRMCSLMQGSTLPRRSGAA
MDPRMYSLLQLSTSPRRSGAA

SEQ ID NO: 105042 - protein, 21 aa, Artificial Sequence
  Description of Artificial Sequence: Synthetic peptide
  Seed: MDPRMCSLMQGSTLPRRSGAA
MDPRMYSLLQMSTAPRRSGAA

SEQ ID NO: 105043 - protein, 21 aa, Artificial Sequence
  Description of Artificial Sequence: Synthetic peptide
  Seed: MDPRMCSLMQGSTLPRRSGAA
MDPRMYSLLQMSTNPRRSGAA

SEQ ID NO: 105044 - protein, 21 aa, Artificial Sequence
  Description of Artificial Sequence: Synthetic peptide
  Seed: MDPRMCSLMQGSTLPRRSGAA
MDPRMYSLLQMSTSPRRSGAA

SEQ ID NO: 105045 - protein, 21 aa, Artificial Sequence
  Description of Artificial Sequence: Synthetic peptide
  Seed: MDPRMCSLMQGSTLPRRSGAA
MDPRMYSLLQNSTAPRRSGAA

SEQ ID NO: 105046 - protein, 21 aa, Artificial Sequence
  Description of Artificial Sequence: Synthetic peptide
  Seed: MDPRMCSLMQGSTLPRRSGAA
MDPRMYSLLQNSTIPRRSGAA

SEQ ID NO: 105047 - protein, 21 aa, Artificial Sequence
  Description of Artificial Sequence: Synthetic peptide
  Seed: MDPRMCSLMQGSTLPRRSGAA
MDPRMYSLLQNSTLPRRSGAA

SEQ ID NO: 105048 - protein, 21 aa, Artificial Sequence
  Description of Artificial Sequence: Synthetic peptide
  Seed: MDPRMCSLMQGSTLPRRSGAA
MDPRMYSLLQNSTMPRRSGAA

SEQ ID NO: 105049 - protein, 21 aa, Artificial Sequence
  Description of Artificial Sequence: Synthetic peptide
  Seed: MDPRMCSLMQGSTLPRRSGAA
MDPRMYSLLQNSTNPRRSGAA

SEQ ID NO: 105050 - protein, 21 aa, Artificial Sequence
  Description of Artificial Sequence: Synthetic peptide
  Seed: MDPRMCSLMQGSTLPRRSGAA
MDPRMYSLLQNSTSPRRSGAA

SEQ ID NO: 105051 - protein, 21 aa, Artificial Sequence
  Description of Artificial Sequence: Synthetic peptide
  Seed: MDPRMCSLMQGSTLPRRSGAA
MDPRMYSLLQNSTTPRRSGAA

SEQ ID NO: 105052 - protein, 21 aa, Artificial Sequence
  Description of Artificial Sequence: Synthetic peptide
  Seed: MDPRMCSLMQGSTLPRRSGAA
MDPRMYSLLQNSTVPRRSGAA

SEQ ID NO: 105053 - protein, 21 aa, Artificial Sequence
  Description of Artificial Sequence: Synthetic peptide
  Seed: MDPRMCSLMQGSTLPRRSGAA
MDPRMYSLLQPSTAPRRSGAA

SEQ ID NO: 105054 - protein, 21 aa, Artificial Sequence
  Description of Artificial Sequence: Synthetic peptide
  Seed: MDPRMCSLMQGSTLPRRSGAA
MDPRMYSLLQPSTGPRRSGAA

SEQ ID NO: 105055 - protein, 21 aa, Artificial Sequence
  Description of Artificial Sequence: Synthetic peptide
  Seed: MDPRMCSLMQGSTLPRRSGAA
MDPRMYSLLQPSTHPRRSGAA

SEQ ID NO: 105056 - protein, 21 aa, Artificial Sequence
  Description of Artificial Sequence: Synthetic peptide
  Seed: MDPRMCSLMQGSTLPRRSGAA
MDPRMYSLLQPSTIPRRSGAA

SEQ ID NO: 105057 - protein, 21 aa, Artificial Sequence
  Description of Artificial Sequence: Synthetic peptide
  Seed: MDPRMCSLMQGSTLPRRSGAA
MDPRMYSLLQPSTLPRRSGAA

SEQ ID NO: 105058 - protein, 21 aa, Artificial Sequence
  Description of Artificial Sequence: Synthetic peptide
  Seed: MDPRMCSLMQGSTLPRRSGAA
MDPRMYSLLQPSTMPRRSGAA

SEQ ID NO: 105059 - protein, 21 aa, Artificial Sequence
  Description of Artificial Sequence: Synthetic peptide
  Seed: MDPRMCSLMQGSTLPRRSGAA
MDPRMYSLLQPSTNPRRSGAA

SEQ ID NO: 105060 - protein, 21 aa, Artificial Sequence
  Description of Artificial Sequence: Synthetic peptide
  Seed: MDPRMCSLMQGSTLPRRSGAA
MDPRMYSLLQPSTQPRRSGAA

SEQ ID NO: 105061 - protein, 21 aa, Artificial Sequence
  Description of Artificial Sequence: Synthetic peptide
  Seed: MDPRMCSLMQGSTLPRRSGAA
MDPRMYSLLQPSTSPRRSGAA

SEQ ID NO: 105062 - protein, 21 aa, Artificial Sequence
  Description of Artificial Sequence: Synthetic peptide
  Seed: MDPRMCSLMQGSTLPRRSGAA
MDPRMYSLLQPSTTPRRSGAA

SEQ ID NO: 105063 - protein, 21 aa, Artificial Sequence
  Description of Artificial Sequence: Synthetic peptide
  Seed: MDPRMCSLMQGSTLPRRSGAA
MDPRMYSLLQPSTVPRRSGAA

SEQ ID NO: 105064 - protein, 21 aa, Artificial Sequence
  Description of Artificial Sequence: Synthetic peptide
  Seed: MDPRMCSLMQGSTLPRRSGAA
MDPRMYSLLQSSTAPRRSGAA

SEQ ID NO: 105065 - protein, 21 aa, Artificial Sequence
  Description of Artificial Sequence: Synthetic peptide
  Seed: MDPRMCSLMQGSTLPRRSGAA
MDPRMYSLLQSSTGPRRSGAA

SEQ ID NO: 105066 - protein, 21 aa, Artificial Sequence
  Description of Artificial Sequence: Synthetic peptide
  Seed: MDPRMCSLMQGSTLPRRSGAA
MDPRMYSLLQSSTIPRRSGAA

SEQ ID NO: 105067 - protein, 21 aa, Artificial Sequence
  Description of Artificial Sequence: Synthetic peptide
  Seed: MDPRMCSLMQGSTLPRRSGAA
MDPRMYSLLQSSTLPRRSGAA

SEQ ID NO: 105068 - protein, 21 aa, Artificial Sequence
  Description of Artificial Sequence: Synthetic peptide
  Seed: MDPRMCSLMQGSTLPRRSGAA
MDPRMYSLLQSSTMPRRSGAA

SEQ ID NO: 105069 - protein, 21 aa, Artificial Sequence
  Description of Artificial Sequence: Synthetic peptide
  Seed: MDPRMCSLMQGSTLPRRSGAA
MDPRMYSLLQSSTNPRRSGAA

SEQ ID NO: 105070 - protein, 21 aa, Artificial Sequence
  Description of Artificial Sequence: Synthetic peptide
  Seed: MDPRMCSLMQGSTLPRRSGAA
MDPRMYSLLQSSTSPRRSGAA

SEQ ID NO: 105071 - protein, 21 aa, Artificial Sequence
  Description of Artificial Sequence: Synthetic peptide
  Seed: MDPRMCSLMQGSTLPRRSGAA
MDPRMYSLLQSSTTPRRSGAA

SEQ ID NO: 105072 - protein, 21 aa, Artificial Sequence
  Description of Artificial Sequence: Synthetic peptide
  Seed: MDPRMCSLMQGSTLPRRSGAA
MDPRMYSLLQSSTVPRRSGAA

SEQ ID NO: 105073 - protein, 21 aa, Artificial Sequence
  Description of Artificial Sequence: Synthetic peptide
  Seed: MDPRMCSLMQGSTLPRRSGAA
MDPRMYSLLQTSTAPRRSGAA

SEQ ID NO: 105074 - protein, 21 aa, Artificial Sequence
  Description of Artificial Sequence: Synthetic peptide
  Seed: MDPRMCSLMQGSTLPRRSGAA
MDPRMYSLLQTSTGPRRSGAA

SEQ ID NO: 105075 - protein, 21 aa, Artificial Sequence
  Description of Artificial Sequence: Synthetic peptide
  Seed: MDPRMCSLMQGSTLPRRSGAA
MDPRMYSLLQTSTIPRRSGAA

SEQ ID NO: 105076 - protein, 21 aa, Artificial Sequence
  Description of Artificial Sequence: Synthetic peptide
  Seed: MDPRMCSLMQGSTLPRRSGAA
MDPRMYSLLQTSTLPRRSGAA

SEQ ID NO: 105077 - protein, 21 aa, Artificial Sequence
  Description of Artificial Sequence: Synthetic peptide
  Seed: MDPRMCSLMQGSTLPRRSGAA
MDPRMYSLLQTSTMPRRSGAA

SEQ ID NO: 105078 - protein, 21 aa, Artificial Sequence
  Description of Artificial Sequence: Synthetic peptide
  Seed: MDPRMCSLMQGSTLPRRSGAA
MDPRMYSLLQTSTNPRRSGAA

SEQ ID NO: 105079 - protein, 21 aa, Artificial Sequence
  Description of Artificial Sequence: Synthetic peptide
  Seed: MDPRMCSLMQGSTLPRRSGAA
MDPRMYSLLQTSTSPRRSGAA

SEQ ID NO: 105080 - protein, 21 aa, Artificial Sequence
  Description of Artificial Sequence: Synthetic peptide
  Seed: MDPRMCSLMQGSTLPRRSGAA
MDPRMYSLLQTSTTPRRSGAA

SEQ ID NO: 105081 - protein, 21 aa, Artificial Sequence
  Description of Artificial Sequence: Synthetic peptide
  Seed: MDPRMCSLMQGSTLPRRSGAA
MDPRMYSLLQTSTVPRRSGAA

SEQ ID NO: 105082 - protein, 21 aa, Artificial Sequence
  Description of Artificial Sequence: Synthetic peptide
  Seed: MDPRMCSLMQGSTLPRRSGAA
MDPRMYSLLQVSTAPRRSGAA

SEQ ID NO: 105083 - protein, 21 aa, Artificial Sequence
  Description of Artificial Sequence: Synthetic peptide
  Seed: MDPRMCSLMQGSTLPRRSGAA
MDPRMYSLLQVSTGPRRSGAA

SEQ ID NO: 105084 - protein, 21 aa, Artificial Sequence
  Description of Artificial Sequence: Synthetic peptide
  Seed: MDPRMCSLMQGSTLPRRSGAA
MDPRMYSLLQVSTHPRRSGAA

SEQ ID NO: 105085 - protein, 21 aa, Artificial Sequence
  Description of Artificial Sequence: Synthetic peptide
  Seed: MDPRMCSLMQGSTLPRRSGAA
MDPRMYSLLQVSTIPRRSGAA

SEQ ID NO: 105086 - protein, 21 aa, Artificial Sequence
  Description of Artificial Sequence: Synthetic peptide
  Seed: MDPRMCSLMQGSTLPRRSGAA
MDPRMYSLLQVSTLPRRSGAA

SEQ ID NO: 105087 - protein, 21 aa, Artificial Sequence
  Description of Artificial Sequence: Synthetic peptide
  Seed: MDPRMCSLMQGSTLPRRSGAA
MDPRMYSLLQVSTMPRRSGAA

SEQ ID NO: 105088 - protein, 21 aa, Artificial Sequence
  Description of Artificial Sequence: Synthetic peptide
  Seed: MDPRMCSLMQGSTLPRRSGAA
MDPRMYSLLQVSTNPRRSGAA

SEQ ID NO: 105089 - protein, 21 aa, Artificial Sequence
  Description of Artificial Sequence: Synthetic peptide
  Seed: MDPRMCSLMQGSTLPRRSGAA
MDPRMYSLLQVSTQPRRSGAA

SEQ ID NO: 105090 - protein, 21 aa, Artificial Sequence
  Description of Artificial Sequence: Synthetic peptide
  Seed: MDPRMCSLMQGSTLPRRSGAA
MDPRMYSLLQVSTSPRRSGAA

SEQ ID NO: 105091 - protein, 21 aa, Artificial Sequence
  Description of Artificial Sequence: Synthetic peptide
  Seed: MDPRMCSLMQGSTLPRRSGAA
MDPRMYSLLQVSTTPRRSGAA

SEQ ID NO: 105092 - protein, 21 aa, Artificial Sequence
  Description of Artificial Sequence: Synthetic peptide
  Seed: MDPRMCSLMQGSTLPRRSGAA
MDPRMYSLLQVSTVPRRSGAA

SEQ ID NO: 105093 - protein, 21 aa, Artificial Sequence
  Description of Artificial Sequence: Synthetic peptide
  Seed: MDPRMCSLMQGSTLPRRSGAA
MDPRMYSLMQASTAPRRSGAA

SEQ ID NO: 105094 - protein, 21 aa, Artificial Sequence
  Description of Artificial Sequence: Synthetic peptide
  Seed: MDPRMCSLMQGSTLPRRSGAA
MDPRMYSLMQASTCPRRSGAA

SEQ ID NO: 105095 - protein, 21 aa, Artificial Sequence
  Description of Artificial Sequence: Synthetic peptide
  Seed: MDPRMCSLMQGSTLPRRSGAA
MDPRMYSLMQASTDPRRSGAA

SEQ ID NO: 105096 - protein, 21 aa, Artificial Sequence
  Description of Artificial Sequence: Synthetic peptide
  Seed: MDPRMCSLMQGSTLPRRSGAA
MDPRMYSLMQASTEPRRSGAA

SEQ ID NO: 105097 - protein, 21 aa, Artificial Sequence
  Description of Artificial Sequence: Synthetic peptide
  Seed: MDPRMCSLMQGSTLPRRSGAA
MDPRMYSLMQASTFPRRSGAA

SEQ ID NO: 105098 - protein, 21 aa, Artificial Sequence
  Description of Artificial Sequence: Synthetic peptide
  Seed: MDPRMCSLMQGSTLPRRSGAA
MDPRMYSLMQASTGPRRSGAA

SEQ ID NO: 105099 - protein, 21 aa, Artificial Sequence
  Description of Artificial Sequence: Synthetic peptide
  Seed: MDPRMCSLMQGSTLPRRSGAA
MDPRMYSLMQASTHPRRSGAA

SEQ ID NO: 105100 - protein, 21 aa, Artificial Sequence
  Description of Artificial Sequence: Synthetic peptide
  Seed: MDPRMCSLMQGSTLPRRSGAA
MDPRMYSLMQASTIPRRSGAA

SEQ ID NO: 105101 - protein, 21 aa, Artificial Sequence
  Description of Artificial Sequence: Synthetic peptide
  Seed: MDPRMCSLMQGSTLPRRSGAA
MDPRMYSLMQASTLPRRSGAA

SEQ ID NO: 105102 - protein, 21 aa, Artificial Sequence
  Description of Artificial Sequence: Synthetic peptide
  Seed: MDPRMCSLMQGSTLPRRSGAA
MDPRMYSLMQASTMPRRSGAA

SEQ ID NO: 105103 - protein, 21 aa, Artificial Sequence
  Description of Artificial Sequence: Synthetic peptide
  Seed: MDPRMCSLMQGSTLPRRSGAA
MDPRMYSLMQASTNPRRSGAA

SEQ ID NO: 105104 - protein, 21 aa, Artificial Sequence
  Description of Artificial Sequence: Synthetic peptide
  Seed: MDPRMCSLMQGSTLPRRSGAA
MDPRMYSLMQASTPPRRSGAA

SEQ ID NO: 105105 - protein, 21 aa, Artificial Sequence
  Description of Artificial Sequence: Synthetic peptide
  Seed: MDPRMCSLMQGSTLPRRSGAA
MDPRMYSLMQASTQPRRSGAA

SEQ ID NO: 105106 - protein, 21 aa, Artificial Sequence
  Description of Artificial Sequence: Synthetic peptide
  Seed: MDPRMCSLMQGSTLPRRSGAA
MDPRMYSLMQASTSPRRSGAA

SEQ ID NO: 105107 - protein, 21 aa, Artificial Sequence
  Description of Artificial Sequence: Synthetic peptide
  Seed: MDPRMCSLMQGSTLPRRSGAA
MDPRMYSLMQASTTPRRSGAA

SEQ ID NO: 105108 - protein, 21 aa, Artificial Sequence
  Description of Artificial Sequence: Synthetic peptide
  Seed: MDPRMCSLMQGSTLPRRSGAA
MDPRMYSLMQASTVPRRSGAA

SEQ ID NO: 105109 - protein, 21 aa, Artificial Sequence
  Description of Artificial Sequence: Synthetic peptide
  Seed: MDPRMCSLMQGSTLPRRSGAA
MDPRMYSLMQGSTAPRRSGAA

SEQ ID NO: 105110 - protein, 21 aa, Artificial Sequence
  Description of Artificial Sequence: Synthetic peptide
  Seed: MDPRMCSLMQGSTLPRRSGAA
MDPRMYSLMQGSTCPRRSGAA

SEQ ID NO: 105111 - protein, 21 aa, Artificial Sequence
  Description of Artificial Sequence: Synthetic peptide
  Seed: MDPRMCSLMQGSTLPRRSGAA
MDPRMYSLMQGSTFPRRSGAA

SEQ ID NO: 105112 - protein, 21 aa, Artificial Sequence
  Description of Artificial Sequence: Synthetic peptide
  Seed: MDPRMCSLMQGSTLPRRSGAA
MDPRMYSLMQGSTGPRRSGAA

SEQ ID NO: 105113 - protein, 21 aa, Artificial Sequence
  Description of Artificial Sequence: Synthetic peptide
  Seed: MDPRMCSLMQGSTLPRRSGAA
MDPRMYSLMQGSTIPRRSGAA

SEQ ID NO: 105114 - protein, 21 aa, Artificial Sequence
  Description of Artificial Sequence: Synthetic peptide
  Seed: MDPRMCSLMQGSTLPRRSGAA
MDPRMYSLMQGSTLPRRSGAA

SEQ ID NO: 105115 - protein, 21 aa, Artificial Sequence
  Description of Artificial Sequence: Synthetic peptide
  Seed: MDPRMCSLMQGSTLPRRSGAA
MDPRMYSLMQGSTMPRRSGAA

SEQ ID NO: 105116 - protein, 21 aa, Artificial Sequence
  Description of Artificial Sequence: Synthetic peptide
  Seed: MDPRMCSLMQGSTLPRRSGAA
MDPRMYSLMQGSTNPRRSGAA

SEQ ID NO: 105117 - protein, 21 aa, Artificial Sequence
  Description of Artificial Sequence: Synthetic peptide
  Seed: MDPRMCSLMQGSTLPRRSGAA
MDPRMYSLMQGSTSPRRSGAA

SEQ ID NO: 105118 - protein, 21 aa, Artificial Sequence
  Description of Artificial Sequence: Synthetic peptide
  Seed: MDPRMCSLMQGSTLPRRSGAA
MDPRMYSLMQGSTTPRRSGAA

SEQ ID NO: 105119 - protein, 21 aa, Artificial Sequence
  Description of Artificial Sequence: Synthetic peptide
  Seed: MDPRMCSLMQGSTLPRRSGAA
MDPRMYSLMQGSTVPRRSGAA

SEQ ID NO: 105120 - protein, 21 aa, Artificial Sequence
  Description of Artificial Sequence: Synthetic peptide
  Seed: MDPRMCSLMQGSTLPRRSGAA
MDPRMYSLMQISTAPRRSGAA

SEQ ID NO: 105121 - protein, 21 aa, Artificial Sequence
  Description of Artificial Sequence: Synthetic peptide
  Seed: MDPRMCSLMQGSTLPRRSGAA
MDPRMYSLMQISTGPRRSGAA

SEQ ID NO: 105122 - protein, 21 aa, Artificial Sequence
  Description of Artificial Sequence: Synthetic peptide
  Seed: MDPRMCSLMQGSTLPRRSGAA
MDPRMYSLMQISTHPRRSGAA

SEQ ID NO: 105123 - protein, 21 aa, Artificial Sequence
  Description of Artificial Sequence: Synthetic peptide
  Seed: MDPRMCSLMQGSTLPRRSGAA
MDPRMYSLMQISTIPRRSGAA

SEQ ID NO: 105124 - protein, 21 aa, Artificial Sequence
  Description of Artificial Sequence: Synthetic peptide
  Seed: MDPRMCSLMQGSTLPRRSGAA
MDPRMYSLMQISTLPRRSGAA

SEQ ID NO: 105125 - protein, 21 aa, Artificial Sequence
  Description of Artificial Sequence: Synthetic peptide
  Seed: MDPRMCSLMQGSTLPRRSGAA
MDPRMYSLMQISTMPRRSGAA

SEQ ID NO: 105126 - protein, 21 aa, Artificial Sequence
  Description of Artificial Sequence: Synthetic peptide
  Seed: MDPRMCSLMQGSTLPRRSGAA
MDPRMYSLMQISTNPRRSGAA

SEQ ID NO: 105127 - protein, 21 aa, Artificial Sequence
  Description of Artificial Sequence: Synthetic peptide
  Seed: MDPRMCSLMQGSTLPRRSGAA
MDPRMYSLMQISTSPRRSGAA

SEQ ID NO: 105128 - protein, 21 aa, Artificial Sequence
  Description of Artificial Sequence: Synthetic peptide
  Seed: MDPRMCSLMQGSTLPRRSGAA
MDPRMYSLMQISTTPRRSGAA

SEQ ID NO: 105129 - protein, 21 aa, Artificial Sequence
  Description of Artificial Sequence: Synthetic peptide
  Seed: MDPRMCSLMQGSTLPRRSGAA
MDPRMYSLMQISTVPRRSGAA

SEQ ID NO: 105130 - protein, 21 aa, Artificial Sequence
  Description of Artificial Sequence: Synthetic peptide
  Seed: MDPRMCSLMQGSTLPRRSGAA
MDPRMYSLMQLSTAPRRSGAA

SEQ ID NO: 105131 - protein, 21 aa, Artificial Sequence
  Description of Artificial Sequence: Synthetic peptide
  Seed: MDPRMCSLMQGSTLPRRSGAA
MDPRMYSLMQLSTNPRRSGAA

SEQ ID NO: 105132 - protein, 21 aa, Artificial Sequence
  Description of Artificial Sequence: Synthetic peptide
  Seed: MDPRMCSLMQGSTLPRRSGAA
MDPRMYSLMQLSTSPRRSGAA

SEQ ID NO: 105133 - protein, 21 aa, Artificial Sequence
  Description of Artificial Sequence: Synthetic peptide
  Seed: MDPRMCSLMQGSTLPRRSGAA
MDPRMYSLMQLSTTPRRSGAA

SEQ ID NO: 105134 - protein, 21 aa, Artificial Sequence
  Description of Artificial Sequence: Synthetic peptide
  Seed: MDPRMCSLMQGSTLPRRSGAA
MDPRMYSLMQMSTAPRRSGAA

SEQ ID NO: 105135 - protein, 21 aa, Artificial Sequence
  Description of Artificial Sequence: Synthetic peptide
  Seed: MDPRMCSLMQGSTLPRRSGAA
MDPRMYSLMQMSTNPRRSGAA

SEQ ID NO: 105136 - protein, 21 aa, Artificial Sequence
  Description of Artificial Sequence: Synthetic peptide
  Seed: MDPRMCSLMQGSTLPRRSGAA
MDPRMYSLMQMSTSPRRSGAA

SEQ ID NO: 105137 - protein, 21 aa, Artificial Sequence
  Description of Artificial Sequence: Synthetic peptide
  Seed: MDPRMCSLMQGSTLPRRSGAA
MDPRMYSLMQNSTAPRRSGAA

SEQ ID NO: 105138 - protein, 21 aa, Artificial Sequence
  Description of Artificial Sequence: Synthetic peptide
  Seed: MDPRMCSLMQGSTLPRRSGAA
MDPRMYSLMQNSTIPRRSGAA

SEQ ID NO: 105139 - protein, 21 aa, Artificial Sequence
  Description of Artificial Sequence: Synthetic peptide
  Seed: MDPRMCSLMQGSTLPRRSGAA
MDPRMYSLMQNSTLPRRSGAA

SEQ ID NO: 105140 - protein, 21 aa, Artificial Sequence
  Description of Artificial Sequence: Synthetic peptide
  Seed: MDPRMCSLMQGSTLPRRSGAA
MDPRMYSLMQNSTMPRRSGAA

SEQ ID NO: 105141 - protein, 21 aa, Artificial Sequence
  Description of Artificial Sequence: Synthetic peptide
  Seed: MDPRMCSLMQGSTLPRRSGAA
MDPRMYSLMQNSTNPRRSGAA

SEQ ID NO: 105142 - protein, 21 aa, Artificial Sequence
  Description of Artificial Sequence: Synthetic peptide
  Seed: MDPRMCSLMQGSTLPRRSGAA
MDPRMYSLMQNSTSPRRSGAA

SEQ ID NO: 105143 - protein, 21 aa, Artificial Sequence
  Description of Artificial Sequence: Synthetic peptide
  Seed: MDPRMCSLMQGSTLPRRSGAA
MDPRMYSLMQNSTTPRRSGAA

SEQ ID NO: 105144 - protein, 21 aa, Artificial Sequence
  Description of Artificial Sequence: Synthetic peptide
  Seed: MDPRMCSLMQGSTLPRRSGAA
MDPRMYSLMQNSTVPRRSGAA

SEQ ID NO: 105145 - protein, 21 aa, Artificial Sequence
  Description of Artificial Sequence: Synthetic peptide
  Seed: MDPRMCSLMQGSTLPRRSGAA
MDPRMYSLMQPSTAPRRSGAA

SEQ ID NO: 105146 - protein, 21 aa, Artificial Sequence
  Description of Artificial Sequence: Synthetic peptide
  Seed: MDPRMCSLMQGSTLPRRSGAA
MDPRMYSLMQPSTGPRRSGAA

SEQ ID NO: 105147 - protein, 21 aa, Artificial Sequence
  Description of Artificial Sequence: Synthetic peptide
  Seed: MDPRMCSLMQGSTLPRRSGAA
MDPRMYSLMQPSTHPRRSGAA

SEQ ID NO: 105148 - protein, 21 aa, Artificial Sequence
  Description of Artificial Sequence: Synthetic peptide
  Seed: MDPRMCSLMQGSTLPRRSGAA
MDPRMYSLMQPSTIPRRSGAA

SEQ ID NO: 105149 - protein, 21 aa, Artificial Sequence
  Description of Artificial Sequence: Synthetic peptide
  Seed: MDPRMCSLMQGSTLPRRSGAA
MDPRMYSLMQPSTLPRRSGAA

SEQ ID NO: 105150 - protein, 21 aa, Artificial Sequence
  Description of Artificial Sequence: Synthetic peptide
  Seed: MDPRMCSLMQGSTLPRRSGAA
MDPRMYSLMQPSTMPRRSGAA

SEQ ID NO: 105151 - protein, 21 aa, Artificial Sequence
  Description of Artificial Sequence: Synthetic peptide
  Seed: MDPRMCSLMQGSTLPRRSGAA
MDPRMYSLMQPSTNPRRSGAA

SEQ ID NO: 105152 - protein, 21 aa, Artificial Sequence
  Description of Artificial Sequence: Synthetic peptide
  Seed: MDPRMCSLMQGSTLPRRSGAA
MDPRMYSLMQPSTPPRRSGAA

SEQ ID NO: 105153 - protein, 21 aa, Artificial Sequence
  Description of Artificial Sequence: Synthetic peptide
  Seed: MDPRMCSLMQGSTLPRRSGAA
MDPRMYSLMQPSTQPRRSGAA

SEQ ID NO: 105154 - protein, 21 aa, Artificial Sequence
  Description of Artificial Sequence: Synthetic peptide
  Seed: MDPRMCSLMQGSTLPRRSGAA
MDPRMYSLMQPSTSPRRSGAA

SEQ ID NO: 105155 - protein, 21 aa, Artificial Sequence
  Description of Artificial Sequence: Synthetic peptide
  Seed: MDPRMCSLMQGSTLPRRSGAA
MDPRMYSLMQPSTTPRRSGAA

SEQ ID NO: 105156 - protein, 21 aa, Artificial Sequence
  Description of Artificial Sequence: Synthetic peptide
  Seed: MDPRMCSLMQGSTLPRRSGAA
MDPRMYSLMQPSTVPRRSGAA

SEQ ID NO: 105157 - protein, 21 aa, Artificial Sequence
  Description of Artificial Sequence: Synthetic peptide
  Seed: MDPRMCSLMQGSTLPRRSGAA
MDPRMYSLMQSSTAPRRSGAA

SEQ ID NO: 105158 - protein, 21 aa, Artificial Sequence
  Description of Artificial Sequence: Synthetic peptide
  Seed: MDPRMCSLMQGSTLPRRSGAA
MDPRMYSLMQSSTGPRRSGAA

SEQ ID NO: 105159 - protein, 21 aa, Artificial Sequence
  Description of Artificial Sequence: Synthetic peptide
  Seed: MDPRMCSLMQGSTLPRRSGAA
MDPRMYSLMQSSTIPRRSGAA

SEQ ID NO: 105160 - protein, 21 aa, Artificial Sequence
  Description of Artificial Sequence: Synthetic peptide
  Seed: MDPRMCSLMQGSTLPRRSGAA
MDPRMYSLMQSSTLPRRSGAA

SEQ ID NO: 105161 - protein, 21 aa, Artificial Sequence
  Description of Artificial Sequence: Synthetic peptide
  Seed: MDPRMCSLMQGSTLPRRSGAA
MDPRMYSLMQSSTMPRRSGAA

SEQ ID NO: 105162 - protein, 21 aa, Artificial Sequence
  Description of Artificial Sequence: Synthetic peptide
  Seed: MDPRMCSLMQGSTLPRRSGAA
MDPRMYSLMQSSTNPRRSGAA

SEQ ID NO: 105163 - protein, 21 aa, Artificial Sequence
  Description of Artificial Sequence: Synthetic peptide
  Seed: MDPRMCSLMQGSTLPRRSGAA
MDPRMYSLMQSSTQPRRSGAA

SEQ ID NO: 105164 - protein, 21 aa, Artificial Sequence
  Description of Artificial Sequence: Synthetic peptide
  Seed: MDPRMCSLMQGSTLPRRSGAA
MDPRMYSLMQSSTSPRRSGAA

SEQ ID NO: 105165 - protein, 21 aa, Artificial Sequence
  Description of Artificial Sequence: Synthetic peptide
  Seed: MDPRMCSLMQGSTLPRRSGAA
MDPRMYSLMQSSTTPRRSGAA

SEQ ID NO: 105166 - protein, 21 aa, Artificial Sequence
  Description of Artificial Sequence: Synthetic peptide
  Seed: MDPRMCSLMQGSTLPRRSGAA
MDPRMYSLMQSSTVPRRSGAA

SEQ ID NO: 105167 - protein, 21 aa, Artificial Sequence
  Description of Artificial Sequence: Synthetic peptide
  Seed: MDPRMCSLMQGSTLPRRSGAA
MDPRMYSLMQTSTAPRRSGAA

SEQ ID NO: 105168 - protein, 21 aa, Artificial Sequence
  Description of Artificial Sequence: Synthetic peptide
  Seed: MDPRMCSLMQGSTLPRRSGAA
MDPRMYSLMQTSTGPRRSGAA

SEQ ID NO: 105169 - protein, 21 aa, Artificial Sequence
  Description of Artificial Sequence: Synthetic peptide
  Seed: MDPRMCSLMQGSTLPRRSGAA
MDPRMYSLMQTSTIPRRSGAA

SEQ ID NO: 105170 - protein, 21 aa, Artificial Sequence
  Description of Artificial Sequence: Synthetic peptide
  Seed: MDPRMCSLMQGSTLPRRSGAA
MDPRMYSLMQTSTLPRRSGAA

SEQ ID NO: 105171 - protein, 21 aa, Artificial Sequence
  Description of Artificial Sequence: Synthetic peptide
  Seed: MDPRMCSLMQGSTLPRRSGAA
MDPRMYSLMQTSTMPRRSGAA

SEQ ID NO: 105172 - protein, 21 aa, Artificial Sequence
  Description of Artificial Sequence: Synthetic peptide
  Seed: MDPRMCSLMQGSTLPRRSGAA
MDPRMYSLMQTSTNPRRSGAA

SEQ ID NO: 105173 - protein, 21 aa, Artificial Sequence
  Description of Artificial Sequence: Synthetic peptide
  Seed: MDPRMCSLMQGSTLPRRSGAA
MDPRMYSLMQTSTQPRRSGAA

SEQ ID NO: 105174 - protein, 21 aa, Artificial Sequence
  Description of Artificial Sequence: Synthetic peptide
  Seed: MDPRMCSLMQGSTLPRRSGAA
MDPRMYSLMQTSTSPRRSGAA

SEQ ID NO: 105175 - protein, 21 aa, Artificial Sequence
  Description of Artificial Sequence: Synthetic peptide
  Seed: MDPRMCSLMQGSTLPRRSGAA
MDPRMYSLMQTSTTPRRSGAA

SEQ ID NO: 105176 - protein, 21 aa, Artificial Sequence
  Description of Artificial Sequence: Synthetic peptide
  Seed: MDPRMCSLMQGSTLPRRSGAA
MDPRMYSLMQTSTVPRRSGAA

SEQ ID NO: 105177 - protein, 21 aa, Artificial Sequence
  Description of Artificial Sequence: Synthetic peptide
  Seed: MDPRMCSLMQGSTLPRRSGAA
MDPRMYSLMQVSTAPRRSGAA

SEQ ID NO: 105178 - protein, 21 aa, Artificial Sequence
  Description of Artificial Sequence: Synthetic peptide
  Seed: MDPRMCSLMQGSTLPRRSGAA
MDPRMYSLMQVSTGPRRSGAA

SEQ ID NO: 105179 - protein, 21 aa, Artificial Sequence
  Description of Artificial Sequence: Synthetic peptide
  Seed: MDPRMCSLMQGSTLPRRSGAA
MDPRMYSLMQVSTHPRRSGAA

SEQ ID NO: 105180 - protein, 21 aa, Artificial Sequence
  Description of Artificial Sequence: Synthetic peptide
  Seed: MDPRMCSLMQGSTLPRRSGAA
MDPRMYSLMQVSTIPRRSGAA

SEQ ID NO: 105181 - protein, 21 aa, Artificial Sequence
  Description of Artificial Sequence: Synthetic peptide
  Seed: MDPRMCSLMQGSTLPRRSGAA
MDPRMYSLMQVSTLPRRSGAA

SEQ ID NO: 105182 - protein, 21 aa, Artificial Sequence
  Description of Artificial Sequence: Synthetic peptide
  Seed: MDPRMCSLMQGSTLPRRSGAA
MDPRMYSLMQVSTMPRRSGAA

SEQ ID NO: 105183 - protein, 21 aa, Artificial Sequence
  Description of Artificial Sequence: Synthetic peptide
  Seed: MDPRMCSLMQGSTLPRRSGAA
MDPRMYSLMQVSTNPRRSGAA

SEQ ID NO: 105184 - protein, 21 aa, Artificial Sequence
  Description of Artificial Sequence: Synthetic peptide
  Seed: MDPRMCSLMQGSTLPRRSGAA
MDPRMYSLMQVSTQPRRSGAA

SEQ ID NO: 105185 - protein, 21 aa, Artificial Sequence
  Description of Artificial Sequence: Synthetic peptide
  Seed: MDPRMCSLMQGSTLPRRSGAA
MDPRMYSLMQVSTSPRRSGAA

SEQ ID NO: 105186 - protein, 21 aa, Artificial Sequence
  Description of Artificial Sequence: Synthetic peptide
  Seed: MDPRMCSLMQGSTLPRRSGAA
MDPRMYSLMQVSTTPRRSGAA

SEQ ID NO: 105187 - protein, 21 aa, Artificial Sequence
  Description of Artificial Sequence: Synthetic peptide
  Seed: MDPRMCSLMQGSTLPRRSGAA
MDPRMYSLMQVSTVPRRSGAA

SEQ ID NO: 105188 - protein, 21 aa, Artificial Sequence
  Description of Artificial Sequence: Synthetic peptide
  Seed: MDPRMCSLMQGSTLPRRSGAA
MDPRMYSLNQASTLPRRSGAA

SEQ ID NO: 105189 - protein, 21 aa, Artificial Sequence
  Description of Artificial Sequence: Synthetic peptide
  Seed: MDPRMCSLMQGSTLPRRSGAA
MDPRMYSLNQASTVPRRSGAA

SEQ ID NO: 105190 - protein, 21 aa, Artificial Sequence
  Description of Artificial Sequence: Synthetic peptide
  Seed: MDPRMCSLMQGSTLPRRSGAA
MDPRMYSLQQASTAPRRSGAA

SEQ ID NO: 105191 - protein, 21 aa, Artificial Sequence
  Description of Artificial Sequence: Synthetic peptide
  Seed: MDPRMCSLMQGSTLPRRSGAA
MDPRMYSLQQASTIPRRSGAA

SEQ ID NO: 105192 - protein, 21 aa, Artificial Sequence
  Description of Artificial Sequence: Synthetic peptide
  Seed: MDPRMCSLMQGSTLPRRSGAA
MDPRMYSLQQASTLPRRSGAA

SEQ ID NO: 105193 - protein, 21 aa, Artificial Sequence
  Description of Artificial Sequence: Synthetic peptide
  Seed: MDPRMCSLMQGSTLPRRSGAA
MDPRMYSLQQASTMPRRSGAA

SEQ ID NO: 105194 - protein, 21 aa, Artificial Sequence
  Description of Artificial Sequence: Synthetic peptide
  Seed: MDPRMCSLMQGSTLPRRSGAA
MDPRMYSLQQASTNPRRSGAA

SEQ ID NO: 105195 - protein, 21 aa, Artificial Sequence
  Description of Artificial Sequence: Synthetic peptide
  Seed: MDPRMCSLMQGSTLPRRSGAA
MDPRMYSLQQASTSPRRSGAA

SEQ ID NO: 105196 - protein, 21 aa, Artificial Sequence
  Description of Artificial Sequence: Synthetic peptide
  Seed: MDPRMCSLMQGSTLPRRSGAA
MDPRMYSLQQASTTPRRSGAA

SEQ ID NO: 105197 - protein, 21 aa, Artificial Sequence
  Description of Artificial Sequence: Synthetic peptide
  Seed: MDPRMCSLMQGSTLPRRSGAA
MDPRMYSLQQASTVPRRSGAA

SEQ ID NO: 105198 - protein, 21 aa, Artificial Sequence
  Description of Artificial Sequence: Synthetic peptide
  Seed: MDPRMCSLMQGSTLPRRSGAA
MDPRMYSLQQGSTAPRRSGAA

SEQ ID NO: 105199 - protein, 21 aa, Artificial Sequence
  Description of Artificial Sequence: Synthetic peptide
  Seed: MDPRMCSLMQGSTLPRRSGAA
MDPRMYSLQQGSTIPRRSGAA

SEQ ID NO: 105200 - protein, 21 aa, Artificial Sequence
  Description of Artificial Sequence: Synthetic peptide
  Seed: MDPRMCSLMQGSTLPRRSGAA
MDPRMYSLQQGSTLPRRSGAA

SEQ ID NO: 105201 - protein, 21 aa, Artificial Sequence
  Description of Artificial Sequence: Synthetic peptide
  Seed: MDPRMCSLMQGSTLPRRSGAA
MDPRMYSLQQGSTVPRRSGAA

SEQ ID NO: 105202 - protein, 21 aa, Artificial Sequence
  Description of Artificial Sequence: Synthetic peptide
  Seed: MDPRMCSLMQGSTLPRRSGAA
MDPRMYSLQQPSTIPRRSGAA

SEQ ID NO: 105203 - protein, 21 aa, Artificial Sequence
  Description of Artificial Sequence: Synthetic peptide
  Seed: MDPRMCSLMQGSTLPRRSGAA
MDPRMYSLQQPSTLPRRSGAA

SEQ ID NO: 105204 - protein, 21 aa, Artificial Sequence
  Description of Artificial Sequence: Synthetic peptide
  Seed: MDPRMCSLMQGSTLPRRSGAA
MDPRMYSLQQPSTVPRRSGAA

SEQ ID NO: 105205 - protein, 21 aa, Artificial Sequence
  Description of Artificial Sequence: Synthetic peptide
  Seed: MDPRMCSLMQGSTLPRRSGAA
MDPRMYSLQQSSTAPRRSGAA

SEQ ID NO: 105206 - protein, 21 aa, Artificial Sequence
  Description of Artificial Sequence: Synthetic peptide
  Seed: MDPRMCSLMQGSTLPRRSGAA
MDPRMYSLQQSSTIPRRSGAA

SEQ ID NO: 105207 - protein, 21 aa, Artificial Sequence
  Description of Artificial Sequence: Synthetic peptide
  Seed: MDPRMCSLMQGSTLPRRSGAA
MDPRMYSLQQSSTLPRRSGAA

SEQ ID NO: 105208 - protein, 21 aa, Artificial Sequence
  Description of Artificial Sequence: Synthetic peptide
  Seed: MDPRMCSLMQGSTLPRRSGAA
MDPRMYSLQQSSTVPRRSGAA

SEQ ID NO: 105209 - protein, 21 aa, Artificial Sequence
  Description of Artificial Sequence: Synthetic peptide
  Seed: MDPRMCSLMQGSTLPRRSGAA
MDPRMYSLQQVSTAPRRSGAA

SEQ ID NO: 105210 - protein, 21 aa, Artificial Sequence
  Description of Artificial Sequence: Synthetic peptide
  Seed: MDPRMCSLMQGSTLPRRSGAA
MDPRMYSLSQASTAPRRSGAA

SEQ ID NO: 105211 - protein, 21 aa, Artificial Sequence
  Description of Artificial Sequence: Synthetic peptide
  Seed: MDPRMCSLMQGSTLPRRSGAA
MDPRMYSLSQASTIPRRSGAA

SEQ ID NO: 105212 - protein, 21 aa, Artificial Sequence
  Description of Artificial Sequence: Synthetic peptide
  Seed: MDPRMCSLMQGSTLPRRSGAA
MDPRMYSLSQASTLPRRSGAA

SEQ ID NO: 105213 - protein, 21 aa, Artificial Sequence
  Description of Artificial Sequence: Synthetic peptide
  Seed: MDPRMCSLMQGSTLPRRSGAA
MDPRMYSLSQASTVPRRSGAA

SEQ ID NO: 105214 - protein, 21 aa, Artificial Sequence
  Description of Artificial Sequence: Synthetic peptide
  Seed: MDPRMCSLMQGSTLPRRSGAA
MDPRMYSLSQGSTIPRRSGAA

SEQ ID NO: 105215 - protein, 21 aa, Artificial Sequence
  Description of Artificial Sequence: Synthetic peptide
  Seed: MDPRMCSLMQGSTLPRRSGAA
MDPRMYSLSQGSTLPRRSGAA

SEQ ID NO: 105216 - protein, 21 aa, Artificial Sequence
  Description of Artificial Sequence: Synthetic peptide
  Seed: MDPRMCSLMQGSTLPRRSGAA
MDPRMYSLSQGSTVPRRSGAA

SEQ ID NO: 105217 - protein, 21 aa, Artificial Sequence
  Description of Artificial Sequence: Synthetic peptide
  Seed: MDPRMCSLMQGSTLPRRSGAA
MDPRMYSLSQSSTVPRRSGAA

SEQ ID NO: 105218 - protein, 21 aa, Artificial Sequence
  Description of Artificial Sequence: Synthetic peptide
  Seed: MDPRMCSLMQGSTLPRRSGAA
MDPRMYSLTQASTIPRRSGAA

SEQ ID NO: 105219 - protein, 21 aa, Artificial Sequence
  Description of Artificial Sequence: Synthetic peptide
  Seed: MDPRMCSLMQGSTLPRRSGAA
MDPRMYSLTQASTLPRRSGAA

SEQ ID NO: 105220 - protein, 21 aa, Artificial Sequence
  Description of Artificial Sequence: Synthetic peptide
  Seed: MDPRMCSLMQGSTLPRRSGAA
MDPRMYSLTQASTVPRRSGAA

SEQ ID NO: 105221 - protein, 21 aa, Artificial Sequence
  Description of Artificial Sequence: Synthetic peptide
  Seed: MDPRMCSLMQGSTLPRRSGAA
MDPRMYSLVQASTAPRRSGAA

SEQ ID NO: 105222 - protein, 21 aa, Artificial Sequence
  Description of Artificial Sequence: Synthetic peptide
  Seed: MDPRMCSLMQGSTLPRRSGAA
MDPRMYSLVQASTGPRRSGAA

SEQ ID NO: 105223 - protein, 21 aa, Artificial Sequence
  Description of Artificial Sequence: Synthetic peptide
  Seed: MDPRMCSLMQGSTLPRRSGAA
MDPRMYSLVQASTIPRRSGAA

SEQ ID NO: 105224 - protein, 21 aa, Artificial Sequence
  Description of Artificial Sequence: Synthetic peptide
  Seed: MDPRMCSLMQGSTLPRRSGAA
MDPRMYSLVQASTLPRRSGAA

SEQ ID NO: 105225 - protein, 21 aa, Artificial Sequence
  Description of Artificial Sequence: Synthetic peptide
  Seed: MDPRMCSLMQGSTLPRRSGAA
MDPRMYSLVQASTMPRRSGAA

SEQ ID NO: 105226 - protein, 21 aa, Artificial Sequence
  Description of Artificial Sequence: Synthetic peptide
  Seed: MDPRMCSLMQGSTLPRRSGAA
MDPRMYSLVQASTNPRRSGAA

SEQ ID NO: 105227 - protein, 21 aa, Artificial Sequence
  Description of Artificial Sequence: Synthetic peptide
  Seed: MDPRMCSLMQGSTLPRRSGAA
MDPRMYSLVQASTSPRRSGAA

SEQ ID NO: 105228 - protein, 21 aa, Artificial Sequence
  Description of Artificial Sequence: Synthetic peptide
  Seed: MDPRMCSLMQGSTLPRRSGAA
MDPRMYSLVQASTTPRRSGAA

SEQ ID NO: 105229 - protein, 21 aa, Artificial Sequence
  Description of Artificial Sequence: Synthetic peptide
  Seed: MDPRMCSLMQGSTLPRRSGAA
MDPRMYSLVQASTVPRRSGAA

SEQ ID NO: 105230 - protein, 21 aa, Artificial Sequence
  Description of Artificial Sequence: Synthetic peptide
  Seed: MDPRMCSLMQGSTLPRRSGAA
MDPRMYSLVQGSTAPRRSGAA

SEQ ID NO: 105231 - protein, 21 aa, Artificial Sequence
  Description of Artificial Sequence: Synthetic peptide
  Seed: MDPRMCSLMQGSTLPRRSGAA
MDPRMYSLVQGSTIPRRSGAA

SEQ ID NO: 105232 - protein, 21 aa, Artificial Sequence
  Description of Artificial Sequence: Synthetic peptide
  Seed: MDPRMCSLMQGSTLPRRSGAA
MDPRMYSLVQGSTLPRRSGAA

SEQ ID NO: 105233 - protein, 21 aa, Artificial Sequence
  Description of Artificial Sequence: Synthetic peptide
  Seed: MDPRMCSLMQGSTLPRRSGAA
MDPRMYSLVQGSTMPRRSGAA

SEQ ID NO: 105234 - protein, 21 aa, Artificial Sequence
  Description of Artificial Sequence: Synthetic peptide
  Seed: MDPRMCSLMQGSTLPRRSGAA
MDPRMYSLVQGSTVPRRSGAA

SEQ ID NO: 105235 - protein, 21 aa, Artificial Sequence
  Description of Artificial Sequence: Synthetic peptide
  Seed: MDPRMCSLMQGSTLPRRSGAA
MDPRMYSLVQISTAPRRSGAA

SEQ ID NO: 105236 - protein, 21 aa, Artificial Sequence
  Description of Artificial Sequence: Synthetic peptide
  Seed: MDPRMCSLMQGSTLPRRSGAA
MDPRMYSLVQISTNPRRSGAA

SEQ ID NO: 105237 - protein, 21 aa, Artificial Sequence
  Description of Artificial Sequence: Synthetic peptide
  Seed: MDPRMCSLMQGSTLPRRSGAA
MDPRMYSLVQISTSPRRSGAA

SEQ ID NO: 105238 - protein, 21 aa, Artificial Sequence
  Description of Artificial Sequence: Synthetic peptide
  Seed: MDPRMCSLMQGSTLPRRSGAA
MDPRMYSLVQPSTAPRRSGAA

SEQ ID NO: 105239 - protein, 21 aa, Artificial Sequence
  Description of Artificial Sequence: Synthetic peptide
  Seed: MDPRMCSLMQGSTLPRRSGAA
MDPRMYSLVQPSTIPRRSGAA

SEQ ID NO: 105240 - protein, 21 aa, Artificial Sequence
  Description of Artificial Sequence: Synthetic peptide
  Seed: MDPRMCSLMQGSTLPRRSGAA
MDPRMYSLVQPSTLPRRSGAA

SEQ ID NO: 105241 - protein, 21 aa, Artificial Sequence
  Description of Artificial Sequence: Synthetic peptide
  Seed: MDPRMCSLMQGSTLPRRSGAA
MDPRMYSLVQPSTNPRRSGAA

SEQ ID NO: 105242 - protein, 21 aa, Artificial Sequence
  Description of Artificial Sequence: Synthetic peptide
  Seed: MDPRMCSLMQGSTLPRRSGAA
MDPRMYSLVQPSTSPRRSGAA

SEQ ID NO: 105243 - protein, 21 aa, Artificial Sequence
  Description of Artificial Sequence: Synthetic peptide
  Seed: MDPRMCSLMQGSTLPRRSGAA
MDPRMYSLVQPSTTPRRSGAA

SEQ ID NO: 105244 - protein, 21 aa, Artificial Sequence
  Description of Artificial Sequence: Synthetic peptide
  Seed: MDPRMCSLMQGSTLPRRSGAA
MDPRMYSLVQPSTVPRRSGAA

SEQ ID NO: 105245 - protein, 21 aa, Artificial Sequence
  Description of Artificial Sequence: Synthetic peptide
  Seed: MDPRMCSLMQGSTLPRRSGAA
MDPRMYSLVQSSTAPRRSGAA

SEQ ID NO: 105246 - protein, 21 aa, Artificial Sequence
  Description of Artificial Sequence: Synthetic peptide
  Seed: MDPRMCSLMQGSTLPRRSGAA
MDPRMYSLVQSSTIPRRSGAA

SEQ ID NO: 105247 - protein, 21 aa, Artificial Sequence
  Description of Artificial Sequence: Synthetic peptide
  Seed: MDPRMCSLMQGSTLPRRSGAA
MDPRMYSLVQSSTLPRRSGAA

SEQ ID NO: 105248 - protein, 21 aa, Artificial Sequence
  Description of Artificial Sequence: Synthetic peptide
  Seed: MDPRMCSLMQGSTLPRRSGAA
MDPRMYSLVQSSTNPRRSGAA

SEQ ID NO: 105249 - protein, 21 aa, Artificial Sequence
  Description of Artificial Sequence: Synthetic peptide
  Seed: MDPRMCSLMQGSTLPRRSGAA
MDPRMYSLVQSSTSPRRSGAA

SEQ ID NO: 105250 - protein, 21 aa, Artificial Sequence
  Description of Artificial Sequence: Synthetic peptide
  Seed: MDPRMCSLMQGSTLPRRSGAA
MDPRMYSLVQSSTVPRRSGAA

SEQ ID NO: 105251 - protein, 21 aa, Artificial Sequence
  Description of Artificial Sequence: Synthetic peptide
  Seed: MDPRMCSLMQGSTLPRRSGAA
MDPRMYSLVQTSTAPRRSGAA

SEQ ID NO: 105252 - protein, 21 aa, Artificial Sequence
  Description of Artificial Sequence: Synthetic peptide
  Seed: MDPRMCSLMQGSTLPRRSGAA
MDPRMYSLVQTSTNPRRSGAA

SEQ ID NO: 105253 - protein, 21 aa, Artificial Sequence
  Description of Artificial Sequence: Synthetic peptide
  Seed: MDPRMCSLMQGSTLPRRSGAA
MDPRMYSLVQTSTSPRRSGAA

SEQ ID NO: 105254 - protein, 21 aa, Artificial Sequence
  Description of Artificial Sequence: Synthetic peptide
  Seed: MDPRMCSLMQGSTLPRRSGAA
MDPRMYSLVQTSTTPRRSGAA

SEQ ID NO: 105255 - protein, 21 aa, Artificial Sequence
  Description of Artificial Sequence: Synthetic peptide
  Seed: MDPRMCSLMQGSTLPRRSGAA
MDPRMYSLVQTSTVPRRSGAA

SEQ ID NO: 105256 - protein, 21 aa, Artificial Sequence
  Description of Artificial Sequence: Synthetic peptide
  Seed: MDPRMCSLMQGSTLPRRSGAA
MDPRMYSLVQVSTAPRRSGAA

SEQ ID NO: 105257 - protein, 21 aa, Artificial Sequence
  Description of Artificial Sequence: Synthetic peptide
  Seed: MDPRMCSLMQGSTLPRRSGAA
MDPRMYSLVQVSTNPRRSGAA

SEQ ID NO: 105258 - protein, 21 aa, Artificial Sequence
  Description of Artificial Sequence: Synthetic peptide
  Seed: MDPRMCSLMQGSTLPRRSGAA
MDPRMYSLVQVSTSPRRSGAA

SEQ ID NO: 105259 - protein, 21 aa, Artificial Sequence
  Description of Artificial Sequence: Synthetic peptide
  Seed: MDPRMCSLMQGSTLPRRSGAA
MDPRMYSLVQVSTTPRRSGAA

SEQ ID NO: 105260 - protein, 21 aa, Artificial Sequence
  Description of Artificial Sequence: Synthetic peptide
  Seed: MDPRMCSLMQGSTLPRRSGAA
MDPRMYSLVQVSTVPRRSGAA

SEQ ID NO: 105261 - protein, 22 aa, Artificial Sequence
  Description of Artificial Sequence: Synthetic peptide
  Seed: MDPRMCSLMQGSTLPRRSGAAG
MDPRMFSLAQASTAPRRSGAAG

SEQ ID NO: 105262 - protein, 22 aa, Artificial Sequence
  Description of Artificial Sequence: Synthetic peptide
  Seed: MDPRMCSLMQGSTLPRRSGAAG
MDPRMFSLAQASTFPRRSGAAG

SEQ ID NO: 105263 - protein, 22 aa, Artificial Sequence
  Description of Artificial Sequence: Synthetic peptide
  Seed: MDPRMCSLMQGSTLPRRSGAAG
MDPRMFSLAQASTGPRRSGAAG

SEQ ID NO: 105264 - protein, 22 aa, Artificial Sequence
  Description of Artificial Sequence: Synthetic peptide
  Seed: MDPRMCSLMQGSTLPRRSGAAG
MDPRMFSLAQASTHPRRSGAAG

SEQ ID NO: 105265 - protein, 22 aa, Artificial Sequence
  Description of Artificial Sequence: Synthetic peptide
  Seed: MDPRMCSLMQGSTLPRRSGAAG
MDPRMFSLAQASTIPRRSGAAG

SEQ ID NO: 105266 - protein, 22 aa, Artificial Sequence
  Description of Artificial Sequence: Synthetic peptide
  Seed: MDPRMCSLMQGSTLPRRSGAAG
MDPRMFSLAQASTLPRRSGAAG

SEQ ID NO: 105267 - protein, 22 aa, Artificial Sequence
  Description of Artificial Sequence: Synthetic peptide
  Seed: MDPRMCSLMQGSTLPRRSGAAG
MDPRMFSLAQASTMPRRSGAAG

SEQ ID NO: 105268 - protein, 22 aa, Artificial Sequence
  Description of Artificial Sequence: Synthetic peptide
  Seed: MDPRMCSLMQGSTLPRRSGAAG
MDPRMFSLAQASTNPRRSGAAG

SEQ ID NO: 105269 - protein, 22 aa, Artificial Sequence
  Description of Artificial Sequence: Synthetic peptide
  Seed: MDPRMCSLMQGSTLPRRSGAAG
MDPRMFSLAQASTQPRRSGAAG

SEQ ID NO: 105270 - protein, 22 aa, Artificial Sequence
  Description of Artificial Sequence: Synthetic peptide
  Seed: MDPRMCSLMQGSTLPRRSGAAG
MDPRMFSLAQASTSPRRSGAAG

SEQ ID NO: 105271 - protein, 22 aa, Artificial Sequence
  Description of Artificial Sequence: Synthetic peptide
  Seed: MDPRMCSLMQGSTLPRRSGAAG
MDPRMFSLAQASTTPRRSGAAG

SEQ ID NO: 105272 - protein, 22 aa, Artificial Sequence
  Description of Artificial Sequence: Synthetic peptide
  Seed: MDPRMCSLMQGSTLPRRSGAAG
MDPRMFSLAQASTVPRRSGAAG

SEQ ID NO: 105273 - protein, 22 aa, Artificial Sequence
  Description of Artificial Sequence: Synthetic peptide
  Seed: MDPRMCSLMQGSTLPRRSGAAG
MDPRMFSLAQGSTAPRRSGAAG

SEQ ID NO: 105274 - protein, 22 aa, Artificial Sequence
  Description of Artificial Sequence: Synthetic peptide
  Seed: MDPRMCSLMQGSTLPRRSGAAG
MDPRMFSLAQGSTIPRRSGAAG

SEQ ID NO: 105275 - protein, 22 aa, Artificial Sequence
  Description of Artificial Sequence: Synthetic peptide
  Seed: MDPRMCSLMQGSTLPRRSGAAG
MDPRMFSLAQGSTLPRRSGAAG

SEQ ID NO: 105276 - protein, 22 aa, Artificial Sequence
  Description of Artificial Sequence: Synthetic peptide
  Seed: MDPRMCSLMQGSTLPRRSGAAG
MDPRMFSLAQGSTMPRRSGAAG

SEQ ID NO: 105277 - protein, 22 aa, Artificial Sequence
  Description of Artificial Sequence: Synthetic peptide
  Seed: MDPRMCSLMQGSTLPRRSGAAG
MDPRMFSLAQGSTSPRRSGAAG

SEQ ID NO: 105278 - protein, 22 aa, Artificial Sequence
  Description of Artificial Sequence: Synthetic peptide
  Seed: MDPRMCSLMQGSTLPRRSGAAG
MDPRMFSLAQGSTTPRRSGAAG

SEQ ID NO: 105279 - protein, 22 aa, Artificial Sequence
  Description of Artificial Sequence: Synthetic peptide
  Seed: MDPRMCSLMQGSTLPRRSGAAG
MDPRMFSLAQGSTVPRRSGAAG

SEQ ID NO: 105280 - protein, 22 aa, Artificial Sequence
  Description of Artificial Sequence: Synthetic peptide
  Seed: MDPRMCSLMQGSTLPRRSGAAG
MDPRMFSLAQISTAPRRSGAAG

SEQ ID NO: 105281 - protein, 22 aa, Artificial Sequence
  Description of Artificial Sequence: Synthetic peptide
  Seed: MDPRMCSLMQGSTLPRRSGAAG
MDPRMFSLAQISTNPRRSGAAG

SEQ ID NO: 105282 - protein, 22 aa, Artificial Sequence
  Description of Artificial Sequence: Synthetic peptide
  Seed: MDPRMCSLMQGSTLPRRSGAAG
MDPRMFSLAQISTSPRRSGAAG

SEQ ID NO: 105283 - protein, 22 aa, Artificial Sequence
  Description of Artificial Sequence: Synthetic peptide
  Seed: MDPRMCSLMQGSTLPRRSGAAG
MDPRMFSLAQISTTPRRSGAAG

SEQ ID NO: 105284 - protein, 22 aa, Artificial Sequence
  Description of Artificial Sequence: Synthetic peptide
  Seed: MDPRMCSLMQGSTLPRRSGAAG
MDPRMFSLAQISTVPRRSGAAG

SEQ ID NO: 105285 - protein, 22 aa, Artificial Sequence
  Description of Artificial Sequence: Synthetic peptide
  Seed: MDPRMCSLMQGSTLPRRSGAAG
MDPRMFSLAQLSTAPRRSGAAG

SEQ ID NO: 105286 - protein, 22 aa, Artificial Sequence
  Description of Artificial Sequence: Synthetic peptide
  Seed: MDPRMCSLMQGSTLPRRSGAAG
MDPRMFSLAQNSTAPRRSGAAG

SEQ ID NO: 105287 - protein, 22 aa, Artificial Sequence
  Description of Artificial Sequence: Synthetic peptide
  Seed: MDPRMCSLMQGSTLPRRSGAAG
MDPRMFSLAQNSTIPRRSGAAG

SEQ ID NO: 105288 - protein, 22 aa, Artificial Sequence
  Description of Artificial Sequence: Synthetic peptide
  Seed: MDPRMCSLMQGSTLPRRSGAAG
MDPRMFSLAQNSTLPRRSGAAG

SEQ ID NO: 105289 - protein, 22 aa, Artificial Sequence
  Description of Artificial Sequence: Synthetic peptide
  Seed: MDPRMCSLMQGSTLPRRSGAAG
MDPRMFSLAQNSTNPRRSGAAG

SEQ ID NO: 105290 - protein, 22 aa, Artificial Sequence
  Description of Artificial Sequence: Synthetic peptide
  Seed: MDPRMCSLMQGSTLPRRSGAAG
MDPRMFSLAQNSTVPRRSGAAG

SEQ ID NO: 105291 - protein, 22 aa, Artificial Sequence
  Description of Artificial Sequence: Synthetic peptide
  Seed: MDPRMCSLMQGSTLPRRSGAAG
MDPRMFSLAQPSTAPRRSGAAG

SEQ ID NO: 105292 - protein, 22 aa, Artificial Sequence
  Description of Artificial Sequence: Synthetic peptide
  Seed: MDPRMCSLMQGSTLPRRSGAAG
MDPRMFSLAQPSTIPRRSGAAG

SEQ ID NO: 105293 - protein, 22 aa, Artificial Sequence
  Description of Artificial Sequence: Synthetic peptide
  Seed: MDPRMCSLMQGSTLPRRSGAAG
MDPRMFSLAQPSTLPRRSGAAG

SEQ ID NO: 105294 - protein, 22 aa, Artificial Sequence
  Description of Artificial Sequence: Synthetic peptide
  Seed: MDPRMCSLMQGSTLPRRSGAAG
MDPRMFSLAQPSTMPRRSGAAG

SEQ ID NO: 105295 - protein, 22 aa, Artificial Sequence
  Description of Artificial Sequence: Synthetic peptide
  Seed: MDPRMCSLMQGSTLPRRSGAAG
MDPRMFSLAQPSTNPRRSGAAG

SEQ ID NO: 105296 - protein, 22 aa, Artificial Sequence
  Description of Artificial Sequence: Synthetic peptide
  Seed: MDPRMCSLMQGSTLPRRSGAAG
MDPRMFSLAQPSTSPRRSGAAG

SEQ ID NO: 105297 - protein, 22 aa, Artificial Sequence
  Description of Artificial Sequence: Synthetic peptide
  Seed: MDPRMCSLMQGSTLPRRSGAAG
MDPRMFSLAQPSTTPRRSGAAG

SEQ ID NO: 105298 - protein, 22 aa, Artificial Sequence
  Description of Artificial Sequence: Synthetic peptide
  Seed: MDPRMCSLMQGSTLPRRSGAAG
MDPRMFSLAQPSTVPRRSGAAG

SEQ ID NO: 105299 - protein, 22 aa, Artificial Sequence
  Description of Artificial Sequence: Synthetic peptide
  Seed: MDPRMCSLMQGSTLPRRSGAAG
MDPRMFSLAQSSTAPRRSGAAG

SEQ ID NO: 105300 - protein, 22 aa, Artificial Sequence
  Description of Artificial Sequence: Synthetic peptide
  Seed: MDPRMCSLMQGSTLPRRSGAAG
MDPRMFSLAQSSTIPRRSGAAG

SEQ ID NO: 105301 - protein, 22 aa, Artificial Sequence
  Description of Artificial Sequence: Synthetic peptide
  Seed: MDPRMCSLMQGSTLPRRSGAAG
MDPRMFSLAQSSTLPRRSGAAG

SEQ ID NO: 105302 - protein, 22 aa, Artificial Sequence
  Description of Artificial Sequence: Synthetic peptide
  Seed: MDPRMCSLMQGSTLPRRSGAAG
MDPRMFSLAQSSTMPRRSGAAG

SEQ ID NO: 105303 - protein, 22 aa, Artificial Sequence
  Description of Artificial Sequence: Synthetic peptide
  Seed: MDPRMCSLMQGSTLPRRSGAAG
MDPRMFSLAQSSTNPRRSGAAG

SEQ ID NO: 105304 - protein, 22 aa, Artificial Sequence
  Description of Artificial Sequence: Synthetic peptide
  Seed: MDPRMCSLMQGSTLPRRSGAAG
MDPRMFSLAQSSTSPRRSGAAG

SEQ ID NO: 105305 - protein, 22 aa, Artificial Sequence
  Description of Artificial Sequence: Synthetic peptide
  Seed: MDPRMCSLMQGSTLPRRSGAAG
MDPRMFSLAQSSTTPRRSGAAG

SEQ ID NO: 105306 - protein, 22 aa, Artificial Sequence
  Description of Artificial Sequence: Synthetic peptide
  Seed: MDPRMCSLMQGSTLPRRSGAAG
MDPRMFSLAQSSTVPRRSGAAG

SEQ ID NO: 105307 - protein, 22 aa, Artificial Sequence
  Description of Artificial Sequence: Synthetic peptide
  Seed: MDPRMCSLMQGSTLPRRSGAAG
MDPRMFSLAQTSTAPRRSGAAG

SEQ ID NO: 105308 - protein, 22 aa, Artificial Sequence
  Description of Artificial Sequence: Synthetic peptide
  Seed: MDPRMCSLMQGSTLPRRSGAAG
MDPRMFSLAQTSTIPRRSGAAG

SEQ ID NO: 105309 - protein, 22 aa, Artificial Sequence
  Description of Artificial Sequence: Synthetic peptide
  Seed: MDPRMCSLMQGSTLPRRSGAAG
MDPRMFSLAQTSTLPRRSGAAG

SEQ ID NO: 105310 - protein, 22 aa, Artificial Sequence
  Description of Artificial Sequence: Synthetic peptide
  Seed: MDPRMCSLMQGSTLPRRSGAAG
MDPRMFSLAQTSTMPRRSGAAG

SEQ ID NO: 105311 - protein, 22 aa, Artificial Sequence
  Description of Artificial Sequence: Synthetic peptide
  Seed: MDPRMCSLMQGSTLPRRSGAAG
MDPRMFSLAQTSTNPRRSGAAG

SEQ ID NO: 105312 - protein, 22 aa, Artificial Sequence
  Description of Artificial Sequence: Synthetic peptide
  Seed: MDPRMCSLMQGSTLPRRSGAAG
MDPRMFSLAQTSTSPRRSGAAG

SEQ ID NO: 105313 - protein, 22 aa, Artificial Sequence
  Description of Artificial Sequence: Synthetic peptide
  Seed: MDPRMCSLMQGSTLPRRSGAAG
MDPRMFSLAQTSTTPRRSGAAG

SEQ ID NO: 105314 - protein, 22 aa, Artificial Sequence
  Description of Artificial Sequence: Synthetic peptide
  Seed: MDPRMCSLMQGSTLPRRSGAAG
MDPRMFSLAQTSTVPRRSGAAG

SEQ ID NO: 105315 - protein, 22 aa, Artificial Sequence
  Description of Artificial Sequence: Synthetic peptide
  Seed: MDPRMCSLMQGSTLPRRSGAAG
MDPRMFSLAQVSTAPRRSGAAG

SEQ ID NO: 105316 - protein, 22 aa, Artificial Sequence
  Description of Artificial Sequence: Synthetic peptide
  Seed: MDPRMCSLMQGSTLPRRSGAAG
MDPRMFSLAQVSTIPRRSGAAG

SEQ ID NO: 105317 - protein, 22 aa, Artificial Sequence
  Description of Artificial Sequence: Synthetic peptide
  Seed: MDPRMCSLMQGSTLPRRSGAAG
MDPRMFSLAQVSTLPRRSGAAG

SEQ ID NO: 105318 - protein, 22 aa, Artificial Sequence
  Description of Artificial Sequence: Synthetic peptide
  Seed: MDPRMCSLMQGSTLPRRSGAAG
MDPRMFSLAQVSTMPRRSGAAG

SEQ ID NO: 105319 - protein, 22 aa, Artificial Sequence
  Description of Artificial Sequence: Synthetic peptide
  Seed: MDPRMCSLMQGSTLPRRSGAAG
MDPRMFSLAQVSTNPRRSGAAG

SEQ ID NO: 105320 - protein, 22 aa, Artificial Sequence
  Description of Artificial Sequence: Synthetic peptide
  Seed: MDPRMCSLMQGSTLPRRSGAAG
MDPRMFSLAQVSTSPRRSGAAG

SEQ ID NO: 105321 - protein, 22 aa, Artificial Sequence
  Description of Artificial Sequence: Synthetic peptide
  Seed: MDPRMCSLMQGSTLPRRSGAAG
MDPRMFSLAQVSTTPRRSGAAG

SEQ ID NO: 105322 - protein, 22 aa, Artificial Sequence
  Description of Artificial Sequence: Synthetic peptide
  Seed: MDPRMCSLMQGSTLPRRSGAAG
MDPRMFSLAQVSTVPRRSGAAG

SEQ ID NO: 105323 - protein, 22 aa, Artificial Sequence
  Description of Artificial Sequence: Synthetic peptide
  Seed: MDPRMCSLMQGSTLPRRSGAAG
MDPRMFSLCQASTVPRRSGAAG

SEQ ID NO: 105324 - protein, 22 aa, Artificial Sequence
  Description of Artificial Sequence: Synthetic peptide
  Seed: MDPRMCSLMQGSTLPRRSGAAG
MDPRMFSLEQASTAPRRSGAAG

SEQ ID NO: 105325 - protein, 22 aa, Artificial Sequence
  Description of Artificial Sequence: Synthetic peptide
  Seed: MDPRMCSLMQGSTLPRRSGAAG
MDPRMFSLEQASTIPRRSGAAG

SEQ ID NO: 105326 - protein, 22 aa, Artificial Sequence
  Description of Artificial Sequence: Synthetic peptide
  Seed: MDPRMCSLMQGSTLPRRSGAAG
MDPRMFSLEQASTLPRRSGAAG

SEQ ID NO: 105327 - protein, 22 aa, Artificial Sequence
  Description of Artificial Sequence: Synthetic peptide
  Seed: MDPRMCSLMQGSTLPRRSGAAG
MDPRMFSLEQASTVPRRSGAAG

SEQ ID NO: 105328 - protein, 22 aa, Artificial Sequence
  Description of Artificial Sequence: Synthetic peptide
  Seed: MDPRMCSLMQGSTLPRRSGAAG
MDPRMFSLEQGSTIPRRSGAAG

SEQ ID NO: 105329 - protein, 22 aa, Artificial Sequence
  Description of Artificial Sequence: Synthetic peptide
  Seed: MDPRMCSLMQGSTLPRRSGAAG
MDPRMFSLEQGSTLPRRSGAAG

SEQ ID NO: 105330 - protein, 22 aa, Artificial Sequence
  Description of Artificial Sequence: Synthetic peptide
  Seed: MDPRMCSLMQGSTLPRRSGAAG
MDPRMFSLEQGSTVPRRSGAAG

SEQ ID NO: 105331 - protein, 22 aa, Artificial Sequence
  Description of Artificial Sequence: Synthetic peptide
  Seed: MDPRMCSLMQGSTLPRRSGAAG
MDPRMFSLEQSSTLPRRSGAAG

SEQ ID NO: 105332 - protein, 22 aa, Artificial Sequence
  Description of Artificial Sequence: Synthetic peptide
  Seed: MDPRMCSLMQGSTLPRRSGAAG
MDPRMFSLEQSSTVPRRSGAAG

SEQ ID NO: 105333 - protein, 22 aa, Artificial Sequence
  Description of Artificial Sequence: Synthetic peptide
  Seed: MDPRMCSLMQGSTLPRRSGAAG
MDPRMFSLFQASTAPRRSGAAG

SEQ ID NO: 105334 - protein, 22 aa, Artificial Sequence
  Description of Artificial Sequence: Synthetic peptide
  Seed: MDPRMCSLMQGSTLPRRSGAAG
MDPRMFSLFQASTIPRRSGAAG

SEQ ID NO: 105335 - protein, 22 aa, Artificial Sequence
  Description of Artificial Sequence: Synthetic peptide
  Seed: MDPRMCSLMQGSTLPRRSGAAG
MDPRMFSLFQASTLPRRSGAAG

SEQ ID NO: 105336 - protein, 22 aa, Artificial Sequence
  Description of Artificial Sequence: Synthetic peptide
  Seed: MDPRMCSLMQGSTLPRRSGAAG
MDPRMFSLFQASTNPRRSGAAG

SEQ ID NO: 105337 - protein, 22 aa, Artificial Sequence
  Description of Artificial Sequence: Synthetic peptide
  Seed: MDPRMCSLMQGSTLPRRSGAAG
MDPRMFSLFQASTSPRRSGAAG

SEQ ID NO: 105338 - protein, 22 aa, Artificial Sequence
  Description of Artificial Sequence: Synthetic peptide
  Seed: MDPRMCSLMQGSTLPRRSGAAG
MDPRMFSLFQASTVPRRSGAAG

SEQ ID NO: 105339 - protein, 22 aa, Artificial Sequence
  Description of Artificial Sequence: Synthetic peptide
  Seed: MDPRMCSLMQGSTLPRRSGAAG
MDPRMFSLFQGSTAPRRSGAAG

SEQ ID NO: 105340 - protein, 22 aa, Artificial Sequence
  Description of Artificial Sequence: Synthetic peptide
  Seed: MDPRMCSLMQGSTLPRRSGAAG
MDPRMFSLFQGSTVPRRSGAAG

SEQ ID NO: 105341 - protein, 22 aa, Artificial Sequence
  Description of Artificial Sequence: Synthetic peptide
  Seed: MDPRMCSLMQGSTLPRRSGAAG
MDPRMFSLFQPSTAPRRSGAAG

SEQ ID NO: 105342 - protein, 22 aa, Artificial Sequence
  Description of Artificial Sequence: Synthetic peptide
  Seed: MDPRMCSLMQGSTLPRRSGAAG
MDPRMFSLFQPSTNPRRSGAAG

SEQ ID NO: 105343 - protein, 22 aa, Artificial Sequence
  Description of Artificial Sequence: Synthetic peptide
  Seed: MDPRMCSLMQGSTLPRRSGAAG
MDPRMFSLFQPSTSPRRSGAAG

SEQ ID NO: 105344 - protein, 22 aa, Artificial Sequence
  Description of Artificial Sequence: Synthetic peptide
  Seed: MDPRMCSLMQGSTLPRRSGAAG
MDPRMFSLFQSSTAPRRSGAAG

SEQ ID NO: 105345 - protein, 22 aa, Artificial Sequence
  Description of Artificial Sequence: Synthetic peptide
  Seed: MDPRMCSLMQGSTLPRRSGAAG
MDPRMFSLFQSSTVPRRSGAAG

SEQ ID NO: 105346 - protein, 22 aa, Artificial Sequence
  Description of Artificial Sequence: Synthetic peptide
  Seed: MDPRMCSLMQGSTLPRRSGAAG
MDPRMFSLFQTSTAPRRSGAAG

SEQ ID NO: 105347 - protein, 22 aa, Artificial Sequence
  Description of Artificial Sequence: Synthetic peptide
  Seed: MDPRMCSLMQGSTLPRRSGAAG
MDPRMFSLFQVSTAPRRSGAAG

SEQ ID NO: 105348 - protein, 22 aa, Artificial Sequence
  Description of Artificial Sequence: Synthetic peptide
  Seed: MDPRMCSLMQGSTLPRRSGAAG
MDPRMFSLFQVSTNPRRSGAAG

SEQ ID NO: 105349 - protein, 22 aa, Artificial Sequence
  Description of Artificial Sequence: Synthetic peptide
  Seed: MDPRMCSLMQGSTLPRRSGAAG
MDPRMFSLGQASTAPRRSGAAG

SEQ ID NO: 105350 - protein, 22 aa, Artificial Sequence
  Description of Artificial Sequence: Synthetic peptide
  Seed: MDPRMCSLMQGSTLPRRSGAAG
MDPRMFSLGQASTIPRRSGAAG

SEQ ID NO: 105351 - protein, 22 aa, Artificial Sequence
  Description of Artificial Sequence: Synthetic peptide
  Seed: MDPRMCSLMQGSTLPRRSGAAG
MDPRMFSLGQASTLPRRSGAAG

SEQ ID NO: 105352 - protein, 22 aa, Artificial Sequence
  Description of Artificial Sequence: Synthetic peptide
  Seed: MDPRMCSLMQGSTLPRRSGAAG
MDPRMFSLGQASTVPRRSGAAG

SEQ ID NO: 105353 - protein, 22 aa, Artificial Sequence
  Description of Artificial Sequence: Synthetic peptide
  Seed: MDPRMCSLMQGSTLPRRSGAAG
MDPRMFSLHQASTLPRRSGAAG

SEQ ID NO: 105354 - protein, 22 aa, Artificial Sequence
  Description of Artificial Sequence: Synthetic peptide
  Seed: MDPRMCSLMQGSTLPRRSGAAG
MDPRMFSLIQASTAPRRSGAAG

SEQ ID NO: 105355 - protein, 22 aa, Artificial Sequence
  Description of Artificial Sequence: Synthetic peptide
  Seed: MDPRMCSLMQGSTLPRRSGAAG
MDPRMFSLIQASTCPRRSGAAG

SEQ ID NO: 105356 - protein, 22 aa, Artificial Sequence
  Description of Artificial Sequence: Synthetic peptide
  Seed: MDPRMCSLMQGSTLPRRSGAAG
MDPRMFSLIQASTDPRRSGAAG

SEQ ID NO: 105357 - protein, 22 aa, Artificial Sequence
  Description of Artificial Sequence: Synthetic peptide
  Seed: MDPRMCSLMQGSTLPRRSGAAG
MDPRMFSLIQASTEPRRSGAAG

SEQ ID NO: 105358 - protein, 22 aa, Artificial Sequence
  Description of Artificial Sequence: Synthetic peptide
  Seed: MDPRMCSLMQGSTLPRRSGAAG
MDPRMFSLIQASTFPRRSGAAG

SEQ ID NO: 105359 - protein, 22 aa, Artificial Sequence
  Description of Artificial Sequence: Synthetic peptide
  Seed: MDPRMCSLMQGSTLPRRSGAAG
MDPRMFSLIQASTGPRRSGAAG

SEQ ID NO: 105360 - protein, 22 aa, Artificial Sequence
  Description of Artificial Sequence: Synthetic peptide
  Seed: MDPRMCSLMQGSTLPRRSGAAG
MDPRMFSLIQASTHPRRSGAAG

SEQ ID NO: 105361 - protein, 22 aa, Artificial Sequence
  Description of Artificial Sequence: Synthetic peptide
  Seed: MDPRMCSLMQGSTLPRRSGAAG
MDPRMFSLIQASTIPRRSGAAG

SEQ ID NO: 105362 - protein, 22 aa, Artificial Sequence
  Description of Artificial Sequence: Synthetic peptide
  Seed: MDPRMCSLMQGSTLPRRSGAAG
MDPRMFSLIQASTLPRRSGAAG

SEQ ID NO: 105363 - protein, 22 aa, Artificial Sequence
  Description of Artificial Sequence: Synthetic peptide
  Seed: MDPRMCSLMQGSTLPRRSGAAG
MDPRMFSLIQASTMPRRSGAAG

SEQ ID NO: 105364 - protein, 22 aa, Artificial Sequence
  Description of Artificial Sequence: Synthetic peptide
  Seed: MDPRMCSLMQGSTLPRRSGAAG
MDPRMFSLIQASTNPRRSGAAG

SEQ ID NO: 105365 - protein, 22 aa, Artificial Sequence
  Description of Artificial Sequence: Synthetic peptide
  Seed: MDPRMCSLMQGSTLPRRSGAAG
MDPRMFSLIQASTPPRRSGAAG

SEQ ID NO: 105366 - protein, 22 aa, Artificial Sequence
  Description of Artificial Sequence: Synthetic peptide
  Seed: MDPRMCSLMQGSTLPRRSGAAG
MDPRMFSLIQASTQPRRSGAAG

SEQ ID NO: 105367 - protein, 22 aa, Artificial Sequence
  Description of Artificial Sequence: Synthetic peptide
  Seed: MDPRMCSLMQGSTLPRRSGAAG
MDPRMFSLIQASTSPRRSGAAG

SEQ ID NO: 105368 - protein, 22 aa, Artificial Sequence
  Description of Artificial Sequence: Synthetic peptide
  Seed: MDPRMCSLMQGSTLPRRSGAAG
MDPRMFSLIQASTTPRRSGAAG

SEQ ID NO: 105369 - protein, 22 aa, Artificial Sequence
  Description of Artificial Sequence: Synthetic peptide
  Seed: MDPRMCSLMQGSTLPRRSGAAG
MDPRMFSLIQASTVPRRSGAAG

SEQ ID NO: 105370 - protein, 22 aa, Artificial Sequence
  Description of Artificial Sequence: Synthetic peptide
  Seed: MDPRMCSLMQGSTLPRRSGAAG
MDPRMFSLIQGSTAPRRSGAAG

SEQ ID NO: 105371 - protein, 22 aa, Artificial Sequence
  Description of Artificial Sequence: Synthetic peptide
  Seed: MDPRMCSLMQGSTLPRRSGAAG
MDPRMFSLIQGSTCPRRSGAAG

SEQ ID NO: 105372 - protein, 22 aa, Artificial Sequence
  Description of Artificial Sequence: Synthetic peptide
  Seed: MDPRMCSLMQGSTLPRRSGAAG
MDPRMFSLIQGSTGPRRSGAAG

SEQ ID NO: 105373 - protein, 22 aa, Artificial Sequence
  Description of Artificial Sequence: Synthetic peptide
  Seed: MDPRMCSLMQGSTLPRRSGAAG
MDPRMFSLIQGSTIPRRSGAAG

SEQ ID NO: 105374 - protein, 22 aa, Artificial Sequence
  Description of Artificial Sequence: Synthetic peptide
  Seed: MDPRMCSLMQGSTLPRRSGAAG
MDPRMFSLIQGSTLPRRSGAAG

SEQ ID NO: 105375 - protein, 22 aa, Artificial Sequence
  Description of Artificial Sequence: Synthetic peptide
  Seed: MDPRMCSLMQGSTLPRRSGAAG
MDPRMFSLIQGSTMPRRSGAAG

SEQ ID NO: 105376 - protein, 22 aa, Artificial Sequence
  Description of Artificial Sequence: Synthetic peptide
  Seed: MDPRMCSLMQGSTLPRRSGAAG
MDPRMFSLIQGSTNPRRSGAAG

SEQ ID NO: 105377 - protein, 22 aa, Artificial Sequence
  Description of Artificial Sequence: Synthetic peptide
  Seed: MDPRMCSLMQGSTLPRRSGAAG
MDPRMFSLIQGSTSPRRSGAAG

SEQ ID NO: 105378 - protein, 22 aa, Artificial Sequence
  Description of Artificial Sequence: Synthetic peptide
  Seed: MDPRMCSLMQGSTLPRRSGAAG
MDPRMFSLIQGSTTPRRSGAAG

SEQ ID NO: 105379 - protein, 22 aa, Artificial Sequence
  Description of Artificial Sequence: Synthetic peptide
  Seed: MDPRMCSLMQGSTLPRRSGAAG
MDPRMFSLIQGSTVPRRSGAAG

SEQ ID NO: 105380 - protein, 22 aa, Artificial Sequence
  Description of Artificial Sequence: Synthetic peptide
  Seed: MDPRMCSLMQGSTLPRRSGAAG
MDPRMFSLIQISTAPRRSGAAG

SEQ ID NO: 105381 - protein, 22 aa, Artificial Sequence
  Description of Artificial Sequence: Synthetic peptide
  Seed: MDPRMCSLMQGSTLPRRSGAAG
MDPRMFSLIQISTGPRRSGAAG

SEQ ID NO: 105382 - protein, 22 aa, Artificial Sequence
  Description of Artificial Sequence: Synthetic peptide
  Seed: MDPRMCSLMQGSTLPRRSGAAG
MDPRMFSLIQISTIPRRSGAAG

SEQ ID NO: 105383 - protein, 22 aa, Artificial Sequence
  Description of Artificial Sequence: Synthetic peptide
  Seed: MDPRMCSLMQGSTLPRRSGAAG
MDPRMFSLIQISTMPRRSGAAG

SEQ ID NO: 105384 - protein, 22 aa, Artificial Sequence
  Description of Artificial Sequence: Synthetic peptide
  Seed: MDPRMCSLMQGSTLPRRSGAAG
MDPRMFSLIQISTNPRRSGAAG

SEQ ID NO: 105385 - protein, 22 aa, Artificial Sequence
  Description of Artificial Sequence: Synthetic peptide
  Seed: MDPRMCSLMQGSTLPRRSGAAG
MDPRMFSLIQISTSPRRSGAAG

SEQ ID NO: 105386 - protein, 22 aa, Artificial Sequence
  Description of Artificial Sequence: Synthetic peptide
  Seed: MDPRMCSLMQGSTLPRRSGAAG
MDPRMFSLIQISTTPRRSGAAG

SEQ ID NO: 105387 - protein, 22 aa, Artificial Sequence
  Description of Artificial Sequence: Synthetic peptide
  Seed: MDPRMCSLMQGSTLPRRSGAAG
MDPRMFSLIQISTVPRRSGAAG

SEQ ID NO: 105388 - protein, 22 aa, Artificial Sequence
  Description of Artificial Sequence: Synthetic peptide
  Seed: MDPRMCSLMQGSTLPRRSGAAG
MDPRMFSLIQLSTAPRRSGAAG

SEQ ID NO: 105389 - protein, 22 aa, Artificial Sequence
  Description of Artificial Sequence: Synthetic peptide
  Seed: MDPRMCSLMQGSTLPRRSGAAG
MDPRMFSLIQLSTNPRRSGAAG

SEQ ID NO: 105390 - protein, 22 aa, Artificial Sequence
  Description of Artificial Sequence: Synthetic peptide
  Seed: MDPRMCSLMQGSTLPRRSGAAG
MDPRMFSLIQLSTSPRRSGAAG

SEQ ID NO: 105391 - protein, 22 aa, Artificial Sequence
  Description of Artificial Sequence: Synthetic peptide
  Seed: MDPRMCSLMQGSTLPRRSGAAG
MDPRMFSLIQMSTAPRRSGAAG

SEQ ID NO: 105392 - protein, 22 aa, Artificial Sequence
  Description of Artificial Sequence: Synthetic peptide
  Seed: MDPRMCSLMQGSTLPRRSGAAG
MDPRMFSLIQMSTNPRRSGAAG

SEQ ID NO: 105393 - protein, 22 aa, Artificial Sequence
  Description of Artificial Sequence: Synthetic peptide
  Seed: MDPRMCSLMQGSTLPRRSGAAG
MDPRMFSLIQMSTSPRRSGAAG

SEQ ID NO: 105394 - protein, 22 aa, Artificial Sequence
  Description of Artificial Sequence: Synthetic peptide
  Seed: MDPRMCSLMQGSTLPRRSGAAG
MDPRMFSLIQNSTAPRRSGAAG

SEQ ID NO: 105395 - protein, 22 aa, Artificial Sequence
  Description of Artificial Sequence: Synthetic peptide
  Seed: MDPRMCSLMQGSTLPRRSGAAG
MDPRMFSLIQNSTIPRRSGAAG

SEQ ID NO: 105396 - protein, 22 aa, Artificial Sequence
  Description of Artificial Sequence: Synthetic peptide
  Seed: MDPRMCSLMQGSTLPRRSGAAG
MDPRMFSLIQNSTLPRRSGAAG

SEQ ID NO: 105397 - protein, 22 aa, Artificial Sequence
  Description of Artificial Sequence: Synthetic peptide
  Seed: MDPRMCSLMQGSTLPRRSGAAG
MDPRMFSLIQNSTNPRRSGAAG

SEQ ID NO: 105398 - protein, 22 aa, Artificial Sequence
  Description of Artificial Sequence: Synthetic peptide
  Seed: MDPRMCSLMQGSTLPRRSGAAG
MDPRMFSLIQNSTSPRRSGAAG

SEQ ID NO: 105399 - protein, 22 aa, Artificial Sequence
  Description of Artificial Sequence: Synthetic peptide
  Seed: MDPRMCSLMQGSTLPRRSGAAG
MDPRMFSLIQNSTTPRRSGAAG

SEQ ID NO: 105400 - protein, 22 aa, Artificial Sequence
  Description of Artificial Sequence: Synthetic peptide
  Seed: MDPRMCSLMQGSTLPRRSGAAG
MDPRMFSLIQNSTVPRRSGAAG

SEQ ID NO: 105401 - protein, 22 aa, Artificial Sequence
  Description of Artificial Sequence: Synthetic peptide
  Seed: MDPRMCSLMQGSTLPRRSGAAG
MDPRMFSLIQPSTAPRRSGAAG

SEQ ID NO: 105402 - protein, 22 aa, Artificial Sequence
  Description of Artificial Sequence: Synthetic peptide
  Seed: MDPRMCSLMQGSTLPRRSGAAG
MDPRMFSLIQPSTGPRRSGAAG

SEQ ID NO: 105403 - protein, 22 aa, Artificial Sequence
  Description of Artificial Sequence: Synthetic peptide
  Seed: MDPRMCSLMQGSTLPRRSGAAG
MDPRMFSLIQPSTHPRRSGAAG

SEQ ID NO: 105404 - protein, 22 aa, Artificial Sequence
  Description of Artificial Sequence: Synthetic peptide
  Seed: MDPRMCSLMQGSTLPRRSGAAG
MDPRMFSLIQPSTIPRRSGAAG

SEQ ID NO: 105405 - protein, 22 aa, Artificial Sequence
  Description of Artificial Sequence: Synthetic peptide
  Seed: MDPRMCSLMQGSTLPRRSGAAG
MDPRMFSLIQPSTLPRRSGAAG

SEQ ID NO: 105406 - protein, 22 aa, Artificial Sequence
  Description of Artificial Sequence: Synthetic peptide
  Seed: MDPRMCSLMQGSTLPRRSGAAG
MDPRMFSLIQPSTMPRRSGAAG

SEQ ID NO: 105407 - protein, 22 aa, Artificial Sequence
  Description of Artificial Sequence: Synthetic peptide
  Seed: MDPRMCSLMQGSTLPRRSGAAG
MDPRMFSLIQPSTNPRRSGAAG

SEQ ID NO: 105408 - protein, 22 aa, Artificial Sequence
  Description of Artificial Sequence: Synthetic peptide
  Seed: MDPRMCSLMQGSTLPRRSGAAG
MDPRMFSLIQPSTQPRRSGAAG

SEQ ID NO: 105409 - protein, 22 aa, Artificial Sequence
  Description of Artificial Sequence: Synthetic peptide
  Seed: MDPRMCSLMQGSTLPRRSGAAG
MDPRMFSLIQPSTSPRRSGAAG

SEQ ID NO: 105410 - protein, 22 aa, Artificial Sequence
  Description of Artificial Sequence: Synthetic peptide
  Seed: MDPRMCSLMQGSTLPRRSGAAG
MDPRMFSLIQPSTTPRRSGAAG

SEQ ID NO: 105411 - protein, 22 aa, Artificial Sequence
  Description of Artificial Sequence: Synthetic peptide
  Seed: MDPRMCSLMQGSTLPRRSGAAG
MDPRMFSLIQPSTVPRRSGAAG

SEQ ID NO: 105412 - protein, 22 aa, Artificial Sequence
  Description of Artificial Sequence: Synthetic peptide
  Seed: MDPRMCSLMQGSTLPRRSGAAG
MDPRMFSLIQSSTAPRRSGAAG

SEQ ID NO: 105413 - protein, 22 aa, Artificial Sequence
  Description of Artificial Sequence: Synthetic peptide
  Seed: MDPRMCSLMQGSTLPRRSGAAG
MDPRMFSLIQSSTGPRRSGAAG

SEQ ID NO: 105414 - protein, 22 aa, Artificial Sequence
  Description of Artificial Sequence: Synthetic peptide
  Seed: MDPRMCSLMQGSTLPRRSGAAG
MDPRMFSLIQSSTHPRRSGAAG

SEQ ID NO: 105415 - protein, 22 aa, Artificial Sequence
  Description of Artificial Sequence: Synthetic peptide
  Seed: MDPRMCSLMQGSTLPRRSGAAG
MDPRMFSLIQSSTIPRRSGAAG

SEQ ID NO: 105416 - protein, 22 aa, Artificial Sequence
  Description of Artificial Sequence: Synthetic peptide
  Seed: MDPRMCSLMQGSTLPRRSGAAG
MDPRMFSLIQSSTLPRRSGAAG

SEQ ID NO: 105417 - protein, 22 aa, Artificial Sequence
  Description of Artificial Sequence: Synthetic peptide
  Seed: MDPRMCSLMQGSTLPRRSGAAG
MDPRMFSLIQSSTMPRRSGAAG

SEQ ID NO: 105418 - protein, 22 aa, Artificial Sequence
  Description of Artificial Sequence: Synthetic peptide
  Seed: MDPRMCSLMQGSTLPRRSGAAG
MDPRMFSLIQSSTNPRRSGAAG

SEQ ID NO: 105419 - protein, 22 aa, Artificial Sequence
  Description of Artificial Sequence: Synthetic peptide
  Seed: MDPRMCSLMQGSTLPRRSGAAG
MDPRMFSLIQSSTQPRRSGAAG

SEQ ID NO: 105420 - protein, 22 aa, Artificial Sequence
  Description of Artificial Sequence: Synthetic peptide
  Seed: MDPRMCSLMQGSTLPRRSGAAG
MDPRMFSLIQSSTSPRRSGAAG

SEQ ID NO: 105421 - protein, 22 aa, Artificial Sequence
  Description of Artificial Sequence: Synthetic peptide
  Seed: MDPRMCSLMQGSTLPRRSGAAG
MDPRMFSLIQSSTTPRRSGAAG

SEQ ID NO: 105422 - protein, 22 aa, Artificial Sequence
  Description of Artificial Sequence: Synthetic peptide
  Seed: MDPRMCSLMQGSTLPRRSGAAG
MDPRMFSLIQSSTVPRRSGAAG

SEQ ID NO: 105423 - protein, 22 aa, Artificial Sequence
  Description of Artificial Sequence: Synthetic peptide
  Seed: MDPRMCSLMQGSTLPRRSGAAG
MDPRMFSLIQTSTAPRRSGAAG

SEQ ID NO: 105424 - protein, 22 aa, Artificial Sequence
  Description of Artificial Sequence: Synthetic peptide
  Seed: MDPRMCSLMQGSTLPRRSGAAG
MDPRMFSLIQTSTGPRRSGAAG

SEQ ID NO: 105425 - protein, 22 aa, Artificial Sequence
  Description of Artificial Sequence: Synthetic peptide
  Seed: MDPRMCSLMQGSTLPRRSGAAG
MDPRMFSLIQTSTHPRRSGAAG

SEQ ID NO: 105426 - protein, 22 aa, Artificial Sequence
  Description of Artificial Sequence: Synthetic peptide
  Seed: MDPRMCSLMQGSTLPRRSGAAG
MDPRMFSLIQTSTIPRRSGAAG

SEQ ID NO: 105427 - protein, 22 aa, Artificial Sequence
  Description of Artificial Sequence: Synthetic peptide
  Seed: MDPRMCSLMQGSTLPRRSGAAG
MDPRMFSLIQTSTLPRRSGAAG

SEQ ID NO: 105428 - protein, 22 aa, Artificial Sequence
  Description of Artificial Sequence: Synthetic peptide
  Seed: MDPRMCSLMQGSTLPRRSGAAG
MDPRMFSLIQTSTMPRRSGAAG

SEQ ID NO: 105429 - protein, 22 aa, Artificial Sequence
  Description of Artificial Sequence: Synthetic peptide
  Seed: MDPRMCSLMQGSTLPRRSGAAG
MDPRMFSLIQTSTNPRRSGAAG

SEQ ID NO: 105430 - protein, 22 aa, Artificial Sequence
  Description of Artificial Sequence: Synthetic peptide
  Seed: MDPRMCSLMQGSTLPRRSGAAG
MDPRMFSLIQTSTQPRRSGAAG

SEQ ID NO: 105431 - protein, 22 aa, Artificial Sequence
  Description of Artificial Sequence: Synthetic peptide
  Seed: MDPRMCSLMQGSTLPRRSGAAG
MDPRMFSLIQTSTSPRRSGAAG

SEQ ID NO: 105432 - protein, 22 aa, Artificial Sequence
  Description of Artificial Sequence: Synthetic peptide
  Seed: MDPRMCSLMQGSTLPRRSGAAG
MDPRMFSLIQTSTTPRRSGAAG

SEQ ID NO: 105433 - protein, 22 aa, Artificial Sequence
  Description of Artificial Sequence: Synthetic peptide
  Seed: MDPRMCSLMQGSTLPRRSGAAG
MDPRMFSLIQTSTVPRRSGAAG

SEQ ID NO: 105434 - protein, 22 aa, Artificial Sequence
  Description of Artificial Sequence: Synthetic peptide
  Seed: MDPRMCSLMQGSTLPRRSGAAG
MDPRMFSLIQVSTAPRRSGAAG

SEQ ID NO: 105435 - protein, 22 aa, Artificial Sequence
  Description of Artificial Sequence: Synthetic peptide
  Seed: MDPRMCSLMQGSTLPRRSGAAG
MDPRMFSLIQVSTGPRRSGAAG

SEQ ID NO: 105436 - protein, 22 aa, Artificial Sequence
  Description of Artificial Sequence: Synthetic peptide
  Seed: MDPRMCSLMQGSTLPRRSGAAG
MDPRMFSLIQVSTHPRRSGAAG

SEQ ID NO: 105437 - protein, 22 aa, Artificial Sequence
  Description of Artificial Sequence: Synthetic peptide
  Seed: MDPRMCSLMQGSTLPRRSGAAG
MDPRMFSLIQVSTIPRRSGAAG

SEQ ID NO: 105438 - protein, 22 aa, Artificial Sequence
  Description of Artificial Sequence: Synthetic peptide
  Seed: MDPRMCSLMQGSTLPRRSGAAG
MDPRMFSLIQVSTLPRRSGAAG

SEQ ID NO: 105439 - protein, 22 aa, Artificial Sequence
  Description of Artificial Sequence: Synthetic peptide
  Seed: MDPRMCSLMQGSTLPRRSGAAG
MDPRMFSLIQVSTMPRRSGAAG

SEQ ID NO: 105440 - protein, 22 aa, Artificial Sequence
  Description of Artificial Sequence: Synthetic peptide
  Seed: MDPRMCSLMQGSTLPRRSGAAG
MDPRMFSLIQVSTNPRRSGAAG

SEQ ID NO: 105441 - protein, 22 aa, Artificial Sequence
  Description of Artificial Sequence: Synthetic peptide
  Seed: MDPRMCSLMQGSTLPRRSGAAG
MDPRMFSLIQVSTQPRRSGAAG

SEQ ID NO: 105442 - protein, 22 aa, Artificial Sequence
  Description of Artificial Sequence: Synthetic peptide
  Seed: MDPRMCSLMQGSTLPRRSGAAG
MDPRMFSLIQVSTSPRRSGAAG

SEQ ID NO: 105443 - protein, 22 aa, Artificial Sequence
  Description of Artificial Sequence: Synthetic peptide
  Seed: MDPRMCSLMQGSTLPRRSGAAG
MDPRMFSLIQVSTTPRRSGAAG

SEQ ID NO: 105444 - protein, 22 aa, Artificial Sequence
  Description of Artificial Sequence: Synthetic peptide
  Seed: MDPRMCSLMQGSTLPRRSGAAG
MDPRMFSLIQVSTVPRRSGAAG

SEQ ID NO: 105445 - protein, 22 aa, Artificial Sequence
  Description of Artificial Sequence: Synthetic peptide
  Seed: MDPRMCSLMQGSTLPRRSGAAG
MDPRMFSLLQASTAPRRSGAAG

SEQ ID NO: 105446 - protein, 22 aa, Artificial Sequence
  Description of Artificial Sequence: Synthetic peptide
  Seed: MDPRMCSLMQGSTLPRRSGAAG
MDPRMFSLLQASTCPRRSGAAG

SEQ ID NO: 105447 - protein, 22 aa, Artificial Sequence
  Description of Artificial Sequence: Synthetic peptide
  Seed: MDPRMCSLMQGSTLPRRSGAAG
MDPRMFSLLQASTDPRRSGAAG

SEQ ID NO: 105448 - protein, 22 aa, Artificial Sequence
  Description of Artificial Sequence: Synthetic peptide
  Seed: MDPRMCSLMQGSTLPRRSGAAG
MDPRMFSLLQASTEPRRSGAAG

SEQ ID NO: 105449 - protein, 22 aa, Artificial Sequence
  Description of Artificial Sequence: Synthetic peptide
  Seed: MDPRMCSLMQGSTLPRRSGAAG
MDPRMFSLLQASTFPRRSGAAG

SEQ ID NO: 105450 - protein, 22 aa, Artificial Sequence
  Description of Artificial Sequence: Synthetic peptide
  Seed: MDPRMCSLMQGSTLPRRSGAAG
MDPRMFSLLQASTGPRRSGAAG

SEQ ID NO: 105451 - protein, 22 aa, Artificial Sequence
  Description of Artificial Sequence: Synthetic peptide
  Seed: MDPRMCSLMQGSTLPRRSGAAG
MDPRMFSLLQASTHPRRSGAAG

SEQ ID NO: 105452 - protein, 22 aa, Artificial Sequence
  Description of Artificial Sequence: Synthetic peptide
  Seed: MDPRMCSLMQGSTLPRRSGAAG
MDPRMFSLLQASTIPRRSGAAG

SEQ ID NO: 105453 - protein, 22 aa, Artificial Sequence
  Description of Artificial Sequence: Synthetic peptide
  Seed: MDPRMCSLMQGSTLPRRSGAAG
MDPRMFSLLQASTLPRRSGAAG

SEQ ID NO: 105454 - protein, 22 aa, Artificial Sequence
  Description of Artificial Sequence: Synthetic peptide
  Seed: MDPRMCSLMQGSTLPRRSGAAG
MDPRMFSLLQASTMPRRSGAAG

SEQ ID NO: 105455 - protein, 22 aa, Artificial Sequence
  Description of Artificial Sequence: Synthetic peptide
  Seed: MDPRMCSLMQGSTLPRRSGAAG
MDPRMFSLLQASTNPRRSGAAG

SEQ ID NO: 105456 - protein, 22 aa, Artificial Sequence
  Description of Artificial Sequence: Synthetic peptide
  Seed: MDPRMCSLMQGSTLPRRSGAAG
MDPRMFSLLQASTPPRRSGAAG

SEQ ID NO: 105457 - protein, 22 aa, Artificial Sequence
  Description of Artificial Sequence: Synthetic peptide
  Seed: MDPRMCSLMQGSTLPRRSGAAG
MDPRMFSLLQASTQPRRSGAAG

SEQ ID NO: 105458 - protein, 22 aa, Artificial Sequence
  Description of Artificial Sequence: Synthetic peptide
  Seed: MDPRMCSLMQGSTLPRRSGAAG
MDPRMFSLLQASTSPRRSGAAG

SEQ ID NO: 105459 - protein, 22 aa, Artificial Sequence
  Description of Artificial Sequence: Synthetic peptide
  Seed: MDPRMCSLMQGSTLPRRSGAAG
MDPRMFSLLQASTTPRRSGAAG

SEQ ID NO: 105460 - protein, 22 aa, Artificial Sequence
  Description of Artificial Sequence: Synthetic peptide
  Seed: MDPRMCSLMQGSTLPRRSGAAG
MDPRMFSLLQASTVPRRSGAAG

SEQ ID NO: 105461 - protein, 22 aa, Artificial Sequence
  Description of Artificial Sequence: Synthetic peptide
  Seed: MDPRMCSLMQGSTLPRRSGAAG
MDPRMFSLLQASTYPRRSGAAG

SEQ ID NO: 105462 - protein, 22 aa, Artificial Sequence
  Description of Artificial Sequence: Synthetic peptide
  Seed: MDPRMCSLMQGSTLPRRSGAAG
MDPRMFSLLQGSTAPRRSGAAG

SEQ ID NO: 105463 - protein, 22 aa, Artificial Sequence
  Description of Artificial Sequence: Synthetic peptide
  Seed: MDPRMCSLMQGSTLPRRSGAAG
MDPRMFSLLQGSTCPRRSGAAG

SEQ ID NO: 105464 - protein, 22 aa, Artificial Sequence
  Description of Artificial Sequence: Synthetic peptide
  Seed: MDPRMCSLMQGSTLPRRSGAAG
MDPRMFSLLQGSTFPRRSGAAG

SEQ ID NO: 105465 - protein, 22 aa, Artificial Sequence
  Description of Artificial Sequence: Synthetic peptide
  Seed: MDPRMCSLMQGSTLPRRSGAAG
MDPRMFSLLQGSTGPRRSGAAG

SEQ ID NO: 105466 - protein, 22 aa, Artificial Sequence
  Description of Artificial Sequence: Synthetic peptide
  Seed: MDPRMCSLMQGSTLPRRSGAAG
MDPRMFSLLQGSTIPRRSGAAG

SEQ ID NO: 105467 - protein, 22 aa, Artificial Sequence
  Description of Artificial Sequence: Synthetic peptide
  Seed: MDPRMCSLMQGSTLPRRSGAAG
MDPRMFSLLQGSTLPRRSGAAG

SEQ ID NO: 105468 - protein, 22 aa, Artificial Sequence
  Description of Artificial Sequence: Synthetic peptide
  Seed: MDPRMCSLMQGSTLPRRSGAAG
MDPRMFSLLQGSTMPRRSGAAG

SEQ ID NO: 105469 - protein, 22 aa, Artificial Sequence
  Description of Artificial Sequence: Synthetic peptide
  Seed: MDPRMCSLMQGSTLPRRSGAAG
MDPRMFSLLQGSTNPRRSGAAG

SEQ ID NO: 105470 - protein, 22 aa, Artificial Sequence
  Description of Artificial Sequence: Synthetic peptide
  Seed: MDPRMCSLMQGSTLPRRSGAAG
MDPRMFSLLQGSTSPRRSGAAG

SEQ ID NO: 105471 - protein, 22 aa, Artificial Sequence
  Description of Artificial Sequence: Synthetic peptide
  Seed: MDPRMCSLMQGSTLPRRSGAAG
MDPRMFSLLQGSTTPRRSGAAG

SEQ ID NO: 105472 - protein, 22 aa, Artificial Sequence
  Description of Artificial Sequence: Synthetic peptide
  Seed: MDPRMCSLMQGSTLPRRSGAAG
MDPRMFSLLQGSTVPRRSGAAG

SEQ ID NO: 105473 - protein, 22 aa, Artificial Sequence
  Description of Artificial Sequence: Synthetic peptide
  Seed: MDPRMCSLMQGSTLPRRSGAAG
MDPRMFSLLQISTAPRRSGAAG

SEQ ID NO: 105474 - protein, 22 aa, Artificial Sequence
  Description of Artificial Sequence: Synthetic peptide
  Seed: MDPRMCSLMQGSTLPRRSGAAG
MDPRMFSLLQISTGPRRSGAAG

SEQ ID NO: 105475 - protein, 22 aa, Artificial Sequence
  Description of Artificial Sequence: Synthetic peptide
  Seed: MDPRMCSLMQGSTLPRRSGAAG
MDPRMFSLLQISTHPRRSGAAG

SEQ ID NO: 105476 - protein, 22 aa, Artificial Sequence
  Description of Artificial Sequence: Synthetic peptide
  Seed: MDPRMCSLMQGSTLPRRSGAAG
MDPRMFSLLQISTIPRRSGAAG

SEQ ID NO: 105477 - protein, 22 aa, Artificial Sequence
  Description of Artificial Sequence: Synthetic peptide
  Seed: MDPRMCSLMQGSTLPRRSGAAG
MDPRMFSLLQISTLPRRSGAAG

SEQ ID NO: 105478 - protein, 22 aa, Artificial Sequence
  Description of Artificial Sequence: Synthetic peptide
  Seed: MDPRMCSLMQGSTLPRRSGAAG
MDPRMFSLLQISTMPRRSGAAG

SEQ ID NO: 105479 - protein, 22 aa, Artificial Sequence
  Description of Artificial Sequence: Synthetic peptide
  Seed: MDPRMCSLMQGSTLPRRSGAAG
MDPRMFSLLQISTNPRRSGAAG

SEQ ID NO: 105480 - protein, 22 aa, Artificial Sequence
  Description of Artificial Sequence: Synthetic peptide
  Seed: MDPRMCSLMQGSTLPRRSGAAG
MDPRMFSLLQISTQPRRSGAAG

SEQ ID NO: 105481 - protein, 22 aa, Artificial Sequence
  Description of Artificial Sequence: Synthetic peptide
  Seed: MDPRMCSLMQGSTLPRRSGAAG
MDPRMFSLLQISTSPRRSGAAG

SEQ ID NO: 105482 - protein, 22 aa, Artificial Sequence
  Description of Artificial Sequence: Synthetic peptide
  Seed: MDPRMCSLMQGSTLPRRSGAAG
MDPRMFSLLQISTTPRRSGAAG

SEQ ID NO: 105483 - protein, 22 aa, Artificial Sequence
  Description of Artificial Sequence: Synthetic peptide
  Seed: MDPRMCSLMQGSTLPRRSGAAG
MDPRMFSLLQISTVPRRSGAAG

SEQ ID NO: 105484 - protein, 22 aa, Artificial Sequence
  Description of Artificial Sequence: Synthetic peptide
  Seed: MDPRMCSLMQGSTLPRRSGAAG
MDPRMFSLLQLSTAPRRSGAAG

SEQ ID NO: 105485 - protein, 22 aa, Artificial Sequence
  Description of Artificial Sequence: Synthetic peptide
  Seed: MDPRMCSLMQGSTLPRRSGAAG
MDPRMFSLLQLSTNPRRSGAAG

SEQ ID NO: 105486 - protein, 22 aa, Artificial Sequence
  Description of Artificial Sequence: Synthetic peptide
  Seed: MDPRMCSLMQGSTLPRRSGAAG
MDPRMFSLLQLSTSPRRSGAAG

SEQ ID NO: 105487 - protein, 22 aa, Artificial Sequence
  Description of Artificial Sequence: Synthetic peptide
  Seed: MDPRMCSLMQGSTLPRRSGAAG
MDPRMFSLLQMSTAPRRSGAAG

SEQ ID NO: 105488 - protein, 22 aa, Artificial Sequence
  Description of Artificial Sequence: Synthetic peptide
  Seed: MDPRMCSLMQGSTLPRRSGAAG
MDPRMFSLLQMSTNPRRSGAAG

SEQ ID NO: 105489 - protein, 22 aa, Artificial Sequence
  Description of Artificial Sequence: Synthetic peptide
  Seed: MDPRMCSLMQGSTLPRRSGAAG
MDPRMFSLLQMSTSPRRSGAAG

SEQ ID NO: 105490 - protein, 22 aa, Artificial Sequence
  Description of Artificial Sequence: Synthetic peptide
  Seed: MDPRMCSLMQGSTLPRRSGAAG
MDPRMFSLLQNSTAPRRSGAAG

SEQ ID NO: 105491 - protein, 22 aa, Artificial Sequence
  Description of Artificial Sequence: Synthetic peptide
  Seed: MDPRMCSLMQGSTLPRRSGAAG
MDPRMFSLLQNSTGPRRSGAAG

SEQ ID NO: 105492 - protein, 22 aa, Artificial Sequence
  Description of Artificial Sequence: Synthetic peptide
  Seed: MDPRMCSLMQGSTLPRRSGAAG
MDPRMFSLLQNSTIPRRSGAAG

SEQ ID NO: 105493 - protein, 22 aa, Artificial Sequence
  Description of Artificial Sequence: Synthetic peptide
  Seed: MDPRMCSLMQGSTLPRRSGAAG
MDPRMFSLLQNSTLPRRSGAAG

SEQ ID NO: 105494 - protein, 22 aa, Artificial Sequence
  Description of Artificial Sequence: Synthetic peptide
  Seed: MDPRMCSLMQGSTLPRRSGAAG
MDPRMFSLLQNSTMPRRSGAAG

SEQ ID NO: 105495 - protein, 22 aa, Artificial Sequence
  Description of Artificial Sequence: Synthetic peptide
  Seed: MDPRMCSLMQGSTLPRRSGAAG
MDPRMFSLLQNSTNPRRSGAAG

SEQ ID NO: 105496 - protein, 22 aa, Artificial Sequence
  Description of Artificial Sequence: Synthetic peptide
  Seed: MDPRMCSLMQGSTLPRRSGAAG
MDPRMFSLLQNSTSPRRSGAAG

SEQ ID NO: 105497 - protein, 22 aa, Artificial Sequence
  Description of Artificial Sequence: Synthetic peptide
  Seed: MDPRMCSLMQGSTLPRRSGAAG
MDPRMFSLLQNSTTPRRSGAAG

SEQ ID NO: 105498 - protein, 22 aa, Artificial Sequence
  Description of Artificial Sequence: Synthetic peptide
  Seed: MDPRMCSLMQGSTLPRRSGAAG
MDPRMFSLLQNSTVPRRSGAAG

SEQ ID NO: 105499 - protein, 22 aa, Artificial Sequence
  Description of Artificial Sequence: Synthetic peptide
  Seed: MDPRMCSLMQGSTLPRRSGAAG
MDPRMFSLLQPSTAPRRSGAAG

SEQ ID NO: 105500 - protein, 22 aa, Artificial Sequence
  Description of Artificial Sequence: Synthetic peptide
  Seed: MDPRMCSLMQGSTLPRRSGAAG
MDPRMFSLLQPSTCPRRSGAAG

SEQ ID NO: 105501 - protein, 22 aa, Artificial Sequence
  Description of Artificial Sequence: Synthetic peptide
  Seed: MDPRMCSLMQGSTLPRRSGAAG
MDPRMFSLLQPSTDPRRSGAAG

SEQ ID NO: 105502 - protein, 22 aa, Artificial Sequence
  Description of Artificial Sequence: Synthetic peptide
  Seed: MDPRMCSLMQGSTLPRRSGAAG
MDPRMFSLLQPSTEPRRSGAAG

SEQ ID NO: 105503 - protein, 22 aa, Artificial Sequence
  Description of Artificial Sequence: Synthetic peptide
  Seed: MDPRMCSLMQGSTLPRRSGAAG
MDPRMFSLLQPSTFPRRSGAAG

SEQ ID NO: 105504 - protein, 22 aa, Artificial Sequence
  Description of Artificial Sequence: Synthetic peptide
  Seed: MDPRMCSLMQGSTLPRRSGAAG
MDPRMFSLLQPSTGPRRSGAAG

SEQ ID NO: 105505 - protein, 22 aa, Artificial Sequence
  Description of Artificial Sequence: Synthetic peptide
  Seed: MDPRMCSLMQGSTLPRRSGAAG
MDPRMFSLLQPSTHPRRSGAAG

SEQ ID NO: 105506 - protein, 22 aa, Artificial Sequence
  Description of Artificial Sequence: Synthetic peptide
  Seed: MDPRMCSLMQGSTLPRRSGAAG
MDPRMFSLLQPSTIPRRSGAAG

SEQ ID NO: 105507 - protein, 22 aa, Artificial Sequence
  Description of Artificial Sequence: Synthetic peptide
  Seed: MDPRMCSLMQGSTLPRRSGAAG
MDPRMFSLLQPSTLPRRSGAAG

SEQ ID NO: 105508 - protein, 22 aa, Artificial Sequence
  Description of Artificial Sequence: Synthetic peptide
  Seed: MDPRMCSLMQGSTLPRRSGAAG
MDPRMFSLLQPSTMPRRSGAAG

SEQ ID NO: 105509 - protein, 22 aa, Artificial Sequence
  Description of Artificial Sequence: Synthetic peptide
  Seed: MDPRMCSLMQGSTLPRRSGAAG
MDPRMFSLLQPSTNPRRSGAAG

SEQ ID NO: 105510 - protein, 22 aa, Artificial Sequence
  Description of Artificial Sequence: Synthetic peptide
  Seed: MDPRMCSLMQGSTLPRRSGAAG
MDPRMFSLLQPSTPPRRSGAAG

SEQ ID NO: 105511 - protein, 22 aa, Artificial Sequence
  Description of Artificial Sequence: Synthetic peptide
  Seed: MDPRMCSLMQGSTLPRRSGAAG
MDPRMFSLLQPSTQPRRSGAAG

SEQ ID NO: 105512 - protein, 22 aa, Artificial Sequence
  Description of Artificial Sequence: Synthetic peptide
  Seed: MDPRMCSLMQGSTLPRRSGAAG
MDPRMFSLLQPSTSPRRSGAAG

SEQ ID NO: 105513 - protein, 22 aa, Artificial Sequence
  Description of Artificial Sequence: Synthetic peptide
  Seed: MDPRMCSLMQGSTLPRRSGAAG
MDPRMFSLLQPSTTPRRSGAAG

SEQ ID NO: 105514 - protein, 22 aa, Artificial Sequence
  Description of Artificial Sequence: Synthetic peptide
  Seed: MDPRMCSLMQGSTLPRRSGAAG
MDPRMFSLLQPSTVPRRSGAAG

SEQ ID NO: 105515 - protein, 22 aa, Artificial Sequence
  Description of Artificial Sequence: Synthetic peptide
  Seed: MDPRMCSLMQGSTLPRRSGAAG
MDPRMFSLLQSSTAPRRSGAAG

SEQ ID NO: 105516 - protein, 22 aa, Artificial Sequence
  Description of Artificial Sequence: Synthetic peptide
  Seed: MDPRMCSLMQGSTLPRRSGAAG
MDPRMFSLLQSSTCPRRSGAAG

SEQ ID NO: 105517 - protein, 22 aa, Artificial Sequence
  Description of Artificial Sequence: Synthetic peptide
  Seed: MDPRMCSLMQGSTLPRRSGAAG
MDPRMFSLLQSSTFPRRSGAAG

SEQ ID NO: 105518 - protein, 22 aa, Artificial Sequence
  Description of Artificial Sequence: Synthetic peptide
  Seed: MDPRMCSLMQGSTLPRRSGAAG
MDPRMFSLLQSSTGPRRSGAAG

SEQ ID NO: 105519 - protein, 22 aa, Artificial Sequence
  Description of Artificial Sequence: Synthetic peptide
  Seed: MDPRMCSLMQGSTLPRRSGAAG
MDPRMFSLLQSSTHPRRSGAAG

SEQ ID NO: 105520 - protein, 22 aa, Artificial Sequence
  Description of Artificial Sequence: Synthetic peptide
  Seed: MDPRMCSLMQGSTLPRRSGAAG
MDPRMFSLLQSSTIPRRSGAAG

SEQ ID NO: 105521 - protein, 22 aa, Artificial Sequence
  Description of Artificial Sequence: Synthetic peptide
  Seed: MDPRMCSLMQGSTLPRRSGAAG
MDPRMFSLLQSSTLPRRSGAAG

SEQ ID NO: 105522 - protein, 22 aa, Artificial Sequence
  Description of Artificial Sequence: Synthetic peptide
  Seed: MDPRMCSLMQGSTLPRRSGAAG
MDPRMFSLLQSSTMPRRSGAAG

SEQ ID NO: 105523 - protein, 22 aa, Artificial Sequence
  Description of Artificial Sequence: Synthetic peptide
  Seed: MDPRMCSLMQGSTLPRRSGAAG
MDPRMFSLLQSSTNPRRSGAAG

SEQ ID NO: 105524 - protein, 22 aa, Artificial Sequence
  Description of Artificial Sequence: Synthetic peptide
  Seed: MDPRMCSLMQGSTLPRRSGAAG
MDPRMFSLLQSSTQPRRSGAAG

SEQ ID NO: 105525 - protein, 22 aa, Artificial Sequence
  Description of Artificial Sequence: Synthetic peptide
  Seed: MDPRMCSLMQGSTLPRRSGAAG
MDPRMFSLLQSSTSPRRSGAAG

SEQ ID NO: 105526 - protein, 22 aa, Artificial Sequence
  Description of Artificial Sequence: Synthetic peptide
  Seed: MDPRMCSLMQGSTLPRRSGAAG
MDPRMFSLLQSSTTPRRSGAAG

SEQ ID NO: 105527 - protein, 22 aa, Artificial Sequence
  Description of Artificial Sequence: Synthetic peptide
  Seed: MDPRMCSLMQGSTLPRRSGAAG
MDPRMFSLLQSSTVPRRSGAAG

SEQ ID NO: 105528 - protein, 22 aa, Artificial Sequence
  Description of Artificial Sequence: Synthetic peptide
  Seed: MDPRMCSLMQGSTLPRRSGAAG
MDPRMFSLLQTSTAPRRSGAAG

SEQ ID NO: 105529 - protein, 22 aa, Artificial Sequence
  Description of Artificial Sequence: Synthetic peptide
  Seed: MDPRMCSLMQGSTLPRRSGAAG
MDPRMFSLLQTSTDPRRSGAAG

SEQ ID NO: 105530 - protein, 22 aa, Artificial Sequence
  Description of Artificial Sequence: Synthetic peptide
  Seed: MDPRMCSLMQGSTLPRRSGAAG
MDPRMFSLLQTSTGPRRSGAAG

SEQ ID NO: 105531 - protein, 22 aa, Artificial Sequence
  Description of Artificial Sequence: Synthetic peptide
  Seed: MDPRMCSLMQGSTLPRRSGAAG
MDPRMFSLLQTSTHPRRSGAAG

SEQ ID NO: 105532 - protein, 22 aa, Artificial Sequence
  Description of Artificial Sequence: Synthetic peptide
  Seed: MDPRMCSLMQGSTLPRRSGAAG
MDPRMFSLLQTSTIPRRSGAAG

SEQ ID NO: 105533 - protein, 22 aa, Artificial Sequence
  Description of Artificial Sequence: Synthetic peptide
  Seed: MDPRMCSLMQGSTLPRRSGAAG
MDPRMFSLLQTSTLPRRSGAAG

SEQ ID NO: 105534 - protein, 22 aa, Artificial Sequence
  Description of Artificial Sequence: Synthetic peptide
  Seed: MDPRMCSLMQGSTLPRRSGAAG
MDPRMFSLLQTSTMPRRSGAAG

SEQ ID NO: 105535 - protein, 22 aa, Artificial Sequence
  Description of Artificial Sequence: Synthetic peptide
  Seed: MDPRMCSLMQGSTLPRRSGAAG
MDPRMFSLLQTSTNPRRSGAAG

SEQ ID NO: 105536 - protein, 22 aa, Artificial Sequence
  Description of Artificial Sequence: Synthetic peptide
  Seed: MDPRMCSLMQGSTLPRRSGAAG
MDPRMFSLLQTSTQPRRSGAAG

SEQ ID NO: 105537 - protein, 22 aa, Artificial Sequence
  Description of Artificial Sequence: Synthetic peptide
  Seed: MDPRMCSLMQGSTLPRRSGAAG
MDPRMFSLLQTSTSPRRSGAAG

SEQ ID NO: 105538 - protein, 22 aa, Artificial Sequence
  Description of Artificial Sequence: Synthetic peptide
  Seed: MDPRMCSLMQGSTLPRRSGAAG
MDPRMFSLLQTSTTPRRSGAAG

SEQ ID NO: 105539 - protein, 22 aa, Artificial Sequence
  Description of Artificial Sequence: Synthetic peptide
  Seed: MDPRMCSLMQGSTLPRRSGAAG
MDPRMFSLLQTSTVPRRSGAAG

SEQ ID NO: 105540 - protein, 22 aa, Artificial Sequence
  Description of Artificial Sequence: Synthetic peptide
  Seed: MDPRMCSLMQGSTLPRRSGAAG
MDPRMFSLLQVSTAPRRSGAAG

SEQ ID NO: 105541 - protein, 22 aa, Artificial Sequence
  Description of Artificial Sequence: Synthetic peptide
  Seed: MDPRMCSLMQGSTLPRRSGAAG
MDPRMFSLLQVSTDPRRSGAAG

SEQ ID NO: 105542 - protein, 22 aa, Artificial Sequence
  Description of Artificial Sequence: Synthetic peptide
  Seed: MDPRMCSLMQGSTLPRRSGAAG
MDPRMFSLLQVSTGPRRSGAAG

SEQ ID NO: 105543 - protein, 22 aa, Artificial Sequence
  Description of Artificial Sequence: Synthetic peptide
  Seed: MDPRMCSLMQGSTLPRRSGAAG
MDPRMFSLLQVSTHPRRSGAAG

SEQ ID NO: 105544 - protein, 22 aa, Artificial Sequence
  Description of Artificial Sequence: Synthetic peptide
  Seed: MDPRMCSLMQGSTLPRRSGAAG
MDPRMFSLLQVSTIPRRSGAAG

SEQ ID NO: 105545 - protein, 22 aa, Artificial Sequence
  Description of Artificial Sequence: Synthetic peptide
  Seed: MDPRMCSLMQGSTLPRRSGAAG
MDPRMFSLLQVSTLPRRSGAAG

SEQ ID NO: 105546 - protein, 22 aa, Artificial Sequence
  Description of Artificial Sequence: Synthetic peptide
  Seed: MDPRMCSLMQGSTLPRRSGAAG
MDPRMFSLLQVSTMPRRSGAAG

SEQ ID NO: 105547 - protein, 22 aa, Artificial Sequence
  Description of Artificial Sequence: Synthetic peptide
  Seed: MDPRMCSLMQGSTLPRRSGAAG
MDPRMFSLLQVSTNPRRSGAAG

SEQ ID NO: 105548 - protein, 22 aa, Artificial Sequence
  Description of Artificial Sequence: Synthetic peptide
  Seed: MDPRMCSLMQGSTLPRRSGAAG
MDPRMFSLLQVSTPPRRSGAAG

SEQ ID NO: 105549 - protein, 22 aa, Artificial Sequence
  Description of Artificial Sequence: Synthetic peptide
  Seed: MDPRMCSLMQGSTLPRRSGAAG
MDPRMFSLLQVSTQPRRSGAAG

SEQ ID NO: 105550 - protein, 22 aa, Artificial Sequence
  Description of Artificial Sequence: Synthetic peptide
  Seed: MDPRMCSLMQGSTLPRRSGAAG
MDPRMFSLLQVSTSPRRSGAAG

SEQ ID NO: 105551 - protein, 22 aa, Artificial Sequence
  Description of Artificial Sequence: Synthetic peptide
  Seed: MDPRMCSLMQGSTLPRRSGAAG
MDPRMFSLLQVSTTPRRSGAAG

SEQ ID NO: 105552 - protein, 22 aa, Artificial Sequence
  Description of Artificial Sequence: Synthetic peptide
  Seed: MDPRMCSLMQGSTLPRRSGAAG
MDPRMFSLLQVSTVPRRSGAAG

SEQ ID NO: 105553 - protein, 22 aa, Artificial Sequence
  Description of Artificial Sequence: Synthetic peptide
  Seed: MDPRMCSLMQGSTLPRRSGAAG
MDPRMFSLMQASTAPRRSGAAG

SEQ ID NO: 105554 - protein, 22 aa, Artificial Sequence
  Description of Artificial Sequence: Synthetic peptide
  Seed: MDPRMCSLMQGSTLPRRSGAAG
MDPRMFSLMQASTCPRRSGAAG

SEQ ID NO: 105555 - protein, 22 aa, Artificial Sequence
  Description of Artificial Sequence: Synthetic peptide
  Seed: MDPRMCSLMQGSTLPRRSGAAG
MDPRMFSLMQASTDPRRSGAAG

SEQ ID NO: 105556 - protein, 22 aa, Artificial Sequence
  Description of Artificial Sequence: Synthetic peptide
  Seed: MDPRMCSLMQGSTLPRRSGAAG
MDPRMFSLMQASTEPRRSGAAG

SEQ ID NO: 105557 - protein, 22 aa, Artificial Sequence
  Description of Artificial Sequence: Synthetic peptide
  Seed: MDPRMCSLMQGSTLPRRSGAAG
MDPRMFSLMQASTFPRRSGAAG

SEQ ID NO: 105558 - protein, 22 aa, Artificial Sequence
  Description of Artificial Sequence: Synthetic peptide
  Seed: MDPRMCSLMQGSTLPRRSGAAG
MDPRMFSLMQASTGPRRSGAAG

SEQ ID NO: 105559 - protein, 22 aa, Artificial Sequence
  Description of Artificial Sequence: Synthetic peptide
  Seed: MDPRMCSLMQGSTLPRRSGAAG
MDPRMFSLMQASTHPRRSGAAG

SEQ ID NO: 105560 - protein, 22 aa, Artificial Sequence
  Description of Artificial Sequence: Synthetic peptide
  Seed: MDPRMCSLMQGSTLPRRSGAAG
MDPRMFSLMQASTIPRRSGAAG

SEQ ID NO: 105561 - protein, 22 aa, Artificial Sequence
  Description of Artificial Sequence: Synthetic peptide
  Seed: MDPRMCSLMQGSTLPRRSGAAG
MDPRMFSLMQASTLPRRSGAAG

SEQ ID NO: 105562 - protein, 22 aa, Artificial Sequence
  Description of Artificial Sequence: Synthetic peptide
  Seed: MDPRMCSLMQGSTLPRRSGAAG
MDPRMFSLMQASTMPRRSGAAG

SEQ ID NO: 105563 - protein, 22 aa, Artificial Sequence
  Description of Artificial Sequence: Synthetic peptide
  Seed: MDPRMCSLMQGSTLPRRSGAAG
MDPRMFSLMQASTNPRRSGAAG

SEQ ID NO: 105564 - protein, 22 aa, Artificial Sequence
  Description of Artificial Sequence: Synthetic peptide
  Seed: MDPRMCSLMQGSTLPRRSGAAG
MDPRMFSLMQASTPPRRSGAAG

SEQ ID NO: 105565 - protein, 22 aa, Artificial Sequence
  Description of Artificial Sequence: Synthetic peptide
  Seed: MDPRMCSLMQGSTLPRRSGAAG
MDPRMFSLMQASTQPRRSGAAG

SEQ ID NO: 105566 - protein, 22 aa, Artificial Sequence
  Description of Artificial Sequence: Synthetic peptide
  Seed: MDPRMCSLMQGSTLPRRSGAAG
MDPRMFSLMQASTSPRRSGAAG

SEQ ID NO: 105567 - protein, 22 aa, Artificial Sequence
  Description of Artificial Sequence: Synthetic peptide
  Seed: MDPRMCSLMQGSTLPRRSGAAG
MDPRMFSLMQASTTPRRSGAAG

SEQ ID NO: 105568 - protein, 22 aa, Artificial Sequence
  Description of Artificial Sequence: Synthetic peptide
  Seed: MDPRMCSLMQGSTLPRRSGAAG
MDPRMFSLMQASTVPRRSGAAG

SEQ ID NO: 105569 - protein, 22 aa, Artificial Sequence
  Description of Artificial Sequence: Synthetic peptide
  Seed: MDPRMCSLMQGSTLPRRSGAAG
MDPRMFSLMQASTYPRRSGAAG

SEQ ID NO: 105570 - protein, 22 aa, Artificial Sequence
  Description of Artificial Sequence: Synthetic peptide
  Seed: MDPRMCSLMQGSTLPRRSGAAG
MDPRMFSLMQGSTAPRRSGAAG

SEQ ID NO: 105571 - protein, 22 aa, Artificial Sequence
  Description of Artificial Sequence: Synthetic peptide
  Seed: MDPRMCSLMQGSTLPRRSGAAG
MDPRMFSLMQGSTCPRRSGAAG

SEQ ID NO: 105572 - protein, 22 aa, Artificial Sequence
  Description of Artificial Sequence: Synthetic peptide
  Seed: MDPRMCSLMQGSTLPRRSGAAG
MDPRMFSLMQGSTFPRRSGAAG

SEQ ID NO: 105573 - protein, 22 aa, Artificial Sequence
  Description of Artificial Sequence: Synthetic peptide
  Seed: MDPRMCSLMQGSTLPRRSGAAG
MDPRMFSLMQGSTGPRRSGAAG

SEQ ID NO: 105574 - protein, 22 aa, Artificial Sequence
  Description of Artificial Sequence: Synthetic peptide
  Seed: MDPRMCSLMQGSTLPRRSGAAG
MDPRMFSLMQGSTIPRRSGAAG

SEQ ID NO: 105575 - protein, 22 aa, Artificial Sequence
  Description of Artificial Sequence: Synthetic peptide
  Seed: MDPRMCSLMQGSTLPRRSGAAG
MDPRMFSLMQGSTLPRRSGAAG

SEQ ID NO: 105576 - protein, 22 aa, Artificial Sequence
  Description of Artificial Sequence: Synthetic peptide
  Seed: MDPRMCSLMQGSTLPRRSGAAG
MDPRMFSLMQGSTMPRRSGAAG

SEQ ID NO: 105577 - protein, 22 aa, Artificial Sequence
  Description of Artificial Sequence: Synthetic peptide
  Seed: MDPRMCSLMQGSTLPRRSGAAG
MDPRMFSLMQGSTNPRRSGAAG

SEQ ID NO: 105578 - protein, 22 aa, Artificial Sequence
  Description of Artificial Sequence: Synthetic peptide
  Seed: MDPRMCSLMQGSTLPRRSGAAG
MDPRMFSLMQGSTQPRRSGAAG

SEQ ID NO: 105579 - protein, 22 aa, Artificial Sequence
  Description of Artificial Sequence: Synthetic peptide
  Seed: MDPRMCSLMQGSTLPRRSGAAG
MDPRMFSLMQGSTSPRRSGAAG

SEQ ID NO: 105580 - protein, 22 aa, Artificial Sequence
  Description of Artificial Sequence: Synthetic peptide
  Seed: MDPRMCSLMQGSTLPRRSGAAG
MDPRMFSLMQGSTTPRRSGAAG

SEQ ID NO: 105581 - protein, 22 aa, Artificial Sequence
  Description of Artificial Sequence: Synthetic peptide
  Seed: MDPRMCSLMQGSTLPRRSGAAG
MDPRMFSLMQGSTVPRRSGAAG

SEQ ID NO: 105582 - protein, 22 aa, Artificial Sequence
  Description of Artificial Sequence: Synthetic peptide
  Seed: MDPRMCSLMQGSTLPRRSGAAG
MDPRMFSLMQHSTLPRRSGAAG

SEQ ID NO: 105583 - protein, 22 aa, Artificial Sequence
  Description of Artificial Sequence: Synthetic peptide
  Seed: MDPRMCSLMQGSTLPRRSGAAG
MDPRMFSLMQHSTVPRRSGAAG

SEQ ID NO: 105584 - protein, 22 aa, Artificial Sequence
  Description of Artificial Sequence: Synthetic peptide
  Seed: MDPRMCSLMQGSTLPRRSGAAG
MDPRMFSLMQISTAPRRSGAAG

SEQ ID NO: 105585 - protein, 22 aa, Artificial Sequence
  Description of Artificial Sequence: Synthetic peptide
  Seed: MDPRMCSLMQGSTLPRRSGAAG
MDPRMFSLMQISTGPRRSGAAG

SEQ ID NO: 105586 - protein, 22 aa, Artificial Sequence
  Description of Artificial Sequence: Synthetic peptide
  Seed: MDPRMCSLMQGSTLPRRSGAAG
MDPRMFSLMQISTHPRRSGAAG

SEQ ID NO: 105587 - protein, 22 aa, Artificial Sequence
  Description of Artificial Sequence: Synthetic peptide
  Seed: MDPRMCSLMQGSTLPRRSGAAG
MDPRMFSLMQISTIPRRSGAAG

SEQ ID NO: 105588 - protein, 22 aa, Artificial Sequence
  Description of Artificial Sequence: Synthetic peptide
  Seed: MDPRMCSLMQGSTLPRRSGAAG
MDPRMFSLMQISTLPRRSGAAG

SEQ ID NO: 105589 - protein, 22 aa, Artificial Sequence
  Description of Artificial Sequence: Synthetic peptide
  Seed: MDPRMCSLMQGSTLPRRSGAAG
MDPRMFSLMQISTMPRRSGAAG

SEQ ID NO: 105590 - protein, 22 aa, Artificial Sequence
  Description of Artificial Sequence: Synthetic peptide
  Seed: MDPRMCSLMQGSTLPRRSGAAG
MDPRMFSLMQISTNPRRSGAAG

SEQ ID NO: 105591 - protein, 22 aa, Artificial Sequence
  Description of Artificial Sequence: Synthetic peptide
  Seed: MDPRMCSLMQGSTLPRRSGAAG
MDPRMFSLMQISTQPRRSGAAG

SEQ ID NO: 105592 - protein, 22 aa, Artificial Sequence
  Description of Artificial Sequence: Synthetic peptide
  Seed: MDPRMCSLMQGSTLPRRSGAAG
MDPRMFSLMQISTSPRRSGAAG

SEQ ID NO: 105593 - protein, 22 aa, Artificial Sequence
  Description of Artificial Sequence: Synthetic peptide
  Seed: MDPRMCSLMQGSTLPRRSGAAG
MDPRMFSLMQISTTPRRSGAAG

SEQ ID NO: 105594 - protein, 22 aa, Artificial Sequence
  Description of Artificial Sequence: Synthetic peptide
  Seed: MDPRMCSLMQGSTLPRRSGAAG
MDPRMFSLMQISTVPRRSGAAG

SEQ ID NO: 105595 - protein, 22 aa, Artificial Sequence
  Description of Artificial Sequence: Synthetic peptide
  Seed: MDPRMCSLMQGSTLPRRSGAAG
MDPRMFSLMQLSTAPRRSGAAG

SEQ ID NO: 105596 - protein, 22 aa, Artificial Sequence
  Description of Artificial Sequence: Synthetic peptide
  Seed: MDPRMCSLMQGSTLPRRSGAAG
MDPRMFSLMQLSTNPRRSGAAG

SEQ ID NO: 105597 - protein, 22 aa, Artificial Sequence
  Description of Artificial Sequence: Synthetic peptide
  Seed: MDPRMCSLMQGSTLPRRSGAAG
MDPRMFSLMQLSTSPRRSGAAG

SEQ ID NO: 105598 - protein, 22 aa, Artificial Sequence
  Description of Artificial Sequence: Synthetic peptide
  Seed: MDPRMCSLMQGSTLPRRSGAAG
MDPRMFSLMQLSTTPRRSGAAG

SEQ ID NO: 105599 - protein, 22 aa, Artificial Sequence
  Description of Artificial Sequence: Synthetic peptide
  Seed: MDPRMCSLMQGSTLPRRSGAAG
MDPRMFSLMQLSTVPRRSGAAG

SEQ ID NO: 105600 - protein, 22 aa, Artificial Sequence
  Description of Artificial Sequence: Synthetic peptide
  Seed: MDPRMCSLMQGSTLPRRSGAAG
MDPRMFSLMQMSTAPRRSGAAG

SEQ ID NO: 105601 - protein, 22 aa, Artificial Sequence
  Description of Artificial Sequence: Synthetic peptide
  Seed: MDPRMCSLMQGSTLPRRSGAAG
MDPRMFSLMQMSTNPRRSGAAG

SEQ ID NO: 105602 - protein, 22 aa, Artificial Sequence
  Description of Artificial Sequence: Synthetic peptide
  Seed: MDPRMCSLMQGSTLPRRSGAAG
MDPRMFSLMQMSTSPRRSGAAG

SEQ ID NO: 105603 - protein, 22 aa, Artificial Sequence
  Description of Artificial Sequence: Synthetic peptide
  Seed: MDPRMCSLMQGSTLPRRSGAAG
MDPRMFSLMQMSTTPRRSGAAG

SEQ ID NO: 105604 - protein, 22 aa, Artificial Sequence
  Description of Artificial Sequence: Synthetic peptide
  Seed: MDPRMCSLMQGSTLPRRSGAAG
MDPRMFSLMQMSTVPRRSGAAG

SEQ ID NO: 105605 - protein, 22 aa, Artificial Sequence
  Description of Artificial Sequence: Synthetic peptide
  Seed: MDPRMCSLMQGSTLPRRSGAAG
MDPRMFSLMQNSTAPRRSGAAG

SEQ ID NO: 105606 - protein, 22 aa, Artificial Sequence
  Description of Artificial Sequence: Synthetic peptide
  Seed: MDPRMCSLMQGSTLPRRSGAAG
MDPRMFSLMQNSTGPRRSGAAG

SEQ ID NO: 105607 - protein, 22 aa, Artificial Sequence
  Description of Artificial Sequence: Synthetic peptide
  Seed: MDPRMCSLMQGSTLPRRSGAAG
MDPRMFSLMQNSTIPRRSGAAG

SEQ ID NO: 105608 - protein, 22 aa, Artificial Sequence
  Description of Artificial Sequence: Synthetic peptide
  Seed: MDPRMCSLMQGSTLPRRSGAAG
MDPRMFSLMQNSTLPRRSGAAG

SEQ ID NO: 105609 - protein, 22 aa, Artificial Sequence
  Description of Artificial Sequence: Synthetic peptide
  Seed: MDPRMCSLMQGSTLPRRSGAAG
MDPRMFSLMQNSTMPRRSGAAG

SEQ ID NO: 105610 - protein, 22 aa, Artificial Sequence
  Description of Artificial Sequence: Synthetic peptide
  Seed: MDPRMCSLMQGSTLPRRSGAAG
MDPRMFSLMQNSTNPRRSGAAG

SEQ ID NO: 105611 - protein, 22 aa, Artificial Sequence
  Description of Artificial Sequence: Synthetic peptide
  Seed: MDPRMCSLMQGSTLPRRSGAAG
MDPRMFSLMQNSTSPRRSGAAG

SEQ ID NO: 105612 - protein, 22 aa, Artificial Sequence
  Description of Artificial Sequence: Synthetic peptide
  Seed: MDPRMCSLMQGSTLPRRSGAAG
MDPRMFSLMQNSTTPRRSGAAG

SEQ ID NO: 105613 - protein, 22 aa, Artificial Sequence
  Description of Artificial Sequence: Synthetic peptide
  Seed: MDPRMCSLMQGSTLPRRSGAAG
MDPRMFSLMQNSTVPRRSGAAG

SEQ ID NO: 105614 - protein, 22 aa, Artificial Sequence
  Description of Artificial Sequence: Synthetic peptide
  Seed: MDPRMCSLMQGSTLPRRSGAAG
MDPRMFSLMQPSTAPRRSGAAG

SEQ ID NO: 105615 - protein, 22 aa, Artificial Sequence
  Description of Artificial Sequence: Synthetic peptide
  Seed: MDPRMCSLMQGSTLPRRSGAAG
MDPRMFSLMQPSTCPRRSGAAG

SEQ ID NO: 105616 - protein, 22 aa, Artificial Sequence
  Description of Artificial Sequence: Synthetic peptide
  Seed: MDPRMCSLMQGSTLPRRSGAAG
MDPRMFSLMQPSTDPRRSGAAG

SEQ ID NO: 105617 - protein, 22 aa, Artificial Sequence
  Description of Artificial Sequence: Synthetic peptide
  Seed: MDPRMCSLMQGSTLPRRSGAAG
MDPRMFSLMQPSTEPRRSGAAG

SEQ ID NO: 105618 - protein, 22 aa, Artificial Sequence
  Description of Artificial Sequence: Synthetic peptide
  Seed: MDPRMCSLMQGSTLPRRSGAAG
MDPRMFSLMQPSTFPRRSGAAG

SEQ ID NO: 105619 - protein, 22 aa, Artificial Sequence
  Description of Artificial Sequence: Synthetic peptide
  Seed: MDPRMCSLMQGSTLPRRSGAAG
MDPRMFSLMQPSTGPRRSGAAG

SEQ ID NO: 105620 - protein, 22 aa, Artificial Sequence
  Description of Artificial Sequence: Synthetic peptide
  Seed: MDPRMCSLMQGSTLPRRSGAAG
MDPRMFSLMQPSTHPRRSGAAG

SEQ ID NO: 105621 - protein, 22 aa, Artificial Sequence
  Description of Artificial Sequence: Synthetic peptide
  Seed: MDPRMCSLMQGSTLPRRSGAAG
MDPRMFSLMQPSTIPRRSGAAG

SEQ ID NO: 105622 - protein, 22 aa, Artificial Sequence
  Description of Artificial Sequence: Synthetic peptide
  Seed: MDPRMCSLMQGSTLPRRSGAAG
MDPRMFSLMQPSTLPRRSGAAG

SEQ ID NO: 105623 - protein, 22 aa, Artificial Sequence
  Description of Artificial Sequence: Synthetic peptide
  Seed: MDPRMCSLMQGSTLPRRSGAAG
MDPRMFSLMQPSTMPRRSGAAG

SEQ ID NO: 105624 - protein, 22 aa, Artificial Sequence
  Description of Artificial Sequence: Synthetic peptide
  Seed: MDPRMCSLMQGSTLPRRSGAAG
MDPRMFSLMQPSTNPRRSGAAG

SEQ ID NO: 105625 - protein, 22 aa, Artificial Sequence
  Description of Artificial Sequence: Synthetic peptide
  Seed: MDPRMCSLMQGSTLPRRSGAAG
MDPRMFSLMQPSTPPRRSGAAG

SEQ ID NO: 105626 - protein, 22 aa, Artificial Sequence
  Description of Artificial Sequence: Synthetic peptide
  Seed: MDPRMCSLMQGSTLPRRSGAAG
MDPRMFSLMQPSTQPRRSGAAG

SEQ ID NO: 105627 - protein, 22 aa, Artificial Sequence
  Description of Artificial Sequence: Synthetic peptide
  Seed: MDPRMCSLMQGSTLPRRSGAAG
MDPRMFSLMQPSTSPRRSGAAG

SEQ ID NO: 105628 - protein, 22 aa, Artificial Sequence
  Description of Artificial Sequence: Synthetic peptide
  Seed: MDPRMCSLMQGSTLPRRSGAAG
MDPRMFSLMQPSTTPRRSGAAG

SEQ ID NO: 105629 - protein, 22 aa, Artificial Sequence
  Description of Artificial Sequence: Synthetic peptide
  Seed: MDPRMCSLMQGSTLPRRSGAAG
MDPRMFSLMQPSTVPRRSGAAG

SEQ ID NO: 105630 - protein, 22 aa, Artificial Sequence
  Description of Artificial Sequence: Synthetic peptide
  Seed: MDPRMCSLMQGSTLPRRSGAAG
MDPRMFSLMQSSTAPRRSGAAG

SEQ ID NO: 105631 - protein, 22 aa, Artificial Sequence
  Description of Artificial Sequence: Synthetic peptide
  Seed: MDPRMCSLMQGSTLPRRSGAAG
MDPRMFSLMQSSTCPRRSGAAG

SEQ ID NO: 105632 - protein, 22 aa, Artificial Sequence
  Description of Artificial Sequence: Synthetic peptide
  Seed: MDPRMCSLMQGSTLPRRSGAAG
MDPRMFSLMQSSTDPRRSGAAG

SEQ ID NO: 105633 - protein, 22 aa, Artificial Sequence
  Description of Artificial Sequence: Synthetic peptide
  Seed: MDPRMCSLMQGSTLPRRSGAAG
MDPRMFSLMQSSTFPRRSGAAG

SEQ ID NO: 105634 - protein, 22 aa, Artificial Sequence
  Description of Artificial Sequence: Synthetic peptide
  Seed: MDPRMCSLMQGSTLPRRSGAAG
MDPRMFSLMQSSTGPRRSGAAG

SEQ ID NO: 105635 - protein, 22 aa, Artificial Sequence
  Description of Artificial Sequence: Synthetic peptide
  Seed: MDPRMCSLMQGSTLPRRSGAAG
MDPRMFSLMQSSTHPRRSGAAG

SEQ ID NO: 105636 - protein, 22 aa, Artificial Sequence
  Description of Artificial Sequence: Synthetic peptide
  Seed: MDPRMCSLMQGSTLPRRSGAAG
MDPRMFSLMQSSTIPRRSGAAG

SEQ ID NO: 105637 - protein, 22 aa, Artificial Sequence
  Description of Artificial Sequence: Synthetic peptide
  Seed: MDPRMCSLMQGSTLPRRSGAAG
MDPRMFSLMQSSTLPRRSGAAG

SEQ ID NO: 105638 - protein, 22 aa, Artificial Sequence
  Description of Artificial Sequence: Synthetic peptide
  Seed: MDPRMCSLMQGSTLPRRSGAAG
MDPRMFSLMQSSTMPRRSGAAG

SEQ ID NO: 105639 - protein, 22 aa, Artificial Sequence
  Description of Artificial Sequence: Synthetic peptide
  Seed: MDPRMCSLMQGSTLPRRSGAAG
MDPRMFSLMQSSTNPRRSGAAG

SEQ ID NO: 105640 - protein, 22 aa, Artificial Sequence
  Description of Artificial Sequence: Synthetic peptide
  Seed: MDPRMCSLMQGSTLPRRSGAAG
MDPRMFSLMQSSTPPRRSGAAG

SEQ ID NO: 105641 - protein, 22 aa, Artificial Sequence
  Description of Artificial Sequence: Synthetic peptide
  Seed: MDPRMCSLMQGSTLPRRSGAAG
MDPRMFSLMQSSTQPRRSGAAG

SEQ ID NO: 105642 - protein, 22 aa, Artificial Sequence
  Description of Artificial Sequence: Synthetic peptide
  Seed: MDPRMCSLMQGSTLPRRSGAAG
MDPRMFSLMQSSTSPRRSGAAG

SEQ ID NO: 105643 - protein, 22 aa, Artificial Sequence
  Description of Artificial Sequence: Synthetic peptide
  Seed: MDPRMCSLMQGSTLPRRSGAAG
MDPRMFSLMQSSTTPRRSGAAG

SEQ ID NO: 105644 - protein, 22 aa, Artificial Sequence
  Description of Artificial Sequence: Synthetic peptide
  Seed: MDPRMCSLMQGSTLPRRSGAAG
MDPRMFSLMQSSTVPRRSGAAG

SEQ ID NO: 105645 - protein, 22 aa, Artificial Sequence
  Description of Artificial Sequence: Synthetic peptide
  Seed: MDPRMCSLMQGSTLPRRSGAAG
MDPRMFSLMQTSTAPRRSGAAG

SEQ ID NO: 105646 - protein, 22 aa, Artificial Sequence
  Description of Artificial Sequence: Synthetic peptide
  Seed: MDPRMCSLMQGSTLPRRSGAAG
MDPRMFSLMQTSTDPRRSGAAG

SEQ ID NO: 105647 - protein, 22 aa, Artificial Sequence
  Description of Artificial Sequence: Synthetic peptide
  Seed: MDPRMCSLMQGSTLPRRSGAAG
MDPRMFSLMQTSTGPRRSGAAG

SEQ ID NO: 105648 - protein, 22 aa, Artificial Sequence
  Description of Artificial Sequence: Synthetic peptide
  Seed: MDPRMCSLMQGSTLPRRSGAAG
MDPRMFSLMQTSTHPRRSGAAG

SEQ ID NO: 105649 - protein, 22 aa, Artificial Sequence
  Description of Artificial Sequence: Synthetic peptide
  Seed: MDPRMCSLMQGSTLPRRSGAAG
MDPRMFSLMQTSTIPRRSGAAG

SEQ ID NO: 105650 - protein, 22 aa, Artificial Sequence
  Description of Artificial Sequence: Synthetic peptide
  Seed: MDPRMCSLMQGSTLPRRSGAAG
MDPRMFSLMQTSTLPRRSGAAG

SEQ ID NO: 105651 - protein, 22 aa, Artificial Sequence
  Description of Artificial Sequence: Synthetic peptide
  Seed: MDPRMCSLMQGSTLPRRSGAAG
MDPRMFSLMQTSTMPRRSGAAG

SEQ ID NO: 105652 - protein, 22 aa, Artificial Sequence
  Description of Artificial Sequence: Synthetic peptide
  Seed: MDPRMCSLMQGSTLPRRSGAAG
MDPRMFSLMQTSTNPRRSGAAG

SEQ ID NO: 105653 - protein, 22 aa, Artificial Sequence
  Description of Artificial Sequence: Synthetic peptide
  Seed: MDPRMCSLMQGSTLPRRSGAAG
MDPRMFSLMQTSTPPRRSGAAG

SEQ ID NO: 105654 - protein, 22 aa, Artificial Sequence
  Description of Artificial Sequence: Synthetic peptide
  Seed: MDPRMCSLMQGSTLPRRSGAAG
MDPRMFSLMQTSTQPRRSGAAG

SEQ ID NO: 105655 - protein, 22 aa, Artificial Sequence
  Description of Artificial Sequence: Synthetic peptide
  Seed: MDPRMCSLMQGSTLPRRSGAAG
MDPRMFSLMQTSTSPRRSGAAG

SEQ ID NO: 105656 - protein, 22 aa, Artificial Sequence
  Description of Artificial Sequence: Synthetic peptide
  Seed: MDPRMCSLMQGSTLPRRSGAAG
MDPRMFSLMQTSTTPRRSGAAG

SEQ ID NO: 105657 - protein, 22 aa, Artificial Sequence
  Description of Artificial Sequence: Synthetic peptide
  Seed: MDPRMCSLMQGSTLPRRSGAAG
MDPRMFSLMQTSTVPRRSGAAG

SEQ ID NO: 105658 - protein, 22 aa, Artificial Sequence
  Description of Artificial Sequence: Synthetic peptide
  Seed: MDPRMCSLMQGSTLPRRSGAAG
MDPRMFSLMQVSTAPRRSGAAG

SEQ ID NO: 105659 - protein, 22 aa, Artificial Sequence
  Description of Artificial Sequence: Synthetic peptide
  Seed: MDPRMCSLMQGSTLPRRSGAAG
MDPRMFSLMQVSTDPRRSGAAG

SEQ ID NO: 105660 - protein, 22 aa, Artificial Sequence
  Description of Artificial Sequence: Synthetic peptide
  Seed: MDPRMCSLMQGSTLPRRSGAAG
MDPRMFSLMQVSTEPRRSGAAG

SEQ ID NO: 105661 - protein, 22 aa, Artificial Sequence
  Description of Artificial Sequence: Synthetic peptide
  Seed: MDPRMCSLMQGSTLPRRSGAAG
MDPRMFSLMQVSTGPRRSGAAG

SEQ ID NO: 105662 - protein, 22 aa, Artificial Sequence
  Description of Artificial Sequence: Synthetic peptide
  Seed: MDPRMCSLMQGSTLPRRSGAAG
MDPRMFSLMQVSTHPRRSGAAG

SEQ ID NO: 105663 - protein, 22 aa, Artificial Sequence
  Description of Artificial Sequence: Synthetic peptide
  Seed: MDPRMCSLMQGSTLPRRSGAAG
MDPRMFSLMQVSTIPRRSGAAG

SEQ ID NO: 105664 - protein, 22 aa, Artificial Sequence
  Description of Artificial Sequence: Synthetic peptide
  Seed: MDPRMCSLMQGSTLPRRSGAAG
MDPRMFSLMQVSTLPRRSGAAG

SEQ ID NO: 105665 - protein, 22 aa, Artificial Sequence
  Description of Artificial Sequence: Synthetic peptide
  Seed: MDPRMCSLMQGSTLPRRSGAAG
MDPRMFSLMQVSTMPRRSGAAG

SEQ ID NO: 105666 - protein, 22 aa, Artificial Sequence
  Description of Artificial Sequence: Synthetic peptide
  Seed: MDPRMCSLMQGSTLPRRSGAAG
MDPRMFSLMQVSTNPRRSGAAG

SEQ ID NO: 105667 - protein, 22 aa, Artificial Sequence
  Description of Artificial Sequence: Synthetic peptide
  Seed: MDPRMCSLMQGSTLPRRSGAAG
MDPRMFSLMQVSTPPRRSGAAG

SEQ ID NO: 105668 - protein, 22 aa, Artificial Sequence
  Description of Artificial Sequence: Synthetic peptide
  Seed: MDPRMCSLMQGSTLPRRSGAAG
MDPRMFSLMQVSTQPRRSGAAG

SEQ ID NO: 105669 - protein, 22 aa, Artificial Sequence
  Description of Artificial Sequence: Synthetic peptide
  Seed: MDPRMCSLMQGSTLPRRSGAAG
MDPRMFSLMQVSTSPRRSGAAG

SEQ ID NO: 105670 - protein, 22 aa, Artificial Sequence
  Description of Artificial Sequence: Synthetic peptide
  Seed: MDPRMCSLMQGSTLPRRSGAAG
MDPRMFSLMQVSTTPRRSGAAG

SEQ ID NO: 105671 - protein, 22 aa, Artificial Sequence
  Description of Artificial Sequence: Synthetic peptide
  Seed: MDPRMCSLMQGSTLPRRSGAAG
MDPRMFSLMQVSTVPRRSGAAG

SEQ ID NO: 105672 - protein, 22 aa, Artificial Sequence
  Description of Artificial Sequence: Synthetic peptide
  Seed: MDPRMCSLMQGSTLPRRSGAAG
MDPRMFSLNQASTIPRRSGAAG

SEQ ID NO: 105673 - protein, 22 aa, Artificial Sequence
  Description of Artificial Sequence: Synthetic peptide
  Seed: MDPRMCSLMQGSTLPRRSGAAG
MDPRMFSLNQASTLPRRSGAAG

SEQ ID NO: 105674 - protein, 22 aa, Artificial Sequence
  Description of Artificial Sequence: Synthetic peptide
  Seed: MDPRMCSLMQGSTLPRRSGAAG
MDPRMFSLNQASTVPRRSGAAG

SEQ ID NO: 105675 - protein, 22 aa, Artificial Sequence
  Description of Artificial Sequence: Synthetic peptide
  Seed: MDPRMCSLMQGSTLPRRSGAAG
MDPRMFSLQQASTAPRRSGAAG

SEQ ID NO: 105676 - protein, 22 aa, Artificial Sequence
  Description of Artificial Sequence: Synthetic peptide
  Seed: MDPRMCSLMQGSTLPRRSGAAG
MDPRMFSLQQASTIPRRSGAAG

SEQ ID NO: 105677 - protein, 22 aa, Artificial Sequence
  Description of Artificial Sequence: Synthetic peptide
  Seed: MDPRMCSLMQGSTLPRRSGAAG
MDPRMFSLQQASTLPRRSGAAG

SEQ ID NO: 105678 - protein, 22 aa, Artificial Sequence
  Description of Artificial Sequence: Synthetic peptide
  Seed: MDPRMCSLMQGSTLPRRSGAAG
MDPRMFSLQQASTMPRRSGAAG

SEQ ID NO: 105679 - protein, 22 aa, Artificial Sequence
  Description of Artificial Sequence: Synthetic peptide
  Seed: MDPRMCSLMQGSTLPRRSGAAG
MDPRMFSLQQASTNPRRSGAAG

SEQ ID NO: 105680 - protein, 22 aa, Artificial Sequence
  Description of Artificial Sequence: Synthetic peptide
  Seed: MDPRMCSLMQGSTLPRRSGAAG
MDPRMFSLQQASTSPRRSGAAG

SEQ ID NO: 105681 - protein, 22 aa, Artificial Sequence
  Description of Artificial Sequence: Synthetic peptide
  Seed: MDPRMCSLMQGSTLPRRSGAAG
MDPRMFSLQQASTTPRRSGAAG

SEQ ID NO: 105682 - protein, 22 aa, Artificial Sequence
  Description of Artificial Sequence: Synthetic peptide
  Seed: MDPRMCSLMQGSTLPRRSGAAG
MDPRMFSLQQASTVPRRSGAAG

SEQ ID NO: 105683 - protein, 22 aa, Artificial Sequence
  Description of Artificial Sequence: Synthetic peptide
  Seed: MDPRMCSLMQGSTLPRRSGAAG
MDPRMFSLQQGSTAPRRSGAAG

SEQ ID NO: 105684 - protein, 22 aa, Artificial Sequence
  Description of Artificial Sequence: Synthetic peptide
  Seed: MDPRMCSLMQGSTLPRRSGAAG
MDPRMFSLQQGSTIPRRSGAAG

SEQ ID NO: 105685 - protein, 22 aa, Artificial Sequence
  Description of Artificial Sequence: Synthetic peptide
  Seed: MDPRMCSLMQGSTLPRRSGAAG
MDPRMFSLQQGSTLPRRSGAAG

SEQ ID NO: 105686 - protein, 22 aa, Artificial Sequence
  Description of Artificial Sequence: Synthetic peptide
  Seed: MDPRMCSLMQGSTLPRRSGAAG
MDPRMFSLQQGSTMPRRSGAAG

SEQ ID NO: 105687 - protein, 22 aa, Artificial Sequence
  Description of Artificial Sequence: Synthetic peptide
  Seed: MDPRMCSLMQGSTLPRRSGAAG
MDPRMFSLQQGSTVPRRSGAAG

SEQ ID NO: 105688 - protein, 22 aa, Artificial Sequence
  Description of Artificial Sequence: Synthetic peptide
  Seed: MDPRMCSLMQGSTLPRRSGAAG
MDPRMFSLQQISTAPRRSGAAG

SEQ ID NO: 105689 - protein, 22 aa, Artificial Sequence
  Description of Artificial Sequence: Synthetic peptide
  Seed: MDPRMCSLMQGSTLPRRSGAAG
MDPRMFSLQQNSTLPRRSGAAG

SEQ ID NO: 105690 - protein, 22 aa, Artificial Sequence
  Description of Artificial Sequence: Synthetic peptide
  Seed: MDPRMCSLMQGSTLPRRSGAAG
MDPRMFSLQQNSTVPRRSGAAG

SEQ ID NO: 105691 - protein, 22 aa, Artificial Sequence
  Description of Artificial Sequence: Synthetic peptide
  Seed: MDPRMCSLMQGSTLPRRSGAAG
MDPRMFSLQQPSTAPRRSGAAG

SEQ ID NO: 105692 - protein, 22 aa, Artificial Sequence
  Description of Artificial Sequence: Synthetic peptide
  Seed: MDPRMCSLMQGSTLPRRSGAAG
MDPRMFSLQQPSTIPRRSGAAG

SEQ ID NO: 105693 - protein, 22 aa, Artificial Sequence
  Description of Artificial Sequence: Synthetic peptide
  Seed: MDPRMCSLMQGSTLPRRSGAAG
MDPRMFSLQQPSTLPRRSGAAG

SEQ ID NO: 105694 - protein, 22 aa, Artificial Sequence
  Description of Artificial Sequence: Synthetic peptide
  Seed: MDPRMCSLMQGSTLPRRSGAAG
MDPRMFSLQQPSTVPRRSGAAG

SEQ ID NO: 105695 - protein, 22 aa, Artificial Sequence
  Description of Artificial Sequence: Synthetic peptide
  Seed: MDPRMCSLMQGSTLPRRSGAAG
MDPRMFSLQQSSTAPRRSGAAG

SEQ ID NO: 105696 - protein, 22 aa, Artificial Sequence
  Description of Artificial Sequence: Synthetic peptide
  Seed: MDPRMCSLMQGSTLPRRSGAAG
MDPRMFSLQQSSTIPRRSGAAG

SEQ ID NO: 105697 - protein, 22 aa, Artificial Sequence
  Description of Artificial Sequence: Synthetic peptide
  Seed: MDPRMCSLMQGSTLPRRSGAAG
MDPRMFSLQQSSTLPRRSGAAG

SEQ ID NO: 105698 - protein, 22 aa, Artificial Sequence
  Description of Artificial Sequence: Synthetic peptide
  Seed: MDPRMCSLMQGSTLPRRSGAAG
MDPRMFSLQQSSTSPRRSGAAG

SEQ ID NO: 105699 - protein, 22 aa, Artificial Sequence
  Description of Artificial Sequence: Synthetic peptide
  Seed: MDPRMCSLMQGSTLPRRSGAAG
MDPRMFSLQQSSTVPRRSGAAG

SEQ ID NO: 105700 - protein, 22 aa, Artificial Sequence
  Description of Artificial Sequence: Synthetic peptide
  Seed: MDPRMCSLMQGSTLPRRSGAAG
MDPRMFSLQQTSTAPRRSGAAG

SEQ ID NO: 105701 - protein, 22 aa, Artificial Sequence
  Description of Artificial Sequence: Synthetic peptide
  Seed: MDPRMCSLMQGSTLPRRSGAAG
MDPRMFSLQQTSTLPRRSGAAG

SEQ ID NO: 105702 - protein, 22 aa, Artificial Sequence
  Description of Artificial Sequence: Synthetic peptide
  Seed: MDPRMCSLMQGSTLPRRSGAAG
MDPRMFSLQQTSTVPRRSGAAG

SEQ ID NO: 105703 - protein, 22 aa, Artificial Sequence
  Description of Artificial Sequence: Synthetic peptide
  Seed: MDPRMCSLMQGSTLPRRSGAAG
MDPRMFSLQQVSTAPRRSGAAG

SEQ ID NO: 105704 - protein, 22 aa, Artificial Sequence
  Description of Artificial Sequence: Synthetic peptide
  Seed: MDPRMCSLMQGSTLPRRSGAAG
MDPRMFSLQQVSTNPRRSGAAG

SEQ ID NO: 105705 - protein, 22 aa, Artificial Sequence
  Description of Artificial Sequence: Synthetic peptide
  Seed: MDPRMCSLMQGSTLPRRSGAAG
MDPRMFSLQQVSTSPRRSGAAG

SEQ ID NO: 105706 - protein, 22 aa, Artificial Sequence
  Description of Artificial Sequence: Synthetic peptide
  Seed: MDPRMCSLMQGSTLPRRSGAAG
MDPRMFSLSQASTAPRRSGAAG

SEQ ID NO: 105707 - protein, 22 aa, Artificial Sequence
  Description of Artificial Sequence: Synthetic peptide
  Seed: MDPRMCSLMQGSTLPRRSGAAG
MDPRMFSLSQASTIPRRSGAAG

SEQ ID NO: 105708 - protein, 22 aa, Artificial Sequence
  Description of Artificial Sequence: Synthetic peptide
  Seed: MDPRMCSLMQGSTLPRRSGAAG
MDPRMFSLSQASTLPRRSGAAG

SEQ ID NO: 105709 - protein, 22 aa, Artificial Sequence
  Description of Artificial Sequence: Synthetic peptide
  Seed: MDPRMCSLMQGSTLPRRSGAAG
MDPRMFSLSQASTMPRRSGAAG

SEQ ID NO: 105710 - protein, 22 aa, Artificial Sequence
  Description of Artificial Sequence: Synthetic peptide
  Seed: MDPRMCSLMQGSTLPRRSGAAG
MDPRMFSLSQASTNPRRSGAAG

SEQ ID NO: 105711 - protein, 22 aa, Artificial Sequence
  Description of Artificial Sequence: Synthetic peptide
  Seed: MDPRMCSLMQGSTLPRRSGAAG
MDPRMFSLSQASTSPRRSGAAG

SEQ ID NO: 105712 - protein, 22 aa, Artificial Sequence
  Description of Artificial Sequence: Synthetic peptide
  Seed: MDPRMCSLMQGSTLPRRSGAAG
MDPRMFSLSQASTVPRRSGAAG

SEQ ID NO: 105713 - protein, 22 aa, Artificial Sequence
  Description of Artificial Sequence: Synthetic peptide
  Seed: MDPRMCSLMQGSTLPRRSGAAG
MDPRMFSLSQGSTIPRRSGAAG

SEQ ID NO: 105714 - protein, 22 aa, Artificial Sequence
  Description of Artificial Sequence: Synthetic peptide
  Seed: MDPRMCSLMQGSTLPRRSGAAG
MDPRMFSLSQGSTLPRRSGAAG

SEQ ID NO: 105715 - protein, 22 aa, Artificial Sequence
  Description of Artificial Sequence: Synthetic peptide
  Seed: MDPRMCSLMQGSTLPRRSGAAG
MDPRMFSLSQGSTVPRRSGAAG

SEQ ID NO: 105716 - protein, 22 aa, Artificial Sequence
  Description of Artificial Sequence: Synthetic peptide
  Seed: MDPRMCSLMQGSTLPRRSGAAG
MDPRMFSLSQPSTIPRRSGAAG

SEQ ID NO: 105717 - protein, 22 aa, Artificial Sequence
  Description of Artificial Sequence: Synthetic peptide
  Seed: MDPRMCSLMQGSTLPRRSGAAG
MDPRMFSLSQSSTIPRRSGAAG

SEQ ID NO: 105718 - protein, 22 aa, Artificial Sequence
  Description of Artificial Sequence: Synthetic peptide
  Seed: MDPRMCSLMQGSTLPRRSGAAG
MDPRMFSLSQSSTLPRRSGAAG

SEQ ID NO: 105719 - protein, 22 aa, Artificial Sequence
  Description of Artificial Sequence: Synthetic peptide
  Seed: MDPRMCSLMQGSTLPRRSGAAG
MDPRMFSLSQSSTVPRRSGAAG

SEQ ID NO: 105720 - protein, 22 aa, Artificial Sequence
  Description of Artificial Sequence: Synthetic peptide
  Seed: MDPRMCSLMQGSTLPRRSGAAG
MDPRMFSLTQASTAPRRSGAAG

SEQ ID NO: 105721 - protein, 22 aa, Artificial Sequence
  Description of Artificial Sequence: Synthetic peptide
  Seed: MDPRMCSLMQGSTLPRRSGAAG
MDPRMFSLTQASTIPRRSGAAG

SEQ ID NO: 105722 - protein, 22 aa, Artificial Sequence
  Description of Artificial Sequence: Synthetic peptide
  Seed: MDPRMCSLMQGSTLPRRSGAAG
MDPRMFSLTQASTLPRRSGAAG

SEQ ID NO: 105723 - protein, 22 aa, Artificial Sequence
  Description of Artificial Sequence: Synthetic peptide
  Seed: MDPRMCSLMQGSTLPRRSGAAG
MDPRMFSLTQASTSPRRSGAAG

SEQ ID NO: 105724 - protein, 22 aa, Artificial Sequence
  Description of Artificial Sequence: Synthetic peptide
  Seed: MDPRMCSLMQGSTLPRRSGAAG
MDPRMFSLTQASTVPRRSGAAG

SEQ ID NO: 105725 - protein, 22 aa, Artificial Sequence
  Description of Artificial Sequence: Synthetic peptide
  Seed: MDPRMCSLMQGSTLPRRSGAAG
MDPRMFSLVQASTAPRRSGAAG

SEQ ID NO: 105726 - protein, 22 aa, Artificial Sequence
  Description of Artificial Sequence: Synthetic peptide
  Seed: MDPRMCSLMQGSTLPRRSGAAG
MDPRMFSLVQASTGPRRSGAAG

SEQ ID NO: 105727 - protein, 22 aa, Artificial Sequence
  Description of Artificial Sequence: Synthetic peptide
  Seed: MDPRMCSLMQGSTLPRRSGAAG
MDPRMFSLVQASTHPRRSGAAG

SEQ ID NO: 105728 - protein, 22 aa, Artificial Sequence
  Description of Artificial Sequence: Synthetic peptide
  Seed: MDPRMCSLMQGSTLPRRSGAAG
MDPRMFSLVQASTIPRRSGAAG

SEQ ID NO: 105729 - protein, 22 aa, Artificial Sequence
  Description of Artificial Sequence: Synthetic peptide
  Seed: MDPRMCSLMQGSTLPRRSGAAG
MDPRMFSLVQASTLPRRSGAAG

SEQ ID NO: 105730 - protein, 22 aa, Artificial Sequence
  Description of Artificial Sequence: Synthetic peptide
  Seed: MDPRMCSLMQGSTLPRRSGAAG
MDPRMFSLVQASTMPRRSGAAG

SEQ ID NO: 105731 - protein, 22 aa, Artificial Sequence
  Description of Artificial Sequence: Synthetic peptide
  Seed: MDPRMCSLMQGSTLPRRSGAAG
MDPRMFSLVQASTNPRRSGAAG

SEQ ID NO: 105732 - protein, 22 aa, Artificial Sequence
  Description of Artificial Sequence: Synthetic peptide
  Seed: MDPRMCSLMQGSTLPRRSGAAG
MDPRMFSLVQASTQPRRSGAAG

SEQ ID NO: 105733 - protein, 22 aa, Artificial Sequence
  Description of Artificial Sequence: Synthetic peptide
  Seed: MDPRMCSLMQGSTLPRRSGAAG
MDPRMFSLVQASTSPRRSGAAG

SEQ ID NO: 105734 - protein, 22 aa, Artificial Sequence
  Description of Artificial Sequence: Synthetic peptide
  Seed: MDPRMCSLMQGSTLPRRSGAAG
MDPRMFSLVQASTTPRRSGAAG

SEQ ID NO: 105735 - protein, 22 aa, Artificial Sequence
  Description of Artificial Sequence: Synthetic peptide
  Seed: MDPRMCSLMQGSTLPRRSGAAG
MDPRMFSLVQASTVPRRSGAAG

SEQ ID NO: 105736 - protein, 22 aa, Artificial Sequence
  Description of Artificial Sequence: Synthetic peptide
  Seed: MDPRMCSLMQGSTLPRRSGAAG
MDPRMFSLVQGSTAPRRSGAAG

SEQ ID NO: 105737 - protein, 22 aa, Artificial Sequence
  Description of Artificial Sequence: Synthetic peptide
  Seed: MDPRMCSLMQGSTLPRRSGAAG
MDPRMFSLVQGSTIPRRSGAAG

SEQ ID NO: 105738 - protein, 22 aa, Artificial Sequence
  Description of Artificial Sequence: Synthetic peptide
  Seed: MDPRMCSLMQGSTLPRRSGAAG
MDPRMFSLVQGSTLPRRSGAAG

SEQ ID NO: 105739 - protein, 22 aa, Artificial Sequence
  Description of Artificial Sequence: Synthetic peptide
  Seed: MDPRMCSLMQGSTLPRRSGAAG
MDPRMFSLVQGSTMPRRSGAAG

SEQ ID NO: 105740 - protein, 22 aa, Artificial Sequence
  Description of Artificial Sequence: Synthetic peptide
  Seed: MDPRMCSLMQGSTLPRRSGAAG
MDPRMFSLVQGSTNPRRSGAAG

SEQ ID NO: 105741 - protein, 22 aa, Artificial Sequence
  Description of Artificial Sequence: Synthetic peptide
  Seed: MDPRMCSLMQGSTLPRRSGAAG
MDPRMFSLVQGSTSPRRSGAAG

SEQ ID NO: 105742 - protein, 22 aa, Artificial Sequence
  Description of Artificial Sequence: Synthetic peptide
  Seed: MDPRMCSLMQGSTLPRRSGAAG
MDPRMFSLVQGSTTPRRSGAAG

SEQ ID NO: 105743 - protein, 22 aa, Artificial Sequence
  Description of Artificial Sequence: Synthetic peptide
  Seed: MDPRMCSLMQGSTLPRRSGAAG
MDPRMFSLVQGSTVPRRSGAAG

SEQ ID NO: 105744 - protein, 22 aa, Artificial Sequence
  Description of Artificial Sequence: Synthetic peptide
  Seed: MDPRMCSLMQGSTLPRRSGAAG
MDPRMFSLVQISTAPRRSGAAG

SEQ ID NO: 105745 - protein, 22 aa, Artificial Sequence
  Description of Artificial Sequence: Synthetic peptide
  Seed: MDPRMCSLMQGSTLPRRSGAAG
MDPRMFSLVQISTNPRRSGAAG

SEQ ID NO: 105746 - protein, 22 aa, Artificial Sequence
  Description of Artificial Sequence: Synthetic peptide
  Seed: MDPRMCSLMQGSTLPRRSGAAG
MDPRMFSLVQISTSPRRSGAAG

SEQ ID NO: 105747 - protein, 22 aa, Artificial Sequence
  Description of Artificial Sequence: Synthetic peptide
  Seed: MDPRMCSLMQGSTLPRRSGAAG
MDPRMFSLVQNSTAPRRSGAAG

SEQ ID NO: 105748 - protein, 22 aa, Artificial Sequence
  Description of Artificial Sequence: Synthetic peptide
  Seed: MDPRMCSLMQGSTLPRRSGAAG
MDPRMFSLVQNSTIPRRSGAAG

SEQ ID NO: 105749 - protein, 22 aa, Artificial Sequence
  Description of Artificial Sequence: Synthetic peptide
  Seed: MDPRMCSLMQGSTLPRRSGAAG
MDPRMFSLVQNSTLPRRSGAAG

SEQ ID NO: 105750 - protein, 22 aa, Artificial Sequence
  Description of Artificial Sequence: Synthetic peptide
  Seed: MDPRMCSLMQGSTLPRRSGAAG
MDPRMFSLVQNSTVPRRSGAAG

SEQ ID NO: 105751 - protein, 22 aa, Artificial Sequence
  Description of Artificial Sequence: Synthetic peptide
  Seed: MDPRMCSLMQGSTLPRRSGAAG
MDPRMFSLVQPSTAPRRSGAAG

SEQ ID NO: 105752 - protein, 22 aa, Artificial Sequence
  Description of Artificial Sequence: Synthetic peptide
  Seed: MDPRMCSLMQGSTLPRRSGAAG
MDPRMFSLVQPSTGPRRSGAAG

SEQ ID NO: 105753 - protein, 22 aa, Artificial Sequence
  Description of Artificial Sequence: Synthetic peptide
  Seed: MDPRMCSLMQGSTLPRRSGAAG
MDPRMFSLVQPSTIPRRSGAAG

SEQ ID NO: 105754 - protein, 22 aa, Artificial Sequence
  Description of Artificial Sequence: Synthetic peptide
  Seed: MDPRMCSLMQGSTLPRRSGAAG
MDPRMFSLVQPSTLPRRSGAAG

SEQ ID NO: 105755 - protein, 22 aa, Artificial Sequence
  Description of Artificial Sequence: Synthetic peptide
  Seed: MDPRMCSLMQGSTLPRRSGAAG
MDPRMFSLVQPSTMPRRSGAAG

SEQ ID NO: 105756 - protein, 22 aa, Artificial Sequence
  Description of Artificial Sequence: Synthetic peptide
  Seed: MDPRMCSLMQGSTLPRRSGAAG
MDPRMFSLVQPSTNPRRSGAAG

SEQ ID NO: 105757 - protein, 22 aa, Artificial Sequence
  Description of Artificial Sequence: Synthetic peptide
  Seed: MDPRMCSLMQGSTLPRRSGAAG
MDPRMFSLVQPSTSPRRSGAAG

SEQ ID NO: 105758 - protein, 22 aa, Artificial Sequence
  Description of Artificial Sequence: Synthetic peptide
  Seed: MDPRMCSLMQGSTLPRRSGAAG
MDPRMFSLVQPSTTPRRSGAAG

SEQ ID NO: 105759 - protein, 22 aa, Artificial Sequence
  Description of Artificial Sequence: Synthetic peptide
  Seed: MDPRMCSLMQGSTLPRRSGAAG
MDPRMFSLVQPSTVPRRSGAAG

SEQ ID NO: 105760 - protein, 22 aa, Artificial Sequence
  Description of Artificial Sequence: Synthetic peptide
  Seed: MDPRMCSLMQGSTLPRRSGAAG
MDPRMFSLVQSSTAPRRSGAAG

SEQ ID NO: 105761 - protein, 22 aa, Artificial Sequence
  Description of Artificial Sequence: Synthetic peptide
  Seed: MDPRMCSLMQGSTLPRRSGAAG
MDPRMFSLVQSSTGPRRSGAAG

SEQ ID NO: 105762 - protein, 22 aa, Artificial Sequence
  Description of Artificial Sequence: Synthetic peptide
  Seed: MDPRMCSLMQGSTLPRRSGAAG
MDPRMFSLVQSSTIPRRSGAAG

SEQ ID NO: 105763 - protein, 22 aa, Artificial Sequence
  Description of Artificial Sequence: Synthetic peptide
  Seed: MDPRMCSLMQGSTLPRRSGAAG
MDPRMFSLVQSSTLPRRSGAAG

SEQ ID NO: 105764 - protein, 22 aa, Artificial Sequence
  Description of Artificial Sequence: Synthetic peptide
  Seed: MDPRMCSLMQGSTLPRRSGAAG
MDPRMFSLVQSSTNPRRSGAAG

SEQ ID NO: 105765 - protein, 22 aa, Artificial Sequence
  Description of Artificial Sequence: Synthetic peptide
  Seed: MDPRMCSLMQGSTLPRRSGAAG
MDPRMFSLVQSSTSPRRSGAAG

SEQ ID NO: 105766 - protein, 22 aa, Artificial Sequence
  Description of Artificial Sequence: Synthetic peptide
  Seed: MDPRMCSLMQGSTLPRRSGAAG
MDPRMFSLVQSSTTPRRSGAAG

SEQ ID NO: 105767 - protein, 22 aa, Artificial Sequence
  Description of Artificial Sequence: Synthetic peptide
  Seed: MDPRMCSLMQGSTLPRRSGAAG
MDPRMFSLVQSSTVPRRSGAAG

SEQ ID NO: 105768 - protein, 22 aa, Artificial Sequence
  Description of Artificial Sequence: Synthetic peptide
  Seed: MDPRMCSLMQGSTLPRRSGAAG
MDPRMFSLVQTSTAPRRSGAAG

SEQ ID NO: 105769 - protein, 22 aa, Artificial Sequence
  Description of Artificial Sequence: Synthetic peptide
  Seed: MDPRMCSLMQGSTLPRRSGAAG
MDPRMFSLVQTSTIPRRSGAAG

SEQ ID NO: 105770 - protein, 22 aa, Artificial Sequence
  Description of Artificial Sequence: Synthetic peptide
  Seed: MDPRMCSLMQGSTLPRRSGAAG
MDPRMFSLVQTSTLPRRSGAAG

SEQ ID NO: 105771 - protein, 22 aa, Artificial Sequence
  Description of Artificial Sequence: Synthetic peptide
  Seed: MDPRMCSLMQGSTLPRRSGAAG
MDPRMFSLVQTSTNPRRSGAAG

SEQ ID NO: 105772 - protein, 22 aa, Artificial Sequence
  Description of Artificial Sequence: Synthetic peptide
  Seed: MDPRMCSLMQGSTLPRRSGAAG
MDPRMFSLVQTSTSPRRSGAAG

SEQ ID NO: 105773 - protein, 22 aa, Artificial Sequence
  Description of Artificial Sequence: Synthetic peptide
  Seed: MDPRMCSLMQGSTLPRRSGAAG
MDPRMFSLVQTSTTPRRSGAAG

SEQ ID NO: 105774 - protein, 22 aa, Artificial Sequence
  Description of Artificial Sequence: Synthetic peptide
  Seed: MDPRMCSLMQGSTLPRRSGAAG
MDPRMFSLVQTSTVPRRSGAAG

SEQ ID NO: 105775 - protein, 22 aa, Artificial Sequence
  Description of Artificial Sequence: Synthetic peptide
  Seed: MDPRMCSLMQGSTLPRRSGAAG
MDPRMFSLVQVSTAPRRSGAAG

SEQ ID NO: 105776 - protein, 22 aa, Artificial Sequence
  Description of Artificial Sequence: Synthetic peptide
  Seed: MDPRMCSLMQGSTLPRRSGAAG
MDPRMFSLVQVSTNPRRSGAAG

SEQ ID NO: 105777 - protein, 22 aa, Artificial Sequence
  Description of Artificial Sequence: Synthetic peptide
  Seed: MDPRMCSLMQGSTLPRRSGAAG
MDPRMFSLVQVSTSPRRSGAAG

SEQ ID NO: 105778 - protein, 22 aa, Artificial Sequence
  Description of Artificial Sequence: Synthetic peptide
  Seed: MDPRMCSLMQGSTLPRRSGAAG
MDPRMFSLVQVSTTPRRSGAAG

SEQ ID NO: 105779 - protein, 22 aa, Artificial Sequence
  Description of Artificial Sequence: Synthetic peptide
  Seed: MDPRMCSLMQGSTLPRRSGAAG
MDPRMFSLVQVSTVPRRSGAAG

SEQ ID NO: 105780 - protein, 22 aa, Artificial Sequence
  Description of Artificial Sequence: Synthetic peptide
  Seed: MDPRMCSLMQGSTLPRRSGAAG
MDPRMISLAQASTAPRRSGAAG

SEQ ID NO: 105781 - protein, 22 aa, Artificial Sequence
  Description of Artificial Sequence: Synthetic peptide
  Seed: MDPRMCSLMQGSTLPRRSGAAG
MDPRMISLAQASTIPRRSGAAG

SEQ ID NO: 105782 - protein, 22 aa, Artificial Sequence
  Description of Artificial Sequence: Synthetic peptide
  Seed: MDPRMCSLMQGSTLPRRSGAAG
MDPRMISLAQASTLPRRSGAAG

SEQ ID NO: 105783 - protein, 22 aa, Artificial Sequence
  Description of Artificial Sequence: Synthetic peptide
  Seed: MDPRMCSLMQGSTLPRRSGAAG
MDPRMISLAQASTVPRRSGAAG

SEQ ID NO: 105784 - protein, 22 aa, Artificial Sequence
  Description of Artificial Sequence: Synthetic peptide
  Seed: MDPRMCSLMQGSTLPRRSGAAG
MDPRMISLAQGSTLPRRSGAAG

SEQ ID NO: 105785 - protein, 22 aa, Artificial Sequence
  Description of Artificial Sequence: Synthetic peptide
  Seed: MDPRMCSLMQGSTLPRRSGAAG
MDPRMISLAQGSTVPRRSGAAG

SEQ ID NO: 105786 - protein, 22 aa, Artificial Sequence
  Description of Artificial Sequence: Synthetic peptide
  Seed: MDPRMCSLMQGSTLPRRSGAAG
MDPRMISLIQASTAPRRSGAAG

SEQ ID NO: 105787 - protein, 22 aa, Artificial Sequence
  Description of Artificial Sequence: Synthetic peptide
  Seed: MDPRMCSLMQGSTLPRRSGAAG
MDPRMISLIQASTIPRRSGAAG

SEQ ID NO: 105788 - protein, 22 aa, Artificial Sequence
  Description of Artificial Sequence: Synthetic peptide
  Seed: MDPRMCSLMQGSTLPRRSGAAG
MDPRMISLIQASTLPRRSGAAG

SEQ ID NO: 105789 - protein, 22 aa, Artificial Sequence
  Description of Artificial Sequence: Synthetic peptide
  Seed: MDPRMCSLMQGSTLPRRSGAAG
MDPRMISLIQASTNPRRSGAAG

SEQ ID NO: 105790 - protein, 22 aa, Artificial Sequence
  Description of Artificial Sequence: Synthetic peptide
  Seed: MDPRMCSLMQGSTLPRRSGAAG
MDPRMISLIQASTSPRRSGAAG

SEQ ID NO: 105791 - protein, 22 aa, Artificial Sequence
  Description of Artificial Sequence: Synthetic peptide
  Seed: MDPRMCSLMQGSTLPRRSGAAG
MDPRMISLIQASTVPRRSGAAG

SEQ ID NO: 105792 - protein, 22 aa, Artificial Sequence
  Description of Artificial Sequence: Synthetic peptide
  Seed: MDPRMCSLMQGSTLPRRSGAAG
MDPRMISLIQGSTAPRRSGAAG

SEQ ID NO: 105793 - protein, 22 aa, Artificial Sequence
  Description of Artificial Sequence: Synthetic peptide
  Seed: MDPRMCSLMQGSTLPRRSGAAG
MDPRMISLIQGSTIPRRSGAAG

SEQ ID NO: 105794 - protein, 22 aa, Artificial Sequence
  Description of Artificial Sequence: Synthetic peptide
  Seed: MDPRMCSLMQGSTLPRRSGAAG
MDPRMISLIQGSTLPRRSGAAG

SEQ ID NO: 105795 - protein, 22 aa, Artificial Sequence
  Description of Artificial Sequence: Synthetic peptide
  Seed: MDPRMCSLMQGSTLPRRSGAAG
MDPRMISLIQGSTVPRRSGAAG

SEQ ID NO: 105796 - protein, 22 aa, Artificial Sequence
  Description of Artificial Sequence: Synthetic peptide
  Seed: MDPRMCSLMQGSTLPRRSGAAG
MDPRMISLIQSSTLPRRSGAAG

SEQ ID NO: 105797 - protein, 22 aa, Artificial Sequence
  Description of Artificial Sequence: Synthetic peptide
  Seed: MDPRMCSLMQGSTLPRRSGAAG
MDPRMISLIQSSTVPRRSGAAG

SEQ ID NO: 105798 - protein, 22 aa, Artificial Sequence
  Description of Artificial Sequence: Synthetic peptide
  Seed: MDPRMCSLMQGSTLPRRSGAAG
MDPRMISLLQASTAPRRSGAAG

SEQ ID NO: 105799 - protein, 22 aa, Artificial Sequence
  Description of Artificial Sequence: Synthetic peptide
  Seed: MDPRMCSLMQGSTLPRRSGAAG
MDPRMISLLQASTGPRRSGAAG

SEQ ID NO: 105800 - protein, 22 aa, Artificial Sequence
  Description of Artificial Sequence: Synthetic peptide
  Seed: MDPRMCSLMQGSTLPRRSGAAG
MDPRMISLLQASTIPRRSGAAG

SEQ ID NO: 105801 - protein, 22 aa, Artificial Sequence
  Description of Artificial Sequence: Synthetic peptide
  Seed: MDPRMCSLMQGSTLPRRSGAAG
MDPRMISLLQASTLPRRSGAAG

SEQ ID NO: 105802 - protein, 22 aa, Artificial Sequence
  Description of Artificial Sequence: Synthetic peptide
  Seed: MDPRMCSLMQGSTLPRRSGAAG
MDPRMISLLQASTMPRRSGAAG

SEQ ID NO: 105803 - protein, 22 aa, Artificial Sequence
  Description of Artificial Sequence: Synthetic peptide
  Seed: MDPRMCSLMQGSTLPRRSGAAG
MDPRMISLLQASTNPRRSGAAG

SEQ ID NO: 105804 - protein, 22 aa, Artificial Sequence
  Description of Artificial Sequence: Synthetic peptide
  Seed: MDPRMCSLMQGSTLPRRSGAAG
MDPRMISLLQASTSPRRSGAAG

SEQ ID NO: 105805 - protein, 22 aa, Artificial Sequence
  Description of Artificial Sequence: Synthetic peptide
  Seed: MDPRMCSLMQGSTLPRRSGAAG
MDPRMISLLQASTTPRRSGAAG

SEQ ID NO: 105806 - protein, 22 aa, Artificial Sequence
  Description of Artificial Sequence: Synthetic peptide
  Seed: MDPRMCSLMQGSTLPRRSGAAG
MDPRMISLLQASTVPRRSGAAG

SEQ ID NO: 105807 - protein, 22 aa, Artificial Sequence
  Description of Artificial Sequence: Synthetic peptide
  Seed: MDPRMCSLMQGSTLPRRSGAAG
MDPRMISLLQGSTAPRRSGAAG

SEQ ID NO: 105808 - protein, 22 aa, Artificial Sequence
  Description of Artificial Sequence: Synthetic peptide
  Seed: MDPRMCSLMQGSTLPRRSGAAG
MDPRMISLLQGSTIPRRSGAAG

SEQ ID NO: 105809 - protein, 22 aa, Artificial Sequence
  Description of Artificial Sequence: Synthetic peptide
  Seed: MDPRMCSLMQGSTLPRRSGAAG
MDPRMISLLQGSTLPRRSGAAG

SEQ ID NO: 105810 - protein, 22 aa, Artificial Sequence
  Description of Artificial Sequence: Synthetic peptide
  Seed: MDPRMCSLMQGSTLPRRSGAAG
MDPRMISLLQGSTMPRRSGAAG

SEQ ID NO: 105811 - protein, 22 aa, Artificial Sequence
  Description of Artificial Sequence: Synthetic peptide
  Seed: MDPRMCSLMQGSTLPRRSGAAG
MDPRMISLLQGSTSPRRSGAAG

SEQ ID NO: 105812 - protein, 22 aa, Artificial Sequence
  Description of Artificial Sequence: Synthetic peptide
  Seed: MDPRMCSLMQGSTLPRRSGAAG
MDPRMISLLQGSTTPRRSGAAG

SEQ ID NO: 105813 - protein, 22 aa, Artificial Sequence
  Description of Artificial Sequence: Synthetic peptide
  Seed: MDPRMCSLMQGSTLPRRSGAAG
MDPRMISLLQGSTVPRRSGAAG

SEQ ID NO: 105814 - protein, 22 aa, Artificial Sequence
  Description of Artificial Sequence: Synthetic peptide
  Seed: MDPRMCSLMQGSTLPRRSGAAG
MDPRMISLLQNSTIPRRSGAAG

SEQ ID NO: 105815 - protein, 22 aa, Artificial Sequence
  Description of Artificial Sequence: Synthetic peptide
  Seed: MDPRMCSLMQGSTLPRRSGAAG
MDPRMISLLQNSTLPRRSGAAG

SEQ ID NO: 105816 - protein, 22 aa, Artificial Sequence
  Description of Artificial Sequence: Synthetic peptide
  Seed: MDPRMCSLMQGSTLPRRSGAAG
MDPRMISLLQNSTVPRRSGAAG

SEQ ID NO: 105817 - protein, 22 aa, Artificial Sequence
  Description of Artificial Sequence: Synthetic peptide
  Seed: MDPRMCSLMQGSTLPRRSGAAG
MDPRMISLLQPSTAPRRSGAAG

SEQ ID NO: 105818 - protein, 22 aa, Artificial Sequence
  Description of Artificial Sequence: Synthetic peptide
  Seed: MDPRMCSLMQGSTLPRRSGAAG
MDPRMISLLQPSTIPRRSGAAG

SEQ ID NO: 105819 - protein, 22 aa, Artificial Sequence
  Description of Artificial Sequence: Synthetic peptide
  Seed: MDPRMCSLMQGSTLPRRSGAAG
MDPRMISLLQPSTLPRRSGAAG

SEQ ID NO: 105820 - protein, 22 aa, Artificial Sequence
  Description of Artificial Sequence: Synthetic peptide
  Seed: MDPRMCSLMQGSTLPRRSGAAG
MDPRMISLLQPSTMPRRSGAAG

SEQ ID NO: 105821 - protein, 22 aa, Artificial Sequence
  Description of Artificial Sequence: Synthetic peptide
  Seed: MDPRMCSLMQGSTLPRRSGAAG
MDPRMISLLQPSTNPRRSGAAG

SEQ ID NO: 105822 - protein, 22 aa, Artificial Sequence
  Description of Artificial Sequence: Synthetic peptide
  Seed: MDPRMCSLMQGSTLPRRSGAAG
MDPRMISLLQPSTSPRRSGAAG

SEQ ID NO: 105823 - protein, 22 aa, Artificial Sequence
  Description of Artificial Sequence: Synthetic peptide
  Seed: MDPRMCSLMQGSTLPRRSGAAG
MDPRMISLLQPSTTPRRSGAAG

SEQ ID NO: 105824 - protein, 22 aa, Artificial Sequence
  Description of Artificial Sequence: Synthetic peptide
  Seed: MDPRMCSLMQGSTLPRRSGAAG
MDPRMISLLQPSTVPRRSGAAG

SEQ ID NO: 105825 - protein, 22 aa, Artificial Sequence
  Description of Artificial Sequence: Synthetic peptide
  Seed: MDPRMCSLMQGSTLPRRSGAAG
MDPRMISLLQSSTAPRRSGAAG

SEQ ID NO: 105826 - protein, 22 aa, Artificial Sequence
  Description of Artificial Sequence: Synthetic peptide
  Seed: MDPRMCSLMQGSTLPRRSGAAG
MDPRMISLLQSSTIPRRSGAAG

SEQ ID NO: 105827 - protein, 22 aa, Artificial Sequence
  Description of Artificial Sequence: Synthetic peptide
  Seed: MDPRMCSLMQGSTLPRRSGAAG
MDPRMISLLQSSTLPRRSGAAG

SEQ ID NO: 105828 - protein, 22 aa, Artificial Sequence
  Description of Artificial Sequence: Synthetic peptide
  Seed: MDPRMCSLMQGSTLPRRSGAAG
MDPRMISLLQSSTMPRRSGAAG

SEQ ID NO: 105829 - protein, 22 aa, Artificial Sequence
  Description of Artificial Sequence: Synthetic peptide
  Seed: MDPRMCSLMQGSTLPRRSGAAG
MDPRMISLLQSSTSPRRSGAAG

SEQ ID NO: 105830 - protein, 22 aa, Artificial Sequence
  Description of Artificial Sequence: Synthetic peptide
  Seed: MDPRMCSLMQGSTLPRRSGAAG
MDPRMISLLQSSTTPRRSGAAG

SEQ ID NO: 105831 - protein, 22 aa, Artificial Sequence
  Description of Artificial Sequence: Synthetic peptide
  Seed: MDPRMCSLMQGSTLPRRSGAAG
MDPRMISLLQSSTVPRRSGAAG

SEQ ID NO: 105832 - protein, 22 aa, Artificial Sequence
  Description of Artificial Sequence: Synthetic peptide
  Seed: MDPRMCSLMQGSTLPRRSGAAG
MDPRMISLLQTSTAPRRSGAAG

SEQ ID NO: 105833 - protein, 22 aa, Artificial Sequence
  Description of Artificial Sequence: Synthetic peptide
  Seed: MDPRMCSLMQGSTLPRRSGAAG
MDPRMISLLQTSTIPRRSGAAG

SEQ ID NO: 105834 - protein, 22 aa, Artificial Sequence
  Description of Artificial Sequence: Synthetic peptide
  Seed: MDPRMCSLMQGSTLPRRSGAAG
MDPRMISLLQTSTLPRRSGAAG

SEQ ID NO: 105835 - protein, 22 aa, Artificial Sequence
  Description of Artificial Sequence: Synthetic peptide
  Seed: MDPRMCSLMQGSTLPRRSGAAG
MDPRMISLLQTSTNPRRSGAAG

SEQ ID NO: 105836 - protein, 22 aa, Artificial Sequence
  Description of Artificial Sequence: Synthetic peptide
  Seed: MDPRMCSLMQGSTLPRRSGAAG
MDPRMISLLQTSTVPRRSGAAG

SEQ ID NO: 105837 - protein, 22 aa, Artificial Sequence
  Description of Artificial Sequence: Synthetic peptide
  Seed: MDPRMCSLMQGSTLPRRSGAAG
MDPRMISLLQVSTAPRRSGAAG

SEQ ID NO: 105838 - protein, 22 aa, Artificial Sequence
  Description of Artificial Sequence: Synthetic peptide
  Seed: MDPRMCSLMQGSTLPRRSGAAG
MDPRMISLLQVSTNPRRSGAAG

SEQ ID NO: 105839 - protein, 22 aa, Artificial Sequence
  Description of Artificial Sequence: Synthetic peptide
  Seed: MDPRMCSLMQGSTLPRRSGAAG
MDPRMISLLQVSTSPRRSGAAG

SEQ ID NO: 105840 - protein, 22 aa, Artificial Sequence
  Description of Artificial Sequence: Synthetic peptide
  Seed: MDPRMCSLMQGSTLPRRSGAAG
MDPRMISLMQASTAPRRSGAAG

SEQ ID NO: 105841 - protein, 22 aa, Artificial Sequence
  Description of Artificial Sequence: Synthetic peptide
  Seed: MDPRMCSLMQGSTLPRRSGAAG
MDPRMISLMQASTGPRRSGAAG

SEQ ID NO: 105842 - protein, 22 aa, Artificial Sequence
  Description of Artificial Sequence: Synthetic peptide
  Seed: MDPRMCSLMQGSTLPRRSGAAG
MDPRMISLMQASTIPRRSGAAG

SEQ ID NO: 105843 - protein, 22 aa, Artificial Sequence
  Description of Artificial Sequence: Synthetic peptide
  Seed: MDPRMCSLMQGSTLPRRSGAAG
MDPRMISLMQASTLPRRSGAAG
